United States Patent Application Publication US 2020/0109395 A1 - sequence listing, part 4

SEQ ID NO: 16304 - protein, 483 aa, Staphylococcus aureus VET0312R; identical to SEQ ID NO: 13296

SEQ ID NO: 16305 - protein, 202 aa, Staphylococcus aureus VET0312R; identical to SEQ ID NO: 13267

SEQ ID NO: 16306 - protein, 308 aa, Staphylococcus aureus VET0312R; identical to SEQ ID NO: 13262

SEQ ID NO: 16307 - protein, 483 aa, Staphylococcus aureus VET0313R; identical to SEQ ID NO: 13296

SEQ ID NO: 16308 - protein, 202 aa, Staphylococcus aureus VET0313R; identical to SEQ ID NO: 13267

SEQ ID NO: 16309 - protein, 308 aa, Staphylococcus aureus VET0313R; identical to SEQ ID NO: 13262

SEQ ID NO: 16310 - protein, 483 aa, Staphylococcus aureus VET0314R; identical to SEQ ID NO: 13296

SEQ ID NO: 16311 - protein, 202 aa, Staphylococcus aureus VET0314R; identical to SEQ ID NO: 13267

SEQ ID NO: 16312 - protein, 308 aa, Staphylococcus aureus VET0314R; identical to SEQ ID NO: 13262

SEQ ID NO: 16313 - protein, 483 aa, Staphylococcus aureus VET0315R; identical to SEQ ID NO: 13296

SEQ ID NO: 16314 - protein, 202 aa, Staphylococcus aureus VET0315R; identical to SEQ ID NO: 13267

SEQ ID NO: 16315 - protein, 308 aa, Staphylococcus aureus VET0315R; identical to SEQ ID NO: 13262

SEQ ID NO: 16316 - protein, 483 aa, Staphylococcus aureus VET0316R; identical to SEQ ID NO: 13296

SEQ ID NO: 16317 - protein, 202 aa, Staphylococcus aureus VET0316R; identical to SEQ ID NO: 13267

SEQ ID NO: 16318 - protein, 308 aa, Staphylococcus aureus VET0316R; identical to SEQ ID NO: 13262

SEQ ID NO: 16319 - protein, 483 aa, Staphylococcus aureus VET0317R; identical to SEQ ID NO: 13296

SEQ ID NO: 16320 - protein, 202 aa, Staphylococcus aureus VET0317R; identical to SEQ ID NO: 13267

SEQ ID NO: 16321 - protein, 308 aa, Staphylococcus aureus VET0317R; identical to SEQ ID NO: 13262

SEQ ID NO: 16322 - protein, 483 aa, Staphylococcus aureus VET0318R; identical to SEQ ID NO: 13296

SEQ ID NO: 16323 - protein, 202 aa, Staphylococcus aureus VET0318R; identical to SEQ ID NO: 13267

SEQ ID NO: 16324 - protein, 308 aa, Staphylococcus aureus VET0318R; identical to SEQ ID NO: 13262

SEQ ID NO: 16325 - protein, 483 aa, Staphylococcus aureus VET0320R; identical to SEQ ID NO: 13296

SEQ ID NO: 16326 - protein, 202 aa, Staphylococcus aureus VET0320R; identical to SEQ ID NO: 13267

SEQ ID NO: 16327 - protein, 308 aa, Staphylococcus aureus VET0320R; identical to SEQ ID NO: 13262

SEQ ID NO: 16328 - protein, 483 aa, Staphylococcus aureus VET0322R; identical to SEQ ID NO: 13296

SEQ ID NO: 16329 - protein, 202 aa, Staphylococcus aureus VET0322R; identical to SEQ ID NO: 13267

SEQ ID NO: 16330 - protein, 308 aa, Staphylococcus aureus VET0322R; identical to SEQ ID NO: 13262

SEQ ID NO: 16331 - protein, 483 aa, Staphylococcus aureus VET0323R; identical to SEQ ID NO: 13296

SEQ ID NO: 16332 - protein, 202 aa, Staphylococcus aureus VET0323R; identical to SEQ ID NO: 13267

SEQ ID NO: 16333 - protein, 308 aa, Staphylococcus aureus VET0323R; identical to SEQ ID NO: 13262

SEQ ID NO: 16334 - protein, 483 aa, Staphylococcus aureus VET0325R; identical to SEQ ID NO: 13296

SEQ ID NO: 16335 - protein, 202 aa, Staphylococcus aureus VET0325R; identical to SEQ ID NO: 13267

SEQ ID NO: 16336 - protein, 308 aa, Staphylococcus aureus VET0325R; identical to SEQ ID NO: 13262

SEQ ID NO: 16337 - protein, 483 aa, Staphylococcus aureus VET0326R; identical to SEQ ID NO: 13296

SEQ ID NO: 16338 - protein, 202 aa, Staphylococcus aureus VET0326R; identical to SEQ ID NO: 13267

SEQ ID NO: 16339 - protein, 308 aa, Staphylococcus aureus VET0326R; identical to SEQ ID NO: 13262

SEQ ID NO: 16340 - protein, 483 aa, Staphylococcus aureus VET0329R; identical to SEQ ID NO: 13296

SEQ ID NO: 16341 - protein, 202 aa, Staphylococcus aureus VET0329R; identical to SEQ ID NO: 13267

SEQ ID NO: 16342 - protein, 308 aa, Staphylococcus aureus VET0329R; identical to SEQ ID NO: 16126

SEQ ID NO: 16343 - protein, 483 aa, Staphylococcus aureus VET0331R; identical to SEQ ID NO: 13296

SEQ ID NO: 16344 - protein, 202 aa, Staphylococcus aureus VET0331R; identical to SEQ ID NO: 13267

SEQ ID NO: 16345 - protein, 308 aa, Staphylococcus aureus VET0331R; identical to SEQ ID NO: 13262

SEQ ID NO: 16346 - protein, 131 aa, Staphylococcus aureus VET0333R; identical to SEQ ID NO: 14745

SEQ ID NO: 16347 - protein, 202 aa, Staphylococcus aureus VET0333R; identical to SEQ ID NO: 13267

SEQ ID NO: 16348 - protein, 308 aa, Staphylococcus aureus VET0333R; identical to SEQ ID NO: 13262

SEQ ID NO: 16349 - protein, 131 aa, Staphylococcus aureus VET0335R; identical to SEQ ID NO: 14745

SEQ ID NO: 16350 - protein, 202 aa, Staphylococcus aureus VET0335R; identical to SEQ ID NO: 13267

SEQ ID NO: 16351 - protein, 308 aa, Staphylococcus aureus VET0335R; identical to SEQ ID NO: 13262

SEQ ID NO: 16352 - protein, 483 aa, Staphylococcus aureus VET0336R; identical to SEQ ID NO: 13296

SEQ ID NO: 16353 - protein, 202 aa, Staphylococcus aureus VET0336R; identical to SEQ ID NO: 13267

SEQ ID NO: 16354 - protein, 308 aa, Staphylococcus aureus VET0336R; identical to SEQ ID NO: 13262

SEQ ID NO: 16355 - protein, 483 aa, Staphylococcus aureus VET0337R; identical to SEQ ID NO: 13296

SEQ ID NO: 16356 - protein, 202 aa, Staphylococcus aureus VET0337R; identical to SEQ ID NO: 13267

SEQ ID NO: 16357 - protein, 308 aa, Staphylococcus aureus VET0337R; identical to SEQ ID NO: 13262

SEQ ID NO: 16358 - protein, 483 aa, Staphylococcus aureus VET0338R; identical to SEQ ID NO: 13296

SEQ ID NO: 16359 - protein, 202 aa, Staphylococcus aureus VET0338R; identical to SEQ ID NO: 13267

SEQ ID NO: 16360 - protein, 308 aa, Staphylococcus aureus VET0338R; identical to SEQ ID NO: 13262

SEQ ID NO: 16361 - protein, 483 aa, Staphylococcus aureus VET0339R; identical to SEQ ID NO: 13296

SEQ ID NO: 16362 - protein, 202 aa, Staphylococcus aureus VET0339R; identical to SEQ ID NO: 13267

SEQ ID NO: 16363 - protein, 308 aa, Staphylococcus aureus VET0339R; identical to SEQ ID NO: 13262

SEQ ID NO: 16364 - protein, 483 aa, Staphylococcus aureus VET0340R; identical to SEQ ID NO: 13296

SEQ ID NO: 16365 - protein, 202 aa, Staphylococcus aureus VET0340R; identical to SEQ ID NO: 13267

SEQ ID NO: 16366 - protein, 308 aa, Staphylococcus aureus VET0340R; identical to SEQ ID NO: 13262

SEQ ID NO: 16367 - protein, 483 aa, Staphylococcus aureus VET0341R; identical to SEQ ID NO: 13296

SEQ ID NO: 16368 - protein, 202 aa, Staphylococcus aureus VET0341R; identical to SEQ ID NO: 13267

SEQ ID NO: 16369 - protein, 308 aa, Staphylococcus aureus VET0341R; identical to SEQ ID NO: 13262

SEQ ID NO: 16370 - protein, 483 aa, Staphylococcus aureus VET0352R; identical to SEQ ID NO: 13296

SEQ ID NO: 16371 - protein, 202 aa, Staphylococcus aureus VET0352R; identical to SEQ ID NO: 13267

SEQ ID NO: 16372 - protein, 308 aa, Staphylococcus aureus VET0352R; identical to SEQ ID NO: 13262

SEQ ID NO: 16373 - protein, 483 aa, Staphylococcus aureus VET0354R; identical to SEQ ID NO: 13296

SEQ ID NO: 16374 - protein, 202 aa, Staphylococcus aureus VET0354R; identical to SEQ ID NO: 13267

SEQ ID NO: 16375 - protein, 308 aa, Staphylococcus aureus VET0354R; identical to SEQ ID NO: 13262

SEQ ID NO: 16376 - protein, 483 aa, Staphylococcus aureus VET0357R; identical to SEQ ID NO: 13296

SEQ ID NO: 16377 - protein, 202 aa, Staphylococcus aureus VET0357R; identical to SEQ ID NO: 13267

SEQ ID NO: 16378 - protein, 308 aa, Staphylococcus aureus VET0357R; identical to SEQ ID NO: 13262

SEQ ID NO: 16379 - protein, 483 aa, Staphylococcus aureus VET0359R; identical to SEQ ID NO: 13296

SEQ ID NO: 16380 - protein, 202 aa, Staphylococcus aureus VET0359R; identical to SEQ ID NO: 13267

SEQ ID NO: 16381 - protein, 308 aa, Staphylococcus aureus VET0359R; identical to SEQ ID NO: 13262

SEQ ID NO: 16382 - protein, 483 aa, Staphylococcus aureus VET0360R; identical to SEQ ID NO: 13296

SEQ ID NO: 16383 - protein, 202 aa, Staphylococcus aureus VET0360R; identical to SEQ ID NO: 13267

SEQ ID NO: 16384 - protein, 308 aa, Staphylococcus aureus VET0360R; identical to SEQ ID NO: 13262

SEQ ID NO: 16385 - protein, 483 aa, Staphylococcus aureus VET0363R; identical to SEQ ID NO: 13296

SEQ ID NO: 16386 - protein, 202 aa, Staphylococcus aureus VET0363R; identical to SEQ ID NO: 13267

SEQ ID NO: 16387 - protein, 308 aa, Staphylococcus aureus VET0363R; identical to SEQ ID NO: 13262

SEQ ID NO: 16388 - protein, 483 aa, Staphylococcus aureus VET0366R; identical to SEQ ID NO: 13296

SEQ ID NO: 16389 - protein, 202 aa, Staphylococcus aureus VET0366R; identical to SEQ ID NO: 13267

SEQ ID NO: 16390 - protein, 308 aa, Staphylococcus aureus VET0366R; identical to SEQ ID NO: 13262

SEQ ID NO: 16391 - protein, 483 aa, Staphylococcus aureus VET0367R; identical to SEQ ID NO: 13296

SEQ ID NO: 16392 - protein, 202 aa, Staphylococcus aureus VET0367R; identical to SEQ ID NO: 13267

SEQ ID NO: 16393 - protein, 308 aa, Staphylococcus aureus VET0367R; identical to SEQ ID NO: 13262

SEQ ID NO: 16394 - protein, 483 aa, Staphylococcus aureus VET0369R; identical to SEQ ID NO: 13296

SEQ ID NO: 16395 - protein, 202 aa, Staphylococcus aureus VET0369R; identical to SEQ ID NO: 13267

SEQ ID NO: 16396 - protein, 308 aa, Staphylococcus aureus VET0369R; identical to SEQ ID NO: 13262

SEQ ID NO: 16397 - protein, 131 aa, Staphylococcus aureus VET0373R; identical to SEQ ID NO: 14745

SEQ ID NO: 16398 - protein, 202 aa, Staphylococcus aureus VET0373R; identical to SEQ ID NO: 13267

SEQ ID NO: 16399 - protein, 308 aa, Staphylococcus aureus VET0373R; identical to SEQ ID NO: 13262

SEQ ID NO: 16400 - protein, 131 aa, Staphylococcus aureus VET0376R; identical to SEQ ID NO: 14745

SEQ ID NO: 16401 - protein, 202 aa, Staphylococcus aureus VET0376R; identical to SEQ ID NO: 13267

SEQ ID NO: 16402 - protein, 308 aa, Staphylococcus aureus VET0376R; identical to SEQ ID NO: 13262

SEQ ID NO: 16403 - protein, 483 aa, Staphylococcus aureus VET0382R; identical to SEQ ID NO: 13296

SEQ ID NO: 16404 - protein, 202 aa, Staphylococcus aureus VET0382R; identical to SEQ ID NO: 13267

SEQ ID NO: 16405 - protein, 308 aa, Staphylococcus aureus VET0382R; identical to SEQ ID NO: 13262

SEQ ID NO: 16406 - protein, 483 aa, Staphylococcus aureus VET0383R; identical to SEQ ID NO: 13296

SEQ ID NO: 16407 - protein, 202 aa, Staphylococcus aureus VET0383R; identical to SEQ ID NO: 13267

SEQ ID NO: 16408 - protein, 308 aa, Staphylococcus aureus VET0383R; identical to SEQ ID NO: 13262

SEQ ID NO: 16409 - protein, 483 aa, Staphylococcus aureus VET0384R; identical to SEQ ID NO: 13296

SEQ ID NO: 16410 - protein, 202 aa, Staphylococcus aureus VET0384R; identical to SEQ ID NO: 13267

SEQ ID NO: 16411 - protein, 308 aa, Staphylococcus aureus VET0384R; identical to SEQ ID NO: 13262

SEQ ID NO: 16412 - protein, 483 aa, Staphylococcus aureus VET0387R; identical to SEQ ID NO: 13296

SEQ ID NO: 16413 - protein, 202 aa, Staphylococcus aureus VET0387R; identical to SEQ ID NO: 13267

SEQ ID NO: 16414 - protein, 308 aa, Staphylococcus aureus VET0387R; identical to SEQ ID NO: 13262

SEQ ID NO: 16415 - protein, 483 aa, Staphylococcus aureus VET0388R; identical to SEQ ID NO: 13296

SEQ ID NO: 16416 - protein, 202 aa, Staphylococcus aureus VET0388R; identical to SEQ ID NO: 13267

SEQ ID NO: 16417 - protein, 308 aa, Staphylococcus aureus VET0388R; identical to SEQ ID NO: 13262

SEQ ID NO: 16418 - protein, 483 aa, Staphylococcus aureus VET0389R; identical to SEQ ID NO: 13296

SEQ ID NO: 16419 - protein, 202 aa, Staphylococcus aureus VET0389R; identical to SEQ ID NO: 13267

SEQ ID NO: 16420 - protein, 308 aa, Staphylococcus aureus VET0389R; identical to SEQ ID NO: 13262

SEQ ID NO: 16421 - protein, 483 aa, Staphylococcus aureus VET0390R; identical to SEQ ID NO: 13296

SEQ ID NO: 16422 - protein, 202 aa, Staphylococcus aureus VET0390R; identical to SEQ ID NO: 13267

SEQ ID NO: 16423 - protein, 308 aa, Staphylococcus aureus VET0390R; identical to SEQ ID NO: 13262

SEQ ID NO: 16424 - protein, 483 aa, Staphylococcus aureus VET0393R; identical to SEQ ID NO: 13296

SEQ ID NO: 16425 - protein, 202 aa, Staphylococcus aureus VET0393R; identical to SEQ ID NO: 13267

SEQ ID NO: 16426 - protein, 308 aa, Staphylococcus aureus VET0393R; identical to SEQ ID NO: 13262

SEQ ID NO: 16427 - protein, 483 aa, Staphylococcus aureus VET0394R; identical to SEQ ID NO: 13296

SEQ ID NO: 16428 - protein, 202 aa, Staphylococcus aureus VET0394R; identical to SEQ ID NO: 13267

SEQ ID NO: 16429 - protein, 308 aa, Staphylococcus aureus VET0394R; identical to SEQ ID NO: 13262

SEQ ID NO: 16430 - protein, 483 aa, Staphylococcus aureus VET0395R; identical to SEQ ID NO: 13296

SEQ ID NO: 16431 - protein, 202 aa, Staphylococcus aureus VET0395R; identical to SEQ ID NO: 13267

SEQ ID NO: 16432 - protein, 308 aa, Staphylococcus aureus VET0395R; identical to SEQ ID NO: 13262

SEQ ID NO: 16433 - protein, 483 aa, Staphylococcus aureus VET0396R; identical to SEQ ID NO: 13296

SEQ ID NO: 16434 - protein, 202 aa, Staphylococcus aureus VET0396R; identical to SEQ ID NO: 13267

SEQ ID NO: 16435 - protein, 308 aa, Staphylococcus aureus VET0396R; identical to SEQ ID NO: 13262

SEQ ID NO: 16436 - protein, 483 aa, Staphylococcus aureus VET0399R; identical to SEQ ID NO: 13296

SEQ ID NO: 16437 - protein, 202 aa, Staphylococcus aureus VET0399R; identical to SEQ ID NO: 13267

SEQ ID NO: 16438 - protein, 308 aa, Staphylococcus aureus VET0399R; identical to SEQ ID NO: 13262

SEQ ID NO: 16439 - protein, 483 aa, Staphylococcus aureus VET0401R; identical to SEQ ID NO: 13296

SEQ ID NO: 16440 - protein, 202 aa, Staphylococcus aureus VET0401R; identical to SEQ ID NO: 13267

SEQ ID NO: 16441 - protein, 308 aa, Staphylococcus aureus VET0401R; identical to SEQ ID NO: 13262

SEQ ID NO: 16442 - protein, 483 aa, Staphylococcus aureus VET0402R; identical to SEQ ID NO: 13296

SEQ ID NO: 16443 - protein, 202 aa, Staphylococcus aureus VET0402R; identical to SEQ ID NO: 13267

SEQ ID NO: 16444 - protein, 308 aa, Staphylococcus aureus VET0402R; identical to SEQ ID NO: 13262

SEQ ID NO: 16445 - protein, 483 aa, Staphylococcus aureus VET0403R; identical to SEQ ID NO: 13296

SEQ ID NO: 16446 - protein, 202 aa, Staphylococcus aureus VET0403R; identical to SEQ ID NO: 13267

SEQ ID NO: 16447 - protein, 308 aa, Staphylococcus aureus VET0403R; identical to SEQ ID NO: 13262

SEQ ID NO: 16448 - protein, 483 aa, Staphylococcus aureus VET0406R; identical to SEQ ID NO: 13296

SEQ ID NO: 16449 - protein, 202 aa, Staphylococcus aureus VET0406R; identical to SEQ ID NO: 13267

SEQ ID NO: 16450 - protein, 308 aa, Staphylococcus aureus VET0406R; identical to SEQ ID NO: 13262

SEQ ID NO: 16451 - protein, 483 aa, Staphylococcus aureus VET0407R; identical to SEQ ID NO: 13296

SEQ ID NO: 16452 - protein, 202 aa, Staphylococcus aureus VET0407R; identical to SEQ ID NO: 13267

SEQ ID NO: 16453 - protein, 308 aa, Staphylococcus aureus VET0407R; identical to SEQ ID NO: 13262

SEQ ID NO: 16454 - protein, 483 aa, Staphylococcus aureus VET0410R; identical to SEQ ID NO: 13296

SEQ ID NO: 16455 - protein, 202 aa, Staphylococcus aureus VET0410R; identical to SEQ ID NO: 13267

SEQ ID NO: 16456 - protein, 308 aa, Staphylococcus aureus VET0410R; identical to SEQ ID NO: 13262

SEQ ID NO: 16457 - protein, 483 aa, Staphylococcus aureus VET0411R; identical to SEQ ID NO: 13296

SEQ ID NO: 16458 - protein, 202 aa, Staphylococcus aureus VET0411R; identical to SEQ ID NO: 13267

SEQ ID NO: 16459 - protein, 308 aa, Staphylococcus aureus VET0411R; identical to SEQ ID NO: 13262

SEQ ID NO: 16460 - protein, 483 aa, Staphylococcus aureus VET0412R; identical to SEQ ID NO: 13296

SEQ ID NO: 16461 - protein, 202 aa, Staphylococcus aureus VET0412R; identical to SEQ ID NO: 13267

SEQ ID NO: 16462 - protein, 308 aa, Staphylococcus aureus VET0412R; identical to SEQ ID NO: 13262

SEQ ID NO: 16463 - protein, 483 aa, Staphylococcus aureus VET0413R; identical to SEQ ID NO: 13296

SEQ ID NO: 16464 - protein, 202 aa, Staphylococcus aureus VET0413R; identical to SEQ ID NO: 13267

SEQ ID NO: 16465 - protein, 308 aa, Staphylococcus aureus VET0413R; identical to SEQ ID NO: 13262

SEQ ID NO: 16466 - protein, 483 aa, Staphylococcus aureus VET0415R; identical to SEQ ID NO: 13296

SEQ ID NO: 16467 - protein, 202 aa, Staphylococcus aureus VET0415R; identical to SEQ ID NO: 13267

SEQ ID NO: 16468 - protein, 308 aa, Staphylococcus aureus VET0415R; identical to SEQ ID NO: 13262

SEQ ID NO: 16469 - protein, 483 aa, Staphylococcus aureus VET0417R; identical to SEQ ID NO: 13296

SEQ ID NO: 16470 - protein, 202 aa, Staphylococcus aureus VET0417R; identical to SEQ ID NO: 13267

SEQ ID NO: 16471 - protein, 308 aa, Staphylococcus aureus VET0417R; identical to SEQ ID NO: 13262

SEQ ID NO: 16472 - protein, 483 aa, Staphylococcus aureus VET0418R; identical to SEQ ID NO: 13296

SEQ ID NO: 16473 - protein, 202 aa, Staphylococcus aureus VET0418R; identical to SEQ ID NO: 13267

SEQ ID NO: 16474 - protein, 308 aa, Staphylococcus aureus VET0418R; identical to SEQ ID NO: 13262

SEQ ID NO: 16475 - protein, 375 aa, Staphylococcus aureus VET0421R; identical to SEQ ID NO: 13260

SEQ ID NO: 16476 - protein, 202 aa, Staphylococcus aureus VET0421R; identical to SEQ ID NO: 13267

SEQ ID NO: 16477 - protein, 308 aa, Staphylococcus aureus VET0421R; identical to SEQ ID NO: 13262

SEQ ID NO: 16478 - protein, 483 aa, Staphylococcus aureus VET0423R; identical to SEQ ID NO: 13296

SEQ ID NO: 16479 - protein, 202 aa, Staphylococcus aureus VET0423R; identical to SEQ ID NO: 13267

SEQ ID NO: 16480 - protein, 308 aa, Staphylococcus aureus VET0423R; identical to SEQ ID NO: 13262

SEQ ID NO: 16481 - protein, 483 aa, Staphylococcus aureus VET0425R; identical to SEQ ID NO: 13296

SEQ ID NO: 16482 - protein, 202 aa, Staphylococcus aureus VET0425R; identical to SEQ ID NO: 13267

SEQ ID NO: 16483 - protein, 308 aa, Staphylococcus aureus VET0425R; identical to SEQ ID NO: 16126

SEQ ID NO: 16484 - protein, 483 aa, Staphylococcus aureus VET0427R; identical to SEQ ID NO: 13296

SEQ ID NO: 16485 - protein, 202 aa, Staphylococcus aureus VET0427R; identical to SEQ ID NO: 13267

SEQ ID NO: 16486 - protein, 308 aa, Staphylococcus aureus VET0427R; identical to SEQ ID NO: 13262

SEQ ID NO: 16487 - protein, 483 aa, Staphylococcus aureus VET0428R; identical to SEQ ID NO: 13296

SEQ ID NO: 16488 - protein, 202 aa, Staphylococcus aureus VET0428R; identical to SEQ ID NO: 13267

SEQ ID NO: 16489 - protein, 308 aa, Staphylococcus aureus VET0428R; identical to SEQ ID NO: 13262

SEQ ID NO: 16490 - protein, 483 aa, Staphylococcus aureus VET0431R; identical to SEQ ID NO: 13296

SEQ ID NO: 16491 - protein, 202 aa, Staphylococcus aureus VET0431R; identical to SEQ ID NO: 13267

SEQ ID NO: 16492 - protein, 308 aa, Staphylococcus aureus VET0431R; identical to SEQ ID NO: 13262

SEQ ID NO: 16493 - protein, 483 aa, Staphylococcus aureus VET0432R; identical to SEQ ID NO: 13296

SEQ ID NO: 16494 - protein, 202 aa, Staphylococcus aureus VET0432R; identical to SEQ ID NO: 13267

SEQ ID NO: 16495 - protein, 308 aa, Staphylococcus aureus VET0432R; identical to SEQ ID NO: 13262

SEQ ID NO: 16496 - protein, 483 aa, Staphylococcus aureus VET0433R; identical to SEQ ID NO: 13296

SEQ ID NO: 16497 - protein, 202 aa, Staphylococcus aureus VET0433R; identical to SEQ ID NO: 13267

SEQ ID NO: 16498 - protein, 308 aa, Staphylococcus aureus VET0433R; identical to SEQ ID NO: 13262

SEQ ID NO: 16499 - protein, 483 aa, Staphylococcus aureus VET0434R; identical to SEQ ID NO: 13296

SEQ ID NO: 16500 - protein, 202 aa, Staphylococcus aureus VET0434R; identical to SEQ ID NO: 13267

SEQ ID NO: 16501 - protein, 308 aa, Staphylococcus aureus VET0434R; identical to SEQ ID NO: 13262

SEQ ID NO: 16502 - protein, 483 aa, Staphylococcus aureus VET0435R; identical to SEQ ID NO: 13296

SEQ ID NO: 16503 - protein, 202 aa, Staphylococcus aureus VET0435R; identical to SEQ ID NO: 13267

SEQ ID NO: 16504 - protein, 308 aa, Staphylococcus aureus VET0435R; identical to SEQ ID NO: 13262

SEQ ID NO: 16505 - protein, 483 aa, Staphylococcus aureus VET0438R; identical to SEQ ID NO: 13296

SEQ ID NO: 16506 - protein, 202 aa, Staphylococcus aureus VET0438R; identical to SEQ ID NO: 13267

SEQ ID NO: 16507 - protein, 308 aa, Staphylococcus aureus VET0438R; identical to SEQ ID NO: 13262

SEQ ID NO: 16508 - protein, 483 aa, Staphylococcus aureus VET0439R; identical to SEQ ID NO: 13296

SEQ ID NO: 16509 - protein, 202 aa, Staphylococcus aureus VET0439R; identical to SEQ ID NO: 13267

SEQ ID NO: 16510 - protein, 308 aa, Staphylococcus aureus VET0439R; identical to SEQ ID NO: 13262

SEQ ID NO: 16511 - protein, 483 aa, Staphylococcus aureus VET0440R; identical to SEQ ID NO: 13296

SEQ ID NO: 16512 - protein, 202 aa, Staphylococcus aureus VET0440R; identical to SEQ ID NO: 13267

SEQ ID NO: 16513 - protein, 308 aa, Staphylococcus aureus VET0440R; identical to SEQ ID NO: 13262

SEQ ID NO: 16514 - protein, 483 aa, Staphylococcus aureus VET0442R; identical to SEQ ID NO: 13296

SEQ ID NO: 16515 - protein, 202 aa, Staphylococcus aureus VET0442R; identical to SEQ ID NO: 13267

SEQ ID NO: 16516 - protein, 308 aa, Staphylococcus aureus VET0442R; identical to SEQ ID NO: 13262

SEQ ID NO: 16517 - protein, 131 aa, Staphylococcus aureus VET0443R; identical to SEQ ID NO: 14745

SEQ ID NO: 16518 - protein, 202 aa, Staphylococcus aureus VET0443R; identical to SEQ ID NO: 13267

SEQ ID NO: 16519 - protein, 308 aa, Staphylococcus aureus VET0443R; identical to SEQ ID NO: 13262

SEQ ID NO: 16520 - protein, 483 aa, Staphylococcus aureus VET0444R; identical to SEQ ID NO: 13296

SEQ ID NO: 16521 - protein, 202 aa, Staphylococcus aureus VET0444R; identical to SEQ ID NO: 13267

SEQ ID NO: 16522 - protein, 308 aa, Staphylococcus aureus VET0444R; identical to SEQ ID NO: 13262

SEQ ID NO: 16523 - protein, 483 aa, Staphylococcus aureus VET0446R; identical to SEQ ID NO: 13296

SEQ ID NO: 16524 - protein, 202 aa, Staphylococcus aureus VET0446R; identical to SEQ ID NO: 13267

SEQ ID NO: 16525 - protein, 308 aa, Staphylococcus aureus VET0446R; identical to SEQ ID NO: 13262

SEQ ID NO: 16526 - protein, 483 aa, Staphylococcus aureus VET0451R; identical to SEQ ID NO: 13296

SEQ ID NO: 16527 - protein, 202 aa, Staphylococcus aureus VET0451R; identical to SEQ ID NO: 13267

SEQ ID NO: 16528 - protein, 308 aa, Staphylococcus aureus VET0451R; identical to SEQ ID NO: 13262

SEQ ID NO: 16529 - protein, 483 aa, Staphylococcus aureus VET0452R; identical to SEQ ID NO: 13296

SEQ ID NO: 16530 - protein, 202 aa, Staphylococcus aureus VET0452R; identical to SEQ ID NO: 13267

SEQ ID NO: 16531 - protein, 308 aa, Staphylococcus aureus VET0452R; identical to SEQ ID NO: 13262

SEQ ID NO: 16532 - protein, 483 aa, Staphylococcus aureus VET0454R; identical to SEQ ID NO: 13296

SEQ ID NO: 16533 - protein, 202 aa, Staphylococcus aureus VET0454R; identical to SEQ ID NO: 13267

SEQ ID NO: 16534 - protein, 308 aa, Staphylococcus aureus VET0454R; identical to SEQ ID NO: 13262

SEQ ID NO: 16535 - protein, 483 aa, Staphylococcus aureus VET0455R; identical to SEQ ID NO: 13296

SEQ ID NO: 16536 - protein, 202 aa, Staphylococcus aureus VET0455R; identical to SEQ ID NO: 13267

SEQ ID NO: 16537 - protein, 308 aa, Staphylococcus aureus VET0455R; identical to SEQ ID NO: 13262

SEQ ID NO: 16538 - protein, 483 aa, Staphylococcus aureus VET0456R; identical to SEQ ID NO: 13296

SEQ ID NO: 16539 - protein, 202 aa, Staphylococcus aureus VET0456R; identical to SEQ ID NO: 13267

SEQ ID NO: 16540 - protein, 308 aa, Staphylococcus aureus VET0456R; identical to SEQ ID NO: 13262

SEQ ID NO: 16541 - protein, 483 aa, Staphylococcus aureus VET0459R; identical to SEQ ID NO: 13296

SEQ ID NO: 16542 - protein, 202 aa, Staphylococcus aureus VET0459R; identical to SEQ ID NO: 13267

SEQ ID NO: 16543 - protein, 308 aa, Staphylococcus aureus VET0459R; identical to SEQ ID NO: 13262

SEQ ID NO: 16544 - protein, 483 aa, Staphylococcus aureus VET0460R; identical to SEQ ID NO: 13296

SEQ ID NO: 16545 - protein, 202 aa, Staphylococcus aureus VET0460R; identical to SEQ ID NO: 13267

SEQ ID NO: 16546 - protein, 308 aa, Staphylococcus aureus VET0460R; identical to SEQ ID NO: 13262

SEQ ID NO: 16547 - protein, 483 aa, Staphylococcus aureus VET0462R; identical to SEQ ID NO: 13296

SEQ ID NO: 16548 - protein, 202 aa, Staphylococcus aureus VET0462R; identical to SEQ ID NO: 13267

SEQ ID NO: 16549 - protein, 308 aa, Staphylococcus aureus VET0462R; identical to SEQ ID NO: 13262

SEQ ID NO: 16550 - protein, 483 aa, Staphylococcus aureus VET0463R; identical to SEQ ID NO: 13296

SEQ ID NO: 16551 - protein, 202 aa, Staphylococcus aureus VET0463R; identical to SEQ ID NO: 13267

SEQ ID NO: 16552 - protein, 308 aa, Staphylococcus aureus VET0463R; identical to SEQ ID NO: 13262

SEQ ID NO: 16553 - protein, 483 aa, Staphylococcus aureus VET0464R; identical to SEQ ID NO: 13296

SEQ ID NO: 16554 - protein, 202 aa, Staphylococcus aureus VET0464R; identical to SEQ ID NO: 13267

SEQ ID NO: 16555 - protein, 308 aa, Staphylococcus aureus VET0464R; identical to SEQ ID NO: 13262

SEQ ID NO: 16556 - protein, 483 aa, Staphylococcus aureus VET0468R; identical to SEQ ID NO: 13296

SEQ ID NO: 16557 - protein, 202 aa, Staphylococcus aureus VET0468R; identical to SEQ ID NO: 13267

SEQ ID NO: 16558 - protein, 308 aa, Staphylococcus aureus VET0468R; identical to SEQ ID NO: 13262

SEQ ID NO: 16559 - protein, 483 aa, Staphylococcus aureus VET0470R; identical to SEQ ID NO: 13296

SEQ ID NO: 16560 - protein, 202 aa, Staphylococcus aureus VET0470R; identical to SEQ ID NO: 13267

SEQ ID NO: 16561 - protein, 308 aa, Staphylococcus aureus VET0470R; identical to SEQ ID NO: 13262

SEQ ID NO: 16562 - protein, 483 aa, Staphylococcus aureus VET0478R; identical to SEQ ID NO: 13296

SEQ ID NO: 16563 - protein, 202 aa, Staphylococcus aureus VET0478R; identical to SEQ ID NO: 13267

SEQ ID NO: 16564 - protein, 308 aa, Staphylococcus aureus VET0478R; identical to SEQ ID NO: 13262

SEQ ID NO: 16565 - protein, 483 aa, Staphylococcus aureus VET0481R; identical to SEQ ID NO: 13296

SEQ ID NO: 16566 - protein, 202 aa, Staphylococcus aureus VET0481R; identical to SEQ ID NO: 13267

SEQ ID NO: 16567 - protein, 308 aa, Staphylococcus aureus VET0481R; identical to SEQ ID NO: 13262

SEQ ID NO: 16568 - protein, 131 aa, Staphylococcus aureus VET0485R; identical to SEQ ID NO: 14745

SEQ ID NO: 16569 - protein, 202 aa, Staphylococcus aureus VET0485R; identical to SEQ ID NO: 13267

SEQ ID NO: 16570 - protein, 308 aa, Staphylococcus aureus VET0485R; identical to SEQ ID NO: 13262

SEQ ID NO: 16571 - protein, 131 aa, Staphylococcus aureus VET0486R; identical to SEQ ID NO: 14745

SEQ ID NO: 16572 - protein, 202 aa, Staphylococcus aureus VET0486R; identical to SEQ ID NO: 13267

SEQ ID NO: 16573 - protein, 308 aa, Staphylococcus aureus VET0486R; identical to SEQ ID NO: 13262

SEQ ID NO: 16574 - protein, 483 aa, Staphylococcus aureus VET0488R; identical to SEQ ID NO: 13296

SEQ ID NO: 16575 - protein, 202 aa, Staphylococcus aureus VET0488R; identical to SEQ ID NO: 13267

SEQ ID NO: 16576 - protein, 308 aa, Staphylococcus aureus VET0488R; identical to SEQ ID NO: 13262

SEQ ID NO: 16577 - protein, 483 aa, Staphylococcus aureus VET0519S; identical to SEQ ID NO: 13296

SEQ ID NO: 16578 - protein, 202 aa, Staphylococcus aureus VET0519S; identical to SEQ ID NO: 13267

SEQ ID NO: 16579 - protein, 308 aa, Staphylococcus aureus VET0519S; identical to SEQ ID NO: 13262

SEQ ID NO: 16580 - protein, 483 aa, Staphylococcus aureus VET0596R; identical to SEQ ID NO: 13296

SEQ ID NO: 16581 - protein, 202 aa, Staphylococcus aureus VET0596R; identical to SEQ ID NO: 13267

SEQ ID NO: 16582 - protein, 308 aa, Staphylococcus aureus VET0596R; identical to SEQ ID NO: 13262

SEQ ID NO: 16583 - protein, 483 aa, Staphylococcus aureus VET0645S; identical to SEQ ID NO: 13296

SEQ ID NO: 16584 - protein, 202 aa, Staphylococcus aureus VET0645S; identical to SEQ ID NO: 13267

SEQ ID NO: 16585 - protein, 308 aa, Staphylococcus aureus VET0645S; identical to SEQ ID NO: 13262

SEQ ID NO: 16586 - protein, 483 aa, Staphylococcus aureus VET0657S; identical to SEQ ID NO: 13296

SEQ ID NO: 16587 - protein, 202 aa, Staphylococcus aureus VET0657S; identical to SEQ ID NO: 13267

SEQ ID NO: 16588 - protein, 308 aa, Staphylococcus aureus VET0657S; identical to SEQ ID NO: 13262

SEQ ID NO: 16589 - protein, 483 aa, Staphylococcus aureus VET0779S; identical to SEQ ID NO: 13296

SEQ ID NO: 16590 - protein, 202 aa, Staphylococcus aureus VET0779S; identical to SEQ ID NO: 13267

SEQ ID NO: 16591 - protein, 308 aa, Staphylococcus aureus VET0779S; identical to SEQ ID NO: 13262

SEQ ID NO: 16592 - protein, 483 aa, Staphylococcus aureus VET0809S; identical to SEQ ID NO: 13296

SEQ ID NO: 16593 - protein, 202 aa, Staphylococcus aureus VET0809S; identical to SEQ ID NO: 13267

SEQ ID NO: 16594 - protein, 308 aa, Staphylococcus aureus VET0809S; identical to SEQ ID NO: 13262

SEQ ID NO: 16595 - protein, 483 aa, Staphylococcus aureus VET0810S; identical to SEQ ID NO: 13296

SEQ ID NO: 16596 - protein, 202 aa, Staphylococcus aureus VET0810S; identical to SEQ ID NO: 13267

SEQ ID NO: 16597 - protein, 308 aa, Staphylococcus aureus VET0810S; identical to SEQ ID NO: 13262

SEQ ID NO: 16598 - protein, 483 aa, Staphylococcus aureus VET0919S; identical to SEQ ID NO: 13296

SEQ ID NO: 16599 - protein, 202 aa, Staphylococcus aureus VET0919S; identical to SEQ ID NO: 13267

SEQ ID NO: 16600 - protein, 308 aa, Staphylococcus aureus VET0919S; identical to SEQ ID NO: 13262

SEQ ID NO: 16601 - protein, 483 aa, Staphylococcus aureus VET0920S; identical to SEQ ID NO: 13296

SEQ ID NO: 16602 - protein, 202 aa, Staphylococcus aureus VET0920S; identical to SEQ ID NO: 13267

SEQ ID NO: 16603 - protein, 308 aa, Staphylococcus aureus VET0920S; identical to SEQ ID NO: 13262

SEQ ID NO: 16604 - protein, 483 aa, Staphylococcus aureus VET1035S; identical to SEQ ID NO: 13296

SEQ ID NO: 16605 - protein, 202 aa, Staphylococcus aureus VET1035S; identical to SEQ ID NO: 13267

SEQ ID NO: 16606 - protein, 308 aa, Staphylococcus aureus VET1035S; identical to SEQ ID NO: 13262

SEQ ID NO: 16607 - protein, 483 aa, Staphylococcus aureus VET1048S; identical to SEQ ID NO: 13296

SEQ ID NO: 16608 - protein, 202 aa, Staphylococcus aureus VET1048S; identical to SEQ ID NO: 13267

SEQ ID NO: 16609 - protein, 308 aa, Staphylococcus aureus VET1048S; identical to SEQ ID NO: 13262

SEQ ID NO: 16610 - protein, 483 aa, Staphylococcus aureus VET1052S; identical to SEQ ID NO: 13296

SEQ ID NO: 16611 - protein, 202 aa, Staphylococcus aureus VET1052S; identical to SEQ ID NO: 13267

SEQ ID NO: 16612 - protein, 308 aa, Staphylococcus aureus VET1052S; identical to SEQ ID NO: 13262

SEQ ID NO: 16613 - protein, 483 aa, Staphylococcus aureus VET1054S; identical to SEQ ID NO: 13296

SEQ ID NO: 16614 - protein, 202 aa, Staphylococcus aureus VET1054S; identical to SEQ ID NO: 13267

SEQ ID NO: 16615 - protein, 308 aa, Staphylococcus aureus VET1054S; identical to SEQ ID NO: 13262

SEQ ID NO: 16616 - protein, 483 aa, Staphylococcus aureus VET1068S; identical to SEQ ID NO: 13296

SEQ ID NO: 16617 - protein, 202 aa, Staphylococcus aureus VET1068S; identical to SEQ ID NO: 13267

SEQ ID NO: 16618 - protein, 308 aa, Staphylococcus aureus VET1068S; identical to SEQ ID NO: 13262

SEQ ID NO: 16619 - protein, 483 aa, Staphylococcus aureus VET1088S; identical to SEQ ID NO: 13296

SEQ ID NO: 16620 - protein, 202 aa, Staphylococcus aureus VET1088S; identical to SEQ ID NO: 13267

SEQ ID NO: 16621 - protein, 308 aa, Staphylococcus aureus VET1088S; identical to SEQ ID NO: 13262

SEQ ID NO: 16622 - protein, 483 aa, Staphylococcus aureus VET1104S; identical to SEQ ID NO: 13296

SEQ ID NO: 16623 - protein, 202 aa, Staphylococcus aureus VET1104S; identical to SEQ ID NO: 13267

SEQ ID NO: 16624 - protein, 308 aa, Staphylococcus aureus VET1104S; identical to SEQ ID NO: 13262

SEQ ID NO: 16625 - protein, 483 aa, Staphylococcus aureus VET1168S; identical to SEQ ID NO: 13296

SEQ ID NO: 16626 - protein, 202 aa, Staphylococcus aureus VET1168S; identical to SEQ ID NO: 13267

SEQ ID NO: 16627 - protein, 308 aa, Staphylococcus aureus VET1168S; identical to SEQ ID NO: 13262

SEQ ID NO: 16628 - protein, 483 aa, Staphylococcus aureus VET1181S; identical to SEQ ID NO: 13296

SEQ ID NO: 16629 - protein, 202 aa, Staphylococcus aureus VET1181S; identical to SEQ ID NO: 13267

SEQ ID NO: 16630 - protein, 308 aa, Staphylococcus aureus VET1181S; identical to SEQ ID NO: 13262

SEQ ID NO: 16631 - protein, 483 aa, Staphylococcus aureus VET1245S
MTIDKKKFIEKYVKALESNTAAIFAGAGLSCGAGYVNWKTLLNEAAEELELNIDKEEHDLVGLAQHYINKKRSRGNLNTVIMEQFSTRAELTENHELLAKLPIDTYWTTNYDCMIEKALDSEGRIVDVKRNQNQLTVSVADKDATVYKMHGDIDSIDKIILTRDDYEKYNLTHPKFREILEGDLLSKTFLFIGFSFTDPNISYILSRIRLVLEDNTRPHYCILKEVEEKEYDNTEEFMYAKIKQQLHIEDLSRFSIETLLVKDYIEITEILESIYKRYRRKTIFISGSATEYLPFNSETGKYFLHQLSKKLVENDFKLVTGFGLGVGSYVINGVADYINSNKKSKLQNHLNILPFSQDSSGDLDLKEVWKKNRLEMISECGMALFLFGNKEKDGKIVLADGLEEEYKIAERQELVRLPINVTGYKTKNLSEQYNEEINIQFKEKILKMYNEINEYKCDFSNKQSIDELVQKIVNLVIEIKKTK

SEQ ID NO: 16632 - protein, 202 aa, Staphylococcus aureus VET1245S; identical to SEQ ID NO: 13267

SEQ ID NO: 16633 - protein, 308 aa, Staphylococcus aureus VET1245S; identical to SEQ ID NO: 13262

SEQ ID NO: 16634 - protein, 483 aa, Staphylococcus aureus VET1411S; identical to SEQ ID NO: 13296

SEQ ID NO: 16635 - protein, 202 aa, Staphylococcus aureus VET1411S; identical to SEQ ID NO: 13267

SEQ ID NO: 16636 - protein, 308 aa, Staphylococcus aureus VET1411S; identical to SEQ ID NO: 13262

SEQ ID NO: 16637 - protein, 483 aa, Staphylococcus aureus VET1434S; identical to SEQ ID NO: 13296

SEQ ID NO: 16638 - protein, 202 aa, Staphylococcus aureus VET1434S; identical to SEQ ID NO: 13267

SEQ ID NO: 16639 - protein, 308 aa, Staphylococcus aureus VET1434S; identical to SEQ ID NO: 13262

SEQ ID NO: 16640 - protein, 483 aa, Staphylococcus aureus VET1468S; identical to SEQ ID NO: 13296

SEQ ID NO: 16641 - protein, 202 aa, Staphylococcus aureus VET1468S; identical to SEQ ID NO: 13267

SEQ ID NO: 16642 - protein, 308 aa, Staphylococcus aureus VET1468S; identical to SEQ ID NO: 13262

SEQ ID NO: 16643 - protein, 483 aa, Staphylococcus aureus VET1495S; identical to SEQ ID NO: 13296

SEQ ID NO: 16644 - protein, 202 aa, Staphylococcus aureus VET1495S; identical to SEQ ID NO: 13267

SEQ ID NO: 16645 - protein, 308 aa, Staphylococcus aureus VET1495S; identical to SEQ ID NO: 13262

SEQ ID NO: 16646 - protein, 483 aa, Staphylococcus aureus VET1499S; identical to SEQ ID NO: 16631

SEQ ID NO: 16647 - protein, 202 aa, Staphylococcus aureus VET1499S; identical to SEQ ID NO: 13267

SEQ ID NO: 16648 - protein, 308 aa, Staphylococcus aureus VET1499S; identical to SEQ ID NO: 13262

SEQ ID NO: 16649 - protein, 483 aa, Staphylococcus aureus VET1519S; identical to SEQ ID NO: 13296

SEQ ID NO: 16650 - protein, 202 aa, Staphylococcus aureus VET1519S; identical to SEQ ID NO: 13267

SEQ ID NO: 16651 - protein, 308 aa, Staphylococcus aureus VET1519S; identical to SEQ ID NO: 13262

SEQ ID NO: 16652 - protein, 483 aa, Staphylococcus aureus VET1526S; identical to SEQ ID NO: 13296

SEQ ID NO: 16653 - protein, 202 aa, Staphylococcus aureus VET1526S; identical to SEQ ID NO: 13267

SEQ ID NO: 16654 - protein, 308 aa, Staphylococcus aureus VET1526S; identical to SEQ ID NO: 13262

SEQ ID NO: 16655 - protein, 483 aa, Staphylococcus aureus VET1727S; identical to SEQ ID NO: 13296

SEQ ID NO: 16656 - protein, 202 aa, Staphylococcus aureus VET1727S; identical to SEQ ID NO: 13267

SEQ ID NO: 16657 - protein, 308 aa, Staphylococcus aureus VET1727S; identical to SEQ ID NO: 13262

SEQ ID NO: 16658 - protein, 483 aa, Staphylococcus aureus VET1738S; identical to SEQ ID NO: 13296

SEQ ID NO: 16659 - protein, 202 aa, Staphylococcus aureus VET1738S; identical to SEQ ID NO: 13267

SEQ ID NO: 16660 - protein, 308 aa, Staphylococcus aureus VET1738S; identical to SEQ ID NO: 13262

SEQ ID NO: 16661 - protein, 483 aa, Staphylococcus aureus VET1816S; identical to SEQ ID NO: 13296

SEQ ID NO: 16662 - protein, 202 aa, Staphylococcus aureus VET1816S; identical to SEQ ID NO: 13267

SEQ ID NO: 16663 - protein, 308 aa, Staphylococcus aureus VET1816S; identical to SEQ ID NO: 13262

SEQ ID NO: 16664 - protein, 483 aa, Staphylococcus aureus VET1817S; identical to SEQ ID NO: 13296

SEQ ID NO: 16665 - protein, 202 aa, Staphylococcus aureus VET1817S; identical to SEQ ID NO: 13267

SEQ ID NO: 16666 - protein, 308 aa, Staphylococcus aureus VET1817S; identical to SEQ ID NO: 13262

SEQ ID NO: 16667 - protein, 483 aa, Staphylococcus aureus VET1822S; identical to SEQ ID NO: 13296

SEQ ID NO: 16668 - protein, 202 aa, Staphylococcus aureus VET1822S; identical to SEQ ID NO: 13267

SEQ ID NO: 16669 - protein, 308 aa, Staphylococcus aureus VET1822S; identical to SEQ ID NO: 13262

SEQ ID NO: 16670 - protein, 483 aa, Staphylococcus aureus VET1832R; identical to SEQ ID NO: 13296

SEQ ID NO: 16671 - protein, 202 aa, Staphylococcus aureus VET1832R; identical to SEQ ID NO: 13267

SEQ ID NO: 16672 - protein, 308 aa, Staphylococcus aureus VET1832R; identical to SEQ ID NO: 13262

SEQ ID NO: 16673 - protein, 483 aa, Staphylococcus aureus VET1834R; identical to SEQ ID NO: 13296

SEQ ID NO: 16674 - protein, 202 aa, Staphylococcus aureus VET1834R; identical to SEQ ID NO: 13267

SEQ ID NO: 16675 - protein, 308 aa, Staphylococcus aureus VET1834R; identical to SEQ ID NO: 13262

SEQ ID NO: 16676 - protein, 483 aa, Staphylococcus aureus VET1835R; identical to SEQ ID NO: 13296

SEQ ID NO: 16677 - protein, 202 aa, Staphylococcus aureus VET1835R; identical to SEQ ID NO: 13267

SEQ ID NO: 16678 - protein, 308 aa, Staphylococcus aureus VET1835R; identical to SEQ ID NO: 13262

SEQ ID NO: 16679 - protein, 483 aa, Staphylococcus aureus VET1838R; identical to SEQ ID NO: 13296

SEQ ID NO: 16680 - protein, 202 aa, Staphylococcus aureus VET1838R; identical to SEQ ID NO: 13267

SEQ ID NO: 16681 - protein, 308 aa, Staphylococcus aureus VET1838R; identical to SEQ ID NO: 13262

SEQ ID NO: 16682 - protein, 483 aa, Staphylococcus aureus VET1839R; identical to SEQ ID NO: 13296

SEQ ID NO: 16683 - protein, 202 aa, Staphylococcus aureus VET1839R; identical to SEQ ID NO: 13267

SEQ ID NO: 16684 - protein, 308 aa, Staphylococcus aureus VET1839R; identical to SEQ ID NO: 13262

SEQ ID NO: 16685 - protein, 483 aa, Staphylococcus aureus VET1843R; identical to SEQ ID NO: 13296

SEQ ID NO: 16686 - protein, 202 aa, Staphylococcus aureus VET1843R; identical to SEQ ID NO: 13267

SEQ ID NO: 16687 - protein, 308 aa, Staphylococcus aureus VET1843R; identical to SEQ ID NO: 13262

SEQ ID NO: 16688 - protein, 483 aa, Staphylococcus aureus VET1844R; identical to SEQ ID NO: 13296

SEQ ID NO: 16689 - protein, 202 aa, Staphylococcus aureus VET1844R; identical to SEQ ID NO: 13267

SEQ ID NO: 16690 - protein, 308 aa, Staphylococcus aureus VET1844R; identical to SEQ ID NO: 13262

SEQ ID NO: 16691 - protein, 483 aa, Staphylococcus aureus VET1845R; identical to SEQ ID NO: 13296

SEQ ID NO: 16692 - protein, 202 aa, Staphylococcus aureus VET1845R; identical to SEQ ID NO: 13267

SEQ ID NO: 16693 - protein, 308 aa, Staphylococcus aureus VET1845R; identical to SEQ ID NO: 13262

SEQ ID NO: 16694 - protein, 483 aa, Staphylococcus aureus VET1846R; identical to SEQ ID NO: 13296

SEQ ID NO: 16695 - protein, 202 aa, Staphylococcus aureus VET1846R; identical to SEQ ID NO: 13267

SEQ ID NO: 16696 - protein, 308 aa, Staphylococcus aureus VET1846R; identical to SEQ ID NO: 13262

SEQ ID NO: 16697 - protein, 483 aa, Staphylococcus aureus VET1848R; identical to SEQ ID NO: 13296

SEQ ID NO: 16698 - protein, 202 aa, Staphylococcus aureus VET1848R; identical to SEQ ID NO: 13267

SEQ ID NO: 16699 - protein, 308 aa, Staphylococcus aureus VET1848R; identical to SEQ ID NO: 13262

SEQ ID NO: 16700 - protein, 483 aa, Staphylococcus aureus VET1849R; identical to SEQ ID NO: 13296

SEQ ID NO: 16701 - protein, 202 aa, Staphylococcus aureus VET1849R; identical to SEQ ID NO: 13267

SEQ ID NO: 16702 - protein, 308 aa, Staphylococcus aureus VET1849R; identical to SEQ ID NO: 13262

SEQ ID NO: 16703 - protein, 483 aa, Staphylococcus aureus VET1850R; identical to SEQ ID NO: 13296

SEQ ID NO: 16704 - protein, 202 aa, Staphylococcus aureus VET1850R; identical to SEQ ID NO: 13267

SEQ ID NO: 16705 - protein, 308 aa, Staphylococcus aureus VET1850R; identical to SEQ ID NO: 13262

SEQ ID NO: 16706 - protein, 483 aa, Staphylococcus aureus VET1851R; identical to SEQ ID NO: 13296

SEQ ID NO: 16707 - protein, 202 aa, Staphylococcus aureus VET1851R; identical to SEQ ID NO: 13267

SEQ ID NO: 16708 - protein, 308 aa, Staphylococcus aureus VET1851R; identical to SEQ ID NO: 13262

SEQ ID NO: 16709 - protein, 483 aa, Staphylococcus aureus VET1852R; identical to SEQ ID NO: 13296

SEQ ID NO: 16710 - protein, 202 aa, Staphylococcus aureus VET1852R; identical to SEQ ID NO: 13267

SEQ ID NO: 16711 - protein, 308 aa, Staphylococcus aureus VET1852R; identical to SEQ ID NO: 13262

SEQ ID NO: 16712 - protein, 483 aa, Staphylococcus aureus VET1853R; identical to SEQ ID NO: 13296

SEQ ID NO: 16713 - protein, 202 aa, Staphylococcus aureus VET1853R; identical to SEQ ID NO: 13267

SEQ ID NO: 16714 - protein, 308 aa, Staphylococcus aureus VET1853R; identical to SEQ ID NO: 13262

SEQ ID NO: 16715 - protein, 483 aa, Staphylococcus aureus VET1854R; identical to SEQ ID NO: 13296

SEQ ID NO: 16716 - protein, 202 aa, Staphylococcus aureus VET1854R; identical to SEQ ID NO: 13267

SEQ ID NO: 16717 - protein, 308 aa, Staphylococcus aureus VET1854R; identical to SEQ ID NO: 13262

SEQ ID NO: 16718 - protein, 483 aa, Staphylococcus aureus VET1855R; identical to SEQ ID NO: 13296

SEQ ID NO: 16719 - protein, 202 aa, Staphylococcus aureus VET1855R; identical to SEQ ID NO: 13267

SEQ ID NO: 16720 - protein, 308 aa, Staphylococcus aureus VET1855R; identical to SEQ ID NO: 13262

SEQ ID NO: 16721 - protein, 483 aa, Staphylococcus aureus VET1856R; identical to SEQ ID NO: 13296

SEQ ID NO: 16722 - protein, 202 aa, Staphylococcus aureus VET1856R; identical to SEQ ID NO: 13267

SEQ ID NO: 16723 - protein, 308 aa, Staphylococcus aureus VET1856R; identical to SEQ ID NO: 13262

SEQ ID NO: 16724 - protein, 483 aa, Staphylococcus aureus VET1859R; identical to SEQ ID NO: 13296

SEQ ID NO: 16725 - protein, 202 aa, Staphylococcus aureus VET1859R; identical to SEQ ID NO: 13267

SEQ ID NO: 16726 - protein, 308 aa, Staphylococcus aureus VET1859R; identical to SEQ ID NO: 13262

SEQ ID NO: 16727 - protein, 483 aa, Staphylococcus aureus VET1860R; identical to SEQ ID NO: 13296

SEQ ID NO: 16728 - protein, 202 aa, Staphylococcus aureus VET1860R; identical to SEQ ID NO: 13267

SEQ ID NO: 16729 - protein, 308 aa, Staphylococcus aureus VET1860R; identical to SEQ ID NO: 13262

SEQ ID NO: 16730 - protein, 483 aa, Staphylococcus aureus VET1861R; identical to SEQ ID NO: 13296

SEQ ID NO: 16731 - protein, 202 aa, Staphylococcus aureus VET1861R; identical to SEQ ID NO: 13267

SEQ ID NO: 16732 - protein, 308 aa, Staphylococcus aureus VET1861R; identical to SEQ ID NO: 13262

SEQ ID NO: 16733 - protein, 483 aa, Staphylococcus aureus VET1865R; identical to SEQ ID NO: 13296

SEQ ID NO: 16734 - protein, 202 aa, Staphylococcus aureus VET1865R; identical to SEQ ID NO: 13267

SEQ ID NO: 16735 - protein, 308 aa, Staphylococcus aureus VET1865R; identical to SEQ ID NO: 13262

SEQ ID NO: 16736 - protein, 483 aa, Staphylococcus aureus VET1866R; identical to SEQ ID NO: 13296

SEQ ID NO: 16737 - protein, 202 aa, Staphylococcus aureus VET1866R; identical to SEQ ID NO: 13267

SEQ ID NO: 16738 - protein, 308 aa, Staphylococcus aureus VET1866R; identical to SEQ ID NO: 13262

SEQ ID NO: 16739 - protein, 483 aa, Staphylococcus aureus VET1867R; identical to SEQ ID NO: 13296

SEQ ID NO: 16740 - protein, 202 aa, Staphylococcus aureus VET1867R; identical to SEQ ID NO: 13267

SEQ ID NO: 16741 - protein, 308 aa, Staphylococcus aureus VET1867R; identical to SEQ ID NO: 13262

SEQ ID NO: 16742 - protein, 131 aa, Staphylococcus aureus VET1868R; identical to SEQ ID NO: 14745

SEQ ID NO: 16743 - protein, 202 aa, Staphylococcus aureus VET1868R; identical to SEQ ID NO: 13267

SEQ ID NO: 16744 - protein, 308 aa, Staphylococcus aureus VET1868R; identical to SEQ ID NO: 13262

SEQ ID NO: 16745 - protein, 483 aa, Staphylococcus aureus VET1871R; identical to SEQ ID NO: 13296

SEQ ID NO: 16746 - protein, 202 aa, Staphylococcus aureus VET1871R; identical to SEQ ID NO: 13267

SEQ ID NO: 16747 - protein, 308 aa, Staphylococcus aureus VET1871R; identical to SEQ ID NO: 13262

SEQ ID NO: 16748 - protein, 483 aa, Staphylococcus aureus VET1872R; identical to SEQ ID NO: 13296

SEQ ID NO: 16749 - protein, 202 aa, Staphylococcus aureus VET1872R; identical to SEQ ID NO: 13267

SEQ ID NO: 16750 - protein, 308 aa, Staphylococcus aureus VET1872R; identical to SEQ ID NO: 13262

SEQ ID NO: 16751 - protein, 483 aa, Staphylococcus aureus VET1873R; identical to SEQ ID NO: 13296

SEQ ID NO: 16752 - protein, 202 aa, Staphylococcus aureus VET1873R; identical to SEQ ID NO: 13267

SEQ ID NO: 16753 - protein, 308 aa, Staphylococcus aureus VET1873R; identical to SEQ ID NO: 13262

SEQ ID NO: 16754 - protein, 483 aa, Staphylococcus aureus VET1875R; identical to SEQ ID NO: 13296

SEQ ID NO: 16755 - protein, 202 aa, Staphylococcus aureus VET1875R; identical to SEQ ID NO: 13267

SEQ ID NO: 16756 - protein, 308 aa, Staphylococcus aureus VET1875R; identical to SEQ ID NO: 13262

SEQ ID NO: 16757 - protein, 483 aa, Staphylococcus aureus VET1877R; identical to SEQ ID NO: 13296

SEQ ID NO: 16758 - protein, 202 aa, Staphylococcus aureus VET1877R; identical to SEQ ID NO: 13267

SEQ ID NO: 16759 - protein, 308 aa, Staphylococcus aureus VET1877R; identical to SEQ ID NO: 13262

SEQ ID NO: 16760 - protein, 483 aa, Staphylococcus aureus VET1880R; identical to SEQ ID NO: 13296

SEQ ID NO: 16761 - protein, 202 aa, Staphylococcus aureus VET1880R; identical to SEQ ID NO: 13267

SEQ ID NO: 16762 - protein, 308 aa, Staphylococcus aureus VET1880R; identical to SEQ ID NO: 13262

SEQ ID NO: 16763 - protein, 483 aa, Staphylococcus aureus VET1884R; identical to SEQ ID NO: 13296

SEQ ID NO: 16764 - protein, 202 aa, Staphylococcus aureus VET1884R; identical to SEQ ID NO: 13267

SEQ ID NO: 16765 - protein, 308 aa, Staphylococcus aureus VET1884R; identical to SEQ ID NO: 13262

SEQ ID NO: 16766 - protein, 483 aa, Staphylococcus aureus VET1886R; identical to SEQ ID NO: 13296

SEQ ID NO: 16767 - protein, 202 aa, Staphylococcus aureus VET1886R; identical to SEQ ID NO: 13267

SEQ ID NO: 16768 - protein, 308 aa, Staphylococcus aureus VET1886R; identical to SEQ ID NO: 13262

SEQ ID NO: 16769 - protein, 483 aa, Staphylococcus aureus VET1890R; identical to SEQ ID NO: 13296

SEQ ID NO: 16770 - protein, 202 aa, Staphylococcus aureus VET1890R; identical to SEQ ID NO: 13267

SEQ ID NO: 16771 - protein, 308 aa, Staphylococcus aureus VET1890R; identical to SEQ ID NO: 13262

SEQ ID NO: 16772 - protein, 483 aa, Staphylococcus aureus VET1892R; identical to SEQ ID NO: 13296

SEQ ID NO: 16773 - protein, 202 aa, Staphylococcus aureus VET1892R; identical to SEQ ID NO: 13267

SEQ ID NO: 16774 - protein, 308 aa, Staphylococcus aureus VET1892R; identical to SEQ ID NO: 13262

SEQ ID NO: 16775 - protein, 483 aa, Staphylococcus aureus VET1893R; identical to SEQ ID NO: 13296

SEQ ID NO: 16776 - protein, 202 aa, Staphylococcus aureus VET1893R; identical to SEQ ID NO: 13267

SEQ ID NO: 16777 - protein, 308 aa, Staphylococcus aureus VET1893R; identical to SEQ ID NO: 13262

SEQ ID NO: 16778 - protein, 483 aa, Staphylococcus aureus VET1895R; identical to SEQ ID NO: 13296

SEQ ID NO: 16779 - protein, 202 aa, Staphylococcus aureus VET1895R; identical to SEQ ID NO: 13267

SEQ ID NO: 16780 - protein, 308 aa, Staphylococcus aureus VET1895R; identical to SEQ ID NO: 13262

SEQ ID NO: 16781 - protein, 375 aa, Staphylococcus aureus VET1897R; identical to SEQ ID NO: 13260

SEQ ID NO: 16782 - protein, 202 aa, Staphylococcus aureus VET1897R; identical to SEQ ID NO: 13267

SEQ ID NO: 16783 - protein, 308 aa, Staphylococcus aureus VET1897R; identical to SEQ ID NO: 13262

SEQ ID NO: 16784 - protein, 483 aa, Staphylococcus aureus VET1899R; identical to SEQ ID NO: 13296

SEQ ID NO: 16785 - protein, 202 aa, Staphylococcus aureus VET1899R; identical to SEQ ID NO: 13267

SEQ ID NO: 16786 - protein, 308 aa, Staphylococcus aureus VET1899R; identical to SEQ ID NO: 13262

SEQ ID NO: 16787 - protein, 483 aa, Staphylococcus aureus VET1901R; identical to SEQ ID NO: 13296

SEQ ID NO: 16788 - protein, 202 aa, Staphylococcus aureus VET1901R; identical to SEQ ID NO: 13267

SEQ ID NO: 16789 - protein, 308 aa, Staphylococcus aureus VET1901R; identical to SEQ ID NO: 13262

SEQ ID NO: 16790 - protein, 375 aa, Staphylococcus aureus VET1904R; identical to SEQ ID NO: 13260

SEQ ID NO: 16791 - protein, 202 aa, Staphylococcus aureus VET1904R; identical to SEQ ID NO: 13267

SEQ ID NO: 16792 - protein, 308 aa, Staphylococcus aureus VET1904R; identical to SEQ ID NO: 13262

SEQ ID NO: 16793 - protein, 375 aa, Staphylococcus aureus VET1905R; identical to SEQ ID NO: 13260

SEQ ID NO: 16794 - protein, 202 aa, Staphylococcus aureus VET1905R; identical to SEQ ID NO: 13267

SEQ ID NO: 16795 - protein, 308 aa, Staphylococcus aureus VET1905R; identical to SEQ ID NO: 13262

SEQ ID NO: 16796 - protein, 483 aa, Staphylococcus aureus VET1906R; identical to SEQ ID NO: 13296

SEQ ID NO: 16797 - protein, 202 aa, Staphylococcus aureus VET1906R; identical to SEQ ID NO: 13267

SEQ ID NO: 16798 - protein, 308 aa, Staphylococcus aureus VET1906R; identical to SEQ ID NO: 13262

SEQ ID NO: 16799 - protein, 483 aa, Staphylococcus aureus VET1908R; identical to SEQ ID NO: 13296

SEQ ID NO: 16800 - protein, 202 aa, Staphylococcus aureus VET1908R; identical to SEQ ID NO: 13267

SEQ ID NO: 16801 - protein, 308 aa, Staphylococcus aureus VET1908R; identical to SEQ ID NO: 13262

SEQ ID NO: 16802 - protein, 483 aa, Staphylococcus aureus VET1909R; identical to SEQ ID NO: 13296

SEQ ID NO: 16803 - protein, 202 aa, Staphylococcus aureus VET1909R; identical to SEQ ID NO: 13267

SEQ ID NO: 16804 - protein, 308 aa, Staphylococcus aureus VET1909R; identical to SEQ ID NO: 13262

SEQ ID NO: 16805 - protein, 483 aa, Staphylococcus aureus VET1911R; identical to SEQ ID NO: 13296

SEQ ID NO: 16806 - protein, 202 aa, Staphylococcus aureus VET1911R; identical to SEQ ID NO: 13267

SEQ ID NO: 16807 - protein, 308 aa, Staphylococcus aureus VET1911R; identical to SEQ ID NO: 13262

SEQ ID NO: 16808 - protein, 483 aa, Staphylococcus aureus VET1912R; identical to SEQ ID NO: 13296

SEQ ID NO: 16809 - protein, 202 aa, Staphylococcus aureus VET1912R; identical to SEQ ID NO: 13267

SEQ ID NO: 16810 - protein, 308 aa, Staphylococcus aureus VET1912R; identical to SEQ ID NO: 13262

SEQ ID NO: 16811 - protein, 483 aa, Staphylococcus aureus VET1913R; identical to SEQ ID NO: 13296

SEQ ID NO: 16812 - protein, 202 aa, Staphylococcus aureus VET1913R; identical to SEQ ID NO: 13267

SEQ ID NO: 16813 - protein, 308 aa, Staphylococcus aureus VET1913R; identical to SEQ ID NO: 13262

SEQ ID NO: 16814 - protein, 483 aa, Staphylococcus aureus VET1914R; identical to SEQ ID NO: 13296

SEQ ID NO: 16815 - protein, 202 aa, Staphylococcus aureus VET1914R; identical to SEQ ID NO: 13267

SEQ ID NO: 16816 - protein, 308 aa, Staphylococcus aureus VET1914R; identical to SEQ ID NO: 13262

SEQ ID NO: 16817 - protein, 483 aa, Staphylococcus aureus VET1917S; identical to SEQ ID NO: 13296

SEQ ID NO: 16818 - protein, 202 aa, Staphylococcus aureus VET1917S; identical to SEQ ID NO: 13267

SEQ ID NO: 16819 - protein, 308 aa, Staphylococcus aureus VET1917S; identical to SEQ ID NO: 13262

SEQ ID NO: 16820 - protein, 483 aa, Staphylococcus aureus VET1923S; identical to SEQ ID NO: 13296

SEQ ID NO: 16821 - protein, 202 aa, Staphylococcus aureus VET1923S; identical to SEQ ID NO: 13267

SEQ ID NO: 16822 - protein, 308 aa, Staphylococcus aureus VET1923S; identical to SEQ ID NO: 13262

SEQ ID NO: 16823 - protein, 483 aa, Staphylococcus aureus VET1949S; identical to SEQ ID NO: 13296

SEQ ID NO: 16824 - protein, 202 aa, Staphylococcus aureus VET1949S; identical to SEQ ID NO: 13267

SEQ ID NO: 16825 - protein, 308 aa, Staphylococcus aureus VET1949S; identical to SEQ ID NO: 13262

SEQ ID NO: 16826 - protein, 483 aa, Staphylococcus aureus VET1950S; identical to SEQ ID NO: 13296

SEQ ID NO: 16827 - protein, 202 aa, Staphylococcus aureus VET1950S; identical to SEQ ID NO: 13267

SEQ ID NO: 16828 - protein, 308 aa, Staphylococcus aureus VET1950S; identical to SEQ ID NO: 13262

SEQ ID NO: 16829 - protein, 483 aa, Staphylococcus aureus VET1956S; identical to SEQ ID NO: 13296

SEQ ID NO: 16830 - protein, 202 aa, Staphylococcus aureus VET1956S; identical to SEQ ID NO: 13267

SEQ ID NO: 16831 - protein, 308 aa, Staphylococcus aureus VET1956S; identical to SEQ ID NO: 13262

SEQ ID NO: 16832 - protein, 375 aa, Staphylococcus aureus VET1959S; identical to SEQ ID NO: 13260

SEQ ID NO: 16833 - protein, 202 aa, Staphylococcus aureus VET1959S; identical to SEQ ID NO: 13267

SEQ ID NO: 16834 - protein, 308 aa, Staphylococcus aureus VET1959S; identical to SEQ ID NO: 13262

SEQ ID NO: 16835 - protein, 483 aa, Staphylococcus aureus ZTA09/03576-8HST; identical to SEQ ID NO: 13296

SEQ ID NO: 16836 - protein, 202 aa, Staphylococcus aureus ZTA09/03576-8HST; identical to SEQ ID NO: 13267

SEQ ID NO: 16837 - protein, 308 aa, Staphylococcus aureus ZTA09/03576-8HST; identical to SEQ ID NO: 13262

SEQ ID NO: 16838 - protein, 483 aa, Staphylococcus aureus ZTA09/03734-9HSA; identical to SEQ ID NO: 13296

SEQ ID NO: 16839 - protein, 202 aa, Staphylococcus aureus ZTA09/03734-9HSA; identical to SEQ ID NO: 13267

SEQ ID NO: 16840 - protein, 72 aa, Staphylococcus aureus ZTA09/03734-9HSA; identical to SEQ ID NO: 14720

SEQ ID NO: 16841 - protein, 483 aa, Staphylococcus aureus ZTA09/03745-9HSA; identical to SEQ ID NO: 13296

SEQ ID NO: 16842 - protein, 202 aa, Staphylococcus aureus ZTA09/03745-9HSA; identical to SEQ ID NO: 13267

SEQ ID NO: 16843 - protein, 72 aa, Staphylococcus aureus ZTA09/03745-9HSA; identical to SEQ ID NO: 14720

SEQ ID NO: 16844 - protein, 483 aa, Staphylococcus aureus ZTA10/00045-9HST; identical to SEQ ID NO: 13296

SEQ ID NO: 16845 - protein, 202 aa, Staphylococcus aureus ZTA10/00045-9HST; identical to SEQ ID NO: 13267

SEQ ID NO: 16846 - protein, 308 aa, Staphylococcus aureus ZTA10/00045-9HST; identical to SEQ ID NO: 13262

SEQ ID NO: 16847 - protein, 483 aa, Staphylococcus aureus ZTA10/00047-8HST; identical to SEQ ID NO: 13296

SEQ ID NO: 16848 - protein, 202 aa, Staphylococcus aureus ZTA10/00047-8HST; identical to SEQ ID NO: 13267

SEQ ID NO: 16849 - protein, 308 aa, Staphylococcus aureus ZTA10/00047-8HST; identical to SEQ ID NO: 13262

SEQ ID NO: 16850 - protein, 483 aa, Staphylococcus aureus ZTA10/00058-8HST; identical to SEQ ID NO: 13296

SEQ ID NO: 16851 - protein, 202 aa, Staphylococcus aureus ZTA10/00058-8HST; identical to SEQ ID NO: 13267

SEQ ID NO: 16852 - protein, 308 aa, Staphylococcus aureus ZTA10/00058-8HST; identical to SEQ ID NO: 13262

SEQ ID NO: 16853 - protein, 483 aa, Staphylococcus aureus ZTA10/02412-8HSA; identical to SEQ ID NO: 13296

SEQ ID NO: 16854 - protein, 202 aa, Staphylococcus aureus ZTA10/02412-8HSA; identical to SEQ ID NO: 13267

SEQ ID NO: 16855 - protein, 308 aa, Staphylococcus aureus ZTA10/02412-8HSA; identical to SEQ ID NO: 13262

SEQ ID NO: 16856 - protein, 483 aa, Staphylococcus aureus ZTA11/00189-8HSA; identical to SEQ ID NO: 13296

SEQ ID NO: 16857 - protein, 202 aa, Staphylococcus aureus ZTA11/00189-8HSA; identical to SEQ ID NO: 13267

SEQ ID NO: 16858 - protein, 308 aa, Staphylococcus aureus ZTA11/00189-8HSA; identical to SEQ ID NO: 13262

SEQ ID NO: 16859 - protein, 483 aa, Staphylococcus aureus VET0465R; identical to SEQ ID NO: 13296

SEQ ID NO: 16860 - protein, 202 aa, Staphylococcus aureus VET0465R; identical to SEQ ID NO: 13267

SEQ ID NO: 16861 - protein, 308 aa, Staphylococcus aureus VET0465R; identical to SEQ ID NO: 13262

SEQ ID NO: 16862 - protein, 487 aa, Pseudomonas sp. AAC
MTKAALNRFLNEYPDALNDGVGAIFVGAGVSMAAGYPSWAELLSDIAVELEVDSKNVHDLAALAQWSILENGGATRVRNVIKNEIGPDKPIPETVEIISRLPVRHIWTTNYDRLIERAFESISRPLNPISSPKDLALRVTPGAVLLYKMHGSVDRLDDVVISTDDYELFRSKRGQYLPLFQAHLTSMSMLFIGISFTDPNVRHVLSLIRESFTDAPPEHFAIVRAPQKSDFKTEGEFAARNAQHKLWAKDLKRYGLLAVEVNDYAEIPALLRQIGKRVASRRIWVSGSWPLERGGSESADIHALAEDIGRRIGETGRHLVTGAGRLVGSASLSGFLGALRQGGGWDLERRLIARPFPQPLAGAQPNNEEWAALRQELARQAGIAIFIGGAKLAGDKLEVAQGVEQEFEVAKAAGVFLLPVGASGGAAKKISDLLLGSELSSSGQDAVRPTDKELKVLSAPGLLDSKEGRRKLVSQVFEIIDRIARAT

SEQ ID NO: 16863 - protein, 167 aa, Pseudomonas sp. AAC
MARNVFFSFHFKNDFWRTQQVRNIGALDGQKLYTPNDWEGVKKKGNAAIEKWIDDSLVGKTCVVVLVGSETASRPWVVNEIIKGWNAGKGVVGIRINKLLDANGNSSVAGSNPFDLVTLKNGTVSLSNYARLITPVGADSKAVYASIQENIEQWIEDAIAVRKNYKP

SEQ ID NO: 16864 - protein, 183 aa, Pseudomonas sp. AAC
MARNVTKAELRAFTANRSQSDREKLLKSNASSSGTSTFLSHSSKDHELLEGAMEVLHNHGARVYIDEIDPEMPPYTSAETAALLKQRISQTRRFVLLTTENSKDSRWVPWELGIADGEKSLLNIALFPASDSTYDDNWTSWEYLGLYHRIVWGKLSGYENELWMVLDAKANTAVTLRKWLTGC

SEQ ID NO: 16865 - protein, 487 aa, Parabacteroides sp. HGS0025
MEFSTKQKAFINAFATEIINGDAAIFAGAGLSAPLGFVNWKNLLKDLAEEINLDINKESDLVSVAQYHFNKFKRGKINNKIVNEFTTLKKGSVNHEILARIGIDTFWTTNYDQLIEKTLEAEGKTVEIKIRNEDFSRNIKKKNAIVYKMHGDKNSPDDAVLIKDDYETYNDKREFFSTSLRGDLLSKTFLFIGFSFDDPNLEYILSRIKVLLKDNTPTHYCFFKEVLAEDFNDPNLTKEKNNENYLYAKIKQELKIDDLLRYGIHAVMIRQYNEITSILLEIEKKIKRRNIFVSGAAHIYDPYTPDEAKELIHQLSYKLAENEYKIVSGYGLGIGSVVINGALEFKLSSNYRNLDDLLILRPFPQIQSGSKTIPEIWTDYRKDMISKAGIAIFMFGNKVNANGEVVHSNGMEEEFNICLEYGVFPIPIGVTGFISKALWDDVMINIDKYYPNNFELKNAIKKIGDSTTSIEMIITNVIKAINILQKI

SEQ ID NO: 16866 - protein, 160 aa, Parabacteroides sp. HGS0025
MAKRQFFYSFHYDNDVFRVQQIRNIGALEENKPVSANEWETVKKGGDAAIKRWIDDNMKYKSCLVVLIGSETASRPWVDYEIRKAWNDGKGVLGIYIHNLKCPRNGKCRQGANPFDNIYFTDGKTKLSSVVKTYNPNSFDAYNDIANNLENWIEAAISAR

SEQ ID NO: 16867 - protein, 186 aa, Parabacteroides sp. HGS0025
MAIFTKQEFESIARIKAGYKGLSSVLNESRFYSKASALTSLFLSHSHYDKAIVEQAKIFFENLGISIYVDWADETMPEKTNGITATRIKSKIITNDKFVLLATNSAVISRWCNWEVGIGDTYKLNSDKICILPLSDNKNDWNGNEYLQIYPRIEPVYKDSYSFYDNIFKVIYPDGHSTWLDDWLKK

SEQ ID NO: 16868 - protein, 481 aa, Parabacteroides sp. HGS0025
MKAEFEPFVRDFVNHLRDNNVAIFAGAGLSKAAGYVNWKELLEEIAEDVGLKIELEEDLISLAQYHVNQNNRHKINQKILDEFVEGSNPTENHVILSRLPIATYWTTNYDKLLEDSLAKNHKRYDVKIRETDFHHSIHRRDAVIYKMHGDVSNPSEAVITKEDYERYYLYHNSFLTALNGDLTTKTFLFLGFSFTDPNITYIISRLNNVIDKKSSRQHYLFLKRPVIGDSNITNEAELDYAKTKQRLLIDDLKIRYNIKALLIDEFSEITDVLKEIERRYKKQTIFISGSSCGEYGRFGEKRATDFIHNLTKQIIQKSYTIVNGFGVGVGSAVINGALDAIDSEPQKFSDSQLVMKPFPQFVPEGKNIQELWEAYRKRIIPIAGIAIFVFGNKKDTTGNVVLADGVKKEFNIAIENGVIPIPIAATGYMSKEIFDLISEDSSKYLAPYNWLWKELCQMNSDVISENEIIDKVINIILKLNK

SEQ ID NO: 16869 - protein, 163 aa, Parabacteroides sp. HGS0025
MGRRVFTSFHYIPDNWRASQIRNMGKIEGNGIVSANKWEEVTKGGNKAIEKWIDDNMSGKSCVIVLVGENTANRKWIDYEIKKAWEEERGIFGIYIHNLKDRDGNQANKGDNPFDGFTINGKSMSSIVKCYNPPYKTSTNVYEYIENNIEDWIEEAIEIRDKY

SEQ ID NO: 16870 - protein, 181 aa, Parabacteroides sp. HGS0025
MAIITKNRLSEISNNKSGGYTQKSIILNESRSYSRGFYKTSIFLSHSHLDRDYITDTVVFLRKMGVNVYIDWMDDNMPKETSGKTADILKQKIKENDKFIFLATNNSISSKWCNWEIGFGDAHKYIDRIALLPLADNYTEWKGNEYLQIYPHIVESDYTNDYYKVIFPDGKEMSLYEWLNR

SEQ ID NO: 16871 - protein, 478 aa, Klebsiella pneumoniae
MTFSNEIEVFIKDFVKDLENDCAAIFSGAGMSKNQGYVDWKELLSDIAEELSLDINKEDDLISLAQFHVNEKKGATKLTRKIIEEFSEQAEPSEVHNIIARLPIKTFWTTNYDTLIEDSLRKVYKIADIKRNIDDLNTTRPKRDAIVYKMHGDISSPSKAILYKEQYEKYYRTHASFITALSGDLISKTFLFIGFSFTDPNLDYILSRLYTHSGDKRTHYCFMKNEANNSLDDEETVAYKIRKQKLRIDDLKRFGIQVLLIDEYSDIPIILAKIEQSFKKKTIFISGSAEKYGGLERPKALDFIHTLSYEIIKNNYRIVNGFGWGVGSSVINGALDAIYSRPDKLSEEQLIVRPFPQTVSKGKDIQELWEEYRQRMIPLGGIALFIFGNKQEENNDIVNARGVFREFEIAVQHGLVPIPLPNTGYMSEYIFKQISQDPKKYYGSNEWIYNDLSELTEKDFSVKKTIEAVIKIINKLNK

SEQ ID NO: 16872 - protein, 203 aa, Klebsiella pneumoniae
MAHETFISYKYSEAQDLRDKIVKALGDDAVYYKGETSESPDISNTTVDNIKNNLKNMIFGTSVLIVIISPNMIKSKWIDWEIEYSLKEYKRGGTTSRTNGIVGVIMKVNNSYDWLVSSSINPDGCSSRTIDTTKLYDIINNNRFNLTSEDKYCCPECKSYDQLTGSYISLIEEDRFLADLSSYIENAYDKSKKLSSYNLSKQK

SEQ ID NO: 16873 - protein, 484 aa, Serratia marcescens
MPERDIELFIRDYVNDIKAGSAALFAGAGLSIPAGFVSWKELIGDIAYELGLDIEKESDLISLAQYHLNEKGNRHKINQKIITEFAVQAEETENHRIIARLPIASLWTTNYDDLIEKTYARYNRVCDVKTTPESLTNNIHKRDVVLYKMHGDYRTPNQAIITREQYETYSRTHLPFINMLMAELTAKTFLFIGFSFEDPNLQYVLSRLYAQYGEGKRNHYCIMRRVQPGDSGSEDQASYDYNSRKQSLMINDLRRYGIQTLLVEDYRQITDLLYAIETQFKKSTVFISGSADNYHPYAREESIQFIHRLARLLIRKQYRIVNGFGWGVGTAVINGALEAIYASGGKISESQLVLRPFPQFASGGITLPALWHEYRQNMISLSGIAVFLFGNKRNAEGECVLADGLLKEFHIAAEQGCVCIPIGCTGGASAEIYRKIKEEMKDTLYHRHPVAMNLLDQLNEPGSLAEKKTCLLALIDIITKDNPR

SEQ ID NO: 16874 - protein, 163 aa, Serratia marcescens; identical to SEQ ID NO: 14126

SEQ ID NO: 16875 - protein, 480 aa, Bacillus sp. SGD-V-76
MKYDASIKEFLRTYVKEIQDSNAAIFAGAGLSRPAGHVDWKDLLRDVAEDLQLDIDQEADLIAVAQYHVNEFNGRNKINQVLIDEFTKSVSITENHKILSQLPIDTYWTTNYDQLIESTLEATGKKVDKKITSENLTYSVPGSDAKVYKMHGDSSLPHDAVLTKDDYEGYDQKREIFSTALRGDLVSKTFLFIGFSFDDPNLSQILSKIRILLNTNTRTHYCFMKKIDINEYKNEEEFLYAEIKQDLKIKDLKRYGIKVLLVDNYSDVTDILHHVSSLVKRKNIFVSGSASDYGRWSETQAFEFSTLLSRSLIKSNNNVVSGFGLGIGSCIISGALEELYSSQNNKVEERLKCRPFPQVTTGQISKSELWTKYRKEMLSNVGIAIFIFGNKIDMKTKKVIGASGMNEEFKISIENGAIPIPIGATGFTSNELWQEVMKDFDKYVGIEKLKPLYNDLGDDTKTPEELIETVIKIISQLAKH

SEQ ID NO: 16876 - protein, 202 aa, Bacillus sp. SGD-V-76
MARKTFISYKYSESKDLRDKILESLGEDAEYYQGETSESPDMSDRTTDYIKDKLKDMIYSTSVTIVIISPNMKLSKWIDWEIEYSLKQIKRNDRTSGTNGVLGIVMKHNGGYSWLRSSVTNHDGHSSIHTNNEYLYDIIHKNRFNQEPPEYTCDVCKIVNSLTGSYISLVNEEDFLKDPNQYIDNAYDKSKNTGNYNLTRKR

SEQ ID NO: 16877 - protein, 484 aa, Novosphingobium sp. Fuku2-ISO-50
MAVAATTKRFLKDYPEALIGGGAAVFVGAGVSMGAGYPSWASLLTEVGEELGVKSGELHDLAALAQWSIQENGSATRVRNVIKEQIGVEHAVPAALEIIARLPVKFIWTTNYDRLVERAFGHVNRPIDTVSGAADLTLRATPGATRLFKMHGSIERLDDVVISTDDYELYRSKRGAFLPLLQAHLSSMSMLFLGISFTDPNIRHVLSLIRESFTSAPPEHFAIVRPPQRDDYKTDAEFEARSTQHKLWSRDLKRYGLVVVEIDNYGEVPELLWQIERRVAARRVWVSGSWPPEAGHEIARVYNVAQAVGRLVGDRNRDLVSGAGLVVGSASIAGFLDALRSSGGWDLERRLIARPFPQPILGKAPDGAQWAALRAELARIAGVVIFIGGMKIEPSTGSTVIAAGVLDEFEAAKTADCFLIPIGSTGGAAAQISDSLIGSAIEASGHTALRPMDDELKELARVDITVEEIVKLVAEILKRIDRQV

SEQ ID NO: 16878 - protein, 165 aa, Novosphingobium sp. Fuku2-ISO-50
MARRVFFSFHFDNDYWRTQQVRNMGALEGQPVCTPNVWEEVKRKGRASIEKWIADNMHGKSCVVVLVGSETASRPWVIHEIIKAWDDRRGVLGIRVDRLLDRHSQTSIAGANPFDKITIGGTNSKLSSVAPLITPSGSDSKSVYASISNGIEKWIEDAIMIRGRN

SEQ ID NO: 16879 - protein, 184 aa, Novosphingobium sp. Fuku2-ISO-50
MAEYITREELRSYAAEMGTVEIARVRKAAASRSLAGSTFLSHSSKDDDLVAGAIRVLESHGAEVYVDEIDPEMPPYTSEKTAALLKTRIRDTSRFVLLASKNSKESKWVPWELGIADGMKGTPKIALFPASDSSYDKAWASWEYLGLYDRIVWGKLEGYQNEVWMVIDENNNTGTELRKWLTGY

SEQ ID NO: 16880 - protein, 259 aa, Novosphingobium sp. Fuku2-ISO-50
MFRGFELSVKEDFLSVYKSIGASQHEYNKRRVDECLNRFRDGSGDLLAAKMTAEWFPEIDAQVFISHAHKDSALALGLAGHLHKGFGLKSFVDSAVWGYSDDLLRILDDAFCYNETSGTYSYAKRNRSTSHVHMMLSVALSRMIDRCECIIFINTPQSITSRDYIKGDKTDSPWIYSEIAMTRLIKKRSREDHRGTESLLATESLGTDTRLRVRYDVDLDHLSKLDGATYGMWTIRSHGRAGATALDTLYDLVPPSPIE

SEQ ID NO: 16881 - protein, 476 aa, Streptococcus oralis
MDKELFIREFSKAIHEGNAAIFAGAGTSVSAGFVNWKELVRPFSVEIKLDIEKETDLIGVTQYYINTKRNRAKVNQRIFNTFLSREAETDVMNLLTRLPISTYWTTNYDTVIEKGLENNHRKGDIKRKETNLTYSVPDRDAVVYKMHGDVMLPEEAVISKDDYARYSDDHSLFITALHGDLVSKTFLFVGFSFEDPNLDSILGKLHVLLKEDTREHFCIQKKVSKSDFYDPEEAEEVTNDKFAYALIKQDLKIEDLRRYGIETVLVDEYSEIPELILRIEKEYLKNTIFISGSISSYDTTWSEESVNKYCYDLSKYLVSQNYKIISGFGLGVGSSIINGALDEIYKSKYRHVNEHLGLFPFPQYENGEKSLQERWTENRKEMISSAGVCIFIFGNKIDANGEIVDATGMLEEFYLASETGKIIIPIGSTGFTAKKIFDRMKASDKFRYLDKYWDILESGDDSKKVFSAIDSIIKGT

SEQ ID NO: 16882 - protein, 207 aa, Streptococcus oralis
MATKVFISFRYSDGKNIKDELVDLFDESTEIINRSEDVDRNQMSEETIQKYLYEKLKDTSVTILLLTPEAVSYKKDWYGEYDDWLYDELRYSLEDRTNNRTNGVVAVYTDGARDKLFIEDNHYCSCCQQNQPCKILKDFDNLARKNMLNIKPNFKKELCNNLYSDEYDSYISLVSLEVFKKDYKKYIDNAKEKRDRLEEFEIKKRMD

SEQ ID NO: 16883 - protein, 477 aa, Enterobacter asburiae; identical to SEQ ID NO: 13632

SEQ ID NO: 16884 - protein, 146 aa, Enterobacter asburiae; identical to SEQ ID NO: 13630

SEQ ID NO: 16885 - protein, 161 aa, Enterobacter asburiae
MPIRQSDLLNAGQRGQFSKRFGQPTAFLSHSHKDAQLALGLQALLNDQGWGVYIDWQDQTMPDKPDTETALNIKSAIVRADWFLFLATQHSTTSRWCPWEIGFADGKKVYDRIAIIPTQDNLGHFYGNEYLNLYNKIDVSSGHTGLAFFDTRGNGKWVRNL

SEQ ID NO: 16886 - protein, 486 aa, Listeria monocytogenes; identical to SEQ ID NO: 14113

SEQ ID NO: 16887 - protein, 202 aa, Listeria monocytogenes; identical to SEQ ID NO: 14114

SEQ ID NO: 16888 - protein, 480 aa, Bacillus cereus
MKYDPSIQEFLRTYVKAIQDSNASIFAGAGLSRPAGYVDWKELLREVAEDLQLDIDQEVDLIALAQYHVNEFNGRSKINQILIDEFTRCVTTTDNHKILSQLPISTYWTTNYDQLIESNLVAVGKKVDKKITPENLSYSVPGSDAIVYKMHGDSTLPHDAVLTKDDYEGYDQKRKLFGTALRGDLVSKTFLFIGFSFDDPNLSQILSKIRILLNENARTHYCFMKKVNIDDYDTEEEFRYATIKQGLKIKDLKRYSIKVLLVNDYPEVTGILKHIASLVIRKNIFVSGSASDYGEWGEKVSFEFSTSLSKALIKNNNNIVSGFGLGLGSCIVSGALEELYSGQNNKVEERLKCRPFPQVTTGQLSRTQLWTKYRKEMLSNVGIAVFIFGNKIDTNTQEIIDANGMVEEFEISVGNGAIPIPVGATGFTSKVLWKKVMDDFDNYVGIEELKTLYIDLGDTNKTPKELIETVIKIINQLAKH

SEQ ID NO: 16889 - protein, 202 aa, Bacillus cereus
MAYKTFISYKYSEAKGLRDTIVNALGDGGKYYQGETSESPDLSDKTTDYIKDRLKDMIYSTSVTIVIISPNMNLSKWIDWEIEYSLKEIKRNDRKSGTNGILGVVMKYNGGYSWLRPSVTNSDGHTSIQTNNQYLYDIIHKNRFNQNPPEYTCDECEIVNSLTGSYISLINEEDFLKDPNKYIDNAYDKSKNTSNYNLTKKK

SEQ ID NO: 16890 - protein, 480 aa, Bacillus cereus; identical to SEQ ID NO: 16888

SEQ ID NO: 16891 - protein, 202 aa, Bacillus cereus; identical to SEQ ID NO: 16889

SEQ ID NO: 16892 - protein, 480 aa, Bacillus cereus; identical to SEQ ID NO: 16888

SEQ ID NO: 16893 - protein, 202 aa, Bacillus cereus; identical to SEQ ID NO: 16889

SEQ ID NO: 16894 - protein, 477 aa, Bacillus cereus; identical to SEQ ID NO: 13302

SEQ ID NO: 16895 - protein, 226 aa, Bacillus cereus; identical to SEQ ID NO: 13303

SEQ ID NO: 16896 - protein, 488 aa, Candidatus Magnetobacterium bavaricum
MSIDKKIFIREFVKAIEEKNAAIFAGAGLSKDGGFVDWKGLLRLIADEIGLDVDKECDLVAVAQYCINNRGGNRGFINQILIEEFTKKVSISKNHKILSKLPIDTYWTTNYDKLIEKVLEENGKTVDVKITQTNLATNKPKRDAIIYKMHGDVDQIADAVICKDDYETYNLRRQLFTTALQGDLVSKTFLFIGISFDDPNIDYILSRIKTLLGHNKREHYCIFRKVNENDNVYAKDRDKFIYDQTKQDLRIKDLQRYSINVVLVDDYTEITGILEQVEKLYRKKIVFISGSANSYGYWETEKALKFVKDLSHKLVSDGNKLVSGYGLGIGSTVITGALEYIFSTRYRHLDEHIMLYPFPQISTTTSPKQLEELFSKYRHEMISNAGVAIFIFGNKIKGGIEVIADGVLKEFDIAFEHGLNVIPIGATGFAAEELWNKVNGDFVKYYGDNDKIKPLFQKLGDKGATSEELIDSVIKMLHILQQSNVKGV

SEQ ID NO: 16897 - protein, 162 aa, Candidatus Magnetobacterium bavaricum
MRYVFFSFDYDRDIWRVSVVRNHWVTKGNSEIAGYVDKAEWEAVKKNTSDVIKKWIDKQLEDTSVTVVLIGAKTSYSQYVQYEIEKSMERGNGFLGIYINNIKNSDGETDSKGSNPLDNFKENRGGKQTLLSKIYPPYDWVNDNGYDNFPKWVEAAAKKVGR

SEQ ID NO: 16898 - protein, 475 aa, Clostridiaceae bacterium BRH_c20a
MAVSLTEFKREYTKAVSEGYAAIFAGAGLSRSSGYANWKELLRTIAKDIGLDIDKETDLVAVAQYYKNEKGSRRDGINQKIINEFTKNAQQNVNIEILTRLPISVYWTTNYDELIEDNLKLNNRKPDIKTNQDSLANNFYDRDAVVYKMHGDVRNPSEAVITKDDYETYNQKRALFTTALQGDLISKTFLFIGFSFEDPNLEYILSRIKVLLGENTRTHYCFLKKIVIDDYENDDEFKYAMIRQDLKVKDLSRYGIEAVLLDDYCQITDILMEIENNCRLSNVFISGSAAVYGDNWSEKAAISFMHNLSKRLVGENYRVISGFGLGVGSVVINGALEEIMLSKYKHVDEHLCLRPFPQIQSGTKSLKELWEEYRQEMIEHSGIAVFIFGNKETQDGVVLANGMIREFEIAKEKQKYIIPIGSTGYAAKQILDEVEAAIGDYPYLLNYLEVLKTETDENKLISAVLDIISDIRGDL

SEQ ID NO: 16899 - protein, 160 aa, Clostridiaceae bacterium BRH_c20a
MARKVFFSFHFERDSWRAGQVRNSGVTKENSGFIDAAAWEEVKKKGDKAIKDWIDDQLKGTSVTVILIGKETADRKYVKYEIQKSEEKGNGFVGIYIHDLENKDKEKEAKGTNPLTMFYYEKDGKKIYLSDIYKSYYWKKDDGYKNFGKWVENAAKLAGR

SEQ ID NO: 16900 - protein, 228 aa, Clostridiaceae bacterium BRH_c20a
MGRKIFISYKYSDNNVYNITGSIWGSTVRNYVDKIEEIIDDSDHIYKAESEGEDLSYLSEEQIWEKLKDRIYDSTLTIVLISPNMKEWFKEEKDQWIPREVSYSLKAISRKNKNGDAVTSSENAILAVVVPDRNNSYSYYLNYKSCCSGGCRMLQNSTIFKILANNMFNIKNPDKKECDDSSVIYYGDSSYISVVKWDDFISKMDSYINKAYEIKENIDNYNICKEIS

SEQ ID NO: 16901 - protein, 478 aa, Escherichia coli; identical to SEQ ID NO: 13308

SEQ ID NO: 16902 - protein, 203 aa, Escherichia coli; identical to SEQ ID NO: 13309

SEQ ID NO: 16903 - protein, 481 aa, Vibrio parahaemolyticus; identical to SEQ ID NO: 13362

SEQ ID NO: 16904 - protein, 200 aa, Vibrio parahaemolyticus; identical to SEQ ID NO: 15055

SEQ ID NO: 16905 - protein, 191 aa, Vibrio parahaemolyticus; identical to SEQ ID NO: 13364

SEQ ID NO: 16906 - protein, 479 aa, Lactobacillus plantarum; identical to SEQ ID NO: 13525

SEQ ID NO: 16907 - protein, 209 aa, Lactobacillus plantarum
MAHKTFISYKYSEARDLRDKIISHLGEDAQYYKGETADSPDLTDEKTDSIRKYLKDMIYDTSVMIVIISPNMKYSNWIDWEIEYALKNIKHGDQTSHSNGILGIIMNNPNENWFRYEEKKPDGDNCYAYNTDYVYEIINDNRFNQNPKEYSCEVCKTVDSLTGSYISFITEDDFFSDPNKYIDNAFDKSQKIDNYDIKKYVNEDHIATL

SEQ ID NO: 16908 - protein, 478 aa, Enterococcus faecium MRSN 3418; identical to SEQ ID NO: 13220

SEQ ID NO: 16909 - protein, 161 aa, Enterococcus faecium MRSN 3418; identical to SEQ ID NO: 13221

SEQ ID NO: 16910 - protein, 283 aa, Enterococcus faecium MRSN 3418; identical to SEQ ID NO: 13222

SEQ ID NO: 16911 - protein, 480 aa, Candidatus Uhrbacteria bacterium GW2011_GWF2_41_16
MEQHLIRFVDTYTKAIKENNAAIFAGAGLSIPAGFVNWKDLLRDIAADLNLDIDKENDLIAVAQYHFNEKGNNRHKLNQLLIDEFTQGTSVTQNHKILAALPIQTYWTTNYDKLIEKAIEEEGKTPDIKITPENLSNNIHKRDAVVYKMHGDVSLPDKAILTKDDYEGYNENRLLYTTALQGDLVAKTFLFIGFSFDDPNLEYILSRIRILLGQNQRNHYCFFKKINRKDFKKKADFKYAEVQHKLKINDLKRYSINALLIDDYADITEVLSAIKKKVLRSNIFISGAAKIYDPRTEKDALSFVHKLSYRISSEGYKIVSGVGYGIGSAVINGATEYVFSTKYRHLDNALVLRPFPQIVTGRRKKEERNLEYRNEMMRHAGIALFIFGNNDNGKGGWEHSKGMVEEFKVAVQQGAIPIPVGATGYASEKLWNKVMASPTDYYPNNSDLLDSIKQIGDKSLPDDELINQILKAISILQNHF

SEQ ID NO: 16912 - protein, 168 aa, Candidatus Uhrbacteria bacterium GW2011_GWF2_41_16
MGTKRQIFYSFHYDNDVFRVQQIRNIGALEDNKPVSANDWETVKKGGDKAIEKWIDDTMKGRSCLVVLVGSDTSKRKWVDYEIRKAWDDGKGVLGIYIDDLVDPRYSKTPPFFGKSLRGTNPFNNISLKSGKVLSSIVKCYAPPPIDTYKNIAANLETWIEEAIKMRQ

SEQ ID NO: 16913 - protein, 393 aa, Candidatus Uhrbacteria bacterium GW2011_GWF2_41_16
MGGTKRQFVNMYVKFTQRFKKPFDSIAKLMPINFSDNEFLKCFKTLYEYFWIDIEREYSYWEKKNDDLIHYGKKSRYDFPKPEEFVLKNSVHVRTKYRNNHKTGVILPKEEQEMLYIRLSNHNQIKLNSKKNKEFEKLELVQEIEPKFVQEYINKYFCLRNISQDIIDEKFKIIREIAKYKADKTVKFLQKVNAKETNYSLKQEAFKSLQQLNEKVILRRKKMGKKKESVEAIYNTTDSPDNLIEKLNDNTLEKIKSFDVFLSHSSSDRKKVILLYKNLNSKKLHVYIDWVNDSDALKRNLSNRNTANVIIERLKKSKMLIYCHTEASMKSQWASWEIGYFHGIGRQIFVFNPDNFELPDFLKVYPKLIEKDSEYYIENKSEKITLNNWIFNK

SEQ ID NO: 16914 - protein, 484 aa, Serratia marcescens
MFNRDIELFIRDYVNDIKAGSAALFAGAGLSIPAGFVSWKELIGDIAYELGLDIEKESDLISLAQYHLNEKGNRHKINQKIITEFAGQAEETENHRIIARLPIASLWTTNYDDLIEKTYARYNRVCDVKTTPESLTNNIHKRDVVLYKMHGDYRNPNQAIITREQYETYSRTHLPFINMLMAELTAKTFLFIGFSFEDPNLQYVLSRLYAQYAEGKRNHYCIMRRVQLGDSGSEDQASCDYNSRKQSLMINDLRRYGIQTLLVDDYRQITDLLYAIETQFKKSTVFISGSADNYHPYAREESIQFIHRLARLLIRKQYRIVNGFGWGVGTAVINGALEAIYDSQGKISESQLVLRPFPQFASGGITLPALWHEYRQNMISLSGIAIFLFGNKRNAEGEYVLANGLLKEFQIATEQGCVCIPIGCTGSASAEIYRKIKEEMKETLYHRHPTAMNLLDQLNEPGSLAEKKKCLLALIDIITKDNPR

SEQ ID NO: 16915 - protein, 163 aa, Serratia marcescens
MTRKCFYSFHYEPDNWRASQIREMGTLEGNRPATDNDWEEVKKGGDKAIADWIKSQLDNRSCAVILAGKDTANRKWINFEICEAWKKGMGVLVVYIHNLKDSAGDQTEKGKNPLDHIKLGDTKLSAIAKAYDPPYLTSTNVYNHIKENLAEWVEEAIRIRANY

SEQ ID NO: 16916 - protein, 586 aa, Bacillus cereus
MDNQLMSLSFSMEANKGVYALLLGSGISYSADIPTGWGILKELCRRIMELNKETHEDPIQWYQNYYSQTPAYDEVIEMLAKTSTERVGLLAEFFEPQEGDEAYVKRPTKAHKEIAKLVKEGFIKVIVTTNFDRLMEQALDELDIQYQTLYHESDIDGMKPLTHANCTVLKIHGDYRDTRFKNVSNELKEYPPVLSNLLKQIFDEYGIITSGWSAEWDTALRDTIKSVKGRRYSWYWHAYNETLCEQAESLLKWRDGIKIVNGNGADSFFSLLSENVESISKLKKSSPENVQMKINKLKKFITNDLEIELYEMMTEETQMLVQFIKSLDFNVSATSETKGEYIEKIKEKSRTLAIMLTILTYYSRNKKHESIITETLERLTTAMAREGVTTFICFSKLPAIIGLYSAGIAAVMKKNYKLLNKLFMEIRVRTNLYRPETFLEFTASSGDIYIAFRDLYSEKRWHLPFEKMFMQPYMSDIYANSKLTFDEQELNNHYDTFELLLALKHRHLNTHRFFSGIFGYKDDKLYISHFLRLGAEEKENWQVLELFDNSIENFKKSLEILTGDLNREMYFDGYPLLSSYQTAMES

SEQ ID NO: 16917 - protein, 325 aa, Bacillus cereus
MHSSPEKVFVSYSWDSEEHKQWILELVRKLRSEGYDANFDRGITSTSTVNLNQMMVEHMRDDDYIIMVLTEKYTVKADGFVGGVGFETLLSLPIIQQNLDKLIILTRQPAVLQKVIPFHLQGINYIDFSNPAEFDTKFEELVYRLQKVPMFDLGPIGEKKLRKPKVHGNSAATVLNDVKVPRLSPPTDLERNSFIEENFNLIINGLDEILNILQSQNPNFIYQKQNITSDKVMYSFYLNGQSSGNLKIWLGNLFSSAKQIQFSVGRYVDISNDNSMNGSINVEIDQEYNLSLSMPMNVFSPNTKNMGYAEVVKALYEQNILPYLR

SEQ ID NO: 16918 - protein, 477 aa, Bacillus cereus; identical to SEQ ID NO: 13302

SEQ ID NO: 16919 - protein, 226 aa, Bacillus cereus; identical to SEQ ID NO: 13303

SEQ ID NO: 16920 - protein, 481 aa, Enterobacter cloacae
MSVQFSAEVEAFIRTYVKDLEEGAAAVFAGAGLSRTSGFVNWSELLREIAEELGLSVELEHDLISVAQYHVNKKNSSTGLARKILEEFSEQAEPSEAHKILARLPIRTYWTTNYDTLIEDSLKENYRVADIKRKTDDLITTRPKRDAVVYKMHGDVDSPGAAILYKAQYEQYYKTHEGFVTALSGDLISKTFLFIGFSFTDPNLDYILSRLHVPEKHRRTHYCFLRKEPSVPQGNEDEASAMYRQRRQEHHIRDLLRFGIQAVLVNEYEDIPVILKEIESRFLKKTIFISGSAEEYGTWDKQEALNFVHSLSASLVKAGYRVVNGFGWGIGSAVINGALDAIYSKPDKYSEDQLIMRPFPQHPSNGKALSELWDEYRHRMIGLSGVAIFLFGNKLHDGQIVNAGGVRKEFQIAQNTGVAVLPLGITGYMAKELADEMLADPSKHFVQYPWLETEVAQLADLSADRAKIEKKVLTILKKLGG

SEQ ID NO: 16921 - protein, 155 aa, Enterobacter cloacae
MKRKVFYSFHFDNDVMRVQQIRNMGVLEGDEPASPNTWEQIKRTEQGVKNWINQSLNGKSCLVVLIGSQTANRPWIKYEIQRAWQEGKAVVGIHIHRLKCPRNGYGTKGANPFDQFTFKRGDQVIKPLVYEPSFNDAYNDIKNNLATWIENAIKQ

SEQ ID NO: 16922 - protein, 484 aa, Serratia sp. TEL
MFNRNIELFIRDYVNDIKAGSAALFAGAGLSIPAGFVSWKELIGDIAYELELDIEKESDLISLAQYHLNEKGNRHKINQKIITEFAEQAEETENHRIIARLPIASLWTTNYDDLIEKTYARYNRVCDVKTTPESLTNNIHKRDVVLYKMHGDYRNPNQAIITREQYETYSRTHLPFINMLMAELTAKTFLFIGFSFEDPNLQYVLSRLYAQYGEGQRNHYCIMRRVQLGDNGSEDQASCDYNSRKQGLMINDLRRYGIQTLLVDDYRQITDLLYAIETQFKKSTVFISGSADNYQPYAREESIQFIHRLARLLIRKQYRIVNGFGWGVGTAVINGALEAIYDSQGKISESQLVLRPFPQFASGGITLPALWHEYRQNMISLSGIAIFLFGNKRNAEGEYVQADGLLKEFQIATEQGCVCIPIGCTGSASAEIYRKIKEEMKETLYHRNPAAMNLLDQLNEPGSLAEKKKSLLALIDIITKDNPR

SEQ ID NO: 16923 - protein, 163 aa, Serratia sp. TEL
MTRKCFYSFHYEPDNWRASQVREMGSLEGNRPATDNDWEEVKKGGDAAIAAWIKGQLDNRSCAVILAGKDTADRKWINFEICEAWKKGMGVLVVYIHNLKDSAGDQTTKGKNPLDYIKLGDAKLSTIAKAYDPPYLTSTNVYNHIKENLAEWVEEAIRIRKNY

SEQ ID NO: 16924 - protein, 481 aa, Bacillus cereus
MSREIDEFLRTYTKAIEESTAAVFAGAGLSKTAGFVNWKELLRDIADEIGLDVDKETDLIGVAQYHVNENGGNRGRINQVLIEEFTKDTYVTENHKILAKLPIRTFWTTNYDQLIEDSLKSEHKRSDAKITPENFATTMPNCDAVIYKMHGDITQAHKAVLTKDDYENYNLTRQIFTTALQGDLVSKTFLFIGFSFDDPNLEYILSRIRILLGNNQRPHYCFMKKVRRSEYEEESDFVYAEIRQELKIKDLKRFNIKVLLVEEYSEITNVLKMLEVKSKQKNIFISGSASNYGDWGEKRSFEFASSLSKQLIQNGNNIVTGFGLGVGSCVLSGALEEIYKVRTKRVEERLISRPFPQAIADDEIDLRKLWTIHRNNIIDNIGISIFIFGNKIDQSNGDVLDADGMIEEFNISMDKGSIPIPIGVTGFTSKKLWETVMGDFNKYIPDQKLEKYYHIIGDQKCKDEEIIQNVIHIINHLKRRK

SEQ ID NO: 16925 - protein, 202 aa, Bacillus cereus
MARKTFISYKYSEARDLRDDILDALGKDAQYYKGETSDSPDLTDTTTENIKKNLRDMIYETSVSIVIISPSMIDSEWIDWEIEYSLKEITRADRKSRTNGIVGVIMKHNGDYGWIETIQNNADGCTSRVISNSKLYNIISNNRFNLKNPEYTCDSCKTINSLTGSYISIINEEDFLANPSEYIENAFEKSQGIDKFNITKSR

SEQ ID NO: 16926 - protein, 481 aa, Chromobacterium sp. LK11
MSAKFSREIEAFIRVYVKDLEEGTAAIFAGAGLSKSCGFVNWSELLSEIAEELGLSVKLEHDLISVAQYHVNQKNSATGLARKILEEFSEQAEPSAAHQILARLPIGTYWTTNYDTIIEDSLKDNYRVADVKRKTDDLITTRPKRDAVVYKMHGDVGSSTAAVLYKAQYEQYYKTHEAFVTTLSGDLISKTFLFIGFSFTDPNLDYVLSRLHVPAAHRRTHYCILRKEPSIQQEGEDADFAMYRQRRQEHHTRDLLRFGIQAVLVDEYEDIPVILREIENRFLKKTIFISGSAEEYGTWDKQEALNFVHSLSASLVKAGYRIVNGFGWGIGSAVINGALDAIYSKPDKYSEDQLIMRPFPQLPSSGKDLPALWDEYRHRMIGLSGIALFLFGNKFDGGSIKNADGMREEFQIAQETEVAVLPLGITGYMAKELADEMLADPDKHFAQYPWLQQEVAQLADPAADRAKIETQVLSIIKKLGG

SEQ ID NO: 16927 - protein, 155 aa, Chromobacterium sp. LK11
MKRKVFYSFHFDNDVMRVHQIRNMGILDGDEPANPNTWEQIKRSEQGVKNWIDKNLHGKSCLVVLIGSQTANRPWVKYEIQRAWELGKAVVGVHIHRLNCPQNGFGTKGANPFDQFTFQRNNQIIKPLIYEPSYSNAYGDIKDNLAIWIENAIKH

SEQ ID NO: 16928 - protein, 155 aa, Chromobacterium sp. LK11
MAEKRNVFISHVHKDDHGLQKLKDLLNPKGMEIRDASIHKGKFNKATDEHYIKTQILAPAINWAGVFICYVSPQTKNSDWVNWEIEYAAKQGKRIVGVWEHGEKGCDLPEALKEYADALVGWNGDAIIEAINGKDSWENPDGSACSPVPLKRHPC

SEQ ID NO: 16929 - protein, 190 aa, Chromobacterium sp. LK11
MAFFTKSEARAAATSARGYRTAKAVLTATMESYKEHEKFDIFLSHSSVDSDLVLGVMILLQKQNLNVYVDWVVDRQLNRNSVDKATAATLRQRMKHSHSMIYIATDSASNSKWMPWELGFFDGHKPGQVAILPLQDTENQSFQGQEYLGLYPVVTKHLQNNTMNHYIEDRGNKWSTLSNFARGVPSWKGY

SEQ ID NO: 16930 - protein, 477 aa, Enterobacter asburiae; identical to SEQ ID NO: 13632

SEQ ID NO: 16931 - protein, 146 aa, Enterobacter asburiae; identical to SEQ ID NO: 13630

SEQ ID NO: 16932 - protein, 161 aa, Enterobacter asburiae; identical to SEQ ID NO: 16885

SEQ ID NO: 16933 - protein, 479 aa, Haemophilus sp. C1
MEFTKKQKKFITDFVVEIKNGDAAIFAGAGLSAPAGFVNWKGLLKDLAEELGLDIEKEHDLIGVAQYHFNRHKRGKINNKIINEFTTLRQGGDNHKLLSKIGISTFWTTNYEQLIEKTLEADGKTVEKKIRNEDFSRNIKKKDAIVYKMHGDKDLPDEAVLIKDDYETYQDKKELFATALRGDLLSKTFLFIGFSFDDPNLEYILGRIKVLLKDNTPTHYCFFKEVSRDDFHDDESYMYAKVKQELKIEDLKRYGIHSIMIKEYSDITAILKEIERRLKRSNIFISGAAHSYSPFSEEQAKELIHNLSYKLAEKEYKIISGYGLGIGSIVINGALEYKYQSNYRNLDDLLILRPFPQIQSGDKSISERWTDYRNEIISQAGIAIFMFGNKLNKNGEIVLSNGMKEEFEICLQHNVIPIPIGCTGSISKELWDDVVKNHTELYFNDQSLIDEIRTLDQSGISNDEIISTVLSIIDKLQNM

SEQ ID NO: 16934 - protein, 205 aa, Haemophilus sp. C1
MGRKIFISYKYSDSSVERLSPYQEATARDYVDILQAKLEEDGIHINKGEKDNESLAQFKDETIQTKLSDKIFDSSVTIVLLSPNMKEWWNSESEQWIPWEIAYSIKNNKRSLSSSKRNAILLVVLPDLSGCYSYVNKEGFYFNIIKSNRNNLQHSYSAKKLKNGCSNSYMLKCNWDNFISNVNGWINAAVEIKENADKYAINTKV

SEQ ID NO: 16935 - protein, 165 aa, Haemophilus sp. C1
MAYFTKQEARNYARSVTASFESYSSKLESIVESQKYQYRFDVFLSHSVKDAELVLGVVRILEDMGQKVYVDWVVDPQLSRDSVTKETAETLRDRMKQSSKLLYLATDNASSSKWMPWELGYFDGLKSGNVAILPLVDSVYSSFQGQEYLGLYPALGKDDLRRFLG

SEQ ID NO: 16936 - protein, 487 aa, Stenotrophomonas sp. DDT-1
MNRVALSRFLSEYPDALNDGVGAIFVGAGVSMAAGYPSWSELLRDIALELEVDTKNVHDLAALAQWSILENGGSTRVRTVIKNEIGPDKPIPETVQIISRLPVRHIWTTNYDRLVERAFASISRPLDAISGPKDLALRATPGAALLYKMHGSVNRLDDVVISTDDYELFRSKRGQYLPLFQAHLTSMSMLFIGISFTDPNIRHVLSLIRESFTDAPPEHFAIVRAPQRTDFTSEGEFAARNAQHRLWTKDLKRYGLLAVEVSDYAEIPALLRQIERRVSARRIWVSGSWPLERGGSESAAIHALAEDIGRRIGESGRHLVSGAGLLVGSASLSGFLAALRLSGGWDLERRLIARPFPQPLTGTQPNQEEWDALRIELARQSGIAIFIGGAKMVDGALEVAQGVERESEVAMHAGVFLLPVGATGGAAQKISSQLLGSELASSGQDAQRPTDEELVALSSPALLDSQEGRRDLVSMLFKIIDRIALAR

SEQ ID NO: 16937 - protein, 167 aa, Stenotrophomonas sp. DDT-1
MARNVFFSFHFNNDFWRTQQVRNMGSLEGQKLYTANEWEDVKKNGSDEIEKWIDRSLIGKTCVVVLVGAETANRPWVITEIVKGWNSGKGVVGIRIDKLLDDDSRPSTAGLNPFDKVHLKSGTVPLSDHVKLVTPVGADSKAVYAHIQANIEQWIEEAIEIRSNYKP

SEQ ID NO: 16938 - protein, 183 aa, Stenotrophomonas sp. DDT-1
MARNVTKAELRDISAAKSHSDRQRLLDSVASSRGTSTFLSHSSKDKELLEGAMEILYNHGARVYIDEVDPLMPPYTTAATAALLKQRISQNQRFVLLASENSKESRWVPWELGVADGEKGLANIALFPASERTHEDNWASWEYLGLYHRIVWGKLTGYENELWMVLDARRNTAIKLSKWLAGY

SEQ ID NO: 16939 - protein, 484 aa, Serratia marcescens subsp. marcescens; identical to SEQ ID NO: 14407

SEQ ID NO: 16940 - protein, 163 aa, Serratia marcescens subsp. marcescens; identical to SEQ ID NO: 14408

SEQ ID NO: 16941 - protein, 269 aa, Candidatus Burkholderia humilis
MAFSKEIEAFIREYVKDIAKDNAAIFADAGMSKSAGFVDWAEFLRDIADEIGHDLIALAQFHVNEHKGYAKLSRKIIEEFSEQAEPSESHSILARLPIRTYWTTNYDTLIEDTLRQAYKVPDVKHSVEQLNTTRPKRDVVVYKMHGDVSYPNSAVLYKEQYERYFRTHEPFVRALSGDLVSKTFLFIGFSFTDPNLDYVLSRLHSVTKRHHYCFMRREQVLPGDDDDVKKYKQVLRVNDLKRFGIQTLLIDDYAEVPRILAAIEARFLK

SEQ ID NO: 16942 - protein, 103 aa, Candidatus Burkholderia humilis
MHGKSCVVVLISSETAKRPWVKYEIEKAWKDGKGLLGIHIHNLSCPNNGKYLQGADPLAQYIFKIGERFVKPKTYNPNSSDAYGDIAANLDDWVEEAIKIRTS

SEQ ID NO: 16943 - protein, 174 aa, Candidatus Burkholderia humilis
MDSGRILQEAKRSATSASRFDVFLSHASKDAKLILGVKALLEERGFVVYVDWVDDAHADRSQVDRETADLLRQRMRQSASLIWVATDATSNSKWMPWELGYFDGFAPGQVATIPLVDNPGESFKGQEYLSLYPLIGQDHYIGGRKDVFVEDRSRRWATLDSFAKGTTRWSRYSN

SEQ ID NO: 16944 - protein, 477 aa, Aeromonas caviae
MKKEHLRLIDNLSKELAEGNLAIFAGAGFSRAAGYVDWRSLLKPIADDLDLDVEKEWDLVTLAQYHANANATNRSKLNQMLVTEFSSGVAPTVNHEIVARLPIQTYWTTNYDKLIESSLERNGKVPDVKYTNKQLATTRPKRDAVVYKMHGDVDHASEAVLIRDDYERYHVKMQPFITALSGDLIAKTFLFLGFSFTDPNLEYILSRVRIQFAQDQRQHYCILRKASRMEGEEQAEFEYRQRKEDLFKHELLRVGIKAVYVDEFSEITDILREIEHRHKRKTIFISGAAHDYSPWTESEAEQFVYKLSKAISKAQYRVISGFGLGVGSAVITGVLEQTIMNGGRLDNDQLVLRPFPQSQSGERPLPELWTEYRRNMLAHAGVALFLFGNKLDKTGAVVPSNGMREEFEIAVANGLFVIPVGITGSISADLWNEVIQAYDESNHEHGKKITPLLQELGAPHTDLARAHDIILSLLPLL

SEQ ID NO: 16945 - protein, 155 aa, Aeromonas caviae
MTEKRNMFISHVHKDDLGLQKLKDLLAPKGMEIRDSSIHTGKFNNATDEHYIKTQILAPAINWAGVFVCYVSPQTKNSDWVNWEIEYAAKQGKRIIGIWEHGEKECDLPEALKEYADALVGWNGDSIIDAINGKDSWEKPDGGDCDPVPLKRHPC

SEQ ID NO: 16946 - protein, 147 aa, Aeromonas caviae
MARKVFFSFQYEDVHRAMNVRNSNVIASDTKVGFIDKADFEEVERKGDTAIKKWIDDQLHGTSVTVVLVGATTDKSKWVKYEIEKSIERGNGILTIDISKIADLNGKTTNCCSLRVPNTTHYLWNNQKGRENLGKWVEAAAKAAGRS

SEQ ID NO: 16947 - protein, 165 aa, Aeromonas caviae
MPVRQSDLLNAGQRRPMQGQFAKRFGQPTAFLSHSHKDSLLALGLQELLKNQGWDVYIDWQDQTMPDKPDAKTAFNIKTAIVRADWFLFLATQNSMASRWCPWEIGFADGKKSHEHIAIVPTQDSQGHFYGNEYLNLYNKIDVPASGAGLAFFDTKGNGKWVRTL

SEQ ID NO: 16948 - protein, 481 aa, Vibrio parahaemolyticus; identical to SEQ ID NO: 13362

SEQ ID NO: 16949 - protein, 200 aa, Vibrio parahaemolyticus; identical to SEQ ID NO: 15055

SEQ ID NO: 16950 - protein, 191 aa, Vibrio parahaemolyticus; identical to SEQ ID NO: 13364

SEQ ID NO: 16951 - protein, 492 aa, Oceanobacillus caeni
MDFGREINNFIEEYVSALKEGNAAIFAGAGLSIPSGVVNWKDLLRRPAFRLGLDIDKESDLVSLAQYIYNDSKTKTPLTELINNHFSQTGRINRNHEIIAELPIRTFWTTNYDKLIEQALVQAGKKPDVKKRVNDLSVIKSKRDAIVYKMHGDVEVADEAVLIKNDYELYEKNNQMFTIALKGDLVSKTFLFIGFSFEDPNLEHILSRIKILLDDHTRTHYYFIKEVAEEDYPDNAAGKEQFQYDKIKQELKCADLERYSIKPLIVKKYEDITAILETITERYNRNNVLISGSADEFNDYKVSGIKAEDFIHKLSKTLNQKEYKVATGFGVGVGSGVINGVLEGMEETGTRNINEHLIMRPFPQYATNGKEIGQLWEEYRQQLISECGIVIFMFGNKLDKKEGTDEETVVEANGVIREFDIAVDKNAKVIPIGVTGYASRKLWERVINDFEKYYSDYPHLKDKFIKLGEDGIDFNQLINIVIDIVTEIRGGE

SEQ ID NO: 16952 - protein, 161 aa, Oceanobacillus caeni
MARKTFFSFHFERDSWRAGQVRNSGQFKGDKAGFIDKAEWEEVKRKGDQAIKRWIDKQLEGTSTTVVLIGSETSERKYVGYEIEQSAKRGNGLLGVYIHQVKDINGRTDTKGKNPFDNWYYERNGKNVYFSEIYPTYDWVNDNGRDNLGKWIEAAAKNAGR

SEQ ID NO: 16953 - protein, 175 aa, Oceanobacillus caeni
MNKANSVVQKSYNTKTASKILNESYNAYNQFKTYDIFLSHSYQDAEVILGLKNTLEEMGYEVYVDWIEDRQMSRENVNAQTANQLRKRMKNCRSLFFATSDNSTDSKWMPWELGYYDGYRGKVAILPINNSSYQKDSFEGQEYLGLYNYVIENYGVLYIKYLDGSSKRYSEWVSE

SEQ ID NO: 16954 - protein, 487 aa, Pseudomonas sp. RIT-PI-q; identical to SEQ ID NO: 13575

SEQ ID NO: 16955 - protein, 167 aa, Pseudomonas sp. RIT-PI-q; identical to SEQ ID NO: 13576

SEQ ID NO: 16956 - protein, 183 aa, Pseudomonas sp. RIT-PI-q
MARNVTTEELRNISANSSQATRDHVFKSLAATASMSTFLSHSSKDKEVLPGAIQVLQNHGASVYIDEIDHEMPPYTSEETAALLKQRIAQTKRFVLLTTKNSKESRWVPWELGIADGAKGLSKIAIFPASDSAYDDSWVSWEYLGLYQRVVWGLLQGHPQELWMVLDTKANTAVPLKDWLAGY

SEQ ID NO: 16957 - protein, 486 aa, Elizabethkingia miricola
MTFTEQQKKFINDFAIEINSGDAAIFAGAGFSATLGFVNWKELLRDLAVELKLDVDKEHDLISVAQYHFNKFKRGKINNKIINEFTTLTTGSENHKILSRIGIDTFWTTNYDQLIEKTLEANGKTVETKIRNVDFSRNIKKKDAIVYKMHGDKNSPDEAVLTKDDYETYNDKKELFSTALRGDLLSKTFLFIGFSFDDPNLEYILGRIKILLKDNTPTHYCFFKEVQETDFNDTTKTPEQNKEDYLYAKIKQELKIEDLVRYGIHAIMVKEYSEITAILHEIEKRIKRKNIFISGAAHDYSPYTAEDANDLIHSLSYKLAEKEYKIISGFGLGIGSVVINGALDFKLNSNYRNLDDLLILRPFPQIQSGAKSIPEIWTDYRNEMISKAGVAVFVFGNKKVGDDIVNSNGMEEEFEICLQHNVIPIPIGATGYVSKSLWDKVTGELQVYYPDNAELYNAIRELGKDNPTKEEIINNTIKAINILQKL

SEQ ID NO: 16958 - protein, 163 aa, Elizabethkingia miricola
MTRKVFTSFHYVPDNWRASQIRNMGKIEGNGVVTSNKWEEVTNGGDKEIEKWIDNNMSGKSCVIVFVGEKTAGRKWIDHEIKKAWEEGRGIFGIYVHNLKDSGGNQSNQGNNPFDGFSVDGKSLSSIVKCYNPPYNTSTYVYDHIKENLEDWIEEAIKIRNNY

SEQ ID NO: 16959 - protein, 235 aa, Elizabethkingia miricola
MGKSIFVSYKYADAQVQDLGVYEVIDFFGTKRRIATTARHYVDEIAKILEEDDHIYKGENDGESMVALEDTTIASKLGDKIFYSSITIVLVSKGMKENFSSEKDQWIPWEISYSLKEQSRQGGRSKTNAVLAVVLPDQWGSYNYFIEENSCLYCNCRTLKTDSLFQILRDNMFNVKNPVYTDCANHIGSRPYKGYSSFIHSVKWSDFIVNPGKYIDIALTIRANINEYDIVKTIK

SEQ ID NO: 16960 - protein, 178 aa, Elizabethkingia miricola
MFTKQEFQTIAYNKARNKGYTTLNESRTFSEYSSKTSIFLSHSHKDKALIAQAKTFFENLGISIYVDWADETMPQRTSGITAQNIKGQIRKNDKFVLLATNDAIASKWCNWEVGIGDTYKLASDKICILPLADNRLTWQGNEYLQIYPRIEESEYTKDYYKIIYPNKTEISLNEWLNK

SEQ ID NO: 16961 - protein, 477 aa, Serratia marcescens subsp. marcescens
MKRKLLRLIDNLSKELDEGNLAVFAGAGLSRTAGFVDWKSLLKPIADDLDLDVEREWDLVTLAQYHANANAANRSKLNQMLVSEFSSGLAPTDNHEILARLPIQTYWTTNYDKLIESSLERNGKTPDVKYTNKQLATTRPKRDAIVYKMHGDVDHASEAVLIRDDYERYHIKMQPFITALSGDLIAKTFLFLGFSFTDPNLEYILSRVRIQFAQDQRQHYCILRKASREEGEELADFEYRERKEDLFKHELLRVGIKVVYVDEFSEITDILREIERRHKRKTIFISGAAHDYTPWSVSEAEQFVYRLSKTISKQQYRVISGFGLGIGSAVITGVLEETIMNGGRLDNDQLVLRPFPQNQSGERALPELWTEYRRNMLAHAGVAIFLFGNKLDKTGTVIPSHGMREEFDIAVANGLFVIPVGITGSISAELWQEVISAYDESKHENGKKITPLLHKLGSQGTDLAHAHDIILSLLSLI

SEQ ID NO: 16962 - protein, 200 aa, Serratia marcescens subsp. marcescens
MPRRTFFSFHYGPDVWRAWNVRNSWVVREANKEDRGFFDSSVLEASKKESDNTLKNFLRKGLDNTSVTCVLAGTQTWERRWVRYEIARSVIKGNGLLTVYIHGVQNKDKETSTKGANPLAQMGLYRTEHGIYLAEWKGGKWVAYADYTLAISEGDLWFTAPKTNNVVQLSTHYLSYDFIGQDGRKNIGGWIETAAEMAGR

SEQ ID NO: 16963 - protein, 146 aa, Serratia marcescens subsp. marcescens
MTRKVFFSFQYEDVQRAMNVRNSNVIASDTKVGFIDKADFEEVERKGDAAIKKWINDQLYGTSVTVVLIGATTNKSKWVKYEIEQSIDRGNGILTIDISKIADLKGNTTDCCSLRVPDAPHYLWNKGNGRENLGKWIEAAAEAAGK

SEQ ID NO: 16964 - protein, 395 aa, Serratia marcescens subsp. marcescens
MSDTSNIRSPYQLIMLGASNGHDNGLRHNIDSALHKLGIPTCAIKYFCEFNAADRSLKLPTMAIFFGSPENTVDTALVTELIDDSIVIAPIVSDLSQVHEEIPSQLRHINAIVLGSNDEGIDRLVTLVLETFRLLRRERRLFISYKRAGSQPLADRLYDALDARGFDVFIDVRSVPPAADFQSQLWHRMSDSDVVVLIDTPGFREGRWTSEELARANATNVQILHLLWPGQKEDPASSFSHFMKLKRSDFVGYLPMRGRWATKGLVKRICVEVERLRAPAIAARHRYLVDNFCDAARDEGFNPSVQIEGWISLEPKSERGLAIVPAVGIPTSDRINEVFEAITHNVVETKEIWMIYDNRGVLKTWLSHLDWLDSYLPIRAVQMSKVPQLLKEFIA

SEQ ID NO: 16965 - protein, 477 aa, Serratia marcescens subsp. marcescens; identical to SEQ ID NO: 16961

SEQ ID NO: 16966 - protein, 146 aa, Serratia marcescens subsp. marcescens; identical to SEQ ID NO: 16963

SEQ ID NO: 16967 - protein, 200 aa, Serratia marcescens subsp. marcescens; identical to SEQ ID NO: 16962

SEQ ID NO: 16968 - protein, 395 aa, Serratia marcescens subsp. marcescens; identical to SEQ ID NO: 16964

SEQ ID NO: 16969 - protein, 487 aa, beta proteobacterium AAP99
MNWFATAGQKRFIRNYGDALRSRDGALFVGAGVSRAAGFVDWKALLRDLAADLDLDVDRETDLVALAQFHLNSRGTRAGINQALIDGLTDGAVPTKLHDVLARLPVDTVWTTYYDQLLEQAFAAAGKAVDVKLTIQNLAQLRRGKDVTLYKMHGCVTQPQDAVLTKDDYERYADKRALFSDSLKGDLIEKTLLFLGFSFTDPNIEQILSRVRGHLGTNQRDHYCVMRRRPRSPDLAGAALAEFEYEARKAEYQVADLKRFGIQTVSIEEYEHLTPLLQAVAAYTNRDSVFVSGAAADAAPLGPDRLHAIARRIGQRLITDNFRLVSGFGTGIGEQVALGALRALFGRPDPRDPDRVVIRPFPAPSSSEHQAATYTRHREDLLSRAGAVVVIAGNKASNMGGIQPASGVVEEVRIAQAMGKIIIPIGVTGHVAADVWTQAMNNPELFLPGLDVQQVLSVLGDETASDDSLIDAVFEILDAGRQRAAAP

SEQ ID NO: 16970 - protein, 165 aa, beta proteobacterium AAP99
MARKAFYSFHYKPDNWRASQVRNMGVVEGNKPAADNDWEAVKKGGDAAIQAWIDGQLHGRSVAVVLIGAETAGRKWINYEIAKAWNDGKGVLGIYVHNLKDSAGEQTTKGANPFEEFTLNESKKRLSSIVKAYDPPYSTSTNVYKHINDNLATWIEEAIAIRAAY

SEQ ID NO: 16971 - protein, 477 aa, Pediococcus pentosaceus
MITSRKSFIEQYSKAINEGYAAVFAGAGLSVASGYVDWKTLVTPLAEELNLNIEEENDLTKVAQYYRNEFKSRGDINQTIMEAFSKEKEPNENIDILTRLPIYTYWTTNYDKLLEEGFKNNNRKVDVKCRETRLSTQKYDRDAILYKMHGDVDDPAEAVLTKQDYEIYNQRNPLFTSILQGDLISKTFLFIGFSFEDPNLTNVLAATRNILDENISNNYWLEKRVTKPSDIEESTEAKVRYEVDRTKQELKIHELQRYGIQTVYIDSYEEITEILKELEFLNLKRKIFISGSVTFYDKIWTKEKVNALCYSLAKELVKNNYQICSGFGYGVGSSVINGALEVIYSEKYKHVDDYLNLRPFPQNNSSVNQGNDVRQKMYRSEMVNGVGVVIFMFGNREGKDKKEELSEGLIEEFRIAKEQGKKIIPIGSTGGATKKIFEEVENNIIDYPYLKKHLSILKNNTDINELICEIKDILNEL

SEQ ID NO: 16972 - protein, 202 aa, Pediococcus pentosaceus
MARKTFISYKYSEARELRDSIIESMGKDATYYTGETSDSPDMTDRTTDYIREKLKDMIYSTSVTIVVISPNMIKSQWIDWEIEYSLKQVKRGDFSSGTNGIVGVVKKYNGDYTWLRPRNDKFDGCSTLGTNEKYMYDILNKNRFNQEPKVYACENCKCVDMLVGSYISLINEEDFLNDPNFYIENAYEKSKHSEGYILSKKR

SEQ ID NO: 16973 - protein, 474 aa, Bacillus sp. FJAT-25509
MSRDIELFIKDYSKEIEEDNAAVFAGAGLSVPVGYVSWSELLEPIADEIGLDIHKETDLVSLAQYYCNENLGNRSRINQIIMNEFSKKTTLTENHKILSRLPIRTYWTTNYDRLLENALENEGKVPDVKYTVNQLAITRPNRDAVIYKMHGDINHPNDAVIIKDDYESYFLKMSSYITALSGDLVSKTFLFLGFSFTDPNLDYVLSRIRSTYTNNQRRHYCIMKKIEIRNNELVEDFQYRQRKQELFINDLKRFNIKTLIIDSYDEITYILKKIENKIKRKTIFLSGSATIYNQWEKEESESFIHKLSKEIIKNKFNIVSGFGLGVGSFVITGALEEIYINQGKIDDNRLILRPFPQSEHGQTQWKKYREDMISRAGVSIFIYGNKYEENRIVSAGGVISEFEISHQQQNFLIPVGATGFAAKDLWNRVNNDFEKYYPNTTTDIRKAFDSLNDEKLSKDELIEKILIFLNLILK

SEQ ID NO: 16974 - protein, 222 aa, Bacillus sp. FJAT-25509
MGRKIFISYKYNDSSVYPLNNILETKARDYVDEIQQKLYEEDHVNKGEADGEDLSDFKDETIWTKLKDKIYDSSITIVLISKNMKDNSQEVEQWIPWEISYSLKELSRNGRTSYSNAILAVVIPDENNSYEYYIKENSCEYCKCRTLKTHTLFKILSNNMFNIKSPNYNDCNNHGAEKVFTGEASYIRSVKWENFIKDIDFYINKSLEIKNKIDEYNIFKNV

SEQ ID NO: 16975 - protein, 477 aa, Pseudomonas syringae pv. tagetis
MKKEHLRLIDTLSTELEEGNLAIFAGAGFSQGAGFVNWKTLLRPVAEELDLDIDKETDLVALAQYHANSNATNRSKLDQMLVTEFSAKVKPTDNHKILARLPIQTYWTTNYDKLIETALEDNEKVPDVKYTVKQLATTKRKRDAVVYKMHGDVEHASEAILIRDDYEHYHVKMQPFITALSGDLIAKTFLFLGFSFTDPNLDYILSRVRIQYAKHQRQHYCILRKVSQEENEDQADFEYRERKEQLFKQELLRFGIKAIYVDDFSQITVILHEIERRHKRKTIFISGAAHDYSPWTQVESEQFVYKLSKAISELQYRVISGFGLGIGSAVITGVLEQTIMNGHRLDSDQLILRPFPQSQSGERQLPELWTEYRQNMLAHAGIALFLFGNKLDKEGQLVLSNGMREEFEIAVAKGIFVIPVGVTGSISAELWNEVIQTFDESKYEHGKNVTPLLHELGASSTTLGRAHEIILSLLPLI

SEQ ID NO: 16976 - protein, 147 aa, Pseudomonas syringae pv. tagetis
MARKVFFSFQYEDVQRAMNVRNSNVIASDDKVGFIDKADFEEVERQGDAAIKKWINDQLYGTSVTVVLIGATTDKSKWVKYEIEQSVARGNGIFTVDVSQIADLKGQTTTCCSLRVPGAPHYQWNNGKGRENLGAWIETAAKAAGKP

SEQ ID NO: 16977 - protein, 167 aa, Pseudomonas syringae pv. tagetis
MPIRQSDLYTAGYSRYLQGQFSKRSGQPTAFLSHSHTDAVLALGLQELLKKAGWDVYIDWQDRTMPETPDAETAFNIKVAIVQADWFLLLATQHSTASRWCPWEIGFADGRKAHDRIAIVPTQDNQGNFYGNEYLNLYNKIDVPRITGTPGLALFDTRGNGTWVRGL

SEQ ID NO: 16978 - protein, 276 aa, Pseudomonas syringae pv. tagetis
MYLGFEIQQFESLNGYVGNRIDLYEAQAKGRVGNLAQYIIGTYAGRQILDAEALSNQIFPEAKYDVFVSHSHADQRKAIDLAIALESRGLKVFVDSTVWGFYPELVNTIASAVHPSTGETADRLKLRISADVHMMLTSALHRTIAKAETFIFVRTEKSVPLTYSATERTLSPWLFSELQFSFQVRHAAPQRILKRLQGTLLDSVKGFNTMSLESMQYLMAFEAFNDHLPTVYGHGLREWFAQLPSNARGAEVLDSLYTQFSLESDYYRRRRELHAL

SEQ ID NO: 16979 - protein, 482 aa, Vibrio sp. J2-4
MDREKQAFITHICKELEDENIAIFAGAGMSAGTGFVNWSELLRPIADELGLDVDREHDLVALAQYHCNDNGNNRSQLNQRLIEEFSRDANETEVHRILSRLPIRTFWTTNYDKLIESSLVKTGKTPDVKHTKQQLAFTKPKRDSVVYKMHGDVDHPSDAVLTKDDYEKYHVKMEQFLSSLKGDLISKTFIFIGFSFTDPNLDYILSRVRVAYDGNQRRHYCFIRSVQKNDGESDADYEYRQRKQSLFIGDLNRFNIKTIIIDDFDEIETLLKLVEINHKKKSFFISGAAHDYGSWGETKSLSFVSSLSSKLVRKGWNVVSGFGLGIGSSVICGALEEIYVNQKRSIADQLLLRPFPQSASTQSLPTLWTMYREDMISHAGFTILVFGNKLNDGEVVLSNGMLEEYEISKKKNNIILPIGATGYMAKKIWEKEYQSLSAAENTDDNFLTLFFELGDDTKSPEQILVVIQNIIEYSIKKGELHG

SEQ ID NO: 16980 - protein, 166 aa, Vibrio sp. J2-4
MARKCFFSFQYKPDNWRVSQVRNIGAIEGNQPAKDNDWETVVGGGDKKIEKWISDQMKGRTCTVILAGSNTANRKWINHEIIESWNKGMGVLVVHIHNLKNSSGQQSSKGANPLYYITHGPTGKRLSTIAQSYDPPYSTSTNVYDYIANNIDDWIEEAIKIRKEND

SEQ ID NO: 16981 - protein, 228 aa, Vibrio sp. J2-4
MARCTAPSRGHRSAAAAANCPACGGRYSRYGSGGYSSYSTSSYSPSRISSSETSSSKKPSWSKSGSSVSYTSAQIQSLTPIRETVETRAAQQPDLRDVFLCHAWGDRKDAAKELHDLLEAAGVKVWFSEKDLGLGVPMMRAIDKGLANSRIGLVLVTPAMLERLPKESVADKELSTLLAGNQLIPIVHNTSYEALRNVSPMLASRTGLDTSEDSMEVVAEKIAELVDI

SEQ ID NO: 16982 - protein, 482 aa, Vibrio sp. J2-26; identical to SEQ ID NO: 16979

SEQ ID NO: 16983 - protein, 166 aa, Vibrio sp. J2-26; identical to SEQ ID NO: 16980

SEQ ID NO: 16984 - protein, 228 aa, Vibrio sp. J2-26; identical to SEQ ID NO: 16981

SEQ ID NO: 16985 - protein, 475 aa, Pseudomonas syringae ICMP 19498
MAFSGEINSFIKEFVKDLSEDNAAVFAGAGMSKGAGFVDWKELLRDIADELDLKIEQEDDLISLAQFHVNKLKGPAKLSRKILEEFSEQAEPSTTHEILARLPIRTYWTTNYDTLVEDALKRTFKVPDVKHSVAQLNTTRPKRDAVVYKMHGDAHHPNDAVLYKEQYERYYRTHEAFVTALSGDLVSKTFLFIGFSFTDPNLDYVLSRLHTTTKRNHYCFVRREPIAPKDDDEVKAYKRRKQDLRIDDLKRYGIQSLLIDNYEDVPVILQEIESRFLKKTVFISGSAEDFGEWGQQEAQEFIHTLSASLVKNNLRVVNGFGWGVGSAVINGALEAIYANPEKFSEDQLIMRPFPQVATKAADLQQLWEQYRQRMIGLTGIAIFVFGNKRSAEGKIIEAGGVIREAQIAIDKGCVIIPVGATGFAAQSVWQMISARDELFQGVEWMRPLIEEICDPQIKRKEIIIKIVAILNRLGK

SEQ ID NO: 16986 - protein, 160 aa, Pseudomonas syringae ICMP 19498
MAKRKVFYSFHFDNDVMRVQQIRNMGVIEGNAAVTANTWEEVKKKGDAAIKAWIEENMSGKSCVVVLIGSDTSKRPWVQYEIKKAWEEGKALLGVYIHNLSCPNKGTSSQGANPFDLYTFKTGDKVVKPLVFNPKSSDAYNDISANLANWIESAITQRNG

SEQ ID NO: 16987 - protein, 475 aa, Pseudomonas sp. ICMP 3272; identical to SEQ ID NO: 16985

SEQ ID NO: 16988 - protein, 160 aa, Pseudomonas sp. ICMP 3272; identical to SEQ ID NO: 16986

SEQ ID NO: 16989 - protein, 494 aa, Pseudomonas syringae ICMP 11293
MDFFALEERVASYGSGGYLFLEAFLTKLLQIEAAHYGQEVNSLDTHTSLFEAVAPQGIGDLSTPIVIEYIFTATKDKVKLLLDAFRMHGEPGFGLLIIAPKMPESTLIYMLHEPDAHGRAPVVIWGEKKINDLMRKHKEEVGKLTDSLFSLRLKMAVTRPTKPWLEERDQLIKLVAEQYRSGSFSLVLGAGVSSSAGLPDWNTLLNSLFVSMLAQENIGGDKSDTAQVSQIVSRLMEVDGPSALMLARYIRKGLSVGSQTEQQSFIEALTHQLYSLRNEVFQIESELITAIARLCTPTRTGAKVKSILTYNFDDFIERALSGRGLVHKSIFEEFETPSAEELPIYHVHGFLPEVREKYSNLDRCTLVFSEEGYHLIYRDSYHWSNLVQLNGFKETSCLMIGLSLTDPNLRRLLEIASKSIEKPKHFAFMRRLTSKKFKSGDRGHQLKIPSSVIDRFLDRHHSTNEELMRELGVTVIWYEEYSDIPKILNRIREG

SEQ ID NO: 16990 - protein, 312 aa, Pseudomonas syringae ICMP 11293
MSPKVFVSHASEDKDRFVLDFAKQLRANGVDAWLDKWEMLPGDSLITKIFEEGIKDAQAVIVVLSKNSVEKPWVKHELDAACVKRINTGSKLIPIVIDDCKVPEVLKATLWESISDTASYQSSLERIVASIFGASDKPALGKPPAYVSRFGAGVAGHNNVDSLVCKLACEFVLETGSRHVSISAFCKDGEFIIPEHQLRESVEVLGEHGTFDLQHSLGEGFPSVSVTDSGFELYARDHVGNYDEVFRSVVSAIVNNGFTTLSQMRRELNLRPFLVEHVLRILASGNKISVSWYLGGDCSINSISPSLRRSLS

SEQ ID NO: 16991 - protein, 388 aa, Pseudomonas syringae ICMP 11292
MDIKKLRENNIVDRVEEVLQAAYSSNQAFNAVLDEAEPLAFKSLRDPEHEYLIKVSDALYWVERDAYLDELDHWEGQCQVNQHEAAATFIKDSDQQAVFLDLVDAIRFGRIAPFVGAGLSKPCGYPMWGEALRKIAQKLDGLDVQDIEPLMERYDYLQAAQVLHETDAEIVRHFIKTEFRQRGAITGPVTLLPDLANGCIVTTNFDTVIEDLFREIKQPLDGYMHGMQPGNNFVQRLLRGERCILKLHGDAGQAITHVFTQTQYQVAYGGAAGEPFAFQNQLPRALRQIFVSHSLLFLGCSLEQDKTLDLFKSVVDEAAFEIPDHFALLNEPVTPQERARKEARLLQLKIRPLWYPTPHDVEGKPDHSLLEQILRLAIAVARRQVVFG

SEQ ID NO: 16992 - protein, 231 aa, Pseudomonas syringae ICMP 11292
MARCTAPSRGHRTASAAADCPACSSRNYSYRSTSYSPPPYSSSGSGGGSSVRNAGGGSSTRPRWSKPGSSLPYTSIQVQSLSPIREALEASAAKQPDLRDVFLCHAWDDRLGAAKELHALLVAEGVKVWFSEKDLALGVPMMRAIDKGLANSRIGLVLVTPALLARLPRESVADKELSALLAGNQLVPIVHNTTYEALRNVSPLLASRTGLDTEEDSMAIVAKKIAELVSL

SEQ ID NO: 16993 - protein, 474 aa, Pectobacterium carotovorum subsp. brasiliense
MIDRIVKELEEHNFAIFAGAGLSAPAGYLNWKELLRPLSVELKLNIDKETDLVSLAQYYVNENHSRSRLTERLIDEIGISQKVTINHQILAKLPISTYWTTNYDDLIERSLEDEGKLPDKKFTKNHLSQTKKGRSAIVYKMHGDASLPEQAIITKDQYESYSLHFAPFVTALSGDLVSKTFLFLGFSFTDPNLDYILSRIRIHFETNQRQHFCIFREVNRDDYHNDDEFSYNQLKQQFVIKDLARFSIKVILISAWTDLTSILKEITKRFRCKNVFLSGSAHEFGNWEQNATEIFLSKLGEILIQEGFKITSGLGLGIGNAFISGAIKEIYDKKHAKIDDYLTMKVFPQFVEDKNTRKRIWSLWRKDLLIQAGIAIFFMGNKSTKDINSEKSNITLADGMEEEFQIAKNFGLKIIPIGASGYKAKELFDRVMADFNTYYPNATPEFHDAFTKLDESVDEPIKLLSKIHNIIKLI

SEQ ID NO: 16994 - protein, 200 aa, Pectobacterium carotovorum subsp. brasiliense; identical to SEQ ID NO: 15101

SEQ ID NO: 16995 - protein, 474 aa, Pseudomonas aeruginosa
MKFSGEINSFIRDFVKDLSENNAAVFAGAGLSRSSGYVNWKELLTDIAEELELKIDLESDLISLAQFHVNKTKGPAKLTRKIVEEFSHQAEPSENHKILARLPIRTYWTTNYDSLIEDSLKQSYKVADVKHKLSQLNITRPKRDAVIYKMHGCASDAGNAILYKQQYETYYRDHEPFVTALSGDLVSKTFLFIGFSFSDPNLDYVLSRLHTSTIKAHYCFIKREDEGVGDDEEMTQYKRRKQDFRIEDLRRYGIQPILVENYSDITEILLEIERRFLKKTTFISGSAEQYGEWGKEQSLKFIHTLSSELILKERRIVNGFGWGVGSAVINGALDAIYKNPEKYSEDQLVMRPFPQFASSGEDLRLLWEEYRQRMIGLAGVCIFIFGNKVDDGKLVIANGVIREAEIAIEQGRIVIPIAATGFAAAEIYKLVKVKPELYDAHKWLIAVIDELADPALAWTDIVKKVSDAIIKLDK

SEQ ID NO: 16996 - protein, 163 aa, Pseudomonas aeruginosa
MARKCFFSFHYAPDNWRASTIRGIGAIEGNQPALDNDWEKVTKGGDAQIQKWIDSQMEGRTCAVILIGENTAKRKWIDYEIKKAWANKIGVLGIYIHGIKDSSGNISKKGLNPFAHFELGGKNFSSIVQTYDPIGADSKARYNYIADNIDSWIEKAIGIRKNN

SEQ ID NO: 16997 - protein, 482 aa, Pseudomonas aeruginosa; identical to SEQ ID NO: 13374

SEQ ID NO: 16998 - protein, 158 aa, Pseudomonas aeruginosa; identical to SEQ ID NO: 13375

SEQ ID NO: 16999 - protein, 179 aa, Pseudomonas aeruginosa; identical to SEQ ID NO: 13376

SEQ ID NO: 17000 - protein, 183 aa, Pseudomonas aeruginosa; identical to SEQ ID NO: 13377

SEQ ID NO: 17001 - protein, 284 aa, Pseudomonas aeruginosa; identical to SEQ ID NO: 13378

SEQ ID NO: 17002 - protein, 482 aa, Pseudomonas aeruginosa; identical to SEQ ID NO: 13374

SEQ ID NO: 17003 - protein, 158 aa, Pseudomonas aeruginosa; identical to SEQ ID NO: 13375

SEQ ID NO: 17004 - protein, 183 aa, Pseudomonas aeruginosa; identical to SEQ ID NO: 13377

SEQ ID NO: 17005 - protein, 179 aa, Pseudomonas aeruginosa; identical to SEQ ID NO: 13376

SEQ ID NO: 17006 - protein, 284 aa, Pseudomonas aeruginosa; identical to SEQ ID NO: 13378

SEQ ID NO: 17007 - protein, 482 aa, Pseudomonas aeruginosa; identical to SEQ ID NO: 13374

SEQ ID NO: 17008 - protein, 158 aa, Pseudomonas aeruginosa; identical to SEQ ID NO: 13375

SEQ ID NO: 17009 - protein, 183 aa, Pseudomonas aeruginosa; identical to SEQ ID NO: 13377

SEQ ID NO: 17010 - protein, 179 aa, Pseudomonas aeruginosa; identical to SEQ ID NO: 13376

SEQ ID NO: 17011 - protein, 284 aa, Pseudomonas aeruginosa; identical to SEQ ID NO: 13378

SEQ ID NO: 17012 - protein, 487 aa, Pseudomonas aeruginosa; identical to SEQ ID NO: 13379

SEQ ID NO: 17013 - protein, 167 aa, Pseudomonas aeruginosa; identical to SEQ ID NO: 13380

SEQ ID NO: 17014 - protein, 183 aa, Pseudomonas aeruginosa; identical to SEQ ID NO: 13381

SEQ ID NO: 17015 - protein, 501 aa, Pelomonas sp. Root1217
MGGQRVASSKGPKKFTPDIEAFIVSFAADIRDGAAAIFAGAGLSVESGFVNWSALLRDIAHELGLDVDRETNLVAVAQYHLNERRNRSRINQKIVDEFSAGHSINESHEILARLPIATYWTTNYDAMLETALAATGKIVDVKHSVPQLKTVKRGRSVILYKMHGDASDPDNAVLTKDDYEGYFRDREPFVAALSGDLVAKTMLFLGFSFTDPNIDYVLSRVRVVLRSAPKQHYCILRREQRRTGEKVENFHYRQRQQDYFVKDLARVGIHALMVDEYGDVKRILRAVEERYRNRSVFIAGSAAEFDPWDTDTANRFLESLAKALIGKGMDIVTGFGLGVGPPIIAGAYGEILLHPGARSLSQLQAHPFPADTGTAPARLALYQQHRERMIGAAGVIVLVFGNKRDGSGALVPADGMRAELEIARAMGLHVIAAGATGWVAKEIAAALSPPPGATESYRKAFLAANDPKSKPDQIVRAIVSMIEEFAKSTTAGGRPPAKRGK

SEQ ID NO: 17016 - protein, 158 aa, Pelomonas sp. Root1217
MARRVFFSFHYERDVRRIVQVRNSWVVRPGDDAQPFYDKAEFEEAKKRAGGIEQWIEEQLKGCSVTVVLFGAETYERDWVKHEILRSYQLGKGMLAIDLQGVKDPQKGVDVQGRNPLLHWQANNVPFTQLYKTYSWVRDDGYHNMPAWIEAAAKTAGR

SEQ ID NO: 17017 - protein, 596 aa, Afipia sp. Root123D2; identical to SEQ ID NO: 15175

SEQ ID NO: 17018 - protein, 370 aa, Afipia sp. Root123D2; identical to SEQ ID NO: 15176

SEQ ID NO: 17019 - protein, 480 aa, Sphingomonas sp. Leaf230
MRKDITGFIDDYIKEMEAGQAAVFAGAGLSVPAGFVDWRHLLAPLAVELDLDIAQETDFIALAQFHVNANSNNRSQLNKAIIEAFSTGAKPTESHRLLAGLPIATWWTTNYDNLIERALSGAGKIPDVKHTVAQLANTKPRRDAIVFKMHGDVDHPDQAVATRDDYERYAGSRGAYINALSGDFVNKTFLFLGFSFTDPNLEAVLSRIRQTFEGNQRRHYAIFKNRTQNADEDDAVFINAKTRQSLVLRDLERFNIKPLMIDDYPEVPVILGELVKRYRRRTIFVSASASDFGVWGEAQVTGFMRRLGATVMDSEVRLVTGLGLGVGNALFTGAVEQVVRKGQGHMEDRIIVRPFPQALPDPDREDLWETYRQTIVAEAGVALFMFGNKEVGGAIQNARGVEREFEIAREHGLVVLPIGATGSMASVLASRALADPDVYLSELDGTQRAQLAELAKPVADLATLIEPIMALVRGLKGVRK

SEQ ID NO: 17020 - protein, 158 aa, Sphingomonas sp. Leaf230
MAKQCFLSFHYKPDVWRVSQVREIGTIEEQPLLASNKWEEIKEKGSDAIKAWIDTNMKGKKCLVVLVGTKTAGRAWVNYEIKKAWKDGLGVLAIHIHNLKDSSGNQSTKGSNPFSGLFVDGESVTGKVYDPPFVTSTNVYKHIQDNIASWVDTAVAAR

SEQ ID NO: 17021 - protein, 476 aa, Rhizobium sp. Leaf386
MRDDIKGFVAGFLAEIEAGNAAIFAGAGLSAPAGFVDWANLVRPLAEELHLDVDKESDLVAVAQFHVNANHQNRHALHTAIVNAFSADNPPTANHRLLARLPITTYWTTNYDKLIETALRDGGKIVDVKWAVPQLANTQPRRDAIVYKMHGDVDRPDEAVATRDDYERYVNERGAFVNALAGDLVSKTFLFLGFSFTDPNLEQVLARVRVTFKTNQRRHYAIFRNRSRRAGESEAEFEYGKIRQALVLEDLKRFNIRPLLVDEYSEITDILAEIERQYRGRTIFISSSASDFAPWGEPAVAGFMRTLGSALISAKFRIATGMGLGVGNALFTGALEAVYADRQGHLEDRILMRPFPQYIADEAKRKEVWEIYRQDIISSAGIAVFLFGNKNAGENTVIADGMIREFEIARQHGLTCIPVGATGYAAAELANRLIGDGADGDATLLDALKEMRDPRQNLNELIDPILKLAAAARKIR

SEQ ID NO: 17022 - protein, 205 aa, Rhizobium sp. Leaf386
MHEVFISYHHANDQWAKNQLQQWANQYGLFTDVSVDTNDVSDTLPTESIRRIIRDDYLMDSSVTIVLVGTETKGRKHVDWEIYSSMFDGAVNKKSGILVVQLPSTNPTYYTAAHEVEKSTVYPDCTSWSTITDRAEYERRYPCLPARIIDNLLAPKAKVSVTTWDRIAGNLNNLVTMIDAAHDERALCEYDLSRPMRSNNAPAFI

SEQ ID NO: 17023 - protein, 174 aa, Rhizobium sp. Leaf386
MRTAKTVLKEEVATAKTKNSFDIFLSHSTSDAEIILGVKGVLEDYGKTVYVDWLEDPQLNRTNVTAATAEVIRLRMRQCKSLVYVHTANSGSSKWMPWELGYFDGFNGAVAILPVTQSQQASYEGQEYLGIYPYLDEAPAKGNTTNEMWINKSSSASQPWTTWISAPSAFRKTI

SEQ ID NO: 17024 - protein, 334 aa, Arthrobacter sp. Soil762
MGDVDSNILTDMIVAAEKVTAALQEQPGLFEKWLEESVGSLKCKDPALPNELARLARDGALLVTTNYDDILADAGALKIVTESDGGAELRKAAKRLSAAIVHLHGHWKFPNSVVFGTSSYTRIASSESAKAFMTTLLYAETIVFVGVGEGLCDPNFEGLRKWCAAILGNTGDPHYRLAREGELAAIAAQHEAGENIKVVSYGADYKDLQPFLASVSPSVPTRSAGVAGGQALQSRAAPTPTPLSFATRAKETEDRVRLRAHIEALAPVLTSLNAASSDDQERFSDAAVFEDVLRQPLEEITRADPSELAGTDLSSAVAFAQRLRNLVSLVDIGT

SEQ ID NO: 17025 - protein, 318 aa, Arthrobacter sp. Soil762
MTNTDQTQAPWVFVSYSWDSAAHSDWVLALATRLRSDGVNVILDRWDTRLGSDLSLFMERAADSEYRILAVVTSAYVRKADAAEGGVGYERKMITPSLMKDLHGHRVVPVIRDNPEGELPRFLGAAKYVDLRDDELHEDGYYALLQELHGLQPTPKPPLGKNPFRLLAEDEVPVALRHDPSRYVAPAFEGKVSFDYSNNDGRFVIGTGERSFTIAFSTAGHGAIYVYTDPSDILTVALAPGVKSPGEVNDASAYDGSSRIRTIQVGDAAILRNQNNYWAAVFVDEVLTRESSPTGKPKIAFRYIIPAVPAPAFVTPAS

SEQ ID NO: 17026 - protein, 240 aa, Mycoplasma capricolum subsp. capripneumoniae
MKRVSKQENETNEDFGYRLVKQNLQIQDLRRYGIFTCLVDEYDKITEILQTLVDMYKRKTIFISGSADKYYGFRNENDAKLFLHTLAYKLAENNYHIVNGYGKGIGDFLLSGITEFCLKNNKKISDHLTVAPFPQNKISKANIEELYIKNREQMIEKCGIAIFVFGNKDNNNAEGIIKEYQLTNQKKLIPIPIKITGGSAKQIFDLEYSNDIDEIKNAIEKANSETTDNINKIVENILKS

SEQ ID NO: 17027 - protein, 156 aa, Mycoplasma capricolum subsp. capripneumoniae; identical to SEQ ID NO: 13541

SEQ ID NO: 17028 - protein, 240 aa, Mycoplasma capricolum subsp. capripneumoniae; identical to SEQ ID NO: 13540

SEQ ID NO: 17029 - protein, 156 aa, Mycoplasma capricolum subsp. capripneumoniae
MARKSFFSFHYDNDVWRVNVVRNSWVIRGKKKAGFIDKAEFEKTKLENELTIKKWIDKQLMGTSVTVALIGSETLNRKFVQYEIQESIKRKNGIIGISIGRIKNQNRLTSISQSPYTIVNEYRFIDICDGFYDYVLDDGYSNMGKWIEQAAKKKGK

SEQ ID NO: 17030 - protein, 307 aa, Actinobacillus pleuropneumoniae serovar 8; identical to SEQ ID NO: 15118

SEQ ID NO: 17031 - protein, 165 aa, Actinobacillus pleuropneumoniae serovar 8; identical to SEQ ID NO: 13444

SEQ ID NO: 17032 - protein, 214 aa, Actinobacillus pleuropneumoniae serovar 8; identical to SEQ ID NO: 13445

SEQ ID NO: 17033 - protein, 482 aa, Escherichia coli; identical to SEQ ID NO: 15249

SEQ ID NO: 17034 - protein, 166 aa, Escherichia coli; identical to SEQ ID NO: 15250

SEQ ID NO: 17035 - protein, 478 aa, Enterococcus faecium; identical to SEQ ID NO: 13220

SEQ ID NO: 17036 - protein, 161 aa, Enterococcus faecium; identical to SEQ ID NO: 13221

SEQ ID NO: 17037 - protein, 283 aa, Enterococcus faecium
  MOD_RES (227)..(227): Any amino acid
  MOD_RES (275)..(275): Any amino acid
MYKAYELDFTNADLNAFSSSSQSYTHVVNQIDHNQKSINKRIENLFESENDLVDYYSKDSKILDADEIIKDWFPTIKADIFISHSHADEKLAIRFASWLFENFGLTAFIDSSVWGYSSDLLKKIDQKYCYKEQTKTYDYDKRNVTTSHVHMMLSTALNNMIDSTECLFFLNTPNSISLSNEITNEQKFTYSPWLYSELTTASIVEKKNPRLESNPQMSTEBVRSIIXHYSSQENLQIKYSLNLSELTYLRKADLKKWALDAVECTKGSNTLDILXKNTIFTNL

SEQ ID NO: 17038 - protein, 478 aa, Enterococcus faecium; identical to SEQ ID NO: 13220

SEQ ID NO: 17039 - protein, 161 aa, Enterococcus faecium; identical to SEQ ID NO: 13221

SEQ ID NO: 17040 - protein, 283 aa, Enterococcus faecium; identical to SEQ ID NO: 13222

SEQ ID NO: 17041 - protein, 478 aa, Enterococcus faecium; identical to SEQ ID NO: 13220

SEQ ID NO: 17042 - protein, 161 aa, Enterococcus faecium; identical to SEQ ID NO: 13221

SEQ ID NO: 17043 - protein, 283 aa, Enterococcus faecium; identical to SEQ ID NO: 13222

SEQ ID NO: 17044 - protein, 329 aa, Enterococcus faecium
DIDDVSSTVITRDDYEKYDDDSYALFKETLKGDLLTKTFLFLGFSFTDPNLERILSDIRWVLRENQRPHYCIMRKILKENFVDSEDFFDQERYNYELTKRRLQINDLSRFSINVVEVDDYSEITDILKSIRKKYLRKTIFISGSAVDYTPFTSESKGLKFVEKLAYRLSESGYRIVSGYGLGIGNSIVSGVLKQRRNLRKNNIQDVLSLRPLPLDMPHEWRRYRENIIAESGISIFVFGNKLESGEIVTADGMIEEFELSVQNENIVVPIGFTKGASKVLFDKIQENFSDYFDDSLKSKFQALEKLDTEGEVDKKVEQIVSLIBSIQED

SEQ ID NO: 17045 - protein, 161 aa, Enterococcus faecium; identical to SEQ ID NO: 13221

SEQ ID NO: 17046 - protein, 314 aa, Enterococcus faecium
EKYDDDSYALFKETLKGDLLTKTFLFLGFSFTDPNLERILSDIRWVLRENQRPHYCIMRKILKENFVDSEDFFDQERYNYELTKRRLQINDLSRFSINVVEVDDYSEITDILKSIRKKYLRKTIFISGSAVDYTPFTSESKGLKFVEKLAYRLSESGYRIVSGYGLGIGNSIVSGVLKQRRNLRKNNIQDVLSLRPLPLDMPHEWRRYRENIIAESGISIFVFGNKLESGEIVTADGMIEEFELSVQNENIVVPIGFTKGASKVLFDKIQENFSDYFDDSLKSKFQALEKLDTEGEVDKKVEQIVSLINSIQED

SEQ ID NO: 17047 - protein, 161 aa, Enterococcus faecium; identical to SEQ ID NO: 13221

SEQ ID NO: 17048 - protein, 478 aa, Enterococcus faecium; identical to SEQ ID NO: 13220

SEQ ID NO: 17049 - protein, 161 aa, Enterococcus faecium; identical to SEQ ID NO: 13221

SEQ ID NO: 17050 - protein, 478 aa, Enterococcus faecium; identical to SEQ ID NO: 13220

SEQ ID NO: 17051 - protein, 161 aa, Enterococcus faecium; identical to SEQ ID NO: 13221

SEQ ID NO: 17052 - protein, 283 aa, Enterococcus faecium; identical to SEQ ID NO: 13222

SEQ ID NO: 17053 - protein, 478 aa, Enterococcus faecium; identical to SEQ ID NO: 13220

SEQ ID NO: 17054 - protein, 114 aa, Enterococcus faecium
MVRRVFFSFHYADVTRAMVVRNSWTLRGTKEAGFVDKAEFEKVKRNGDIAIKNWIDNQLIGTSVTVVLIGKETLDREYVKYEIQESYKRGNAILAVNIGKIKDFNQMTTTSQSV

SEQ ID NO: 17055 - protein, 478 aa, Enterococcus faecium; identical to SEQ ID NO: 13220

SEQ ID NO: 17056 - protein, 161 aa, Enterococcus faecium; identical to SEQ ID NO: 13221

SEQ ID NO: 17057 - protein, 283 aa, Enterococcus faecium; identical to SEQ ID NO: 13222

SEQ ID NO: 17058 - protein, 478 aa, Enterococcus faecium; identical to SEQ ID NO: 13220

SEQ ID NO: 17059 - protein, 161 aa, Enterococcus faecium; identical to SEQ ID NO: 13221

SEQ ID NO: 17060 - protein, 283 aa, Enterococcus faecium; identical to SEQ ID NO: 13222

SEQ ID NO: 17061 - protein, 478 aa, Enterococcus faecium; identical to SEQ ID NO: 13220

SEQ ID NO: 17062 - protein, 161 aa, Enterococcus faecium; identical to SEQ ID NO: 13221

SEQ ID NO: 17063 - protein, 283 aa, Enterococcus faecium; identical to SEQ ID NO: 13222

SEQ ID NO: 17064 - protein, 478 aa, Enterococcus faecium; identical to SEQ ID NO: 13220

SEQ ID NO: 17065 - protein, 161 aa, Enterococcus faecium; identical to SEQ ID NO: 13221

SEQ ID NO: 17066 - protein, 283 aa, Enterococcus faecium; identical to SEQ ID NO: 13222

SEQ ID NO: 17067 - protein, 489 aa, Staphylococcus aureus; identical to SEQ ID NO: 13604

SEQ ID NO: 17068 - protein, 202 aa, Staphylococcus aureus; identical to SEQ ID NO: 13267

SEQ ID NO: 17069 - protein, 344 aa, Staphylococcus aureus; identical to SEQ ID NO: 13268

SEQ ID NO: 17070 - protein, 477 aa, Legionella quateirensis
MNRDIKQFIKQYLKEIEADNAAIFAGAGLSAPAGFVNWKELLRPLVDELGLDIDKEQDLVSLAQFHNNEHGRHRINQQLINELSSNKEPSDSHRILAKLPISTYWTTNYDRLIEDALKENGKIVDAKYTNNHLATTKPRRDVVVYKMHGDIEHPDQTVLTKDDYEKYTIDYEPFVNALSGDLVSKTFLFLGFSFTDPNLDYILSRIRIYFKKNQRQHYCIFKSCNAKEYDSDAEFQHANTKQQLVISDLRRFNIKALLVEEYSEIPKILNAIERAFSRKTVFISGSASDFGQWSQVDTELALSTLSITMIDQGYKIATGVGLGIGNAIISGAISEIYRNGIGHVEDFLIMRPFPQFIADEDEREATWKQYRKDLIGHAGIALFIMGNKIINGKVANADGVRKEFEIAKDLGLLLVPVGGSEFMSRELWEEINTSFGDYFPNSSDDIKKAFEALGKPIEKPNELISIVIDFLNLLSKE

SEQ ID NO: 17071 - protein, 163 aa, Legionella quateirensis
MARKVFFSFHYENDIRRVAQVRNSWRIRNGNDTQPFMDKADWETLKKSSDKAIENWIEKQLKGTSVTVVLIGSDTFNRPWVRHEINRSHMLGKGMIGIYIHNVKDPQKGTSSKGINPFNYWYIEENGSKKYFSEIYPTYDWVIDDGFNNIEGWIETAVKNAGR

SEQ ID NO: 17072 - protein, 479 aa, Sphingomonadales bacterium BRH_c3
MKPAMRRFLEDFPRALNDGVGAVFVGAGTSMAAGYPSWANLLHDIGEELGVSSRDIHDLAALAQWSIQESGSETRVRNVIKEKIGVAYATPSILEVIARLPIAHIWTTNYDRLIEGAFAEIDRPLDSISGANDLALKPTPGAVRLYKMHGSVDRLDDIVISTDDYELYRKKRGAFLPLLQAHLTSMSMLFVGLSLTDPNIRHVLSLIREAFTDAPPEHFAIVRPPQEGDYDSEAEFKARLAQHNLWAKDLRRYGLIAVEIDDYEQVPDLLRQIERRVAARRIWVSGSWPIEDGDIVASDIYRLSEDVGRWIGRSERDLVSGAGLLVGSAVISGFLEVLRHGGGWDLNRRLIARPFPQPLAGAEPDAAKWTELRKELARQAGGVIFIGGVKREGDKLVTAGGVLEEYEKARAVGAFLLPIGKTGGAAQEIAEMLIGSNVEATGPNAMRPTDDELKFLLDPANERHDVLACIDAVMTRLTK

SEQ ID NO: 17073 - protein, 155 aa, Sphingomonadales bacterium BRH_c3
MSETKNVFISHVHKDDHGLQKLKDLLAPKGMDIRDSSIHTGKFNNATDPAYIKSQILAPAINWAGVFICYVTPDTKNSDWVNWEIEYAAKQGKRIVGIWEHGEKECDLPEALEEYADAMVGWNGEAIIDAINGADTWEKPDGGPCAPVPLKRHPC

SEQ ID NO: 17074 - protein, 500 aa, Bacillus cereus
MTVDERDKKNFINSYVRALNNGRAAIFAGAGVSIPSGGISWSDLLREEAESIGLDITKENDLISVAQYIYNESGTKQTITNLLKNKIAREGKINKNHEIIRSLPIRKIWTTNYDDFLEKAYLDVNKVIDVKKSIEDMATEIDFSETTIYKMHGDIGIPSSTVLLKDDYEIYDKKNELFTKTLQTDLLSNTFLFIGFSFDDPNLESILSKVRIMLEGNPRRHYCLLKKISESDPEFDQFDDQKEKARELEYRINKQRLRVADLLRYGIKAILVDSYDEMTQLLDSIKRKYLSTKVFVSGAYEGVDNFLGETGDDALKQANRFCEKLGEVLFTEGFEISSGFGLGVGRNVVTGVLIQESLLNHTRAGSQLVIRPFPTQQTVPEKSAYREKILSECGVTICVFGNKKASGSNELINSPGVEEEARIAGELGQLVLSIGSTGYVAKKIWEDQLGKITTTFSENPKIIESYNNLNNPNQSIDQLIDDILIILKEYKTNPEKFKSV

SEQ ID NO: 17075 - protein, 206 aa, Bacillus cereus
MGTNVFISFRFSDGNDLKEELEELFDSSTEVFNRSENEDRSTMSEDTIQKYLYEKLKQTSVTIVLLTPKAVSYKKGIFGLYDDWLYDELRYSLEDRNENRTNGVVAVYTNESKDLILSTSSHTCSVCNQESNCEVILDFDNLVRKNVLNVKAAYKSNLCNNLFDEDKDSYISLVHIDDFKKDYVKYIEAAKEKRDRKDEFELVKKM

SEQ ID NO: 17076 - protein, 126 aa, Escherichia coli; identical to SEQ ID NO: 15183

SEQ ID NO: 17077 - protein, 155 aa, Escherichia coli; identical to SEQ ID NO: 13289

SEQ ID NO: 17078 - protein, 126 aa, Escherichia coli; identical to SEQ ID NO: 15183

SEQ ID NO: 17079 - protein, 155 aa, Escherichia coli; identical to SEQ ID NO: 13289

SEQ ID NO: 17080 - protein, 476 aa, Burkholderia ubonensis
MAFGREIEAFIKEYVKDLAEDNAAVFAGAGMSKAAGFVDWLELLRDIADEIGLKVEIEHDLIALAQFHVNESKGTTKLSRKIIEEFSEQAEPSETHTILARLPIRTYWTTNYDTLIEDALRRAYKVPDVKHNVEQLNTTRPKRDAVIYKMHGDVSLPQQTVLYKEQYERYFKTHEPFVTALSGDLVSKTFLFIGFSFTDPNLDYVLSRLHTATKRNHYCFMRREAILPGDDEEVQRYKRRKQELRVDDLKRFGIQTLLIDDYKDVPLILTAIETQFLKKAVFVAGSADDFGTWRRNEAQDFIHSLSGSLIRHNYRVVNGFGWGVGSAVINGALEAIYLNPGRYSEDQLVMRPFPQFQSKEQDLNTLWEEYRQRMIALAGVSLFLFGNKRDDTGQIVLAKGMMREFEITVEAGRIPIPIGVTGYVAYAIWEEIAPRAADIYRGIEWIIPMIAEICDTNVDRTLITEKIIAILNRLGK

SEQ ID NO: 17081 - protein, 160 aa, Burkholderia ubonensis
MPKRNVFFSFHFDNDVMRVQQVRNMGVIEGNTPVSPNTWEEVKRKGDASIEKWIDDNMKGKSCVVVLIGSETSKRPWVKYEIQKAWKDGKGVVGIHIHNLKCPNTGTCTIGADPLAMFTFKIGDKIVTPKTYNPKSSDAYNDITDNLDKWVEEAIKIRAG

SEQ ID NO: 17082 - protein, 155 aa, Burkholderia ubonensis
MAEQRNVFISHVHEDDHGLQKLKDLLAPKGVDVKDSSIHTGKFNNAKDEHYIKTQILAPAINWAGIFICYVSPQTKNSEWVNWEIEYAAKQGKRIIGIWEHGEKECDLPSALEQYADAMVGWNGDAIIDAINGKDTWEKPDGGPCDPVPLKRHPC

SEQ ID NO: 17083 - protein, 197 aa, Burkholderia ubonensis
MPTFYTKAEARAFASRKLQKSFTTDSKRVLREAARSAASHDLFDIFLSHASKDAELILGVKELLEDQGFKVYVDWVEDAQTDRTKVDRENADLLRRRMRQSNSLIWVATSAASESKWMPWELGYFDGFKPNQVAVMPLVDNPGATFKGQEYLALYPVIGKDRYIDGRQDVFVEDLGRQWSTLRNFGKGTSTWSRYTR

SEQ ID NO: 17084 - protein, 476 aa, Burkholderia ubonensis; identical to SEQ ID NO: 17080

SEQ ID NO: 17085 - protein, 155 aa, Burkholderia ubonensis; identical to SEQ ID NO: 17082

SEQ ID NO: 17086 - protein, 160 aa, Burkholderia ubonensis; identical to SEQ ID NO: 17081

SEQ ID NO: 17087 - protein, 197 aa, Burkholderia ubonensis; identical to SEQ ID NO: 17083

SEQ ID NO: 17088 - protein, 476 aa, Burkholderia ubonensis; identical to SEQ ID NO: 17080

SEQ ID NO: 17089 - protein, 160 aa, Burkholderia ubonensis; identical to SEQ ID NO: 17081

SEQ ID NO: 17090 - protein, 155 aa, Burkholderia ubonensis; identical to SEQ ID NO: 17082

SEQ ID NO: 17091 - protein, 197 aa, Burkholderia ubonensis; identical to SEQ ID NO: 17083

SEQ ID NO: 17092 - protein, 476 aa, Burkholderia ubonensis
MHRDQIKLVEALSKELEEGNLAIFAGAGFSRGAGYVDWKTLLKPIADDLDLDVEKEWDLVTLAQYHTNVNHANRAKLNQLLVTEFSTDLAPTENHRILARLPIYTFWTTNYDKLIESSLELNGKIPDVKYTVKQLATTRRHRDAIVYKMHGDSDHASEAVLIRDDYERYHIAMQQFITALSGDLVSKTFLFLGFSFTDPNLEYILSRVRIQYGKDQRQHHCILRHVSQDAGESKADFEYRQRKEKLFEGELLRVGIKTTYVDEYAEITTILKTVEDKHKRRTIFISGAAHDYSPWTRIEAEKFVYNLSREISKADFRVISGFGLGVGSAVITGVLEQTIMNGRRLDSEQLVLRPFPQTQSGTRPLPELWREYRHTMIDHAGIAIFLFGNKLQGDTVVESNGMREEFDIAREKGVFVIPVGITGSITRKIWEEVLAGFDPTKHQNGAQILPLLQALGDDKTDFDAATGIVLKLLKTI

SEQ ID NO: 17093 - protein, 146 aa, Burkholderia ubonensis
MARKVFFSFKYDDVQRAMNVRNSNVITGAIKSGFIDKADFEEVERKGDNAIKAWIDKQLEGTTVTVVLVGANTNKSRWVKYEIDQSIARGNGILTIDISKIKDMGGNTTNCCGLRVKGYNHYLWNNGNGRDNLGKWVEDAAIAAGK

SEQ ID NO: 17094 - protein, 536 aa, Burkholderia ubonensis
MSGLESLITNDSNLRTMTISDVLSRQLQAHSSGPFLFAGSGLSRRYLGLDDWAGLLRRFCQHIKPYEYYLSSANGDLPSVAAAMAEDFHEVWWTRDEYAASREKHSKKIGERTAPLRVVICDYLKSVGKPDLSQSDFADELAALSQLNVDGIITTNWDTFLQSLFPDYRVYVGQDELLFSNPQSIGEIYKIHGCVNTPRSLVLTSADYKDFNERNAYLAAKLITIFVEHPVIFMGYSLHDDNIISLLKAICACIGSDKLQQLNNNLIFVQRTRELEDDSISQTVIALEKTQIPITLIKAKSFVGVYQAIESTKRKIPARVLRYCKEQLYELVKTTEPHGKLVVVDVDQVNGREDIEFVVGVGVAAEREEEERRRLGDVGYRGIKSIDLFEDLISRNKGYEARRVLLEAMPQVSKGLKYLPVFFLLRAAGVNSRDEYALSEYDVDKYLELMPADFRAKNLRKGYMRNYRELSVSEMIQKCTPEIVAQYLPFAEWQREDYAGIQQFLAANIDRFQTSNYSTAFRKLACLYDRAVYGWE

SEQ ID NO: 17095 - protein, 315 aa, Burkholderia ubonensis
MATIFFSYCHKDEVLRNELEAHLALLKHEGLVDAWHDRRIVAGEEIDDAIFSKLEKADIILLLVSSDFINSAYCYSREMARAMERHSAGEARVIPVILRHCDWTRAPFGKLLAAPRDGKPVASWPDRDEALADVARQVRQAVDASGAVAKAGTPKQAAVGRSADASSLPRSSNLRLKQEFTEKDADDFVRSTFEFTCRFFEGSVQAVGERNRDVTGAFERIDSRRMTAVLYRSGRKIAECSIRTDSLGRTNGIAFSYDSSASSGSYNEMLTPEAGEQSLHFKPMGMAWNGERDKRLSEEGVAEFLWAMFIERAQS

SEQ ID NO: 17096 - protein, 484 aa, Burkholderia vietnamiensis
MTTSPTQFSPDIQAFINAFANDIADGTAAIFAGAGLSVGSGYVNWPELMREIAEELGLDVDRETNLVAVAQYHLNERRNRTRINQKIIDEFSVGHALNENHKILARLPIATYWTTNYDRMIETALEASGKVVDVKYTIEHLKKTQRGRQAVVYKMHGDVGEPDKAVLTKDDYEGYFRDREPFVTALTGDLVSKTMLFVGFSFTDPNIDYVMSRIRVVLRSQPKQHYCILRREARRSGEKHASFEYRRRQQDYFVKDLARIGIHALMVHEYADVTRLLQAIEARYRTRTVFISGSAHEFDPWLPDDAGRLIESLSAGLISKGFTVVTGFGLGVGPSVIAGALHEILAHPKRHSQNQLQAFPFPVATGSTIARRALYRPHREAMIGKAGIAIFLFGNKRDGHGNIVPADGMRDELAIARALGLHIVAAGSTGWVAQEIANDLAGSLAGRTKSFRKAFAIANNPDPGIDIASTVGAILTMVNEYREL

SEQ ID NO: 17097 - protein, 189 aa, Burkholderia vietnamiensis
MAKRCFFSFHYQDVIDFRANVVRNHNVTKADNGGFFDASIWENARKQGDLALKRLIHGGLDNTSVTVVLIGSQTYARRWVQYEIMKSIERGNAVLGVHINNIRDRHGLIKAQGPSPFDYLGLEISADGRSGTPTMWDGRQWVYYGDLGQFQINEQSQDKRGKNLQLKTWLRTYDWVADKGFDNFGKWVA

SEQ ID NO: 17098 - protein, 129 aa, Burkholderia vietnamiensis
MGYKVYVDWIHDRHLSRDDVTKETAHVLRLRMQTSKSLFYATTANSSGSRWMPWELGFKDGHNRKAAILPVSQSGGNSYAGQEYLGIYPYVSRDPMQGSSKDRLWINASSTCYVLFEKWLEGEEPYERG

SEQ ID NO: 17099 - protein, 477 aa, Burkholderia vietnamiensis
MKFDPDIEAFIKDFVKDLRENNVAVFAGAGMSKGSGFVDWPTLLSDIAEELGLSINKEYDLISLAQYHVNHRGNRSGIKRKILEEFSEQAEPSKTHTILSRLPIQTYWTTNYDTLIEDTLRKSQKIPDIKFSVKQLANTRPKRDAVIYKMHGDVHSPDDAIITKEQYEAYHRTHAPFITALSGDLISKTFLFIGFSFADPNLDYVLSRLNQESVERQHYCFMKKETRATEDDDETFNYKQRKQNLRVADLKRYKIKALLVDDYPDIFSILEEVERRHKKNTVFISGSADEYGGWDRIHAQKFIHKLSKEIINCGATIVNGFGWGVGSAVINGALEAIYENYERSSEDQLIVRPFPQFETGNKKLPDLWEDYRQRMISLAGIAVFIFGNKFDDNRNIIQADGVIREFEISVNHGLIPIPIASTSYAAKEIFDRIEKDPRKFYGDIDWIFPEIKDLSDPALTIDTLTKKVATIIKKLNK

SEQ ID NO: 17100 - protein, 203 aa, Burkholderia vietnamiensis
MARKTFISYKFSEAISLRDKIIDALGDDATYYQGETAESPDLTDTTAENIKKNLKDMMFDTSVTIVIASPNIIQSKWIDWEIEYSLKEITRENKTSRTNGIVGVIMKHNGSYDWLIKNYTNEDGCSVRKYTESKLYNIINKNRYNYTDDGKYSCSHCKTFSQLDGSYISLIDEDKFLIDPDKYIENAYNKSKDISNFNISKLR

SEQ ID NO: 17101 - protein, 484 aa, Burkholderia ubonensis
MTTSSTQFSPDIQAFINAFANDIADGTAAIFAGAGLSVGSGYVNWSELMREIADELGLDVDRETNLVAVAQYHLNERRNRTRINQKIIDEFSVGHALNENHKILARLPIATYWTTNYDRMIETALEATGKVVDVKYTVEHLKKTQRGRQAVVYKMHGDVGEPDKAVLTKDDYEGYFRDREPFVTALTGDLVSKTMLFVGFSFTDPNIDYVMSRIRVVLRSQPKQHYCILRREARRSGEKRASFEYRRRQQDYFVKDLARIGIHALMVNEYADVTRLLQAIEARYRTRTVFISGSAHAFDPWLPDDAGRLIESLSAGLISKGFTVITGFGLGVGPSVIAGALHEILAHPKRHSQNQLQAFPFPVASGSAVSRRALYRPHREAMIGKAGIAIFLFGNKRDDHGDIVPADGMRDELAIARALGLHIVAAGSTGWVAQEIANDLAGSLAGRTKAFRKAFAIANDPDPGIDIASTVGAILTMVNEYREL

SEQ ID NO: 17102 - protein, 189 aa, Burkholderia ubonensis
MAKRCFFSFHYQDVIDFRANVVRNHNVTKDDNGGFFDASIWENAKKQGDLALKRLIHGGLDNTSVTVVLIGSQTYARRWVQYEIMKSIERGNAVLGVHINNIRDRHGFIKAQGLSPFDYLGLEISADGRSGTPTMWDGRQWVYYGDLGRFQIKEQSQDKRGKNLQLKTWLRTYDWVTDKGFDNFGKWVA

SEQ ID NO: 17103 - protein, 129 aa, Burkholderia ubonensis
MGYKVYVDWIHDRHLSRDDVTKETAHVLRLRMQTSKSLFYATTANSSGSRWMPWELGFKDGHNRKAAILPVSQSGGNSYAGQEYLGIYPYVSKDPMQGSSKDRLWINASSTCYVLFEKWLEGVEPYERG

SEQ ID NO: 17104 - protein, 476 aa, Burkholderia ubonensis; identical to SEQ ID NO: 17080

SEQ ID NO: 17105 - protein, 160 aa, Burkholderia ubonensis; identical to SEQ ID NO: 17081

SEQ ID NO: 17106 - protein, 493 aa, Burkholderia ubonensis
MKGRAQSAILTTSSTQFSPDIQAFINAFANDIADGTAAIFAGAGLSVGSGYVNWSELMREIADELGLDVDRETNLVAVAQYHLNERRNRTRINQKIIDEFSVGHALNENHKILARLPIATYWTTNYDRMIETALEATGKVVDVKYTVEHLKKTQRGRQAVVYKMHGDVGEPDKAVLTKDDYEGYFRDREPFVTALTGDLVSKTMLFVGFSFTDPNIDYVMSRIRVVLRSQPKQHYCILRREARRSGEKRASFEYRRRQQDYFVKDLARIGIHALMVNEYADVTRLLQAIEARYRTRTVFISGSAHAFDPWLPDDAGRLIESLSAGLISKGFTVITGFGLGVGPSVIAGALHEILAHPKRHSQNQLQAFPFPVASGSAVSRRALYRPHREAMIGKAGIAIFLFGNKRDDHGDIVPADGMRDELAIARALGLHIVAAGSTGWVAQEIANDLAGSLAGRTKAFRKAFAIANDPDPGIDIASTVGAILTMVNEYREL

SEQ ID NO: 17107 - protein, 189 aa, Burkholderia ubonensis
MAKRCFFSFHYQDVIDFRANVVRNHNVTKDDNGGFFDASIWENAKKQGDLALKRLIHGGLDNTSVTVVLIGSQTYARRWVQYEIMKSIERGNAVLGVHINNIRDRHGFIKAQGPSPFDYLGLEISADGRSGTPTMWDGRQWVYYGDLGRFQINEQSQDKRGKNLQLKTWLRTYDWVTDKGFDNFGKWVA

SEQ ID NO: 17108 - protein, 129 aa, Burkholderia ubonensis
MGYKVYVDWIHDRHLSRDDVTKETAHVLRLRMQTSKSLFYATTANSSGSRWMPWELGFKDGHNRKAAILPVSQSGGNSYAGQEYLGIYPYVSRDPMQGSSKDRLWINASSTCYVVFEKWLEGVEPYERG

SEQ ID NO: 17109 - protein, 493 aa, Burkholderia ubonensis; identical to SEQ ID NO: 17106

SEQ ID NO: 17110 - protein, 189 aa, Burkholderia ubonensis; identical to SEQ ID NO: 17107

SEQ ID NO: 17111 - protein, 129 aa, Burkholderia ubonensis; identical to SEQ ID NO: 17108

SEQ ID NO: 17112 - protein, 536 aa, Burkholderia ubonensis; identical to SEQ ID NO: 17094

SEQ ID NO: 17113 - protein, 315 aa, Burkholderia ubonensis; identical to SEQ ID NO: 17095

SEQ ID NO: 17114 - protein, 481 aa, Enterobacter hormaechei subsp. oharae
MSVQFSTGVEAFIKTYVKDLEEGTAAVFAGAGLSRTCGYVNWSDLLREIADELGLSIELEHDLISVAQYHVNLKNSSIGLARKILEEFSEQAEPSEAHQILARLPITTYWTTNYDTLIEDSLKKNYRVADVKRKTDDLITTRPKRDAVVYKMHGDVDSPAAAVLYKSQYEQYYKTHEGFVTALSGDLISKTFLFIGFSFTDPNLDYILSRLHVPATHRRPHYCFLRKEPIAPQGKEDPDCAKYRQRRQEHHIRDLLRFGIQAVLVDEYDDIPIILREIESRFLKKTIFISGSAEDYGDWNKQEALNFVHSLSASLVKAGYRVVNGFGWGIGSAVINGALEAIYDKPDRYSEDQLIMRPFPQHPSNGKDLPALWDEYRHRMIGLSGVALFIFGNKLLDGHIVNADGVRKEFKIAVDKGVAVIPLGVTGFMAKELSDEMLADSAKYFTPFPWLETEVAQLSDLNTDRTKIEKRVLDILKKLGG

SEQ ID NO: 17115 - protein, 155 aa, Enterobacter hormaechei subsp. oharae
MKRKVFYSFHFDNDVMRVQQIRNMGLLEGDEPVNPNTWEKIKRTEQGVKNWINENLAGKSCLVVLIGSQTASRPWVKYEIQKAWEEGKAVVGVYIHRLKCPRNGFGTKGANPFDQFTFKRGDQVIKPHVYEPSFDDAYNDIKNNLATWIENAIKQ

SEQ ID NO: 17116 - protein, 280 aa, Enterobacter hormaechei subsp. oharae
MFVDIAITNFDTSSLQFSPSEISDYRKKSNAAFNRDKLQNFLLGVDNVLDAEAITKSCFPDVHADVFLSHAHRDEDDVIKLALSLEKVGLSVFVDSCVWGWVDEILRVVDEEFCYNKTSRTFDYHMRNRTTSNIYMILNSALQNMISRCELLLFLQTNNSIKIGEYVKDKTHLSSPWIFSELMFAKIGQRTNRRQVRRHAFESMAADSAEIELRKSFETAYLHPGNRYQLTSNQLIQWIHEGYQKKSHDEIEALTHLDTLYERAGVLPAALASSRLLLPS

SEQ ID NO: 17117 - protein, 529 aa, Enterobacter hormaechei subsp. oharae
MNFKKKLEEHFKQFEASPVLFVGSGVSRRYLGVSCWQDLLKHFAEAIGENHIKLKTKSNGDLPEYAQLLVSAYADKWWDTEEGQLALCEKEQEKTFINEQSPLKLSISKYIESAHENIIDNDELKHEISLFAKANIDGIITTNWDVFLESLFPKFTTFIGQDGLITGRSHGIAEIYKIHGCCTEPNSLILTSSDYDKYRKKNPYLSSKLLTMFIERPVIFLGYSLTDEHIAEILEDIVSCFPDASLDFLQNKLLFVEWKPELEEADISDSVIHKKIPVKYVQAPSYKEIFEVLSETKKRIPAHLFRMIKDELYELVLTDDPKGKLYVRDSEKIEEGVSTTEFVVGYGAISMVKKSESMAAKGLVGLERVDLIREVVFENGHYDWECVVNDVLPNICKGNARIPVFHFLNHAHLINSDGSIINETGLSGGVLSRLNITPVSFQSQGWDKRRSENVPEVRVGVNELYLAYDFGFFLRMMPYMEPGLIKRDMDELLKILKKHIDEAMSIQVLSSNFCKLVCLYDFIKNSNRF

SEQ ID NO: 17118 - protein, 323 aa, Enterobacter hormaechei subsp. oharae
MTTLVFSYSHADEAQRNELEKHLSPLKRMGKITTWHDRRIVPGQEFEHQIDHYFSQADIILLLISSDFIASDYCYQIEMTNALERHKKGEAVVIPVILRECAWHQLPFGSIMAATIDGKAISRFASHDEGYVQVADAVSRAIANLEAKKPQQIVHAPASADPMLQATDTVFTPRSSNLSLPKSFTDLDKDRARREGFEYVARYFANSLDELKKRHAGLDVDFHRPDNDSFTCAVYINGSKVGQCGVWCGSRNMGFGDICYSQSGVTRNSCNESLSVADNGQTLGFRTLMGLGYSNSRDSLLTNEGMAEHLWDMFFSPIQQRNR

SEQ ID NO: 17119 - protein, 481 aa, Escherichia coli; identical to SEQ ID NO: 14099

SEQ ID NO: 17120 - protein, 155 aa, Escherichia coli; identical to SEQ ID NO: 13289

SEQ ID NO: 17121 - protein, 481 aa, Escherichia coli; identical to SEQ ID NO: 14099

SEQ ID NO: 17122 - protein, 155 aa, Escherichia coli; identical to SEQ ID NO: 13289

SEQ ID NO: 17123 - protein, 481 aa, Escherichia coli; identical to SEQ ID NO: 14099

SEQ ID NO: 17124 - protein, 155 aa, Escherichia coli; identical to SEQ ID NO: 13289

SEQ ID NO: 17125 - protein, 478 aa, Enterococcus faecium; identical to SEQ ID NO: 13220

SEQ ID NO: 17126 - protein, 161 aa, Enterococcus faecium; identical to SEQ ID NO: 13221

SEQ ID NO: 17127 - protein, 283 aa, Enterococcus faecium; identical to SEQ ID NO: 13222

SEQ ID NO: 17128 - protein, 482 aa, Escherichia coli; identical to SEQ ID NO: 15249

SEQ ID NO: 17129 - protein, 166 aa, Escherichia coli; identical to SEQ ID NO: 15250

SEQ ID NO: 17130 - protein, 482 aa, Escherichia coli; identical to SEQ ID NO: 15249

SEQ ID NO: 17131 - protein, 166 aa, Escherichia coli; identical to SEQ ID NO: 15250

SEQ ID NO: 17132 - protein, 481 aa, Escherichia coli
MSVQFSAEVEAFIRTYVKDLEEGVAAVFAGAGLSRTSGFVNWSELLREIAEELGLSVELEHDLISVAQYHVNKNNSSTGLARKILEEFSEQAEPSEAHKILARLPIRTYWTTNYDTLIEDSLKENYRVADIKRRTDDLISTRPKRDAVVYKMHGDVSSPGDAILYKAQYEQYYKTHEGFVTALSGDLISKTFLFIGFSFTDPNLDYILSRLHVPEKHRRRHYCFLRKEPSLPQGNEDEAGAMYRQRRQEHHIRDLLRFGIQAVLVNEYDDIPLILKEIESRFLKKTIFISGSAEEYGAWDKQEALNFVHILSSSLVKNGYRVVNGFGWGIGSAVINGALEAIYSKPDKYSEEQLIMRPFPQHSSNDKALSELWDEYRQRMIGLSGIAIFLFGNKLHDGRIVNADGVRREFQIAQETGGVVLPLGVTGYMAKELADEMLTDPSKHFVRYPWLEKEVAQLADLSANRANIEMKVLEILKKLGG

SEQ ID NO: 17133 - protein, 155 aa, Escherichia coli; identical to SEQ ID NO: 13289

SEQ ID NO: 17134 - protein, 482 aa, Escherichia coli; identical to SEQ ID NO: 15249

SEQ ID NO: 17135 - protein, 166 aa, Escherichia coli; identical to SEQ ID NO: 15250

SEQ ID NO: 17136 - protein, 482 aa, Escherichia coli; identical to SEQ ID NO: 15249

SEQ ID NO: 17137 - protein, 166 aa, Escherichia coli; identical to SEQ ID NO: 15250

SEQ ID NO: 17138 - protein, 481 aa, Escherichia coli; identical to SEQ ID NO: 17132

SEQ ID NO: 17139 - protein, 155 aa, Escherichia coli; identical to SEQ ID NO: 13289

SEQ ID NO: 17140 - protein, 481 aa, Escherichia coli; identical to SEQ ID NO: 17132

SEQ ID NO: 17141 - protein, 155 aa, Escherichia coli; identical to SEQ ID NO: 13289

SEQ ID NO: 17142 - protein, 482 aa, Escherichia coli; identical to SEQ ID NO: 15249

SEQ ID NO: 17143 - protein, 166 aa, Escherichia coli; identical to SEQ ID NO: 15250

SEQ ID NO: 17144 - protein, 481 aa, Enterobacter cloacae; identical to SEQ ID NO: 16920

SEQ ID NO: 17145 - protein, 155 aa, Enterobacter cloacae; identical to SEQ ID NO: 16921

SEQ ID NO: 17146 - protein, 481 aa, Enterobacter cloacae; identical to SEQ ID NO: 16920

SEQ ID NO: 17147 - protein, 155 aa, Enterobacter cloacae; identical to SEQ ID NO: 16921

SEQ ID NO: 17148 - protein, 477 aa, Shewanella frigidimarina
MTREQELFIQRFLNELEEDNVAIFAGAGLSSSAGYVNWKELLRPLADELSLDIDEEQDLVGVAQYYLNENGRNRISQQLMDEIATAKQPTTNHQILSRLPIKTYWTTNYDKLVEKSLEGAGKIVDVKYTNNHLAVTKKKRDAIVYKMHGDIDHPDTAILTKDDYEKYPLKMKPYITALSGDLVSKTFLFIGFSFTDPNLDYIMSRVKAYFEEHQRQHYCIFKQCNEHEFDNPESYENAKIKQALLIKDLARFQIKTILVENYSDITEILHRIDRAYRRKTVFLSGSAHEFSPFKQSDVESFLCLLGKVLIERNCKISSGIGLGIGNAFITGAIEGVYTHHNGYVNDHLSMRPFPQYIEDKKARDDTWKKYRYEVIGDAGIAIFFMGNKIVDGNTVLADGVRKEFEIAHELGLALIPVGCSGSMAKELWQEVMGNVAKFYDESNEELIQAINELGEEVEKPEQLISKIINVIDLMSKE

SEQ ID NO: 17149 - protein, 147 aa, Shewanella frigidimarina
MARRVFFSFHYQHVWKVNQIRSMPNITGTAAAGFQDASLWEESKKKSDKAIKALIDEGLKNTSVTVVCVTYGTANRDYINYEIDQSLAKGNGLVAVQIHHLKDSNGQTGSAGAIPSKIASNGFKAYKYTNKEDLAKWIEEAAALAGK

SEQ ID NO: 17150 - protein, 481 aa, Enterobacter cloacae; identical to SEQ ID NO: 16920

SEQ ID NO: 17151 - protein, 155 aa, Enterobacter cloacae; identical to SEQ ID NO: 16921

SEQ ID NO: 17152 - protein, 103 aa, Aeromonas hydrophila; identical to SEQ ID NO: 13523

SEQ ID NO: 17153 - protein, 155 aa, Aeromonas hydrophila; identical to SEQ ID NO: 13524

SEQ ID NO: 17154 - protein, 192 aa, Aeromonas hydrophila; identical to SEQ ID NO: 13600

SEQ ID NO: 17155 - protein, 103 aa, Aeromonas hydrophila; identical to SEQ ID NO: 13523

SEQ ID NO: 17156 - protein, 155 aa, Aeromonas hydrophila; identical to SEQ ID NO: 13524

SEQ ID NO: 17157 - protein, 192 aa, Aeromonas hydrophila; identical to SEQ ID NO: 13600

SEQ ID NO: 17158 - protein, 103 aa, Aeromonas hydrophila; identical to SEQ ID NO: 13523

SEQ ID NO: 17159 - protein, 155 aa, Aeromonas hydrophila; identical to SEQ ID NO: 13524

SEQ ID NO: 17160 - protein, 192 aa, Aeromonas hydrophila; identical to SEQ ID NO: 13600

SEQ ID NO: 17161 - protein, 103 aa, Aeromonas hydrophila; identical to SEQ ID NO: 13523

SEQ ID NO: 17162 - protein, 155 aa, Aeromonas hydrophila; identical to SEQ ID NO: 13524

SEQ ID NO: 17163 - protein, 192 aa, Aeromonas hydrophila; identical to SEQ ID NO: 13600

SEQ ID NO: 17164 - protein, 487 aa, Bordetella hinzii LMG 13501
MADLLARHKLVPFFGAGISRQHLGLAAAELARDMAAKIGSPPETPLADLSDAYVEARGLDAFVAFLSSKLVVAELDERKVPSHRLLVSLMQNVLYTTNQDNLFELVAAKYGRPYRRVVTVDDLSESIPGEPLLIKFHGDMAVPASLVFGTKSYQARMSEEDHPLDIRLKSDLLGKRLMFLGYSLSDENIAKIFATVARIFKGTLPPSYLVAFDDDPVLIATAQQYQVKVVIPPRIFPDAANNAEAFERFLQVLCNETRTRQVKNGTDDLFSMGLINPHIVTDFEVRSVATVVRREPFETAVNAFRATFDSAHAPEYLEQEITDLFVELVGRVDPKASDQMAELAAALFNFHISPGAAFTATAHLMAACNKRPKVSGFDHYQLISPALPKGCMPVAAAAAVALLNERGEPITDSFRRSADWWFRQHDKVSENLKDQVTAAIQAVWSGPHAARSPLRHPLPLFGGDVDFHDIRDDMLARLPKRPFRPKE

SEQ ID NO: 17165 - protein, 239 aa, Bordetella hinzii LMG 13501
MARCTAPVEGHRSSSAAAACPACRGRYGRGGYGGYSGYSGYGSYSPRSYSSPGGGGTSSGGSSGSARPRWSRAGSSVSYTFAQVASLTPVRAAVEREAAAKPDLRDCFLCHAWDDRQGAAKELHDLLQAAGVKVWFSEKDLGLGVPMMRAIDKGLAASKIGLVLVTPALLDRLPKEGVADKELSTLLQGNRLVPIVHGTTYTALREVSPMLASRSGLDTSEDTMEVVAAKISELVAIWS

SEQ ID NO: 17166 - protein, 1197 aa, Sinorhizobium fredii NGR234
MRLHHLGPDFPEALVDELLEGNVVFLCGAGVSAPQLPNFRDLVLNVYNRLGEERTPAEDHAFQASRYEEVLGALSRRLVRSEDVIDAAAAELQVPANPDTAHHDVILRLSRDQVGRPIIVTTNFDTLFERSLMVSHSAAFATQESAAGQDIPAPGSARFTGVVHTHGRLTDDELNLSQTELVLTSAQYGEAYLRAGWAARFLFDLMRCRTLVLVGYTANDAPVRYILNVLEGDRERFTDLRRVYALSSSNGDPQAAAAPWQALAVEPLLFDPEGGNPYGPLWSSLEGLANLVENPDVRRREMIAAIVSGPVSETTDHDIRTLKWALGARADLFEHFITRCEDAAWFDTLAVVIRAFGERARAWMLARWFARGWDDKVRYLTAIKHLGRGSQEFSDAVFRELDQNRPQDAIWEKAWRLLAEAAAAASHDSLRDYQLRHRLNRGPVVESDLGHLVNAIGPRLTIEAPFRDEDPSEHPNQLSDIARFSMESEHQEFLRDVLASPAGNAENILRLLERGSQRLSCQLRTARDAELIGQVRDVTDFGVPSVVNHQQNQHRRGFVPLTVFITSALPMAAQANLEGTKRVVGGWRAEPFNLTTRLWMHALTHQALFTADEAIEALATSNEAAFWSFALEFVAIVRARIAQASGEAVERLVRRLLVEGPQRYADREQNADGIDWQDRARDRDIWVRLTAISEHVVLPQEAETLLHEIRERRTYLSREIDERDLFRTWSSGVRAVRGRTAQIVSAQPSERLTIADRLEESSDIEDREGWVEYCREDPVGAYAALRSHPLEIGVVARWATWLEIIPSRANMTSPEWLRVIQEAVELLGEADDEIVIALVGPLARIAEHSRQLQLALPANWWDRLWQAAEGEPDVDWGDDVETYDRVINSTGGSLAEALLQAISSQRENGDDVNAADFQRLQRMIVSMTYSGEMARAACVRYLSFVFSVSNEIALDHLRPFIAADNDEGRRLRGVLVEYNSFVADTEISFADLILQGVRESRQKDVSAANAASHLVRAVVASFDEPNVVRGISPQQARQTLREAAADIRVGALKIMTNWLEENPDDERAAAWTDLYGPTFQAIWPRDRSYLSNDVSKEVFSLATAAGTAFEAAVEALLPYVSTFEDDWLSLHDLERNNAELATRFPVAALRLVWAACGPPCKGRTSDIAAILDAVAAANPALAVDRRMHKLRLLAVSH

SEQ ID NO: 17167 - protein, 640 aa, Sinorhizobium fredii NGR234
MKYDFSTLSPDDFENLSRDLVGAETGVRFEAFTVGADDGMDGRHAKADGSIILQAKHYLRSGFSKLKSKMREERVSIDELAPQRYILTTSVPLTPANKATLTEIIGPSLVGPGDIFGADDLNGLLRSYPEIVKAHEGLWAHSTPVLEEVVTNAVRKAMAPAEVPKTLARLMPPPGAADAPIEPVKRDTIFIIKASPIDDEFTLWLAPKLEAEGYQVFADVLTLMPGERWRREITSALRHRAVKVLLLCRDSSLEDSSIQDDLDIALETGKELGDQRFVIPLRMETFRKIKGLGDTVAVDFVRNWGEGLLKLIDTLQRQKVQRSIDTMINPNWEIYRRRGAVPIIEVPERLTSNWLRVAEAPDFIRYFECSGSINKGRLQGAIDSYGHPCALVGGSGFLAFGGVPEIEMAFEAVGRFKLKHEIPLVEFTEGGFQRLRIDRQIASNLVVAMLKKAWFNYCKRNGFIEHGYSNGIGFHASPEQAPTGKRIPWGNQAEKKRSSMLRNSAKGHIWQFGVTAMPAFWPFWHFKLKSRVLFAQDNDTPAGLVVDDPKKLHRLRRSVCKGWRNKQWYGRLLAFLELLSGESAFVRLPLSETETFVIEASPMLFSSPVSTVLPNDLDDEDEELDDSTLGRPDSDEEGGE

SEQ ID NO: 17168 - protein, 278 aa, Pseudoalteromonas atlantica T6c
MAKVSFLDKRIFRQFLEVVSVISVVASLAFIFVEIPKDCKLVVGGIFLILLFGVYVALWVRSNNLQQIHTNIEGSEVTIKKGDIFKQPDFKVIAFNEYLDTKVDNKIISSNSLNGIFINSHLDTSVVDLDRYIENYPFEDDDVVGENPERKSGKKKRFEIGAICVYGEYLLTAFSKFDDKNRARLTMPEYLSFLINFWDRVNRIYAQKSVSVPIFGSGITRIKEHKNISDEDLLKIMLWTFRISEMRFKYPAKLTIIIHPEKMDAINLLDIKSSNNGL

SEQ ID NO: 17169 - protein, 189 aa, Pseudoalteromonas atlantica T6c
MAYRNGNYSAFYVSEPFTEGGLGAHATKDFVSYSMLRAWKGKDSDFPFNDSHNKNYNVRDGSDWDKTLKPRIRERLSKSKNIILFLSSVTKSSKAIREEIDYGINTLGLPVIVVYPEYTEKSDIINCQSKTFKKQIKDLWDKLPKFRDSMDSVPTLHIPNKKALIEKSLKDTDFMVNTKKDAAKSFYPC

SEQ ID NO: 17170 - protein, 282 aa, Acidovorax ebreus TPSY
MIHVMAKVNFFDKRVIKKFLEITAVVSGTLSFVVIFVDIPAEWKLKAGLAFLAVQALTYLVIWLWSNNLNSIDINVEGSDVAIKTGDIFRQPGLKAIAFNEYFDTQVDNKIIGETSLNGVFIQKHLGVPLSELDRHIEEYAFDNSEVLDENETRKQGKKKRYQIGTICLYKDYLLTAFSKFDENNKALLTMPEYLEFLINFWDKVNNVYAQQSVSTTIFGSGITRIKGHKNISDEDLLKIMLWTFRISEMRFKYPAKLTIVIHKDKIDQINLLDIRSARNGV

SEQ ID NO: 17171 - protein, 187 aa, Acidovorax ebreus TPSY
MTYRNGNYTAFYVAEPFHPSSLGANATKDFQYYNTLRMWKGADATFPFVDSHDKTYSVRDGSDWESTLKPRLRERLRNSKNIILILSSITTNSRALREEIDYGINDQGLPIIVVYPEYATKESLLVGGSLKQAVKNLWENLPVFRDSMSKVPTLHVPMNKELIKKSLQDGEFMVGSVKAPGIYRYNP

SEQ ID NO: 17172 - protein, 296 aa, Eubacterium eligens ATCC 27750
MKVLFCTMRYNWHYIFITSNKITASLFSVWGFVTLVTPTDIMLNCIDNVVMRMIVAVFILMVIYFAIVIGVTIYTKQRKQVKIFDLHSNHSLFVEYGDLFNNGNPNEKKNIVFAGNRCFDTIVDDDLVGSKKIHGLALERIYKQNNRDSDTVSNEIQNNLLLHGYKYTNIKQKEKRSGNLRRYDIGSVAEIKGLNNEQYFILGLTYFDNELRAHVEKEDYIKAIASLVKYISERSQGFPTYMPVIGTGGADVGSANDLAVYIVKTIELFKDKIDCDIHIVVRDKEEKIGLMNLKML

SEQ ID NO: 17173 - protein, 184 aa, Eubacterium eligens ATCC 27750
MNRTGTYVAFDGQGTTDPTESDIHYFNLLKAWNRLGSIDFKFTNSHEKTYQVRDSSSKATLFNRLETRLSASKNFLLIITDKTNYDRGILNWEIEKAVDYYELPIIIAYPGYSKIGAPSELNTMWPKSLAERIQNGNAHCIHIPFKKEPIFDAINQFSVVNSKYPKGGALGCYSDEAYKSWGIV

SEQ ID NO: 17174 - protein, 297 aa, Eubacterium rectale ATCC 33656
MNKVNVIKQNLEFIGKTWMKCIGTFASILSLFFLFWTWDDIRITSTQYKCVIIILLCVLALILAILWTCIFKRTKTIWESPSGKIKVCYSDIMKDGFDKRNKEEKLFVIPVNSCFDTIVDEDISTCSKPLVSPNLLHGRWIKTMVNKGFTIEEIDNKIHNCLEMQNLLPKSIIADEDKERGKREVYELGTVAMIRGNNNSTFLLLAISEYDKDNIAHTSVDDLEMCIKSLLNFYDQHDQGHRLVIPLMGTNLSRAGLSHNDSLRVITSLFQLYGDKIHGEVDVVIYKGDKDKVTLDI

SEQ ID NO: 17175 - protein, 188 aa, Eubacterium rectale ATCC 33656
MSYQNANYSAFYVSEPFSESNLGANSTHDFVYYNMLRMWKGEDNSFPFNDAHDKTYNVRDGSDWEKTLKPRLHTRLDNSKNIILFLSSITANSRALREEMNYGIGTKGLPVIVIYPDYDKKSDIVDSNGNFKKQIKDLWDKLPAFRDNMSSVATLHIPCTKSVIISALNNEDFMVNTMADAEKYYYKP

SEQ ID NO: 17176 - protein, 283 aa, Bacillus thuringiensis serovar finitimus YBT-020
MWKLKEILQDKNFWINTWVLPGALFGIATTLLTFIEFESKTIKQFILGVLLFLTLLIILYQIIRVLCLKSLKLDIDGSEIQIKKGDIFSFPRNVYKVIAFNEFFDTKVDDHIISRTSLNGKYLNKYYSDTSDLDNRIIEDPRMKLRITEKDVNRPLGGKQTRYRLGSVYKDMDFFLVAFSKFDDQNEANLKLHEYANCLINFWNEVNSLYAQQEIVVPLLGSGITRHKDFDAEPHQLLEVMLWTFKISKVKFREPSKVTILLHGEHHKKINFYKLKEFENNGI

SEQ ID NO: 17177 - protein, 189 aa, Bacillus thuringiensis serovar finitimus YBT-020
MAYKNGNYTAFYVSEPFSESNLGAAATRDFSSYSMLRAWKGLDSTFPFNDSHNKNYNVRDGSDWEKTLKPRLRDRINNSKNIILFLSSVTKNSKALREEIEYGVGTKSLPIIIIYPEYKNKSDIIDCKTETIKDEIKKLWDKIPILRNSMQNVPTIHLPYKKELIRKALNDTDFMVNSKCGAGKFFYTC

SEQ ID NO: 17178 - protein, 297 aa, Bacillus amyloliquefaciens Y2
MNIIGSDRNTNIGGFMWKFKELIRDKTFRRWALSIILTIPTSVSTFISFLDLDARCRLIILLILVGLSLVIIIVQFIRLLFMNNITLNLNGSEVEIKKGDIFEVPRNNYKVIAFNEYFDTQVDDVIIARETLNGQYIKRYYSHQDITELDQKIKDDVKLKIEEKNVERPFGGKTTRYSLGSVFKDMDFFLVAFSKFDRENRAQLKLNEYASCMLNVWNEINTLHASKEVFIPLLGSGITRHVDSDVGVNELLHIMLWTFQISKVKFREPAKVTILLYKNDHKKINFYKLKEFEKNGL

SEQ ID NO: 17179 - protein, 156 aa, Bacillus amyloliquefaciens Y2
MLRAWKGKDNNYPFNDSHDKTYNVRDGSDWEKTLKPRLRKRLDQSKNIIFFLSKHTENSKALREEIDYGINVKGLPVIVVYPELSEKSDIIDCTTKVFRSEVVNLWSRVPVFKDSMLKVPTIHIPYKKDQIKKALENKDFMINSKISAGSVYFYPC

SEQ ID NO: 17180 - protein, 278 aa, Pseudomonas monteilii SB3078
MAKVNFFDKRVIKKFLEITAVVSGTLSFIVIFVDVPAEWKLKAGLAFLAILALTYVVIWLWSNNLNSIDINVEGSDVAIKTGDIFHQPGLKAIAFNEYFDTQVDNKIIGETSLNGVFIQKHLGVPISELDRYIEEYAFDESEVLEENEARKHGKKKRYQIGTICLYEDYLLTAFSKFDENNKALLTMPEYLEFLINFWDKVNNVYAQQSVSTTIFGSGITRIKGHKNISDEDLLKIMLWTFRISEMRFKYPAKLTIVIHKDKIDQINLLDIKSARNGV

SEQ ID NO: 17181 - protein, 187 aa, Pseudomonas monteilii SB3078
MAYRNGNYTAFYVAEPFHPSSLGANATKDFQYYNTLRMWKGADATFPFVDSHDKTYSVRDGSDWEYTLKPRLRERLRSSKNIILILSSITTNSRALREEIDYGINDQGLPVIVIYPEYATKESLLVGGSLKQAVKNLWGNLPVFRDSMNKVPTLHVPMNKELIKKSLQDGEFMVGSMKAPGIYRYNP

SEQ ID NO: 17182 - protein, 278 aa, Pseudomonas monteilii SB3101; identical to SEQ ID NO: 17180

SEQ ID NO: 17183 - protein, 187 aa, Pseudomonas monteilii SB3101; identical to SEQ ID NO: 17181

SEQ ID NO: 17184 - protein, 285 aa, Sulfurospirillum multivorans DSM 12446
MSLKKVGFFDKAIRDKFSKVIAWMSSIVTLVFVFSPALPSNWKLDFGMGFIAILFVIYIYLWVKANLLSSVKINIEGSEVNIKAGDIFAQDGLKVIAFNEYFDTKVDDNIISSKSLNGIFINKYFKDSAGVLDQHIENYDFEENKIEVNSTRNDGKKQKFKIGTICLYKFQNNEEFILTAFTKFDIQNKATLTMPEYLEFLIKFWDEINRVYAQKSVSVPIFGSGITRIKEHKNISDEELLKIMLWTFRISEMRFKYPAKLTIVVHKDKINQINLLDIEMAKNGL

SEQ ID NO: 17185 - protein, 187 aa, Sulfurospirillum multivorans DSM 12446
MAYRNGNYCAFYVMNEGTDSNLQAHATKDFVYYNTLRMWKGGDSTFPFVDSHDKNYNVRDGSDWEKTLKPRLRNRLANSKNIILFLSEKTKSSQALREEIDYGINNQGLPVIIIYPDYDSKASLLKDGSLKKEIKDLWDKLPIFRDSMKSVSTLHIPMKKELIKSALENEDFMVNSKVASGCFFYKV

SEQ ID NO: 17186 - protein, 278 aa, Pseudomonas alkylphenolia
MRKVSFFDSQLMKNFKERISTTSTVLSLALIFVEIPAQMKALAGAIFIGLLIVVYVWLWHRANQLKSVDLDIDGSKVTVKAGDLFLEPGLKVIAFNEYFDTVVDDRIISAHSLNGVFINLHLPSTLTKLDHHLETYPFDPDELGELNTARRAGKLQKYKIGTLCVYDDFILTAFSKFDNQNRAMLTMPEYLEFLINFWDKINKVYAQQSVSTPIFGSGITRIKEHKNISDEDLLKIMLWTFRISEMRFKYPAKLTIVIHQDKIKTINLLDIKSAKNGL

SEQ ID NO: 17187 - protein, 187 aa, Pseudomonas alkylphenolia
MAYRNGNYCAFYVAEPFHESSLAAHATKDFVYYNMLRAWKAKDPSFPFIDSHAKTYSVRDGSDWESTLKPRLRERLQSSKNIVLFLSSVTISSVALNEEIEYGIENQGLPVIVIYPEFKTKGSLLLNGALSEDVKKLWSRLPTFKRLMSKVPTLHIPLNQETIVTALINSDFSLTSKTKPDVYRYSA

SEQ ID NO: 17188 - protein, 278 aa, Pantoea sp. PSNIH1
MSKVSLCDKQVFNEFKGYASLLFGFIGAVVIFVDIPANQKIAAGLACIAVLIIAYLWLWYRANSLREINLTIEESTVIIKTGDIFKQEGLKAIAFNEYFDTQVDERIIAGSSLNGKFINEHLSCTVSELDDYISNYRFDAEEIKDRNEERIEGKKQKFEIGTICVYGDYILTALSKFDEHNVAHLTMPEYLGFLISFWDKVNRVYAQKSVSVPIFGSGLTRIKGHKIIDEQDLLKIMLWTFRISEMRFKHPAKLTIMIHEGKIDKVNLLELKTARNGL

SEQ ID NO: 17189 - protein, 184 aa, Pantoea sp. PSNIH1
MSGNYCAFYVAEPFHEGALGAHATKDFVYYNTLRMWKGADSGFPFTNSHDTTYNVRDGSNWEQTLMPRLRQRLRNSKNIILFLSDRTINSRALREEIDYGINSLGLPVIVIYPDYDTKESLLVNNILKQQIQNLWSKIPAFRDSMHLVPTLHIPMNKALIRQSLADSKFMVKTKTVPDVYRYSA

SEQ ID NO: 17190 - protein, 278 aa, Pantoea sp. PSNIH2; identical to SEQ ID NO: 17188

SEQ ID NO: 17191 - protein, 184 aa, Pantoea sp. PSNIH2; identical to SEQ ID NO: 17189

SEQ ID NO: 17192 - protein, 275 aa, Bacillus sp. BH072
MRDKTFRRWALSIILTIPTSVSTFISFLDLDARCRLIILLILVGLSLVIIIVQFIRLLFMNNITLNLNGSEVEIKKGDIFEVPRNNYKVIAFNEYFDTQVDDVIIARETLNGQYIKRYYSHQDITELDQKIKDDVKLKIEEKNVERPFGGKTTRYSLGSVFKDMDFFLVAFSKFDRENRAQLKLNEYASCMLNVWNEINTLHASKEVFIPLLGSGITRHVDSDVGVNELLHIMLWTFQISKVKFREPAKVTILLYKNDHKKINFYKLKEFEKNGL

SEQ ID NO: 17193 - protein, 190 aa, Bacillus sp. BH072
MGYRNGNYAAFYVSEPFSESSLGANATKDFVSYNMLRAWKGKDNNYPFNDSHDKTYNVRDGSDWEKTLKPRLRKRLDQSKNIIFFLSKHTENSKALREEIDYGINVKGLPVIVVYPELSEKSDIIDCTTKVFRSEVVNLWSRVPVFKDSMLKVPTIHIPYKKDQIKKALENKDFMINSKISAGSVYFYPC

SEQ ID NO: 17194 - protein, 278 aa, Klebsiella oxytoca; identical to SEQ ID NO: 17188

SEQ ID NO: 17195 - protein, 184 aa, Klebsiella oxytoca; identical to SEQ ID NO: 17189

SEQ ID NO: 17196 - protein, 92 aa, Nostoc sp. PCC 7120
MPDYLGFLIRFWDKVNRVYAQKSVSVPIFGSGITRIKEHKNISDEDLLKIMLWTFRISEMRFKYPAKLHIIIHESKIDRINLLDIKSAKNGL

SEQ ID NO: 17197 - protein, 186 aa, Nostoc sp. PCC 7120
MSYKNGNYCAFYVAEPFNESALGAYATKDFVYYNLLRTWKGSDSSFPFNDSHSKTYSVRDGSDWELTLKPRLRERLRNSKNVILFLSERTVNSRALKEEIDYGINSLGLPVIVIYPDYDTKESLLHNGSLKDEIKNLWNKLPILRESMNKVPTLHVPMNKYLITESLKNNDFMTNTKTTPDVYLYR

SEQ ID NO: 17198 - protein, 282 aa, Ralstonia solanacearum GMI1000
MIHVMAKVNFFDKRVIKKFLEITAVVSGTLSFIVIFVDVPAEWKLKAGLAFLAILALTYVVIWLWSNNLNSIDINVEGSDVAIKTGDIFQQPGLKAIAFNEYFDTQVDNKIIGETSLNGVFIQKHLGVPISELDRYIEEYAFDESEVLEENEARKYGKKKRYQIGTICLYKDYLLTAFSKFDENNKALLTMPEYLEFLINFWDKVNNVYAQQSVSTTIFGSGITRIKGHKNISDEDLLKIMLWTFRISEMRFKYPAKLTIVIHKDKIDQINLLDIKSARNGV

SEQ ID NO: 17199 - protein, 187 aa, Ralstonia solanacearum GMI1000
MAYRNGNYTAFYVAEPFHPSSLGANATKDFQYYNTLRMWKGADATFPFVDSHDKTYSVRDGSDWEYTLKPRLRERLRSSKNIILILSSITTNSRALREEIDYGINDQGLPVIVIYPEYATKESLLVDGSLKQAVKNLWGNLPVFRDSMSKIPTLHVPMNKELIKKSLQDGEFMVGSMKAPDIYRYNP

SEQ ID NO: 17200 - protein, 285 aa, Nitrospira defluvii
MTKVAFFDRRLLATFYKYATAVSVFLSFVFPFVDIPKDCLPAPSYGLWYKAAAFVAAFLVVYIAVWVWSNRLRNVSINIEGSEVNVVAGDIFQQPGLKVIAFNEYFDTLVDERVISSRSVNGMFVKQILKTPVADLDNYIENYQFQDDEIIGENQNRRAGKKKRYKIGTICVYEEFLLAAFSKFDEDNKAVLTMPEYLEFLINFWDRVNSIYGQRSVSTTIFGSGITRIKGHKLISDEDLLKIMLWTFRISEMRFKYPAKLTIVIHEEKINKINLFDIQTVKNGV

SEQ ID NO: 17201 - protein, 189 aa, Nitrospira defluvii
MAYRNGNYSAFYVTEPFNPSALGAHATRDFFYYNQLRMWKGQDSVFPFNDSHDKTYNVRDGSDWETTLKPRLRERLRNSKNIVLFLSSTTANSRALREEIDYGINDQGLPVIVVYPEYASESDLLTADNQALKQAVKNLWDKLPIFRDSMSSVPTLHVPNKKSVIEKALNNAKFMVGTKGDSGVFFYKP

SEQ ID NO: 17202 - protein, 297 aa, Bacillus methylotrophicus YAU B9601-Y2; identical to SEQ ID NO: 17178

SEQ ID NO: 17203 - protein, 190 aa, Bacillus methylotrophicus YAU B9601-Y2; identical to SEQ ID NO: 17193

SEQ ID NO: 17204 - protein, 156 aa, Clostridium sp. CAG:813
MNGKFILNYVKNIEEFNSFIQNENEATDLKRKILKDKSVYPLGRIIKYNDFLLLAFTHFDKNNIAHISKIEYEKCLLNMWKELRRTYAGEKIFLPLIGSGITKFDDVPEKSNLDLLKCVLCTLKASGEQFTETITILVTNEIWEDLNLFDNSESVK

SEQ ID NO: 17205 - protein, 186 aa, Clostridium sp. CAG:813
MTYRNGNYTAFYVEEPFDDSNLKLYATKDFCYYNMIRTWKKGDSLFPFNDSHDKTYNVRDGSDWEKTLKPRLHERLDNSKNILLILSSCTKNSRALREEIDYGINTCELPIIVVYPEYSEKSDIAKDRKITQKIKNLWDKLPIFRDSKKNVPVIHIPYKKELIKKALADEDFMVNSKCKVNDYFFK

SEQ ID NO: 17206 - protein, 307 aa, Xenorhabdus bovienii str. feltiae France
MKSNGTEVYIKQKNNSIGFQPTIIKVQGTFMKVGFFDKIVWKEIINHASIISVVFTITLAFVDIPKNIKIFSGVVFLVIFLVLYIFLLYKANQAKLVEIKIDGSNVIVKFGDIFKEEGYKAIAFNEYFDTEINDRIISHSSLNGQYINNHLECSIDEINGYIKNYKFNISDFSGVNNDRKVGKKQKYKIGTICVHGEYLLTAFSKFNENNEARLTMPEYLGFLICFWDQVNRVYAQKSVSVPVFGSGITRIKEHKNISDEELLKIMLWTYRISEMRFKYPAKLSIIIHESKRDLINLYELKSVKNGI

SEQ ID NO: 17207 - protein, 187 aa, Xenorhabdus bovienii str. feltiae France
MSYKNGNYAAFYVDEPVCETNLKPHSAKDFVYYNMIRAWKGKDSKFPFVDSHDKNYNVRDDSDWEKTLKPRLRDRLNNSKNIVLFLSERTVNSRALREEIDYGINTLGLPVIVIYPDYDSKESLLDSKGLKDDIKKLWNNLPIFRDSKNNVPTLHIPFKKDLIIKALSNDDLMINSKGKISTYYYRA

SEQ ID NO: 17208 - protein, 277 aa, Xenorhabdus bovienii str. feltiae Florida
MKVGFFDKIVWKEIINHASIISVVFTITLAFVDIPKNIKIFSGVVFLVIFLVLYIFLLYKANQAKLVEIKIDGSNVIVKFGDIFKEEGYKAIAFNEYFDTEINDRIISHSSLNGQYINNHLECSIDEINGYIKNYKFNISDFSGVNNDRKVGKKQKYKIGTICVHGEYLLTAFSKFNENNEARLTMPEYLGFLICFWDQVNRVYAQKSVSVPVFGSGITRIKEHKNISDEELLKIMLWTYRISEMRFKYPAKLSIIIHESKRDLINLYELKSVKNGI

SEQ ID NO: 17209 - protein, 187 aa, Xenorhabdus bovienii str. feltiae Florida; identical to SEQ ID NO: 17207

SEQ ID NO: 17210 - protein, 278 aa, Legionella massiliensis
MTKVKITDTRVLRKFLEKISVISMVITTIVIFVDIPTECRIKYGIAFLILLPILYIAIWYRANSLQDINLNIEGSAVNIKVGDIFHQQGFKVIAFNEYFDTLVDDKVIAQKSLNGIFINKHLNSSPIELDEYIQTYEFDENEILATNVPRKSGKTTQYHIGTICVYEDYLLTAFSKFDSNNKANLTMPEYLEFLITFWDKVNRVYAQQNVSTTIFGSGITRIKGHKNISDEDLLKIMLWTFRISEMRFKYPAKLTIIIHKDKINQINLFDIKSARNGM

SEQ ID NO: 17211 - protein, 187 aa, Legionella massiliensis
MSVRNGNYCAFYVAEPFSTSSLGAHATKDFYYYNLIRLWKGSDATFPFIDSHDKTYNVRDGSSWELTLKPRLRERLRVSKNIILFLSSTTTNSNALREEIDYGINDQKLPVIVVYPDYNSKASLLTNGYLKQDVKNLWDKLPIFKNSIKNVPTLHIPMDKEVIRQALTNQGFMFSTQKEADIYIYKT

SEQ ID NO: 17212 - protein, 278 aa, Legionella massiliensis; identical to SEQ ID NO: 17210

SEQ ID NO: 17213 - protein, 187 aa, Legionella massiliensis; identical to SEQ ID NO: 17211

SEQ ID NO: 17214 - protein, 282 aa, Achromobacter sp. 2789STDY5608606; identical to SEQ ID NO: 17198

SEQ ID NO: 17215 - protein, 187 aa, Achromobacter sp. 2789STDY5608606
MAYRNGNYTAFYVAEPFHPSSLGANATKDFQYYNTLRMWKGADATFPFVDSHDKTYSVRDGSDWEYTLKPRLRERLRSSKNIILILSSITTNSRALREEIDYGINDQGLPVIVIYPEYATKESLLVDGSLKQAVKNLWGNLPVFRDSMSKVPTLHVPMNKELIKKSLQDGEFMVGSMKAPGIYRYNP

SEQ ID NO: 17216 - protein, 278 aa, Serratia marcescens
MSKVGFFDRRILEKFMKLASAVTAFISATVIFVDIPTDLKITFGISLIVTLIIFYIILWSHANRLKSISLSVEGSEVNIITGDIFKQDGFKAIAFNDYFDTMVDEKIISSKSLNGVFLKQHLSGSIAALDAHIEHYQFDDGDFLENDTERKTGKTKKFNIGTLCVYDDYLITAFSKFDKNNQARLTMPEYLEFLIKFWDKVNKVYAQKSVSVPIFGSGITRIKEHKNITDEELLKIMLWTFRISEMRFKHPAKLTIVIHEDKIDQISLLDLKLARNGL

SEQ ID NO: 17217 - protein, 187 aa, Serratia marcescens
MSYKNGNYCAFYVQPPFNETSLGAHATKDFVYYSMLKAWKGSDSTFPFNNSHDKTYNVRDGSNWESTLKPRLRERLSNSKNIILFLSVRTVSSLALNEEIDYGINTLGLPVIVIYPDYKTKTDLLDGQSLKQAIRNLWDKLPTFRNSMSKVPTLHVPMDKELIKTALNDKDFMVNSKKEANIYRYNP

SEQ ID NO: 17218 - protein, 278 aa, Serratia marcescens
MAKVSLWDKQVFNEFKDCTLLIFSLIGGPLYFVDIPTEQKIVYGIICLVVLILVYLYLWHRANSLREIKLTIEGSTVIIKTGDIFSQDGLKAIAFNEYFDTQVDDRLIAASSLNGKFITDHLPCSIPELDEHIKNYKFDTDEIKDIDEDRKEGKKQKYEIGTICVLGDFLLTALSKFDSRNEAHLTMPEYLEFLISFWDKVNRVYAQKSVSVPIFGSGLTRIKGHKTIDEQDLLKIMLWTFRVSEMRFKHPAKLTIMIHEGKIDKVNLLELKAARNGL

SEQ ID NO: 17219 - protein, 185 aa, Serratia marcescens
MNGNYCAFYVAEPFNESFLGAHATKDFVYYNTLRMWKGADASFPFHNSHDTTYNVRDGSNWELTLRPRLRERLRNSKNIILFLSDRTINSRALREEIDYGINTLGLPVIVIYPDYSTKESLLDRNNILIPQIQNLWGKIPTFRDSMSLVPTLHIPMNKALISHSLIDSKFMVKTKAVPDVYRYTV

SEQ ID NO: 17220 - protein, 278 aa, Legionella pneumophila
MAKVKIYDKHVFRSFKEKSSAIFAIITALLIFIDIPNDYRILTGLVVAVILVIVYIAIWLHSNNLQDITLNIEGSTVNIKVGDIFTQQGFKVIAFNEYFDTAVDNKLIAEKSLNGTFIKEHLDIPPSELDKYITAYDFESDEIIDTDVKRISGKDTKYSLGTICVYKDYFLTAFSKFDSNNKANLTMPEYIEFLISFWDKINRIYAQQSVSTTIFGSGITRIKGHKNISDEDLIKIMLWTFRISEMRFKYPAKLTIVIHEDKINQINLLDIRSARNGM

SEQ ID NO: 17221 - protein, 187 aa, Legionella pneumophila
MSIRQGNYSAFYVAEPFSTSSLGAHATKDFCYYNLLRSWKGADATFPFIDSHATTYNVRDGSSWELTLKPRLRERLRASKNIILFLSSFTANSNALREEIDYGINDQELPVIVIYPDYNTKESILSNSSLKQNIVNLWNRLPVFRDSMKNVPTLHVPMAKDVIRQALNNTNFMLSTKREPGNFFLKA

SEQ ID NO: 17222 - protein, 278 aa, Legionella pneumophila; identical to SEQ ID NO: 17220

SEQ ID NO: 17223 - protein, 187 aa, Legionella pneumophila; identical to SEQ ID NO: 17221

SEQ ID NO: 17224 - protein, 282 aa, Pseudomonas aeruginosa 2192; identical to SEQ ID NO: 17198

SEQ ID NO: 17225 - protein, 187 aa, Pseudomonas aeruginosa 2192; identical to SEQ ID NO: 17215

SEQ ID NO: 17226 - protein, 286 aa, Bifidobacterium pseudocatenulatum
  DSM 20438 = JCM 1200 = LMG 10505
MFFLMHGKFVSRLPRLKETASIWGSVSFGVATTLLTFFPKISIIGKDINNSIILFATCVIFGIGALCQTMFGKKNTIWEKGNNKITAIYGDILDESSKHEEIRVIPVNTAFDTIVDDPCSTDKPLVSPNSLHGQWLRKQECEQEILNNEVLGNMSGKPYRKIDPLQKKRGNCMEYKIGTYSFARRKNITYLLVALTAFDTNNVAHSTQTDLETVLQSAVSYHNQCGQGAKLMIPLMGTANSRMKLDHQESFDIIKNYLLLRKKDINGCIEIVVYQKDANKVSIWNS

SEQ ID NO: 17227 - protein, 188 aa, Bifidobacterium pseudocatenulatum
  DSM 20438 = JCM 1200 = LMG 10505
MNYRNGNYSAFYVSEPFDEYSLGARQAHDFCYYSLLGAWKKKDSNFPFIDSHNKTYSVRDGSDWEGTLKPRLHKRLMNSKNIILFLSSITKESRALREELQYGIGVLRLPVIVVYPELENTNIVDSSRRDFSSSVKRLWDNLPIFKKMMNAVPTIHVPFKKDLIARALSDEEFTVQSESRPGAYFYSI

SEQ ID NO: 17228 - protein, 297 aa, Roseburia intestinalis L1-82
MNKVNVIKQNLEFIGKTWMKCIGTFASILSLFFLFWTWDDIRITSTQYKCVIIILLCVLALILAILWTCIFRRTKTIWESSSGKIKVCYSDIMKDGFDKRNKEEKLFVIPVNSCFDTIVDEDISTCSKPLVSPNSLHGRWIKTMVNKGFTIEEIDNKIHNCLKMQNLVPKSIIADEDKERGKREVYELGTVAMIRGNNNSTFLLLAISEYDKDNIAHTSVDDLEMCIKSLLNFYDQHGQGHRLVIPLMGTNLSRAGLSHNDSLRVITSLFQLYGDKIHGEVDVVIYKGDKDKVTLDI

SEQ ID NO: 17229 - protein, 188 aa, Roseburia intestinalis L1-82
MSYQNANYSAFYVSEPFSESNLGANSTHDFVYYNMLRMWKGEDNSFPFNDAHDKTYNVRDGSDWEKTLKPRLHTRLDNSKNIILFLSSITANSHALREEMNYGIGTKGLPVIVIYPDYDKKSDIVDSNGNFKKQIKDLWDKLPAFRDNMSSVATLHIPCTKSVIISALNNEDFMVNTMADAKKYYYKP

SEQ ID NO: 17230 - protein, 278 aa, Legionella drancourtii LLAP12
MTKVKITDTQVFRKFLEKISVISMVITTIVIFVDIPAECRIKYGIAFLILLPILYIAIWYRANSLQDINLNIEGSAVNIKVGDIFNQQGFKVIAFNEYFDTLVDDKVIAQKSINGIFINKHLNISPIELDEYIQTYEFDENEILATNVPRKSGKTTQYHIGTICVYEDYLLTAFSKFDSNNKANLTMPEYLEFLITFWDKVNRVYAQQNVSTTIFGSGITRIKGHKNISDEDLLKIMLWTFRISEMRFKYPAKLTIVIHKDKINQINLFDIKSARNGM

SEQ ID NO: 17231 - protein, 187 aa, Legionella drancourtii LLAP12
MSVRNGNYCAFYVAEPFSTSSLGAHATKDFYYYNLIKLWKGADATFPFIDSHDKTYNVRDGSSWELTLKPRLRERLRVSKNIILFLSSTTTNSNALREEIDYGINDQKLPVIVVYPDYNSKASLLTNGYLKQDVKNLWDKLPIFKNSIKNVPTLHIPMDKEVIRQALTNQGFMFSTQKEADIYIYKT

SEQ ID NO: 17232 - protein, 278 aa, Raoultella ornithinolytica 10-5246; identical to SEQ ID NO: 17188

SEQ ID NO: 17233 - protein, 184 aa, Raoultella ornithinolytica 10-5246; identical to SEQ ID NO: 17189

SEQ ID NO: 17234 - protein, 187 aa, Achromobacter piechaudii HLE
MAIFQDLKTWRFGRRFLTMSFACIGGLSTVLQTIVLIFPKVTVFQGVPILLLAVAISLIGGLIWSWPRPIEQDYSAPNTKITIVKGDMLAEMTHLVIGTNDTFDTETPIIIARQSLQGQALERLYGGDLRELDAQLALALSDKPTVGVIEKAGKQIQYGVGTIATVKHAARLIFFLAYCEMDIHNTA

SEQ ID NO: 17235 - protein, 99 aa, Achromobacter piechaudii HLE
GSNDGKRKGSDGMSFLAHEIEVIIEFNLPVVVANLDQDRTVDRNYIPDPLLNSSYYTVSVSYQPKIIMHALDKYAVTFAASDKKGPHQYPANVYSDLGL

SEQ ID NO: 17236 - protein, 278 aa, Thauera phenylacetica B4P
MVKVNFFDKRVIKKFLEVTAVVSGTLSFVVIFVDVPAEWKLKAGLAFLAILALTYLAIWLWSNNLNSIDINVEGSDVAIKTGDIFQQPGLKAIAFNEYFDTQVDNKIIGETSLNGVFIQKHLGVPLSELDRHIEEYAFDNSEVLDENEARKQGKKKRYQIGTICLYKDYLLTAFSKFDENNKALLTMPEYLEFLINFWDKVNNIYAQQSVSTTIFGSGITRIKGHKNISDEDLLKIMLWTFRISEMRFKYPAKLTIVIHEDKIDQINLLDIKSARNGV

SEQ ID NO: 17237 - protein, 187 aa, Thauera phenylacetica B4P
MAYRNGNYTAFYVAEPFNPSSLGANATKDFQYYNVLRMWKGADATFPFVDSHDKTYSVRDGSDWEYTLKPRLRERLRNSKNIILILSSITTNSRALREEIDYGINDQGLPVIVVYPEYSTKESLLIGGSLKQAVKNLWENLPVLRDSMSKVPTLHVPMDKALIKSALQDGGFMVGSKKTPDIYRYNP

SEQ ID NO: 17238 - protein, 282 aa, Delftia acidovorans CCUG 274B
MIHVMAKVNFFDRRVIKKFLEITAVISGTLSFVVIFVDVPTEWKLKAGLAFLVILALTYLVIWLWSNNLNSIDINVEGSDVAIKTGDIFQQPGLKAIAFNEYFDTQVDNKIIGETSLNGVFIQKHLGVPLSELDRHIEEYAFDISEVLDENEARKQGKKKRYQIGTICLYKDYLLTAFSKFDENNKALLTMPEYLEFLINFWDKVNNVYAQQSVSTTIFGSGITRIKGHKNISDEDLLKIMLWTFRISEMRFKYPAKLTIVIHKDKIDQINLLDIKSARNGV

SEQ ID NO: 17239 - protein, 187 aa, Delftia acidovorans CCUG 274B
MAYRNGNYTAFYVAEPFHPSSLGANATKDFQYYNTLRMWKGADATFPFVDSHDKTYSVRDGSDWEYTLKPRLRERLRNSKNIILILSSITTNSRALREEIDYGINDQGLPVIVVYPEYATKESLLVGGSLKQAVKNLWGNLPVFRDSMSKIPTLHVPMNKELIKKSLQDGEFMVGSMKAPGIYRYNP

SEQ ID NO: 17240 - protein, 283 aa, Aneurinibacillus aneurinilyticus ATCC 12856
MWKLKEIVKDKDFWISSWAIPGALFGIATTLLTFIEFDNNFNKFYILIGLVILSFILILFKLIKSLCLKKIKLNIDGSEIEIKKGDIFTFPRNIYKVIAFNEFFDTEVDDQIISRTSLNGQYLNRFYSDTSDLDKRIIQDPRMQLRIVEKDVNRPLGGKKTRYRLGSVYKDIDFFLVAFSKFDNENKANLKLHEYANCLINFWNEVNGLYAQQEVVVPLLGSGITRHKDFNANSHQLLEVMLWTFKISKVKFREPSKVTILLHEKHHKEINFYKLKEFEKNGI

SEQ ID NO: 17241 - protein, 189 aa, Aneurinibacillus aneurinilyticus ATCC 12856
MAYRNGNYTAFYVSEPFSESNLGASATKDFSSYNLLRAWKAADSSFPFNDSHNKNYNVRDGSDWEKTLKPRLHDRLSNSKNIILFLSSVTKNSKALREEINYGIGMKGLPVIVVYPEYQNKSDIINCKTNTIKDEIQSLWDKLPTFRDSMAEVPTIHLPYKKDLIKSALNDTSFMINSKCSAGVYFYKC

SEQ ID NO: 17242 - protein, 282 aa, Pseudomonas aeruginosa BWHPSA028; identical to SEQ ID NO: 17198

SEQ ID NO: 17243 - protein, 187 aa, Pseudomonas aeruginosa BWHPSA028; identical to SEQ ID NO: 17215

SEQ ID NO: 17244 - protein, 278 aa, Salmonella enterica; identical to SEQ ID NO: 17188
  subsp. enterica serovar Senftenberg str. ATCC 43845

SEQ ID NO: 17245 - protein, 184 aa, Salmonella enterica; identical to SEQ ID NO: 17189
  subsp. enterica serovar Senftenberg str. ATCC 43845

SEQ ID NO: 17246 - protein, 278 aa, Enterobacter cloacae BWH 29
MKKVKFFDSRVRDKFSKHISAISTLASVLLIFFNIPENKKIILFAVFSACLFLLYCKIWWHFNNLQEIELDVEGSKVSIKTGDLFLQPGLKCIAFNEYFDTKVDEKIISSTSLNGQYINKFFPNSVNELDKIITEYEFEEEEKIGINNERRVGKKVKYSLGTTCVIDDYLLTAFSHFDKNNKAYLSMPDYLSFLITFWDKVNKVYAQRNVSVPIFGSGITRIKEHKNISDEELLKIMLWTFRISEMRFKYPAKLSIIINYDKIKTINLLDIKSARNGI

SEQ ID NO: 17247 - protein, 186 aa, Enterobacter cloacae BWH 29
MSQQKGNYCAFYVSEPFNQSSLGAHATKDFVYYNLLRSWKGADASFPFIDSHSSTYSVRDGSDWEKTLKPRLHQRLKNSKNIILFLSSSTINSRAIREEVDYAINVLSLPVIVIYPEFENKEDIHDANGFTKKITNLWDLLPIFRDSKHKVPVMHIPLKKELVQSALKDKDFFLGSAAKNIGYYYN

SEQ ID NO: 17248 - protein, 278 aa, Enterobacter cloacae UCI 36; identical to SEQ ID NO: 17246

SEQ ID NO: 17249 - protein, 186 aa, Enterobacter cloacae UCI 36; identical to SEQ ID NO: 17247

SEQ ID NO: 17250 - protein, 278 aa, Enterobacter cloacae UCI 35; identical to SEQ ID NO: 17246

SEQ ID NO: 17251 - protein, 186 aa, Enterobacter cloacae UCI 35; identical to SEQ ID NO: 17247

SEQ ID NO: 17252 - protein, 278 aa, Pseudomonas stutzeri KOS6
MAKVNFFDRRVIKKFLEITAVISGTLSFVVIFVDVPTEWKLKAGLAFLVILALTYLVIWLWSNNLNSIDINVEGSDVAIKTGDIFQQPGLKAIAFNEYFDTQVDNKIIGETSLNGVFIQKHLGVPLSELDRHIEEYAFDISEVLDENEARKQGKKKRYQIGTICLYKDYLLTAFSKFDENNKALLTMPEYLEFLINFWDKVNNVYAQQSVSTTIFGSGITRIKGHKNISDEDLLKIMLWTFRISEMRFKYPAKLTIVIHKDKIDQINLLDIKSARNGV

SEQ ID NO: 17253 - protein, 85 aa, Pseudomonas stutzeri KOS6
GINDQGLPVIVVYPEYATKESLLVGGSLKQAVKNLWGNLPVFRDSMSKIPTLHVPMNKELIKKSLQDGEFMVGSMKAPGIYRYNP

SEQ ID NO: 17254 - protein, 278 aa, Sphingobium sp. Ant17
MAKVNFFDKRVIKKFLEITAVVSGTLSFIVIFVDVPAEWKLKAGLAFLAILALTYVVIWLWSNNLNSIDINVEGSDVAIKTGDIFQQPGLKAIAFNEYFDTQVDNKIIGETSLNGVFIQKHLGVPISELDRYIEEYAFDESEVLEENEARKYGKKKRYQIGTICLYKDYLLTAFSKFDENNKALLTMPEYLEFLINFWDKVNNVYAQQSVSTTIFGSGITRIKGHKNISDEDLLKIMLWTFRISEMRFKYPAKLTIVIHKDKIDQINLLDIKSARNGV

SEQ ID NO: 17255 - protein, 187 aa, Sphingobium sp. Ant17; identical to SEQ ID NO: 17215

SEQ ID NO: 17256 - protein, 283 aa, Bacillus sp. DW5-4
MWKFKELITDKQFLTWAIGILLITIPSCVGTIISFLDFDARSRLIILLMVVALSLVIIIFRFIRLLFLSNITLNLNGSEVEIKKGNIFEVPRNNYKVIAFNEFFDTQVDDVIIARETLNGQYINRYYSDQDISKLDQEIKDDVKLKIEEKNVERPLGGKTTRYTLGSVFKDMDFFLVAFSKFDRENRAHLKLNEYASCMLNVWNEVNTLHASKEVFIPLLGSGITRHVDSDVGVNELLHIMLWTFQISKLKFREPAKVTILLYKDDHKKINFYKLKEFEKNGL

SEQ ID NO: 17257 - protein, 190 aa, Bacillus sp. DW5-4
MGYRNGNYAAFYVSEPFNESSLGANATKDFVSYNMLRAWKGKDSNYPFNDSHDKTYNVRDGSDWDKTLKPRLRKRLDQSKNIIYFLSKHTENSKALREEIDYGINVKGLPVIVVYPELSEKSDIIDCTTKTIRSEVVNLWSRVPIFNDSMLKVPTIHIPYKKHLIKQALEDKDFMVNSKIAAGSYHFYRC

SEQ ID NO: 17258 - protein, 280 aa, Epilithonimonas lactis
MKVKLLDKNVRNKFWFYFSVISGILSFVLLFNIVPDEYKDCLRYFGYITFGVLIVIYLVIWYRANNLASINIDIDGSEVHIKSGNLFNEQGFKVIPFNEYFDTVVDDKIISNSSLNGIYVKKYFLDNVDKLDNFIVANSDELDIIDNQTYRRLGGKLVKFKLSTIFVYEDFILTAFTKFDEHNKAILTMPEYIEFLINFWDRVNRVYAQKTVSVPIFGSGITRIKEHKNISDEDLLKIMLWTFKLSEMKFKHPAKLTIVVHEDKIGQINLFNIKSIELGL

SEQ ID NO: 17259 - protein, 187 aa, Epilithonimonas lactis
MSKIYNYTAFYVSEPFNESSLGANATKDFCYYNILKAWKGSDSSFPFNNAHDTTYNVRDSSDWESTLKPRLRERLKNSKNIVLFLSNDTMNSKALKEELDYGINTLGLPIIVIYPDLKTKDDLLTNGKTSLNSTVTTLWNKLPIFRDSKSKVPVLHIPMSKDTIRTALNNTNFRVDSGKEANDYFYN

SEQ ID NO: 17260 - protein, 275 aa, Bacillus subtilis; identical to SEQ ID NO: 17192

SEQ ID NO: 17261 - protein, 190 aa, Bacillus subtilis; identical to SEQ ID NO: 17193

SEQ ID NO: 17262 - protein, 282 aa, Bifidobacterium pseudocatenulatum
  DSM 20438 = JCM 1200 = LMG 10505
MHGKFVSRLPRLKETASIWGSVSFGVATTLLTFFPKISIIGKDINNSIILFATCVIFGIGALCQTMFGKKNTIWEKGNNKITAIYGDILDESSKHEEIRVIPVNTAFDTIVDDPCSTDKPLVSPNSLHGQWLRKQECEQEILNNEVLGNMSGKPYRKIDPLQKKRGNCMEYKIGTYSFARRKNITYLLVALTAFDTNNVAHSTQTDLETVLQSAVSYHNQCGQGAKLMIPLMGTANSRMKLDHQESFDIIKNYLLLRKKDINGCIEIVVYQKDANKVSIWNS

SEQ ID NO: 17263 - protein, 196 aa, Bifidobacterium pseudocatenulatum
  DSM 20438 = JCM 1200 = LMG 10505
MNYRNGNYSAFYVSEPFDEYSLGARQAHDFCYYSLLGAWKKKDSNFPFIDSHNKTYSVRDGSDWEGTLKPRLHKRLMNSKNIILFLSSITKESRALREELQYGIGVLRLPVIVVYPELENTNIVDSSRRDFSSSVKRLWDNLPIFKKMMNAVPTIHVPFKKDLIARALSDEEFTVQSESRPGAYFLFHLMTFFRWY

SEQ ID NO: 17264 - protein, 278 aa, Escherichia coli; identical to SEQ ID NO: 17188

SEQ ID NO: 17265 - protein, 184 aa, Escherichia coli; identical to SEQ ID NO: 17189

SEQ ID NO: 17266 - protein, 278 aa, Raoultella ornithinolytica; identical to SEQ ID NO: 17188

SEQ ID NO: 17267 - protein, 184 aa, Raoultella ornithinolytica; identical to SEQ ID NO: 17189

SEQ ID NO: 17268 - protein, 278 aa, Citrobacter freundii; identical to SEQ ID NO: 17188

SEQ ID NO: 17269 - protein, 184 aa, Citrobacter freundii; identical to SEQ ID NO: 17189

SEQ ID NO: 17270 - protein, 278 aa, Enterobacter sp. 35666; identical to SEQ ID NO: 17188

SEQ ID NO: 17271 - protein, 184 aa, Enterobacter sp. 35666; identical to SEQ ID NO: 17189

SEQ ID NO: 17272 - protein, 277 aa, Acinetobacter indicus
MKVKIFNKKLRDSFFLKISLFSAFATLLLAFVPIPSKIQGLLGGVFLVFLVIIYIYDWRKANKLNSVEIDIEGTTVCIKEGDIFEEDGLKVIAFNEYFDTLVDNKIINEVSLNGIFLQKKLDIEISALDQEIDNYPFEDNEILEENVDRLVGKKKKFKIGTIFVHNDYILTAFSKFDSSNRANLTMPEYLGFLITFWDKVNIVYGQRSVSVPIFGSGITRIKEHRGISDEDLLKIMIWTFRISEMRFKHPAKLTIVIHSEKMNKINLLDIQETKNGI

SEQ ID NO: 17273 - protein, 185 aa, Acinetobacter indicus
MSRINSYSAFYVSEPFDPSSLGAYATHDFCHYQMLKAWKGKDGSFPFYNAHETTYNVRDNSNWEQTLKPRLRERLRNSKNIILFLSSKTKNSRALREEIDYGVNVLKLPIIVVYPEFTTYSELLSVNGQFKNEVTQLWDNLPIFRDSKKNIPVLHVPLNKSLLHNALLNKGFTVQSPLESKDYKL

SEQ ID NO: 17274 - protein, 276 aa, Bacillus stratosphericus
MTDKQFLTWAIGILLITIPSCVGTIISFLDLDARSRLIILLMVVALSLVIIIFRFIRLLFLSNITLNLNGSEVEIKKGNIFEVPRNNYKVIAFNEFFDTQVDDVIIARETLNGQYINRYYSDQDISKLDQEIKDDVKLKIEEKNVERPLGGKTTRYTLGSVFKDMDFFLVAFSKFDRENRAHLKLNEYASCMLNVWNEVNTLHASKEVFIPLLGSGITRHVDSDVGVNELLHIMLWTFQISKVKFREPAKVTILLYKDDHKKINFYKLKEFEKNGL

SEQ ID NO: 17275 - protein, 190 aa, Bacillus stratosphericus
MGYRNGNYAAFYVSEPFNESSLGANATKDFVSYNMLRAWKGKDSNYPFNDSHDKTYNVRDGSDWDKTLKPRLRKRLDQSKNIIFFLSKHTENSKALREEIDYGINVKGLPVIVVYPEFSEKSDIIDCTTKTIRSEVVNLWSRVPIFNDSMLKVPTIHIPYKKHLIKQALEDKDFMVNSKIAAGSYHFYRC

SEQ ID NO: 17276 - protein, 276 aa, Bacillus stratosphericus; identical to SEQ ID NO: 17274

SEQ ID NO: 17277 - protein, 190 aa, Bacillus stratosphericus; identical to SEQ ID NO: 17275

SEQ ID NO: 17278 - protein, 276 aa, Bacillus stratosphericus; identical to SEQ ID NO: 17274

SEQ ID NO: 17279 - protein, 190 aa, Bacillus stratosphericus; identical to SEQ ID NO: 17275

SEQ ID NO: 17280 - protein, 276 aa, Bacillus sp. LK10; identical to SEQ ID NO: 17274

SEQ ID NO: 17281 - protein, 190 aa, Bacillus sp. LK10; identical to SEQ ID NO: 17275

SEQ ID NO: 17282 - protein, 282 aa, Bacillus amyloliquefaciens
MWKFKELIRDKTFRRWALSIILTIPTSVSTFISFLDLDARCRLIILLILVGLSLVIIIVQFIRLLFMNNITLNLNGSEVEIKKGDIFEVPRNNYKVIAFNEYFDTQVDDVIIARETLNGQYIKRYYSHQDITELDQKIKDDVKLKIEEKNVERPFGGKTTRYSLGSVFKDMDFFLVAFSKFDRENRAQLKLNEYASCMLNVWNEINTLHASKEVFIPLLGSGITRHVDSDVGVNELLHIMLWTFQISKVKFREPAKVTILLYKNDHKKINFYKLKEFEKNGL

SEQ ID NO: 17283 - protein, 190 aa, Bacillus amyloliquefaciens; identical to SEQ ID NO: 17193

SEQ ID NO: 17284 - protein, 278 aa, Vibrio parahaemolyticus
MIKVSFLDKRVFENFLKVTSYISVTLSLVVLFIDIPKDCKTLYGLGFLGLLLVIYISIWIWANTLQKIDIKVEGSDVTIKVGDIFQQKGLKAIAFNEYFDTQVDNKLIAKKSLNGIFINDHIGVSVSELDNYIRNYSFESDEFIGRNLNRAQGKVERYQIGTICIHGDYLLTAFSKFDENNKALLTMPEYLEFLINFWDKVNNVYAQQNVSVPIFGSGITRIKGHKSISDEDLLKIMLWTFRISEMRFKYPARLSIIIHKDKINQINLLDIKSARNGV

SEQ ID NO: 17285 - protein, 187 aa, Vibrio parahaemolyticus
MAYRNGNYAAFYVATPFNASALGAHATKDFCYYNMLRAWKGKDSSFPFNDSHGKTYNVRDNSHWELTLKPRLRERLRSSKNIVLFLSSNTASSRALREEIDYGINNQGLPVIVIYPEYASKESLLTNGNLKASVKNLWDKLPIFRDSMGTVPTLHVPLQQSLIKSALNDKDFMLATKVDPDIFRYTP

SEQ ID NO: 17286 - protein, 291 aa, Rhizobium sp. Leaf306
MKYFFRSLWTWSFWRHALLSKEAVAKVFAIVGAMYLLLDMADFFSVYTKDRYSVYAIPIMATLAILWVLATRRPITRFSYKIPGKDFRVEVRIGDLFDGNNDVIVSTNTTFDTNMASGLIDTASIQGQVATKFFNANTSEIDRQLDLDLAAASGSSRPNAPGKKIEYPIGTVARVTSHSRTFYFVAMSRLNDQGNASSSPREIEDALEATWKFVRTNGNLRDLSIPLMGTGRGRVSIPRKKMAERIAQSFCDEAKNQVFSNRLLISIRPEDAEDYAVNLYQIRDYLVQSLH

SEQ ID NO: 17287 - protein, 185 aa, Rhizobium sp. Leaf306
MSRNANYCAFYVAEPFNPGALGAHATKDFCYYNLLRSWKGSDANFPFNDAHATTYSVRDGSDWEYTLKPRLRERMRSSKNIVLFLSISTVNSRAVREEFDYGINDQGLPIIVVYPEYDTKESLLINGSLKPKVRELWNNLPIFRDTMHKVPTLHLPMKKELIKSALADADFMLSTKATAQIYRFI

SEQ ID NO: 17288 - protein, 282 aa, Stenotrophomonas maltophilia; identical to SEQ ID NO: 17238

SEQ ID NO: 17289 - protein, 187 aa, Stenotrophomonas maltophilia; identical to SEQ ID NO: 17239

SEQ ID NO: 17290 - protein, 282 aa, Stenotrophomonas nitritireducens
MVHVMAKVNFFDKRVIKKFLEITAVVSGTLSFVVIFVDVPVEWKLKAGLAFLAILVLTYLVIWLWSNNLNSIDINVEGSDVAIKTGDIFQQPGLKAIAFNEYFDTQVDNKIIGETSLNGVFIQKHLGVPLSELDSHIEEYAFDDSEVLEENEARKQGKKKRYQIGTICLYKDYLLTAFSKFDENNKALLMMPEYLEFLINFWDKVNNVYAQQSVSTTIFGSGITRIKGHKNISDEDLLKIMLWTFRISEMRFKYPAKLTIVIHKDKIDQINLLDIKSARNGV

SEQ ID NO: 17291 - protein, 187 aa, Stenotrophomonas nitritireducens
MAYRNGNYTAFYVAEPFHPSSLGANATKDFQYYNTLRMWKGADATFPFVDSHGKTYSVRDGSDWEYTLKPRLRERLRNSKNIILILSSITTNSLAVREEIDYGINDQGLPVIVVYPEYATKESLLVDGSLKQAIKNLWGNLPVFRDSMSKVPTLHVPMNKELIKKSLLDSEFMVGSMKAPGIYRYSP

SEQ ID NO: 17292 - protein, 278 aa, Pseudomonas aeruginosa
MAKVSFIDRRVVKKFLETTSVVSGALSFAVIFYDIPVEWKLKVGLAFLALLVLIYLVIWFRSNNLNSIDINVEGSDVAIKTGDIFQQPGLKAIAFNEYFDTQVDNKIIGETSLNGVFIQKHLSDPLSELDRHIEEYAFDDSEVLEKNEARKHGKKKRYQIGTICLYKDYLLTAFSKFDENNKALLTMPEYLEFLINFWDKVNNVYAQQSVSTTIFGSGITRIKGHKNISDEDLLKIMLWTFRISEMRFKYPAKLTIVIHKDKIDQINLLDIKSVRNGV

SEQ ID NO: 17293 - protein, 187 aa, Pseudomonas aeruginosa
MAYRNGNYTAFYVAEPFHPSSLGANATKDFQYYNTLRMWKGADATFPFVDSHDKTYSVRDGSDWEYTLKPRLRERLRNSKNIILILSSITTNSRALREEIDYGINDQGLPVIVIYPEYATKESLLVGGSLKQAVKNLWGNLPVFRDSMGKVPTLHVPMNKDLIKQALQNADFMVGNKGNPDFYWYTP

SEQ ID NO: 17294 - protein, 282 aa, Pseudomonas aeruginosa
MIHVMAKVNFFDKRVIKKFLEITAVVSGTLSFIVIFVDVPAEWKLKAGLAFLAILALTYVVIWLWSNNLNSIDINVEGSDVAIKTGDIFHQPGLKAIAFNEYFDTQVDNKIIGETSLNGVFIQKHLGVPISELDRYIEEYAFDESEVLEENEARKHGKKKRYQIGTICLYEDYLLTAFSKFDENNKALLTMPEYLEFLINFWDKVNNVYAQQSVSTTIFGSGITRIKGHKNISDEDLLKIMLWTFRISEMRFKYPAKLTIVIHKDKIDQINLLDIKSARNGV

SEQ ID NO: 17295 - protein, 187 aa, Pseudomonas aeruginosa; identical to SEQ ID NO: 17181

SEQ ID NO: 17296 - protein, 297 aa, Bacillus sp. NRRL B-4257; identical to SEQ ID NO: 17178

SEQ ID NO: 17297 - protein, 190 aa, Bacillus sp. NRRL B-4257; identical to SEQ ID NO: 17193

SEQ ID NO: 17298 - protein, 297 aa, Bacillus sp. NRRL B-41580; identical to SEQ ID NO: 17178

SEQ ID NO: 17299 - protein, 190 aa, Bacillus sp. NRRL B-41580; identical to SEQ ID NO: 17193

SEQ ID NO: 17300 - protein, 297 aa, Bacillus amyloliquefaciens
MNIIGSDRNTNIGGFMWKFKELIRDKTFRRWALSIILTIPTSVSTFISFLDLDARCRLIILLILVGLSLVIIIVQFIRLLFMNNITLNLNGSEVEIKKGDIFEVPRNNYKVIAFNEYFDTQVDDVIIARETLNGQYIKRYYSHQDITELDQKIKDDVKLKIEEKNVERPFGGKTTRYSLGSVFKDMDFFLVAFSKFDRENRAQLKLNEYASCMLNVWNEINTLHASKEVFIPLLGSGITRHVDSDVGVNELLHIMLWTFQISKVKFREPAKITILLYKNDHKKINFYKLKEFEKNGL

SEQ ID NO: 17301 - protein, 190 aa, Bacillus amyloliquefaciens; identical to SEQ ID NO: 17193

SEQ ID NO: 17302 - protein, 280 aa, Flavobacteriaceae bacterium CRH
MKVNFLDKGVRNKFWIYFSAISGVISFILLFNIVPEEYKEWLKYFGYLSFFILIIIYLILWYTANKLTNIDVDIDGSNVNIKCGDLFSEDGLKTIPFNEYFDSVVDDKIISAKSLNGIFINKYFSGKVEVLDDFIVDNSDELDVTDTLVNRRLGGKMVKFKLSTIFVYDEFILTAFSKFDENNKATLTMPEYIEFLINFWDRVNRVYAQKSVSVPIFGSGITRIKEHKNISDEDLLKIMLWTFKLSEMKFKYPAKLKIVVHKDKIGQINLFNVKSIELGL

SEQ ID NO: 17303 - protein, 188 aa, Flavobacteriaceae bacterium CRH
MSQIYNYCAFYVSEPFSESSLGAHATKDFCYYNILKAWKGLDSSFPFKNAHDTTYNVRDNSDWESTLKPRLRERLRNSKNIILFLSENTSNSRALREEMEYGINTLSLPVIVIYPDLKTNEDLHTYDKKNLNNTVKNLWDKLPAFRDSKSKVPVLHIPMDKYVIGTSLNNSDFIVNSGKKPDDYSYKN

SEQ ID NO: 17304 - protein, 292 aa, Novosphingobium fuchskuhlense
MRYFFKSVATFSFWKYALFSGEAIAKIFAIVGMQYALMDMADFFSIYTKDKYSKFAVIVMLVIAVIWVAVRRRPITRFSYKVPGKDVSIEVKIGDLLDGNNDVVVSTNTTFDTDMAGGLIDTDSVQGQVATRFFNANTVEIDRQLALDLASAQSTHRADAPGKQTEYPIGTVARVKSHNRTFYYVAMARLNAQGTASSTPREIEDALEATWSFVQSHGSVRDLSIPLLGTGRGRTGIQRKKMVERIAQSFVDGSTGQIFSNRLCIFIRPQDAESFAVNLYQIRDYLIQSLHT

SEQ ID NO: 17305 - protein, 186 aa, Novosphingobium fuchskuhlense
MARNGNYCAFYVAEPFNSGALGAHATKDFCYYNLFRSWKGADSTFPFSDSHALTYNVRDGSNWELTLKPRLRERLRSSQNVVLFLSSDTANSRALREEIDYAINDQGLPLIVVYPEFKTKESLLTNGSLKQSVKNLWSKVPVLRDSIDNVPSLHVPMVKSLISSALKDPDFKLSTKTTASVYHYKI

SEQ ID NO: 17306 - protein, 278 aa, Burkholderia sp. MSMB1835
MAKVKFFDKRLRKKFLEITSVISVSLSLFALFVNIPSDHKSLYGWIFLALLFGIYLTLWIWSNSLNSIDIKIEDSKVTIKTGDIFDQPGLKVIAFNEYFDTQVDNVIIGEGSLNGIFIKKYLNAPVSELDRHIENYAFDRSELLGKNDDRKQGKKLQYQVGTVCVYKDYLLTAFSKFDENNKALLTMPEYLEFLITFWDKVNNIYAQQSVSTTIFGSGITRIKGHKNISDEDLLKIMLWTFRISEMRFKYPAKLTIVIHRDKIDQINLLDIKSVRNGV

SEQ ID NO: 17307 - protein, 187 aa, Burkholderia sp. MSMB1835
MVYRNGNYTAFYVAEPFSASALGAHATKDFCYYNLLRSWKGNDASFPFVDSHNKTYNVRDSSDWEVTLKPRLRERIRNSKNIVLFLSANTKNSRALREEIDYGINDQGLPVIVVYPEYDTKESLVNNGSLKQAVKNLWDNLPVFRDSMSNVPTLHVPMKKALIKESLEHSGFMLNTKLAADFYWYKV

SEQ ID NO: 17308 - protein, 285 aa, Ruminococcus sp. DSM 100440
MKKIYNWYINLSRQIRDSITASVTTVGLISTILSVLGISLGDWKDSNVWMRIGVVLVIFVVIYSLIYFAIGRIFRDSVNLTIRQTQVVISCGDIFEASGWKIIGCDTHFDTRVDDIVISKKSLHGQLVLNHGKKEEIEAVVENEAKRLGLQKKNDGLYEFPLGTVIRYDSSVDNQTYLMLAMTELNIQHEAHTNMAKFELMLMKMWTEIDRVYASNDIVLPVLGTGISRFDDGPKDREALLRCMLCTLNSSGVSLKSKVDIIIYGDVKDIPMYEYKNMFHMTLRR

SEQ ID NO: 17309 - protein, 187 aa, Ruminococcus sp. DSM 100440
MANRTANYAAFYVSEPFSESNLGANATPDFLYYNQLRAWKGADSSFPFVDAHAKTYNVRDNSSWETLKKRLHDRLDVSKNIILFLSNNTKNSQALREEIEYGINTKGLPVIVIYPDFKEKSDIWCSTGMRKQVKDLWDKLPKFRDNMDKVATLHVPYKKNLIVSALEDPDFKVQTMTNAGQYHYKLD

SEQ ID NO: 17310 - protein, 278 aa, Escherichia coli 536
MAKVNFFDKRILKKFSDYTSTISTIFSLFLIFVDIPTENKLTLGIIFLIILFLLYFGIWFKSNNLSEINLDVEGSIVTVKAGDLFRQDGFKVIAFNEYFDTQVDDVIISHNSLNGLYIDNYLAGSVSDLDHRISNHQFEEDELLEVNHKRKVGKTQKYSLGTIFVNNDYLLTAFSKFDDKNRAFLTMPDYLAFLINFWDKVNRIYAQKSVSVPIFGSGITRIKEHKNISDEDLLKIMLWTFRISEMRFKFPAKLTIVIHKDKIDKINLLDIKSARNGL

SEQ ID NO: 17311 - protein, 287 aa, Escherichia coli 536
MYNILFFIFLSIAIPFLLFLAWKQHLKTKEIRSYLLKEGYNIIFNGEGNSYLAFNISNATFRAGNLTSNDYFQASISYIHDYRWEWKEVEAKKINNIFIIYISNIDFPSQKLFYRNNKSLAEIDWAKLQAIFHQPYEIQNDVMQDNNNTHYDFFISHAKEDKDTFVRPLVDELNRLGVIIWYDEQTLEVGDSLRRNIDLGLRKANYGIVILSHNFLNKKWTQYELDSLINRAVYDDNKIILPIWHNINAQEVSKYSHYLADKMALQTSLYSVKEIARELAEIAYRRR

SEQ ID NO: 17312 - protein, 278 aa, Escherichia coli Nissle 1917; identical to SEQ ID NO: 17310

SEQ ID NO: 17313 - protein, 287 aa, Escherichia coli Nissle 1917; identical to SEQ ID NO: 17311

SEQ ID NO: 17314 - protein, 278 aa, Escherichia coli 1-182-04_S4_C3
MAKVNFFDKRILKKFSDYTSTISTIFSLFLIFIDIPTENKLTLGIIFLIILFLLYFGIWFKSNNLSEVNLDVEGSIVTVKAGDLFRQDGFKVIAFNEYFDTQVDDVIISHNSLNGLYIDNYLVGSVSDLDHRISNHQFEEDELLDVNHKRKVGKTQKYSLGTIFVNNDYLLTAFSKFDDKNRAFLTMPDYLAFLINFWDKVNRIYAQKSVSVPIFGSGITRIKEHKNISDEDLLKIMLWTFRISEMRFKFPAKLTIVIHKDKIDKINLLDIKSARNGL

SEQ ID NO: 17315 - protein, 307 aa, Escherichia coli 1-182-04_S4_C3
MITYENIEFFICLVNVLDNNIYNILFFIFLSIAIPFLLFLAWKQHLKTKEIRSYLLKEGYNIIFNGEGNSYLAFNISNATFRAGDLTSNDYFQASISYIHDYRWEWKEVEAKKINNIFIIYISNIDFPSQKLFYRNNKSLAEIDWAKLQAIFHQPYEIQNDVMQDNNNTHYDFFISHAKEDKDTFVRPLVDELNRLGVIIWYDEQTLEVGDSLRRNIDLGLRKANYGIVILSHNFLNKKWTQYELDSLINRAVYDDNKIILPIWHNINAQEVSKYSHYLADKMALQTSLYSVKEIARELAEIAYRRR

SEQ ID NO: 17316 - protein, 278 aa, Escherichia coli 1-182-04_S4_C2; identical to SEQ ID NO: 17314

SEQ ID NO: 17317 - protein, 307 aa, Escherichia coli 1-182-04_S4_C2; identical to SEQ ID NO: 17315

SEQ ID NO: 17318 - protein, 278 aa, Escherichia coli 1-182-04_S4_C1; identical to SEQ ID NO: 17314

SEQ ID NO: 17319 - protein, 307 aa, Escherichia coli 1-182-04_S4_C1; identical to SEQ ID NO: 17315

SEQ ID NO: 17320 - protein, 278 aa, Escherichia coli 8-415-05_S4_C1; identical to SEQ ID NO: 17310

SEQ ID NO: 17321 - protein, 287 aa, Escherichia coli 8-415-05_S4_C1; identical to SEQ ID NO: 17311

SEQ ID NO: 17322 - protein, 278 aa, Escherichia coli 8-415-05_S4_C2; identical to SEQ ID NO: 17310

SEQ ID NO: 17323 - protein, 287 aa, Escherichia coli 8-415-05_S4_C2; identical to SEQ ID NO: 17311

SEQ ID NO: 17324 - protein, 278 aa, Escherichia coli 8-415-05_S4_C3; identical to SEQ ID NO: 17310

SEQ ID NO: 17325 - protein, 287 aa, Escherichia coli 8-415-05_S4_C3; identical to SEQ ID NO: 17311

SEQ ID NO: 17326 - protein, 278 aa, Escherichia coli 8-415-05_S3_C3; identical to SEQ ID NO: 17310

SEQ ID NO: 17327 - protein, 287 aa, Escherichia coli 8-415-05_S3_C3; identical to SEQ ID NO: 17311

SEQ ID NO: 17328 - protein, 278 aa, Escherichia coli 8-415-05_S3_C1; identical to SEQ ID NO: 17310

SEQ ID NO: 17329 - protein, 287 aa, Escherichia coli 8-415-05_S3_C1; identical to SEQ ID NO: 17311

SEQ ID NO: 17330 - protein, 278 aa, Escherichia coli 8-415-05_S3_C2; identical to SEQ ID NO: 17310

SEQ ID NO: 17331 - protein, 287 aa, Escherichia coli 8-415-05_S3_C2; identical to SEQ ID NO: 17311

SEQ ID NO: 17332 - protein, 278 aa, Escherichia coli 9.1649; identical to SEQ ID NO: 17310

SEQ ID NO: 17333 - protein, 287 aa, Escherichia coli 9.1649; identical to SEQ ID NO: 17311

SEQ ID NO: 17334 - protein, 226 aa, Acinetobacter baumannii ATCC 17978
MNILIDLSTWRFWRHFFLQSLACGGGISAAIQFILIIFPEYAQKFQGLIPIILIFIVSTIFGLVRSWPRPIEMEYSAPKTKIKIIKGDLLDQDEHLVIGICNTFDTETPHIVSKKSLLGQSIDRLFGGDIKKLDELLNQALVGKSFENREPVKDGKNKQYPLGTVAIVEHSPRLIFFLAYCQMSDKNEAFGTVDSVWKSLLSYGLSQSERGNQRPYINSCYWWRTS

SEQ ID NO: 17335 - protein, 169 aa, Acinetobacter baumannii ATCC 17978
MSYKNKTYIAFASEDIHLYRLMEAWRENEKIDFDFFDAHDLYISRDSSKPETIKRNLRERLKNAKQIILIGSSDCKRKGGDGKSFLAHEIDVIKEFNLPIVIANKDGDRNIDRSFIPDPLLQANYYTVSVSLQPKIIKYALDNYAKLYSSSNNKGPHYYLSSIYEKIGL

SEQ ID NO: 17336 - protein, 278 aa, Pseudomonas putida H8234
MSQIGFFDQRIIKRFWGALAATGTALSLLLIFVTIPETGKVTAGIACVAFLILIYIHFWWTSNNLTEVELKIESTTVIVKVGDIFKQPGLKVIAFNEYFDTQVDDEIISHSSLNGIFIDRHLPKALVDLENHLTAYRFDECEILELNETRATGKKQRYDIGTICVYEDFLLAAFSKFNERNQAYLTMPEYLGFLIKFWDNVNRVYAQQSVSTPIFGSGITRIKEHRNISDEELLKIMLWTFRISEMRFKHPAKLNIIIHKDKISQINLLDIKSARNGL

SEQ ID NO: 17337 - protein, 169 aa, Pseudomonas putida H8234
MAYRNKTYVAFASEDINLYRLMEAWRENDKIDFDFFDAHDLFISRDTSQRETIKRNLRQRMKNAKQVVLIGSPDAKKKGGDGYSFLAHELELIVEFDLPVVVANKGGSREIQRALIPTPLLNADYYTMSVSLQPAIIKFALDEYVPAFAQKVRKGPHYYPADIYKRLGI

SEQ ID NO: 17338 - protein, 292 aa, Xanthomonas campestris
MRYFFESIRTRAYWRYALFSGEAIGKFFAVMGILYLCVDLADAFNIYKKNQYSYYGLIFLVVLALLYVLSTRRPLSRISYKIPQKDFAVEVLIGDLFKIPGEVIISTSSTFDTDMSSGLIAASSLQGQLATNYFNGQTIEIDRQIEVSLEKEAFTINEKRPGKKKEYPIGTVARVSAHSKNFYLVAMSHMEENKNARSDLKMIDEALEKLWVNLASKAEVGDIVMPLIGTGRGRVPYPRKKMIERIAQSFADAASERAFSNKLIIVVRPEDASMFSLNLFQVRDYLGQSLHT

SEQ ID NO: 17339 - protein, 166 aa, Xanthomonas campestris
MAYRNKTYIAFDGDNDMHWYRLMTAWKANDGFSLNFHNAHDLNTARDSSQEESIKRQLRERFANSKLLVVLIGANTKYLTKFVKWEMEVALRLGLPIIGVNLNGSRKMDDRCPPAIRDQLVVYTSFNHKIIEHAMDHWPAEFHSLRSAGTSGNRHYNDDVYRRFGL

SEQ ID NO: 17340 - protein, 270 aa, Ralstonia solanacearum
MQRHPFKLLANAFAAFSVIQTIIRGVSLFVPGISISGPIPLLAVFLFSVGWGAKKVWKPSRIEVPVANCGTVIEVLFGDLFEQDGIRAIAVNDFFDSELGKPVSDKSVHGIFLKKCFGGHQEAFDKQVDAELANVASEPAVRSQGKMKRFPIGSTALITANNDRYIAFAFATTDPTTCKASANVTMMWAALHDLWQRGRIEAGGYPINLPLVGSGLSGLGLPTRDLLNLIILSAITETKSKEITPRVRIVLGRDRFDHLDLRDVKKHWSE

SEQ ID NO: 17341 - protein, 185 aa, Ralstonia solanacearum
MAYRNGTYIAFHANGTNRPGGNSDIDYYNLMKAWTGKDDDSFALINSHDKAAAVRDSSKRETLRQSLLERLRNSKNMVLIIGETTRLDTDWVPFEIEKAIDQYKLPIIATYTQYSTPIRDPASLKSLWPQALASRIASNTARVIHVPFKQAALNDAISQFSHNNLPGGSLSYYSDEAYQSFGITD

SEQ ID NO: 17342 - protein, 285 aa, Acinetobacter baumannii NIPH 70
MNILIDLSTWRFWRHFFLQSLACGGGISAAIQFILIIFPEYAQKFQGLIPIILIFIVSTIFGLVRSWPRPIEMEYSAPKTKIKIIKGDLLDQDEHLVIGICNTFDTETPHIVSKKSLLGQSIDRLFGGDIKKLDELLNQALVGKSFENREPVKDGKNKQYPLGTVAIVEHSPRLIFFLAYCQMSDKNEAFGTVDSVWKSLLSLWTAQSERGNQHPISIPVIGGGQARMSSVLPAQDSIKLIVLSFMFASRKHKITDELRIIIQPNDYDRLDRMELQSFLASLRPS

SEQ ID NO: 17343 - protein, 169 aa, Acinetobacter baumannii NIPH 70; identical to SEQ ID NO: 17335

SEQ ID NO: 17344 - protein, 292 aa, Pseudomonas fluorescens
MRYFFESIRTRAYWRYALFSGEAIGKFFAVVGILYLCVDLADAFNIYKKDQHSYYGLIFLVVLALLYVLSTRRPLSRVSYKIPQKDFAVEVLIGDLFKIPGEVIISTSSTFDTDMSSGLIAVTSLQGQLATNYFNGQTTEIDRQIEMSLSGEQFTINERRPGKTKEYSIGTVARVSAHSKNFYLVAMSHMDENRNASSDLKMIDEALEKLWVNLASKAEVGDIVMPLMGTGRGRVAYPRKKIIERIAQSFADACNQRAFSNKLIIVVRPEDASKFSLNLFQVRDYLGQSLHT

SEQ ID NO: 17345 - protein, 166 aa, Pseudomonas fluorescens
MAYRNKTYIAFDGDKDMHYYRLMTAWTAHDGFSLNFHNAHDLNTARDSSQEESIKRQLRERFANSKLLVVLIGENTRYLTKFVKWELEVALRLNLPLIGVNLNGSRQMDDRCPPTIRDQLVLYTSFNHNFIEHAMYHWPDEFDRLRSAGTTGGRYYSDDVYRQLGL

SEQ ID NO: 17346 - protein, 292 aa, Pseudomonas aeruginosa
MKYFFESIRTRAYWRYALFSGEAIGKFFAVMGILYLCVDLADAFNIYKKDQYSYYGLIFLVVLALLYVLSTRRPLSRISYKIPQKDFAVEVLIGDLFKIPGEVIISTSSTFDTDMSSGLIAASSLQGQLATNYFNGQTTEIDRQIEVSLEKEQFTINEKRPGKKKEYPIGTVARVSAHSKNFYLVAMSHMEENKNARSDLKMIDEALEKLWVNLAAKAEVGDIVMPLMGTGRGRVPYPRKKMIERIAQSFADAASERAFSNKLIIVVRPEDASMFSLNLFQVRDYLGQSLHT

SEQ ID NO: 17347 - protein, 166 aa, Pseudomonas aeruginosa
MAYRNKTYIAFDGDNDMHYYRLMTAWKANDGFSLNFHNAHDLNTARDSSLEESIKRQLRERFSNSKQLVVLIGANTKYLTKFVKWEMEVALRLGLPIIGVNLNGSRQMDDRCPPTIRDQLVVYTSFNHNIIEHAMDHWPTNFQSLRAAGTTGPHFYNDDVYRRLGL

SEQ ID NO: 17348 - protein, 285 aa, Acinetobacter baumannii; identical to SEQ ID NO: 17342

SEQ ID NO: 17349 - protein, 169 aa, Acinetobacter baumannii; identical to SEQ ID NO: 17335

SEQ ID NO: 17350 - protein, 278 aa, Enterobacter cloacae
MAKVNFFDTRIVKKFSDYTSTISTIFSLLLIFVDIPTENKITLGIIFLFTLSLLYFGIWLKSNNLTEVNLDVEGSIVTVKAGDLFLQDGFKVIAFNEYFDTQVDDNIISHKSLNGLYIDNHLSGPVSDLDQRVSNYKFDEDEILEVNQDRKVGKKQKYSLGTIFVNEDYLLTAFSKFDDKNRAFLTIPDYLVFLINFWDKVNRIYAQKSVSVPIFGSGITRIKEHKNISDEDLLKIMLWTFRISEMRFKFPAKLTIVIHKDKIDKINLLDIKSARNGL

SEQ ID NO: 17351 - protein, 169 aa, Enterobacter cloacae
MSYRNKTYVAFASENISSYRLMEAWKANENIDFNFFDAHDLYISRDTSKPETIKKNLRERMKNAKQVVLLGSSDAKRKGGDGDSFLAHEIDLIIEFNLPVVIANLDGDRKVDRNFIPKPLLDADHYTVSVSFQPKIIKYALDNYCATYSSSTNKGPHQYPDSVYSGLDI

SEQ ID NO: 17352 - protein, 278 aa, Escherichia coli DEC10E
MAKVNFFDTRIVKKFSDYTSTISTIFSLLLIFVDIPTENKITLGIIFLFTLSLLYFGIWLKSNNLTEVNLDVEGSIVTVKAGDLFLQDGFKVIAFNEYFDTQVDDNIISHKSLNGLYIDNHLSGPISDLDQRVSNYKFDEDEILEVNQERKVGKKQKYSLGTIFVNEDYLLTAFSKFDDKNRAFLTMPDYLGFLINFWDKVNRIYAQKSVSVPIFGSGITRIKEHKNISDEDLLKIMLWTFRISEMRFKFPAKLTIVIHKDKIDKINLLDIKSARNGL

SEQ ID NO: 17353 - protein, 169 aa, Escherichia coli DEC10E
MSYRNKTYVAFASENISSYRLMEAWKANENIDFNFFDAHDLFISRDTSKPETIKKNLRERMKNAKQVVLLGSSDAKRKGGDGDSFLAHEIDLIIEFNLPVVIANLDGDRKVDRNFIPKPLLDADHYTVSVSFQPKIIKYALDNYCATYSSSTNKGPHQYPDSVYSGLDI

SEQ ID NO: 17354 - protein, 278 aa, Escherichia coli DEC14D; identical to SEQ ID NO: 17352

SEQ ID NO: 17355 - protein, 169 aa, Escherichia coli DEC14D; identical to SEQ ID NO: 17353

SEQ ID NO: 17356 - protein, 278 aa, Escherichia coli KTE103
MAKVNFFDTRIVKKFSDYTSTISTIFSLLLIFVDIPTENKITLGIIFLFTLSLLYFGIWLKSNNLTEVNLDVEGSIVTVKAGDLFLQDGFKVIAFNEYFDTQVDDNIISHKSLNGLYIDNHLSGPVSDLDQRVSNYKFDEDEILEVNQDRKVGKKQKYSLGTIFVNEDYLLTAFSKFDDKNRAFLTMPDYLGFLINFWDKVNRIYAQKSVSVPIFGSGITRIKEHKNISDEDLLKIMLWTFRISEMRFKFPAKLTIVIHKDKIDKINLLDIKSARNGL

SEQ ID NO: 17357 - protein, 169 aa, Escherichia coli KTE103; identical to SEQ ID NO: 17351

SEQ ID NO: 17358 - protein, 278 aa, Escherichia coli HVH 194 (4-2356805); identical to SEQ ID NO: 17352

SEQ ID NO: 17359 - protein, 169 aa, Escherichia coli HVH 194 (4-2356805); identical to SEQ ID NO: 17353

SEQ ID NO: 17360 - protein, 278 aa, Escherichia coli 910096-2; identical to SEQ ID NO: 17352

SEQ ID NO: 17361 - protein, 148 aa, Escherichia coli 910096-2
MEAWKANENIDFNFFDAHDLFISRDTSKPETIKKNLRERMKNAKQVVLLGSSDAKRKGGDGDSFLAHEIDLIIEFNLPVVIANLDGDRKVDRNFIPKPLLDADHYTVSVSFQPKIIKYALDNYCATYSSSTNKGPHQYPDSVYSGLDI

SEQ ID NO: 17362 - protein, 278 aa, Escherichia coli 2-005-03_S3_C2; identical to SEQ ID NO: 17352

SEQ ID NO: 17363 - protein, 169 aa, Escherichia coli 2-005-03_S3_C2; identical to SEQ ID NO: 17353

SEQ ID NO: 17364 - protein, 278 aa, Escherichia coli 2-316-03_S1_C2; identical to SEQ ID NO: 17352

SEQ ID NO: 17365 - protein, 148 aa, Escherichia coli 2-316-03_S1_C2; identical to SEQ ID NO: 17361

SEQ ID NO: 17366 - protein, 278 aa, Escherichia coli 2-316-03_S1_C1; identical to SEQ ID NO: 17352

SEQ ID NO: 17367 - protein, 148 aa, Escherichia coli 2-316-03_S1_C1; identical to SEQ ID NO: 17361

SEQ ID NO: 17368 - protein, 278 aa, Escherichia coli 5-172-05_S4_C2; identical to SEQ ID NO: 17352

SEQ ID NO: 17369 - protein, 169 aa, Escherichia coli 5-172-05_S4_C2; identical to SEQ ID NO: 17353

SEQ ID NO: 17370 - protein, 278 aa, Escherichia coli 5-172-05_S4_C1; identical to SEQ ID NO: 17352

SEQ ID NO: 17371 - protein, 169 aa, Escherichia coli 5-172-05_S4_C1; identical to SEQ ID NO: 17353

SEQ ID NO: 17372 - protein, 278 aa, Escherichia coli 5-172-05_S4_C3; identical to SEQ ID NO: 17352

SEQ ID NO: 17373 - protein, 169 aa, Escherichia coli 5-172-05_S4_C3; identical to SEQ ID NO: 17353

SEQ ID NO: 17374 - protein, 278 aa, Escherichia coli C691-71 (14b); identical to SEQ ID NO: 17352

SEQ ID NO: 17375 - protein, 169 aa, Escherichia coli C691-71 (14b); identical to SEQ ID NO: 17353

SEQ ID NO: 17376 - protein, 278 aa, Escherichia coli; identical to SEQ ID NO: 17352

SEQ ID NO: 17377 - protein, 169 aa, Escherichia coli; identical to SEQ ID NO: 17353

SEQ ID NO: 17378 - protein, 278 aa, Klebsiella pneumoniae UCICRE 7
MDLLRGIIRKPFKTVTYFFTSFSVLFTIVRMIVYFVPSIKFDGVIPLIIMLCISLGFTLKKVWKPSKVVIPIPNTATKIEIVFGDIFNQDGIRVIPANEYFDSKLGLPVSENSLHGIFINKCFGGHPESFDKQVEEGLSGKESEVVNNKIDGNFRKYEIGTSVLMEADSKKYLVFAFAHTNESTCKAFIDVKDTWIALHEMWSSLRIFSGGSAVNLPLIGSGISGLGLPTRDILNLIILSAITETKNKEVTKLIRVILHRDRFDDLDLREIKDYWEKK

SEQ ID NO: 17379 - protein, 188 aa, Klebsiella pneumoniae UCICRE 7
MAYRNGTYVAFHANGTNRPGESDISYYNLLKAWSGKGDDSFTFINSHDKASAVRDSSKAETLRRSLNERLKNSKNMLLIIGDTTKDDDDWVPFEINKAVDTYKLPLIIAYTKSVHNGSLIRNPNALSEYWPDVLKEKIESSSINAIHIPFSKNVINDAIGQFNHTKPPLGKGLGIYSDDAYRSFGFAL

SEQ ID NO: 17380 - protein, 278 aa, Klebsiella pneumoniae UCI 64; identical to SEQ ID NO: 17378

SEQ ID NO: 17381 - protein, 188 aa, Klebsiella pneumoniae UCI 64; identical to SEQ ID NO: 17379

SEQ ID NO: 17382 - protein, 278 aa, Klebsiella pneumoniae; identical to SEQ ID NO: 17378

SEQ ID NO: 17383 - protein, 188 aa, Klebsiella pneumoniae; identical to SEQ ID NO: 17379

SEQ ID NO: 17384 - protein, 278 aa, Serratia marcescens SM39
MAKVNFFDTRIVKKFSDYTSTISTIFSLLLIFVDIPTENKITLGIIFLFTLSLLYFGIWLKSNNLTEVNLDVEGSIVTVKAGDLFLQDGFKVIAFNEYFDTQVDDNIISHKSLNGLYIDNHLSGPISDLDQSISNYKFDEDEILEVNQERKVGKKQKYSLGTIFVNEDYLLTAFSKFDDKNRAFLTMPDYLGFLINFWDKVNRIYAQKSVSVPIFGSGITRIKEHKNISDEDLLKIMLWTFRISEMRFKFPAKLTIVIHKDKIDKINLLDIKSARNGL

SEQ ID NO: 17385 - protein, 169 aa, Serratia marcescens SM39
MSYRNKTYVTFASENISSYRLMEAWKANENIDFNFFDAHDLFISRDTSKPETIKKNLRERMKNAKQVVLLGSSDAKRKGGDGDSFLAHEIDLIIEFNLPVVIANLDGDRKVDRNFIPKPLLDADHYTVSVSFQPKIIKYALDNYCATYSSSTNKGPHQYPDSVYSGLDI

SEQ ID NO: 17386 - protein, 278 aa, Yersinia enterocolitica
MAKVNFFDTRIAKKFSDYTSTISTIFSLFLIFIDIPTDNKLTLGVIFLFILFLLYFGVWFKSNNLTEVNLDVEGTIVTVKAGDLFKQDGFKAIAFNEYFDTQVDDKVISHKSLNGIYIDNYLSCSTSDLDQRISDYHFYEDEILDINKTRKVGKNQKYSLGTIFVNDDFLLTAFSKFDDKDRAFLTMPDYLGFLINFWDKVNRIYAQKNVSVPIFGSGITRIKEHKNINDEDLLKIMLWTFRISEMRFKFPAKLTIVIHKDKIDKINLLDIKSARNGL

SEQ ID NO: 17387 - protein, 169 aa, Yersinia enterocolitica
MSYRNKTYVAFASEDIKSYRLMEAWKANDNIDFNFFDAHDLFISRDTSKPETIKKNLRERMKNAKQVVLLGSSDAKKKGGDGESFLAHEIDLIIEFNLPVVIANLDGDRTVDRNLIPKPLLDSEHYTVSVSFQPKIIKYALDDYCADYSSSVKKGPHQYPDSVYSGLKI

SEQ ID NO: 17388 - protein, 278 aa, Yersinia enterocolitica
MAKVNFFDTRIVKKFSDYTSTISTIFSLFLIFIDIPTDNKLTLGVIFLFILFLLYFGIWFKSNNLTEVNLDVEGTIVTVKAGDLFKQDGFKAIAFNEYFDTQVDDKIISRKSLNGIYIDNYLSCSTSDLDQRISDYHFDEDEILDINKTRKVGKNQKYSLGTIFVNDDFLLTAFSKFDDKDRAFLTMPDYLGFLINFWDKVNRIYAQKNVSVPIFGSGITRIKEHKNINDEDLLKIMLWTFRISEMRFKFPAKLTIVIHKDKIDKINLLDIKSARNGL

SEQ ID NO: 17389 - protein, 169 aa, Yersinia enterocolitica; identical to SEQ ID NO: 17387

SEQ ID NO: 17390 - protein, 286 aa, Vibrio cholerae
MYCSKKRNHSLKVKITDKAVWQEFLKKVSIISAIFSIAFIFIDVSEQYKTYAGLSVVLFFAVLYVYLWWRYNNLKNLNLVIDGSKVSILTGNLFEQSGLKAIAFNEYFDTQVDDRIISKNSLNGIYINEHSSHSVDELDQIITDYLFEDGELIESGVERSGKSKKYRLGTICLVDDYLLVAFSKFDSQNKAVLTMPEYLEFLINFWDSVNRIYSQKSVSVPIFGSGITRIKEHKNISDEELLKIMLWTFRISEMRFKHPAKLTVIIHHDKIDSINLLDIKSIENGI

SEQ ID NO: 17391 - protein, 183 aa, Vibrio cholerae
MGNRTGTYIAFDGLGKTNPTESDFRYYSTLQAWSEGKSIDFKFVNSHDKTAAVRDTSLRSTLESRIRERLAVSKNCVVILSDDTRKTGSMLSYEIEKAVDLYKIPLICVYVGFEKINKPKELSNRWPNALETRINNGTAKAIHIPFKKEILLTAINQFSVNSSFPNGSLVTYTNEAQEKMNSK

SEQ ID NO: 17392 - protein, 277 aa, Bacteroides fragilis
MIIKLFWKEFIAALAALSSVATLVVFICDWNTTKLSIYETLAGGLMILAICICYGLYQIQRKKKIILQLDSKFIVTVTEGDLFKFEGVIVIPVNEYFDTIVNDIIIAKNTIHGKFINQYFGDRLQELDDKIEQSLTGIAFEENDQRKNGGKNKKYALGTCAKIRDGKNCYILLAMTHFDKDDHAYIDTHEFKDVIYNLSICLNKNANSRPIYMPLMGTGQSGIKKPAQRILLFTLTCFEFMNSNSLPQGLNIIIHSSMMKNVNLNLIEEYYNNKLLN

SEQ ID NO: 17393 - protein, 173 aa, Bacteroides fragilis
MAYRSGTYVAFDGQGEPCPANSDYKYFNTLKMWQNSNKCDFNFVNSHEKTYAVRDTSCDITLRNRLRERMRNSKNMLVIISNETNYNRGLLNWEIETAVNDYNLPIIVAYTGETNFSYLTERLIQRLPKKLKEYVVNNTAKVVHIPFTQDKIKYAIAYYGVNSNVPYNSKTIY

SEQ ID NO: 17394 - protein, 276 aa, Parabacteroides distasonis CL09T03C24
MKFVHYINSPLLWKDSTNTAFAILAGIETLFAVSAISLEKFWGDYSWIIKLLFVIVIFLIIDVVIFIIKHSLAKDGISLNIRGIKVNIRKGDIFKANGWKVIAFNEYFDTQVDDIIIAHNTLNGKFIDNYVADINELNKIISSENDDNTSFKRRTRNNRSIFPLGRIIRYKDYMLLAFTHFDNNQAHLTQKDYENCLRVMWAEISRTYANKPIFIPLLGSGITRFDGTPHKSNFDLLRCMLCTLRTSGVNINQTITILLTEEAMQSINIYEIKGVK

SEQ ID NO: 17395 - protein, 170 aa, Parabacteroides distasonis CL09T03C24
MVYRTKTYIAADWDGDKNAVEQLYKWKKSNYWSLDFHDAHDLTQARDSSLNCSIKSSLATRLDVSKTFVLIVGNTTKTVRSGSCQYCGSYNSWTQSCARGHSVDYRSYIEYECEKAIRDGLKIVVLYNAGSVNKSKCPDSIKYHGTHVAMWKWENGQYYWDYQSVKRALE

SEQ ID NO: 17396 - protein, 276 aa, Desulfovibrio piger ATCC 29098
MFKKIFRHMSWAFGITSAIFAFVSDSIFKKIFIIENIKANISDDFKVAIIKILLFIFIFLIIKIIVFIYKKFRSTVVIKKIGYSIYIEYGDILSKCNGKRIINFDECFSTDVGEKTYEINKTSLCGQYIQKTNIKNHQIRKLLKQYNIKASATNSLFQNKIRYESGTLLPNGDDLLLAFAKLNKDGLGCMSYDEFIECLNLLWKEIDKYYGGKDVYMPILGSGVTRMWDESLTQQKILEIILKSYSLTRYKLKLPCKLHIVCKEREGFSLNEIENY

SEQ ID NO: 17397 - protein, 152 aa, Desulfovibrio piger ATCC 29098
MDECYPCDLKAEFNRQINASSIVICIIGDKTATRTAGSTCSRFGKDYFFGCTCTPYKQSRNGIRDCKVDITYPAMGEIGNINNYSYLRHEFEQAKIKNKTIIVVYNSLIREPKWLPHYMKEYESRAEPFWKKDDYGRKVGNYTRIKEALGYV

SEQ ID NO: 17398 - protein, 370 aa, Nitrobacter hamburgensis X14
MIVSRLAEFSEPLAERGFVAKMQHSCRYRGNIADQASTVIGSCKSATMQVVRGFEFHRFRRSLWMCRHNPLLQKAVPANLAVDMATHLIKSLTVGFLRRWKAGLTRAFGVAGAIWLVTEIVTRVSSSANDWLTANGDVYLGGVLLAGAMWFVAYSYEQRKVKFRVPTTNSYITIKFGNLFEERSDWLIGVNEFFDGRLGQVIAKTSVHGQFITNVFHGDETRFREAVTAALAGVPCTSTARMNLPADSYEIGTTAVVANGSQKAFLVAMSRTDLVTHKAGSTVPMLFEAMKGALESVKNYGNGEPLALPLIGNGLSSVNLEPQHLLRLITLALVDFGRKVSLPKQVTIVAPEGCFEQLDIREIKRDWMKR

SEQ ID NO: 17399 - protein, 183 aa, Nitrobacter hamburgensis X14
MAYRNGTYIAFHAEGNSDPTASDIRYYRTLKMWHTNDNIEFKFVNSHEKVAAVRDTSQAATIKRSLRARLDNSKNMVLIIGQRTRFDMDFVPYEIAYAVDTCRIPIIATYPGQSVIRVSNALRPLWPEALRERIDNGAASVIHIPFNQKAIDDAIGQFSHNKLPFGGGIGIYSDDAYRSFGLL

SEQ ID NO: 17400 - protein, 286 aa, Afipia clevelandensis ATCC 49720
MKLFWKSLYLGLRRRWRTGFTRGFALAGVIWLFTEISMKSFAALDGLVSTYGTGYFSTVIALCVLTFFIHVYETRSVSFRVPTTDSWINIYYGDLLSTDTDWLVGVGEFFDSDLGHVVSRESLHGKLIETVWNSDGGRFRKAVDDALKGKPFEITERSIKPNKKYPIGTTAVLPRASRKIFLVAMARTDLQNAKASSTVPILWDALLGAFHSIHNFGNGGTVSLPLIGNGRSSVNIEPQHLLRLIVLSLIDFGRKTALPKQVNIVLPEECFERLDIREIRRDWSHR

SEQ ID NO: 17401 - protein, 183 aa, Afipia clevelandensis ATCC 49720
MAYRNGTYIAFHAEGNADPTASDIRYYRMIKAWHEHDKIEFKFVNSHEKTSAVRDSSLKATLRRSLVERLNNSRNMLLIIGDTTRFDTDWVPFEIGYAIDACKIPVIAVYTGYTSIRQPALLSNLWPVALGRRISNGTARVIHIPFKQAAIDDAIKQFDHTNLPKTGLEAYSVEAHRFFGISI

SEQ ID NO: 17402 - protein, 285 aa, Leuconostoc mesenteroides P45
MKISFANKYLLDNVTRQVGYVFAISSGILTFLDFSKNIKLFIFVGTLTISLVIYIANLIFANLMSFTTFKVGESEIRIQKGDIFSNEIFNNPDFIKVINANEYFDTIVNEEIISKRSVHGKFLLRSDVDVSQVNDAIKKDKRLNKRHKVGENLDREEGNQIKYELGSIFKYSDDVFLTALTHFDEYNKAYLSIQDFIRFLINFWDEIDELYAGRTVVITLFGSNLARLDNNTYSNTQILDTILWTFRLRRIKFKKPTKLIILLDKETNQKINYYKIKDRFYGLQE

SEQ ID NO: 17403 - protein, 166 aa, Leuconostoc mesenteroides P45
MAYRNKVYVAFDGDNDIFKYDLIKAWSKNQNIDFHIDDAHDLNTSKDSSQEASIKHNLSIRFSNSKAFILLVGEHTKNLTKFVKWEIETAIRLELPIIAVNLNGKKRADELMPPLLKENLSIVVPFKMVAIKYALENWPESDKEYRKNQDHRQYHYNDKVYDSLGI

SEQ ID NO: 17404 - protein, 290 aa, Pediococcus acidilactici DSM 20284
MRLLVMKIGIFNGELWKKISATGGWVFGFLGALISFIDIEEAIRVKMLCAFVVLMIIFFLFELIKANILWKARLNVGESEIIIREGDIFSNDIYENKKLIKVFAFNEYFDTEVDDNVISHGSLNGQFIDKHVNNVLSLDKAIDSDKRLSTRHKLGEDSTRESGKKIKYELGSIFKFSDDIFLTALTHFDSKNRAYLSIQDYIKFLVNFWDEIDELYAGKTVVITLFGSGITRLDHDRYSATEILDTILWTFKLRRIKFKKPTKLMILLDKDTNRQINYFLLRSRFYGLQK

SEQ ID NO: 17405 - protein, 158 aa, Pediococcus acidilactici DSM 20284
MAYRNKVYVAFDGDNDIKYYYLMKAWNKNPNFDFEISDAHDLHSSRDTSTEESIKRSLRQRFANSKLFILLIGEHTKYLTKFVKWEIETAIRLELPIIAVNLNGSEKEDNLVPSSLKGELAVFVPYKERAIKHAMENWPTFDKKYRKAGKTGAYYYEN

SEQ ID NO: 17406 - protein, 277 aa, Streptococcus sanguinis SK330
MKLKVNIFNRDILKQFSKVCATLTAILSGVLIFLDIPDNCRLYAGVAYISLLLAIYIFIWIRANRMKQIVIKIGLTTVLVKSGDIFDEEGLKAVAFNEYFDTMVDDKVIARQSLNGQFIINYIDDVEKLNSDIKNDDDLKNNIVEEGVRRQHGKTTKYGLGSSILIDDEYILTAFSRFNKNNQAELTIQEYVNFLLTFWNEINRLYAQRSVIVPVFGSGITRFKNGFEDIDINELLRIMIWTFKISKIKFAYPAKLTIIIHNDLLSQVNLYELRENE

SEQ ID NO: 17407 - protein, 166 aa, Streptococcus sanguinis SK330
MAYRNKTYVAFDGDNDMRYYQLMKAWKQNDNTSFNFHDAHDINSARDTSQEESIKRQLRERMANSKAFVLLIGEHTKYLTKFVKWEIELAIKKGLPIICVNLNKNKRKDELCPSSLNGQLAIFIPFGSKMMQYALENWPKSHEQYLKNGEISSYCYKDAVYKRLGL

SEQ ID NO: 17408 - protein, 275 aa, Streptococcus suis
MKVNIFDKDILKQFSNICATITAILSAVLIFLDIPNQWRIVSGVVYVLFLSVTYVFLWIRANRLRQVDIKIGTTTVVVKSGDIFKEDGLKAIAFNEYFDTVVDDKIIAKKSLNGQFIMNHITNVEELDSDIEYDDDLKSNIIGRAVERKQGKTTKYKLGSSILIDDEYILTAFSRFNKENQAELTIQEYVNFLLTFWNEINRLYAQRSVTVPVFGSGITRFKNGFEDIDINELLRIMIWTFKISKIRFAYPAKLTIIVHDDLLSKVNLYELRENE

SEQ ID NO: 17409 - protein, 169 aa, Streptococcus suis
MAYRNKTYVAFDGDNNMRYYQLMKAWKQSDSTSFNFYDAHDINRARDSSLEESIKRQLRERMANSKVFVLLIGERTRYLTKFVKWEIELAIKKELPIICVNLNKNRKKDNLCPSSLDEKLAIFIPFGNKIMQYALENWPRSHEKYRNEGKIGAYRYPDSIYENLKYWHY

SEQ ID NO: 17410 - protein, 275 aa, Streptococcus suis; identical to SEQ ID NO: 17408

SEQ ID NO: 17411 - protein, 169 aa, Streptococcus suis; identical to SEQ ID NO: 17409

SEQ ID NO: 17412 - protein, 275 aa, Streptococcus mutans NLML8
MKVNIFNRDILKQFSKVCATLTAILSGALIFLDIPDNCRLYAGVAYISLLLAIYIFIWIRANIMKQIVIKIGLTTVLVKSGDIFDEEGLKAVAFNEYFDTMVDDKVIARQSLNGQFIINYIDDVEKLNSDIKNDDDLKNNIVEEGVRRQHGKTTKYGLGSSILIDDEYILTAFSRFNKNNQAELTIQEYVNFLLTFWNEINRLYAQRSVIVPVFGSGITRFKNGFEDIDINELLRIMIWTFKISKIKFTYPAKLTIIIHNDLLSQVNLYELKENE

SEQ ID NO: 17413 - protein, 166 aa, Streptococcus mutans NLML8; identical to SEQ ID NO: 17407

SEQ ID NO: 17414 - protein, 275 aa, Streptococcus mutans N3209
MKVNIFNRDILKQFSKVCATLTAILSGALIFLDIPDNCRLYAGVAYISLLLAIYIFIWIRANIMKQIVIKIGLTTVLVKSGDIFDEEGLKAVAFNEYFDTMVDDKVIARQSLNGQFIINYIDDVEKLNSDIKNDDDLKNNIVEEGVRRQHGKTTKYGLGSSILIDDEYILTAFSRFNKNNQAELTIQEYVNFLLTFWNEINRLYAQRSVIVPVFGSGITRFKNGFEDIDINELLRIMIWTFKISKIKFAYPAKLTIIIHNDLLSQVNLYELRENE

SEQ ID NO: 17415 - protein, 166 aa, Streptococcus mutans N3209
MAYRNKTYVAFDGDNDMRYYQLMKAWKQNDSTSFNFHDAHDINSARDTSQEESIKRQLRERMANSKAFVLLIGEHTKYLTKFVKWEIELAIKKGLPIICVNLNKNKRKDELCPSSLNGQLAIFIPFGSKIMQYALENWPKSHEQYLKNGEISSYRYKDAVYKRLGL

SEQ ID NO: 17416 - protein, 275 aa, Streptococcus mutans; identical to SEQ ID NO: 17414

SEQ ID NO: 17417 - protein, 166 aa, Streptococcus mutans; identical to SEQ ID NO: 17415

SEQ ID NO: 17418 - protein, 275 aa, Streptococcus agalactiae ATCC 13813
MKVSIFDKDILKQFSNICATITAILSAVLIFLDIPNKWRLTSGVVYVAFLCVIYIFLWRRANRLRQVNIKIGVTTLIVKSGDIFEEDGLKAIAFNEYFDTTVDDKIIAKKSLNGQFILNHIDDVAKLNSDIESDDDLKNSIVEKEVKRKQGKMTQYKLGSSILINDEYILTAFSRFNKNNQAELTIQEYVNFLLTFWNEINRLYAQRSVTVPVFGSGITRFKNGFEDIDINELLRIMIWTFKVSKIKFAYLAKLTIIVHNDLLNQVNLYKLKENE

SEQ ID NO: 17419 - protein, 166 aa, Streptococcus agalactiae ATCC 13813
MAYRNKTYVAFDGDNDMRYYQLMKAWKQSDNTAFNFYDAHDINSARDSSQEESIKRQLRERMTNSKVFILLIGENTKYLRKFVKWEIELAIKKGLPIICVNLNKSKQRDNYCPSSLDGQLAIFIPFGNKIMQYALENWPPSHEQYLKKGEAGSYFYKGTVYKQLGY

SEQ ID NO: 17420 - protein, 212 aa, Streptococcus agalactiae FSL S3-026
MRQVNIKIGVTTLIVKSGDIFEEDGLRAIAFNEYFDTTVDDKIIAKKSLNGQFILNHIDDVAKLNSDIESDDDLKNSIVEKEVKRKQGKMTQYKLGSSILINDEYILTAFSRFNKNNQAELTIQEYVNFLLTFWNEINRLYAQRSVTVPVFGSGITRFKNGFEDIDINELLRIMIWTFKVSKIKFAYPAKLTIIVHNDLLNQVNLYKLKENE

SEQ ID NO: 17421 - protein, 166 aa, Streptococcus agalactiae FSL S3-026; identical to SEQ ID NO: 17419

SEQ ID NO: 17422 - protein, 275 aa, Streptococcus agalactiae FSL S3-501; identical to SEQ ID NO: 17418

SEQ ID NO: 17423 - protein, 166 aa, Streptococcus agalactiae FSL S3-501; identical to SEQ ID NO: 17419

SEQ ID NO: 17424 - protein, 212 aa, Streptococcus agalactiae FSL S3-586; identical to SEQ ID NO: 17420

SEQ ID NO: 17425 - protein, 166 aa, Streptococcus agalactiae FSL S3-586; identical to SEQ ID NO: 17419

SEQ ID NO: 17426 - protein, 78 aa, Streptococcus agalactiae FSL S3-251
NEINRLYAQRSVTVPVFGSGITRFKNGFEDIDINELLRIMIWTFKVSKIKFAYLAKLTIIVHNDLLNQVNLYKLKENE

SEQ ID NO: 17427 - protein, 166 aa, Streptococcus agalactiae FSL S3-251; identical to SEQ ID NO: 17419

SEQ ID NO: 17428 - protein, 275 aa, Streptococcus agalactiae
MKVSIFDKDILKQFSNICATITAILSAVLIFLDIPNKWRLTSGVVYVAFLCVIYIFLWRRANRLRQVNIKIGVTTLIVKSGDIFEEDGLKAIAFNEYFDTTVDDKIIAKKSLNGQFILNHIDDVAKLNSDIESDDDLKNSIVEKEVKRKQGKMTQYKLGSSILINDEYILTAFSRFNKNNQAELTIQEYVNFLLTFWNEINRLYAQRSVTVPVFGSGITRFKNGFEDIDINELLRIMIWTFKVSKIKFAYPAKLTIIVHNDLLNQVNLYKLKENE

SEQ ID NO: 17429 - protein, 166 aa, Streptococcus agalactiae; identical to SEQ ID NO: 17419

SEQ ID NO: 17430 - protein, 275 aa, Streptococcus agalactiae; identical to SEQ ID NO: 17418

SEQ ID NO: 17431 - protein, 166 aa, Streptococcus agalactiae; identical to SEQ ID NO: 17419

SEQ ID NO: 17432 - protein, 212 aa, Streptococcus agalactiae; identical to SEQ ID NO: 17420

SEQ ID NO: 17433 - protein, 166 aa, Streptococcus agalactiae; identical to SEQ ID NO: 17419

SEQ ID NO: 17434 - protein, 275 aa, Streptococcus uberis C8329
MKVSIFDKDILKQFSNICATITAILSAVLIFLDIPNKWRLTSGVIYVAFLCAIYIFLWRRANRLRQVNIKIGVTTLIVKSGDIFEEDGLKAIAFNEYFDTTVDDQIIAKKSLNGQFILNHIDDVAKLNSDIESDDDLKNSIVEKEVKRKQGKMTQYKLGSSILINDEYILTAFSRFNKNNQAELTIQEYVNFLLTFWNEINRLYAQRSVTVPVFGSGITRFKNGFEDIDINELLRIMIWTFKVSKIKFAYPAKLTIIVHNDLLNQVNLYKLKENE

SEQ ID NO: 17435 - protein, 166 aa, Streptococcus uberis C8329
MAYRNKTYVAFDGDNDMRYYQLMKAWKQSDNTAFNFYDAHDINSARDSSQEESIKRQLRERMTNSKVFILLIGENTKYLRKFVKWEIELAIKKGLPIICVNLNKSKQRDNYCPSSLDGQLAIFIPFGNKIMQYALENWPPSHEQYLKKGEAGAYFYKDTVYKQLGY

SEQ ID NO: 17436 - protein, 302 aa, Enterococcus faecalis TX1467
MVYSYKIVCLNLLGDVITLKIIKVKFFDKRIRAKFLKILGAISTFISLLLIFVDIPENLSIKAGIVFVVILLVIYIVLYVYANKLSEATIDIGGTSVLVKKGDIFKEDGLKVIPFNEYFDTIVDNQVITELSLNGKYIKKFGDVHKLDELIYSNTFLNSSENILEEDVSRNGNIGKKVRYKLGSSIVVDDYVLTAFSKFNQKNEAQLTMTEYINFLLNFWNEINRVYAQKSVTVPIFGSGITRFKGGFNDIEINELLNIMLWTFRISGTRFKYPAKLTIIVYGDLFKKINLFGLQEDVNYGI

SEQ ID NO: 17437 - protein, 186 aa, Enterococcus faecalis TX1467
MVYRNGTYVAFDGQATTNPTQSDMKYYGLLQNWNANNTSGMTFSDSHKKTYQVKDTSSRATLESRLMDRLRNSKNFLLIISDETNWDRGMLNFEIEKAVDKFQLPIIVAYTGYNSILAPSQLRSKWPKNLASRIDDKTAKCIHIPFKKEAIMSAISQFSIHSTGNNVLTGPLHYYSTEAQKEWGYI

SEQ ID NO: 17438 - protein, 284 aa, Enterococcus faecalis EnGen0327
MKIIKVKFFDKRIRAKFLKILGAISTFISLLLIFVDIPENLSIKAGIVFVVILLVIYIVLYVYANKLSEATIDIGGTSVLVKKGDIFKEDGLKVIPFNEYFDTIVDNQVITELSLNGKYIKKFGDVHKLDELIYSNTFLNSSENILEEDVSRNGNIGKKVRYKLGSSIVVDDYVLTAFSKFNQKNEAQLTMTEYINFLLNFWNEINRVYAQKSVTVPIFGSGITRFKGGFNDIEINELLNIMLWTFRISGTRFKYPAKLTIIVYGDLFKKINLFGLQEDVNYGI

SEQ ID NO: 17439 - protein, 186 aa, Enterococcus faecalis EnGen0327; identical to SEQ ID NO: 17437

SEQ ID NO: 17440 - protein, 284 aa, Enterococcus faecalis EnGen0329; identical to SEQ ID NO: 17438

SEQ ID NO: 17441 - protein, 186 aa, Enterococcus faecalis EnGen0329; identical to SEQ ID NO: 17437

SEQ ID NO: 17442 - protein, 284 aa, Enterococcus faecalis EnGen0289; identical to SEQ ID NO: 17438

SEQ ID NO: 17443 - protein, 186 aa, Enterococcus faecalis EnGen0289; identical to SEQ ID NO: 17437

SEQ ID NO: 17444 - protein, 284 aa, Enterococcus faecalis EnGen0285; identical to SEQ ID NO: 17438

SEQ ID NO: 17445 - protein, 186 aa, Enterococcus faecalis EnGen0285; identical to SEQ ID NO: 17437

SEQ ID NO: 17446 - protein, 291 aa, Enterococcus faecalis 20.SD.W.06
MLGDVITLKIIKVKFFDKRIRAKFLKILGAISTFISLLLIFVDIPENLSIKAGIVFVVILLVIYIVLYVYANKLSEATIDIGGTSVLVKKGDIFKEDGLKVIPFNEYFDTIVDNQVITELSLNGKYIKKFGDVHKLDELIYSNTFLNSSENILEEDVSRNGNIGKKVRYKLGSSIVVDDYVLTAFSKFNQKNEAQLTMTEYINFLLNFWNEINRVYAQKSVTVPIFGSGITRFKGGFNDIEINELLNIMLWTFRISGTRFKYPAKLTIIVYGDLFKKINLFGLQEDVNYGI

SEQ ID NO: 17447 - protein, 186 aa, Enterococcus faecalis 20.SD.W.06; identical to SEQ ID NO: 17437

SEQ ID NO: 17448 - protein, 284 aa, Enterococcus faecalis EnGen0403; identical to SEQ ID NO: 17438

SEQ ID NO: 17449 - protein, 186 aa, Enterococcus faecalis EnGen0403; identical to SEQ ID NO: 17437

SEQ ID NO: 17450 - protein, 284 aa, Enterococcus faecalis EnGen0404; identical to SEQ ID NO: 17438

SEQ ID NO: 17451 - protein, 186 aa, Enterococcus faecalis EnGen0404; identical to SEQ ID NO: 17437

SEQ ID NO: 17452 - protein, 284 aa, Enterococcus faecalis EnGen0405; identical to SEQ ID NO: 17438

SEQ ID NO: 17453 - protein, 186 aa, Enterococcus faecalis EnGen0405; identical to SEQ ID NO: 17437

SEQ ID NO: 17454 - protein, 284 aa, Enterococcus faecalis EnGen0406; identical to SEQ ID NO: 17438

SEQ ID NO: 17455 - protein, 186 aa, Enterococcus faecalis EnGen0406; identical to SEQ ID NO: 17437

SEQ ID NO: 17456 - protein, 284 aa, Enterococcus faecalis EnGen0408; identical to SEQ ID NO: 17438

SEQ ID NO: 17457 - protein, 186 aa, Enterococcus faecalis EnGen0408; identical to SEQ ID NO: 17437

SEQ ID NO: 17458 - protein, 284 aa, Enterococcus faecalis EnGen0410; identical to SEQ ID NO: 17438

SEQ ID NO: 17459 - protein, 186 aa, Enterococcus faecalis EnGen0410; identical to SEQ ID NO: 17437

SEQ ID NO: 17460 - protein, 284 aa, Enterococcus faecalis EnGen0412; identical to SEQ ID NO: 17438

SEQ ID NO: 17461 - protein, 186 aa, Enterococcus faecalis EnGen0412; identical to SEQ ID NO: 17437

SEQ ID NO: 17462 - protein, 284 aa, Enterococcus faecalis EnGen0415; identical to SEQ ID NO: 17438

SEQ ID NO: 17463 - protein, 186 aa, Enterococcus faecalis EnGen0415; identical to SEQ ID NO: 17437

SEQ ID NO: 17464 - protein, 284 aa, Enterococcus faecalis EnGen0418; identical to SEQ ID NO: 17438

SEQ ID NO: 17465 - protein, 186 aa, Enterococcus faecalis EnGen0418; identical to SEQ ID NO: 17437

SEQ ID NO: 17466 - protein, 284 aa, Enterococcus faecalis EnGen0421; identical to SEQ ID NO: 17438

SEQ ID NO: 17467 - protein, 186 aa, Enterococcus faecalis EnGen0421; identical to SEQ ID NO: 17437

SEQ ID NO: 17468 - protein, 277 aa, Lactococcus lactis subsp. lactis A12
MKTKKVPLFDKQVIRQFGSRSATLFAILSAVLIFVDIPVNLRLIAGGVVLLVLVAIYFLTWHRANTLNDISISIGATTVQIKSGDLFKQDGLKAIAFNEYFDTQVDDVIIAKRSLNGQVIEKYFPDIQGLDKQIESDKSLEKGLIEEMNREVGKKKRYKLGSSVLIDDEFILTAFSRFDDDNKAELTMQEYINFLLAFWNEINRLYAQRTVSVPVFGAGITRFRNGFEDIDINELLQIMVWTFKVSKIKFTYPAKLQIIVHEDLLKKVNLYELKENE

SEQ ID NO: 17469 - protein, 166 aa, Lactococcus lactis subsp. lactis A12
MAYRNKTYVAFDGDKDIRYYRLMKAWKQSDKTDFNFYDAHDLNTARDSSQEESIKRQLRERMANSKVFVLLIGESTKNLTKFLKWEIELAIKKELPIICVNLNGKKSKDTLCPKSLDDKLSIFIPFGSKIMQYALENWPTSDASYRKDGKTGAYHYKQSVYDELGI

SEQ ID NO: 17470 - protein, 259 aa, Clostridium cylindrosporum DSM 605
MMSYIKYACSQYFTWLGYIATIIGLVAVVPFDEKYNYIALLIVIAFFALAFIIPFIIAMVRRNFKLITVGKSDISFEFGDLFEEKCFVITTNRHYDVNPTGEWIAPDSLLGIYVNRYFLNDTERLESLISAELGSSVAPHEYGKTIKIQHDDKKVYLLVFTDRKKTKQPKDFYEKSLQGLFETIVNENHGETIAVPLIGDNNNLSDSGFDSSAMTFKCLMAMINSFDTRHQRSGIKLKIVALPKKRAELIKVVHSYSKS

SEQ ID NO: 17471 - protein, 174 aa, Clostridium cylindrosporum DSM 605
MIYRTRTYIAADWTDDKDAVDQLMKWNSSKHWGLTFGDAHELSQCLSDDTNNCNIKKNCSQNFDHSKFFVLIVGDKTKSLRSGYCMYCKAYSYCQYTYKTNKSYVEYECDYAVRNNLPIIVLYNSTTIDKSKCIDSVVKVAKAHAKMVMYGTDNKLYWDYQSVKDAFDKLAMPI

SEQ ID NO: 17472 - protein, 285 aa, Clostridium perfringens
MIDFIKKSVALAFAFVTGIFTFVPEAFFGKHEWVTQETLKQDKWFNHLDVQDVNIVISRLVCFLLVWGAISLLYMGFLKICRWITIKGQNYSIRVEYGNILTKRKCKRVINFDECFTTKVGSATPDVKPNSICGQYLSLHPDLDVQQLIETSKIKPAGSKSKYLNKTRYDSGTIVPNGDDLLMAFAKLDERGKGRFFSRDEYLVCLDLLWKELENHNSEKDICVPVLGAGTTTFDGGSGASISQQDLLDMMIWSYKLSSHKIKAPHKLRIVCKKNSGFSINNIGK

SEQ ID NO: 17473 - protein, 202 aa, Clostridium perfringens
MSKQVYISADYDRLNGDQDVVDELNKWGSDNLHKVDFIDMSKVSSGTVANSDDCRICDLKAEFNRQINASSAVIFVVGDMTSSRTAGSGCERASKEQWQCSCTPYKQNTNGTKACKVYSTSKCGENDNYGNINGCSYLRHEFEQAKKKKKTIIIVYNSTRNELNWLPSYMNGYGNDAKPFWKKDSNGKKVGDYSYIKEVLGF

SEQ ID NO: 17474 - protein, 278 aa, Clostridium sordellii
MIKLILTCCGIAFSITSAIISFVPESLYLKIKVGMAEIDSISKIQDGNFILMSRLFIFIAVLIICTIFGSIIRTFWWRRRFKGKSYTIIVKYGNLFKQKKCKKIISFDECFTTKVGESPSDIKPDSICGQYLLANPNLNIKKLITDCGLKSLDKKSEFQKQDVYKSGSIVPNGDYLLMAFAKLNQDGLGEMSYEEYLMCLDNLWKNIDKNYGSKSVCLPILGSGRTRFDGIQPSQQELLDIMIESYKLSRTKIKLPYKLYIICRKSENFTLNQIGQTL

SEQ ID NO: 17475 - protein, 200 aa, Clostridium sordellii
MKKKVYISADYSEDHGDRDVVNELNRFAKDNRYSLEFIDMAAVASGSVSNNNPDCRPCDLKLEFNRQINSSSAVIFVVGDKTAARTAGSSCSRKGSDWWNYSCTPYKQNTNGSKMCKVTSTASAGDDVGSINTYSYLQHEFMQAVKRNKQIIIFYNAKIKKESWLPSYMLGYADQARPFWIEESSGYLHGNYDYLRQELL

SEQ ID NO: 17476 - protein, 275 aa, Ruminiclostridium thermocellum BC1
MFSMKAIPRIWKDSASMGSTIFAIISTFMGVAGISLDSIISSQKWWNRLLIILALYTVLVVFLRVILGLTVSNGIKIKIRGISVSIKQGNIFDANGWKVIPFNEYFDTIVDDVIVSSTTLNGIFINDYVSDIKKLQDAIMSADKDYSDLKKYKKGNRFAYPLGRIITFEDYMLLAFSHFNEQNVAHISKPEYERCLLAMWKEIRRTYANRPVFLPLIGSGITSFDDVPEKSNIDLLKCMLCTLRASGENFNQPITILLTKEIMQELNLYELKGVV

SEQ ID NO: 17477 - protein, 170 aa, Ruminiclostridium thermocellum BC1
MAYRTKTYIAADWTGDKDAVEQLHKWNDSDHWSLSFIDAHDLTQARDESLNCSIKASLRTRLDASKTFVLIVGENTKTLRSGGCQYCYSYNSWTRSCARGYSVDYRSYIEYECDKAVQDGLKIVVLYNAATVNKSKCPDSVKNIGTHVAMCFFRDGKYYWDYQSVKAALS

SEQ ID NO: 17478 - protein, 271 aa, Clostridium clostridioforme 2_1_49FAA
MLKLLKKSSTWALSIITVVFTFVPESVFGKWKWLPNASDEANVVLARVLAFIAALVISIIINTLYVLGRRSIRIKGKNYSIQVQYGDLFKMRACKIVIPFDECFTTSVGAAPSDINPDSICGQYLKEYPIQDIQSLIDNVQLKPAKGKSKYQNKERYDSGKLVPNGNYLLMAFAKLDKDGLGRMTRDEFLACLSVLWKEIDKYYGQKDVCIPVLGSGITRMDDTSLTQQELLEIIIGSYRLSPHKMKSPSQLHIVCKKREDFSLNKVGENM

SEQ ID NO: 17479 - protein, 203 aa, Clostridium clostridioforme 2_1_49FAA
MSKRVYISADYAEDSGDRDVVDILNQWGSDNRHKVDFIDMSKVASGSVSNDPDCRPCDLKREFNQQINASSAVIFIVGDKTASRKAGSSCSRASSEQADCSCTPYKQNSKGSKTCKVIHTSSAKADSDVGNINAFSYLQHEFEQAKKRKKPIIIVYNSLRKESNWLPSYMKGYESDARPFWKRNDYGEKVGDYTYIKQVLGYA

SEQ ID NO: 17480 - protein, 271 aa, Clostridium novyi A str. GD211209
MSNFIKKSLTLTVSLITISFTLIPESMFGKYKLISNVSDGKNILLNRLLICIFVFSISSLYLHYRKKIILKGHNYIIDIEYGDLFKMHDCKKVIDFDECFTTSVGNEPSEIKPGSICGQYLEKNPIQDIQSLIDKAKLKPSKTNSKYENKERYESGKLIPNGDYLLMAFAKLDKDGLGIMSRDEFIDCLSVLWQEIDKYYGQEDVCIPILGSGLTRMNGDGSLFKKQELLDMIIYSYKLSSHKIKSPNKLHIVCKKCKDDDFSLNKIGTSI

SEQ ID NO: 17481 - protein, 203 aa, Clostridium novyi A str. GD211209
MSKRVYISADYSQENGDRDVVDILNKWGKDSLHKVDFIDMSQVISGSISSDPDCRPCDLKREFNQQINASSAVIFIVGDKTASRKAGSSCSRVNTDLIKYVCTPYKQNTNGAKTCKVLTTYTVGEDDDVGNINNYSYIQHEFEQAKKRKKPIIIIYNSLRKESSWLPSYMKDYESEAQPFWNKNDRGEKIGNYSYIKKVLGYE

SEQ ID NO: 17482 - protein, 285 aa, Lactobacillus brevis ATCC 14869 = DSM 20054
MNVGFFNKELLKSVSASAGWLFGVIGALLSFVDFKEQTKKDVLIGFVLLTIVFYIVKLIWANLIRSAGFKVGDSNISVKHGDIFNSKYYDNGKFIKVFAFNEYFDTKVDDEIISHGSLNGQFIDKKVDNISKLDISIDKDGRLEHRHKLDINRDRPRGKKTRYELGSIHKFSEDVFLTALTHFDDKNRAYLSIQDYVKFLINFWDEIDEMYAGRTVVITLFGSGITRLDHDRYSATEILDTILWTFKLRRIKFKRPTKLIILLDKNTNREIDYFLLRSKFYGLQK

SEQ ID NO: 17483 - protein, 164 aa, Lactobacillus brevis ATCC 14869 = DSM 20054
MAYRNKVYVAFDGDNDMRYYELMRGWSVKDDFEFNDAHDLHSARDSSTEESIKKSLMDRFKNSKLFILLIGEHTKNLTKFVKWEIEVAIRLDLPIIAVNLNGKRQDDALMPAVLRDELHITVPYKEKIIKYAMDNWPDYDESYRGDGKKGGYSYKDKVYESLGL

SEQ ID NO: 17484 - protein, 285 aa, Lactobacillus brevis ATCC 14869 = DSM 20054; identical to SEQ ID NO: 17482

SEQ ID NO: 17485 - protein, 148 aa, Lactobacillus brevis ATCC 14869 = DSM 20054
MRYYELMRGWSVKDDFEFNDAHDLHSARDSSTEESIKKSLMDRFKNSKLFILLIGEHTKNLTKFVKWEIEVAIRLDLPIIAVNLNGKRQDDALMPAVLRDELHITVPYKEKIIKYAMDNWPDYDESYRGDGKKGGYSYKDKVYESLGL

SEQ ID NO: 17486 - protein, 286 aa, Actinomyces viscosus C505
MRPLTQYKQVQKYSSAKHKLFDAYKTWFLAMLTTCSAALAFFPECTKCRWAALAALLILPAMLAVLFYRPKLPEQQYRNNFKIKVISGDILKQNGNCVIGFTNTFDTDTVHRIISNESLQGQFQNRIYQNDVSRLDDDLSKVLNKLEPVDTIAKKGKRKVYPLGTVVPIRKEGGGFWYCLAYTKMNEENVATAKLSELRHALDLLWEEILATSNGEPVSLPLIGLGNARTPSMSAELSLHLVAFSYYIRSRESVVCESLNIIINEETIENIDLTKFQSFLSSLNTL

SEQ ID NO: 17487 - protein, 390 aa, Actinomyces viscosus C505
MIFISHSSSDIITTRKLVFELNYLGAKTWFDETEITAVSPVFGSIEQAIRNCDVVVLVASVDSLESDYVKREIKLALQLDKPLAIVRVPGSNVDISGDLADYKHFNLSDFPSFSRAAREIIKKDNLKKRGESPEEFWGVCRGVDPLLNDSVRSNIHALKSVVNQSATQEPLVRLLREDYTDLVQSFDVVHDIDVSWLPPELRRDFIDLPEKADRVSNYISSLTYDYLQNPALDSQTFESEYFRIVSTHLIVSLNVELLKLPWAQDPDGISSACRVLTNARNALTSSSPFPTEGISADICLGEVTEQGLAKYHKYVGKCHCPDYVEEKDFRFSVFPNGSPTTLTEGLGVVVPYQLGIMTGWADSWNIWRTLRERRAEARIPSPDSVLLGIS

SEQ ID NO: 17488 - protein, 269 aa, Propionibacterium acidipropionici
MQEFSRRFLEALGVLAVVAGAVALFAPDLLQGRWWLVGIAALLAIGWASFTLRQKSSEQWFPSESVTIRLVEGDLFEQSASAMVGMTTTFDTESGIIENKSVQGSLLRAIYDGSQTRLDAALTAALSEVGPVDTITKPGKHDIYPLGTVAVLPGQGAIRYYCVAYTEMDVHNRAKGTIRGILDSLDAVWDAADRHGNGEPICVPLLGQGQSRIPELTAETAVRLIAFSFLLRTRRGRFSKELRIVVHPNEIGKVDQAEFQAFLRSLVAG

SEQ ID NO: 17489 - protein, 171 aa, Propionibacterium acidipropionici
MSYRNKTYVAFASEDIRYYRLMTAWRANDNIEFDFINAHDIYTARDSSTPETIKRRLRERLNNTKQVVLLGSADARRKGGNGNSFLAYEVGAIISLNLPVVVANLDGSRQGVSGNIPAPFASKDYYTMSVSFGPTIIKYALDNYAPDFAGSEKTGSYFYKESVYERLGLNK

SEQ ID NO: 17490 - protein, 286 aa, Sphingomonas paucimobilis
MSKFVQSAITGLRRRWQRATATFLSVLGSVWLVTEVLTRVSHVTNQWLDDHGTTYLVFAVCSAIIGILIAAYEARSVSFTIPNTDTTLTLSFASIFDESADWIIGVNEFFDSTLGNIVSANSLHGQIIAKLYSGNEANFRRDVDAALAGRQSEHIQRAEGQTAKFPLGTTAVIPRGPHKIFLVAISKTDLATHRSSSTVPILWDALSEAFKEVDGLGNGDPLAMPLIGNGRASLNIPPQHLLRIITLKITELGKRYDLPRQITINLSDDCFEHLDLVEIKRGWSVV

SEQ ID NO: 17491 - protein, 181 aa, Sphingomonas paucimobilis
MAYRNGTYIAFHAEGKTDPTASDIKYYRMMKAWHEHDDVDFKFVNSHDKVAAVRDASTKQTIMRSLRERLNNSKNMVLIIGNTTKNDTDFVPYEIAYAVDTCKIPIICVYTAYASILNPKSHRSEWPSALAERIDAKAVRALHIPFKRRVIDTAIGQFHLGNLPSGSLSYYSKEGQHVDCH

SEQ ID NO: 17492 - protein, 271 aa, Prevotella intermedia ZT
MRQTKVFLSHFLIFIGAISACIGAFIWLSGYSTTTQIIVGGCIILVGIGYAWFQMRPSKSIQIRINDSFPLQVEFGDLFEKKGVVIISVNEYFDTIVDNRIIATDTIHGKFIERLFKGRIQELDNKIRKALNKFIAEDTPNRTRGKKQRYPLGTCAVIEEGENTYILAALTEFDANNHAFIPLSEYGAIIQRIISTAATVANSRPVYMPLLGSGQGGIQKSAQKILFYMISQIEFCSNVSIPKGLHIVIYDLNKKGINLDNIKSVWQSAIK

SEQ ID NO: 17493 - protein, 231 aa, Prevotella intermedia ZT
MELYKVTTEVVGEVFNTSPITSTQPLERPRGLQNELRCLVKGERGIIDGERLRNFVFPTDNYDVFISHSHDDLEIAKQFAAWLKEKYRYSVFLDSFVWNSADGLLREIDNLYCKQRNGLYNYHRRNYSTAHIHTMLSMSIMEIIKRSKVGILIDSHHSINLERLRNSNQGKTLSPWIFQEIMFMRQFANQKSSTRMFSSESLNEGLQIAHTVDLSDFTPLTAMDLISKAPF

SEQ ID NO: 17494 - protein, 280 aa, Burkholderia pseudomallei K96243
MNSIRDLLNGVRRHPVKMLAYMFTAFSIIQTVVRGVSLFVPGISISGPIPFAAVIVISVSWGLKKVWKPSRIELPIANCATVIEVVFGDLFEQEGIRAIAVNNFFDSALGKPVSDKSVHGIFLKKCFGGHAEPFDKQVDEQLAAIESESVERAEGKTKRFPIGSTAMINVNQDRYIAFAFAETDPATSKAHSDVTMMWSALHSLWERARVEAGGHSLNLPLVGSGLSGLGLPTRDLLNLIILSAITETKTREVTQRIRIVLGRDRFDHLDLRDVKAHWSE

SEQ ID NO: 17495 - protein, 185 aa, Burkholderia pseudomallei K96243
MAYRNGTYVAFHANGTNRPGGNSDIDYYNLLKAWVGKDDDHFTMNNSHDKASAVRDSSKKETLRASLLERLRNSKNMVLIIGDTTLLDDDWVPFEISSAVDTYEIPIIAVYTQYSTPIRNPAALRSRWPDALATRIDSQKAKVIHIPFKKAALNDAISQFSHNNMPKGPLSFYSDEAYESFGIDG

SEQ ID NO: 17496 - protein, 265 aa, Burkholderia pseudomallei 1106a
MKMLAYMFTAFSIIQTVVRGVSLFVPGISISGPIPFAAVIVISVSWGLKKVWKPSRIELPIANCATVIEVVFGDLFEQEGIRAIAVNNFFDSALGKPVSDKSVHGIFLKKCFGGHAEPFDKQVDEQLAAIESESVERAEGKTKRFPIGSTAMINVNQDRYIAFAFAETDPATSKAHSDVTMMWSALHSLWERARVEAGGHSLNLPLVGSGLSGLGLPTRDLLNLIILSAITETKTREVTQRIRIVLGRDRFDHLDLRDVKAHWSE

SEQ ID NO: 17497 - protein, 185 aa, Burkholderia pseudomallei 1106a; identical to SEQ ID NO: 17495

SEQ ID NO: 17498 - protein, 265 aa, Burkholderia pseudomallei Pasteur 52237; identical to SEQ ID NO: 17496

SEQ ID NO: 17499 - protein, 185 aa, Burkholderia pseudomallei Pasteur 52237; identical to SEQ ID NO: 17495

SEQ ID NO: 17500 - protein, 265 aa, Burkholderia pseudomallei 1710a; identical to SEQ ID NO: 17496

SEQ ID NO: 17501 - protein, 185 aa, Burkholderia pseudomallei 1710a; identical to SEQ ID NO: 17495

SEQ ID NO: 17502 - protein, 265 aa, Burkholderia pseudomallei 1106b; identical to SEQ ID NO: 17496

SEQ ID NO: 17503 - protein, 185 aa, Burkholderia pseudomallei 1106b; identical to SEQ ID NO: 17495

SEQ ID NO: 17504 - protein, 207 aa, Burkholderia pseudomallei 1258a
MPIANCATVIEVVFGDLFEQEGIRAIAVNNFFDSALGKPVSDKSVHGIFLKKCFGGHAEPFDKQVDEQLAAIESESVERAEGKTKRFPIGSTAMINVNQDRYIAFAFAETDPATSKAHSDVTMMWSALHSLWERARVEAGGHSLNLPLVGSGLSGLGLPTRDLLNLIILSAITETKTREVTQRIRIVLGRDRFDHLDLRDVKAHWSE

SEQ ID NO: 17505 - protein, 185 aa, Burkholderia pseudomallei 1258a; identical to SEQ ID NO: 17495

SEQ ID NO: 17506 - protein, 207 aa, Burkholderia pseudomallei 1258b; identical to SEQ ID NO: 17504

SEQ ID NO: 17507 - protein, 185 aa, Burkholderia pseudomallei 1258b; identical to SEQ ID NO: 17495

SEQ ID NO: 17508 - protein, 207 aa, Burkholderia pseudomallei 354e; identical to SEQ ID NO: 17504

SEQ ID NO: 17509 - protein, 185 aa, Burkholderia pseudomallei 354e; identical to SEQ ID NO: 17495

SEQ ID NO: 17510 - protein, 207 aa, Burkholderia pseudomallei 354a; identical to SEQ ID NO: 17504

SEQ ID NO: 17511 - protein, 185 aa, Burkholderia pseudomallei 354a; identical to SEQ ID NO: 17495

SEQ ID NO: 17512 - protein, 265 aa, Burkholderia pseudomallei BPC006; identical to SEQ ID NO: 17496

SEQ ID NO: 17513 - protein, 177 aa, Burkholderia pseudomallei BPC006
MAFHANGTNRPGGNSDIDYYNLLKAWVGKDDDHFTMNNSHDKASAVRDSSKKETLRASLLERLRNSKNMVLIIGDTTLLDDDWVPFEISSAVDTYEIPIIAVYTQYSTPIRNPAALRSRWPDALATRIDSQKAKVIHIPFKKAALNDAISQFSHNNMPKGPLSFYSDEAYESFGIDG

SEQ ID NO: 17514 - protein, 263 aa, Burkholderia pseudomallei
MLAYMFTAFSIIQTVVRGVSLFVPGISISGPIPFAAVIVISVSWGLKKVWKPSRIELPIANCATVIEVVFGDLFEQEGIRAIAVNNFFDSALGKPVSDKSVHGIFLKKCFGGHAEPFDKQVDEQLAAIESESVERAEGKTKRFPIGSTAMINVNQDRYIAFAFAETDPATSKAHSDVTMMWSALHSLWERARVEAGGHSLNLPLVGSGLSGLGLPTRDLLNLIILSAITETKTREVTQRIRIVLGRDRFDHLDLRDVKAHWSE

SEQ ID NO: 17515 - protein, 185 aa, Burkholderia pseudomallei; identical to SEQ ID NO: 17495

SEQ ID NO: 17516 - protein, 263 aa, Burkholderia pseudomallei; identical to SEQ ID NO: 17514

SEQ ID NO: 17517 - protein, 185 aa, Burkholderia pseudomallei; identical to SEQ ID NO: 17495

SEQ ID NO: 17518 - protein, 263 aa, Burkholderia pseudomallei Pasteur 52237; identical to SEQ ID NO: 17514

SEQ ID NO: 17519 - protein, 185 aa, Burkholderia pseudomallei Pasteur 52237; identical to SEQ ID NO: 17495

SEQ ID NO: 17520 - protein, 273 aa, Burkholderia pseudomallei
MNGVRRHPVKMLAYMFTAFSIIQTVVRGVSLFVPGISISGPIPFAAVIVISVSWGLKKVWKPSRIELPIANCATVIEVVFGDLFEQEGIRAIAVNNFFDSALGKPVSDKSVHGIFLKKCFGGHAEPFDKQVDEQLAAIESESVERAEGKTKRFPIGSTAMINVNQDRYIAFAFAETDPATSKAHSDVTMMWSALHSLWERARVEAGGHSLNLPLVGSGLSGLGLPTRDLLNLIILSAITETKTREVTQRIRIVLGRDRFDHLDLRDVKAHWSE

SEQ ID NO: 17521 - protein, 185 aa, Burkholderia pseudomallei; identical to SEQ ID NO: 17495

SEQ ID NO: 17522 - protein, 263 aa, Burkholderia pseudomallei; identical to SEQ ID NO: 17514

SEQ ID NO: 17523 - protein, 185 aa, Burkholderia pseudomallei; identical to SEQ ID NO: 17495

SEQ ID NO: 17524 - protein, 273 aa, Burkholderia pseudomallei; identical to SEQ ID NO: 17520

SEQ ID NO: 17525 - protein, 185 aa, Burkholderia pseudomallei; identical to SEQ ID NO: 17495

SEQ ID NO: 17526 - protein, 280 aa, Burkholderia pseudomallei B03; identical to SEQ ID NO: 17494

SEQ ID NO: 17527 - protein, 185 aa, Burkholderia pseudomallei B03; identical to SEQ ID NO: 17495

SEQ ID NO: 17528 - protein, 280 aa, Burkholderia pseudomallei A79A; identical to SEQ ID NO: 17494

SEQ ID NO: 17529 - protein, 185 aa, Burkholderia pseudomallei A79A; identical to SEQ ID NO: 17495

SEQ ID NO: 17530 - protein, 263 aa, Burkholderia pseudomallei TSV28; identical to SEQ ID NO: 17514

SEQ ID NO: 17531 - protein, 185 aa, Burkholderia pseudomallei TSV28; identical to SEQ ID NO: 17495

SEQ ID NO: 17532 - protein, 280 aa, Burkholderia pseudomallei A79C; identical to SEQ ID NO: 17494

SEQ ID NO: 17533 - protein, 185 aa, Burkholderia pseudomallei A79C; identical to SEQ ID NO: 17495

SEQ ID NO: 17534 - protein, 280 aa, Burkholderia pseudomallei A79D; identical to SEQ ID NO: 17494

SEQ ID NO: 17535 - protein, 185 aa, Burkholderia pseudomallei A79D; identical to SEQ ID NO: 17495

SEQ ID NO: 17536 - protein, 265 aa, Burkholderia pseudomallei; identical to SEQ ID NO: 17496

SEQ ID NO: 17537 - protein, 185 aa, Burkholderia pseudomallei; identical to SEQ ID NO: 17495

SEQ ID NO: 17538 - protein, 265 aa, Burkholderia pseudomallei; identical to SEQ ID NO: 17496

SEQ ID NO: 17539 - protein, 185 aa, Burkholderia pseudomallei; identical to SEQ ID NO: 17495

SEQ ID NO: 17540 - protein, 280 aa, Burkholderia pseudomallei; identical to SEQ ID NO: 17494

SEQ ID NO: 17541 - protein, 185 aa, Burkholderia pseudomallei; identical to SEQ ID NO: 17495

SEQ ID NO: 17542 - protein, 265 aa, Burkholderia pseudomallei; identical to SEQ ID NO: 17496

SEQ ID NO: 17543 - protein, 185 aa, Burkholderia pseudomallei; identical to SEQ ID NO: 17495

SEQ ID NO: 17544 - protein, 263 aa, Burkholderia pseudomallei K96243; identical to SEQ ID NO: 17514

SEQ ID NO: 17545 - protein, 185 aa, Burkholderia pseudomallei K96243; identical to SEQ ID NO: 17495

SEQ ID NO: 17546 - protein, 273 aa, Burkholderia pseudomallei; identical to SEQ ID NO: 17520

SEQ ID NO: 17547 - protein, 185 aa, Burkholderia pseudomallei; identical to SEQ ID NO: 17495

SEQ ID NO: 17548 - protein, 263 aa, Burkholderia pseudomallei; identical to SEQ ID NO: 17514

SEQ ID NO: 17549 - protein, 185 aa, Burkholderia pseudomallei; identical to SEQ ID NO: 17495

SEQ ID NO: 17550 - protein, 263 aa, Burkholderia pseudomallei; identical to SEQ ID NO: 17514

SEQ ID NO: 17551 - protein, 185 aa, Burkholderia pseudomallei; identical to SEQ ID NO: 17495

SEQ ID NO: 17552 - protein, 263 aa, Burkholderia pseudomallei; identical to SEQ ID NO: 17514

SEQ ID NO: 17553 - protein, 185 aa, Burkholderia pseudomallei; identical to SEQ ID NO: 17495

SEQ ID NO: 17554 - protein, 263 aa, Burkholderia pseudomallei; identical to SEQ ID NO: 17514

SEQ ID NO: 17555 - protein, 185 aa, Burkholderia pseudomallei; identical to SEQ ID NO: 17495

SEQ ID NO: 17556 - protein, 263 aa, Burkholderia pseudomallei; identical to SEQ ID NO: 17514

SEQ ID NO: 17557 - protein, 185 aa, Burkholderia pseudomallei; identical to SEQ ID NO: 17495

SEQ ID NO: 17558 - protein, 263 aa, Burkholderia pseudomallei; identical to SEQ ID NO: 17514

SEQ ID NO: 17559 - protein, 185 aa, Burkholderia pseudomallei; identical to SEQ ID NO: 17495

SEQ ID NO: 17560 - protein, 273 aa, Burkholderia pseudomallei; identical to SEQ ID NO: 17520

SEQ ID NO: 17561 - protein, 185 aa, Burkholderia pseudomallei; identical to SEQ ID NO: 17495

SEQ ID NO: 17562 - protein, 263 aa, Burkholderia pseudomallei; identical to SEQ ID NO: 17514

SEQ ID NO: 17563 - protein, 185 aa, Burkholderia pseudomallei; identical to SEQ ID NO: 17495

SEQ ID NO: 17564 - protein, 263 aa, Burkholderia pseudomallei; identical to SEQ ID NO: 17514

SEQ ID NO: 17565 - protein, 185 aa, Burkholderia pseudomallei; identical to SEQ ID NO: 17495

SEQ ID NO: 17566 - protein, 263 aa, Burkholderia pseudomallei; identical to SEQ ID NO: 17514

SEQ ID NO: 17567 - protein, 185 aa, Burkholderia pseudomallei; identical to SEQ ID NO: 17495

SEQ ID NO: 17568 - protein, 263 aa, Burkholderia pseudomallei; identical to SEQ ID NO: 17514

SEQ ID NO: 17569 - protein, 185 aa, Burkholderia pseudomallei; identical to SEQ ID NO: 17495

SEQ ID NO: 17570 - protein, 273 aa, Burkholderia pseudomallei; identical to SEQ ID NO: 17520

SEQ ID NO: 17571 - protein, 185 aa, Burkholderia pseudomallei; identical to SEQ ID NO: 17495

SEQ ID NO: 17572 - protein, 273 aa, Burkholderia pseudomallei; identical to SEQ ID NO: 17520

SEQ ID NO: 17573 - protein, 185 aa, Burkholderia pseudomallei; identical to SEQ ID NO: 17495

SEQ ID NO: 17574 - protein, 273 aa, Burkholderia pseudomallei; identical to SEQ ID NO: 17520

SEQ ID NO: 17575 - protein, 185 aa, Burkholderia pseudomallei; identical to SEQ ID NO: 17495

SEQ ID NO: 17576 - protein, 273 aa, Burkholderia pseudomallei; identical to SEQ ID NO: 17520

SEQ ID NO: 17577 - protein, 185 aa, Burkholderia pseudomallei; identical to SEQ ID NO: 17495

SEQ ID NO: 17578 - protein, 263 aa, Burkholderia pseudomallei; identical to SEQ ID NO: 17514

SEQ ID NO: 17579 - protein, 185 aa, Burkholderia pseudomallei; identical to SEQ ID NO: 17495

SEQ ID NO: 17580 - protein, 263 aa, Burkholderia pseudomallei; identical to SEQ ID NO: 17514

SEQ ID NO: 17581 - protein, 185 aa, Burkholderia pseudomallei; identical to SEQ ID NO: 17495

SEQ ID NO: 17582 - protein, 263 aa, Burkholderia pseudomallei; identical to SEQ ID NO: 17514

SEQ ID NO: 17583 - protein, 185 aa, Burkholderia pseudomallei; identical to SEQ ID NO: 17495

SEQ ID NO: 17584 - protein, 273 aa, Burkholderia pseudomallei; identical to SEQ ID NO: 17520

SEQ ID NO: 17585 - protein, 185 aa, Burkholderia pseudomallei; identical to SEQ ID NO: 17495

SEQ ID NO: 17586 - protein, 263 aa, Burkholderia pseudomallei; identical to SEQ ID NO: 17514

SEQ ID NO: 17587 - protein, 185 aa, Burkholderia pseudomallei; identical to SEQ ID NO: 17495

SEQ ID NO: 17588 - protein, 273 aa, Burkholderia pseudomallei; identical to SEQ ID NO: 17520

SEQ ID NO: 17589 - protein, 185 aa, Burkholderia pseudomallei; identical to SEQ ID NO: 17495

SEQ ID NO: 17590 - protein, 273 aa, Burkholderia pseudomallei; identical to SEQ ID NO: 17520

SEQ ID NO: 17591 - protein, 185 aa, Burkholderia pseudomallei; identical to SEQ ID NO: 17495

SEQ ID NO: 17592 - protein, 263 aa, Burkholderia pseudomallei; identical to SEQ ID NO: 17514

SEQ ID NO: 17593 - protein, 185 aa, Burkholderia pseudomallei; identical to SEQ ID NO: 17495

SEQ ID NO: 17594 - protein, 263 aa, Burkholderia pseudomallei; identical to SEQ ID NO: 17514

SEQ ID NO: 17595 - protein, 185 aa, Burkholderia pseudomallei; identical to SEQ ID NO: 17495

SEQ ID NO: 17596 - protein, 273 aa, Burkholderia pseudomallei; identical to SEQ ID NO: 17520

SEQ ID NO: 17597 - protein, 185 aa, Burkholderia pseudomallei; identical to SEQ ID NO: 17495

SEQ ID NO: 17598 - protein, 273 aa, Burkholderia pseudomallei; identical to SEQ ID NO: 17520

SEQ ID NO: 17599 - protein, 185 aa, Burkholderia pseudomallei; identical to SEQ ID NO: 17495

SEQ ID NO: 17600 - protein, 273 aa, Burkholderia pseudomallei; identical to SEQ ID NO: 17520

SEQ ID NO: 17601 - protein, 185 aa, Burkholderia pseudomallei; identical to SEQ ID NO: 17495

SEQ ID NO: 17602 - protein, 263 aa, Burkholderia pseudomallei; identical to SEQ ID NO: 17514

SEQ ID NO: 17603 - protein, 185 aa, Burkholderia pseudomallei; identical to SEQ ID NO: 17495

SEQ ID NO: 17604 - protein, 263 aa, Burkholderia pseudomallei; identical to SEQ ID NO: 17514

SEQ ID NO: 17605 - protein, 185 aa, Burkholderia pseudomallei; identical to SEQ ID NO: 17495

SEQ ID NO: 17606 - protein, 263 aa, Burkholderia pseudomallei; identical to SEQ ID NO: 17514

SEQ ID NO: 17607 - protein, 185 aa, Burkholderia pseudomallei; identical to SEQ ID NO: 17495

SEQ ID NO: 17608 - protein, 273 aa, Burkholderia pseudomallei; identical to SEQ ID NO: 17520

SEQ ID NO: 17609 - protein, 185 aa, Burkholderia pseudomallei; identical to SEQ ID NO: 17495

SEQ ID NO: 17610 - protein, 273 aa, Burkholderia pseudomallei; identical to SEQ ID NO: 17520

SEQ ID NO: 17611 - protein, 185 aa, Burkholderia pseudomallei; identical to SEQ ID NO: 17495

SEQ ID NO: 17612 - protein, 273 aa, Burkholderia pseudomallei; identical to SEQ ID NO: 17520

SEQ ID NO: 17613 - protein, 185 aa, Burkholderia pseudomallei; identical to SEQ ID NO: 17495

SEQ ID NO: 17614 - protein, 263 aa, Burkholderia pseudomallei; identical to SEQ ID NO: 17514

SEQ ID NO: 17615 - protein, 185 aa, Burkholderia pseudomallei; identical to SEQ ID NO: 17495

SEQ ID NO: 17616 - protein, 273 aa, Burkholderia pseudomallei; identical to SEQ ID NO: 17520

SEQ ID NO: 17617 - protein, 185 aa, Burkholderia pseudomallei; identical to SEQ ID NO: 17495

SEQ ID NO: 17618 - protein, 263 aa, Burkholderia pseudomallei; identical to SEQ ID NO: 17514

SEQ ID NO: 17619 - protein, 185 aa, Burkholderia pseudomallei; identical to SEQ ID NO: 17495

SEQ ID NO: 17620 - protein, 263 aa, Burkholderia pseudomallei; identical to SEQ ID NO: 17514

SEQ ID NO: 17621 - protein, 185 aa, Burkholderia pseudomallei; identical to SEQ ID NO: 17495

SEQ ID NO: 17622 - protein, 273 aa, Burkholderia pseudomallei; identical to SEQ ID NO: 17520

SEQ ID NO: 17623 - protein, 185 aa, Burkholderia pseudomallei; identical to SEQ ID NO: 17495

SEQ ID NO: 17624 - protein, 273 aa, Burkholderia pseudomallei; identical to SEQ ID NO: 17520

SEQ ID NO: 17625 - protein, 185 aa, Burkholderia pseudomallei; identical to SEQ ID NO: 17495

SEQ ID NO: 17626 - protein, 273 aa, Burkholderia pseudomallei; identical to SEQ ID NO: 17520

SEQ ID NO: 17627 - protein, 185 aa, Burkholderia pseudomallei; identical to SEQ ID NO: 17495

SEQ ID NO: 17628 - protein, 265 aa, Burkholderia pseudomallei; identical to SEQ ID NO: 17496

SEQ ID NO: 17629 - protein, 185 aa, Burkholderia pseudomallei; identical to SEQ ID NO: 17495

SEQ ID NO: 17630 - protein, 265 aa, Burkholderia pseudomallei; identical to SEQ ID NO: 17496

SEQ ID NO: 17631 - protein, 185 aa, Burkholderia pseudomallei; identical to SEQ ID NO: 17495

SEQ ID NO: 17632 - protein, 265 aa, Burkholderia pseudomallei; identical to SEQ ID NO: 17496

SEQ ID NO: 17633 - protein, 185 aa, Burkholderia pseudomallei; identical to SEQ ID NO: 17495

SEQ ID NO: 17634 - protein, 273 aa, Burkholderia pseudomallei; identical to SEQ ID NO: 17520

SEQ ID NO: 17635 - protein, 185 aa, Burkholderia pseudomallei; identical to SEQ ID NO: 17495

SEQ ID NO: 17636 - protein, 273 aa, Burkholderia pseudomallei; identical to SEQ ID NO: 17520

SEQ ID NO: 17637 - protein, 185 aa, Burkholderia pseudomallei; identical to SEQ ID NO: 17495

SEQ ID NO: 17638 - protein, 263 aa, Burkholderia pseudomallei; identical to SEQ ID NO: 17514

SEQ ID NO: 17639 - protein, 185 aa, Burkholderia pseudomallei; identical to SEQ ID NO: 17495

SEQ ID NO: 17640 - protein, 273 aa, Burkholderia pseudomallei; identical to SEQ ID NO: 17520

SEQ ID NO: 17641 - protein, 185 aa, Burkholderia pseudomallei; identical to SEQ ID NO: 17495

SEQ ID NO: 17642 - protein, 263 aa, Burkholderia pseudomallei; identical to SEQ ID NO: 17514

SEQ ID NO: 17643 - protein, 185 aa, Burkholderia pseudomallei; identical to SEQ ID NO: 17495

SEQ ID NO: 17644 - protein, 263 aa, Burkholderia pseudomallei; identical to SEQ ID NO: 17514

SEQ ID NO: 17645 - protein, 185 aa, Burkholderia pseudomallei; identical to SEQ ID NO: 17495

SEQ ID NO: 17646 - protein, 273 aa, Burkholderia pseudomallei; identical to SEQ ID NO: 17520

SEQ ID NO: 17647 - protein, 185 aa, Burkholderia pseudomallei; identical to SEQ ID NO: 17495

SEQ ID NO: 17648 - protein, 263 aa, Burkholderia pseudomallei; identical to SEQ ID NO: 17514

SEQ ID NO: 17649 - protein, 185 aa, Burkholderia pseudomallei; identical to SEQ ID NO: 17495

SEQ ID NO: 17650 - protein, 273 aa, Burkholderia pseudomallei; identical to SEQ ID NO: 17520

SEQ ID NO: 17651 - protein, 185 aa, Burkholderia pseudomallei; identical to SEQ ID NO: 17495

SEQ ID NO: 17652 - protein, 263 aa, Burkholderia pseudomallei; identical to SEQ ID NO: 17514

SEQ ID NO: 17653 - protein, 185 aa, Burkholderia pseudomallei; identical to SEQ ID NO: 17495

SEQ ID NO: 17654 - protein, 263 aa, Burkholderia pseudomallei; identical to SEQ ID NO: 17514

SEQ ID NO: 17655 - protein, 185 aa, Burkholderia pseudomallei; identical to SEQ ID NO: 17495

SEQ ID NO: 17656 - protein, 273 aa, Burkholderia pseudomallei; identical to SEQ ID NO: 17520

SEQ ID NO: 17657 - protein, 185 aa, Burkholderia pseudomallei; identical to SEQ ID NO: 17495

SEQ ID NO: 17658 - protein, 263 aa, Burkholderia pseudomallei; identical to SEQ ID NO: 17514

SEQ ID NO: 17659 - protein, 185 aa, Burkholderia pseudomallei; identical to SEQ ID NO: 17495

SEQ ID NO: 17660 - protein, 263 aa, Burkholderia pseudomallei; identical to SEQ ID NO: 17514

SEQ ID NO: 17661 - protein, 185 aa, Burkholderia pseudomallei; identical to SEQ ID NO: 17495

SEQ ID NO: 17662 - protein, 263 aa, Burkholderia pseudomallei; identical to SEQ ID NO: 17514

SEQ ID NO: 17663 - protein, 185 aa, Burkholderia pseudomallei; identical to SEQ ID NO: 17495

SEQ ID NO: 17664 - protein, 263 aa, Burkholderia pseudomallei; identical to SEQ ID NO: 17514

SEQ ID NO: 17665 - protein, 185 aa, Burkholderia pseudomallei; identical to SEQ ID NO: 17495

SEQ ID NO: 17666 - protein, 273 aa, Burkholderia pseudomallei; identical to SEQ ID NO: 17520

SEQ ID NO: 17667 - protein, 185 aa, Burkholderia pseudomallei; identical to SEQ ID NO: 17495

SEQ ID NO: 17668 - protein, 273 aa, Burkholderia pseudomallei; identical to SEQ ID NO: 17520

SEQ ID NO: 17669 - protein, 185 aa, Burkholderia pseudomallei; identical to SEQ ID NO: 17495

SEQ ID NO: 17670 - protein, 263 aa, Burkholderia pseudomallei; identical to SEQ ID NO: 17514

SEQ ID NO: 17671 - protein, 185 aa, Burkholderia pseudomallei; identical to SEQ ID NO: 17495

SEQ ID NO: 17672 - protein, 273 aa, Burkholderia pseudomallei; identical to SEQ ID NO: 17520

SEQ ID NO: 17673 - protein, 185 aa, Burkholderia pseudomallei; identical to SEQ ID NO: 17495

SEQ ID NO: 17674 - protein, 273 aa, Burkholderia pseudomallei; identical to SEQ ID NO: 17520

SEQ ID NO: 17675 - protein, 185 aa, Burkholderia pseudomallei; identical to SEQ ID NO: 17495

SEQ ID NO: 17676 - protein, 273 aa, Burkholderia pseudomallei; identical to SEQ ID NO: 17520

SEQ ID NO: 17677 - protein, 185 aa, Burkholderia pseudomallei; identical to SEQ ID NO: 17495

SEQ ID NO: 17678 - protein, 273 aa, Burkholderia pseudomallei; identical to SEQ ID NO: 17520

SEQ ID NO: 17679 - protein, 185 aa, Burkholderia pseudomallei; identical to SEQ ID NO: 17495

SEQ ID NO: 17680 - protein, 263 aa, Burkholderia pseudomallei; identical to SEQ ID NO: 17514

SEQ ID NO: 17681 - protein, 185 aa, Burkholderia pseudomallei; identical to SEQ ID NO: 17495

SEQ ID NO: 17682 - protein, 263 aa, Burkholderia pseudomallei; identical to SEQ ID NO: 17514

SEQ ID NO: 17683 - protein, 185 aa, Burkholderia pseudomallei; identical to SEQ ID NO: 17495

SEQ ID NO: 17684 - protein, 273 aa, Burkholderia pseudomallei; identical to SEQ ID NO: 17520

SEQ ID NO: 17685 - protein, 185 aa, Burkholderia pseudomallei; identical to SEQ ID NO: 17495

SEQ ID NO: 17686 - protein, 263 aa, Burkholderia pseudomallei; identical to SEQ ID NO: 17514

SEQ ID NO: 17687 - protein, 185 aa, Burkholderia pseudomallei; identical to SEQ ID NO: 17495

SEQ ID NO: 17688 - protein, 263 aa, Burkholderia pseudomallei; identical to SEQ ID NO: 17514

SEQ ID NO: 17689 - protein, 185 aa, Burkholderia pseudomallei; identical to SEQ ID NO: 17495

SEQ ID NO: 17690 - protein, 273 aa, Burkholderia pseudomallei; identical to SEQ ID NO: 17520

SEQ ID NO: 17691 - protein, 185 aa, Burkholderia pseudomallei; identical to SEQ ID NO: 17495

SEQ ID NO: 17692 - protein, 273 aa, Burkholderia pseudomallei; identical to SEQ ID NO: 17520

SEQ ID NO: 17693 - protein, 185 aa, Burkholderia pseudomallei; identical to SEQ ID NO: 17495

SEQ ID NO: 17694 - protein, 263 aa, Burkholderia pseudomallei; identical to SEQ ID NO: 17514

SEQ ID NO: 17695 - protein, 185 aa, Burkholderia pseudomallei; identical to SEQ ID NO: 17495

SEQ ID NO: 17696 - protein, 273 aa, Burkholderia pseudomallei; identical to SEQ ID NO: 17520

SEQ ID NO: 17697 - protein, 185 aa, Burkholderia pseudomallei; identical to SEQ ID NO: 17495

SEQ ID NO: 17698 - protein, 273 aa, Burkholderia pseudomallei; identical to SEQ ID NO: 17520

SEQ ID NO: 17699 - protein, 185 aa, Burkholderia pseudomallei; identical to SEQ ID NO: 17495

SEQ ID NO: 17700 - protein, 273 aa, Burkholderia pseudomallei; identical to SEQ ID NO: 17520

SEQ ID NO: 17701 - protein, 185 aa, Burkholderia pseudomallei; identical to SEQ ID NO: 17495

SEQ ID NO: 17702 - protein, 263 aa, Burkholderia pseudomallei; identical to SEQ ID NO: 17514

SEQ ID NO: 17703 - protein, 185 aa, Burkholderia pseudomallei; identical to SEQ ID NO: 17495

SEQ ID NO: 17704 - protein, 273 aa, Burkholderia pseudomallei; identical to SEQ ID NO: 17520

SEQ ID NO: 17705 - protein, 185 aa, Burkholderia pseudomallei; identical to SEQ ID NO: 17495

SEQ ID NO: 17706 - protein, 263 aa, Burkholderia pseudomallei; identical to SEQ ID NO: 17514

SEQ ID NO: 17707 - protein, 185 aa, Burkholderia pseudomallei; identical to SEQ ID NO: 17495

SEQ ID NO: 17708 - protein, 263 aa, Burkholderia pseudomallei; identical to SEQ ID NO: 17514

SEQ ID NO: 17709 - protein, 185 aa, Burkholderia pseudomallei; identical to SEQ ID NO: 17495

SEQ ID NO: 17710 - protein, 273 aa, Burkholderia pseudomallei; identical to SEQ ID NO: 17520

SEQ ID NO: 17711 - protein, 185 aa, Burkholderia pseudomallei; identical to SEQ ID NO: 17495

SEQ ID NO: 17712 - protein, 273 aa, Burkholderia pseudomallei; identical to SEQ ID NO: 17520

SEQ ID NO: 17713 - protein, 185 aa, Burkholderia pseudomallei; identical to SEQ ID NO: 17495

SEQ ID NO: 17714 - protein, 273 aa, Burkholderia pseudomallei; identical to SEQ ID NO: 17520

SEQ ID NO: 17715 - protein, 185 aa, Burkholderia pseudomallei; identical to SEQ ID NO: 17495

SEQ ID NO: 17716 - protein, 273 aa, Burkholderia pseudomallei; identical to SEQ ID NO: 17520

SEQ ID NO: 17717 - protein, 185 aa, Burkholderia pseudomallei; identical to SEQ ID NO: 17495

SEQ ID NO: 17718 - protein, 263 aa, Burkholderia pseudomallei; identical to SEQ ID NO: 17514

SEQ ID NO: 17719 - protein, 185 aa, Burkholderia pseudomallei; identical to SEQ ID NO: 17495

SEQ ID NO: 17720 - protein, 273 aa, Burkholderia pseudomallei; identical to SEQ ID NO: 17520

SEQ ID NO: 17721 - protein, 185 aa, Burkholderia pseudomallei; identical to SEQ ID NO: 17495

SEQ ID NO: 17722 - protein, 273 aa, Burkholderia pseudomallei; identical to SEQ ID NO: 17520

SEQ ID NO: 17723 - protein, 185 aa, Burkholderia pseudomallei; identical to SEQ ID NO: 17495

SEQ ID NO: 17724 - protein, 263 aa, Burkholderia pseudomallei; identical to SEQ ID NO: 17514

SEQ ID NO: 17725 - protein, 185 aa, Burkholderia pseudomallei; identical to SEQ ID NO: 17495

SEQ ID NO: 17726 - protein, 263 aa, Burkholderia pseudomallei; identical to SEQ ID NO: 17514

SEQ ID NO: 17727 - protein, 185 aa, Burkholderia pseudomallei; identical to SEQ ID NO: 17495

SEQ ID NO: 17728 - protein, 249 aa, Salmonella enterica
  subsp. enterica serovar Oranienburg str. 0250
MIFVDIPTENKLTLGIIFLIILFLLYFGIWFKSNNLSEVNLDVEGSIVTVKAGDLFRQDGFKVIAFNEYFDTQVDDVVISHNSLNGLYIDNYLAGSVSDLDHRISNHHFEEDELLEVNHKRKVGKTQKYSLGTIFVNSDYLLTAFSKFDDKNRAFLTMPDYLAFLINFWDKVNRIYAQKSVSVPIFGSGITRIKEHKNISDEDLLKIMLWTFRISEMRFKFPAKLTIVIHKDKIDKINLLDIKSARNGL

SEQ ID NO: 17729 - protein, 295 aa, Salmonella enterica
  subsp. enterica serovar Oranienburg str. 0250
MVNVLDNNIYNILFFIFLSIAIPFLLFLAWKQHLKTKEIRSYLLKEGYNIIFSGEGNSYLAFNTSNATFRAGNLTSNDYFQASISYIHDYRWEWKEVDARKINNIFIIYISDIDFPSQKLFYRNNKILAEIDWAKLQAIFHQPYEIQNDVMQDNNNTHYDFFISHANEDKDTFVRPLVDELNRLGVIIWYDEQTLEVGDSLRRNIDLGLRKANYGIVILSHNFLNKKWTQYELDSLINRAVYDDNKIILPIWHNINAQEVSKYSHYLADKMALQTSLYSVKEIARELAEIAYRRR

SEQ ID NO: 17730 - protein, 278 aa, Salmonella enterica
  subsp. enterica serovar Anatum str. CDC 06-0532
MAKVNFFDKRILKKFSDYTSTISTIFSLFLIFVDIPTENKLTLGIIFLIILFLLYFGIWFKSNNLSEVNLDVEGSIVTVKAGDLFRQDGFKVIAFNEYFDTQVDDVVISHNSLNGLYIDNYLAGSVSDLNHRISNHQFEEDERLEINHKRKEGKTQKYSLGTIFVNNDYLLTAFSKFDDKNRAFLTMPDYLAFLINFWDKVNRIYAQKSVSVPIFGSGITRIKEHKNISDEDLLKIMLWTFRISEMRFKFPAKLTIVIHKDKIDKINLLDIKSARNGL

SEQ ID NO: 17731 - protein, 303 aa, Salmonella enterica
  subsp. enterica serovar Anatum str. CDC 06-0532
MKYEFFICLVNVLDNNIYNILFFIFLSIVIPSLLFLAWKQHQKTKEIRSYLLKEGYNIIFNGEGNSYLAFNISNATFRAGNLISNNYFQASISYIHDYRWEWKEVDAKKIKNIFIIYISDIDFPSQKLFYHNNKSLAEIDWAKLQAIFHQPYEIKNDVMLDNNDTHYDFFISHANEDKDTFVRPLVDELNRLGIIIWYDEQTLEVGDSLRRNIDLGLRKANYGIVILSHDFLNKKWTQYELDSLINRAVYDDNKIILPIWHNINAQEVSKYSHYLADKMALQTSLYSVKEIARELAEIAYRRR

SEQ ID NO: 17732 - protein, 278 aa, Salmonella enterica; identical to SEQ ID NO: 17730
  subsp. enterica serovar Anatum str. USDA-ARS-USMARC-1175

SEQ ID NO: 17733 - protein, 303 aa, Salmonella enterica
  subsp. enterica serovar Anatum str. USDA-ARS-USMARC-1175
MKYEFFICLVNVLDNNIYNILFFIFLSIVIPSLLFLAWKQHQKTKEIRSYLLKEGYNIIFNGEGNSYLAFNISNATFRAGNLISNNYFQASISYIHDYRWEWKEVDAKKINNIFIIYISDIDFPSQKLFYHNNKSLAEIDWAKLQAIFHQPYEIKNDVMLDNNDTHYDFFISHANEDKDTFVRPLVDELNRLGIIIWYDEQTLEVGDSLRRNIDLGLRKANYGIVILSHDFLNKKWTQYELDSLINRAVYDDNKIILPIWHNINAQEVSKYSHYLADKMALQTSLYSVKEIARELAEIAYRRR

SEQ ID NO: 17734 - protein, 234 aa, Mycobacterium abscessus
MALAALGLPVAIWSTWPRPIEESYSTPNTRICVVKGDIFDFGTEHVVIPTCDTFDTAPPHIIARTSLQAQALSRIYDNDLAKLDEDLDAALADTVPVGTIAKAGKTSRYEMGTVATINHTHRKLYFLAVTVMDTNNNAQGTPDGLWISLNRLWAEIGRSSNGRAICMPVIGGGMSRMSSIVPTQDSLRFTILSFMFASRRQRVCEELRIVLRPEDYDKLDRLELQAFLTSLKPS

SEQ ID NO: 17735 - protein, 170 aa, Mycobacterium abscessus
MSYRNKTYVAFASEDINYYRLMEAWRGNRHIDFNFFDAHDLYKARDTSQPETIKRNLRERMKNAKQIVLLGSAAGRRKGGDGRSFLAHEVKVAIEFRLPIVIANIDGKRTIDHTVIPQPLLDADYYTLSVSFQAAIIKFALDSYVPAFMGCNGKTGPHYYKSDIYQGLSL

SEQ ID NO: 17736 - protein, 279 aa, Gordonia aichiensis NBRC 108223
MRYKRSVRRYAEGLARRFLEALGALAVLAGAVALFAPDLIKGQWWLLIVAGAIAAAWALIFLRQKDPEQRFPAENIVIRLITGDLFDQKESSLIGMTTTFDTEPGIIDRGSVQGNMLRVIYGDSQSRLDAELASALAGTATVGTITKPGKKDVYPVGTVAVLRGQGTSHYYCVAYTTMDEHNRAKGTIRGILDSLDSVWDAADRCGNGEPICVPLLGQGQSRIPELTAEVAVRLIAFSFLLRTRRSRFSKELRIVVHPNEIGKIDRTEFQAFLRSLVAG

SEQ ID NO: 17737 - protein, 171 aa, Gordonia aichiensis NBRC 108223
MSYRNKTYVAFASEDIHYYRLMTAWRENKSIDFDFVNAHDIYTARDTSTPDTIKRRLRERLNNTKQVVLLGSSDARRKGGNGTSFLAYEVGAILALNLPVVVANLNGSRVGVSGNIPAPFSANDYFTMSVSFGPTIIKYALDHYVPDFASSDKTGSYHYKESVYESLGLNN

SEQ ID NO: 17738 - protein, 258 aa, Paenarthrobacter aurescens TC1
MGFFAVPIGILAPLAPQWWDGKWWLVLGVLAVAVGWTALGLRRKEPNQRYRENVTIRLVVGDLFIQDASPVIGMTATFDTRVPEVIAPTSVQGHFLKRIYDGSQERLDADLDHALANVKPEGMIAKPGKQTVYPLGTVATLSPPGRLRYYCAAYTRMDEKNRASGTIRSVLDSLDNSWEEADVHGNGDPICVPVIGQGQSRIPELTPEISIRLIAFSFLLRSKKSRFASELRIVVHPSERDKINFPEFQAFLTSLAAS

SEQ ID NO: 17739 - protein, 169 aa, Paenarthrobacter aurescens TC1
MSYRNKTYVAFASEDIKSYRLMEAWRENKNIAFDFYDAHDLFISRDTSRPETIKKNLRERMKNAKQIVLLGSPDAKRKGGDGVSFLAYEIQIALEFNLPVVVAHLDGSRGGNSANYPKPLSDANHYTMSVSFQPTIIKHALENYAGSFATSKTTGERIYLASVYSGLGL

SEQ ID NO: 17740 - protein, 285 aa, Rhodococcus equi NBRC 101255 = C 7
MSSALRSDLFSKRFLLSAATWFFAWAGVIAALGQLLDWTFKLAKYGWWSHAVLGVALVGIPLSIWRSWPRPVEETYESPRTRIRIVKGDLFDEEEHLVIGTCDTFDTAIPNIIERTSLQGIALDRLYGNDVARLDADLDAALVNTEFREKVCKEGKTVRYPLGTVAVVERPPRRLFFVGYTKMDENNNAQGTPDGLWVSLNSLWNAISQHGNGRTVCMPVIGGGMSRMSNIVPTQDSIRFTILSFMFASRTNKICDELRIVLRPQDYDRLDRLELQAFLTSLKPS

SEQ ID NO: 17741 - protein, 169 aa, Rhodococcus equi NBRC 101255 = C 7
MSYRNKTYVAFASEDIHCYRLMEAWRENDKIDFDFYNAHTLFISRDESKPETIKRNLRERMKNAKQVVLLGSATGRRKGSDGKSFLAHEIKVAMEFNLPIVIANLDGGRIVNRAVIPQPLLDDDYYTLSASFQPKIIDFALKNYAVEYATADKAGPHEYNSQVYTGLGL

SEQ ID NO: 17742 - protein, 230 aa, Legionella geestiana
MLYVVYKVTEPLKILINLRGAGTELNIYFGNIFSKNEKSHLAIPVNEFFDTQLAGAKGPSGDIVAPNSIHGQFITKVYNSDSVKLDDDLNVALSGIVPNDLPRYLGKTSQYPIGTTAVIGSGKYRYLLFVLSCTDPITAKAKSDVPTMWNALEGLWTSVRNYSNGLPVALPLVGSGQSHVGLDSINLLRLIVLSIIKSSEGQRITSQINIVLHESVMRDVALRKIKEEFN

SEQ ID NO: 17743 - protein, 185 aa, Legionella geestiana
MAYRNGTYVVFHAQNTSDPTKSDMKYYRLLTAWHEHSDIEFKMINSHDKTSAVRDSSKRATLQSRIRERLNNSRNMLLIIGSTTHLDDDNVPFEISYAVDKCGIPIIAAYTGYDSICTPSRLRYLWPNALAARINNNTAKVIHVPFRKEPIKAALQKYDYQDPPKGSLVHYTQETFRKWGLLQPS

SEQ ID NO: 17744 - protein, 297 aa, Acholeplasma brassicae
MTYLTEVKLNLKPIFHLFLKISGIVFSVFAILVTFISLEDIGLTNIWHKIGIIISILVLSLIMSMILILFLFKKNRIWSNGKNKVFASYGDLIKYAFKVKEKNKRIIVIPVNDTFETIVDVGGEKVVNPLVSPNSLHGIWIEEFCKKYEITVNELNSRISANLKLQNRKPVQIYSEDEKRRGNKEKYDLGTVAILNAGNTIFYLVAISEFDEKNNAQSNKIYIRKAVETLIEFYDENGQGFPLYMPLMGTGTSRAKLTHKQSLKLIKSGIFAFEEKINGQINIIVFHKDRDKISIFD

SEQ ID NO: 17745 - protein, 162 aa, Acholeplasma brassicae
MAYRNKTYVAFDGDNDITYYYLMKAWKANDNNDFDFHNAHDLNTARDSSQEESIKSQLRVRMQNSKMFVLLVGDKTKYLTKFVKWEVESAIRREIPIAVVYLKDYSRFDEKMCPTWLNNVLSIHIPFKKTILQYVIDNWPTVSKQKEDKGHYWYSDDFVNSL

SEQ ID NO: 17746 - protein, 278 aa, Pluralibacter gergoviae; identical to SEQ ID NO: 17384

SEQ ID NO: 17747 - protein, 169 aa, Pluralibacter gergoviae; identical to SEQ ID NO: 17353

SEQ ID NO: 17748 - protein, 276 aa, Sulfurospirillum multivorans DSM 12446
MKVKISDRMVFKDFLEKVSIISAFFTIIFIFVDIPKQYKTCTGLVVAFIFVCLYLGLWWWDNKLKNVNLLIEGSKVVIKTGDIFKQSGLKAIAFNEYFDTQVDDKIISKKSLNGIFIDKYSNKSLDELNHLIDSYQFDEENLIDSNVSRLGKSKKYKLGTVCILDDYLLVAFSKFDSKNQANLTMPEYLGFLINFWDNVNRVYSQKDVSVPIFGSGITRIKEHKNISDENLLKIMLWTFRISEMRFKYPAKLSIIIHEDKINSINLLDIKAAENGL

SEQ ID NO: 17749 - protein, 183 aa, Sulfurospirillum multivorans DSM 12446
MANRTGTYIAFDGLGKTNPTESDFKYYATIQAWSANKNIDFKFVNSHDKTAAVRDASLRSTLESRIRERLAASKNCLVILSADTRKSGSMLSYEIEQAVDKYKIPLICVYTDYETIYKPKELSNRWPDALTKRINDGTADAIHIAFKKEILLTAMSQFSVNNDSPGSSLVIYTKETQERLNSK

SEQ ID NO: 17750 - protein, 281 aa, Streptomyces regalis
MLFGTRLGLSTAGRACAVQFGLLSGAAQLYLTFWPDSSLPRGATFLAIACLALVGGTLRSWPRDRISHEFVRPGFRVTIAVGDLFDQPCHLVIGSNDVFDTDTQDDLLIVRRSVQGQFLQRVYAGDVARLDDELNTALFGTQPTRVEERTSKRAGKLVRYPVGTVALLGSPGQRYFLTAYGAMCNDLTVSSGPDQLWLSLGELWRAVHLHARREAVAMPVIGSDLARIDSMDHAGLVKLILLSFVTRSRQSVVCKELTIVVHPGDYERVDMLELAAFLRTL

SEQ ID NO: 17751 - protein, 424 aa, Streptomyces regalis
MRQQPDRSDRQAPYFFLSYAHTPRFDASADPDHWVHQLFRDLCDYIMALTDHPPGQPIGFMAREMRIGERWSDRLSEALATCRVFVPLYSPRYFVSDVCGKEWWAFSQRQEHRRSRGATADPAIVPALWVPVQSEQLPDAAEALQYDHEKFGRDYATEGLYGLMKLRMFRDEYERAVYQLARAIVVTAEQNPIPTGEPLDFADLPNAFGRRSGSRRLRIVVAAPSMQELPRGRSPHCYGPSAVDWNPYRVSDADATRPLAEFAAEEVRRLDYRTAIQPLSEAADGLLTDRPPDGPTLVLLDRWALADPGQRELLARVDLAAQPWVSVIVPWNRSDPDNTSAAYELQTVLEKTLPRTIQRGRSVSRAATGGVPSLEAFAAILPTVIQWAAAQFIRYAPVHPPKGPAIARPRLRGPLEEATDDRRA

SEQ ID NO: 17752 - protein, 275 aa, Streptococcus constellatus subsp. constellatus SK53
MKVNIFNRDILKQFSKVCATLTAILSGALIFLDIPDNCRLYAGVAYISLLLAIYIFIWIRANRMKQIVIKIGLTTVLVKSGDIFDEEGLKAVAFNEYFDTMVDDKVIARQSLNGQFIINYIDDVEKLNSDIKNDDDLKNNIVEEGVRRQHGKTTKYGLGSSILIDDEYILTAFSRFNKNNQAELTIQEYVNFLLTFWNEINRLYAQRSVIVPVFGSGITRFKNGFEDIDINELLRIMIWTFKISKIKFAYPAKLTIIIHNDLLSQVNLYELRENE

SEQ ID NO: 17753 - protein, 166 aa, Streptococcus constellatus subsp. constellatus SK53
MAYRNKTYVAFDGDNDMRYYQLMKAWKQNDNTLFNFHDAHDINSARDTSQEESIKRQLRERMANSKAFVLLIGEHTKYLTKFVKWEIGLAIKKGLPIICVNLNKNKRKDELCPSSLNGQLAIFIPFGSKMMQYALENWPKSHEQYLKNGEISSYCYKDAVYKRLGL

SEQ ID NO: 17754 - protein, 275 aa, Streptococcus constellatus subsp. constellatus SK53; identical to SEQ ID NO: 17752

SEQ ID NO: 17755 - protein, 166 aa, Streptococcus constellatus subsp. constellatus SK53; identical to SEQ ID NO: 17753

SEQ ID NO: 17756 - protein, 279 aa, Lactobacillus paralimentarius DSM 19674
MFDRNLLLKAAGTVGTLFGVVGTAVGFFDFSVKTRYHIFILFFIICFLFYILEWLSANRISDLVLKYDESTIEIKSGDIFSGKYINDDTIRIFAFNEYFDTKVDNEIISKSSLNGQVIIKEVSDIDELDRRVSDDKHLKKNEVGTNRDRSNGKKKKYKLGTIFKYNDNTMFTAMTHFDDENKANLTIQEYIRFLINFWDEVNTIYAGKTVVITLLGSGITRLDNNTYTSNQILEIILWTFYLRRIKFKKPAQLIILMDDNTNKGINYYKIRGMFNGLQK

SEQ ID NO: 17757 - protein, 165 aa, Lactobacillus paralimentarius DSM 19674
MAYKNKIYIAFDGDNDIRYYDLMLAWKAQNDDFNFYNAHDLHTASDSSKEESIKASLRDRFANSKMFILIIGEHTKYLTKFVKWEIETAIRLKLPIVAVNINKSRISDELCPPILKNQLAIFVPFEKKIVKLAINTWSENDKNYRKKGEISNFYYKGSVYKDLED

SEQ ID NO: 17758 - protein, 279 aa, Achromobacter xylosoxidans C54
MKLKVTIFDRNVIKRSVKFIAGISTGLSAVLLFVEIPSGYKIHAGIAFLIVLALTHIVIWLRANLLREISIEIEGSNVNIISGDIFKQEGLKAIAFNEYLDTQVDNIIISKASLNGKFIESELKESIEALDTHIAHFRFDDEDVVETEVQRRIGKTTRYRLGTICVYNEYLLTAFARFDAKNQAHLTMPEYLEFLINFWDKVNKIYAQQSVSTTIFGSGITRIKGHRTISDEDLLKIMLWTFRISEMRFKYPAKLTIVIHASKIDQINLLDIASVKNGV

SEQ ID NO: 17759 - protein, 186 aa, Achromobacter xylosoxidans C54
MAYRNGTYVAFHAGGTTDPTASDIKYYNTMKMWSVNKNIDFTLINSHEKTSAVRDSSKKETLRRSLVARLNNSKHMVLILTATTKNDTDWVPFEIAHAVDVCQIPIIAVYPDYDSILAPAGLANYWPPALASRIANGTARVIHIPFKLLAVFDAIEQFGVSNTTYPTNGYGFYNRETQVGWGLIKS

SEQ ID NO: 17760 - protein, 273 aa, Eubacterium plexicaudatum ASF492
MCKYLKICSAWALSAITIIFTFIPEKCFSQYKLPINVSEEVHIIINRILTYIIIFVISAVLYQWYLQTRKEVTIKGKNYRIQIEYGDLLQKHDYKKVISFDECFTTSVGPAPSDVNADSICGQFLQSHPISAQEMQLLIDKVPLKPMRSKSKFQSKTRYESGKLVPYNDFLLMSFAKLNENGRGEMTHDDFLDCLSLLWKEIDTHYGQKNVCISILGSGVTYMGDESLSQQKLLDIIIASYKLSTHKIKLPYQLFIICKESDDFSLNKIGESI

SEQ ID NO: 17761 - protein, 202 aa, Eubacterium plexicaudatum ASF492
MSKRVYISADYSENSGDRDVVNLLNKWGSDNLHKVDFVDMAKVVSGSVSKDPDCRICDLKREFNQQINASSAVIIVIGDRTASREAGSACSRENNSQAECRCTPYKQNANGSKPCRVSWTVPSGESNVGNINNYSYLRHEFEQAKKSGKPIIVVYNSLRKESSWLPFYMKEYGLNAQPFWIINNFGQKVGNYDYIKKALGYV

SEQ ID NO: 17762 - protein, 290 aa, Streptomyces ipomoeae 91-03
MAGPVRRLRMLFGTRLGLVLLGRNCAVQFGLLAGAAQLVFTLWPDADLPRWPTFLGIAGLAALIATLVSLPRNRISRDFTHPDITVTVEVGDLFDHRCHLVIGFTDTFDTDTADESLVSRRSVQGQFLHRVYDGDVTTLDARLDEALADVTPVRTEARTEKRLGKLERYPIGTVAVVKDSGRAFFCTAYGRMNNDLMVGCGTEQLWNSLARLWDAVRRHGHRDEVAMPITGSDLARINNMDHASLLKMILLSFVAHSRAQGVCGSLTIVVHPQDYYRIDMLELGVFLRSL

SEQ ID NO: 17763 - protein, 410 aa, Streptomyces ipomoeae 91-03
MQDRRSNSAKPYFFLSYAHARKRDAGDADPNVWVRKLYDDLSAHVLQLTDLPWGSRAGFLDQSTAVGVRWRDELSENLAHCRVFVPLYSPRYFVSEQCGREWWAFSQRQVDRRARDGAPRESAIVPALWVPVEPSHLPRVARDLQFDHAALGQDYADEGFYGLIKLRYLRDEYERAVYRLAKQIVKVAREATLDDGHVYRDYESLPSAFGSGGPPDFDISVLACTRSDLPPGREPDYYGDRPHDWNPYHPESARPLGDDVADHVRRMDYKVHVGDFERDADRFLRAGPPRAPGILLVDPWVLRSRFHRDLLSRVDRMASPTMAVVVPWNQQDPGSHADGGPGPAELEAVMPRLLRLSRSASRTSVGGVGTLAALHQILPTVVRHAVDGFSSLTKEFVYPRPRLRGPDSPR

SEQ ID NO: 17764 - protein, 293 aa, Sinorhizobium medicae WSM419
MRYFWKSILTLSFWRYSLFSRGALVSIFSIAGAIYLAIEMLDFFSMYTKDKYSKYTIFAILAASASITLGTRRPVSRISYKIPKRDFSYDVAIGDLLDTKCSNVVISTNTTFDTDIASGLISPDSLQGQLAFRYFNSNTAEMDRQIAESLQGVEAIDHPSGRGKKKRYPTGTIAKIQAHGKTFFFIAMSELNEDGNARSSVRMVDEAVEALWVYIAERGELADVAMPIIGTGRGRIQLSRTKMIERLAQSFADASAERVFSNRLVIYIHPEDAAKHAVNLFEIRDYLAMSLHI

SEQ ID NO: 17765 - protein, 166 aa, Sinorhizobium medicae WSM419
MAYRNKTYICFDGDNDMKYYRLMTAWAENPNFSFNFYNAHDLNSARDSSQEESIKKQLRERFANSKLLVVLIGNNTRYLTKFVKWEMEVALRLNLPIIGVNLNGSRAQDDLCPPKIRNELAIYVPFGLKIVEYGMKNWPDDHYAYKKEGKSGPYYYTEQTYKNMGL

SEQ ID NO: 17766 - protein, 292 aa, Pannonibacter phragmitetus
MKHFWDSVSTISYWRYALFSAEAAAKILACMGGLYLLVELLDTFQIYSKDKYSGYGLIVMLVLSILYVLTTRRPVSRIRYKPPGKDLTFAVEIGDLLSQPGEIIISTNTTFDTDMASGLIAAESLQGQLAIRFFNGQTDEIDRQIAASLESVPFTPNDGRPGKKSEYPLGTVARINAHGKNFYLVAMAHLNAQGTAYSDVRMLDEALENLWKNMAEKAEYGDIYMPIMGTGRGRVKLPRKKVIEKIAQSFADASQETVFSNRLTIVVRPDDASNFSINLFQVRDYLSQSLHV

SEQ ID NO: 17767 - protein, 166 aa, Pannonibacter phragmitetus
MSYRNKTYIAFDGDTDMHYYRLMTAWKAHDGNSFNFHNAHDLNNARDTSLEESIKKQLRERFANSKLFILLIGEKTKNLHKFVRWEIEVALSLGLPIIAVNLNGSRQRDDRCPAILRDELAIFVTFNPRIIEHAMANWPTSYQKHKRDGTSGSRHYVDSVYSGFGL

SEQ ID NO: 17768 - protein, 285 aa, Leuconostoc kimchii IMSNU 11154
MKIGFANKYLLDNVTRQVGYVFAISSVILTFLDFSKKIKLFIFVGTLILSLFIYIANLIFANLMSFTTFKVGESEIRIQKGDIFSNEIFNNPDFIKVINANEYFDTIVNEEIISKRSVHGKFLLRSDVDVSKVDDAIKKDKRLNKRHKVGENLDREEGNQIKYELGSIFKYSDDVFLTALTHFDEYNKAYLSIQDFIRFLINFWDEIDELYAGRTVVITLFGSNLARLDNNTYSNTQILDTILWTFRLRRIKFKKPTKLIILLDRETNQKINYYKIKDRFYGLQE

SEQ ID NO: 17769 - protein, 166 aa, Leuconostoc kimchii IMSNU 11154
MAYRNKVYVAFDGDNDILKYDLIKAWSKNQNIDFHIDDAHDLNTSKDSSQEASIKHNLSIRFLNSKAFILLVGEHTKYLTKFVKWEIETAIRLELPIIAVNLNGKKRADELMPPLLKGNLSIVVPFKMVAIKYALENWPEYDKKYRKNQDHRQYHYNDKVYDSLGI

SEQ ID NO: 17770 - protein, 290 aa, Collinsella stercoris DSM 13279
MSELVEIGGDMGLPQGAKLSILKKDAISVATGIVAVVETALAVSGISLHDMIPGQVWWVYLLIVLAVFAALVVSIRFILACLYREHIELEINGNRIEIVEGDLFAQDGKKVVPFNEYFDSDVDDIVISHSSLNGKFIDCHVDDLAELRSEIESEKSSPLPVYDRDGRRQYDLGTIKRFGEDYLLLAFSHFDEQKQARLTMAEYERCLMNMWQELCRAYAGRPISLPLLGSGITRFDDVRQKSVSELLKCMLCTLRSTGCYFSQPISIVLTSEAMSKVDLYEMKGVSRYGL

SEQ ID NO: 17771 - protein, 168 aa, Collinsella stercoris DSM 13279
MAYRTKTYIAGDWDGDKDAIEQLYKWKESKYLSLDFIDAHDLHQARDTSLNCSIKKSLSQRLNVSKRFVLVVGEKTKDLRSGGCQLCSSYNRWTRACARGHHVDYRSYVEYECEKAKSDGLAIVVLYNSTRVDRDKCPDCIKWSGKHVAMQYYKNGKYYWDYQAVKEL

SEQ ID NO: 17772 - protein, 284 aa, Hungatella hathewayi WAL-18680
MKPKIIIKTIVDLFAPGMAVIGTIWSVMEILEKYYSDTPFINFYQNHISCMLIPGILAVVINVVCLLNNERKVSFTIKDAKITIEIGDILRKRDGVIVVGINNQWNTNGAQIGKSSIHKALLDKYGQDRLDAAFAKGKTEAERLFFQEEIGGKEYLFLRMSDLNNNNAASTTIDQMQKALDELFYHQDYLSMYEGRIYFPVLGTGEGGICLNRVETIEFMVKRFWKFQKQINRNSIVKIKELHIVIYWKDFNRKEWNQIKQWVDKIGQYCMECQMFQSGEEVEC

SEQ ID NO: 17773 - protein, 331 aa, Hungatella hathewayi WAL-18680
MYELIHGSIFDKKCDVIIVPCNHLGGITRSVSDELNKFNIQNIPTVKEPGSVVFENCVGDFAFATVIGFAASVNSFTGMGTPEYLHSICNDIRRYCKENLFTLVNIPLLGAGNGGLGREESFQIIKKEFEDDKTISVRIFVPADNVYQKLLEKAGGRQEIKNPRVFVSYAGKNPENKKWVRELVCKLRKNGVDARVDMFHLKPGQSLPQWMTNEIIMADKVLLICDRFYVERANRGRGGVGWESMIIQGDMMAEMYDSQSETLSNKYICIVHEKDMAEGMPVYARTRLSMHWTDWEIPEEEFMTLLYCLFDCETVPELCEIPLEIRKLKNS

SEQ ID NO: 17774 - protein, 281 aa, Turicibacter sanguinis PC909
MRIKVNFFDKKIINQWLAILGIFGGIYTYITIFIPVPEQIKNNKGSIILAIIISTLLIAIYIFLWIKANLSTKVTLNINNSILEVKTGNIFRQKNFKVIPFNEYFDTLVDDDLISKTSLNGIFIENELDIDVQLLDNHIEKQLISRYLETEETKNRNKGKKVKYPLGTICKYDDYLLTAFSKFDSDNKAYLTMQNYINFLMKFWDEIDRVYAGKSIAIPVLGSGITRFKENINITDQELLEILIWSFKISRIKIKYPSKVSIIIYDENVDKIDFYKLKELK

SEQ ID NO: 17775 - protein, 181 aa, Turicibacter sanguinis PC909
MGYRNGIYVAFNGCGTTNPTESDIKYFNILKGWKENKKIDFSFVDSHQKTYKVLDSSTEKTLLSRLNERMANSKLMFLIVTDNTKNSSHIVDHEIIRAIEHDNIPIVVAYTDKEIIKSVSPEIKSKLPKSLQKHIKNNECKILFIPFKMKAIKKAFQDFGVNQVKEMYNNTYVYPNVDSWE

SEQ ID NO: 17776 - protein, 276 aa, Paenibacillus naphthalenovorans
MKVQFLDKRILHKFYGALSVISVITSIVFLFIDIDTKYKTAIGLAALSFLIVLYIGIWVHSNFRQNIKLKINTSQIEVKFGDIFSEQADLKVIAFNEYFDTLVDDKIIAKSSLNGIFVDKFFKNKVDELDGIISSETQLTEASVGENPSRPSGKKIKYKLGTICVVNDYLITALTHFDDNNKAYLEINDYINCLLNFWNEVDRVYAGRTVALPVLGSGITRFKGYENISDQELLELIIWTFKVSRIKFTYPSKVKIVVYKNKCEKIDLLALKDLET

SEQ ID NO: 17777 - protein, 184 aa, Paenibacillus naphthalenovorans
MANRTGTYVAFDGLGETDPTKSEFKYYATIQAWGANKNIAFSLTNSHEKTDAVRDTSKRATLYARIQERIRASKNMLVILTKNTRYNGSVLSYEIEKAIDTYKIPLIIAYPEYSSILNVNSHSDIWPKALADRINDDKTAAIHIAFAKDCILDAITRFHVNGESLKGGKNYYSREAYVQWGLIK

SEQ ID NO: 17778 - protein, 275 aa, Streptococcus sinensis
MKVGLLDKNIRKQFYKFCSKLTAILTVGLIFIDIPRNFKLLAGIIYLAVLVIAYLIYWHIANKMTQTAIKIGLTTVIVKSGDIFKENGLKAIAFNEFFDTVVDDKIIAKKSLNGQFIINHIDNIEKLNSDIENDDYLKSSIVGKGVKRKQGKTTKYRLGSSILIDDEYILTAFSRFNKNNQAELTIQEYVNFLLTFWNEINRLYAQRSVTVPVFGSGITRFKNGFEDIDINELLRIMIWTFKISKIKFAYPAKLTIIIHNDLLSQVNLYELRENE

SEQ ID NO: 17779 - protein, 166 aa, Streptococcus sinensis
MAYRNKTYVAFDGDNDMRYYQLMKAWKQNDNTLFNFHDAHDINSARDTSQEESIKRQLRERMANSKAFVLLIGEHTKYLTKFVKWEIELAIKKGLPIICVNLNKNKRKDELCPSSLNGQLAIFIPFGSKMMQYALENWPKSHEQYLKNGEISSYCYKDAVYKRLGL

SEQ ID NO: 17780 - protein, 293 aa, Enterobacter sp. DC1
MRYFINSIKTWSYWKYALFSSAGLARLLAVTGAIYLLLEMLDFFSMYTKNKYSAYSFFVVIIFSTFVTVLSRRPASKITYRIPKKDFGYEVIIDDLLSSTAENIVISTNTTFDTNIANGLISPDSLQGKFTAKFFAGNTAELDRKIAESLSNVEHSAHPLGKGKKVKYPIGTVAKISSHGKTFYLSAMSELNSEGTARSTPKMIDEALESLWEFIATKGELGDIAIALIGTGRGRVSLSRKKIAEKIAQSFADASQNRTFSNKLTIVVYPGDADRFGVNLFEIKDYLSQSLQA

SEQ ID NO: 17781 - protein, 167 aa, Enterobacter sp. DC1
MAYRNKTYICFDGDNDMAYYRLMTAWKSNDNFSFNFHNAHDMNSARDESLEESIKKQLRERFANSKTLIVLIGENTKNLTKFVRWEMDVALKLGIPIIAVNLNGSRQKDELCPRIIKNELVVFVSFNMKIIEYAMNNWPEYHNTFTKENKKASFYYTNKTYEALNIK

SEQ ID NO: 17782 - protein, 309 aa, Cyclobacterium amurskyense
MNWFERLKYNFWLFWDRLNLKNFGKSILSVFGGLWLLIEIFAFFGQNTWSNNIRSIWWVFIVIGLIIIIYRNWPKSFFTFKVHNREVSVSIKIGDIFKIDGALIVPINNRLDCVNNGIVKKSSSILRYFIDQVYEETTAHLNTDICQQLEDNSDWYENFVENDNPKTYKVGTVVPVFRSDKQYYLLCSSTLNAQGRSKTTVDDLRLSLTELWAYLTHSGSKDNLIIPIVGTGRGRITLKREDVIKEIVLSFLVSLSQESYCEQLTICIHPNDLKKYNVNLDDLLDFIRLHCNNTGYLKGNENPLGTAIE

SEQ ID NO: 17783 - protein, 167 aa, Cyclobacterium amurskyense
MPYRNKTYVAFDADSDIRYYRLMTAWKQSDKSDFNFNNAHDLMSIWQHSSEETIKRNLRERMNNSKVFILLVGEKTKYLYKYVKWEIEQAIKLNLPIIVVNLNGKRSLDSDKCPAVLRDKLALHVSFNSKIIQLALEKWSDLHYSYSKEDKTGSFYYNDNVYSNLGL

SEQ ID NO: 17784 - protein, 207 aa, Aquitalea magnusonii
MKIANSNTTIEVVFGDLFSQDGVRAISVNDFFDSKLGKPVSDKSLHGAFLQKCFGGHPESFDKQVDEQLKNVAGEHVEKLEGKTFRYPVGTTAVIKVNHDQYLLVSLAKSDPATCKASADVTMMWDALHALWQRSRIECGGHPLNLALVGSGLAGLGLPTRDLLNLIILSAITETKSKEITQRIRVVLYKDRFDDLDLRDVKQHWKE

SEQ ID NO: 17785 - protein, 186 aa, Aquitalea magnusonii
MAYRNGTYVAFHANGTNIPGGNSDIDYYNLLRAWSANPDDEFTMNNSHDKAAAVRDSSKKETLKNSLMARLRNSKNMALIIGETTASDDDWVPFEIEKAVDLYKIPIIAIYTGQDKPIRNPSALKALWPKALETRINNGTAHVIHIPFKKAAILDAIGQFGPLKYPLGGGLGIYNDAAYESFGING

SEQ ID NO: 17786 - protein, 253 aa, Rhodanobacter spathiphylli B39
TSELNSPVDIPADYKIGAGIAFLAVLALIHLATWVRANSLREISIEIEGSKVSITTGDIFKQKGLKAIAFNEYLDTRVDNVIISKASLNGKFIESELKESVEALDDYIANFRFDDGDIFETTVRRRIGKTTRYRLGTICVYNDFLLTAFARFDAKNQANLTMPEYLEFLINFWDKVNKVYAQQSVSTTIFGSGITRIKGHKTISDEDLLKIMLWTFRISEMRFKYPAKLTIVIHESKIDQINLLDIASVKNGV

SEQ ID NO: 17787 - protein, 125 aa, Rhodanobacter spathiphylli B39
MRRSLVARLNNSKHMVLVLTTTTKNDTDWVPFEIAHAVDVCQMPIIAVYPDFDSILAPADLANYWPPALASRITNGKARVIHIPFKLPAVLDAIAQFGVSNTAYPTNGYGFYNRETQVGWGLIKP

SEQ ID NO: 17788 - protein, 291 aa, Flavobacterium reichenbachii
MNYYLKSLRTKSYWIYALLSIDSMTTFIAVVGGAWSLVDILSSWHFVNKEKLPFWFLICLFLSGLLVVIFTRRPVKKIKYKYPGQDLTIEVCIDDLFTVNGQKIISTNTTFDTDMASGIISEKSLQGQFTKKYYPGDVPKLDKEIEDGLAGYSFTEIQKESGKTKRYDFGATVKLRHADQFFYWFAMSDLNYNNNAKTTLKNVHQALDGLWEFIENKGEKQDIVIPLIGSGLGRLSIGRKKLIAIIAQSFLNASEDNIFSNKLIIVIHPNDVDKANLNLFEVKDLLNHYLP

SEQ ID NO: 17789 - protein, 166 aa, Flavobacterium reichenbachii
MAYTACYTCFDGDTDMHYYNLMKAWHKNGKFNFRFDNVHDLEQVRDTSTEETIKRSLRRRLNASDVFVVLIGRSTRYLYKFVRWEIEVAIDMNLPIIAINLDNSRAINYDLCPPILRDTLAIHVPFSPDIVNYAITNWPYSHRNYRSQGVSGSYHYYNSVYSQLGY

SEQ ID NO: 17790 - protein, 306 aa, Labrenzia alexandrii
MIIIWQLKRLMSNIGIWQSLFAPVGVGWTLTQIAIQMGYESILAPYLFLLWYLMPLGLIVGGYIYWPKRSSSKTLPNLDTEIEIRVGDIFSSKAPIVVTIPTTLETEFHSNAISEDSIQGQYTKKYCKDPSVLKLCLQKLVQDNNDFSTVKNFYSNGGDVRKYKPGEVLVIREFDRIAYCTTFASFNEHGTAQISQQEFYDLLPKMWMGIREKGEFGSVDVPLIGSRFARTGISRNKDILRELVYSLSVASADARLADKVTFFIRPSDFTRWGFSFEFIERLLLNVCDEHQQRMMENGSIGQPLDV

SEQ ID NO: 17791 - protein, 169 aa, Labrenzia alexandrii
MAYRNKVFVSFDGDSDMSYYRLMLAWRKSDHSSFNFYNAHDLTSSRDSSLELTIKSSLQQRMINSKLFILLVGANTRYLYKFVRWEIEQAIKRDLPIVCVNLNGLRHIDNERCPAILRDELALHVSFNSRIIERAINEWPSSKKNLEIQGRKGPFFYPEDVYSLLGIVR

SEQ ID NO: 17792 - protein, 280 aa, Psychrobacter piscatorii
MKVHFYDRSLWNDFYKYLSAIGLVTSTTFLFITTSDNFKIITGGVLSIAIFTVFLALWFRANSLKYVKVKIDSTSVEIKEGDLFEQEGLIAIGFNEYFDTVVDDKIISKKSLNGIFIDTYLIHTGKEVDELDVLIENGVENEHKAKGKKRKAEGKLQRYKLGAIYLLDDRYILTAFTKFNDRNEARLTMSEYLEFLVNFWDNVNSIYAQRSVSVPIFGGGITRFKEHKTISDEELLKIMLWTFKISEMRFKHPARLTIIIHPEKIKAINLNDIKGLGNGL

SEQ ID NO: 17793 - protein, 188 aa, Psychrobacter piscatorii
MAYRNGTYVAFDGLDTTNPTIGDIKYFNMLKMWKNISSKSLIDFKFSDSHQKTSQVRDTSSRNTLERVLLERLKNSKNMVLILTEKTRHDREMLNYEIEKAIKMDLPIIVCYPKVRQPIFNPKYYSDYWPLALAEGIRKEEVQCIHIPFKKKPVLDAIPRFHIHSNEKLESLGFYNRDAYDFFNITWE

SEQ ID NO: 17794 - protein, 284 aa, Microbacterium azadirachtae
MESVRRDIRTRRFWKILTTQAFALFGASAAVAGAIALFAPDLFTQHGWIAWCALMASLLYGLAQAWPRPIETTYQSPATVIKLIRGDLFAQHDAHLIIGVSDTFDTAAPHISPNSVQGQFLDRIYGSDGAQLDADIDDELSHVDPVGTVAGKQGKTVRYPLGTTVTLRANARRFFLVAYTLMDKGSTASSTTDGVWNSLSELWKTVRSNSNGGPVCVPMIGGGQSKLSPVLPAADSVRFIALSFMLASRTAKVCDELVIVAPPAQYDALDHLEIQAFLNSLKPS

SEQ ID NO: 17795 - protein, 169 aa, Microbacterium azadirachtae
MSYRNKTYVAFASEDISSYRLMEAWRENDKIDFDFFDAHDLYISRDTSKPETIKRNLRERLKNAKQIVLLGSANAKKKGSDGTSFLAHEVKVMAEFNLPIVVANLDGDRTIDRNFIPDPLLEADYYTLSVSFQPKIIQFALDKYVPGFASSSSTGPHYYKENVYAQLGR

SEQ ID NO: 17796 - protein, 276 aa, Paenibacillus sp. Aloe-11
MKVPFFDKKILHIFYGFLNAISVITSIVFLFVEIDPKIKMVIGGGALALLVLVYIGIWAHANMRRSIKLTINTSEIEVKFGDIFSEEADLKAIAFNEYFDTLVDEKVISSSSLNGIYIKKFYQGNTAVLDEIISSDPHLPEMIVYENAGRTVGKKTRYRLGTICTVDDYLLTAFSRFDDRNKAYLEMNDYINCLLNFWNEIDRVYAGRTVALPVLGSGITRFRGYENILDQELLELIIWTFKVSRIKFTFPSKVKIVVWQKKQEKINLLALKDLES

SEQ ID NO: 17797 - protein, 183 aa, Paenibacillus sp. Aloe-11
MENRTGTYVAFDGLGEADPTKSDFKYYATLQAWNANKNIQFSLTNSHEKTDAVRDTSKRATLYARIQERLRASKNMLVILTSKTRYTGSALSYEIEQAIDTYRIPLIVAYPEFSSILYVDSHSGIWPKALKDRINDTGIEAIHIPFAKECILNAITRFHVNGEHLSSGKNHYKRETQIKWGLI

SEQ ID NO: 17798 - protein, 291 aa, Flavobacterium sp. CF136
MNYYLKSLRTKSYWIYALLSIDSMTTFIAVVGGAWSLVDILSSWHFVNKEKLPFWFLVCLFLSGLIVVIFTRRPVKKIKYKYPGQDLTIEVCIDDLFTVNGQKVISTNTTFDTDMASGIISKKSLQGQFTQKYYPGDVPKLDKEIEDGLAGYSFTAIQKQAGKTKRYDFGTTVKLRYADQFFYWFAMSDLNYSNNAKTTLKNVHQALDGLWEFIETKGEKQDIVIPLIGSGLGRLSIGRKKLIAIIAQSFLNASEDNIFSNKLIIVIHPSDVDKANLNLFEVKDLLNHYLP

SEQ ID NO: 17799 - protein, 166 aa, Flavobacterium sp. CF136
MAYTACYTCFDGDTDMNCYNLMKAWHKNGKFNFTFDNVHDLEQVRDTSTEETIKRSLRRRLNASDVFVVLIGKSTKYLYKFVRWEIEVAIDMNLPIIAINLDGRRTINNDLCPPILRDALAVHVPFSPDIVNYAITNWPYSHRDYKSQRISGSYRYNDSVYSQLGY

SEQ ID NO: 17800 - protein, 278 aa, Pantoea sp. GM01
MLKVSFCDKKIRTLFLKYASATTASIAAAALFWDIPKEYKHYSGLACIAVLVMIYLILWYKANKLTAINLSVEGSTVTIKTGNIFAEQGLKAIAFNEYFDTKVDNIVIAHQSLNGQFVTDQLTCSVQQLDTYIDEYNYEAEDFADINSTRLSGKNQRYKIGTICVWNEYLLTAFSKFNKYNEAYLSMPEYLEFLINFWNKVNRVYAQQSVTVPIFGSGITRIKGHKLISDEELLKIMLWTFRVSEMRFTHPAKLTIIIHEDKISKVNLFELQMARSGL

SEQ ID NO: 17801 - protein, 166 aa, Pantoea sp. GM01
MIYRTKTYIAGEWDGDQDAIEQLHTWNESKYWDFSFTDAHDITQARDSSLNCNIKSSLATRLNASKTFVLIVGNNTKAARSGGCRYCDSYNSLSSQCDRGYSVDHRSYIEYECDKALKDDLNIIVLYNATTINKSKCPDVLKGVGTHTAMRSTHGWDYLAVKNALN

SEQ ID NO: 17802 - protein, 309 aa, Imtechella halotolerans K1
MKCRLTIGNGLWLLWKSLSFIKVGNNLLSVFGVLWLVIEVFTFFNKQEIVNQIKEFWGLFVFIGIIIVIYQNWPKNKFSYKVNNRDVFITLQIGDIFKSDGALIIPVNNRLDVDNHGIIAKSSSILRLFIDKVYNQKHNYLASDISCELKDSEKFYSNFILTENPLTYKIGTVVPIYRDEKQYYLLCSSTLNGQNRSKSTEDDLRSSLIELWAFLSHCGSKDNLVIPIIGTGRGRIQMTREEVIKEIVLSFLSSLDIESYCEQLTICIHPNDIKKYNVNIEGITDFIRLHCMNANFSRRNHMSFGQTIT

SEQ ID NO: 17803 - protein, 167 aa, Imtechella halotolerans K1
MPYRNKTYVAFDADSDIRYYRLMKAWKQSDNSEFNFFDAHDLTNIWQYSSEETIKRNLRERLMNTKIFVLLVGEKTKYLYKYVKWEIEQALSLDLPIIVVNLNGNRGLDDVNCPSILKDKLALHISFNAKIIQKSLENWETLHENYTSEKKSGPFQYDETIYKHLGL

SEQ ID NO: 17804 - protein, 280 aa, Burkholderia pseudomultivorans
MNSIKDLWNGVRSHPWKLLANMFTAFSVIQTVIRGVSLFIPGVTISGWIPILAVLAVSVGWGLKKVWKPSRIEFQVANSGSTIEIVFGDLFAQDGIRAIAVNDFFDSELGKPVSDKSVHGIFLKRCFGGHAEPFDKQVDAELANVQSTSVKRAEGKTKRYPIGSTALLQANQDRYIAFVFATTDPNTSKASADVTMMWTSLHALWERTRIEAGGYPINIPLVGSGLSGLGLPTRDLLNLIVLSAITETKAKEITPRIRIILGRDRFDQLDLRDVKKHWRE

SEQ ID NO: 17805 - protein, 185 aa, Burkholderia pseudomultivorans
MAYRNGTYIAFHANGTNRPGGNSDIDYYNLMKAWTGKGDDSFTMINSHDKASAVRDSSKRETLRRSLLERLRNSKNMVLIVGDTTRLDTDWVPFEIAKAIDEYKLPIIAAYTKCSKPIRNPEALKLLWPQALSTRIAAKTARVIHVPFKQAALEDAISQFSHDNLPKSALSYYSDEAYRSTGITD

SEQ ID NO: 17806 - protein, 285 aa, Blautia sp. KLE 1732
MSNLFKKSAAYAFAIISAVFTFVPEAVFQKITLIPKESFEQFAWIYINISEINIIINRMLAFALVWGIVAVIYGIYLCLRKKVSMKGDNYQITVEYGDLLKIKKCKKVITFDECFSTKVGDAPADIKPTSICGQYLKSNPNLNIQSLISGSQLNPIKSRSKYQNKERYESGRIVPNGDDLLLAFAKLDKKGLGRLTRDEYLECLTILWEEIDTYYGQTDVCIPILGSGLTRFDGGSGASISQQELLNMMIWSYKLSSHKIKLPHKLRIICKKSGDFSLNKIDSQI

SEQ ID NO: 17807 - protein, 215 aa, Blautia sp. KLE 1732
MSANNDEDWEDTYMSKQVYISADYSENDGDREVVKELNKWGQDNLHKVDFIDMSQVASGSVSKDSDCRICDLKKEFNAQINASSAVIFVVGDKTALRTAGSSCRRVNNSQSLCSCTPYKQNTNGTKPCKVAFTSTPGENDDVGCINSYSYLKHEFKQAEKRNKKIIIVYNSSRKESTWLPSYMKAYEKEARPFWTKNILGDKVGDYSYIKEVLGF

SEQ ID NO: 17808 - protein, 319 aa, Lachnospiraceae bacterium M18-1
MKSWGYRIILKYFAPISRNPIQYISCAFALLGAFYTLVEIEQGVFGSEILLMIFRNNIIIIILSIIFISIFLYRDKLEFSAFLGRKDDKITLKMSNLLKMRDTAIVIPTNTTFDTTMNNDFISEKSIQGQFQKKFYGVDFAELDKALQYSLDEQYPNEYIELDDRKQTKRKRYSIGTVAKVTKEKTHYYFLAVADISRSGRPENVTMQNLTQALVNLWNYLSKEGHSESVAIPVIGTGRAGLKDGNIEDVVHETIFSFALAMQEEFVAKGLTVCIYPPTLRNANVTWDDLCNYLKLQCCFATENEKHRKQAEVLGAPIE

SEQ ID NO: 17809 - protein, 166 aa, Lachnospiraceae bacterium M18-1
MAYKNKVYVSMDADNDLRYYFLMKAWKQNDNSSFNFYDAHDINTILDKSEESIKAGLQKRFIDTKVFVLLVGEHTKYLYKYVRWEIDQAIKRELPCIVVNLNGKRSLDENLCPALMRDSLAVHISFNSKILQYALENWPASDKVYRSNGEIDSYHYKDVVYEKLGL

SEQ ID NO: 17810 - protein, 285 aa, Lachnospiraceae bacterium COE1
MIGFILKSVAMAFGIATGIFTFVPEAFFGKYEWVTQTTLEQYKWFAFCDAQDINIIISRLVCFLLVWIGTSLLYGAFLKFRRWTTIKGQNYSIKVEYGNILKKRKCKRVISFDECFTTQVGNATADINPKSICGQYLSLHPNLDVQQLIETAQITPARSKSKYQHKTRYDSGTIVPNGDDLLMAFAKLDERGKGRFFSRDEYIKCLDLLWKELENYYSEKDVCVPILGAGTTSFDGGSGASISQQDLLNMMIWSYKLSSHKIKAPYKLRIVCKKNSDFSINNIDG

SEQ ID NO: 17811 - protein, 202 aa, Lachnospiraceae bacterium COE1
MSKQVYISADYDQLYGDRNVVEELNKWGSDSLHKVDFIDMSKVSSGTVANGDDCRICDLKAEFNRQINASSAVIFVVGNQTGSRTAGSSCERMSKEQWQCYCTPYKQNANGIKLCKIPSVSTPGENDDYGNINKCSYLRHEFEQAKKKKNTIIIVYNSTRKESSWLPSYMNGYEDLARPFWKIDDNGKKVGDYAYIKEALGF

SEQ ID NO: 17812 - protein, 271 aa, Clostridium clostridioforme CAG:511; identical to SEQ ID NO: 17478

SEQ ID NO: 17813 - protein, 203 aa, Clostridium clostridioforme CAG:511; identical to SEQ ID NO: 17479

SEQ ID NO: 17814 - protein, 317 aa, Porphyromonas sp. COT-108 OH1349
MIMFKHFVFTRKYLTLYELRVISWDFVFSVCKWIGFFWLIIEPLSFFSPSIEEFIKGKGWWLFGVSILITLIKRRPRLKFKYFIRDKDVHVNIVIGDLLAMNNKDIVIPTNVHFITEISDKLISENSVQGQFTKKYFTSHAHLDADIVNNLRETKYTDENPPYFGKDKQYPLGTVAKLPIKKNNKTTFWSYLFALAKLNEHGVCQSNIAEFQKTLPLLWDYIQTKGELSDIAMPILGSGFCRIDSSREDLFKEILLSFLAATRNSKFCKSLTIVIYYRDVSETNIDLESIKEFTKYQTLNFSRESAHKKGKGQAIGE

SEQ ID NO: 17815 - protein, 170 aa, Porphyromonas sp. COT-108 OH1349
MAYKNKTYIAFDGDKDIRYYWLMKAWKYNSKDFFSEFNFYDAHDINFARDSSKEQSIKRQLSERLDNTKLFILLVGESTKFLYRFVRWEIEQAIEKKIPIIVINLNGKRQFDIDRCPYLLKDETAIHISFNQKIIEYALKKWETQLQKIKQEGKKGPFYYTDEVYKSIGL

SEQ ID NO: 17816 - protein, 277 aa, Desulfotomaculum sp. 46_296
MKVLFFDKRILRKFYFALSVISVITSIAFLFVEIGTKCKTAIGLTALVILIVLYIGIWIHSNVRRSIRLKINTSEVEVKFGDIFSEQADLKAIAFNEYFDTLVDDKVIAKSTLNGIFINKFFKDNVEELDGIISADAHLREVVIAENATRSAGKKTKYKLGTICVVNDYLLTALTHFDADNRAYLEINDYINCLLNFWNEVDRVYAGKTVALPVLGSGITRFRGYDNILDQELLELIIWTFKVSRIKFTYPSKVKIVVYKNKSDKTNLLKLKDLETA

SEQ ID NO: 17817 - protein, 170 aa, Desulfotomaculum sp. 46_296
MAYRTKTYIAADWTGDKDAVDQLHKWNDSKYWSLSFTDAHDLTQARDGSLNCSIKTSLGKRLDVSKAFVLIIGKNTKTVRSGSCQYCNSYNSQTKSCVRGYSVDYRSYIEYECDKAVSDGLKIIVLYKAATIYKTNCPDAVKNTGTHTAMCYRKDGQLYWDYQAVKDAIG

SEQ ID NO: 17818 - protein, 293 aa, Sphingobacterium sp. Ag1
MNLSYTWQSIKTKSYWEYALWTYDSLKMFLAVLGAFWTIFEMISFFKLLDQNKLPSYTFLILVGISLIIVIITRRPITSITYKVAGRDQVIVVKIGDIFNEKGQKVISTNTTFDTDIQTGIIAQGSLQGQFTKRYFQQNMQALDNLIDNGLVGLNFVVYQKRAGKDKKYPLGTTVRMDIMGETFYWLAMSNLNYDNTAGSTLQEVLTSLDGLWDFIIAKGENDPIVLPLVGTGRGRVKTHRKRVIARLAQSFTQASEHTVFSKKLIIVVHPSDAEEFGVNLFEVRDLLKHYLP

SEQ ID NO: 17819 - protein, 183 aa, Sphingobacterium sp. Ag1
MAYRNGTYVAFHANGTNYPLDSDIRYYNIIKAWSGRTSDDFTIVNSHDKTGAVRDTSSKETLRRSLKERLNNSKNMILIIGETTKNDDDWVPFEIEYAVDTCKIPLIITYVDVSTPIYDCTPLLSKLPAALRTRIADRTASAIHIPFNKNALKDALRFTFNFKPNGYGKGVYSEQAYKNFGMI

SEQ ID NO: 17820 - protein, 278 aa, Pantoea sp. RIT-PI-b
MLKVSFCDKKIRTLFFKYASATTASIAAVALFWDIPKEYKHYSGLACIAVLVMIYLLLWYKANKLTAINLSVEGSTVTIKTGDIFAEQGLKAIAFNEYFDTKVDNIVIAHQSLNGQFVTDQLTCSVQQLDTYIDEYSYEEEDFAEINSTRLSGKNQRYKIGTICVWNEYLLTAFSKFNKYNEAHLSMPEYLEFLINFWNKVNRVYAQQSVTVPIFGSGITRIKGHKLISDEELLKIMLWTFRVSEMRFTHPAKLTIIIHEDKISKVNLFELQMARSGL

SEQ ID NO: 17821 - protein, 166 aa, Pantoea sp. RIT-PI-b
MLYRTKTYIAGEWDGDQDAIEQLHTWNESKYWDFSFTDAHDITQARDSSLNCNIKSSLATRLNASKTFVLIVGNNTKAARSGGCRYCDSYNSLSSQCDRGYSVDHRSYIEYECDKALKDDLNIIVLYNATTINKSKCPDVLKGVGTHTAMRSTHGWDYLAVKNALN

SEQ ID NO: 17822 - protein, 209 aa, Serratia sp. Leaf51
MPIPNTGSKIEIVFGDIFNQEGIRVIPANEYFDSKLGLPVSEKSLHGIFIKKCFGGHSEPFDKQAESGLSGKIFDVVHNKSDGKLNKYEIGTSVLMEADTNKYLVFAFAHTNTETCKAYIDVKDTWVALHEMWNSLRNVSGGEIVNLPLIGSGISGLGLPTRDILNLIILSAITETKHKEVTKLIRVVLHRDRFDDLDLREIKDYWEKK

SEQ ID NO: 17823 - protein, 188 aa, Serratia sp. Leaf51
MAYRNGTYVAFHANGTNRPGESDISYYNLLKAWSGKGDDSFAFINSHDKASAVRDSSKAETLRKSLHERLKNSKNMLLIIGDTTKDDDDWVPFEINKAVDTYKLPLIIAYTKAVNDGGIIRNPNALSKYWPEALKEKIDTSSVNAIHIPFLKNAINDAIGQFDHKNPPPGKGLGIYSDDAYRSFGFTL

SEQ ID NO: 17824 - protein, 276 aa, Methanosarcina mazei
MLLLSFGKTYFSCVGVIWLFVGMYNELTPLNKIGCSFWFLISIALIFAVFWFLVDGYFIDGFLKRKIVLKSNAFDTQIVIKFGDLFKQDGWKAIPVNEFFDSIVDDNHVSSKSLHGILLKNYWSCNTENWDQQINDSLSDRDLIENVSRNPGKSKRYRIGATAIARKNGNNFLCVALTKTDIDTLQASANPIELYQSINGLLIKSREVCSGSSLNIPLIGSGLSRTGIKTNIIVNIILMNIFEESKKSKITEEIRIILPKNKKKDFNLNTIQKDWR

SEQ ID NO: 17825 - protein, 193 aa, Methanosarcina mazei
MAYRNGTYIAFDGLGQTNPILSDFKYYGNIQAWAANKNIDFKYVDSHDKTCAVKDSSLRTTLEDRIRERLSNSKNMIVILSSDTRKTGSYLSYEIEKAVDYYEIPLIIAYVDYRVVANPSQLSEYWPDVLSSRVENGTAKAIHIPFVKDAILDSIGQFNISNMPATAKNYYSKEAHQAFGVLSSTSNFTNTLK

SEQ ID NO: 17826 - protein, 276 aa, Methanosarcina mazei; identical to SEQ ID NO: 17824

SEQ ID NO: 17827 - protein, 193 aa, Methanosarcina mazei; identical to SEQ ID NO: 17825

SEQ ID NO: 17828 - protein, 276 aa, Methanosarcina mazei; identical to SEQ ID NO: 17824

SEQ ID NO: 17829 - protein, 193 aa, Methanosarcina mazei; identical to SEQ ID NO: 17825

SEQ ID NO: 17830 - protein, 276 aa, Methanosarcina mazei; identical to SEQ ID NO: 17824

SEQ ID NO: 17831 - protein, 193 aa, Methanosarcina mazei; identical to SEQ ID NO: 17825

SEQ ID NO: 17832 - protein, 276 aa, Methanosarcina mazei; identical to SEQ ID NO: 17824

SEQ ID NO: 17833 - protein, 193 aa, Methanosarcina mazei; identical to SEQ ID NO: 17825

SEQ ID NO: 17834 - protein, 276 aa, Methanosarcina mazei; identical to SEQ ID NO: 17824

SEQ ID NO: 17835 - protein, 193 aa, Methanosarcina mazei; identical to SEQ ID NO: 17825

SEQ ID NO: 17836 - protein, 276 aa, Methanosarcina mazei; identical to SEQ ID NO: 17824

SEQ ID NO: 17837 - protein, 193 aa, Methanosarcina mazei; identical to SEQ ID NO: 17825

SEQ ID NO: 17838 - protein, 276 aa, Methanosarcina mazei; identical to SEQ ID NO: 17824

SEQ ID NO: 17839 - protein, 193 aa, Methanosarcina mazei; identical to SEQ ID NO: 17825

SEQ ID NO: 17840 - protein, 276 aa, Methanosarcina mazei; identical to SEQ ID NO: 17824

SEQ ID NO: 17841 - protein, 193 aa, Methanosarcina mazei; identical to SEQ ID NO: 17825

SEQ ID NO: 17842 - protein, 276 aa, Methanosarcina mazei; identical to SEQ ID NO: 17824

SEQ ID NO: 17843 - protein, 193 aa, Methanosarcina mazei; identical to SEQ ID NO: 17825

SEQ ID NO: 17844 - protein, 276 aa, Methanosarcina mazei; identical to SEQ ID NO: 17824

SEQ ID NO: 17845 - protein, 193 aa, Methanosarcina mazei; identical to SEQ ID NO: 17825

SEQ ID NO: 17846 - protein, 276 aa, Methanosarcina mazei; identical to SEQ ID NO: 17824

SEQ ID NO: 17847 - protein, 193 aa, Methanosarcina mazei; identical to SEQ ID NO: 17825

SEQ ID NO: 17848 - protein, 276 aa, Methanosarcina mazei; identical to SEQ ID NO: 17824

SEQ ID NO: 17849 - protein, 193 aa, Methanosarcina mazei; identical to SEQ ID NO: 17825

SEQ ID NO: 17850 - protein, 276 aa, Methanosarcina mazei; identical to SEQ ID NO: 17824

SEQ ID NO: 17851 - protein, 193 aa, Methanosarcina mazei; identical to SEQ ID NO: 17825

SEQ ID NO: 17852 - protein, 276 aa, Methanosarcina mazei; identical to SEQ ID NO: 17824

SEQ ID NO: 17853 - protein, 193 aa, Methanosarcina mazei; identical to SEQ ID NO: 17825

SEQ ID NO: 17854 - protein, 255 aa, Bacillus amyloliquefaciens EGD-AQ14
MSTFISFLDLDARCRLIILLILVGLSLVIIIVQFIRLLFMNNITLNLNGSEVEIKKGDIFEVPRNNYKVIAFNEYFDTQVDDVIIARETLNGQYIKRYYSHQDITELDQKIKDDVKLKIEEKNVERPFGGKTTRYSLGSVFKDMDFFLVAFSKFDRENRAQLKLNEYASCMLNVWNEINTLHASKEVFIPLLGSGITRHVDSDVGVNELLHIMLWTFQISKVKFREPAKVTILLYKNDHKKINFYKLKEFEKNGL

SEQ ID NO: 17855 - protein, 190 aa, Bacillus amyloliquefaciens EGD-AQ14; identical to SEQ ID NO: 17193

SEQ ID NO: 17856 - protein, 279 aa, Thiomonas intermedia K12
MNIKVTIFDPNVIKRSVKIIAGASTSLSVSLLFIDIPIKLKICAGIAFLVVLALIHVVTWLRANSLREIIIKIEGSNVKITSGDIFKQEGLKAIAFNEYLDTQVDNIIISKASLNGKFIESELQDSVEALDTHIAHFQFDEGDIIETEVHRPMGKTTRYRLGTICVYNDFLLTAFARFDARNQANLTMPEYLEFLINFWDKVNKVYAQRSVSTTIFGSGITRIKGHKTISDEDLLKIMLWTFRISEMRFKYPAKLTIVIHESKIDQINLLDIASVKNGV

SEQ ID NO: 17857 - protein, 187 aa, Thiomonas intermedia K12
MAARNGNYAAFYVAEPFSSTALGAHATPDFVYYSQLRMWKGADANFPFVDSHDQTYSVRDGSDWEATLKPRLRERLRASKNIILFLSKSTLASKALIEEIDYGINNEGLPVIVVYPDFHSKASLRSSASFAAGITSLWSKVSIFKSSMGKVPTIHIPLLKDAISSALRNKDFMLSTRARAGAYFYKP

SEQ ID NO: 17858 - protein, 186 aa, Thiomonas intermedia K12
MAYRNGTYVAFHAGGTTDPTASDIKYYNTMKMWCVNKNVDFTFINSHEKASAVRDTSTRETLRRSLVARLNNSKHMVLILTAPTKNDTDWVPFEIAYAVDVCQIPIIAVYPDYASILAPAELSNYWPPALASRITNGTARVIHIPFKLPAVLDSIEQFGVSNTAYPTNGYGFYNRETQIGWGLINP

SEQ ID NO: 17859 - protein, 273 aa, Porphyromonas gingivalis
MKQAKVFLSHFLIAIGTISACIGAFSWLGGSGYSTKNQIIVGICILFIGVVYAWFQMRPSKSIQILINDSFPLQVEFGDLFEKKGVVVISVNEYFDTIVDNKIIATETIHGKFIDRLFKGRIPELDNKIRKALNNVIAEEASNRVIGKKKRYPLGTCAVIEEGENTYILTALTKFDANNHASIPLSEYGAIIQRIILTAATVANSRPVYIPLLGSGQGGIQKSAQKILSYMISQIEFCPDVSIPKGLHIVVYDSGNKNVNLDNIKSAWLSTVK

SEQ ID NO: 17860 - protein, 188 aa, Porphyromonas gingivalis
MIYRNSNYTAFYVDEPFSPSPLAAYATKDFCYYSMLKAWKRSDTSFPFNDAHAKTYSVRDRSDWELTLKPRLRERLKVSKNIILFLSSNTRSSKALREEIEYGACILGLPIIVVYPELDNNDIVENDNISLKVKMLWNKLPILGTAMENVPTIHIPMKKESLQHALSDSELTIQGKIANNHTQYFYHK

SEQ ID NO: 17861 - protein, 231 aa, Porphyromonas gingivalis
MELYKVSTETIDEVVNKLPIQSIVHTSKTPNNLRDRLRDLIKGEKGIVNGERLRDFVFPIDKFDVFISHSHNDLKIASLFAVWLKEKCGLSVFLDSFVWGSADGLLQEIDNQYCKQRNGNYNYHRRNYSTAHIHTMLSMSIMEIIKQSRIGIFIDSPHSIDLRNLSNSNRAKTLSPWIYQEIMFMRQFADKKSSTRMFSCENLNESFQIAHSVDLSDFALLTVNDLISVAS

SEQ ID NO: 17862 - protein, 281 aa, Bacteroides ovatus CAG:22
MKKVTLFDKRILTKFWGYFSIISGIISFVYLFNFFPDACEKCNLWVGLLCLILLVFIYLSIWICVNKLKNVKIQIDGSSVIIKEGDLFEEEGYKAIGFNEYFDTQVDNRIISEHSLNGIFINTICANKTKELDKYITEQCDDDDIIEKGVNRKNGGKAIKYKLSTIIVYKEYLLTAFSKFDDKNRAYLTMPEYVEFLINFWDRVNRIYAQKSVSVPIFGSGITRIKEHKNITDEDLLKIMLWTFKLSEYRFKYPAKLTIIIHKDKIDEINLLDIESMGKGL

SEQ ID NO: 17863 - protein, 187 aa, Bacteroides ovatus CAG:22
MGYKNGNYSAFYVSEPFSESSLGAYAAKDFQYYNLLRAWKGRDSSFLFNDSHNKTYNVRDGSDWEKTLKPRLRERLNCSKNIILFLSSVTKNSKALREEIDYGINTLGLPVIVIYPELKDKSSLLTSTGKALNSTVEALWNNLPIFRDSKSVVPVLHIPLNKELIEQALNDPDLMINSKCDPGDYFF

SEQ ID NO: 17864 - protein, 170 aa, Bacteroides ovatus CAG:22
MTYRTRTYIAAEWDGDSDAVQQLHKWNDSNHFSLSFTDAHDLQQSRDGSLNCSIKRSLAERLDASKTFVLIVGSNTKSVRSGSCQYCGSKNSWTGVCARGNFVDNRSYSEYECEKAVRDGLKIVVLYNAATVDKSKCPDAVKYVGTHKAMCYYQNGQYYWDYQTVKSALG

SEQ ID NO: 17865 - protein, 297 aa, Clostridium sp. L2-50
MNKVNVIKQNLEFIGKTWIKCIGTFASILSLFFLFWTWDDIRITSTRYKCVIIILLCVLALILAILWTCIFKRTKTIWESPSGKIKVCYSDIMKDGFDKRNKEEKLFVIPVNSCFDTIVDEDISTCSKPLVSPNSLHGRWIKTMVNKGFTIEEIDNKIHNCLEMQNLVPKSIIADEDKERGKREVYELGTVAMIRGNNNSTFLLLAISEYDKDNIAHTSVDDLEMCIKSLLNFYDQHGQGHRLVIPLMGTNLSRAGLSHNDSLRVITSLFQLYGDKIHGEVDVVIYKGDKDKVTLDI

SEQ ID NO: 17866 - protein, 81 aa, Clostridium sp. L2-50
MRDGSDWEKTLKPRLHTRLDNSKNIILFLSSITANSRALREKMNYGIGTKGLPVIVIYPDYDKKSDIVDSNSGIANCHVIT

SEQ ID NO: 17867 - protein, 184 aa, Clostridium sp. L2-50
MNRTGTYVAFDGQGSTDPTESDIHYFNLLKAWNKSGSIDFRFTNSHEKTYQVRDSSSKATLFNRLETRLSASKNFLLIISDKTNYDRGILNWEIEKAVDYYELPIIIAYPGYSKIGAPSELNSMWTKSLAERIKNERAHCIHIPFKKEPIFDAINQFSVVNSKYPKGGALGFYSEEAYKSWGIV

SEQ ID NO: 17868 - protein, 271 aa, Porphyromonas sp. COT-290 OH860
MKQLKIFSSYFLSFIGAISAFVGAFSWLNGYGLMACIVFVGGIVLIGTGYALFQMRPSKSIQLLINNSFPLQIEDGDLFAKKGVVIISVNDYFDTIVDNRIIAADTIHGKFIEKFFRGRISELDDKIDTALRSEVPIDVPNRAEGKKKRYPLGTCAVLDEGENTYILAALTKFDENNHAFIPLSEYGTIIQKIIVKASITANSRPVYMPLLGSGQGGIQKSAQRILSYIISQIEFCSNVSIPKGLHIVIYDLSKKGINLDNMKSAWQSAIK

SEQ ID NO: 17869 - protein, 187 aa, Porphyromonas sp. COT-290 OH860
MMYRNSNYTAFYVDEPFSPSPLAAYATKDFCYYNMLKAWKGNDALFPFNDAHSKTYSVRDGSNWELTLKPRLRERLRLSKNIILFLSSNTKYSRALREEISYGACTLGLPIIVVYPELDNSQIVSNEQLSSRVKLLWDKLPILKEAMTKVPTLHIPMRQNSVSNALSDSELTIQGKKGGDVTKYFYK

SEQ ID NO: 17870 - protein, 224 aa, Porphyromonas sp. COT-290 OH860
MNVIGEVLDTSPITSTQPLERPRELHSELRRLVKGERGIIDGERLQNFVFPTNNYDVFISHSHDDLEIAKQFAAWLKEKYRYSVFLDSFVWNSADGLLQEIDNLYCKQRNGLYNYHRRNYSTAHIHTMLSMSIMEIIKRSKVGILIDSHHSINLERLRNSNQAKTLSPWIFQEIMFMRQFANQKSSTRMFSSESLNEGLQIAHTVDLSDFTTLTARDLISKTSL

SEQ ID NO: 17871 - protein, 277 aa, Acetobacter pasteurianus
MKVNLINKQVRDSFFKIAAGIGTALSTLLLFVEIPQNWKLRSLIIFAVILAGIYLVIWWCANNLKKVTIKIDGTTVTVKSGDIFNESGLKAIAFNEYFDTVVDNKLISERSLNGIFLKSKLNGTIEELDIEIEQFPFEEGEVLQREVSRDAGKSVKFKLGTIFVKDDFLLTAMSKFDASNRANLTMPEYLEFLINFWDGVNKVYAQRSVVTPIFGSGITRILGHRNITDEDLLKIMLWTFRISEMRFKYPANLTIVVHEEKIDQVNLLDLKALRNGV

SEQ ID NO: 17872 - protein, 183 aa, Acetobacter pasteurianus
MVNRTGTYIAFDGLGQKDPTKSDFRYYATIQAWNASKHREFRFTNSHEKASAVQDTSKLATLHASIRNRLLASKNMLIVLSDNTRKSGSVLSWEIEKAVDEYGLPLIIAHTGYSAILAPKELSNRWPTSLAVRLNNGTAKAIHVPFKQDAIFNAIQRFTVNGEKLDGSFICYNKAVQKQWGYI

SEQ ID NO: 17873 - protein, 169 aa, Acetobacter pasteurianus
MAYRNKTYVAFASEDISSYRLMEAWKANSKIDFNFFDAHDLFISRDTSKPETIKKNLRERLKNAKQIVLLGSREGKKKGDDGVSFLAHEIAVIMEFNLPVVVANLDGDRSIDRNYIPNKLIDADYYTVSTSFQPQIIMHALDDYVSDFYLSSKKGPHQYPAKTYTDLGL

SEQ ID NO: 17874 - protein, 292 aa, Enterobacter cloacae S611
MKYWWESVRTTAYWRYALFSGEAIAKFFSVLGVLYLLINLADTFKIYEKGQYSNYGIFILIGLAIVFVIFTRRPVSRVSYKVPKKDYSFEVKISDLFKESGEIIISSNTTFDTDMSSGLISTASLQGQFATQFFNGQTTEIDRQIEESLARENYVEIDGKPGKLKKYPLGTVARVSAHGKNFYFVAMSDINPEGTAFSNSRMLDEALEGLWSNMARKGELGDIVMPLMGTGRGRVAISRKKVIERIAQSFADAAQERVFSNKLSIIVRPEDASKFTLNLFQVRDYLSQSLNA

SEQ ID NO: 17875 - protein, 304 aa, Enterobacter cloacae S611
MKTDLFISYAWTSAEHCKWVHLFASHLHMAGFIVKIDERVDYGSSLSGFMREMTDCAHVLMIVDANYVERANNMPLSGVAIENRWISDVLETKPETWLSVMFVDNPSCELPGWLTPHNPKGFDFNYPEERMAYPGASQIEAIWRWIAGLPADKSNAVSIATHRERCARLEHADTLLDPANYTNPALNGRVTFNHRDHSYYRVGYGEHKFDIMFDEANSNIVRIYKDYDLKAVWKLQGENSDPLDFRAEMRPTRTVSLMVGQKAMLLNNSGMVCEVTIEEIQPEVEGENYVKEHVTFSYKIHHDK

SEQ ID NO: 17876 - protein, 183 aa, Enterobacter cloacae S611
MAYRNGNYIAFDGLGETDPTKSDFRYYASIQAWAAGKGYDFKYVDSHDKTFAVRDSSLRATLEARIKERLAASKNIVIILSDKTRKTGSMLSYEIEKAVDIYKLPLICAYTDLNQMLTPSAWSHRWPLALKDRIENGSARAIHIPFKKLALLDALTYTVHSHNLENGLHYYSPEAHLKFGCID

SEQ ID NO: 17877 - protein, 278 aa, Escherichia coli CFT073; identical to SEQ ID NO: 17310

SEQ ID NO: 17878 - protein, 307 aa, Escherichia coli CFT073
MIAYENIEFFICLVNVLGNNMYNILFFIFLSIAIPFLLFLAWKQHLKTKEIRSYLLKEGYNIIFNGEGNSYLAFNISNATFRAGNLTSNDYFQASISYIHDYRWEWKEVEAKKINNIFIIYISNIDFPSQKLFYRNNKSLAEIDWAKLQAIFHQPYEIQNDVMQDNNNTHYDFFISHAKEDKDTFVRPLVDELNRLGVIIWYDEQTLEVGDSLRRNIDLGLRKANYGIVILSHNFLNKKWTQYELDSLINRAVYDDNKIILPIWHNINAQEVSKYSHYLADKMALQTSLYSVKEIARELAEIAYRRR

SEQ ID NO: 17879 - protein, 169 aa, Escherichia coli CFT073
MSYRNKTYVAFASEDIKFYRLMEAWKANEKIDFNFFDAHDLFISRDTSKPETIKRNLRERMKNAKQVVLLGSGNTKRKGSDGVSFLAHEIDLIVEFNLPVVIANLDGDRTVDKNFIPKPLLDSEHYTVSVSFQPKIIKYALDNYCVNYYSSSNSGSYLYPTSVYTKLGL

SEQ ID NO: 17880 - protein, 278 aa, Escherichia coli MS 45-1; identical to SEQ ID NO: 17310

SEQ ID NO: 17881 - protein, 307 aa, Escherichia coli MS 45-1; identical to SEQ ID NO: 17878

SEQ ID NO: 17882 - protein, 169 aa, Escherichia coli MS 45-1; identical to SEQ ID NO: 17879

SEQ ID NO: 17883 - protein, 278 aa, Escherichia coli MS 110-3; identical to SEQ ID NO: 17310

SEQ ID NO: 17884 - protein, 307 aa, Escherichia coli MS 110-3; identical to SEQ ID NO: 17878

SEQ ID NO: 17885 - protein, 169 aa, Escherichia coli MS 110-3; identical to SEQ ID NO: 17879

SEQ ID NO: 17886 - protein, 278 aa, Escherichia coli MS 153-1; identical to SEQ ID NO: 17310

SEQ ID NO: 17887 - protein, 307 aa, Escherichia coli MS 153-1; identical to SEQ ID NO: 17878

SEQ ID NO: 17888 - protein, 169 aa, Escherichia coli MS 153-1; identical to SEQ ID NO: 17879

SEQ ID NO: 17889 - protein, 278 aa, Escherichia coli MS 200-1; identical to SEQ ID NO: 17310

SEQ ID NO: 17890 - protein, 307 aa, Escherichia coli MS 200-1; identical to SEQ ID NO: 17878

SEQ ID NO: 17891 - protein, 169 aa, Escherichia coli MS 200-1; identical to SEQ ID NO: 17879

SEQ ID NO: 17892 - protein, 278 aa, Escherichia coli MS 60-1; identical to SEQ ID NO: 17310

SEQ ID NO: 17893 - protein, 307 aa, Escherichia coli MS 60-1; identical to SEQ ID NO: 17878

SEQ ID NO: 17894 - protein, 169 aa, Escherichia coli MS 60-1; identical to SEQ ID NO: 17879

SEQ ID NO: 17895 - protein, 278 aa, Escherichia coli NC101; identical to SEQ ID NO: 17310

SEQ ID NO: 17896 - protein, 307 aa, Escherichia coli NC101; identical to SEQ ID NO: 17878

SEQ ID NO: 17897 - protein, 169 aa, Escherichia coli NC101; identical to SEQ ID NO: 17879

SEQ ID NO: 17898 - protein, 278 aa, Escherichia coli H263; identical to SEQ ID NO: 17310

SEQ ID NO: 17899 - protein, 287 aa, Escherichia coli H263; identical to SEQ ID NO: 17311

SEQ ID NO: 17900 - protein, 169 aa, Escherichia coli H263; identical to SEQ ID NO: 17879

SEQ ID NO: 17901 - protein, 278 aa, Escherichia coli str. 'clone D i2'; identical to SEQ ID NO: 17310

SEQ ID NO: 17902 - protein, 307 aa, Escherichia coli str. 'clone D i2'; identical to SEQ ID NO: 17878

SEQ ID NO: 17903 - protein, 169 aa, Escherichia coli str. 'clone D i2'; identical to SEQ ID NO: 17879

SEQ ID NO: 17904 - protein, 278 aa, Escherichia coli str. 'clone D i14'; identical to SEQ ID NO: 17310

SEQ ID NO: 17905 - protein, 307 aa, Escherichia coli str. 'clone D i14'; identical to SEQ ID NO: 17878

SEQ ID NO: 17906 - protein, 169 aa, Escherichia coli str. 'clone D i14'; identical to SEQ ID NO: 17879

SEQ ID NO: 17907 - protein, 278 aa, Escherichia coli H397; identical to SEQ ID NO: 17310

SEQ ID NO: 17908 - protein, 307 aa, Escherichia coli H397; identical to SEQ ID NO: 17878

SEQ ID NO: 17909 - protein, 169 aa, Escherichia coli H397; identical to SEQ ID NO: 17879

SEQ ID NO: 17910 - protein, 278 aa, Escherichia coli J96; identical to SEQ ID NO: 17310

SEQ ID NO: 17911 - protein, 287 aa, Escherichia coli J96; identical to SEQ ID NO: 17311

SEQ ID NO: 17912 - protein, 169 aa, Escherichia coli J96; identical to SEQ ID NO: 17879

SEQ ID NO: 17913 - protein, 278 aa, Escherichia coli KTE106; identical to SEQ ID NO: 17310

SEQ ID NO: 17914 - protein, 307 aa, Escherichia coli KTE106; identical to SEQ ID NO: 17878

SEQ ID NO: 17915 - protein, 169 aa, Escherichia coli KTE106; identical to SEQ ID NO: 17879

SEQ ID NO: 17916 - protein, 278 aa, Escherichia coli KTE124; identical to SEQ ID NO: 17310

SEQ ID NO: 17917 - protein, 307 aa, Escherichia coli KTE124; identical to SEQ ID NO: 17878

SEQ ID NO: 17918 - protein, 169 aa, Escherichia coli KTE124; identical to SEQ ID NO: 17879

SEQ ID NO: 17919 - protein, 278 aa, Escherichia coli KTE131; identical to SEQ ID NO: 17310

SEQ ID NO: 17920 - protein, 307 aa, Escherichia coli KTE131; identical to SEQ ID NO: 17878

SEQ ID NO: 17921 - protein, 169 aa, Escherichia coli KTE131; identical to SEQ ID NO: 17879

SEQ ID NO: 17922 - protein, 278 aa, Escherichia coli KTE133; identical to SEQ ID NO: 17310

SEQ ID NO: 17923 - protein, 307 aa, Escherichia coli KTE133; identical to SEQ ID NO: 17878

SEQ ID NO: 17924 - protein, 169 aa, Escherichia coli KTE133; identical to SEQ ID NO: 17879

SEQ ID NO: 17925 - protein, 278 aa, Escherichia coli KTE137; identical to SEQ ID NO: 17310

SEQ ID NO: 17926 - protein, 307 aa, Escherichia coli KTE137; identical to SEQ ID NO: 17878

SEQ ID NO: 17927 - protein, 169 aa, Escherichia coli KTE137; identical to SEQ ID NO: 17879

SEQ ID NO: 17928 - protein, 278 aa, Escherichia coli KTE153; identical to SEQ ID NO: 17310

SEQ ID NO: 17929 - protein, 307 aa, Escherichia coli KTE153; identical to SEQ ID NO: 17878

SEQ ID NO: 17930 - protein, 169 aa, Escherichia coli KTE153; identical to SEQ ID NO: 17879

SEQ ID NO: 17931 - protein, 278 aa, Escherichia coli KTE160; identical to SEQ ID NO: 17310

SEQ ID NO: 17932 - protein, 307 aa, Escherichia coli KTE160; identical to SEQ ID NO: 17878

SEQ ID NO: 17933 - protein, 169 aa, Escherichia coli KTE160; identical to SEQ ID NO: 17879

SEQ ID NO: 17934 - protein, 278 aa, Escherichia coli KTE174; identical to SEQ ID NO: 17310

SEQ ID NO: 17935 - protein, 307 aa, Escherichia coli KTE174; identical to SEQ ID NO: 17878

SEQ ID NO: 17936 - protein, 169 aa, Escherichia coli KTE174; identical to SEQ ID NO: 17879

SEQ ID NO: 17937 - protein, 278 aa, Escherichia coli KTE88; identical to SEQ ID NO: 17310

SEQ ID NO: 17938 - protein, 307 aa, Escherichia coli KTE88; identical to SEQ ID NO: 17878

SEQ ID NO: 17939 - protein, 169 aa, Escherichia coli KTE88; identical to SEQ ID NO: 17879

SEQ ID NO: 17940 - protein, 278 aa, Escherichia coli KTE145; identical to SEQ ID NO: 17310

SEQ ID NO: 17941 - protein, 307 aa, Escherichia coli KTE145; identical to SEQ ID NO: 17878

SEQ ID NO: 17942 - protein, 169 aa, Escherichia coli KTE145; identical to SEQ ID NO: 17879

SEQ ID NO: 17943 - protein, 278 aa, Escherichia coli KTE167; identical to SEQ ID NO: 17310

SEQ ID NO: 17944 - protein, 307 aa, Escherichia coli KTE167; identical to SEQ ID NO: 17878

SEQ ID NO: 17945 - protein, 169 aa, Escherichia coli KTE167; identical to SEQ ID NO: 17879

SEQ ID NO: 17946 - protein, 278 aa, Escherichia coli KTE15; identical to SEQ ID NO: 17310

SEQ ID NO: 17947 - protein, 307 aa, Escherichia coli KTE15; identical to SEQ ID NO: 17878

SEQ ID NO: 17948 - protein, 169 aa, Escherichia coli KTE15; identical to SEQ ID NO: 17879

SEQ ID NO: 17949 - protein, 278 aa, Escherichia coli KTE189; identical to SEQ ID NO: 17310

SEQ ID NO: 17950 - protein, 307 aa, Escherichia coli KTE189; identical to SEQ ID NO: 17878

SEQ ID NO: 17951 - protein, 169 aa, Escherichia coli KTE189; identical to SEQ ID NO: 17879

SEQ ID NO: 17952 - protein, 278 aa, Escherichia coli KTE191; identical to SEQ ID NO: 17310

SEQ ID NO: 17953 - protein, 307 aa, Escherichia coli KTE191; identical to SEQ ID NO: 17878

SEQ ID NO: 17954 - protein, 169 aa, Escherichia coli KTE191; identical to SEQ ID NO: 17879

SEQ ID NO: 17955 - protein, 278 aa, Escherichia coli KTE201; identical to SEQ ID NO: 17310

SEQ ID NO: 17956 - protein, 307 aa, Escherichia coli KTE201; identical to SEQ ID NO: 17878

SEQ ID NO: 17957 - protein, 169 aa, Escherichia coli KTE201; identical to SEQ ID NO: 17879

SEQ ID NO: 17958 - protein, 278 aa, Escherichia coli KTE206; identical to SEQ ID NO: 17310

SEQ ID NO: 17959 - protein, 307 aa, Escherichia coli KTE206; identical to SEQ ID NO: 17878

SEQ ID NO: 17960 - protein, 169 aa, Escherichia coli KTE206; identical to SEQ ID NO: 17879

SEQ ID NO: 17961 - protein, 278 aa, Escherichia coli KTE220; identical to SEQ ID NO: 17310

SEQ ID NO: 17962 - protein, 307 aa, Escherichia coli KTE220; identical to SEQ ID NO: 17878

SEQ ID NO: 17963 - protein, 169 aa, Escherichia coli KTE220; identical to SEQ ID NO: 17879

SEQ ID NO: 17964 - protein, 278 aa, Escherichia coli KTE53; identical to SEQ ID NO: 17310

SEQ ID NO: 17965 - protein, 307 aa, Escherichia coli KTE53; identical to SEQ ID NO: 17878

SEQ ID NO: 17966 - protein, 169 aa, Escherichia coli KTE53; identical to SEQ ID NO: 17879

SEQ ID NO: 17967 - protein, 278 aa, Escherichia coli KTE57; identical to SEQ ID NO: 17310

SEQ ID NO: 17968 - protein, 307 aa, Escherichia coli KTE57; identical to SEQ ID NO: 17878

SEQ ID NO: 17969 - protein, 169 aa, Escherichia coli KTE57; identical to SEQ ID NO: 17879

SEQ ID NO: 17970 - protein, 278 aa, Escherichia coli KTE58; identical to SEQ ID NO: 17310

SEQ ID NO: 17971 - protein, 307 aa, Escherichia coli KTE58; identical to SEQ ID NO: 17878

SEQ ID NO: 17972 - protein, 169 aa, Escherichia coli KTE58
MSYRNKTYVVFASEDIKFYRLMEAWKANEKIDFNFFDAHDLFISRDTSKPETIKRNLRERMKNAKQVVLLGSGNTKRKGSDGVSFLAHEIDLIVEFNLPVVIANLDGDRTVDKNFIPKPLLDSEHYTVSVSFQPKIIKYALDNYCVNYYSSSNSGSYLYPTSVYTKLGL

SEQ ID NO: 17973 - protein, 278 aa, Escherichia coli KTE72; identical to SEQ ID NO: 17310

SEQ ID NO: 17974 - protein, 307 aa, Escherichia coli KTE72; identical to SEQ ID NO: 17878

SEQ ID NO: 17975 - protein, 169 aa, Escherichia coli KTE72; identical to SEQ ID NO: 17879

SEQ ID NO: 17976 - protein, 278 aa, Escherichia coli KTE86; identical to SEQ ID NO: 17310

SEQ ID NO: 17977 - protein, 307 aa, Escherichia coli KTE86; identical to SEQ ID NO: 17878

SEQ ID NO: 17978 - protein, 169 aa, Escherichia coli KTE86; identical to SEQ ID NO: 17879

SEQ ID NO: 17979 - protein, 278 aa, Escherichia coli KTE87; identical to SEQ ID NO: 17310

SEQ ID NO: 17980 - protein, 307 aa, Escherichia coli KTE87; identical to SEQ ID NO: 17878

SEQ ID NO: 17981 - protein, 169 aa, Escherichia coli KTE87; identical to SEQ ID NO: 17879

SEQ ID NO: 17982 - protein, 278 aa, Escherichia coli KTE93; identical to SEQ ID NO: 17310

SEQ ID NO: 17983 - protein, 307 aa, Escherichia coli KTE93; identical to SEQ ID NO: 17878

SEQ ID NO: 17984 - protein, 169 aa, Escherichia coli KTE93; identical to SEQ ID NO: 17879

SEQ ID NO: 17985 - protein, 278 aa, Escherichia coli KTE8; identical to SEQ ID NO: 17310

SEQ ID NO: 17986 - protein, 307 aa, Escherichia coli KTE8; identical to SEQ ID NO: 17878

SEQ ID NO: 17987 - protein, 169 aa, Escherichia coli KTE8; identical to SEQ ID NO: 17879

SEQ ID NO: 17988 - protein, 278 aa, Escherichia coli KTE22; identical to SEQ ID NO: 17310

SEQ ID NO: 17989 - protein, 307 aa, Escherichia coli KTE22; identical to SEQ ID NO: 17878

SEQ ID NO: 17990 - protein, 169 aa, Escherichia coli KTE22; identical to SEQ ID NO: 17879

SEQ ID NO: 17991 - protein, 278 aa, Escherichia coli KTE59; identical to SEQ ID NO: 17310

SEQ ID NO: 17992 - protein, 307 aa, Escherichia coli KTE59; identical to SEQ ID NO: 17878

SEQ ID NO: 17993 - protein, 169 aa, Escherichia coli KTE59; identical to SEQ ID NO: 17879

SEQ ID NO: 17994 - protein, 278 aa, Escherichia coli KTE63; identical to SEQ ID NO: 17310

SEQ ID NO: 17995 - protein, 307 aa, Escherichia coli KTE63; identical to SEQ ID NO: 17878

SEQ ID NO: 17996 - protein, 169 aa, Escherichia coli KTE63; identical to SEQ ID NO: 17879

SEQ ID NO: 17997 - protein, 278 aa, Escherichia coli KTE65; identical to SEQ ID NO: 17310

SEQ ID NO: 17998 - protein, 307 aa, Escherichia coli KTE65; identical to SEQ ID NO: 17878

SEQ ID NO: 17999 - protein, 169 aa, Escherichia coli KTE65; identical to SEQ ID NO: 17879

SEQ ID NO: 18000 - protein, 278 aa, Escherichia coli KTE118; identical to SEQ ID NO: 17310

SEQ ID NO: 18001 - protein, 307 aa, Escherichia coli KTE118; identical to SEQ ID NO: 17878

SEQ ID NO: 18002 - protein, 169 aa, Escherichia coli KTE118; identical to SEQ ID NO: 17879

SEQ ID NO: 18003 - protein, 278 aa, Escherichia coli KTE123; identical to SEQ ID NO: 17310

SEQ ID NO: 18004 - protein, 307 aa, Escherichia coli KTE123; identical to SEQ ID NO: 17878

SEQ ID NO: 18005 - protein, 169 aa, Escherichia coli KTE123; identical to SEQ ID NO: 17879

SEQ ID NO: 18006 - protein, 278 aa, Escherichia coli KTE183; identical to SEQ ID NO: 17310

SEQ ID NO: 18007 - protein, 307 aa, Escherichia coli KTE183; identical to SEQ ID NO: 17878

SEQ ID NO: 18008 - protein, 169 aa, Escherichia coli KTE183; identical to SEQ ID NO: 17879

SEQ ID NO: 18009 - protein, 278 aa, Escherichia coli KTE207; identical to SEQ ID NO: 17310

SEQ ID NO: 18010 - protein, 307 aa, Escherichia coli KTE207; identical to SEQ ID NO: 17878

SEQ ID NO: 18011 - protein, 169 aa, Escherichia coli KTE207; identical to SEQ ID NO: 17879

SEQ ID NO: 18012 - protein, 278 aa, Escherichia coli KTE209; identical to SEQ ID NO: 17310

SEQ ID NO: 18013 - protein, 307 aa, Escherichia coli KTE209; identical to SEQ ID NO: 17878

SEQ ID NO: 18014 - protein, 169 aa, Escherichia coli KTE209; identical to SEQ ID NO: 17879

SEQ ID NO: 18015 - protein, 278 aa, Escherichia coli KTE215; identical to SEQ ID NO: 17310

SEQ ID NO: 18016 - protein, 307 aa, Escherichia coli KTE215; identical to SEQ ID NO: 17878

SEQ ID NO: 18017 - protein, 169 aa, Escherichia coli KTE215; identical to SEQ ID NO: 17879

SEQ ID NO: 18018 - protein, 278 aa, Escherichia coli KTE218; identical to SEQ ID NO: 17310

SEQ ID NO: 18019 - protein, 307 aa, Escherichia coli KTE218; identical to SEQ ID NO: 17878

SEQ ID NO: 18020 - protein, 169 aa, Escherichia coli KTE218; identical to SEQ ID NO: 17879

SEQ ID NO: 18021 - protein, 278 aa, Escherichia coli KTE223; identical to SEQ ID NO: 17310

SEQ ID NO: 18022 - protein, 307 aa, Escherichia coli KTE223; identical to SEQ ID NO: 17878

SEQ ID NO: 18023 - protein, 169 aa, Escherichia coli KTE223; identical to SEQ ID NO: 17879

SEQ ID NO: 18024 - protein, 278 aa, Escherichia coli KTE104; identical to SEQ ID NO: 17310

SEQ ID NO: 18025 - protein, 307 aa, Escherichia coli KTE104; identical to SEQ ID NO: 17878

SEQ ID NO: 18026 - protein, 169 aa, Escherichia coli KTE104; identical to SEQ ID NO: 17879

SEQ ID NO: 18027 - protein, 278 aa, Escherichia coli ATCC 25922; identical to SEQ ID NO: 17310

SEQ ID NO: 18028 - protein, 307 aa, Escherichia coli ATCC 25922; identical to SEQ ID NO: 17878

SEQ ID NO: 18029 - protein, 169 aa, Escherichia coli ATCC 25922; identical to SEQ ID NO: 17879

SEQ ID NO: 18030 - protein, 278 aa, Escherichia coli KTE195; identical to SEQ ID NO: 17310

SEQ ID NO: 18031 - protein, 307 aa, Escherichia coli KTE195; identical to SEQ ID NO: 17878

SEQ ID NO: 18032 - protein, 169 aa, Escherichia coli KTE195; identical to SEQ ID NO: 17879

SEQ ID NO: 18033 - protein, 278 aa, Escherichia coli KTE226; identical to SEQ ID NO: 17310

SEQ ID NO: 18034 - protein, 307 aa, Escherichia coli KTE226; identical to SEQ ID NO: 17878

SEQ ID NO: 18035 - protein, 169 aa, Escherichia coli KTE226; identical to SEQ ID NO: 17879

SEQ ID NO: 18036 - protein, 278 aa, Escherichia coli KTE89; identical to SEQ ID NO: 17310

SEQ ID NO: 18037 - protein, 307 aa, Escherichia coli KTE89; identical to SEQ ID NO: 17878

SEQ ID NO: 18038 - protein, 169 aa, Escherichia coli KTE89; identical to SEQ ID NO: 17879

SEQ ID NO: 18039 - protein, 278 aa, Escherichia coli HVH 1 (4-6876161); identical to SEQ ID NO: 17310

SEQ ID NO: 18040 - protein, 307 aa, Escherichia coli HVH 1 (4-6876161); identical to SEQ ID NO: 17878

SEQ ID NO: 18041 - protein, 169 aa, Escherichia coli HVH 1 (4-6876161); identical to SEQ ID NO: 17879

SEQ ID NO: 18042 - protein, 278 aa, Escherichia coli HVH 4 (4-7276109); identical to SEQ ID NO: 17310

SEQ ID NO: 18043 - protein, 307 aa, Escherichia coli HVH 4 (4-7276109); identical to SEQ ID NO: 17878

SEQ ID NO: 18044 - protein, 169 aa, Escherichia coli HVH 4 (4-7276109); identical to SEQ ID NO: 17879

SEQ ID NO: 18045 - protein, 278 aa, Escherichia coli HVH 7 (4-7315031); identical to SEQ ID NO: 17310

SEQ ID NO: 18046 - protein, 307 aa, Escherichia coli HVH 7 (4-7315031); identical to SEQ ID NO: 17878

SEQ ID NO: 18047 - protein, 140 aa, Escherichia coli HVH 7 (4-7315031)
MSYRNKTYVAFASEDIKFYRLMEAWKANEKIDFNFFDAHDLFISRDTSKPETIKRNLRERMKNAKQVVLLGSGNTKRKGSDGVSFLAHEIDLIVEFNLPVVIANLDGDRTVDKNFIPKPLLDSEHYTVSVSFQPKLLNMH

SEQ ID NO: 18048 - protein, 278 aa, Escherichia coli HVH 16 (4-7649002); identical to SEQ ID NO: 17310

SEQ ID NO: 18049 - protein, 307 aa, Escherichia coli HVH 16 (4-7649002); identical to SEQ ID NO: 17878

SEQ ID NO: 18050 - protein, 169 aa, Escherichia coli HVH 16 (4-7649002); identical to SEQ ID NO: 17879

SEQ ID NO: 18051 - protein, 278 aa, Escherichia coli HVH 20 (4-5865042); identical to SEQ ID NO: 17310

SEQ ID NO: 18052 - protein, 307 aa, Escherichia coli HVH 20 (4-5865042); identical to SEQ ID NO: 17878

SEQ ID NO: 18053 - protein, 169 aa, Escherichia coli HVH 20 (4-5865042); identical to SEQ ID NO: 17879

SEQ ID NO: 18054 - protein, 278 aa, Escherichia coli HVH 21 (4-4517873); identical to SEQ ID NO: 17310

SEQ ID NO: 18055 - protein, 307 aa, Escherichia coli HVH 21 (4-4517873); identical to SEQ ID NO: 17878

SEQ ID NO: 18056 - protein, 169 aa, Escherichia coli HVH 21 (4-4517873); identical to SEQ ID NO: 17879

SEQ ID NO: 18057 - protein, 278 aa, Escherichia coli HVH 26 (4-5703913); identical to SEQ ID NO: 17310

SEQ ID NO: 18058 - protein, 307 aa, Escherichia coli HVH 26 (4-5703913); identical to SEQ ID NO: 17878

SEQ ID NO: 18059 - protein, 169 aa, Escherichia coli HVH 26 (4-5703913); identical to SEQ ID NO: 17879

SEQ ID NO: 18060 - protein, 278 aa, Escherichia coli HVH 27 (4-7449267); identical to SEQ ID NO: 17310

SEQ ID NO: 18061 - protein, 307 aa, Escherichia coli HVH 27 (4-7449267); identical to SEQ ID NO: 17878

SEQ ID NO: 18062 - protein, 169 aa, Escherichia coli HVH 27 (4-7449267); identical to SEQ ID NO: 17879

SEQ ID NO: 18063 - protein, 278 aa, Escherichia coli HVH 28 (4-0907367); identical to SEQ ID NO: 17310

SEQ ID NO: 18064 - protein, 307 aa, Escherichia coli HVH 28 (4-0907367); identical to SEQ ID NO: 17878

SEQ ID NO: 18065 - protein, 169 aa, Escherichia coli HVH 28 (4-0907367); identical to SEQ ID NO: 17879

SEQ ID NO: 18066 - protein, 278 aa, Escherichia coli HVH 30 (4-2661829); identical to SEQ ID NO: 17310

SEQ ID NO: 18067 - protein, 307 aa, Escherichia coli HVH 30 (4-2661829); identical to SEQ ID NO: 17878

SEQ ID NO: 18068 - protein, 169 aa, Escherichia coli HVH 30 (4-2661829); identical to SEQ ID NO: 17879

SEQ ID NO: 18069 - protein, 278 aa, Escherichia coli HVH 31 (4-2602156); identical to SEQ ID NO: 17310

SEQ ID NO: 18070 - protein, 307 aa, Escherichia coli HVH 31 (4-2602156); identical to SEQ ID NO: 17878

SEQ ID NO: 18071 - protein, 169 aa, Escherichia coli HVH 31 (4-2602156); identical to SEQ ID NO: 17879

SEQ ID NO: 18072 - protein, 278 aa, Escherichia coli HVH 35 (4-2962667)
MAKVNFFDKRILKKFSDYTSTISTIFSLFLIFVDIPTENKLTLGIIFLIILFLLYFGIWFKSNNLSEINLDVEGSIVTVKAGDLFRQDGFKVIAFNEYFDTQVDDVIISHNSLNGLYIDNYLAGSVSDLDHRISNHQFEEDELLEVNHKRKVGKTQKYSLGTSFVNNDYLLTAFSKFDDKNRAFLTMPDYLAFLINFWDKVNRIYAQKSVSVPIFGSGITRIKEHKNISDEDLLKIMLWTFRISEMRFKFPAKLTIVIHKDKIDKINLLDIKSARNGL

SEQ ID NO: 18073 - protein, 307 aa, Escherichia coli HVH 35 (4-2962667); identical to SEQ ID NO: 17878

SEQ ID NO: 18074 - protein, 169 aa, Escherichia coli HVH 35 (4-2962667); identical to SEQ ID NO: 17879

SEQ ID NO: 18075 - protein, 278 aa, Escherichia coli HVH 37 (4-2773848); identical to SEQ ID NO: 17310

SEQ ID NO: 18076 - protein, 307 aa, Escherichia coli HVH 37 (4-2773848); identical to SEQ ID NO: 17878

SEQ ID NO: 18077 - protein, 169 aa, Escherichia coli HVH 37 (4-2773848); identical to SEQ ID NO: 17879

SEQ ID NO: 18078 - protein, 278 aa, Escherichia coli HVH 40 (4-1219782); identical to SEQ ID NO: 17310

SEQ ID NO: 18079 - protein, 307 aa, Escherichia coli HVH 40 (4-1219782); identical to SEQ ID NO: 17878

SEQ ID NO: 18080 - protein, 169 aa, Escherichia coli HVH 40 (4-1219782); identical to SEQ ID NO: 17879

SEQ ID NO: 18081 - protein, 278 aa, Escherichia coli HVH 48 (4-2658593); identical to SEQ ID NO: 17310

SEQ ID NO: 18082 - protein, 307 aa, Escherichia coli HVH 48 (4-2658593); identical to SEQ ID NO: 17878

SEQ ID NO: 18083 - protein, 169 aa, Escherichia coli HVH 48 (4-2658593); identical to SEQ ID NO: 17879

SEQ ID NO: 18084 - protein, 278 aa, Escherichia coli HVH 51 (4-2172526); identical to SEQ ID NO: 17310

SEQ ID NO: 18085 - protein, 307 aa, Escherichia coli HVH 51 (4-2172526); identical to SEQ ID NO: 17878

SEQ ID NO: 18086 - protein, 169 aa, Escherichia coli HVH 51 (4-2172526); identical to SEQ ID NO: 17879

SEQ ID NO: 18087 - protein, 278 aa, Escherichia coli HVH 55 (4-2646161); identical to SEQ ID NO: 17310

SEQ ID NO: 18088 - protein, 307 aa, Escherichia coli HVH 55 (4-2646161); identical to SEQ ID NO: 17878

SEQ ID NO: 18089 - protein, 169 aa, Escherichia coli HVH 55 (4-2646161)
MSYRNKTYVAFASEDIKFYRLMEAWKANEKIDFNFFDAHDLFISRDTSKPETIKRNLRERMKNAKQVVLLGSGNTKRKGSDGVSFLAHEIDLIVEFNLPVVIANLDGDRTVDNNFIPKPLLDSEHYTVSVSFQPKIIKYALDNYCVNYYSSSNSGSYLYPTSVYTKLGL

SEQ ID NO: 18090 - protein, 278 aa, Escherichia coli HVH 56 (4-2153033); identical to SEQ ID NO: 17310

SEQ ID NO: 18091 - protein, 307 aa, Escherichia coli HVH 56 (4-2153033); identical to SEQ ID NO: 17878

SEQ ID NO: 18092 - protein, 169 aa, Escherichia coli HVH 56 (4-2153033); identical to SEQ ID NO: 17879

SEQ ID NO: 18093 - protein, 278 aa, Escherichia coli HVH 58 (4-2839709); identical to SEQ ID NO: 17310

SEQ ID NO: 18094 - protein, 307 aa, Escherichia coli HVH 58 (4-2839709); identical to SEQ ID NO: 17878

SEQ ID NO: 18095 - protein, 169 aa, Escherichia coli HVH 58 (4-2839709); identical to SEQ ID NO: 17879

SEQ ID NO: 18096 - protein, 278 aa, Escherichia coli HVH 61 (4-2736020); identical to SEQ ID NO: 17310

SEQ ID NO: 18097 - protein, 307 aa, Escherichia coli HVH 61 (4-2736020); identical to SEQ ID NO: 17878

SEQ ID NO: 18098 - protein, 169 aa, Escherichia coli HVH 61 (4-2736020); identical to SEQ ID NO: 17879

SEQ ID NO: 18099 - protein, 278 aa, Escherichia coli HVH 68 (4-0888028); identical to SEQ ID NO: 17310

SEQ ID NO: 18100 - protein, 307 aa, Escherichia coli HVH 68 (4-0888028); identical to SEQ ID NO: 17878

SEQ ID NO: 18101 - protein, 169 aa, Escherichia coli HVH 68 (4-0888028); identical to SEQ ID NO: 17879

SEQ ID NO: 18102 - protein, 278 aa, Escherichia coli HVH 70 (4-2963531); identical to SEQ ID NO: 17310

SEQ ID NO: 18103 - protein, 307 aa, Escherichia coli HVH 70 (4-2963531)
MIAYENIEFFICLVNVLGNNMYNILFFIFLSIAIPFLLFLVWKQHLKTKEIRSYLLKEGYNIIFNGEGNSYLAFNISNATFRAGNLTSNDYFQASISYIHDYRWEWKEVEAKKINNIFIIYISNIDFPSQKLFYRNNKSLAEIDWAKLQAIFHQPYEIQNDVMQDNNNTHYDFFISHAKEDKDTFVRPLVDELNRLGVIIWYDEQTLEVGDSLRRNIDLGLRKANYGIVILSHNFLNKKWTQYELDSLINRAVYDDNKIILPIWHNINAQEVSKYSHYLADKMALQTSLYSVKEIARELAEIAYRRR

SEQ ID NO: 18104 - protein, 169 aa, Escherichia coli HVH 70 (4-2963531); identical to SEQ ID NO: 17879

SEQ ID NO: 18105 - protein, 278 aa, Escherichia coli HVH 74 (4-1034782); identical to SEQ ID NO: 17310

SEQ ID NO: 18106 - protein, 307 aa, Escherichia coli HVH 74 (4-1034782); identical to SEQ ID NO: 17878

SEQ ID NO: 18107 - protein, 169 aa, Escherichia coli HVH 74 (4-1034782); identical to SEQ ID NO: 17879

SEQ ID NO: 18108 - protein, 278 aa, Escherichia coli HVH 76 (4-2538717); identical to SEQ ID NO: 17310

SEQ ID NO: 18109 - protein, 307 aa, Escherichia coli HVH 76 (4-2538717); identical to SEQ ID NO: 17878

SEQ ID NO: 18110 - protein, 169 aa, Escherichia coli HVH 76 (4-2538717); identical to SEQ ID NO: 17879

SEQ ID NO: 18111 - protein, 278 aa, Escherichia coli HVH 77 (4-2605759); identical to SEQ ID NO: 17310

SEQ ID NO: 18112 - protein, 307 aa, Escherichia coli HVH 77 (4-2605759); identical to SEQ ID NO: 17878

SEQ ID NO: 18113 - protein, 169 aa, Escherichia coli HVH 77 (4-2605759); identical to SEQ ID NO: 17879

SEQ ID NO: 18114 - protein, 278 aa, Escherichia coli HVH 78 (4-2735946); identical to SEQ ID NO: 17310

SEQ ID NO: 18115 - protein, 307 aa, Escherichia coli HVH 78 (4-2735946); identical to SEQ ID NO: 17878

SEQ ID NO: 18116 - protein, 169 aa, Escherichia coli HVH 78 (4-2735946); identical to SEQ ID NO: 17879

SEQ ID NO: 18117 - protein, 278 aa, Escherichia coli HVH 89 (4-5885604); identical to SEQ ID NO: 17310

SEQ ID NO: 18118 - protein, 307 aa, Escherichia coli HVH 89 (4-5885604); identical to SEQ ID NO: 17878

SEQ ID NO: 18119 - protein, 169 aa, Escherichia coli HVH 89 (4-5885604); identical to SEQ ID NO: 17879

SEQ ID NO: 18120 - protein, 278 aa, Escherichia coli HVH 92 (4-5930790); identical to SEQ ID NO: 17310

SEQ ID NO: 18121 - protein, 307 aa, Escherichia coli HVH 92 (4-5930790); identical to SEQ ID NO: 17878

SEQ ID NO: 18122 - protein, 169 aa, Escherichia coli HVH 92 (4-5930790); identical to SEQ ID NO: 17879

SEQ ID NO: 18123 - protein, 278 aa, Escherichia coli HVH 95 (4-6074464); identical to SEQ ID NO: 17310

SEQ ID NO: 18124 - protein, 307 aa, Escherichia coli HVH 95 (4-6074464); identical to SEQ ID NO: 17878

SEQ ID NO: 18125 - protein, 169 aa, Escherichia coli HVH 95 (4-6074464); identical to SEQ ID NO: 17879

SEQ ID NO: 18126 - protein, 278 aa, Escherichia coli HVH 96 (4-5934869); identical to SEQ ID NO: 17310

SEQ ID NO: 18127 - protein, 307 aa, Escherichia coli HVH 96 (4-5934869); identical to SEQ ID NO: 17878

SEQ ID NO: 18128 - protein, 169 aa, Escherichia coli HVH 96 (4-5934869); identical to SEQ ID NO: 17879

SEQ ID NO: 18129 - protein, 278 aa, Escherichia coli HVH 100 (4-2850729); identical to SEQ ID NO: 17310

SEQ ID NO: 18130 - protein, 307 aa, Escherichia coli HVH 100 (4-2850729); identical to SEQ ID NO: 17878

SEQ ID NO: 18131 - protein, 169 aa, Escherichia coli HVH 100 (4-2850729); identical to SEQ ID NO: 17879

SEQ ID NO: 18132 - protein, 278 aa, Escherichia coli HVH 103 (4-5904188); identical to SEQ ID NO: 17310

SEQ ID NO: 18133 - protein, 307 aa, Escherichia coli HVH 103 (4-5904188); identical to SEQ ID NO: 17878

SEQ ID NO: 18134 - protein, 169 aa, Escherichia coli HVH 103 (4-5904188); identical to SEQ ID NO: 17879

SEQ ID NO: 18135 - protein, 278 aa, Escherichia coli HVH 109 (4-6977162); identical to SEQ ID NO: 17310

SEQ ID NO: 18136 - protein, 307 aa, Escherichia coli HVH 109 (4-6977162); identical to SEQ ID NO: 17878

SEQ ID NO: 18137 - protein, 169 aa, Escherichia coli HVH 109 (4-6977162); identical to SEQ ID NO: 17879

SEQ ID NO: 18138 - protein, 278 aa, Escherichia coli HVH 111 (4-7039018); identical to SEQ ID NO: 17310

SEQ ID NO: 18139 - protein, 307 aa, Escherichia coli HVH 111 (4-7039018); identical to SEQ ID NO: 17878

SEQ ID NO: 18140 - protein, 169 aa, Escherichia coli HVH 111 (4-7039018); identical to SEQ ID NO: 17879

SEQ ID NO: 18141 - protein, 278 aa, Escherichia coli HVH 112 (4-5987253); identical to SEQ ID NO: 17310

SEQ ID NO: 18142 - protein, 307 aa, Escherichia coli HVH 112 (4-5987253); identical to SEQ ID NO: 17878

SEQ ID NO: 18143 - protein, 169 aa, Escherichia coli HVH 112 (4-5987253); identical to SEQ ID NO: 17879

SEQ ID NO: 18144 - protein, 278 aa, Escherichia coli HVH 114 (4-7037740); identical to SEQ ID NO: 17310

SEQ ID NO: 18145 - protein, 307 aa, Escherichia coli HVH 114 (4-7037740); identical to SEQ ID NO: 17878

SEQ ID NO: 18146 - protein, 169 aa, Escherichia coli HVH 114 (4-7037740); identical to SEQ ID NO: 17879

SEQ ID NO: 18147 - protein, 278 aa, Escherichia coli HVH 116 (4-6879942); identical to SEQ ID NO: 17310

SEQ ID NO: 18148 - protein, 307 aa, Escherichia coli HVH 116 (4-6879942); identical to SEQ ID NO: 17878

SEQ ID NO: 18149 - protein, 169 aa, Escherichia coli HVH 116 (4-6879942); identical to SEQ ID NO: 17879

SEQ ID NO: 18150 - protein, 278 aa, Escherichia coli HVH 117 (4-6857191); identical to SEQ ID NO: 17310

SEQ ID NO: 18151 - protein, 307 aa, Escherichia coli HVH 117 (4-6857191); identical to SEQ ID NO: 17878

SEQ ID NO: 18152 - protein, 169 aa, Escherichia coli HVH 117 (4-6857191); identical to SEQ ID NO: 17879

SEQ ID NO: 18153 - protein, 278 aa, Escherichia coli HVH 118 (4-7345399); identical to SEQ ID NO: 17310

SEQ ID NO: 18154 - protein, 307 aa, Escherichia coli HVH 118 (4-7345399); identical to SEQ ID NO: 17878

SEQ ID NO: 18155 - protein, 169 aa, Escherichia coli HVH 118 (4-7345399); identical to SEQ ID NO: 17879

SEQ ID NO: 18156 - protein, 278 aa, Escherichia coli HVH 120 (4-6978681); identical to SEQ ID NO: 17310

SEQ ID NO: 18157 - protein, 307 aa, Escherichia coli HVH 120 (4-6978681); identical to SEQ ID NO: 17878

SEQ ID NO: 18158 - protein, 169 aa, Escherichia coli HVH 120 (4-6978681); identical to SEQ ID NO: 17879

SEQ ID NO: 18159 - protein, 278 aa, Escherichia coli HVH 132 (4-6876862); identical to SEQ ID NO: 17310

SEQ ID NO: 18160 - protein, 307 aa, Escherichia coli HVH 132 (4-6876862); identical to SEQ ID NO: 17878

SEQ ID NO: 18161 - protein, 169 aa, Escherichia coli HVH 132 (4-6876862); identical to SEQ ID NO: 17879

SEQ ID NO: 18162 - protein, 278 aa, Escherichia coli HVH 137 (4-2124971); identical to SEQ ID NO: 17310

SEQ ID NO: 18163 - protein, 307 aa, Escherichia coli HVH 137 (4-2124971); identical to SEQ ID NO: 17878

SEQ ID NO: 18164 - protein, 169 aa, Escherichia coli HVH 137 (4-2124971); identical to SEQ ID NO: 17879

SEQ ID NO: 18165 - protein, 278 aa, Escherichia coli HVH 138 (4-6066704); identical to SEQ ID NO: 17310

SEQ ID NO: 18166 - protein, 307 aa, Escherichia coli HVH 138 (4-6066704); identical to SEQ ID NO: 17878

SEQ ID NO: 18167 - protein, 169 aa, Escherichia coli HVH 138 (4-6066704); identical to SEQ ID NO: 17879

SEQ ID NO: 18168 - protein, 278 aa, Escherichia coli HVH 142 (4-5627451); identical to SEQ ID NO: 17310

SEQ ID NO: 18169 - protein, 307 aa, Escherichia coli HVH 142 (4-5627451); identical to SEQ ID NO: 17878

SEQ ID NO: 18170 - protein, 169 aa, Escherichia coli HVH 142 (4-5627451); identical to SEQ ID NO: 17879

SEQ ID NO: 18171 - protein, 278 aa, Escherichia coli HVH 143 (4-5674999); identical to SEQ ID NO: 17310

SEQ ID NO: 18172 - protein, 307 aa, Escherichia coli HVH 143 (4-5674999); identical to SEQ ID NO: 17878

SEQ ID NO: 18173 - protein, 169 aa, Escherichia coli HVH 143 (4-5674999); identical to SEQ ID NO: 17879

SEQ ID NO: 18174 - protein, 278 aa, Escherichia coli HVH 144 (4-4451937); identical to SEQ ID NO: 17310

SEQ ID NO: 18175 - protein, 307 aa, Escherichia coli HVH 144 (4-4451937); identical to SEQ ID NO: 17878

SEQ ID NO: 18176 - protein, 169 aa, Escherichia coli HVH 144 (4-4451937); identical to SEQ ID NO: 17879

SEQ ID NO: 18177 - protein, 278 aa, Escherichia coli HVH 149 (4-4451880); identical to SEQ ID NO: 17310

SEQ ID NO: 18178 - protein, 307 aa, Escherichia coli HVH 149 (4-4451880); identical to SEQ ID NO: 17878

SEQ ID NO: 18179 - protein, 169 aa, Escherichia coli HVH 149 (4-4451880); identical to SEQ ID NO: 17879

SEQ ID NO: 18180 - protein, 278 aa, Escherichia coli HVH 157 (4-3406229); identical to SEQ ID NO: 17310

SEQ ID NO: 18181 - protein, 307 aa, Escherichia coli HVH 157 (4-3406229); identical to SEQ ID NO: 17878

SEQ ID NO: 18182 - protein, 169 aa, Escherichia coli HVH 157 (4-3406229); identical to SEQ ID NO: 17879

SEQ ID NO: 18183 - protein, 278 aa, Escherichia coli HVH 158 (4-3224287); identical to SEQ ID NO: 17310

SEQ ID NO: 18184 - protein, 307 aa, Escherichia coli HVH 158 (4-3224287); identical to SEQ ID NO: 18103

SEQ ID NO: 18185 - protein, 169 aa, Escherichia coli HVH 158 (4-3224287); identical to SEQ ID NO: 17879

SEQ ID NO: 18186 - protein, 278 aa, Escherichia coli HVH 159 (4-5818141); identical to SEQ ID NO: 17310

SEQ ID NO: 18187 - protein, 307 aa, Escherichia coli HVH 159 (4-5818141); identical to SEQ ID NO: 17878

SEQ ID NO: 18188 - protein, 169 aa, Escherichia coli HVH 159 (4-5818141); identical to SEQ ID NO: 17879

SEQ ID NO: 18189 - protein, 278 aa, Escherichia coli HVH 160 (4-5695937); identical to SEQ ID NO: 17310

SEQ ID NO: 18190 - protein, 307 aa, Escherichia coli HVH 160 (4-5695937); identical to SEQ ID NO: 17878

SEQ ID NO: 18191 - protein, 169 aa, Escherichia coli HVH 160 (4-5695937); identical to SEQ ID NO: 17879

SEQ ID NO: 18192 - protein, 278 aa, Escherichia coli HVH 161 (4-3119890); identical to SEQ ID NO: 17310

SEQ ID NO: 18193 - protein, 307 aa, Escherichia coli HVH 161 (4-3119890); identical to SEQ ID NO: 17878

SEQ ID NO: 18194 - protein, 169 aa, Escherichia coli HVH 161 (4-3119890); identical to SEQ ID NO: 17879

SEQ ID NO: 18195 - protein, 278 aa, Escherichia coli HVH 169 (4-1075578); identical to SEQ ID NO: 17310

SEQ ID NO: 18196 - protein, 307 aa, Escherichia coli HVH 169 (4-1075578); identical to SEQ ID NO: 17878

SEQ ID NO: 18197 - protein, 169 aa, Escherichia coli HVH 169 (4-1075578); identical to SEQ ID NO: 17879

SEQ ID NO: 18198 - protein, 278 aa, Escherichia coli HVH 171 (4-3191958)
MAKVNFFDKRILKKFSDYTSTISTIFSLFLIFVDIPTENKLTLGIIFLIILFLLYFGIWFKSNNLSEINLDVEGSIVTVKAGDLFRQDGFKVIAFNEYFDTQVDDVIISHNSLNGLYIDNYLAGSVSDLDHRISNHQFEEDELLEVNHKRKVGKTQKYSLGTIFVNNDYLLTAFSKFDDKNRAFLTMPNYLAFLINFWDKVNRIYAQKSVSVPIFGSGITRIKEHKNISDEDLLKIMLWTFRISEMRFKFPAKLTIVIHKDKIDKINLLDIKSARNGL

SEQ ID NO: 18199 - protein, 307 aa, Escherichia coli HVH 171 (4-3191958); identical to SEQ ID NO: 17878

SEQ ID NO: 18200 - protein, 169 aa, Escherichia coli HVH 171 (4-3191958); identical to SEQ ID NO: 17879

SEQ ID NO: 18201 - protein, 278 aa, Escherichia coli HVH 172 (4-3248542); identical to SEQ ID NO: 17310

SEQ ID NO: 18202 - protein, 307 aa, Escherichia coli HVH 172 (4-3248542); identical to SEQ ID NO: 17878

SEQ ID NO: 18203 - protein, 169 aa, Escherichia coli HVH 172 (4-3248542); identical to SEQ ID NO: 17879

SEQ ID NO: 18204 - protein, 278 aa, Escherichia coli HVH 175 (4-3405184); identical to SEQ ID NO: 17310

SEQ ID NO: 18205 - protein, 307 aa, Escherichia coli HVH 175 (4-3405184); identical to SEQ ID NO: 18103

SEQ ID NO: 18206 - protein, 169 aa, Escherichia coli HVH 175 (4-3405184); identical to SEQ ID NO: 17879

SEQ ID NO: 18207 - protein, 278 aa, Escherichia coli HVH 184 (4-3343286); identical to SEQ ID NO: 17310

SEQ ID NO: 18208 - protein, 307 aa, Escherichia coli HVH 184 (4-3343286); identical to SEQ ID NO: 18103

SEQ ID NO: 18209 - protein, 169 aa, Escherichia coli HVH 184 (4-3343286); identical to SEQ ID NO: 17879

SEQ ID NO: 18210 - protein, 278 aa, Escherichia coli HVH 185 (4-2876639); identical to SEQ ID NO: 17310

SEQ ID NO: 18211 - protein, 307 aa, Escherichia coli HVH 185 (4-2876639); identical to SEQ ID NO: 17878

SEQ ID NO: 18212 - protein, 169 aa, Escherichia coli HVH 185 (4-2876639); identical to SEQ ID NO: 17879

SEQ ID NO: 18213 - protein, 278 aa, Escherichia coli HVH 192 (4-3054470); identical to SEQ ID NO: 17310

SEQ ID NO: 18214 - protein, 307 aa, Escherichia coli HVH 192 (4-3054470); identical to SEQ ID NO: 17878

SEQ ID NO: 18215 - protein, 169 aa, Escherichia coli HVH 192 (4-3054470); identical to SEQ ID NO: 17879

SEQ ID NO: 18216 - protein, 249 aa, Escherichia coli HVH 194 (4-2356805)
MIFVDIPTENKLTLGIIFLIILFLLYFGIWFKSNNLSEINLDVEGSIVTVKAGDLFRQDGFKVIAFNEYFDTQVDDVIISHNSLNGLYIDNYLAGSVSDLDHRISNHQFEEDELLEVNHKRKVGKTQKYSLGTIFVNNDYLLTAFSKFDDKNRAFLTMPDYLAFLINFWDKVNRIYAQKSVSVPIFGSGITRIKEHKNISDEDLLKIMLWTFRISEMRFKFPAKLTIVIHKDKIDKINLLDIKSARNGL

SEQ ID NO: 18217 - protein, 307 aa, Escherichia coli HVH 194 (4-2356805); identical to SEQ ID NO: 18103

SEQ ID NO: 18218 - protein, 169 aa, Escherichia coli HVH 194 (4-2356805); identical to SEQ ID NO: 17879

SEQ ID NO: 18219 - protein, 278 aa, Escherichia coli HVH 197 (4-4466217); identical to SEQ ID NO: 17310

SEQ ID NO: 18220 - protein, 307 aa, Escherichia coli HVH 197 (4-4466217); identical to SEQ ID NO: 17878

SEQ ID NO: 18221 - protein, 169 aa, Escherichia coli HVH 197 (4-4466217)
MSYRNKTYVAFASEDIKFYRLMEAWKANEKIDFNFFDAHDLFISRDTSKPETIKRNLRERMKNAKQVVLLGSGNTKRKGSDGVSFLAHEIDLIVEFNLPVVIANLDGDRTVDKNFIPKPLLDSEHYTVSVSFQPKIIKYALDNYCVNYYLSSNSGSYLYPTSVYTKLGL

SEQ ID NO: 18222 - protein, 278 aa, Escherichia coli HVH 199 (4-5670322); identical to SEQ ID NO: 17310

SEQ ID NO: 18223 - protein, 307 aa, Escherichia coli HVH 199 (4-5670322); identical to SEQ ID NO: 17878

SEQ ID NO: 18224 - protein, 169 aa, Escherichia coli HVH 199 (4-5670322); identical to SEQ ID NO: 17879

SEQ ID NO: 18225 - protein, 278 aa, Escherichia coli HVH 210 (4-3042480); identical to SEQ ID NO: 17310

SEQ ID NO: 18226 - protein, 307 aa, Escherichia coli HVH 210 (4-3042480); identical to SEQ ID NO: 17878

SEQ ID NO: 18227 - protein, 169 aa, Escherichia coli HVH 210 (4-3042480); identical to SEQ ID NO: 17879

SEQ ID NO: 18228 - protein, 278 aa, Escherichia coli HVH 211 (4-3041891); identical to SEQ ID NO: 17310

SEQ ID NO: 18229 - protein, 307 aa, Escherichia coli HVH 211 (4-3041891); identical to SEQ ID NO: 17878

SEQ ID NO: 18230 - protein, 169 aa, Escherichia coli HVH 211 (4-3041891); identical to SEQ ID NO: 17879

SEQ ID NO: 18231 - protein, 278 aa, Escherichia coli HVH 212 (3-9305343); identical to SEQ ID NO: 17310

SEQ ID NO: 18232 - protein, 307 aa, Escherichia coli HVH 212 (3-9305343); identical to SEQ ID NO: 17878

SEQ ID NO: 18233 - protein, 169 aa, Escherichia coli HVH 212 (3-9305343); identical to SEQ ID NO: 17879

SEQ ID NO: 18234 - protein, 278 aa, Escherichia coli HVH 216 (4-3042952); identical to SEQ ID NO: 17310

SEQ ID NO: 18235 - protein, 307 aa, Escherichia coli HVH 216 (4-3042952); identical to SEQ ID NO: 17878

SEQ ID NO: 18236 - protein, 169 aa, Escherichia coli HVH 216 (4-3042952); identical to SEQ ID NO: 17879

SEQ ID NO: 18237 - protein, 278 aa, Escherichia coli HVH 218 (4-4500903); identical to SEQ ID NO: 17310

SEQ ID NO: 18238 - protein, 307 aa, Escherichia coli HVH 218 (4-4500903); identical to SEQ ID NO: 17878

SEQ ID NO: 18239 - protein, 169 aa, Escherichia coli HVH 218 (4-4500903); identical to SEQ ID NO: 17879

SEQ ID NO: 18240 - protein, 278 aa, Escherichia coli HVH 220 (4-5876842); identical to SEQ ID NO: 17310

SEQ ID NO: 18241 - protein, 307 aa, Escherichia coli HVH 220 (4-5876842); identical to SEQ ID NO: 17878

SEQ ID NO: 18242 - protein, 169 aa, Escherichia coli HVH 220 (4-5876842); identical to SEQ ID NO: 17879

SEQ ID NO: 18243 - protein, 278 aa, Escherichia coli HVH 227 (4-2277670); identical to SEQ ID NO: 17310

SEQ ID NO: 18244 - protein, 307 aa, Escherichia coli HVH 227 (4-2277670); identical to SEQ ID NO: 17878

SEQ ID NO: 18245 - protein, 169 aa, Escherichia coli HVH 227 (4-2277670); identical to SEQ ID NO: 17879

SEQ ID NO: 18246 - protein, 278 aa, Escherichia coli HVH 228 (4-7787030); identical to SEQ ID NO: 17310

SEQ ID NO: 18247 - protein, 307 aa, Escherichia coli HVH 228 (4-7787030); identical to SEQ ID NO: 17878

SEQ ID NO: 18248 - protein, 169 aa, Escherichia coli HVH 228 (4-7787030); identical to SEQ ID NO: 17879

SEQ ID NO: 18249 - protein, 278 aa, Escherichia coli KOEGE 10 (25a)
MAKVNFFDKRILKKFSDYTSTISTIFSLFLIFVDIPTENKLTLGIIFLIILFLLYFGIWFKSNNLSEINLDVDGSIVTVKAGDLFRQDGFKVIAFNEYFDTQVDDVIISHNSLNGLYIDNYLAGSVSDLDHRISNHQFEEDELLEVNHKRKVGKTQKYSLGTIFVNNDYLLTAFSKFDDKNRAFLTMPDYLAFLINFWDKVNRIYAQKSVSVPIFGSGITRIKEHKNISDEDLLKIMLWTFRISEMRFKFPAKLTIVIHKDKIDKINLLDIKSARNGL

SEQ ID NO: 18250 - protein, 307 aa, Escherichia coli KOEGE 10 (25a); identical to SEQ ID NO: 18103

SEQ ID NO: 18251 - protein, 169 aa, Escherichia coli KOEGE 10 (25a); identical to SEQ ID NO: 17879

SEQ ID NO: 18252 - protein, 278 aa, Escherichia coli KOEGE 30 (63a); identical to SEQ ID NO: 17310

SEQ ID NO: 18253 - protein, 307 aa, Escherichia coli KOEGE 30 (63a); identical to SEQ ID NO: 17878

SEQ ID NO: 18254 - protein, 169 aa, Escherichia coli KOEGE 30 (63a); identical to SEQ ID NO: 17879

SEQ ID NO: 18255 - protein, 278 aa, Escherichia coli KOEGE 58 (171a); identical to SEQ ID NO: 17310

SEQ ID NO: 18256 - protein, 307 aa, Escherichia coli KOEGE 58 (171a); identical to SEQ ID NO: 17878

SEQ ID NO: 18257 - protein, 169 aa, Escherichia coli KOEGE 58 (171a); identical to SEQ ID NO: 17879

SEQ ID NO: 18258 - protein, 278 aa, Escherichia coli KOEGE 70 (185a); identical to SEQ ID NO: 17310

SEQ ID NO: 18259 - protein, 307 aa, Escherichia coli KOEGE 70 (185a); identical to SEQ ID NO: 17878

SEQ ID NO: 18260 - protein, 169 aa, Escherichia coli KOEGE 70 (185a); identical to SEQ ID NO: 17879

SEQ ID NO: 18261 - protein, 278 aa, Escherichia coli UMEA 3053-1; identical to SEQ ID NO: 17310

SEQ ID NO: 18262 - protein, 307 aa, Escherichia coli UMEA 3053-1; identical to SEQ ID NO: 17878

SEQ ID NO: 18263 - protein, 169 aa, Escherichia coli UMEA 3053-1; identical to SEQ ID NO: 18089

SEQ ID NO: 18264 - protein, 278 aa, Escherichia coli UMEA 3113-1; identical to SEQ ID NO: 17310

SEQ ID NO: 18265 - protein, 307 aa, Escherichia coli UMEA 3113-1; identical to SEQ ID NO: 17878

SEQ ID NO: 18266 - protein, 169 aa, Escherichia coli UMEA 3113-1; identical to SEQ ID NO: 17879

SEQ ID NO: 18267 - protein, 278 aa, Escherichia coli UMEA 3121-1; identical to SEQ ID NO: 17310

SEQ ID NO: 18268 - protein, 307 aa, Escherichia coli UMEA 3121-1; identical to SEQ ID NO: 17878

SEQ ID NO: 18269 - protein, 169 aa, Escherichia coli UMEA 3121-1; identical to SEQ ID NO: 17879

SEQ ID NO: 18270 - protein, 278 aa, Escherichia coli UMEA 3122-1; identical to SEQ ID NO: 17310

SEQ ID NO: 18271 - protein, 307 aa, Escherichia coli UMEA 3122-1; identical to SEQ ID NO: 17878

SEQ ID NO: 18272 - protein, 169 aa, Escherichia coli UMEA 3122-1; identical to SEQ ID NO: 17879

SEQ ID NO: 18273 - protein, 278 aa, Escherichia coli UMEA 3159-1; identical to SEQ ID NO: 17310

SEQ ID NO: 18274 - protein, 307 aa, Escherichia coli UMEA 3159-1; identical to SEQ ID NO: 17878

SEQ ID NO: 18275 - protein, 169 aa, Escherichia coli UMEA 3159-1; identical to SEQ ID NO: 17879

SEQ ID NO: 18276 - protein, 278 aa, Escherichia coli UMEA 3172-1; identical to SEQ ID NO: 17310

SEQ ID NO: 18277 - protein, 307 aa, Escherichia coli UMEA 3172-1; identical to SEQ ID NO: 17878

SEQ ID NO: 18278 - protein, 169 aa, Escherichia coli UMEA 3172-1; identical to SEQ ID NO: 17879

SEQ ID NO: 18279 - protein, 278 aa, Escherichia coli UMEA 3175-1; identical to SEQ ID NO: 17310

SEQ ID NO: 18280 - protein, 307 aa, Escherichia coli UMEA 3175-1; identical to SEQ ID NO: 17878

SEQ ID NO: 18281 - protein, 169 aa, Escherichia coli UMEA 3175-1; identical to SEQ ID NO: 17879

SEQ ID NO: 18282 - protein, 278 aa, Escherichia coli UMEA 3185-1; identical to SEQ ID NO: 17310

SEQ ID NO: 18283 - protein, 307 aa, Escherichia coli UMEA 3185-1; identical to SEQ ID NO: 17878

SEQ ID NO: 18284 - protein, 169 aa, Escherichia coli UMEA 3185-1; identical to SEQ ID NO: 17879

SEQ ID NO: 18285 - protein, 278 aa, Escherichia coli UMEA 3193-1; identical to SEQ ID NO: 17310

SEQ ID NO: 18286 - protein, 307 aa, Escherichia coli UMEA 3193-1; identical to SEQ ID NO: 17878

SEQ ID NO: 18287 - protein, 169 aa, Escherichia coli UMEA 3193-1; identical to SEQ ID NO: 17879

SEQ ID NO: 18288 - protein, 278 aa, Escherichia coli UMEA 3216-1; identical to SEQ ID NO: 17310

SEQ ID NO: 18289 - protein, 307 aa, Escherichia coli UMEA 3216-1; identical to SEQ ID NO: 17878

SEQ ID NO: 18290 - protein, 169 aa, Escherichia coli UMEA 3216-1; identical to SEQ ID NO: 17879

SEQ ID NO: 18291 - protein, 278 aa, Escherichia coli UMEA 3220-1; identical to SEQ ID NO: 17310

SEQ ID NO: 18292 - protein, 307 aa, Escherichia coli UMEA 3220-1; identical to SEQ ID NO: 17878

SEQ ID NO: 18293 - protein, 169 aa, Escherichia coli UMEA 3220-1; identical to SEQ ID NO: 17879

SEQ ID NO: 18294 - protein, 278 aa, Escherichia coli UMEA 3222-1; identical to SEQ ID NO: 17310

SEQ ID NO: 18295 - protein, 307 aa, Escherichia coli UMEA 3222-1; identical to SEQ ID NO: 17878

SEQ ID NO: 18296 - protein, 169 aa, Escherichia coli UMEA 3222-1; identical to SEQ ID NO: 17879

SEQ ID NO: 18297 - protein, 278 aa, Escherichia coli UMEA 3244-1; identical to SEQ ID NO: 17310

SEQ ID NO: 18298 - protein, 307 aa, Escherichia coli UMEA 3244-1; identical to SEQ ID NO: 17878

SEQ ID NO: 18299 - protein, 169 aa, Escherichia coli UMEA 3244-1; identical to SEQ ID NO: 17879

SEQ ID NO: 18300 - protein, 278 aa, Escherichia coli UMEA 3257-1; identical to SEQ ID NO: 17310

SEQ ID NO: 18301 - protein, 307 aa, Escherichia coli UMEA 3257-1; identical to SEQ ID NO: 17878

SEQ ID NO: 18302 - protein, 169 aa, Escherichia coli UMEA 3257-1; identical to SEQ ID NO: 17879

SEQ ID NO: 18303 - protein, 278 aa, Escherichia coli UMEA 3391-1; identical to SEQ ID NO: 17310

SEQ ID NO: 18304 - protein, 307 aa, Escherichia coli UMEA 3391-1; identical to SEQ ID NO: 17878

SEQ ID NO: 18305 - protein, 169 aa, Escherichia coli UMEA 3391-1; identical to SEQ ID NO: 17879

SEQ ID NO: 18306 - protein, 278 aa, Escherichia coli UMEA 3585-1; identical to SEQ ID NO: 17310

SEQ ID NO: 18307 - protein, 307 aa, Escherichia coli UMEA 3585-1; identical to SEQ ID NO: 17878

SEQ ID NO: 18308 - protein, 169 aa, Escherichia coli UMEA 3585-1; identical to SEQ ID NO: 17879

SEQ ID NO: 18309 - protein, 278 aa, Escherichia coli UMEA 3617-1; identical to SEQ ID NO: 17310

SEQ ID NO: 18310 - protein, 307 aa, Escherichia coli UMEA 3617-1; identical to SEQ ID NO: 17878

SEQ ID NO: 18311 - protein, 169 aa, Escherichia coli UMEA 3617-1; identical to SEQ ID NO: 17879

SEQ ID NO: 18312 - protein, 278 aa, Escherichia coli UMEA 3707-1; identical to SEQ ID NO: 17310

SEQ ID NO: 18313 - protein, 307 aa, Escherichia coli UMEA 3707-1; identical to SEQ ID NO: 17878

SEQ ID NO: 18314 - protein, 169 aa, Escherichia coli UMEA 3707-1; identical to SEQ ID NO: 17879

SEQ ID NO: 18315 - protein, 278 aa, Escherichia coli UMEA 3955-1
MAKVNFFDKRILKKFSDYTSTISTIFSLFLIFVDIPTENKLTLGIIFLIILFLLYFGIWFKSNNLSEINLDVEGSIVTVKAGDLFRQDGFKVIAFNEYFDTQVDDVIISHNSLNGLYIDNYLAGSVSDLDHRISNHQFEEDELLEVNHKRKVGKTQKYSLGTIFVNNDYLLTAFSKFDDKNRAFLTMPDYLAFLINFGDKVNRIYAQKSVSVPIFGSGITRIKEHKNISDEDLLKIMLWTFRISEMRFKFPAKLTIVIHKDKIDKINLLDIKSARNGL

SEQ ID NO: 18316 - protein, 307 aa, Escherichia coli UMEA 3955-1; identical to SEQ ID NO: 17878

SEQ ID NO: 18317 - protein, 169 aa, Escherichia coli UMEA 3955-1; identical to SEQ ID NO: 17879

SEQ ID NO: 18318 - protein, 278 aa, Escherichia coli UMEA 4075-1; identical to SEQ ID NO: 17310

SEQ ID NO: 18319 - protein, 307 aa, Escherichia coli UMEA 4075-1; identical to SEQ ID NO: 17878

SEQ ID NO: 18320 - protein, 169 aa, Escherichia coli UMEA 4075-1; identical to SEQ ID NO: 17879

SEQ ID NO: 18321 - protein, 278 aa, Escherichia coli UMEA 3652-1; identical to SEQ ID NO: 17310

SEQ ID NO: 18322 - protein, 307 aa, Escherichia coli UMEA 3652-1; identical to SEQ ID NO: 17878

SEQ ID NO: 18323 - protein, 169 aa, Escherichia coli UMEA 3652-1; identical to SEQ ID NO: 17879

SEQ ID NO: 18324 - protein, 278 aa, Escherichia coli UMEA 3426-1; identical to SEQ ID NO: 17310

SEQ ID NO: 18325 - protein, 307 aa, Escherichia coli UMEA 3426-1; identical to SEQ ID NO: 17878

SEQ ID NO: 18326 - protein, 169 aa, Escherichia coli UMEA 3426-1; identical to SEQ ID NO: 17879

SEQ ID NO: 18327 - protein, 278 aa, Escherichia coli UMEA 3290-1; identical to SEQ ID NO: 17310

SEQ ID NO: 18328 - protein, 307 aa, Escherichia coli UMEA 3290-1; identical to SEQ ID NO: 17878

SEQ ID NO: 18329 - protein, 169 aa, Escherichia coli UMEA 3290-1; identical to SEQ ID NO: 17879

SEQ ID NO: 18330 - protein, 278 aa, Escherichia coli UMEA 3693-1; identical to SEQ ID NO: 17310

SEQ ID NO: 18331 - protein, 307 aa, Escherichia coli UMEA 3693-1; identical to SEQ ID NO: 17878

SEQ ID NO: 18332 - protein, 169 aa, Escherichia coli UMEA 3693-1; identical to SEQ ID NO: 17879

SEQ ID NO: 18333 - protein, 278 aa, Escherichia coli 907391; identical to SEQ ID NO: 17310

SEQ ID NO: 18334 - protein, 307 aa, Escherichia coli 907391; identical to SEQ ID NO: 17878

SEQ ID NO: 18335 - protein, 169 aa, Escherichia coli 907391; identical to SEQ ID NO: 17879

SEQ ID NO: 18336 - protein, 278 aa, Escherichia coli 907892; identical to SEQ ID NO: 17310

SEQ ID NO: 18337 - protein, 81 aa, Escherichia coli 907892
WLSGDSGGQSNKKWTQYELDSLINRAVYDDNKIILPIWHNINAQEVSKYSHYLADKMALQTSLYSVKEIARELAEIAYRRR

SEQ ID NO: 18338 - protein, 169 aa, Escherichia coli 907892; identical to SEQ ID NO: 17879

SEQ ID NO: 18339 - protein, 278 aa, Escherichia coli 910096-2; identical to SEQ ID NO: 17310

SEQ ID NO: 18340 - protein, 307 aa, Escherichia coli 910096-2; identical to SEQ ID NO: 17878

SEQ ID NO: 18341 - protein, 169 aa, Escherichia coli 910096-2; identical to SEQ ID NO: 17879

SEQ ID NO: 18342 - protein, 278 aa, Escherichia coli A25922R; identical to SEQ ID NO: 17310

SEQ ID NO: 18343 - protein, 307 aa, Escherichia coli A25922R; identical to SEQ ID NO: 17878

SEQ ID NO: 18344 - protein, 169 aa, Escherichia coli A25922R; identical to SEQ ID NO: 17879

SEQ ID NO: 18345 - protein, 278 aa, Escherichia coli A35218R; identical to SEQ ID NO: 17310

SEQ ID NO: 18346 - protein, 307 aa, Escherichia coli A35218R; identical to SEQ ID NO: 17878

SEQ ID NO: 18347 - protein, 169 aa, Escherichia coli A35218R; identical to SEQ ID NO: 17879

SEQ ID NO: 18348 - protein, 278 aa, Escherichia coli HVH 86 (4-7026218); identical to SEQ ID NO: 17310

SEQ ID NO: 18349 - protein, 307 aa, Escherichia coli HVH 86 (4-7026218); identical to SEQ ID NO: 17878

SEQ ID NO: 18350 - protein, 169 aa, Escherichia coli HVH 86 (4-7026218); identical to SEQ ID NO: 17879

SEQ ID NO: 18351 - protein, 278 aa, Escherichia coli HVH 86 (4-7026218); identical to SEQ ID NO: 17310

SEQ ID NO: 18352 - protein, 307 aa, Escherichia coli HVH 86 (4-7026218); identical to SEQ ID NO: 17878

SEQ ID NO: 18353 - protein, 169 aa, Escherichia coli HVH 86 (4-7026218); identical to SEQ ID NO: 17879

SEQ ID NO: 18354 - protein, 278 aa, Escherichia coli LAU-EC6; identical to SEQ ID NO: 17310

SEQ ID NO: 18355 - protein, 307 aa, Escherichia coli LAU-EC6; identical to SEQ ID NO: 17878

SEQ ID NO: 18356 - protein, 169 aa, Escherichia coli LAU-EC6; identical to SEQ ID NO: 17879

SEQ ID NO: 18357 - protein, 278 aa, Escherichia coli UMEA 3489-1; identical to SEQ ID NO: 17310

SEQ ID NO: 18358 - protein, 307 aa, Escherichia coli UMEA 3489-1; identical to SEQ ID NO: 17878

SEQ ID NO: 18359 - protein, 169 aa, Escherichia coli UMEA 3489-1; identical to SEQ ID NO: 17879

SEQ ID NO: 18360 - protein, 278 aa, Escherichia coli BIDMC 83; identical to SEQ ID NO: 17310

SEQ ID NO: 18361 - protein, 307 aa, Escherichia coli BIDMC 83; identical to SEQ ID NO: 17878

SEQ ID NO: 18362 - protein, 169 aa, Escherichia coli BIDMC 83; identical to SEQ ID NO: 17879

SEQ ID NO: 18363 - protein, 278 aa, Escherichia coli BIDMC 65; identical to SEQ ID NO: 17310

SEQ ID NO: 18364 - protein, 307 aa, Escherichia coli BIDMC 65; identical to SEQ ID NO: 17878

SEQ ID NO: 18365 - protein, 169 aa, Escherichia coli BIDMC 65; identical to SEQ ID NO: 17879

SEQ ID NO: 18366 - protein, 278 aa, Escherichia coli; identical to SEQ ID NO: 17310

SEQ ID NO: 18367 - protein, 307 aa, Escherichia coli; identical to SEQ ID NO: 17878

SEQ ID NO: 18368 - protein, 169 aa, Escherichia coli; identical to SEQ ID NO: 17879

SEQ ID NO: 18369 - protein, 278 aa, Escherichia coli Nissle 1917; identical to SEQ ID NO: 17310

SEQ ID NO: 18370 - protein, 307 aa, Escherichia coli Nissle 1917; identical to SEQ ID NO: 17878

SEQ ID NO: 18371 - protein, 169 aa, Escherichia coli Nissle 1917; identical to SEQ ID NO: 17879

SEQ ID NO: 18372 - protein, 278 aa, Escherichia coli ATCC 25922; identical to SEQ ID NO: 17310

SEQ ID NO: 18373 - protein, 307 aa, Escherichia coli ATCC 25922; identical to SEQ ID NO: 17878

SEQ ID NO: 18374 - protein, 169 aa, Escherichia coli ATCC 25922; identical to SEQ ID NO: 17879

SEQ ID NO: 18375 - protein, 278 aa, Escherichia coli; identical to SEQ ID NO: 17310

SEQ ID NO: 18376 - protein, 307 aa, Escherichia coli; identical to SEQ ID NO: 17878

SEQ ID NO: 18377 - protein, 169 aa, Escherichia coli; identical to SEQ ID NO: 17879

SEQ ID NO: 18378 - protein, 278 aa, Escherichia coli; identical to SEQ ID NO: 17310

SEQ ID NO: 18379 - protein, 307 aa, Escherichia coli; identical to SEQ ID NO: 17878

SEQ ID NO: 18380 - protein, 169 aa, Escherichia coli; identical to SEQ ID NO: 17879

SEQ ID NO: 18381 - protein, 278 aa, Escherichia coli; identical to SEQ ID NO: 17310

SEQ ID NO: 18382 - protein, 307 aa, Escherichia coli; identical to SEQ ID NO: 17878

SEQ ID NO: 18383 - protein, 169 aa, Escherichia coli; identical to SEQ ID NO: 17879

SEQ ID NO: 18384 - protein, 278 aa, Escherichia coli; identical to SEQ ID NO: 17310

SEQ ID NO: 18385 - protein, 287 aa, Escherichia coli; identical to SEQ ID NO: 17311

SEQ ID NO: 18386 - protein, 169 aa, Escherichia coli; identical to SEQ ID NO: 17879

SEQ ID NO: 18387 - protein, 278 aa, Escherichia coli; identical to SEQ ID NO: 17310

SEQ ID NO: 18388 - protein, 287 aa, Escherichia coli; identical to SEQ ID NO: 17311

SEQ ID NO: 18389 - protein, 169 aa, Escherichia coli; identical to SEQ ID NO: 17879

SEQ ID NO: 18390 - protein, 278 aa, Escherichia coli; identical to SEQ ID NO: 17310

SEQ ID NO: 18391 - protein, 287 aa, Escherichia coli; identical to SEQ ID NO: 17311

SEQ ID NO: 18392 - protein, 169 aa, Escherichia coli; identical to SEQ ID NO: 17879

SEQ ID NO: 18393 - protein, 278 aa, Escherichia coli; identical to SEQ ID NO: 17310

SEQ ID NO: 18394 - protein, 287 aa, Escherichia coli; identical to SEQ ID NO: 17311

SEQ ID NO: 18395 - protein, 169 aa, Escherichia coli; identical to SEQ ID NO: 17879

SEQ ID NO: 18396 - protein, 278 aa, Escherichia coli; identical to SEQ ID NO: 17310

SEQ ID NO: 18397 - protein, 287 aa, Escherichia coli; identical to SEQ ID NO: 17311

SEQ ID NO: 18398 - protein, 169 aa, Escherichia coli; identical to SEQ ID NO: 17879

SEQ ID NO: 18399 - protein, 278 aa, Escherichia coli; identical to SEQ ID NO: 17310

SEQ ID NO: 18400 - protein, 287 aa, Escherichia coli; identical to SEQ ID NO: 17311

SEQ ID NO: 18401 - protein, 169 aa, Escherichia coli; identical to SEQ ID NO: 17879

SEQ ID NO: 18402 - protein, 278 aa, Escherichia coli; identical to SEQ ID NO: 17310

SEQ ID NO: 18403 - protein, 287 aa, Escherichia coli
MYNILFFIFLSIAIPFLLFLAWKQHLKTKEIRSYLLKEGYNIIFNGEGNSYLAFNISNATFRAGNLTSNDYFQASISYIHDYRWEWKEVEAKKINNIFIIYISNIDFPSQKLFYRNNKSLAEIDWAKLQAIFHQPYEIQNDVMQDNNNTHYDFFISHAKEDKDTFVRPLVDELNRLGVIIWYDEQTLEVGDSLRRNIDLGLRKANYGIVILSHNFLNKKWTQYELDSLINRAVYDDNKIILPIWHNINSQEVSKYSHYLADKMALQTSLYSVKEIARELAEIAYRRR

SEQ ID NO: 18404 - protein, 169 aa, Escherichia coli; identical to SEQ ID NO: 17879

SEQ ID NO: 18405 - protein, 278 aa, Escherichia coli; identical to SEQ ID NO: 17310

SEQ ID NO: 18406 - protein, 287 aa, Escherichia coli
MYNILFFIFLSIAIPFLLFLVWKQHLKTKEIRSYLLKEGYNIIFNGEGNSYLAFNISNATFRAGNLTSNDYFQASISYIHDYRWEWKEVEAKKINNIFIIYISNIDFPSQKLFYRNNKSLAEIDWAKLQAIFHQPYEIQNDVMQDNNNTHYDFFISHAKEDKDTFVRPLVDELNRLGVIIWYDEQTLEVGDSLRRNIDLGLRKANYGIVILSHNFLNKKWTQYELDSLINRAVYDDNKIILPIWHNINAQEVSKYSHYLADKMALQTSLYSVKEIARELAEIAYRRR

SEQ ID NO: 18407 - protein, 169 aa, Escherichia coli; identical to SEQ ID NO: 17879

SEQ ID NO: 18408 - protein, 278 aa, Escherichia coli; identical to SEQ ID NO: 17310

SEQ ID NO: 18409 - protein, 287 aa, Escherichia coli; identical to SEQ ID NO: 18406

SEQ ID NO: 18410 - protein, 169 aa, Escherichia coli; identical to SEQ ID NO: 17879

SEQ ID NO: 18411 - protein, 278 aa, Escherichia coli; identical to SEQ ID NO: 17310

SEQ ID NO: 18412 - protein, 287 aa, Escherichia coli; identical to SEQ ID NO: 17311

SEQ ID NO: 18413 - protein, 169 aa, Escherichia coli; identical to SEQ ID NO: 17879

SEQ ID NO: 18414 - protein, 278 aa, Escherichia coli; identical to SEQ ID NO: 17310

SEQ ID NO: 18415 - protein, 287 aa, Escherichia coli; identical to SEQ ID NO: 17311

SEQ ID NO: 18416 - protein, 169 aa, Escherichia coli; identical to SEQ ID NO: 17879

SEQ ID NO: 18417 - protein, 278 aa, Escherichia coli; identical to SEQ ID NO: 17310

SEQ ID NO: 18418 - protein, 287 aa, Escherichia coli; identical to SEQ ID NO: 17311

SEQ ID NO: 18419 - protein, 169 aa, Escherichia coli; identical to SEQ ID NO: 17879

SEQ ID NO: 18420 - protein, 278 aa, Escherichia coli; identical to SEQ ID NO: 17310

SEQ ID NO: 18421 - protein, 287 aa, Escherichia coli; identical to SEQ ID NO: 17311

SEQ ID NO: 18422 - protein, 169 aa, Escherichia coli; identical to SEQ ID NO: 17879

SEQ ID NO: 18423 - protein, 278 aa, Escherichia coli; identical to SEQ ID NO: 17310

SEQ ID NO: 18424 - protein, 287 aa, Escherichia coli; identical to SEQ ID NO: 17311

SEQ ID NO: 18425 - protein, 169 aa, Escherichia coli; identical to SEQ ID NO: 17879

SEQ ID NO: 18426 - protein, 278 aa, Escherichia coli; identical to SEQ ID NO: 17310

SEQ ID NO: 18427 - protein, 287 aa, Escherichia coli; identical to SEQ ID NO: 17311

SEQ ID NO: 18428 - protein, 169 aa, Escherichia coli; identical to SEQ ID NO: 17879

SEQ ID NO: 18429 - protein, 278 aa, Escherichia coli; identical to SEQ ID NO: 17310

SEQ ID NO: 18430 - protein, 287 aa, Escherichia coli; identical to SEQ ID NO: 17311

SEQ ID NO: 18431 - protein, 169 aa, Escherichia coli; identical to SEQ ID NO: 17879

SEQ ID NO: 18432 - protein, 278 aa, Escherichia coli; identical to SEQ ID NO: 17310

SEQ ID NO: 18433 - protein, 287 aa, Escherichia coli; identical to SEQ ID NO: 17311

SEQ ID NO: 18434 - protein, 169 aa, Escherichia coli; identical to SEQ ID NO: 17879

SEQ ID NO: 18435 - protein, 278 aa, Escherichia coli; identical to SEQ ID NO: 17310

SEQ ID NO: 18436 - protein, 287 aa, Escherichia coli; identical to SEQ ID NO: 17311

SEQ ID NO: 18437 - protein, 169 aa, Escherichia coli; identical to SEQ ID NO: 17879

SEQ ID NO: 18438 - protein, 278 aa, Escherichia coli; identical to SEQ ID NO: 17310

SEQ ID NO: 18439 - protein, 287 aa, Escherichia coli; identical to SEQ ID NO: 18406

SEQ ID NO: 18440 - protein, 169 aa, Escherichia coli; identical to SEQ ID NO: 17879

SEQ ID NO: 18441 - protein, 278 aa, Escherichia coli; identical to SEQ ID NO: 17310

SEQ ID NO: 18442 - protein, 287 aa, Escherichia coli; identical to SEQ ID NO: 17311

SEQ ID NO: 18443 - protein, 169 aa, Escherichia coli; identical to SEQ ID NO: 17879

SEQ ID NO: 18444 - protein, 278 aa, Escherichia coli; identical to SEQ ID NO: 17310

SEQ ID NO: 18445 - protein, 287 aa, Escherichia coli; identical to SEQ ID NO: 17311

SEQ ID NO: 18446 - protein, 169 aa, Escherichia coli; identical to SEQ ID NO: 17879

SEQ ID NO: 18447 - protein, 278 aa, Escherichia coli; identical to SEQ ID NO: 17310

SEQ ID NO: 18448 - protein, 287 aa, Escherichia coli; identical to SEQ ID NO: 17311

SEQ ID NO: 18449 - protein, 169 aa, Escherichia coli; identical to SEQ ID NO: 17879

SEQ ID NO: 18450 - protein, 278 aa, Escherichia coli; identical to SEQ ID NO: 17310

SEQ ID NO: 18451 - protein, 287 aa, Escherichia coli; identical to SEQ ID NO: 17311

SEQ ID NO: 18452 - protein, 169 aa, Escherichia coli; identical to SEQ ID NO: 17879

SEQ ID NO: 18453 - protein, 278 aa, Escherichia coli; identical to SEQ ID NO: 17310

SEQ ID NO: 18454 - protein, 287 aa, Escherichia coli; identical to SEQ ID NO: 17311

SEQ ID NO: 18455 - protein, 169 aa, Escherichia coli; identical to SEQ ID NO: 17879

SEQ ID NO: 18456 - protein, 278 aa, Escherichia coli; identical to SEQ ID NO: 17310

SEQ ID NO: 18457 - protein, 287 aa, Escherichia coli; identical to SEQ ID NO: 17311

SEQ ID NO: 18458 - protein, 169 aa, Escherichia coli; identical to SEQ ID NO: 17879

SEQ ID NO: 18459 - protein, 278 aa, Escherichia coli; identical to SEQ ID NO: 17310

SEQ ID NO: 18460 - protein, 287 aa, Escherichia coli; identical to SEQ ID NO: 17311

SEQ ID NO: 18461 - protein, 169 aa, Escherichia coli; identical to SEQ ID NO: 17879

SEQ ID NO: 18462 - protein, 278 aa, Escherichia coli; identical to SEQ ID NO: 17310

SEQ ID NO: 18463 - protein, 287 aa, Escherichia coli; identical to SEQ ID NO: 17311

SEQ ID NO: 18464 - protein, 169 aa, Escherichia coli; identical to SEQ ID NO: 17879

SEQ ID NO: 18465 - protein, 278 aa, Escherichia coli; identical to SEQ ID NO: 17310

SEQ ID NO: 18466 - protein, 287 aa, Escherichia coli; identical to SEQ ID NO: 17311

SEQ ID NO: 18467 - protein, 169 aa, Escherichia coli; identical to SEQ ID NO: 17879

SEQ ID NO: 18468 - protein, 278 aa, Escherichia coli; identical to SEQ ID NO: 17310

SEQ ID NO: 18469 - protein, 287 aa, Escherichia coli; identical to SEQ ID NO: 17311

SEQ ID NO: 18470 - protein, 169 aa, Escherichia coli; identical to SEQ ID NO: 17879

SEQ ID NO: 18471 - protein, 278 aa, Escherichia coli; identical to SEQ ID NO: 17310

SEQ ID NO: 18472 - protein, 287 aa, Escherichia coli; identical to SEQ ID NO: 17311

SEQ ID NO: 18473 - protein, 169 aa, Escherichia coli; identical to SEQ ID NO: 17879

SEQ ID NO: 18474 - protein, 278 aa, Escherichia coli; identical to SEQ ID NO: 17310

SEQ ID NO: 18475 - protein, 287 aa, Escherichia coli; identical to SEQ ID NO: 17311

SEQ ID NO: 18476 - protein, 169 aa, Escherichia coli; identical to SEQ ID NO: 17879

SEQ ID NO: 18477 - protein, 278 aa, Escherichia coli
MAKVNFFDKRILKKFSDYTSTISTIFSLFLIFVDIPTENKLTLGIIFLIILFLLYFGIWFKSNNLSEINLDVEGSIVTVKAGDLFRQDGFKVIAFNEYFDTQVDDVIISHNSLNGLYIDNYLAGSVSDLDHRISNHQFEEDELLEVNHKRKVGKTQKYSLGTIFVNNDYLLTAFSKFDDKNRAFLTMPDYLAFLINFWDNVNRIYAQKSVSVPIFGSGITRIKEHKNISDEDLLKIMLWTFRISEMRFKFPAKLTIVIHKDKIDKINLLDIKSARNGL

SEQ ID NO: 18478 - protein, 307 aa, Escherichia coli; identical to SEQ ID NO: 17878

SEQ ID NO: 18479 - protein, 169 aa, Escherichia coli; identical to SEQ ID NO: 17879

SEQ ID NO: 18480 - protein, 278 aa, Escherichia coli; identical to SEQ ID NO: 17310

SEQ ID NO: 18481 - protein, 287 aa, Escherichia coli; identical to SEQ ID NO: 17311

SEQ ID NO: 18482 - protein, 169 aa, Escherichia coli; identical to SEQ ID NO: 17879

SEQ ID NO: 18483 - protein, 278 aa, Escherichia coli; identical to SEQ ID NO: 17310

SEQ ID NO: 18484 - protein, 287 aa, Escherichia coli; identical to SEQ ID NO: 17311

SEQ ID NO: 18485 - protein, 169 aa, Escherichia coli; identical to SEQ ID NO: 17879

SEQ ID NO: 18486 - protein, 278 aa, Escherichia coli; identical to SEQ ID NO: 17310

SEQ ID NO: 18487 - protein, 287 aa, Escherichia coli; identical to SEQ ID NO: 18406

SEQ ID NO: 18488 - protein, 169 aa, Escherichia coli; identical to SEQ ID NO: 17879

SEQ ID NO: 18489 - protein, 278 aa, Escherichia coli; identical to SEQ ID NO: 17310

SEQ ID NO: 18490 - protein, 287 aa, Escherichia coli; identical to SEQ ID NO: 17311

SEQ ID NO: 18491 - protein, 169 aa, Escherichia coli; identical to SEQ ID NO: 17879

SEQ ID NO: 18492 - protein, 278 aa, Escherichia fergusonii; identical to SEQ ID NO: 17310

SEQ ID NO: 18493 - protein, 287 aa, Escherichia fergusonii; identical to SEQ ID NO: 17311

SEQ ID NO: 18494 - protein, 169 aa, Escherichia fergusonii; identical to SEQ ID NO: 17879

SEQ ID NO: 18495 - protein, 285 aa, Enterococcus faecalis VC1B-1
MNKVSFFDKRLLKKFWQVFSCIGGIISFILLFLDIPQSCKLITLVVMVITLLIYYLVIWRIATRQKEITLHFGESIVEVYFGDIFQSEEEDLKIISFNEYFDTEMGGNTKIISPGTINGKFLEMNKDKIPQFDKIIAEDEYLNSEMLLETVNERKHGKKNKYKLGSLVNLSDNYFAVAASKFDKDNKANITMREYIGFLLTLWSEVDRIYNNRSIVIPVFGSNILRFTDGYAGATSQDLLEIIIWTFKISRIKIAYPSKIKIVVFENKSDMYNLYKLKELEKNGI

SEQ ID NO: 18496 - protein, 474 aa, Enterococcus faecalis VC1B-1
MEAIVLGNIEGKKVFISYSWSNEEHQTKVIKLAEELVNLGIDVILDVWDLKPGQDKYNFMEKMVKDPSLDKVLIITDKTYAEKANNRQGGVGTETQIITPSIYNNLGEDKFIPIIFEKDKSTGEAFLPVYAQSRIYIDLTNDTVYQEGLEQLVREIYERPTYKKPKLGNAPSYILEDKINTFNIERKADDVEHALSKGTQRVRFAIKDYFDSFIEELDKLIVKENEGEAFDAAAVRMIDESLPFRKSFIKMLNVFVQIDNIDSEFISEFFEDYSNKIFQMERKDELAPEAVKFLLLELFICSTSIFIKYKRWEMLAHILNHEYYNKLERKTYSFGYLYMPTSFILEGSLQRMNNKSLVSDKMEKRATERDFNLMVEADMFLYYISKINPNVGVDYRVPWFPILHIFTTRLNGHMKVLNLLKSKNKLSEMLPIFGVSEEELKLKIREMKSDSGYSYRPIQEFQFFLKVEDIGIKA

SEQ ID NO: 18497 - protein, 153 aa, Enterococcus faecalis VC1B-1
MVYKTKTYVAFDGTNDMTYYRTLKMWSENDNIDFTLNNAHDLKSSRDSSLPETIKRSLRERIQASKVMILIVGKETHHHTKFVKYEIEYAKSLNIPIILAIVDNGVTPKSWFNDYPVIEVPFKLKDINYAMNNWPISFKTHNKNGDVGIWHYK

SEQ ID NO: 18498 - protein, 283 aa, Enterococcus faecalis EnGen0413
MNKVNFFDIRLLRIFGMILTGVSTMFSLILIFVTIPEDAKKYLGLFLLILLIIGYVLLWKYMSGLKEVHLRIGETNVEIKFGDIFNEKGLKVIPFNEYFDTAVDNNIISENSLNGQFINKFYFNKQLVKELDNIILNSPLLKESKVGIVPEREVGNKNKYVLGSLVALDNEYIVTAMSRFDENNKAFLSMEDYIAFLMKFWEKISIVYNQRTVVIPVMGSGITRFPNGYDNAKLQDLLQIILWTFEVSKIKLDLPAKLVIVISEKKEDRINLFKLKEMGKDGL

SEQ ID NO: 18499 - protein, 281 aa, Enterococcus faecalis EnGen0413
MYKGYNLILEKNEPQNFFGITDFAMRNFDKDILKMRKNVQEKMEAKLEFPLDSDSNIDAQKIMNDWFPNYKADIFISHSHKDEKTAKRLAIWLKEKLGLTVFIDSIVWGSADDLLKKIDDEYSVLSRKGSQVAYNYGIRNYTTSHVHMMLMAALTEVINNTECLFFLNTPNSVSVREVQNKKTNSPWIYAELKMAGVIEKKLPKRIQIEINKELQRSETFNSKDKLPKFDYLLNNDLNKLKILKKHDLVMWSELIARSSNEDLNKMHPLDLLYGEERKKDL

SEQ ID NO: 18500 - protein, 173 aa, Enterococcus faecalis EnGen0413
MAYRNKTYVAFDGDNDIHYYRTMKMWKQNDKSDFNFFDAHDLNNARDTSSEDTIKRRLRERLSNSKVFVLLVGDGTRYLYKFVRWEIEQAVKLNLPIIVVNLPQDAGQEGERQVDFERCPKIVRDNLAIHISFKSNILQYALENWPESHYNHRKKGDTGGYSYKDYVYDSLGI

SEQ ID NO: 18501 - protein, 281 aa, Enterococcus faecium EnGen0048
MKKIKFMDHRIRKVFLRFLGVISTILSLVLIFIEIPDYCKLYLGISFGVLLVITYIGIWFYANKKASTSLKIGGTTVEIIRGDIFAQKGLKVIPFNEYFDTVVDDKIISKKSLHGKFIQKYYTNPSDLKQKIEDDPDFNDDENWCMKKRYKDVYQKSYKLGSTFVDGDFVLTAFSKFNEKNEARLSMSEYINFLLIFWNEINRVYSLQNVSVPIFGAGITRFSNGFNNIPINELLNIMLWTFRISETRFKYPAKLRIIIYKDQFDEIDLFGLKGEINDGSL

SEQ ID NO: 18502 - protein, 277 aa, Enterococcus faecium EnGen0048
MYKGYNLDLSVIEKQSFLNVTDYEIDLFEKKIHSKKNELLSRIKETIYLPRTEDNKIDGSQLINDWFPNYKSDIFLSHSHNDHRTAKRLAVWLKREFGLEVFLDSIVWGSADKLLKNIDNEYAILRKKGDNITYNYDIRNFTTSHVHMMLSTALNDVINNTECLIFLNTPESISIGEVSKRKTNSPWIYNELKIASLIEKKNPRETILKEQLGKRQKEIYANGGLDILYDVQTQLGCLETLDNKKIQEWQKEWEISNHKFHPLDLLYYGNSSYFLKE

SEQ ID NO: 18503 - protein, 166 aa, Enterococcus faecium EnGen0048
MVAYRNKTYVAFDGDNDIRYYWMMKAWKQKDNTTFDFYDAHDLNSARDTSKEESIKSQLRERMKNSKVFVLLIGENTKYLRKFVKWEIESAIRMGLPIICVNLNGKRMKDELCPPCLNDELSIFIPYEKKIMQYTLEHWPSSYSQHMINGDSGAYQSLTMKFSYQD

SEQ ID NO: 18504 - protein, 271 aa, Clostridium clostridioforme 90A8; identical to SEQ ID NO: 17478

SEQ ID NO: 18505 - protein, 98 aa, Clostridium clostridioforme 90A8
MSKRVYISADYAEDSGDRDVVDILNQWGSDNRHKVDFIDMSKVASGSVSNDPDCRPCDLKREFNQQINASSAVIFIVGDKTASWCGIKKVDSLFSRIS

SEQ ID NO: 18506 - protein, 134 aa, Clostridium clostridioforme 90A8
MSVGKASINILQTKTKAGSSCSRASSEQADCSCTPYKQNSKGSKTCKVIHTSSAKADSDVGNINAFSYLQHEFEQAKKRKKPIIIVYNSLRKESNWLPSYMKGYESDARPFWKRNDYGEKVGDYTYIKQVLGYA

SEQ ID NO: 18507 - protein, 278 aa, Salmonella enterica; identical to SEQ ID NO: 17730
  subsp. enterica serovar Anatum str. ATCC BAA-1592

SEQ ID NO: 18508 - protein, 294 aa, Salmonella enterica
  subsp. enterica serovar Anatum str. ATCC BAA-1592
MNVLDNNIYNILFFIFLSIVIPSLLFLAWKQHQKTKEIRSYLLKEGYNIIFNGEGNSYLAFNISNATFRAGNLISNNYFQASISYIHDYRWEWKEVDAKKINNIFIIYISDIDFPSQKLFYHNNKSLAEIDWAKLQAIFHQPYEIKNDVMLDNNDTHYDFFISHANEDKDTFVRPLVDELNRLGIIIWYDEQTLEVGDSLRRNIDLGLRKANYGIVILSHDFLNKKWTQYELDSLINRAVYDDNKIILPIWHNINAQEVSKYSHYLADKMALQTSLYSVKEIARELAEIAYRRR

SEQ ID NO: 18509 - protein, 169 aa, Salmonella enterica
  subsp. enterica serovar Anatum str. ATCC BAA-1592
MSYRNKTYVAFASEDIKLYRLMEAWKANENIDFNFFDAHDLFISRDTSKPETIKRNLRERMKNAKQVVLLGSSNTKRKGSDGVSFLAHEIDLIVEFNLPVVIANLDGDRTVDKNFIPKPLLDSEHYTVSVSFQPKIIKYALDNYCVNYYSSSNSGSYLYPASVYTKLGL

SEQ ID NO: 18510 - protein, 278 aa, Salmonella enterica subsp. enterica serovar Saintpaul str. S-70
MAKVNFFDKRILKKFSDYTSTISTIFSLFLIFVDIPTENKLTLGIIFLIILFLLYFGIWFKSNNLSEVNLDVEGSIVTVKAGDLFRQDGFKVIAFNEYFDTQVDDVVISHNSLNGLYIDNYLAGSVSDLDHRISNHHFEEDELLEVNHKRKVGKTQKYSLGTIFVNSDYLLTAFSKFDDKNRAFLTMPDYLAFLINFWDKVNRIYAQKSVSVPIFGSGITRIKEHKNISDEDLLKIMLWTFRISEMRFKFPAKLTIVIHKDKIDKINLLDIKSARNGL

SEQ ID NO: 18511 - protein, 295 aa, Salmonella enterica subsp. enterica serovar Saintpaul str. S-70; identical to SEQ ID NO: 17729

SEQ ID NO: 18512 - protein, 169 aa, Salmonella enterica subsp. enterica serovar Saintpaul str. S-70
MSYRNKTYVAFASEDIKFYRLMEAWKANENIDFNFFDAHDLFISRDTSKPETIKRNLRERMKNAKQVVLLGSGNTKRKGSDGVSFLAHEIDLIVEFNLPVVIANLDGDRTVDKNFIPKPLLDLEHYTVSVSFQPKIIKYALDNYCVNYYSSSNSGSYLYPTSVYTKLGL

SEQ ID NO: 18513 - protein, 278 aa, Salmonella enterica; identical to SEQ ID NO: 18510
  subsp. enterica serovar Oranienburg str. S-76

SEQ ID NO: 18514 - protein, 295 aa, Salmonella enterica; identical to SEQ ID NO: 17729
  subsp. enterica serovar Oranienburg str. S-76

SEQ ID NO: 18515 - protein, 169 aa, Salmonella enterica; identical to SEQ ID NO: 18512
  subsp. enterica serovar Oranienburg str. S-76

SEQ ID NO: 18516 - protein, 278 aa, Salmonella enterica; identical to SEQ ID NO: 17730
  subsp. enterica serovar Bareilly str. CFSAN000207

SEQ ID NO: 18517 - protein, 303 aa, Salmonella enterica; identical to SEQ ID NO: 17733
  subsp. enterica serovar Bareilly str. CFSAN000207

SEQ ID NO: 18518 - protein, 169 aa, Salmonella enterica; identical to SEQ ID NO: 18509
  subsp. enterica serovar Bareilly str. CFSAN000207

SEQ ID NO: 18519 - protein, 278 aa, Salmonella enterica subsp. enterica; identical to SEQ ID NO: 17730

SEQ ID NO: 18520 - protein, 287 aa, Salmonella enterica subsp. enterica
MYNILFFIFLSIVIPSLLFLAWKQHQKTKEIRSYLLKEGYNIIFNGEGNSYLAFNISNATFRAGNLISNNYFQASISYIHDYRWEWKEVDAKKINNIFIIYISDIDFPSQKLFYHNNKSLAEIDWAKLQAIFHQPYEIKNDVMLDNNDTHYDFFISHANEDKDTFVRPLVDELNRLGIIIWYDEQTLEVGDSLRRNIDLGLRKANYGIVILSHDFLNKKWTQYELDSLINRAVYDDNKIILPIWHNINAQEVSKYSHYLADKMALQTSLYSVKEIARELAEIAYRRR

SEQ ID NO: 18521 - protein, 169 aa, Salmonella enterica subsp. enterica; identical to SEQ ID NO: 18509

SEQ ID NO: 18522 - protein, 278 aa, Salmonella enterica subsp. enterica; identical to SEQ ID NO: 17730

SEQ ID NO: 18523 - protein, 287 aa, Salmonella enterica subsp. enterica; identical to SEQ ID NO: 18520

SEQ ID NO: 18524 - protein, 169 aa, Salmonella enterica subsp. enterica; identical to SEQ ID NO: 18509

SEQ ID NO: 18525 - protein, 278 aa, Salmonella enterica; identical to SEQ ID NO: 17730
  subsp. enterica serovar Anatum str. USDA-ARS-USMARC-1735

SEQ ID NO: 18526 - protein, 303 aa, Salmonella enterica; identical to SEQ ID NO: 17733
  subsp. enterica serovar Anatum str. USDA-ARS-USMARC-1735

SEQ ID NO: 18527 - protein, 169 aa, Salmonella enterica; identical to SEQ ID NO: 18509
  subsp. enterica serovar Anatum str. USDA-ARS-USMARC-1735

SEQ ID NO: 18528 - protein, 278 aa, Salmonella enterica subsp. enterica serovar Anatum; identical to SEQ ID NO: 17730

SEQ ID NO: 18529 - protein, 303 aa, Salmonella enterica subsp. enterica serovar Anatum; identical to SEQ ID NO: 17733

SEQ ID NO: 18530 - protein, 169 aa, Salmonella enterica subsp. enterica serovar Anatum; identical to SEQ ID NO: 18509

SEQ ID NO: 18531 - protein, 278 aa, Salmonella enterica subsp. enterica serovar Anatum; identical to SEQ ID NO: 17730

SEQ ID NO: 18532 - protein, 303 aa, Salmonella enterica subsp. enterica serovar Anatum; identical to SEQ ID NO: 17733

SEQ ID NO: 18533 - protein, 169 aa, Salmonella enterica subsp. enterica serovar Anatum; identical to SEQ ID NO: 18509

SEQ ID NO: 18534 - protein, 277 aa, Salmonella enterica subsp. enterica serovar Anatum
MAKVNFFDKRILKKFSDYTSTISTIFSLFLIFVDIPTENKLTRIIFLIILFLLYFGIWFKSNNLSEVNLDVEGSIVTVKAGDLFRQDGFKVIAFNEYFDTQVDDVVISHNSLNGLYIDNYLAGSVSDLNHRISNHQFEEDERLEINHKRKEGKTQKYSLGTIFVNNDYLLTAFSKFDDKNRAFLTMPDYLAFLINFWDKVNRIYAQKSVSVPIFGSGITRIKEHKNISDEDLLKIMLWTFRISEMRFKFPAKLTIVIHKDKIDKINLLDIKSARNGL

SEQ ID NO: 18535 - protein, 303 aa, Salmonella enterica subsp. enterica serovar Anatum; identical to SEQ ID NO: 17733

SEQ ID NO: 18536 - protein, 169 aa, Salmonella enterica subsp. enterica serovar Anatum; identical to SEQ ID NO: 18509

SEQ ID NO: 18537 - protein, 278 aa, Salmonella enterica; identical to SEQ ID NO: 18510

SEQ ID NO: 18538 - protein, 287 aa, Salmonella enterica
MYNILFFIFLSIAIPFLLFLAWKQHLKTKEIRSYLLKEGYNIIFSGEGNSYLAFNTSNATFRAGNLTSNDYFQASISYIHDYRWEWKEVDARKINNIFIIYISDIDFPSQKLFYRNNKILAEIDWAKLQAIFHQPYEIQNDVMQDNNNTHYDFFISHANEDKDTFVRPLVDELNRLGVIIWYDEQTLEVGDSLRRNIDLGLRKANYGIVILSHNFLNKKWTQYELDSLINRAVYDDNKIILPIWHNINAQEVSKYSHYLADKMALQTSLYSVKEIARELAEIAYRRR

SEQ ID NO: 18539 - protein, 169 aa, Salmonella enterica; identical to SEQ ID NO: 18512

SEQ ID NO: 18540 - protein, 278 aa, Salmonella enterica subsp. enterica serovar Anatum; identical to SEQ ID NO: 17730

SEQ ID NO: 18541 - protein, 287 aa, Salmonella enterica subsp. enterica serovar Anatum; identical to SEQ ID NO: 18520

SEQ ID NO: 18542 - protein, 169 aa, Salmonella enterica subsp. enterica serovar Anatum; identical to SEQ ID NO: 18509

SEQ ID NO: 18543 - protein, 278 aa, Salmonella enterica subsp. enterica serovar Anatum; identical to SEQ ID NO: 17730

SEQ ID NO: 18544 - protein, 287 aa, Salmonella enterica subsp. enterica serovar Anatum; identical to SEQ ID NO: 18520

SEQ ID NO: 18545 - protein, 169 aa, Salmonella enterica subsp. enterica serovar Anatum
MSYRNKTYVAFASEDIKLYRLMEAWKANENIDFNFFDAHDLFISRDTSKPETIKRNLRERMKNAKQVVLLGSSNTKRKGSDGVSFLAHEIDLIVEFNLPVVIANLDGDRTVDKNFIPKPLLDSEHYTVSVSFQHKIIKYALDNYCVNYYSSSNSGSYLYPASVYTKLGL

SEQ ID NO: 18546 - protein, 278 aa, Salmonella enterica subsp. enterica serovar Kentucky; identical to SEQ ID NO: 17730

SEQ ID NO: 18547 - protein, 287 aa, Salmonella enterica subsp. enterica serovar Kentucky; identical to SEQ ID NO: 18520

SEQ ID NO: 18548 - protein, 169 aa, Salmonella enterica subsp. enterica serovar Kentucky; identical to SEQ ID NO: 18509

SEQ ID NO: 18549 - protein, 278 aa, Salmonella enterica subsp. enterica serovar Anatum; identical to SEQ ID NO: 17730

SEQ ID NO: 18550 - protein, 287 aa, Salmonella enterica subsp. enterica serovar Anatum; identical to SEQ ID NO: 18520

SEQ ID NO: 18551 - protein, 169 aa, Salmonella enterica subsp. enterica serovar Anatum; identical to SEQ ID NO: 18509

SEQ ID NO: 18552 - protein, 278 aa, Salmonella enterica
MAKVNFFDKRILKKFSDYTSTISTIFSLFLIFVDIPTENKLTLGIIFLIILFLLYFGIWFKSNNLSEVNLDVEGSIVTVKAGDLFRQDGFKVIAFNEYFDTQVDDVVISHNSLNGLYIDNYLVGSVSDLNHRISNHQFEEDERLEINHKRKEGKTQKYSLGTIFVNNDYLLTAFSKFDDKNRAFLTMPDYLAFLINFWDKVNRIYAQKSVSVPIFGSGITRIKEHKNISDEDLLKIMLWTFRISEMRFKFPAKLTIVIHKDKIDKINLLDIKSARNGL

SEQ ID NO: 18553 - protein, 303 aa, Salmonella enterica; identical to SEQ ID NO: 17733

SEQ ID NO: 18554 - protein, 169 aa, Salmonella enterica; identical to SEQ ID NO: 18509

SEQ ID NO: 18555 - protein, 282 aa, Clostridium spiroforme DSM 1552
MRKIYKWYSKLTKRVKDSIIITMSSIGVISTFLSVLGLSLADIETLTIWLRIVISVFAFIVLYIIIYMLIGRIFKDSVSTTIHQTSVTVVCGDIFEVPEFRVIGCDTNFRTEIDDVIISKKSLHGQLILNHGVPDEINAVIESEAKRLGLHKNDEGLYDFPLGTIIRYDSSVDNHTYLMLAMTELNSNYESHTNMAKFEYMLMRMWKEINRVYAGNDIALPLLGSGISRFDDGPKEYGALLRCMLCTLNGSGVTFNSNIKILIYGNIKDIPLYEYKDIFNIV

SEQ ID NO: 18556 - protein, 284 aa, Clostridium spiroforme DSM 1552
MYRCFKLSLDQWEFKNNHKQFLDNCKTCGIELKENLVNAFDSILNASIDGNGVISGENFIDSWFPIDNYDVFLSYSHDDEELALLLAGFLKYQFGLRVFIDELFWGSADDLLHKLDDKYCKTKEGNYDYRKRNFTTTHVHAMLSTAIARTINNSEVIIFLNSEKSIYKVREEVNVGQTLSPWIYEEIIFTTVIGEREWYEHRLDELKESTINFQKSMEISYLVPNEHLIPIQYNDLCEWIKLWEERKDNGNGPYGNICLKPNEKIRHPLNVLYDFKCGYDIKCS

SEQ ID NO: 18557 - protein, 217 aa, Clostridium spiroforme DSM 1552
MGHKCFISFKKEDDYYKNEISKILEEGQIQGKSLDKWIDSEDIDYVMQVIRSQYMKNTSVTLFLIGEHSSENEGFEYSWSDGCYYNKQNFIIRELKATLYDGKGNRRSGLLGIVLPNMYDTVYGGSYTCSHCGKEVNVVNINSNTVIKEFSENYYLNPNCNDGHCDETGRYCVLVKYDDFIKNPNVYIDMAYDKTNEEISDFVHWKDIKHEYKKTYL

SEQ ID NO: 18558 - protein, 291 aa, Elizabethkingia miricola
MNYYIRSFRTKSYWVYALWSVDSVKTFMAVVGGIWLFVDILSSFKLIDKEKLSLWSLAPIVIFGLIIVIITRRPVKKISYKYPGQDLRIEVCIGNLFDIPGQKVISTNTTFDTDVASGIISSRSLQGQFTEKFFPSNLPALDEALNKGLQGLPKTTVEKDAGKTERYDFGTTVKLNLSGQYFYWFAMADLNRSNNAKTTLKNVHQSLDGLWEFIETKGEKLPTVIPLIGTGLGRLTTSRKKLIAIIAQSFINASEDNLFSEKLVIVVHPSDAEASGLNLFEVKDLLHHYLP

SEQ ID NO: 18559 - protein, 284 aa, Elizabethkingia miricola
MSIQSITSSISSLDREISSLENQLQTINNNLSRKEKEATSILEKISKEKDLKRIVTYNKDLLRKNDEINRINKDKSSKSKTLSDKQTKKLKLLQDLNKEEQKVRDKTKKEQKEILTMQQSITREMERQKTLSLSSLPKKHFELPINTQKSYDVFISHASEDKAGFVRPFVEALRAKDVVVWYDDFELQVGDSLRRSIDNGLKNSKYGIVVLSDAFFNKEWPQRELDGLFAREVNGEKVILPIWHKISKNEVMSYSPIIGDMLAINTTDFMIEEIAEKIATRIKR

SEQ ID NO: 18560 - protein, 168 aa, Elizabethkingia miricola
MYFMNPTCYVCFDGDNDIHYYRLMQAWDKNERFDFTFVNAHDITQARDTSTEETIKRSLRTRLKASDVLIVLVGESTRNLYKFVRWEIEVALEMELSIIVVNLDGKKSINNDLCPPILRNELAIHIPFAQKILGYAIRNWPSSSARHKAKGETGPYHYNNSVYISLGL

SEQ ID NO: 18561 - protein, 278 aa, Bacteroides cellulosilyticus CL02T12C19
MLSNYNFFLKQVALAMGTISCILTIFIGIWPRFNCSCMWGCCLFASIAWGFSSIIPGKEIRIDFIRRRRIRVKVGDLFDTECGSIVVIPVNNYLDTQLQHDVIGPRTVHGLFIQHYRDKYPRKNLDDEITNAISRDGILSSGSVASRRNVSGKLNKYPLGTVVRLFEEDKQYYLVVATEFDENNHVIYQPEKYTYMLLTMMEKINTYNSGHPIYMPIIGSGQTGLNLSKQKTLCHILQCFSLVDHYVTMGGTTIVVHKSDTKFISLNKVKYEFNNLGT

SEQ ID NO: 18562 - protein, 176 aa, Bacteroides cellulosilyticus CL02T12C19
MNIRALKNKTKTYLAGDWSGDKAAIDKLHEWNEGNRWSLHFIDVHNLTQSRDNSNNCNIKASLRMRMGISKTFVLIIGEHTKSLRSGACYLCKWYRENSCLLRHSVDNRSYVDYECDMAIKENAKIVILYNSIIVDRNKCPEMLRNKGIYKPMKKFNFNTWNVEWDYQTVKSAIND

SEQ ID NO: 18563 - protein, 176 aa, Bacteroides cellulosilyticus CL02T12C19
MGTYRNGTYVAFDGQGEVNPVNSDLHNFELLKAWQANDNVRFNFVNSHEKTYSVRDSSSLETLKARLKERMANSKNMLVIVSSQTNKNRGLLNWEIQQAVEVYKLPIIVAYVGLQSLNSFSLNLYYNWLPSKLREYVNSNTAKVAHTLFTQFKIGGAINYYSVVTPTMPINSMEIY

SEQ ID NO: 18564 - protein, 297 aa, Lachnospiraceae bacterium 3-1
MKFLNILEKNLKQVWKVWFAVSSSLFSILSIILSFLSWEDFGITKTSAKLIAFIIIILFSLVTGVFWTCFITKKHVYWSNGDGKINICYADIMKISFPWKSKGKKIVVIPVNTSFDTIVDENLASCDRPLVSATTVHGLWLKNMIKNGTSIADIDLAIDRYILNKNIRCVKELTIEEKSRGKRKCFENGTTVIIEGKNDITFFLLALSEFDENNRAQSSKEDVVKCMKELLEFYDINGQGYEMYVTLVGTGRSRAGLSHEESLQTMKSIFSIYSHKIHGTINIVIYSKDKEKVSIFS

SEQ ID NO: 18565 - protein, 280 aa, Lachnospiraceae bacterium 3-1
MYRGFNLMLDEIDFWLMDEKKIAEYENRGKKRLEYLHDNVVDILKEHVSEGIIDGTELSKTWFKCIKTDVFLSHSHNDAKLALLLAGWLEKNMGINVFLDEVIWGSADKLLKAIDDEYCISDINEDTYDYKKRNLSTSHVHAMLSVAMFDAIDKAEVVFFINTENSVPKIEDSINIRNQTLSPWIYEEIVATKLIRKREWEEHRIVSIMEDYTEKQLKVSYKIPLEDLTEINMEDLDKWNREYIQSKASRNSYGGLLEKNPDHPLNYLYSTKFGFKEDNN

SEQ ID NO: 18566 - protein, 154 aa, Lachnospiraceae bacterium 3-1
MRTKTYIAADWSGDIDAVEQLHKWNKSYYWSLSFSDAHDITQARDTSLNCSIKSSLRVRLEASKRFILIVGNQTKTVKSGSCQYCPSYNSWTYSCARGGHVDYRSYIEFECEKAIKDNIEIIVLYNAATIDKNKCPDIIKNYGKHVAMCYRKDG

SEQ ID NO: 18567 - protein, 278 aa, Escherichia sp. 3_2_53FAA; identical to SEQ ID NO: 17310

SEQ ID NO: 18568 - protein, 307 aa, Escherichia sp. 3_2_53FAA
MIAYENIEFFICLVNVLGNNMYNILFFIFLSIAIPFLLFLAWKQHLKTKEIRSYLLKEGYNIIFNGEGNSYLAFNISNATFRAGNLTSNDYFQASISYIHDYRWEWKEVEAKKINNIFIIYIPNIDFPSQKLFYRNNKSLAEIDWAKLQAIFHQPYEIQNDVMQDNNNTHYDFFISHAKEDKDTFVRPLVDELNRLGVIIWYDEQTLEVGDSLRRNIDLGLRKANYGIVILSHNFLNKKWTQYELDSLINRAVYDDNKIILPIWHNINAQEVSKYSHYLADKMALQTSLYSVKEIARELAEIAYRRR

SEQ ID NO: 18569 - protein, 169 aa, Escherichia sp. 3_2_53FAA; identical to SEQ ID NO: 17879

SEQ ID NO: 18570 - protein, 293 aa, Prevotella stercorea CAG:629
MLIDKISMFVKNLWTYKTIVFSKFLKSLGVLFSIEKLLELLDTGDCLKTHSFILGVVLLIASAFGGISFLLFKKKKIQLSINKRTKLSTYYGDLFNEQGIRVIPVNEYFDTHLGDGIIASNTIHGKFLARFTAHINELRRMIDDQLALKDTLPSNRERTLVEGLPQNRYPLGTTIRVTINNQTYLLVAVTRFNENEHVEVDDSEYMGIMQKMFYSVEQLNDAQTVNIPLIGGGQAGFGYTNMQLLNMMVQAACLTDGLAVVNGINIILYDGKSIKNSIDLNVIKILFENWKIL

SEQ ID NO: 18571 - protein, 266 aa, Prevotella stercorea CAG:629
MFAKFKINSGTIEQLRLQVGKVSLLRQSIVNDAFYNDIVTKVLGNDGVLDGSQLQNLNFPSLRDNYHVFISYSHNDEELALYLASYLQNNCGLNCFLDSTVWHSADSLLKRLDDIYCLNEDGQTYNYNSRNFSTSHVHAMLSMAMHSIINRSECCIVLNSEHSFTLQDGIDNATFSPWLYEEVTFMKGMKISIPPRLRLRQERRSYSLGGQIVCESASPQLQIKYTVDLNMFPNLYVTDLLNLGGQGETGLNNLYRSKGILRYANR

SEQ ID NO: 18572 - protein, 185 aa, Prevotella stercorea CAG:629
MTITDRSYRTCTYIAGDWTGDSSAIEELHKWNESDHWGLSFTDIHNLTQSRDSSQNCSIKSSLRTRMNYCKTFVLIVGEQTNTVTSGACFWCNSYIAPTTTKCASCKKGYSIDNRSYIKTECDMAASDYDASKLKIIVLYNAEKVDRNRCPEAVRWKGTHLNMYYKGFDGRYYWNYSAIKQAFEE

SEQ ID NO: 18573 - protein, 278 aa, Salmonella enterica
  subsp. enterica serovar Sloterdijk str. ATCC 15791
MAKVNFFDKRILKKFSDYTSTISTIFSLFLIFVDIPTENKLTLGIIFLIILFLLYFGIWFKSNNLSEVNLDVEGSIVTVKAGDLFRQDGFKVIAFNEYFDTQVDDVVISHNSLNGLYIDNYLAGSVSDLNHRISNYQFEEDERLEINHKRKEGKTQKYSLGTIFVNNDYLLTAFSKFDDKNRAFLTMPDYLAFLINFWDKVNRIYAQKSVSVPIFGSGITRIKEHKNISDEDLLKIMLWTFRISEMRFKFPAKLTIVIHKDKIDKINLLDIKSARNGL

SEQ ID NO: 18574 - protein, 303 aa, Salmonella enterica
  subsp. enterica serovar Sloterdijk str. ATCC 15791
MKYEFFICLVNVLDNNIYNILFFIFLSIVIPSLLFLAWKQHQKTKEIRSYLLKEGYNIIFNGEGNSYLAFNISNATFRAGNLISNNYFQASISYIHDYRWEWKEVDAKKINNIFIIYISDIDFPSQKLFYHNNKSLAEIDWAKLQAIFHQPYEIKSDVMLDNNDTHYDFFISHANEDKDTFVRPLVDELNRLGIIIWYDEQTLEVGDSLRRNIDLGLRKANYGIVILSHDFLNKKWTQYELDSLINRAVYDDNKIILPIWHNINAQEVSKYSHYLADKMALQTSLYSVKEIARELAEIAYRRR

SEQ ID NO: 18575 - protein, 291 aa, Salmonella enterica
  subsp. enterica serovar Sloterdijk str. ATCC 15791
MSISVFLSHNHNDKPFVRKLARDLENHGVRYWLDEAEMKIGDSLIQKIREGIDGVDYFAVVLSPDSINAPWVVNELDVAMNYQISGKEIKVLPIMLKECEPPGFLIGKLYADFRNEDNYVEAFKRLIQSIGMVFNKNVMSDEKVFDNLGTALDKASHANIPIMCKPFHRPFQYMGMQVPQAEKIFECKGNEVGSIFVEDGDCRMHLCAEGNYISFVEVDFKKTIPHYRNQEFDSEIFLGALSIGLSELELVGKKTHSHTYYDHRRKLKITVSCLYDEAPITVSFSSKYYGM

SEQ ID NO: 18576 - protein, 169 aa, Salmonella enterica; identical to SEQ ID NO: 18509
  subsp. enterica serovar Sloterdijk str. ATCC 15791

SEQ ID NO: 18577 - DNA, 1437 bp, Enterococcus faecium DO
atggataagaaagttttaataaagaggttctctgaagctattgaaaaaggaaatgcagcaatatttgcaggtgcaggattatcgatgtcacaaggatatgtaagttggccggaactacttaatgatcctgcaacagaaatcgggttggattctaaaaaagaaacagacttagttactctggctcaatattataaaaatgaaaatggtggatcaagaggaattttgaatcagatacttatggataattttggtgaagaattagaaatatctgaaaatcatcgaatactagcaagtttacctattgaaacttattggacaactaattatgatcatctaatagaaaaatcaatccgagaagcttataaaaaccctcaggttaagaaaaattatactcagttagcaacaactaatccaaatgtggatacaattgtttataaaatgcatggtgatatagatgatgtcagttcgacagtaataacaagagatgattatgaaaaatatgatgatgattcgtacgcgttatttaaagaaactttaaaaggagatttgttaacaaaaacttttctctttttaggatttagttttacagaccctaatttagaaagaattttatcagatataagatgggttttgagagaaaaccaaagacctcattattgtataatgagaaaaatattaaaggaaaattttgtcgattctgaggatttttttgatcaagagagatataattatgaactgacaaaaagaagactacaaatcaatgatttgtccagattttcgataaacgttgttgaagtagatgattattctgagattactgatattttgaaaagtattagaaaaaagtatttgagaaaaactatttttatttcgggaagtgctgttgattatactccatttacatctgaatcgaaaggattaaaatttgtcgagaaattagcatataggctttctgaatccggttatagaatagtatcaggttacggacttggaattggtaatagtattgtttcaggagttctaaagcagagaagaaatttaagaaaaaataacatacaagacgtactttctttaagaccacttccccttgatatgcctcatgagtggagaagatatcgagaaaacattattgcagagtctgggattagtatttttgtttttggaaacaaacttgaatcaggtgaaatagttacagcagatggaatgattgaagaatttgaattatctgttcaaaatgaaaatatagtagttccgattggatttaccaaaggtgcaagtaaggttttgtttgataagattcaagagaatttcagtgattattttgatgattccttaaaaagtaaatttcaagcgctagaaaaattagatactgaaggagaagtagataaaaaagttgaacaaattgtcagtttaataaatagtattcaggaggattaa

SEQ ID NO: 18578 - DNA, 486 bp, Enterococcus faecium DO
atggtgagaagggttttttttagtttccattatgcagatgtaacaagagcaatggtagttagaaacagctggactttgcgaggaacaaaggaagctggttttgtagataaggctgaatttgagaaagttaaacgtaatggagatattgctataaaaaactggatagataatcaattaattggaacatcagtgactgtggtgctgataggtaaagaaactcttgatcgagaatatgttaaatatgaaatccaggagagttataagcgaggaaatgctattttggccgttaatataggtaaaataaaagattttaaccagatgacaactactagtcaatcagtaattaaaataattgggcaaaaaccagatggagaatatttgtggtttgacgaaattattgatggccaatatgattatataagtgatgatggatacaacaatttaggaacttggattgacagtgcagcatacaaaaaaggtaaataa

SEQ ID NO: 18579 - DNA, 852 bp, Enterococcus faecium DO
ttgtataaggcatatgaattggattttacaaatgctgacttaaatgcattctcctcaagctcgcaatcatatacacatgtagtaaatcaaatagatcacaaccaaaaatctattaacaagagaatagaaaatctatttgaaagtgaaaatgatttagttgattattattctaaggacagcaaaattctagatgcagacgaaattattaaagattggtttccaactataaaagcagatatttttatatctcactctcatgctgatgaaaaattagctatacgttttgcatcatggctatttgaaaattttggtcttactgcatttattgattcttcggtttggggatacagttctgatttattaaaaaaaatagaccaaaaatattgctataaggaacaaacaaaaacatatgattatgataaaagaaatgtaacaactagtcatgttcatatgatgctttctacagctttaaataatatgattgatagtacagaatgtctgttttttcttaatacacctaattcaattagtttgagcaatgaaatcactaatgaacagaaatttacgtattcgccatggctatatagcgaactgacgacagcttcaatagtggaaaaaaagaatccacgattggaaagtaatcctcaaatgagcaccgaggatgttagaagcattataaagcactattcttcgcaagaaaatctgcaaataaaatattctttaaatttaagtgaattaacttatttacgaaaagctgatttgaaaaaatgggctttagatgctgtggaatgcactaaaggaagtaatacattagatattttatataaaaacaccattttcactaatctctaa

SEQ ID NO: 18580 - DNA, 1434 bp, Bacillus sp. B14905
ttgtatactacacaaataaataggtttattaaaacttatacaaaggaaattgaagattctaatgcagcgatattcgctggtgcagggttatctcagccagcaggttatgtcaattggaaagaattaatgcgcgatattgcagaagatttaaatttagatatagaattagaatctgatttagttgccttagcccaatatcatgttaatgagtctggtggaagagggaaagtgaatcaaattctaatagatgaatttacaaaaggtgttaaagaaactgaaaatcataaaatacttgcagatttgtcaatagatacttattggacaactaattatgattctttaatagaggacactttagaaacgattgggaaaaaggttgacacaaaaagagtcccagaaaacttagctaattcagtttctaaaactgacgcaattgtttataaaatgcatggggataaatctttgcctcataaggcagttttaacaaaagatgattatgaaggttataatatcgaacgtcaattgtttagttctgcattacagggggatttaatttcaaaaacttttttatttattggattcagttttgatgatccaaatttaacctatattctaagtagaattcgccttctattaggtgaaaattcaagaacacattattgtttcatgaagcaaatagaaagaaaagattataaaactgaagaagaatttcactatgctcaaataaagcaggaattaagaataaatgatttaaaaagatattcaatctctgtattattggttaattcgtataatcaaatcacagaaatattacagaaagttcatgataatgttaaacgaggtaatatttttatttcagggagtgctactgtattcgataattgggaagaagaaaaagcccttcaattcagtacaaatttgagtaaggccataatccaatctgggcacaatattgtttcaggttttggattagggatcggtagctgtattgtatctggtgctcttgaagaactatatcaaactggcaatagaaaaattgaagagcgcttaagagcacgcccatttcctcaaaatactactggggacttacctttaaaggatctttggactaaatatagggatgatatgctttcttctgtaggaattgctatatttattttcggtaataaaaaaaatgaatccgaagaaaaaattgaggcaaatggtatgattaaagagtttgaaattgctattggaaagggtgtaattccaataccgataggtgctactggggatgctgctctaactatttggacaagagtaaaagagaattttgaagattatgtaggattaccatcattaattgaattatatgatcagcttggagatacaaataaatcacctgaagaattaataactactattttacagattattaagcaactaaaaagataa

SEQ ID NO: 18581 - DNA, 681 bp, Bacillus sp. B14905
atgggaagaaagatatttgtttcttataagtatgcggacagtaatgtgtatcctttagagaatcagaaatactcaaccactgttagaagttatgtagatgagcttcaagataaattaaaagatgaggatcatattaataaaggagaagctgatggtgacgatttaagtgactttaaagatgaaacaatatggactaaattgaaagataaaatttttgacagtacacttacaatcgttttaatttctcctaacatgaaagaaatattcactagtgaagaagatcaatggattccatgggaaatttcatattctttaaaagctcacacaagaaatggaaaagttagtggaacaaatgcaatgctagcaatcgtattaccagatcaaaataacagttacagttattatattgaagataatacctgtgaatattgtaaatgcaggactttaaaaactaatacattgtttaccattttaaaaaagaatatgtttaacataaaatcacctacttttagtgattgttctaatcacagtgaatataataaagtttatttgggagaagaatcctatattagatctgtaaaatggtgtgattttattaatgatgttgaaggatatatccaagcagcatatggtataaaagagaaaatagatgactatgagatttacaaaaaagttttataa

SEQ ID NO: 18582 - DNA, 1437 bp, Enterococcus faecium E1162; identical to SEQ ID NO: 18577

SEQ ID NO: 18583 - DNA, 486 bp, Enterococcus faecium E1162; identical to SEQ ID NO: 18578

SEQ ID NO: 18584 - DNA, 852 bp, Enterococcus faecium E1162; identical to SEQ ID NO: 18579

SEQ ID NO: 18585 - DNA, 1437 bp, Enterococcus faecium U0317; identical to SEQ ID NO: 18577

SEQ ID NO: 18586 - DNA, 486 bp, Enterococcus faecium U0317; identical to SEQ ID NO: 18578

SEQ ID NO: 18587 - DNA, 852 bp, Enterococcus faecium U0317; identical to SEQ ID NO: 18579

SEQ ID NO: 18588 - DNA, 1386 bp, Peptoniphilus lacrimalis 315-B
ttgattagagaaattgaaaaagctattaaaagtgatgaattaggagcttttattggagcaggattatcaattcctgctggattttctagttggaaagaacttctaagggaaccagcagaagaaattggattagatgttgaaaaagaaaatgatttagttaacttggctcagtattattctaactcgaaaaatagaacatcaatagatgatttaatcaaggagcgtttttctcaattagcaaagcctactgaaaatcataaactattatcacagttgccaatttcaactttttggacaacaaattatgataagttaatagaaaaagctttggaaaataatatgaaaaagccttatgtaaaaataaaagatgaacacttaagaggtacaaatcataattttgatgcgatagtatataaactgcatggagatgtagaagctcctgaagacgcggtgattacaagaagtgattatgaagagtttggatataacaaaagaaagttatttagagaagttttagagggagatttgcttaccaagacatttctatttttaggatttagttttgaagatccaaactttaactatgtaattggaagattaagggtattgctagatgaaaagaatacaagaaaacattactgtattatgaaaaggatccaagataccgatgaggattatgaatacaaaaaagtaagacaggagctacaaattgaagatctaaatagatatggtatttttacatatttagtaaataaatatgatgaaatcactgaaatattaagtactcttgttgatagatttagaaggaaaacaatatttatatcgggtagtgcatactcctattcgacttattctcagaaaattggagaaaattttattcataaactatcttttgaactatcaaaaaatggttatcatattgtgaatggatatggtaaaggtgtcggtgaatttgtattaaatggagttgcagattattgtttggctcataaatccaaaataaatgattttttaacacttatgccttttcctcaaaatagttcattaggtattgatttagataagctatataaagaaaatagagagcagatgattgaaaattgtggtatcgctatattcatttttggaaataaagaaacagaagatattgcacatggagtgatggatgaatttgagttatgtaaaaagcatggattagtatgtttgcctattgaacatactggtggggcagctaaagaaatatataatcaaacaactcaagaaattacagatgaaaatataataaccgcaattggacaagcaaataatcaatgtcatggcgatatagatatgtctattaaaaacatagtgcaagcagttaaaatattaaataaggaggagttttaa

SEQ ID NO: 18589 - DNA, 498 bp, Peptoniphilus lacrimalis 315-B
atggcaaaaagacaggtgttttttagctttcattacgacaatgataattggagggcagtacaggttcgcaacatggggaaagtagacagtagctctaccttttcagataatgactgggaagaagtaaaagaaaaaacagatactaaaatcgaaacatggattgatgaacaagtaaacaagcggtcatgtttagtggtcttaattggagagaagactgcaaataggaaatggataaattatgaaataaaaaaagcatacgagttaaataaaggtattgttggaatttatatccacaagttggagaattcattgggagagcaagatgataagtgcaataatccttttgattatttaatattagaaggtaaaaaactttcaaagtatgttaaatgttttgattctgtatacttatcaagtaaaaatgtttatagcgatatcaaagataatattgaagatttaattgagtatggaatagaacataaaccaccaacttggtaa

SEQ ID NO: 18590 - DNA, 1425 bp, Peptostreptococcus stomatis DSM 17678
gtgtttactattattaaaggtgaagtatcaaaaaaagatttgattagagaagttgaaaaagctattaaaggtgatggattaggagcatttattggagcaggattatcaattactgctggattttgtagttggaaagaacttttaagagaacctgcagaagaaattggattagatgttgaaaaagaaagtgatttggttaacttggctcagtattattctaattcaaaaaagagaacatcaatagatgatttaatcaaggatcaattttctcaattagtaaagcctactgaaaatcataaactattatcccagctgcccatttcaactttttggacaacaaattatgataggttaatagaaaaagctttagaaaataatatgaaaaagccttatgtaaaaacaaaggatgaacaattaagaggtacaaatcataattttgatgcgatagtatataagctgcatggtgatgtaggaactcctgaagatgcagtaataacaagaagtgattatgaagagtttggatataacaaaagaaaattatttagagaggttttagagggagatttgcttactaaaacatttctatttttgggttttagctttgaagatccaaatttcaactatgtaattggaagattaagggtgttacttgacgaaaaaaatacaagaaagcattattgtattatgaaaagagttcaggataccgtggagaattcagaatatgaaaaagcaaagcaagaactacgaattgaagatttaaataggtatggtatttttacttgcttggttaatgattataatgaaattactgaaatactaagtacacttgtagataaatacagacgaaaaacaatatttatatcaggtagtgcatactgttatcctggttattctcatgaaatcgctcgaacttttattcataaattatcttttgaactatcgaagaatggttatcgtattgtgaatggctatggaaaaggtataggcgaatttgtgttaaatggtgttgcagattattgtttgactcacaattctaaaataaatgattttttaacacttatgcctttcccacagaatagttcattaggaatagatttagataccttgtataaagaaaatagagagcagatgattgaaaattgtggtatagcaatattcatttttgggaacaaagaaacagaaaatatcgcaagtggagttttagaagaatatgagttatctaaagagcatggattagcatgcttacctattgaatatactggtgggtcatctaaagaaatatatgataaagcaattcaagaaatctcagataaaaatacaataaaggcaattgaacaggcaaataaacaatgcgatggagatattgatatgtctgttagaaatataatgcaagcagttaaaatattaaataaggaggatttttaa

SEQ ID NO: 18591 - DNA, 498 bp, Peptostreptococcus stomatis DSM 17678
atgacaaaaagacaggtattcttcagctttcattacgacaatgataattggagggcgggacaggttcgcaaaatggggaaagtagatagcagttccaccttttctgataatgactgggaagaagtaaaagaaaaaagtgagagtaaaattaaagaatggattgatgaacaattaaataagcgttcatgtttagtagttttaatcggagaaaaaacagcaaacagaaaatggataaattatgaaataaaaaaagcatatgagttgaataaaggaatcgtaggaatttatatccacaagttgaagaattcatctggagagcaagataataagggtgagaatccgtttgattatttgatattaaaaggtgaaaaactttcaaaaaatgtaaaatgttttgattcaggttattcatcaagtaaatatgtttacagcgatattaaagataacattgaagatttaatagagcatggtatagaacataaaccacctacttggtaa

SEQ ID NO: 18592 - DNA, 1416 bp, Bacteroides ovatus SD CMC 3f
atgccaataaataaaaatgttttcataaagaattatcttagtgctcttaataatggtgatgctgctatatttgcaggtgctggattgtctgctccaagtggatgcgttaattggaagcaattgctaagagagattgccgaggaattggagcttgatattgaaaaggagtcagatttggtagcgatagcacaatactattacaataaaaatggatgtaatcgaacaaaattaaatgatacaattaaagatgctttccagacaggaaaacaaccaaatgttaatcataatatactcgctaaattgcctatttttacatattggaccacaaactatgataaactaatagaaaaggcattggagaataatggtaagatctgtgatataaaaacttgttgtgcgaacctcacgactactttaaaaggacgcaatgttgtagtttataaaatgcatggagatgttgatcatccagaagatgctgtattgattcgcgatgactatgagtcatataatcaagaaaaggcgccttttataaatacattatccggagacttaatgacaaaaacatttttgtttataggctttagttttacggatcctaatttttattatatatgtgcacatttaagggcacgtctaaaaggaaatatgagggaacattattgtttcctgaaagatgtttctaaaacagattataaagatgaggacgaatttaaatatgagaagagaaaactatcatattttattgatgacttaaaacgattcaatataaaaaccgtgcttattcaagaatactcagagataactgaaatattacaaagtataaagagggtttataatggtcgtacagtatatctatctggtgcggcagctgaatacaacccagatggtaaagacgcatatgaaaaatttataagtaaattaagcggtcgcttaatttacgaaggatataaaatagtttcaggatatggtttaggtgtgggtagtgcggtaataagtggtgctctttctgaaatatattataatcagaaaaaatcgcttacagaccaattaattctgagaccttttccacaaggtgacgatgcaaaagaaatgtgggaaacttatagacaagacatgatatcttatagtggtatatcaatcttcttgttgggtaataagaaagaaagtggaactattgttccatctaatggaatgcggtcagaatatgaaatttcaaaagaacagggtaacttcctaatccctattggtagaacaggatatatatctaaagaattatggaatgagttattggaagaaagacaagacgaccatacttttgatatttatcgacatgatattgagtctttgggcgatgatacaaaaacattagacgaagtaatagaaatagtaatagagttaattaaaaaagtaaaataa

SEQ ID NO: 18593 - DNA, 549 bp, Bacteroides ovatus SD CMC 3f
atgacaaaaagacaagtattttacagttttcattttaagaatgactcatggagagccggacaggttcggaatattggagtagtagaaggaaatatgccagtttcttccaatgattgggaagaggttaagcgcaaaggtgatgattctattaaaaggtggattgatactcatatggattatcgctcttgtgttattgtattaatcggttctgatactgcatcaagagagtggtgtaggtatgaaattaaacatgcatggaaagagggcaaaggagttgttggtatttatgtgcataatctaaagaacattgaaggagagcaggatataaaaggagataatccattcaaattattctgtattgataagacatttaactatataatcgaacataaacatccagctgatagtaacgaaattaatttgtccgaaatatgtaagacttatgatcctccatataaaatcagtaccaatgtgtatgattatatcaaagagcatataaatgagtgggtagaagaggccattagaattcgtaatcagtatcctaaataa

SEQ ID NO: 18594 - DNA, 612 bp, Bacteroides ovatus SD CMC 3f
atggcacataaaacatttatttcttataaatatagcgaagcgcaggatcttcgcgataggataataaaggcattgggggatgatgcgagttactatcaaggagaaacaagtgattctcctgatttaacagatacgtctactgagaatataaagaagaacctaaaagatatgatgtatgacacatctgtaacgattgtaattatttctccgcatataaaagaaagtaagtggattgattgggaaattgaatattgtcttaagaatataacaagaaaaaataggacatcgcatactaatggggttgttggtgttataatgaaagtaaatgggggctatgactggtttaaatacacctcaactaaaccagatggatgttctgttactaattattatgattcaaaggtttatgatatcataaacaataatagatataatcaatatcctaaagtgtattcttgtaatcaatgtaaatgtgtaaacgcattgactggttcttatattgcttttgttgaagaagatgagtttttgtcaaatcctcaaaagtatattaacaatgcctatgataaaagtgaaaaggatgcagaaggatataacttaacaaaacaacgatag

SEQ ID NO: 18595 - DNA, 1503 bp, Bacillus cereus ATCC 14579
atgacagttattgaaagagataaaaagaactttgtaaattcatatgtaagagccttaaataacggtagagctgcaatatttgctggtgcaggagtttcgattccatctggtggaatcagctggagtgatttacttagagaggaagctgagtccatcgggttagacatatcgaaagaaaatgatttgatatcagttgctcaatatatctataatgagtcaggtactaagcaaactataactaatcttttaaagaataagattgctcgcgaaggaaagataaataaaaatcatgaaataataagatcattgcccatacgaaaaatttggacgacaaactatgacgatttcttagaaaaggcatatttagatgacaataaagtgattgatgtaaaaaagtccattgaagatatggctactgaaatagatttttctgaaactactatttacaaaatgcatggtgatattggaatcccaagtagtacggtgttacttaaagatgattatgaaatttatgataagaagaatgaactttttaccaagactcttcagacagatttacttagtaatacatttttgtttattggatttagttttgatgaccctaacttagaaagtattttatctaaagttcgaattatgttagagggtaatccccgtcgacactactgtttgttgaaaaagattagtgagggtgatcctgaatttgatcagtttgatgacccaaaagaaaaagctagggaactagaatacagaattaataaacagcgattaagagtagcggatttattaagatatggtattaaggcaatattggttgattcctatgatgagatgactcaattactagactcaattaaaagaaagtacttatcgactaaagtatttgtatctggggcatacgaagaagttgataattttcttggaaaaaccggtaatgatgctttaaaacaagctgacaagttttgtgtaaggttaggagaagcactatttactgaaggctttgaaatatcatctggttttggcttaggagttggtaggaatgtagtaactggtgttttaattcaagaatctcttttaaatcatacaagagtaggctcccagctggtaataagacctttcccgacacaacaaacggtacctgaaaaacgtgcataccgtgagaaaatattgtctgaatgtggtgtgacaatatgtgttttcggaaataaaaaagttagtgggagcaatgaattacaaaactctcctggtgttgaagaagaggcaagaattgctggagagttaggacaacttgttttatctataggctcaactggatacgttgcaaaaaaaatatgggaagatcagctaggaaaaataacgactactttttctgagaactcccaaattttagaaagctatcataatcttaacagtcctaatcgaagcattgatcagcttattgatgatattttgattatcttaaaagaatataaaacaaacccaaagaagtttaaaattgtataa

SEQ ID NO: 18596 - DNA, 621 bp, Bacillus cereus ATCC 14579
atggggacaaacgtatttatttcatttcgttttagtgatggtaacgatttaaaggaagagttagaagaattaattgaatcatcaactgaagtctttaatagatccgaaaatgaggacagaagtactatgagcgaagacacgattcagaaatacctatacgacaaactgaaacaaacctctgttacaattgtattgttaactcctaaagctgtttcctataagaaggatatttggggggcatatgatgattggttatatgatgagttaagatattctttggaggatcgaaatgagaatcgtacaaacggtgtagttgctgtttacacaaatgaaagtaaagacctaatattaagtaaaagctcacatacttgtagtgtttgtaatcaagaatcaaattgtgaggtaatactagattttgataatcttgtgagaaaaaatgtcctaaatattaaaactgcctataaatctaacccttgtaacaacctatttgatgaggataaagactcttatatttcactagttcatatagatgattttaagaaggattacgtgaaatatattgaagcggcaaaagaaaaacgggacagaaaagatgaatttgaactagtaaaaaaaatgtga

SEQ ID NO: 18597 - DNA, 1422 bp, Paenibacillus curdlanolyticus YK9
ttggctagcaaacaagaattagttcgtgaatttgtaagagctgtttctgagggttatgcagcgatttttgctggtgccggtctatctcgcggttcaggctatattaattggaaagagctcgttcgacctttagcatcagagattggcttaaatgtggataaggagcatgatttaattgcaattgctcaatattatcgtaatgaacgaggtacgcgttacgctattaatcaaagaattctaaatgaatttacacgtggtgccgtagacaatgaaaatattgagattcttaccagactccctatatctacatattggacaacaaactatgatgaattgttggaagagaacctcagaagaaataatagaaaggctgatgtaaagacgacccaagaatcactggcaaataatatatacgatagagatgcagttgtttataagatgcatggggatgtaagatcccccgaaaacgcagtccttactaaggatgattatgaactatatggaaatgaacgtcctcttttcagaacagcccttcaaggtgatttgatttcaaaaacgtttctatttatcggatttagctttgaagaccctaatcttgattatgtattaagccaaatacgtgtactgttaggggagtcgcaacgagatcattattgtttctttcaaaaaatttctaagcagaatggcgaaagcgaagccgattatcaatataatttagcccgtcaggatctaaggataaaggatctacgccggtatgggatacaagctgttattttagatagttatgatgaaattactgagatacttcaagatattgagcatggatatctcctgaaaaatatttttatctcaggaagtattgctgagtttggggaggaatggactagggagagagttaatttttttactcataacttggcaaaaaaattagttcttgaagattacagaattgtttctggttttggttttggtatcggttcaacaattataaatggcgctttagaagaaattatgaggagcaaatataagcatgtcgatgaacatctgtgtttgcgtccgttccctcaatattcatcaggggaaatgcctatgaatgaacttattaaggaataccgtgtggatatgattcagcaagctggaattgcagtgtttattttcggcaacaagaaggatgagaacggggacataactgtggcagatggaatgattgaagagttcaaaattgcaaaaaaacaaggaaaaataataattccggtttgcagtactggtggtgcatctgcaattatttacaatgaagtgattaaaaatagtgaacagtatccgtatttagatggatacttagataagttggcagaagtaaccgaagctgattcactcattgatttaatatatagtattattaaaaaccagcagattatctaa

SEQ ID NO: 18598 - DNA, 501 bp, Paenibacillus curdlanolyticus YK9
atggctaaacgccaagtgtttttcagctttgaatataataaggatgcatggagagcttctcagataaaagaaatggggaaagtagatggtagttctacattctcggcgaatgattgggaagaagtaaaagaaaaaagcgatgcaaaaattaaagaatggattgacagccaaatggtaatgcgctcatgtttggttgtgttgattggtgccacgacatcaggaagaaaatggattaaatatgaaattgaaaaagcttacgagttaaataaggggatagtgggtattcatatccataatctaaaggactcccaaggtaaacaaactacaaaaggaagtaaccccttttataatatatttatcggtgaaaataatgagcggttatccaaatatgtgacttgttttgattcagtgtactcttcaagtaaatacgtgtatgatgatatcaaggataagattgagcaattaattgaagatgctattgcaaataaggcaccccagtaa

SEQ ID NO: 18599 - DNA, 612 bp, Paenibacillus curdlanolyticus YK9
atggctcataaaacgtttatatcctataagtatagtgaggcaagaagtttacgcgatttgataattcaatcactaggtgaagatgctacatattatcaaggtgaaacctccgattcacctgacttaacggatacatcgaccgagaatattaagagaaagctgacagatatgatgtatgatacaagtgtcacaattgtaataatctcgcctaacataaaaaaaagtgaatggattgaatgggagatcgagtatagccttaagaacatttctcgaaaaggtcgaacctcacatactaatggagttgttggtgtcattatgaaacataatggaggttatagttggtttaaaacttcttcggataagtctgacggatgttcttcttccagttatgatgaaaataaggtatatggaattattaacaataatcgttttaatcagaatcctaaagtatatagttgtgatacgtgtaagacagtagatgcattaactggatcgtatattgcgtatgttgaagaagagacttttctgtctaatccagagaaatatataaataatgcattcgataagagtgaaaataatgcaaaaggttatgacatcgttaaaactcgatga

SEQ ID NO: 18600 - DNA, 1401 bp, Aggregatibacter actinomycetemcomitans serotype b str. SCC1398
atgaataaaaaacaattgataaaagaattagttaacgagttatctgcaaataacctagccatcttcgctggtgcagggttatctgtttcagctggttttgtagattggaagatattgcttcgtgatttagcagatgagatgaatttagatatagacaaagaagaaagcaatctagtctctttggctcagtattatgtcaatagtaaatgtggtaaacgttcaaaaatcaaccaactcattttagatgagttttcccagagtgctacattgacagaaaatcataaaatattagctagacttcccatagatactttctggacaaccaattatgactctatgatagaaacagcattaaaagaagctgggaaagttgtggatgtaaagcactgcgtagaacaacttccaatatcaattcataaaagagatgttgttgtatataaaatgcatggcgatgcttctctgccaaatcaaactgttcttatcaaggacgattatgagaaatttcatttaacaagaaatgacttttttaatgctttgcgtggagatctattaacaaaaagatttttatttttagggtttagcttttctgatcctaatattgattatattctgagtcggattagagcgtcatatagtgaaaatcaaaaagagcatttttgtattttaagaaaagtccaaaagaatgagaatgaaccacaagatgaatttgaatacagacaacggaagcaacaattttttatttcagatttagagcgagtaggaattagtgcgttattaattgatgattattcagaaattacagaaatattgatggaaatagaacaagctcaaaaacgtaaaactatttttatctcaggggcagcagaaaattattctccttattctcagcaagaagttgaacaatttgtttcttctctttctcaagagattttaaaactagggtatcgtattgttacaggttttggattaggaataggtagctcagttatttcaggcgcaataaaacatcttacggaacaaaatttaaaaatagatgaggactatttgatacttcgcccattccctcagaataaagaagggaaagaattgtggtctgcttggcgtgaagatatgatttcttatgctggtatctctatatttctattcggaaataaattacagaatggaaatttgattttatcaaatggtatgcaggaggaatttgatatttccaaaaggaatggaaatgttttaatccctgttgctgctactggatatatggcaaaacaactctgggataatgagatgaataaagagtctgctaaggaggttgaaaatgaaatgcaagcactatctaaagaaaatatttcgctagatgaattaagatctaatattttgtcaattttaaaaaaggttaaataa

SEQ ID NO: 18601 - DNA, 483 bp, Aggregatibacter actinomycetemcomitans serotype b str. SCC1398
atgaagagaaatgtattttatagttttcattatgaaaaagatgttttacgtgttcaacaagtaagaaacattggaaagctagaaggcaatccaccagcgacacctaatacctgggaagaaataaaaaggaaaggagataaagaaatacaaaaatggattgatgaaaatttatctggtaaaagctgtctggttgttctgattggagaagatacatctaaacgaaaatgggttaagtatgaaattcaaaaagcttggaatgatggaaaaggcgtattgggtatctatattcataacctgaaagatccaaaaagtggtgaatgtagaaaaggcgacaatccatttgaacaatttacgttcgaaaatggttctaaattatctagcatagtcaaatgttataatcctaaatcttcggatgcctataatgatattgcagataatatagaaaaatggattgaagaggctatttccattcgtaaaaaataa

SEQ ID NO: 18602 - DNA, 645 bp, Aggregatibacter actinomycetemcomitans serotype b str. SCC1398
atgggaaataaaatttttatttcgtataaatattctgacaatgctgttaaacaacttaaagaacccaataatttgttttcattctatagtcaatataaaacaactgctcgtgattatgttgatattattaaaaataaatttgagcgtgatgatattcatatcaataaaggggaaaatgataatgaaagtcttgccggctttaaaacggagactattcgttcaaaattagcagaaaagatttttgatagttccgttaccattgttcttatctcccccaatataaaaaattcttggaaatcagagaaagatcaatggataccttgggaaattgcttattcactaagaagtaagcgacgtccagataaccgaagcaagcgtaatgcaattttattggtcgttctacctgatagatatggttattatgattacgtaaattcatatggcttttattttgatattattcaaagaaacttgaataacctgcatacaccatatactacatataaactaaggaatggttgttctaattcatatatgcttcaatgtaactgggataagtttatctctaatccgaatgcttggattgaagctgcaatagaaattagagataaaggaaataattataatattgtaataagaccataa

SEQ ID NO: 18603 - DNA, 1401 bp, Aggregatibacter actinomycetemcomitans serotype b str. I23C
atgaataaaaaacaattgataaaagaattagttaacgagttatctgcaaataacctagccatcttcgctggtgcagggttatctgtttcagctggttttgtagattggaagatattgcttcgtgatttagcagatgagatgaatttagatatagacaaagaagaaagcaatctagtctctttggctcagtattatgtcaatagtaaatgtggtaaacgttcaaaaatcaaccaactcattttagatgagttttcccagagtgctacattgacagaaaatcataaaatattagctagacttcccatagatactttctggacaaccaattatgactctatgatagaaacagcattaaaagaagctgggaaagttgtggatgtaaagcactgcgtagaacaacttccaatatcaattcataaaagagatgttgttgtatataaaatgcatggcgatgcttctctgccaaatcaaactgttcttatcaaggacgattatgagaaatttcatttaacaagaaatgacttttttaatgctttgcgtggagatctattaacaaaaagatttttatttttagggtttagcttttctgatcctaatattgattatattctgagtcggattagagcgtcatatagtgaaaatcaaaaagagcatttttgtattttaagaaaagtccaaaagaatgagaatgaaccacaagatgaatttgaatacagacaacggaagcaacaattttttatttcagatttagagcgagtaggaattagtgcgttattaattgatgattattcagaaattacagaaatattgatggaaatagaacaagctcaaaaacgtaaaactatttttatctcaggggcagcagaaaattattctccttattctcagcaagaagttgaacaatttgtttcttctctttctcaagagattttaaaactagggtatcgtattgttacaggttttggattaggaataggtagctcagttatttcaggcgcaataaaacatcttacggaacaaaatttaaaaatagatgaggactatttgataattcgcccattccctcagaataaagaagggaaagaattgtggtctgcttggcgtgaagatatgatttcttatgctggtatctctatatttctattcggaaataaattacagaatggaaatttgattttatcaaatggtatgcaggaggaatttgatatttccaaaaggaatggaaatgttttaatccctgttgctgctactggatatatggcaaaacaactctgggataatgagatgaataaagagtctgctaaggaggttgaaaatgaaatgcaagcactatctaaagaaaatatttcgctagatgaattaagatctaatattttgtcaattttaaaaaaggttaaataa

SEQ ID NO: 18604 - DNA, 483 bp, Aggregatibacter actinomycetemcomitans serotype b str. I23C
atgaagagaaatgtattttatagttttcattatgaaaaagatgttttccgtgttcaacaagtaagaaacattggaaagctagaaggcaatccaccagcgacacctaatacctgggaagaaataaaaaggaaaggagataaagaaatacaaaaatggattgatgaaaatttatctggtaaaagctgtctggttgttctgattggagaagatacatctaaacgaaaatgggttaagtatgaaattcaaaaagcttggaatgatggaaaaggcgtattgggtatctatattcataacctgaaagatccaaaaagtggtgaatgtagaaaaggcgacaatccatttgaacaatttacgttcgaaaatggttctaaattatctagcatagtcaaatgttataatcctaaatcttcggatgcctataatgatattgcagataatatagaaaaatggattgaagaggctatttccattcgtaaaaaataa

SEQ ID NO: 18605 - DNA, 645 bp, Aggregatibacter actinomycetemcomitans serotype b str. I23C
atgggaaataaaatttttatttcgtataaatattctgacaatgctgttaaacaacttaaagaacccaataatttgttttcattctatagtcaatataaaacaactgctcgtgattatgttgatattattcaaaataaatttgagcgtgatgatattcatatcaataaaggggaaaatgataatgaaagtcttgccggctttaaaacggagactattcgttcaaaattagcagaaaagatttttgatagttccgttaccattgttcttatctcccccaatataaaaaattcttggaaatcagagaaagatcaatggataccttgggaaattgcttattcactaagaagtgagcgacgtccagataaccgaagcaagcgtaatgcaattttattggtcgttctacctgatagatatggttattatgattacgtaaattcatatggcttttattttgatattattcaaagaaacttgaataacctgcatacaccatatactacatataaactaaggaatggttgttctaattcatatatgcttcaatgtaactgggataagtttatctctaatccgaatgcttggattgaagctgcaatagaaattagagataaaggaaataattataatattgtaataagaccataa

SEQ ID NO: 18606 - DNA, 1437 bp, Enterococcus faecium E4452
atggataagaaagttttaataaagaggttctctgaagctattgaaaaaggaaatgcagcaatatttgcaggtgcaggattatcgatgtcacaaggatatgtaagttggccggaactacttaatgatcctgcaacagaaatcgggttggattctaaaaaagaaacagacttagttactctggctcaatattataaaaatgaaaatggtggatcaagaggaattttgaatcagatacttatggataattttggtgaagaattagaaatatctgaaaatcatcgaatactagcaagtttacctattgaaacttattggacaactaattatgatcatctaatagaaaaatcaatccgagaagcttataaaaaccctcaggttaagaaaaattatactcagttagcaacaactaatccaaatgtggatacaattgtttataaaatgcatggtgatatagatgatgtcagttcgacagtaataacaagagatgattatgaaaaatatgatgatgattcgtacgcgttatttaaagaaactttaaaaggagatttgttaacaaaaacttttctctttttaggatttagttttacagaccctaatttagaaagaattttatcagatataagatgggttttgagagaaaaccaaagacctcattattgtataatgagaaaaatattaaaggaaaattttgtcgattctgaggatttttttgatcaagagagatataattatgaactgacaaaaagaagactacaaatcaatgatttgtccagattttcgataaacgttgttgaagtagatgattattctgagattactgatattttgaaaagtattagaaaaaagtatttgagaaaaactatttttatttcgggaagtgctgttgattatactccatttacatctgaatcgaaaggattaaaatttgtcgagaaattagcatataggctttctgaatccggttatagaatagtatcaggttacggacttggaattggtaatagtattgtttcaggagttctaaagcagagaagaaatttaagaaaaaataacatacaagacgtactttctttaagaccacttccccttgatatgcctcatgaatggagaagatatcgagaaaacattattgcagagtctgggattagtatttttgtttttggaaacaaacttgaatcaggtgaaatagttacagcagatggaatgattgaagaatttgaattatctgttcaaaatgaaaatatagtagttccgattggatttaccaaaggtgcaagtaaggttttgtttgataagattcaagagaatttcagtgattattttgatgattccttaaaaagtaaatttcaagcgctagaaaaattagatactgaaggagaagtagataaaaaagttgaacaaattgtcagtttaataaatagtattcaggaggattaa

SEQ ID NO: 18607 - DNA, 486 bp, Enterococcus faecium E4452; identical to SEQ ID NO: 18578

SEQ ID NO: 18608 - DNA, 852 bp, Enterococcus faecium E4452; identical to SEQ ID NO: 18579

SEQ ID NO: 18609 - DNA, 1422 bp, Rhizobium grahamii CCGE 502
gtgaacagagacgtttcccgctttatcgatgactactttggcgaaatgatcgcggggaatgcggcgatattggcgggcgcgggactatccgtcccggccggctttgttgattggcgggaacttgttcgcccgcttgccgatgaacttgaactggacatcgatcgagagacggatttagttgccgtagctcaatttcatgtcaatgcgaatgggaacaatcgaaatcggcttcatcgagcggtgatcgaagccttgtcagcagacaacccaccaaccgtgaaccacggccttctcgcacgcctaccaatcgtgacttggtggaccactaattatgacaagttgatcgagacggctctgaaggacgccggcaagattgtcgacgtaaaaacgtcggtggcgcaacttgcaaatactcgaccgcgtcgcgacgcgattgtttacaaaatgcacggggacgttgatcgacccgacgaagcgattgtcacgcgagatgattacgagcgatacaaccgtgatcgcggtgcatttataaatgcgctcgcaggggacctggtatcgaaaacattcctctttcttggatttagcttcaccgatcctaacctcgaccaggtgctagcccgtctacgcttaacctttgaaagcaaccaaagacgccactatgccatattcaaaaagcggacgcggttaagcaccgaggatgcagcctcgttcgagcatgcaaaaattcgccaagccttagtaatcgaagaccttaagcgcttcaacgtgaaggttgtgctcgtagacgactacggtgatatcactgaaattctccaggagtttgagcgtcgttatcgccggcaaacagtatttgtgtccgcaagtgcggcgtcgttcgagccttggggcgaagcggccgtcacaaattttatgcggacattggggaagaagctcgttgctaaaaacatgaagatagcgaccggtttggggttgggtgtaggaaattcgcttttcacgggcgcgcttgagcagatcatggaggcccgaacgggccatatcgaagattaccttgtaatcagaccctttccccaggcgatccccgatgcccgtcagcggcagcaagtgtgggagcagtatcgccgagagatattaggcaaagcggggatcgcggtctttcttttcggaaacaaactagcgggcactgacgtagtcaacgccgatgggatggagaaagagttcaacatcgcggcggagttgggcctgatcacattaccgatcggtgcgactggctacatggcggaaaccctgtccgggagggcgttaattggcctgacagacagtcaaaaggcgcaactagaccagatccaagtgcctgttgacgacctgaatgatttgatcgatccgattgttaaactcgtatccgcattgcgcgaaggaaagtaa

SEQ ID NO: 18610 - DNA, 489 bp, Rhizobium grahamii CCGE 502
atggcacgcaaggtcttctttagttttcactatcagcgcgacgttatgcgcgtcatgcaagttcgcaactcttgggtagtccgctcgaaaggagaggcaacgcccttctacgacaaagcggagttcgagcaagtcaagaaaaaagcagggggcattgagaggtggattgaagagcaaatgaatggaacgtcggtgacggttgttctttacggtcgagagaccttcgaccgcccttgggtcttgcacgaaatcaggcgcagctacgaattaggcaaggggctcatcgcaatcgcaattcacaatgtgaaggaccctcggaacggaactgactacgcgggcaaaaatccgcttagctatttcacaacaacgagaaacggggtgaagttcgacctcagccagctttacccctcgtatgattgggtgaacaatgacggctatacaaatttgccagcctggattgaaagcgcggcgaaggctgccggaaaataa

SEQ ID NO: 18611 - DNA, 654 bp, Haemophilus pittmaniae HK 85
atgtgccgttgtatgctacatattttatttaaaaagcttgaaaaagtcctatttatctatatttcaagaaaagttatcaaacaaaagaatgaagagagaattatgaacaaaaaacagtttatacgagaattggttaatgaactatctgcaaataatttagcaatttttgctggggctggattatctgttgctgctggattcgtggattggaaagggttgcttaaagatttagctgaagaattagatttgaatattgacaaggaagaaaatgatctaatttccttagcacaatactacattaacgaaaaacagggtaatcgttctaaaataaatcaaatcattttgaatgaattttctcaacaagcagttctaacggagaaccataaaattttagctagattacctatagatactttttggacaaccaattatgattcaatgatagagaatgctttaaaagatgcggggaaagttgtagatataaaacattgtatagaacaactccctacatctgttcataagagagatgttgtagtttataaaatgcatggtgatgcttctctgccaaaccaaacagtcttaattaaagatgattatgaaaaatttcatttgacaagaaatgattttttactgctctgcgtggagatttattaa

SEQ ID NO: 18612 - DNA, 627 bp, Haemophilus pittmaniae HK 85
atgggaaataaagtatttatttcatacaagtattctgatgattcagtgcaacaattaaggccatatgaattttttcatgtaacaactgcccgtgattatgtggatattattcaaaataaatttgatcgagatggaattcatattaataaaggtgaaaaggatgacgagagcttaactgaatttaaaagcgaaactattcgctcaaaactagcggataaaattttcgatagctctgttactattgttctcctctctccgaatatgaaggattcttggaaattagagaaagatcaatggataccttgggaaattgcttattcattaagaagcaaacgacgtttagataacaggagcaagcgtaatgcaattttgttagtagtcttacctgatagatgtggaaattatgattatgtaaattcatatggattttattttgatattattaaaaataacttaaataaccttcatactccatatattgcagataaactaataaatggttgctctaattcatatatattgaagtgtaattgggctcagtttatttctaatccaaatgcttggatagacgctgcaatagaaattagagataaaggagacaaatataatatcgtagtaagaccttag

SEQ ID NO: 18613 - DNA, 495 bp, Haemophilus pittmaniae HK 85
atggctagaaaagttttttatagctttcactttgataacgatgcctggcgagctggtcaagtacgtaatattggtgtagttgatggttccgaaccgttaaaaggtaatcgttgggaagatgttaaagctaaatctgacaaagagattgagaaatggattaatgataatctaaaagacaaatcttgccttgttgttttaattggttcagaaacgtcagaaaagaaatgggtaaagtatgaaatcgaaacagcttggaaactaggaaaagctgtatgcggtatatacgttcataaattaaaagatgctaatggagaacaatcagatgaaggaaataatccattttattgttttacaataggcgataaaaatttatctgagatagctccagtatttaaatcttcataccttagtagtaaatatgtatatgatgatatagcagagaatattgaagatttagttgaagaagcaatttctgttagggaagaatataaataa

SEQ ID NO: 18614 - DNA, 1410 bp, Streptococcus pneumoniae GA47502
atggaaaaagagctatttattaaaaaatatactaaagttattcaagaagggaatgctgcagtatttgctggtgcggggacatcagttgatgccggttttgttaattggaaagaattggtaagaccattctcagaagaaataaatttggacattgataaagaaacagatttaattggagtggcgcaatactatatcaattctaaaatgggaaatcgtggtactgtgaatcaaaaaataattaatcagttttctagttcagatgcagaaacggatgttatgaatatattaacacgtcttcccatttctacatattggacaacaaattatgatgaggtcatagaaaatggattggaaaaaaataatcgtaggggggatataaaaagaaaagtagatgatttggctattaatatttatgatagtgatgctatcgtatataaaatgcacggtgatataagatctccccaagatgcagttatttcaaaagatgattatgaaagatatggtgagaaaaattcgttatttgttacagccttgcgtggggacttagtctcaaaaacgttcctatttgtagggttcagttttgaagatccaaacctagagtctattttaggaaaggtgaatgttttattaggagataacaaaagagaacattattgtattcagagaactgtattaagaaaagattataaaacgaaaaaagagtatgactatgcaaaaataaagcaaggtttaaaaataatagacttaaaacgatatggtattgagactgttttggtaaatgattatactgagattccccaattattactagaaattgaaagagaatattttaaaaatacaatcttcatttcaggtagtatatcagattataatgagaattggagtgaagaaaaggtaaatcaatactgctatgatttatctagttttcttatttcaaaagattataaaataatatcagggtttggactggggataggaagcagtgttattaatggtgcgctggatcaaatttataaaactaaatatagacatgtggctgaacaccttggtttgtttccttttccccaaaatgctaatggagagaaatcgttaaaagaatgttggaccgagaatcgtgaacaaatgattagtgagtcaggggtgtgtatatttttatttggtaacaagctagttgatggtaaggtagaacttgcttcaggcatgatggaggaatttcaaatagctaaagaaaaaggaaagataatcattccgattgcctctactggatttgctgcaaaagaaatttatgatgagatgaaacaatcaggagaatatagttatttagataattactgggaaactttggagactgaaaaggatttcactaaagttttttccacgattgataaaattgtcaatgaggtacgataa

SEQ ID NO: 18615 - DNA, 621 bp, Streptococcus pneumoniae GA47502
atggcaaccaaaatatttatttcgttccgttttagtgatggaaaagagattaaagacgaactagttgatttatttgatgaatctactgaggtaattaatagatcagaagatgttgatagaggtcaaatgagtgagaacattattaaggaatatctatatgagaagttaaaagatacatcggttacaattgtattattaactccagaggctgtttcttatagaaagaattggattggaaattatgatgattggctttatgatgaactaaggtattctttagaggatagaaaaaataacagaacaaatggtgtgatagctgtttatactgatgaagctaaagataaggtactagatgatagtactcattattgtcaacattgtcagcagactaagtcgtgtaggtctttgaaatattttgataatttagctagaaagaacatgctaaatattaagtcggtttataagaaaaatccatgtaatgatctttatgatgatgagcacgattcttatatttctttagtgagtttgaacgatttcaaagaagattatagtcgatatattcagaatgcaaaagacaaaagagaacgattagatgagttcaatatagctaagaggatgtaa

SEQ ID NO: 18616 - DNA, 933 bp, Streptococcus pneumoniae GA47502
atgtctttagaaactaatgattttattcttgaaacatctaaatatataagaagacgagtaagaaaaaatattttgagtattgaagaaagaaaaactcaggcagatgaaattcgaaaaaaatctttagtaaaattaaagctgcaaactataaaaagaaaaaaatcattagattatatccaagaaataaatccctcttatctggaacattatcgcaaaagattttttaaaacacatgatttacatgaaagatttgaaatcattagagaactttcgaagtatgattcaaaggaagttcataattttttctatgcaataaatggtcatgtaagaaatcaatcgctaaaaaaagaagttcagtcgtactttcaaagtttatctctaccgtttagattgagtagaaaaaagaaaggaaaaacaaattttattgataatgaaatagtaacaaataggaaaggaccagaagagttgaagaagaggttatacattgatgatctagaaaagataaaaaaatttgatatctttctttcacataactctcaagatgaagaaaaaataataaccttttataaaaacctaaacaaaaatggccaagtcgtatatattgactgggttaatgataaatacgatctgaaacgagaatggtgtaatacttcaacagtcgatattatcaaagagcgtataaaacaatcggatgtatttgttttgtacttttcaagtaagacacttaattctcagtggtgtgcttgggaattgggatatgcagatggaattggaaagaaaatatgtatctatttttcagaaaaaatagatagaacaattattcccaaattttattctatttatccagagctacatctttctgaaaacattacaattgaagttgataaacaatcatctattatatttaatgattggaaaaataggagtagttaa

SEQ ID NO: 18617 - DNA, 1128 bp, Staphylococcus aureus subsp. aureus 21331
atgactatagataagaaaaaattcattgaaaaatatgtaaaagctttagaaagtaatacagcggctatttttgctggagcaggattatcttgtggagcaggttatgttaattggaagacattgcttaatgaagcagcagaagaattagaattaaatatagataaagaagaacatgatcttgtaggattagcacaacattatattaataagaaaagaagtcgtggaaatctaaatacagtaataatggagcaattttcaacaagagcagaattaacagaaaatcataagcttttagcaaaacttcccattgatacatattggacaactaattatgattgtatgattgaaaaagctcttgattctgagggcagaattgtagatgtgaaaagaaatcaaaatcaattaactgtttcagtagccgataaggatgctacagtttataaaatgcatggggatatagacagtatagacaagattattttaactagagatgattatgaaaaatataatctaactcatccaaagtttcgtgaaatattggaaggagatttactttcaaaaacttttctattcataggttttagctttacagatccaaatattagttatatcttatcgagaataagattagtgttagaagacaatactagaccacattattgtattttaaaagaagtagaagaaaaggaatatgataatacagaagaatttatgtatgcaaagataaaacaacaacttcatatagaagatttaagccgattttcaatagaaactttattagttaaagattatattgaaatcacagaaatattagaaagtatttataaaagatatagaagaaaaacaatttttatatcaggaagtgctacagaatatttaccttttaattcagaaacagggaaatattttttacatcaactaagtaaaaaattagttgaaaatgattttaaattagttacaggttttggattaggagtaggatcatatgttattaatggagtagctgattatattaatagtaataagaagtctaaactacagaatcatttaaatatattgccattttctcaagattcaagtggcgatttagacttaaaagaagtatggaaaaaaatcgcttggaaatga

SEQ ID NO: 18618 - DNA, 609 bp, Staphylococcus aureus subsp. aureus 21331
ttggcgcgtaaaacatttatttcatataaatactctgaagcaaaagatttaagagataaaatagtggaatctctaggagaagatgctaaatattatcaaggagagacaagtgattctcctgatatgtccgatagaataacagagtatattaaaaaagaattaaaaaataagatatattcaacttcagtaacaattgtagttatttcacctaatatgaaagaaagtaattggattgattgggaaatagaatactcagttaaacaaatgaaaagaggagatagaacatctagtactaatggtgttgtaggggttgttatgaagcataatggtgattattcatggttaagaaattctgttattaattcagagggtcataccgcaattcatactgacaatagttatttatatgacataatagtgaagaatagatttaatcaggaacctatagaatatacgtgtgatgaatgtaaaaatatagatgcattaacaggatcttttatttctttagtagaagaagatgaatttttgggtaatccaactaaatatatagaaaatgcatatgaaaaaagtaaaaaagcaacgaattataatatctgtagaagaaaataa

SEQ ID NO: 18619 - DNA, 927 bp, Staphylococcus aureus subsp. aureus 21331
gtggaaagacaacaaacttacaaagaaaaagcgcaacacctatataaagttaaaaaaatcaaaaatagatataatacgaaaagtgcagaagaatattttttctcgattcctcaagtaaaatacattctttcagcaggaagaatgaaaaaacataaagagaattataatgcttcagagataaaaataaaaaaagcagctttagaaaagagtaggaagaataagaattggaaaattgaagaacgtttaataaaagctaagagatatactcaaaaagttgatccagaatacttaaatatttatatgaaagcttatcataagaaagatataactacagaagaaaaactagaaattctaacggaattaaaaaaatttgatacagaaaatatagtgcgtttttttagaaaattaaatgatgctgaacaaaataaaatgattagaaatttagcctttaaatatttacaagattacggtcactatgtgaaactaaggaaaaattttaaaggaaagaagaaagtatatcaaactgagagagcttctttagacactaaaaaacctgaagatttatataatgatttaacaaataagaatattcaatctcaaaaagtctatgatatttttatttctcatagtacaaaagataagaagacagttgaagatattataagagtttttaatgaacaaaataaaacgtgttattgtgattggactatggatcaagattatttaaaaaggaagtatgttggtgaatatacaaagcaagtattgaaggctcgtatggagcaaagtaaaatgctggttttgttgagaacggagaattcagttcaatctgattgggttagttttgaaatagaatactttgaaaatctaaaaaaacctatatatatagtagagtctcttgaagaattattagaggctttttcagattag

SEQ ID NO: 18620 - DNA, 1401 bp, Aggregatibacter actinomycetemcomitans RhAA1
atgaataaaaaacaattgataaaagaattagttaacgagttatctgcaaataacctagccatcttcgctggtgcagggttatctgtttcagctggttttgtagattggaagatattgcttcgtgatttagcagatgagatgaatttagatatagacaaagaagaaagcaatctagtctctttggctcagtattatgtcaatagtaaatgtggtaaacgttcaaaaatcaaccaactcattttagatgagttttcccagagtgctacattgacagaaaatcataaaatattagctagacttcccatagatactttctggacaaccaattatgactctatgatagaaacagcattaaaagaagctgggaaagttgtggatgtaaagcactgcgtagaacaacttccaatatcaattcataaaagagatgttgttgtatataaaatgcatggcgatgcttctctgccaaatcaaactgttcttatcaaggacgattatgagaaatttcatttaacaagaaatgacttttttaatgctttgcgtggagatctattaacaaaaagatttttatttttagggtttagcttttctgatcctaatattgattatattctgagtcggattagagcgtcatatagtgaaaatcaaaaagagcatttttgtattttaagaaaagtccaaaagaatgagaatgaaccacaagatgaatttgaatacagacaacggaagcaacaattttttatttcagatttagagcgagtaggaattagtgcgttattaattgatgattattcagaaattacagaaatattgatggaaatagaacaagctcaaaaacgtaaaactatttttatctcaggggcagcagaaaattattctccttattctcagcaagaagttgaacaatttgtttcttctctttctcaagagattttaaaactagggtatcgtattgttacaggttttggattaggaataggtagctcagttatttcaggcgcaataaaacatcttacggaacaaaatttaaaaatagatgaggactatttgatacttcgcccattccctcagaataaagaagggaaagaattgtggtctgcttggcgtgaagatatgatttcttatgctggtatctctatatttctattcggaaataaattacagaatggaaatttgattttatcaaatggtatgcaggaggaatttgatatttccaaaaggaatggaaatgttttaatccctgttgctgctactggatatatggcaaaacaactctgggataatgagatgaataaagagtctgctaaagaggttgaaaatgaaatgcaagcactatctaaagaaaatatttcgctagatgaattaagatctaatattttgtcaattttaaaaaaggttaaataa

SEQ ID NO: 18621 - DNA, 210 bp, Aggregatibacter actinomycetemcomitans RhAA1
ttgggtatctatattcataacctgaaagatccaaaaagtggtgaatgtagaaaaggcgacaatccatttgaacaatttacgttcgaaaatggctctaaattatctagcatagtcaaatgttataatcctaaatcttcggatgcctataatgatattgcagataatatagaaaaatggattgaagaggctatttccattcgtaaaaaataa

SEQ ID NO: 18622 - DNA, 645 bp, Aggregatibacter actinomycetemcomitans RhAA1
atgggaaataaaatttttatttcgtataaatattctgacaatgctgttaaacaacttaaagaacccaataatttgttttcattctatagtcaatataaaacaactgctcgtgattatgttgatattattcaaaataaatttgagcgtgatgatattcatatcaataaaggggaaaatgataatgaaagtcttgccggctttaaaacggagactattcgttcaaaattagcagaaaagatttttgatagttccgttaccattgttcttatctcccctaatatgaaaaattcttggaaatcagagaaagatcaatggataccttgggaaattgcttattcactaagaagtaagcgacgtccagataaccgaagcaagcgtaatgcaattttattggtcgttctacctgatagatatggttattatgattacgtaaattcatatggcttttattttgatattattcaaagaaacttgaataacctgcatacaccatatactacatataaactaaggaatggttgttctaattcatatatgcttcaatgtaactgggataagtttatctctaatccgaatgcttggattgaagctgcaatagaaattagagataaaggaaataattataatattgtaataagaccataa

SEQ ID NO: 18623 - DNA, 1470 bp, Staphylococcus aureus subsp. aureus 112808A
atgaatggagatggcaaaatgactatagataagaaaaaattcattgaaaaatatgtaaaagctttagaaagtaatacagcggctatttttgctggagcaggattatcttgtggagcaggttatgttaattggaagacattgcttaatgaagcagcagaaggattagaattaaatatagataaagaagaacatgatcttgtaggattagcacaacattatattaataagaaaagaagtcgtggaaatctaaatacagtaataatggagcaattttcaacaagagcagaattaacagaaaatcataagcttttagcaaaacttcccattgatacatattggacaactaattatgattgtatgattgaaaaagctcttgattctgagggcagaattgtagatgtgaaaagaaatcaaaatcaattaactgtttcagtagccgataaggatgctacagtttataaaatgcatggggatatagacagtatagacaagattattttaactagagatgattatgaaaaatataatctaactcatccaaagtttcgtgaaatattggaaggagatttactttcaaaaacttttctattcataggttttagctttacagatccaaatattagttatatcttatcgagaataagattagtgttagaagacaatactagaccacattattgtattttaaaagaagtagaagaaaaggaatatgataatacagaagaatttatgtatgcaaagataaaacaacaacttcatatagaagatttaagccgattttcaatagaaactttattagttaaagattatattgaaatcacagaaatattagaaagtatttataaaagatatagaagaaaaacaatttttatatcaggaagtgctacagaatatttaccttttaattcagaaacagggaaatattttttacatcaactaagtaaaaaattagttgaaaatgattttaaattagttacaggttttggattaggagtaggatcatatgttattaatggagtagctgattatattaatagtaataagaagtctaaactacagaatcatttaaatatattgccattttctcaagattcaagtggcgatttagacttaaaagaagtatggaaaaaaaatcgcttggaaatgatttctgagtgtggaatggcattatttttatttggaaataaagaaaaggatggaaaaattgttttagctgatggattagaagaagaatataaaatagcagaaagacaagaattggttagactccctataaatgtgacaggttataaaacaaagaatctttcagaacaatataacgaagagataaatatacaatttaaagagaaaatattaaaaatgtataacgaaataaatgaatacaaatgtgatttttcaaataaacaaagtattgatgaattagttcaaaaaatagtaaatttagtaattgaaataaaaaaaacaaaataa

SEQ ID NO: 18624 - DNA, 609 bp, Staphylococcus aureus subsp. aureus 112808A
ttggcgcgtaaaacatttatttcatataaatactctgaagcaaaagatttaagagataaaatagtggaatctctaggagaagatgctaaatattatcaaggagagacaagtgattctcctgatatgtccgatagaataacagagtatattaaaaaagaattaaaaaataagatatattcaacttcagtaacaattgtagttatttcacctaatatgaaagaaagtaattggattgattgggaaatagaatactcagttaaacaaatgaaaagaggagatagaacatctagtactaatggtgttgtaggggttgttatgaagcataatggtgattattcatggttaagaaattctgttattaattcagatggtcataccgcaattcatactgacaatagttatttatatgacataatagtgaagaatagatttaatcaggaacctatagaatatacgtgtgatgaatgtaaaaatatagatgcattaacaggatcttttatttctttagtagaagaagatgaatttttgggtaatccaactaaatatatagaaaatgcatatgaaaaaagtaaaaaagcaacgaattataatatctgtagaagaaaataa

SEQ ID NO: 18625 - DNA, 1035 bp, Staphylococcus aureus subsp. aureus 112808A
ttgaagtaccctatacgacaagtagcagaagttttgccagagaaatatacaaggtatattttattaaaagaatttcagcgattatttccataccagtggaatataattgtggaaagacaacaaacttacaaagaaaaagcgcaacacctatataaagttaaaaaaatcaaaaatagatataatacgaaaagtgcagaagaatattttttctcgattcctcaagtaaaatacattctttcagcaggaagaatgaaaaaacataaagagaattataatgcttcagagataaaaataaaaaaagcagctttagaaaagagtaggaagaataagaattggaaaattgaagaacgtttaataaaagctaagagatatactcaaaaagttgatccagaatacttaaatatttatatgaaagcttatcataagaaagatataactacagaagaaaaactagaaattctaacggaattaaaaaaatttgatacagaaaatatagtgcgtttttttagaaaattaaatgatgctgaacaaaataaaatgattagaaatttagcctttaaatatttacaagattacggtcactatgtgaaactaaggaaaaattttaaaggaaagaagaaagtatatcaaactgagagagcttctttagacactaaaaaacctgaagatttatataatgatttaacaaataagaatattcaatctcaaaaagtctatgatatttttatttctcatagtacaaaagataagaagacagttgaagatattataagagtttttaatgaacaaaataaaacgtgttattgtgattggactatggatcaagattatttaaaaaggaagtatgttggtgaatatacaaagcaagtattgaaggctcgtatggagcaaagtaaaatgctggttttgttgagaacggagaattcagttcaatctgattgggttagttttgaaatagaatactttgaaaatctaaaaaaacctatatatatagtagagtctcttgaagaattattagaggctttttcagattag

SEQ ID NO: 18626 - DNA, 1413 bp, Streptococcus mitis SK616
atgaggaaagagcaatttattaaaaaatttacgaaagctgttcaagatagcaatgcggcagtttttgctggcgcaggaacatcagttgacgcaggatttgttaactggaaaaagctcgtaaagccatttgcggatgagattgatttagatattgataaagagtcagatttagtgggattgactcaatattatatcaattctaaaatgggaaatcgaggttctgtaaatcaggaaatagtttatcaattttctagtcaagaagcagaaacaaaagtaacgaatttactaacacgactacccatttctacatattggacgacaaactatgataacgtaattgaaaacggtttaaagaaaaacaatcgtagaggagatataaagagaaagatagatgatttagcaattagtattcgtgatagcgatgccattgtttataagatgcatggtgatgtagattcgcctaatgatgcagttatttcaaaagatgattatgaaagatatagtgataaaaactctttatttgtaacagctttacgaggtgacttagtttctaaaacatttttatttgtaggttttggttttgaagatcctaatttagaatctattctggggaaggtaaatgtcctgctgggagataataagagagaacattattgtattcaaaaacaagtgttagagagagactatgacgcagatatcgagggatataattacgctaaaataaaacaagatttaaaaatcaaagatttacagagatatggaatagagaccgttctagtagatgattattctgaaatatctgacttgatacaaaaaattgaggaggagtacttaaaaaatacaatcttcatttcaggtagtatatcagattataatgagaattggagtgaagaaaaggtaaatcaatactgctatgatttatctagttttcttatttcaaaagattataaaataatatcagggtttggactggggataggaagcagtgttattaacggtgcgctggatcaaatttataaaactaaatatagacatgtggctgaacaccttggtttgtttccttttccacaaaatgccaatggagagaaatcgttaaaagaacgttggaccgagaaccgtgaacaaatgattagtgagtcaggggtgtgtatatttttatttggtaacaagctagttgatggtaaggtagaacttgcttcaggcatgatggaggaatttgaaatagctaaagaaaaaggaaagataatcattccgattgcctctactggatttgctgcaaaagaaatttttgatgagatgaaacaatcaggagaatatagttatttagataattactgggaaactttggagactgaaaaggatttcactaaagttttttctacgattgataaaattgtcaatgaggtacgataa

SEQ ID NO: 18627 - DNA, 621 bp, Streptococcus mitis SK616
atggcaaccaaaatatttatttcgttccgttttagtgatggaaaagagattaaagatgaactagttgatttatttgatgaatctactgaggtaattaatagatcagaagatgttgatagaagtcaaatgagtgagaatattattcaggaatatctatatgagaagttaaaagatacatcggttacaattgtattattaactccagaggctgtttcttatagaaagaattggattggaaattatgatgattggctttatgatgaactaaggtattctttagaggatagaaaaaataacagaacaaatggtgtgatagctgtttatactgatgaagctaaagataaggtactagacaatagtactcattattgtcaacattgtcagcagactaagtcgtgtaggtctttgaaatattttgataatttagctagaaagaacatgctaaatattaagtcggcttataagaaaaatccatgtaatgatctttatgatgatgagcatgattcttatatttctttagtaagtttgagcgatttcaaagaagattatagtcaatatatacagaatgccaaagacaaaagagaacgattagatgagttcaatatagctaagaagatgtaa

SEQ ID NO: 18628 - DNA, 1167 bp, Streptococcus mitis SK616
atgggcaaagtaatgagacaatacaatgaattttatataaaattgcaaaaagaatttaaaccggctcataatatggtcatagagactatgccagaaaaattttctaacaaggactatgttgataaatttacttatatgtttcctgacaaaatttctaagctggaaaaggaaagaaattattggtatggtaaatgtattattaaaaagaatttagttaaaattcggcgtaaaagaatgtctttagagatttatgattttattcttgagacatctaaacatataaggaaacgaacaaggaaaaattttttaagcaatgaggaaagaaagaatcgagtagatgaaattcgcaaaaaatctttagagaaattaaagttacaatctataaaaagaaaaaaagtattagattatatccaagaaatagatccaccgtatctaaatcattatcgtaaaagatttttcagaacacatgatttacatgaaagattagagattattagagagctttcaaagtatgattcgaagaaagtccataattttttctatgcaataaatggtcatgtaagaaatcaatcgctaaaaaaagaagttcagtcttactttcaaagtttatctctaccgtttagattgagtagaaaaaagaaaggaaaaacaaattttattgataatgaaatagtaacaaataggaaaggaccagaagagttgaagaagaggttatacattaatgatttggagaaagtaaaaaaatttgatatttttctttcacataactctcaagatgaagataaaataataaccttttataaaaaattaaataaagatggacaagttgtatatattgattgggttaatgataaatacgacctgaaacgtgagtggtgtaatacttcaacagtggatattataaaagagcgaataaagcaatctgatgtatttgttttgtacttttcaagtaagacacttaattctcaatggtgtgcttgggaattgggatatgcagatgcaattggaaagaaaatatgtatctatttttcagaaaaaataaataaatcaattattccaaagttctactttaaatatccaaaattaattttttctgaagattttatggttaaaaatcatggacagtcagatattcaatttactaaatggaaagagaataaaaaataa

SEQ ID NO: 18629 - DNA, 1146 bp, Staphylococcus aureus subsp. aureus DR10
atgaatggagatggcaaaatgactatagataagaaaaaattcattgaaaaatatgtaaaagctttagaaagtaatacagcggctatttttgctggagcaggattatcttgtggagcaggttatgttaattggaagacattgcttaatgaagcagcagaagaattagaattaaatatagataaagaagaacatgatcttgtaggattagcacaacattatattaataagaaaagaagtcgtggaaatctaaatacagtaataatggagcaattttcaacaagagcagaattaacagaaaatcataagcttttagcaaaacttcccattgatacatattggacaactaattatgattgtatgattgaaaaagctcttgattctgagggcagaattgtagatgtgaaaagaaatcaaaatcaattaactgtttcagtagccgataaggatgctacagtttataaaatgcatggggatatagacagtatagacaagattattttaactagagatgattatgaaaaatataatctaactcatccaaagtttcgtgaaatattggaaggagatttactttcaaaaacttttctattcataggttttagctttacagatccaaatattagttatatcttatcgagaataagattagtgttagaagacaatactagaccacattattgtattttaaaagaagtagaagaaaaggaatatgataatacagaagaatttatgtatgcaaagataaaacaacaacttcatatagaagatttaagccgattttcaatagaaactttattagttaaagattatattgaaatcacagaaatattagaaagtatttataaaagatatagaagaaaaacaatttttatatcaggaagtgctacagaatatttaccttttaattcagaaacagggaaatattttttacatcaactaagtaaaaaattagttgaaaatgattttaaattagttacaggttttggattaggagtaggatcatatgttattaatggagtagctgattatattaatagtaataagaagtctaaactacagaatcatttaaatatattgccattttctcaagattcaagtggcgatttagacttaaaagaagtatggaaaaaaatcgcttggaaatga

SEQ ID NO: 18630 - DNA, 609 bp, Staphylococcus aureus subsp. aureus DR10; identical to SEQ ID NO: 18618

SEQ ID NO: 18631 - DNA, 1035 bp, Staphylococcus aureus subsp. aureus DR10; identical to SEQ ID NO: 18625

SEQ ID NO: 18632 - DNA, 480 bp, Lachnoanaerobaculum saburreum F0468
atgcgattatccgaaaaaggctatcatatcatcaatgggtacggtagaggtgttggagaatacttgctatcaggtgttgcggaatattgcctgataaacggtaaaaatattttagattatcttaccgttatgccgtttccacaaagcaatatctcgcatattgacattggaaagctttataaagagaataggaaacagatgattgaaaaatgcggaattgccatcttcgtttttggaaacaagaatggtaaaattgcaaatggagtattggaggagttttcaatttctaaagaaaaaggcttggtgtgtttgccaataggatatactgagggtgctgccaaagaaatctttgaaagcttatcttcaaatgataattcagaagcagtgattattgctaatgaaaaggttgatggagatatatcttcaactgcggaaaatatcataaaagctgttaatttaatgaacaaggaggacaattaa

SEQ ID NO: 18633 - DNA, 369 bp, Lachnoanaerobaculum saburreum F0468
atggcaagaagagtattttttagttttcactatgataacgatgtttggagagcaaataccattagaaatagctgggtaactcaggaaaaggaagctgcaggatttatagataaagctgagtttgaaaaagttagacgagcaggcgatagagcagttaagaactggatagatgaacaacttataggtacaagtgttatggttgtgcttatcggtagcgaaactttggatagaccttttgttcagtatgaaatagaggcaagccgaagaagaggcaatgctattattggagttacaataggtggtataaagaatcaatatcaaaacacgagccagtcccaaagtaaatacacacagataaacggggtttag

SEQ ID NO: 18634 - DNA, 1431 bp, Burkholderia sp. SJ98
atggcgttcagcaaagaaatcgaggcgttcatccgcgaatatgtgaaggacatcgcggaagacaatgcggccatcttcgccggagcgggcatgtcaaaaagctccggatatgtcgattgggcagagcttctgcgtgacatcgcggacgagattgggctgaaagtggaaattgagcacgaccttatcgcgcttgctcagtttcatgtgaatgagcacaagggatacgcaaagctttcgcgcaagatcattgaggagttttccgaacaagccgagccttctgaaacccatgctgtgcttgcccgattgccgattcgcacctattggaccacgaactacgacacgctcattgaggacgcgcttaagaacgcatacaaagtccctgacgtcaagcacagcatcgagcagctaaataccacacgaccgaagcgggacgcggtcgttcataaaatgcatggcgatgtcacccaccctaatagtgctgtgctctacaaggaacaatacgagcgctatcatcaaacgcacgcgccgttcgtgaccgccctcagcggggatctcgtatcgaaaaccttcctttttattgggttcagttttacggatccgaacctagactacgtgttgagcaggctacacaccacgacgaagagacatcactactgtttcatgagacgtgagcaagtccatgctggcgatgacgaagacgtcaagaagtacaagcgtcggaaacaggaacttcgggtcgatgatctgaagcggtttggtatccagacgttgttgattgacgactacaaagaggttccgcaaattcttgcagcaatcgaatctcgctttctcaagcgaacgatcttcgttggcggtagcgccgaagaatttggcacctgggacaagaaggaagcgcttgactttatacactcgttgtcgagcagcttggtcaaaaagaactatcgtgtcgtcaatggtttcgggtggggtgtcggcagtgcaattatcaacggagcgcttgacgccatctactcgaatcccgggaagtattccgaggaccagttggtcatgcgcccgtttcctcagttcgctagcaatgaccaggatctagcgacgctctgggaggattatcgccaacgtatgattgggctcgcgggtatttgtatttttctcttcggaaacaagcgaaacgatgccggagagatcgtcattgcgagcgggatgatccgcgagttcgaaatttcccgagaactgaaccgcattccaattccggtcgcttcgacgggttatgccgcacaggaaatctggaaccagatttcccctcacgttacggaaatctaccacggcgtcgagtgggctatcccgctcataaaggaaatttgcgatgtaggtgttgaccggacactcatcattgacaagctcgttgcaatacttaaccgattaggaaaataa

SEQ ID NO: 18635 - DNA, 489 bp, Burkholderia sp. SJ98
atgaccaaaattaagcgaaaagtgttctacagtttccacttcgacaatgacgtgatgcgtgtgcagcaagtgcgaaacatgggcgtgctcgacgggaatacccccgtgtctcccaacgaatgggaggaagtaaagcgcaaaggtaagtccaatattgaacagtggatcgaagacaacatgcatgggaagtcttgcgtagttgttctcattggcacaaagaccgctgaacgaccgtgggtaaagtacgaaattgagaaagcgtggaaggatgggaaaggcctgcttggcatccatgttcacaacttgacttgccccaataatgggaagtgcctacaaggcgtcgacccgttcgcgcaatacacatttaggatcggcgaacggattgtgaagcctaaaacatacaatccaaaaagctccgacgcctacggtgacatcgccgcgaatctggacgattgggttgaagaagcgatcaaaatccgtaacagttga

SEQ ID NO: 18636 - DNA, 1401 bp, Aggregatibacter actinomycetemcomitans serotype b str. SCC4092; identical to SEQ ID NO: 18600

SEQ ID NO: 18637 - DNA, 645 bp, Aggregatibacter actinomycetemcomitans serotype b str. SCC4092; identical to SEQ ID NO: 18602

SEQ ID NO: 18638 - DNA, 483 bp, Aggregatibacter actinomycetemcomitans serotype b str. SCC4092; identical to SEQ ID NO: 18601

SEQ ID NO: 18639 - DNA, 1401 bp, Aggregatibacter actinomycetemcomitans serotype b str. S23A; identical to SEQ ID NO: 18603

SEQ ID NO: 18640 - DNA, 645 bp, Aggregatibacter actinomycetemcomitans serotype b str. S23A; identical to SEQ ID NO: 18605

SEQ ID NO: 18641 - DNA, 483 bp, Aggregatibacter actinomycetemcomitans serotype b str. S23A; identical to SEQ ID NO: 18604

SEQ ID NO: 18642 - DNA, 1398 bp, Haemophilus parahaemolyticus HK385
atgaacaaaaaacagtttatacgagaattagttaatgaactatctgcaaataatttagcaatttttgcgggagctggattatctgttgctgctggattcgtggattggaaagggttgcttaaagatttagctgaagaattagatttggatattgataaggaagaaaatgatctcatttccttagcacaatactacatcaacgaaaaacagggtaatcgttctaaaataaatcaaattattttgaatgaattttctcaccaagcagttctaacggagaaccataaaattttagctaggttacctatagatactttttggacaaccaattatgattcaatgatagagaatgctttaaaagatgtggggaaagttgtagatatcaaacattgtgtaggtcaactccctatctctattcataaaagagacgctgtagtgtataaaatgcatggtgatgcttctcttccagaccaaacggtcttaattaaagatgattatgaaaaatttcatttaacaagaaatgatttctttaccgcattgcgtggagatttattaaccaagcgatttcttttcttaggatttagtttttccgatcctaatattgattatattttaagtagaattcgctcgtcatataatgaaaaccagaaagaacatttttgtattcttcgtaaagttcagcaattacctaaagaaaatcaagctgattttgaatacagaaagcgtaaacaagagctatttatcaatgatttaaaaagagtaggaattagcgttttattggttaatcaatatgaggaaattacagagattttacgtgaagtggagcaagcacaaaaacgtaaaactgtctttgtctcaggtgctgcagaagattattctccttattctcagcaagaggttgaacaatttgtttcttctctttctcaagagattttaaaactggggtatcgtattgttacaggttttggattgggaataggcagttcagttatttcaggatcgataaaatatcttacggaaaaaaatttaaaaatagatgaggactatttgatacttcgcccatttccccaaaacaaagaaggaaaagagttgtggtctgcttggcgtgaagatatgatttcttatgctggtatctctatatttctatttggaaataaatcacaaaatggagagataattctatccaatggcatgcaagaagagtttgatatctccaaaagaaacaataatgtcttgattcctgttgccagtacaggatatatggcaaaaaaactttgggagaaggatatgaataaggaatgctctaaaaatattgaaactgaaatgcaagcattatctaaagaaaatgtaactttagataaattaaaatctaatattttatccattttaaaaaaagattaa

SEQ ID NO: 18643 - DNA, 495 bp, Haemophilus parahaemolyticus HK385
atggttagaaaagttttttatagttttcactttgataatgatgcctggcgagctggtcaagtgcgtaatattggtgtagttgatggttccgaaccgttaaaaggtaatcgttgggaagatgttaaagctaaatctgacaaagagattgagaaatggattaatgataatctaaaagacaaatcttgccttgttgttttaattggttcagaaacatcagaaaggaaatggataaagtatgaaatcgaaactgcttggaaactaggaaaagctgtatgcggtatatacgttcataaattaaaagatgctaatggagaacaatcagatgaaggaaataacccatttgattattttacaataggcgataaaaatttatctgagatagctccagtatttaaatcttcataccttagtagcaaatatgtatatgatgatatagcagagaatattgaagatttagttgaaaaagcaatttctgttagggaagaatataaataa

SEQ ID NO: 18644 - DNA, 627 bp, Haemophilus parahaemolyticus HK385
atgggaaataaagtatttatttcatacaagtattctgataattcagtgcaacaattaagtccatatgaattttttcatgtaacaactgcccgtgattatgtggatattattcaaagtaaatttgatcgtgatggaatccatattaataaaggtgaaaaggataatgagagcttagcggactttaaaagtgaaactatccgctcaaagctggcagataaaatctttgatagttctgttaccattgttcttctctcccttaatatgaaagattcttggaaagcagagaaagatcaatggataccttgggaaattgcttattcattaaaaagtaaacgacgtttagataataggagcaagcgtaatgcaattttgttagtagtcttacctgatcggtgtggaaattatggttatgtaaattcatacggattttattttgatattattcaaaagaacttaaataatcttcacacatcatatattccatataaactaagaaatggttgttctaattcatatatgttgcagtgtaattgggatcagtttatttctaatccaaatgcttggatagccgctgcaatagaaattagagataaaggagacaaatataatatcgtagtaagaccttag

SEQ ID NO: 18645 - DNA, 627 bp, Escherichia coli 75
gtgagcatatcacctctgttcaggtggccaaattcagtaaaccacttcactggtagtgcagaagagtatggcgcttgggacaaacaggaagcactaaactttgtacacatactttcgtcatctttggtgaagaatggctatcgagttgtcaatgggtttggatggggtattggtagtgcggtcatcaacggagctcttgaagccatttattctaagcctgataagtactcagaagagcaacttatcatgcggccattccctcaacactcatcaaacgataaagccctgagcgagctatgggacgaatatcggcagcgtatgattggtctttctggaatcgctatattcctttttgggaataaactccatgatggtcgaatcgttaatgctgatggggtccgaagggagtttcaaattgctcaggaaacaggggttgtcgtgcttccacttggcgtcactggttatatggccaaggaactagctgacgagatgctgacggatccaagtaaacattttgtccggtacccttggttggaaaaggaagttgctcagcttgcagatctctctgctaatcgggcaaatatcgaaatgaaagttttagaaattttaaagaaactaggaggttag

SEQ ID NO: 18646 - DNA, 468 bp, Escherichia coli 75
atgaaacgtaaggtattttacagctttcactttgataacgatgttatgcgggtacagcagattcgtaacatgggagtgctggagggggatgaaccggtaagcccaaatacttgggaacaaattaaacgaactgagcagggcgtgaagaattggattaatcagagcttaaatggcaaatcctgcttagtagtactgatcgggagtcaaacggctaatcgcccatgggtcaagtatgagatcgaaagagcctggaaagagggtaaggctgtggtgggtatttatattcatcgactgaaatgccctcgtaacggctatgggacaaaaggaccgaatcctttcgatcaatttacatttaagcgaggcgatcgagtaattaaaccactcgtatatgaacctaactttaacgacgcttatagcgatatcaagaacaatttggcgacatggatagaaaacgccattaaacaataa

SEQ ID NO: 18647 - DNA, 1434 bp, Vibrio cholerae HE-45
atgaaagaagaacatgagcattttgttcagaggttcgttgaggaacttgaagaaaataacgtggcgatttttgctggagcaggtttatcttcttctgctggatatgttaactggaaagaactaattcgtcctttggccaaagagttacgattggatgtcgatcaagaacatgatttagttggtatcgctcagtattattttaatgaaaatggccgatatcgtattagccaacaacttatggatgaaatagcatctgcgaaaagccctaccgaaaatcaccggatactttcaagcttgccaattagtacatactggacaactaattacgataaacttatagagaaatcgctagaagaaaatggaaaaattgttgatgtaaaatatagtaataaccatttgtcactaactaagaaaaagcgtgatgccgtcgtctataaaatgcatggggatattgatcatccggatacagctgtattaactaaagatgactatgaaaaatactcagtcagaaaagctccttatataactgcactctccggagaccttgtctcaaaaacgtttttgtttttagggtttagttttactgatccaaatttagattacattatgagtcgagttagagcttattttgaagatcacctaagacagcattactgtattttcaaaaagtgcagcaaatccgattattctaatgaagatgaattaaaaaatgcattagttaaacaaaatttactaataaaagatcttcaaagatttagagttaaaacacttttggttgatgattattctgagataacagtaatattgaaaagaattgataacttgtatcgaagacgaactattttcttatcagggagtgcaagcgattttgggaagtgggcaaaagaagacgtagaaagctttttgtgtaaacttggtgctattttagtagaaaggaattataaaatatcttctggtatcggcttgggtataggtaatgcgtttataactggggcaatccaatcagtatacagttatcacaacggaaaagttagtgattacttaaacatgaagcctttccctcaatttatagacgatgctaatttaagaaaaagcacttggactaagtatagacgagaaatcattggatcttctggaattgcattattttttatgggaaataagtttgttaataatgaaattgttaatgctgatggaatggaagaagagttcgatatagctcgagagcttggattacaaattgtacctataggttgtagtggatataaagcaaaagaaatatgggatcgcgtcaagtctcatccagataattattttgaactaatatccgatgaatttattcaggccttagatgatcttgggagagaggtagaaaaacctgagcacttgatttccaaaatacttcactttctcgatttaatatcaaaggaataa

SEQ ID NO: 18648 - DNA, 294 bp, Vibrio cholerae HE-45
gtgcatattaacgctataaaaagtaaatctcaggaaacaaaaaagaaaggtccaaacccatttgagtatgttggcgttactttttccgattctggtaaaacggtaacattatgggaaaaaattaatggggaatggattaaatatgacaagattgatggatctgcctcttatcagctggatacccctgttaaacaagaaatgcgaggtaatggatacaatcttagccatttttataatgtttattgttgggtcgatgatagtggatatcaaaacttttccaactgggtaggttga

SEQ ID NO: 18649 - DNA, 1422 bp, Streptococcus agalactiae GB00679
gtgctcattattaaaggcgaagtatcaaaaaaagatttgattagagaaattgaaaaagctattaaaagtgatgaaataggagcatttattggagcaggattatcaattcctgctgggttttgtagttggaaagaacttttaaaagaaccggcagaagaaattggattagatgttgaaaaagaaaatgatttggttaatttggcacagtattattctaattcgaaaaagagaacatcaatagatgatctaatcaaaggtcaattttctcaattagtaaaacccactgaaaatcataaacttttatcacagctgccaatttcaactttttggacaacaaattatgataagttaatagaaaaggctttagaaaccaatatgaaaaagccttatgtaaaaacaaaggatgaacaactaagaggtacaaattataattttgatgtaatagtatacaaattgcatggtgatgtagaatcccctgaagatgcagtacttacaagaagcgattatgaagaatttggatataacaaaagaaaattattcagagaggttttagagggagatttgcttaccaaaacatttctatttttaggatttagctttgaagatccaaactttaactatgtaatcggaagattaagagtattactcgacgaaaagaatacaagaaaacattattgtattatgaaaagagttcaagatactgatgaggattatgagtacaaaaaagtaagacaagagctgcaaatagaagatttgaataggtatggtatttttacctatttggtaaatgactataatgaaattactgacatattaagtatacttgtagatagatacagaagaaaaacaatatttatatcgggtagcgcgtattgttatccggggtattctcatgaaactggtaaaaattttattcacaatctatcttttgaactatcaaagaatggttatcgtattgtgaatggatatggcaaaggtgtaggcgaatttatattaaatggtgttgcagattattgcttgaatcataattctaaaataagcgattttttgacacttatgcctttcccgcaaaatagctcattgggaatagatttagataagctatataaagaaaatagagagcaaatgattgataattgcggaaccgctatattcatttttggaaacaaagaaacagaaaatactgcaagtggagttatagatgaatttgagttatgtaaaaagcatgggttagtatgtttaccaattgaacatactggtgggtcagctaaagaaatattcaataaaataactcgagaaattacagataaaaatacaataagtgcaattgaacaggcaaataaacaatgcgatggcgatattgatatgtctgttaaaaacatagttcaagcagttaaaatattaaataaggaggaattttaa

SEQ ID NO: 18650 - DNA, 498 bp, Streptococcus agalactiae GB00679
atggcaaaaagacaggtattttttagctttcattacgataatgataattggagggcaggacaggttcgcaacatggggaaagtagacagtagttctaccttttctgataatgactgggaggaagtaaaagaaaaaacagaaagtaaaattaaagaatggattcatgaacagttaaataagcgttcatgtttggttgttttgattggagaaaaaacagcgaacagaaaatggataaattatgaaataaaaaaagcatatgagttaaataaaggtattgtgggaatttacattcacaagttggagaattcactgggagagcaagatgataagggtaataatccttttgattatttaacattagaaggtgaaaaactttcaaagtatgttaaatgttttgactctaactattcatcaagtaaatatgtttatagcgatattaaagataatattgaagatttaattgagtatggaataaaccataaaccatcaacttggtaa

SEQ ID NO: 18651 - DNA, 1500 bp, Sorangium cellulosum So ce56
atgtcaacccttatggacaacgcgaacacggtgagcgcggaggtcgacgccgcggtgatcgaagcgctgcatgaggcgctcgagagcggagagctcgtgctcttcgtcgggggaggcatctcggccgcggccgggctgccgacgtggcgtcagctcgtcgacctgctcgtcgagagggtgcgcgagcagaccagcgacgaggtcgcgatcgccgaggtcgcggccctcgcgcgctcgcagcgctacagcgaggcgctgggcgcggcggagcaggcgctcggcccagcggagttcaacgcgttcgtcgaggatgcgctcgacgacgaggggctcgagccgccgcggatcgcgatcgcgatcgccgcgctgcgagacaagctgcgcgccgtgctcaccacgaacctgaaccacctgctcgagcgcgccttcggcttcgagtgggacaccatgtggcgcgtcaccgacgaggtcgcgtggcggcggcggttcatcctcaaactgcacggcacgctgaaggagccgcacagctgggtgttcgcgcgcgagcgcttcctcgcgtcgatcgcgccgcccgacgtgcgcaagtcgctcacgaccgtgctctcgcggtgccccgtgctcttcatcggcttcggacgcgccgacgggaacttcgacgagatgctggcggacatccacgcgctctcgggcgcctcgccgccgccccgcttcgttatcgccccgggctcgagcttgacgccgctccgccgcaagacgctcgcggacatggggttcctgctcctgccttacgacacccccgacggcagccacgaccgggtgctcgcgatcctcgaccgcacgtgcgcgccccggccgcgcgcgatcacgtcgcgcggccgctcgatccttccgcccccgatccccgatctcgagctcccgccctcgtcatcgcccctcggcgcgccgtacgacctcccgccggactcggccgcgtacgacgacacggtcacgatgacgggggcgctcgaagcctcgcggcgcgagcgcgtctccgagcccccggcgagcccgatcgaggtgttcttctcgtactcggagagcaaccgcgagctgcgcgacaagctcgagacgcacctcgccatcctcaagcggaagggcgtcatccgcggctggcacgacggcgagatcggcgctggcgaggagcgcgacacggcgctggccgagcacctcgagaccgcgaaggtcatcctgctgctcatcagcgcggacttcctcgcgtcggacttctgctacgacgtcgagatgcagaaggcgatcgagcgccacgaacggggtgaggcgcgcgtcatccccgtcatcctcgacgcttgcgactgggagggcgcgcccttcggcaggctggccagcttgccgcggggcgggcgcccggtgacgagctgggtcaaccagagcgaggcgttcaccgacatcgcaaagggcatccgaaagcaggtcgagcagctcacccaaaacccctcctga

SEQ ID NO: 18652 - DNA, 2871 bp, Sorangium cellulosum So ce56
atggttgccttggcgacgagccccgccgatgtgttcttctcctactctccgagggacgaagacctgcggcccaagatcgagacccacctcgacgcgctgaaacggcagggggtcatccggaattaccagggcttcgcgctcggcggagggagggagcggcgagaggcgagcgcggcgaggctgcgcgaggcgcgggtcgtgctgctgctcgtgagcgcggatttcctctccaccgacgcgtggctctctccggagatgcgagaggcgatcgcccgccacgaggccggcgagtgccgggtcatccccgtgatcctgcggccctgcgcctgggagaagacgctgctcggtgagctgcagccgctgccgagccgcgcgcggcccgtgacgagctaccccaaccagagcgaggcgttcacggagatcgcgaaggggatccggagcgccgtccgggagacggagccgccgacgcagcggccggccgctcgaaggccgtcgagctcgcccgacgcggagccccacatcaagaagctgccgccgcggaacccgggcttcaccgggcgcgaccagctcctgagcgagctgcggagcacgctcaccacgggggggcccgccgcgctcacgcagtccatcagcggcctcggcggcgtcggcaagacgcagctcgtcgccgagtacgcgcaccggtacgcgagccagtacaacgtcgtctggtggatccgcgccgaggagccggccacggcggccgaggacttcgcgcgcctcgccgcggccctcgacctgccagagcagaacgaggccgaccagcggatcgcgatcgaggcggcccggtcgtggctgtcgcgcaacgacaagtggctcctcatcttcgacaacgtgaacgacccgcaggacgtcgccccgtacctgccgcacccgcgcaccgggcacatcctcatcacctcgcgcaacccgagcttccgcggcatcgccaccccgctcaccgtgccggcgctcgatcgcgccgactcggtgaagttcctgctcgatcggaccgggcagggcgacgcgcgcgccgcggagaagctcgccgagacgctcggggatctccccctcgcgctggtgcaggcggcggcgaccatcaaggagacgggatcgtccatcgcgacctaccacgccgccttcggcgatcaccagcgcgggctcctgctccgcggcatgccgatggactacccgacgccgatcgccacgacctggggcctcgcgttccaggaggcgcagcgcttctcgcccgtcgcggtcgacctcttgagcctgtgcgcgtacctggcgcccgatgacatcccgcgcgagggcctcgccgacgccgcgccgcacctgccggcggcgctcgcggaggcgctgagcgatccgctgagcctcgacgaggcggtcgccgcgctccgccggtactcgttcatcgacgtgcacgagggcgcgctctccgtgcaccggctcgtccaggcggtggtccgcgatcgcctctcgcccgaggaccggaaggtgtgggccgaggcggcggtccggctcgtcgaccacgcgttccccgagagcagcgacgaggtcgagacgtggcccttctgcgcccgatggctgccgcacgcgctcgccgcggcgagccaggccgaagcgcacgacgtcgcgcgggaggtgcgcggacggctcctcgctcggttcgccgtctacctgcaggggcgcgccgcgttcgcggaggcgaaggggtacctggagcgggcgctcgcgctccacgaggcggtgttcggccacgacgatccgaaggtcgcggccgtgctgcgcagcctcggcagcgtcctccacgacctcggcgatctcggcggcgcgcgggcacacctggagcgcgcgctggcgatcgacatcgcgagcttcggccccgatcacccggacgtcgcgcgcgacgtgaacgacctcggcagcgtgctcatggatcagggcgatctgccgggcgcccgcaagcacctggagcgcgccctcgccatcgacgaggcgacgtacggccccgacgatccgagcgtcgcgatacggctcaacaacctgggcgcgctcttccgcgacctcggcgacttcgcgggcgcgcgcgtgcacctcgagcgggcgctcgcgatcgacatccgcgcctacggtccggaccacccgacagtcgcgatcgggcgcacgaacctcggtcggctgctccacgatctcggcgacctcaagggagcgcgcgaccagttcgaggaggcgctcaagatcgatgagcacagctacggcctctaccacccgcgcttcgcgctcgcgctgaacaaccgcgggcgcgtgctgcgcgatctcggagacctggccggggcgcgcgccgacttcgagcgggcgctcgcgatcgtcgaggacacctacggcccggatcacccggacgtggcgcgggacatcaacaacctcggcagcgtgctgcgcgacctcggcgatctcgagggcgcgcgcgcgaacttcgcgcgcgtgctgaagatcgccgaggcgacctacggcccggaccacccggcggtggcgatcggctgcaacaacctcggcagcgtgctgcaagcgctcggcgagctgcccggggcgcgcgagcagctggagcgcgcactcggcatcgcgcaagccacgtacggtccggatcacccggtggtggcgagcatcgtgaacaacctcgggcgcgtcttgcaggcgctcggcgatctgtcgggcgcatggcagcagatcgagcgcgccgtggcgatcgccacgaaggcgctcgggccgtcgcacccgtccgtgcagatcttctcgcggaacctggcgcgcctcggcgacgccctggggagcagcgccgaggcgacctga

SEQ ID NO: 18653 - DNA, 1452 bp, Staphylococcus aureus subsp. aureus ST398
atgactatagataagaaaaaattcattgaaaaatatgtaaaagctttagaaagtaatacagcggctatttttgctggagcaggattatcttgtggagcaggttatgttaattggaagacattgcttaatgaagcagcagaagaattagaattaaatatagataaagaagaacatgatcttgtaggattagcacaacattatattaataagaaaagaagtcgtggaaatctaaatacagtaataatggagcaattttcaacaagagcagaattaacagaaaatcataagcttttagcaaaacttcccattgatacatattggacaactaattatgattgtatgattgaaaaagctcttgattctgagggcagaattgtagatgtgaaaagaaatcaaaatcaattaactgtttcagtagccgataaggatgctacagtttataaaatgcatggggatatagacagtatagacaagattattttaactagagatgattatgaaaaatataatctaactcatccaaagtttcgtgaaatattggaaggagatttactttcaaaaacttttctattcataggttttagctttacagatccaaatattagttatatcttatcgagaataagattagtgttagaagacaatactagaccacattattgtattttaaaagaagtagaagaaaaggaatatgataatacagaagaatttatgtatgcaaagataaaacaacaacttcatatagaagatttaagccgattttcaatagaaactttattagttaaagattatattgaaatcacagaaatattagaaagtatttataaaagatatagaagaaaaacaatttttatatcaggaagtgctacagaatatttaccttttaattcagaaacagggaaatattttttacatcaactaagtaaaaaattagttgaaaatgattttaaattagttacaggttttggattaggagtaggatcatatgttattaatggagtagctgattatattaatagtaataagaagtctaaactacagaatcatttaaatatattgccattttctcaagattcaagtggcgatttagacttaaaagaagtatggaaaaaaaatcgcttggaaatgatttctgagtgtggaatggcattatttttatttggaaataaagaaaaggatggaaaaattgttttagctgatggattagaagaagaatataaaatagcagaaagacaagaattggttagactccctataaatgtgacaggttataaaacaaagaatctttcagaacaatataacgaagagataaatatacaatttaaagagaaaatattaaaaatgtataacgaaataaatgaatacaaatgtgatttttcaaataaacaaagtattgatgaattagttcaaaaaatagtaaatttagtaattgaaataaaaaaaacaaaataa

SEQ ID NO: 18654 - DNA, 609 bp, Staphylococcus aureus subsp. aureus ST398; identical to SEQ ID NO: 18624

SEQ ID NO: 18655 - DNA, 927 bp, Staphylococcus aureus subsp. aureus ST398; identical to SEQ ID NO: 18619

SEQ ID NO: 18656 - DNA, 1449 bp, Nitratireductor indicus C115
atggcgatcgtcggccggacccggttcctgaaggagttcccggcagctctgcatgagggctcggctgcggtcttcatcggtgccggcgtatccatggccgccggctatccctcttgggcctccctcctgcgagaaataggagacgagttgggcattaactcgagcgatatccatgatctcgctgcccttgcgcagtggcatatccgcgagagcggaggcgctaccggtgttcgcaacgtcatcaagcacgagatcggcaaagacaggaaggtgccggaaacgctggagactctagcaagacttccgctgcgccacatttggacaacaaactatgatcggctgacggagcgtgcattcgttgcggtcaatcggcccatcgatgtcgtttcaggtgccaaagatcttagcctcagggcaaccccgggcgccgcacgactgtacaagatgcatggctctgtcgatcggctcgatgatatcgtcatttctactgacgactatgaactgtaccgttctcggcgtggtgcattctcgacactgctacaggcgcatttgagcagcatgtcgatgctgttcgtcggcctaagcctcaccgaccccaacatccgtcacgtgctgtcgcttattcgtgaaagcttcacagatgcgccgccggagcattttgcgctcctgcgcccacccagaaaggacgatttcgcgtccaataaggagtatcgagcacgagccgctcagcatcggctctgggcgaaggatctcagccgctacggcctattggccgtagagattgatgattatgacgaggttcccgcgctgttgcgcgaggtcgaacgtcgggtggctgctctacgggtatgggtaagcggtagttggccgctcgacatacccgatccacacaccgccagcctgtatcgcttctcggaaaatgtcggacgcctgatcggaacaagcgggcgcgatctcgtcagcgggtccggcatgctggtgggaccggcggccatcgctggcttcatcgagtccctcagggagggagggggatgggatgtcgatcgccgactgatagtacgtgccttcccgcaaccgcttgccggagactcggcagataaggccagatggactgcactacggacggaactcgcccgactcgccggcgtcgtcgtgttcgtgggtgggggaaagatgacgggcggtcttatcactccggctgacggcgttatggaagaatatgcattggccaaggaggcaggtgcgtttctgttgccgatcggagctacgggtggagctgctggccgaatcgctgatgagctcatgggctccgctatcgcatcgagcgggcccgacgcgcagagaccgaaggatgaagagctgcagattcttgccaattccgcagcggatttggagcaacttacgtcgctgatcgcggatatactgaaacgactagctgaaaccgactag

SEQ ID NO: 18657 - DNA, 489 bp, Nitratireductor indicus C115
atggctcggaaggtattcttcagttttcactatgaccgagacgtgcaccgtgtcgtgcaagtgcgaaattcttgggtagtaagggcgaacggtgaggctccgccattctatgacaaagctgaattcgagcaggccaagaagcgcgtaggcggtatcgaaaagtggattgaagaacagatgaaaggtacatccgtgaccgtcgtactgtttggcgctgagacttatgagcgtgaatgggtcaggcatgagataaagcgcagctacgagcttggaaaaggtctgctggcgatcgacatccacaatgtcagacatcctcagaccggtgccgacaatcaaggtaaaaaccccctttcctattggcaggtcgatagaggtgggcagaaggtgcccttaagttcgatctacagcgaatatgactgggtacgagacgacggctacacaaacatgcccagttggatcgaagcggccgcccgcgccgctggaaggtag

SEQ ID NO: 18658 - DNA, 555 bp, Nitratireductor indicus C115
atgccggaattcatcacgcgtgacgaattgcgtcagatcgctgccaagcgaactccgagcgaacgggcttcgatacgcaaaaccgcctcagagcgacctttggagggctccacgttcctatcacactcgaccaaggatgaggacctggtcataggctccacgatcatcctcgagaaccacggggcgaaagtttacaccgacaaggtcgatccggagatgccaccttacacgacagaaaaaacggcatccctactgaagacgcgcatcaggcagaccaagcgctttgttcttctcgccagcaagaacagcaaagagagccgctgggtaccttgggaactcggggtcgccgacgggttcaagagcatcgacaagatagccttattcccatccgccgacgataccaacgacatgacctgggccacgtgggagtatctcggcctgtatccccgcatagtgtgggggcccatgagggggaaagagaagccgctctggatggtctgggatcataagaccaataccgcgacgcccttgtccgattggctcgccggctggtag

SEQ ID NO: 18659 - DNA, 1434 bp, Bacillus thuringiensis serovar aizawai str. Leapi01
ttgtattcaccaaaaatcaaggaatttataagaacttatgtaaaagccattgaaggttcaaatgcagctgtatttgctggagctggcttatctcagccagcagggcatgtgaattggaaagaattaatgcgcgaacttgctgatgatttaggcttaaatgtagatttagaaacagatttagtagctttagcccaatatcacgttaatgaatttgatggtagaggaaaaatcaatcaaatactaatagaagagtttaccaaaggggtccaaacaacagaaaatcatacactacttgcagatttaccgatttctacgtactggaccaccaactatgattccttaattgaaaccactttaaaaaacatgggaaaaaaggtggatactaagatagttcctgaaaaccttgctcatacaactcctaaaactgatgctgttatatataaaatgcatggtgacagctccttgcctcatcaagcagttttaactaaagatgattatgaaggctataatattacacgtcaattatatagtacggcgttacaaggtgacctagtatctaaaacttttttatttgttggttttagtttcgacgatccgaacttaacttacattcttagtagaataagactattattaggtgagaattccagaactcattattgttttatgaaacaaatagaaagagaggactatgagtctgagggagaatttcactatgcacaaattaaacaacaattaagaataaatgatttgaagagatataaaataactgttttattagtagattcctatcagcaaataactgaaatcttaaaaaaagtacacgatattgttaaacgtggtggcatttttatatccggaagtgctactttctttgataattgggaagaacaacaagcacttcaattcagtacaaatttaagtaaatctataattcaatccgattataatattgtctctggattcggattaggaattggtagttgtatcatttctggagcgcttgaagaattatacaaaaccccaaatagaaaagtggaggagcgcttaaaagctcgacctttccctcaacaaactacgggagacttatctttaggagaactttggactaaatatagaaatgatatgctctcttccgtgggtatcgctatatttatatttggaaataaaaaaggtgcatccggtgaaaagatagatgcaaatggtatgattgaagaatttgaaattgctcttacaaaaggcgtaatccctatacctataggagctacaggagacgcctcattaactatatggaccaaagtaatggaaaacttcgatgattatgtaggaataactgaattaaaaggtctatacgaacaattaggagatacaaacaaaacgccagaagaattgataaccattactatacaaataattaaacatctaaaaaaataa

SEQ ID NO: 18660 - DNA, 681 bp, Bacillus thuringiensis serovar aizawai str. Leapi01
atggggagaaaaatatttgtctcatataaatacgcggatagcgatgtatatccattagaaggcttggattatacaacaacggtacggaattacgtagatgaacttcaagggaaattaaaagatgaagatcatattaataaaggtgaagctgatggtgatgatttaagtgatttcaaggatgaaacgatatggaccaaattaaaagataagatttttgatagtacccttacaattgtcttgatttctccaaatatgaaaggaattttcactaatgaagaggaccagtggatcccctgggaaatttcatattctttaaaatcacaaacaagaaacggtaaagttagcggaacaaatgcaatgctggctatagtattaccagatcaaaataatagctatacttactttattgaggataattcttgtcaaagttgcaattgtagaactctaaagactaatactttatttacaatactcaaaaagaatatgtttaatataaaatctcccacttttaacgattgtgataatcacagcgacgacaataaagtttatttaggagaagcatcttatattcgttctgttaaatgggaggattttattaacaatgtcgagggaaatattcagtcagcatacgatatcaaagataatatagacaactatgaaatacataaaaaagttttatag

SEQ ID NO: 18661 - DNA, 1434 bp, Bacillus thuringiensis serovar aizawai str. Hu4-2; identical to SEQ ID NO: 18659

SEQ ID NO: 18662 - DNA, 681 bp, Bacillus thuringiensis serovar aizawai str. Hu4-2; identical to SEQ ID NO: 18660

SEQ ID NO: 18663 - DNA, 1440 bp, Lactobacillus paracasei subsp. paracasei CNCM I-4649
ttgccgataaaaattgatgagtttgtgaatgaatatgttgaaagtcttagatgcggtgaggcaggtctttttgttggagcaggactttcatttgattctggtatgcccagttggaaggaattattaaagaaacctgctgaaaaaatagggatggatgtttctaaagaagaagatttggttactttggcgcaatattttgtgaatgaaaatcataatacaagaaccgcaataaatgcagaactaaaaagtaagtttggcgagttgtcgaatattaatcataatcaggaaattatagcgcaattaccaatagatacagtatggacaacaaattatgacaatcttctggaaaaagcattccaaaagaacaacaaaatatgtgatgttaaaagaaataaagatgattttacatcttctcccaaaaacagcagcgtgacattttataagatgcatggagatgtttccaattttaatgacaccgtgattactcggaggcagtacgaagagtatgatagaaacttcgaaatatatgttaccgctttaaaaagcgacttagtgagaaaaacttttctattcattggatatagtttccaagaccctaacttgagatacatattatcacaactacgattgttgctaggaaatagccccagaaaacactatttcttgataaaaaagcctgaaaaggaaagtgaagaaagtcaggaagattttagatacaggcttaataagcaaaggcttcaaatagaagatcttgagctatacaacatagaagctgttgaggtagattcgtacgggcaaatatcaaaagtattagaaaaaataaaatctaaaataaaactaaaccatgtgtttttatctagtgcacaatcagtcgacaaagaaattgataaagctagcctcaatcaattactgatgtgtttgagctataagctagttaagaatgacaatgtcattgtcaatggctatggatggaatgcaggaaatgctattgttaaaggagccctaatggcaataatggaagattcatcaaaaagtattgatgaatatctaaaagtttacccctttcctcaacctgatgcgggtgtggatagagagtctatgcataatgattggacaaagatcagaaataaaatgcttgataattcgggaattgctattttcatatctggaaacaaaattgaggagggcaaggctgttttatcaaaaggaatgcttgaagaatttgacatagcaaagcaaaaaaatgtgataccaatttctattggatatactggaggagcaagtaaaaaaatatctagtttaatcagcgagaactataaacggtattatggagatgatcaaagattaatagaaatgtctaaaaaaatgtctagtaattttatggacagtgatacaacggttgatttaattatatctatgatatgcaaaattcagcaataa

SEQ ID NO: 18664 - DNA, 633 bp, Lactobacillus paracasei subsp. paracasei CNCM I-4649
atggtacacaaaacttttatttcatataaatattcagaagccagggatttgcgagataagattattcaccatctgggagtagatcaagccaagtactacgaaggagagacttcagagtcccctaatctaacaaatgaaaagacagaatcaattcgtcatctgttaaaagaaatgatttatgatacaagcgttatgattgttatcatctctccaaatatgaaacaaagcaactggatagattgggaaatagaatatgctctgaagagtataaagcacggcaattacacatcgcatagtaacggagttgtaggcgttattatgaatgacccagatgaaagctggttcagatatacagaaaaaaaacctgatggagacacgtgctatgcatataattcggaatatgcttgcaggattataaacgctaatcgctttaatcagaagcgaaaacaatacgcttgtgaaacttgtggaacaatagattcactaactggctcatatatttcttttgtaacagaggatgatttcatttctaatcccaaacgttatatagataatgcgtttgataaaagctgtgaaatagatgaatatgaaataacgaaatatgttgataaaaatcatatggagaccttgtaa

SEQ ID NO: 18665 - DNA, 1437 bp, Escherichia coli KTE113
atgacgtttagtaatgaaattgaagttttcataaaagattttgttaaagatcttgaaaatgattgtgctgctattttttctggcgcaggaatgtctaaaagtcaaggttatgttgattggaaagaattacttagcgatatagcagaagagcttagtttagacattaataaagaagacgatctaatatcgcttgctcaatttcatgttaatgaaaagaaaggggctacaaaactcacaaggaagataatcgaagagttttctgagcaagccgagccatcagaggttcataatataattgctcgtttaccgattaagacattttggacaacaaactatgacactttaattgaagatagtctgcggaaagtttacaaaattgcagatgtaaaaagaaacatagatgatttaaatacaacacgacctaagcgagacgcgatagtatataaaatgcatggtgatatttcgtccccatccaaggctattttatataaagagcagtatgaaaaatactacagaacacacgcttcatttatcaccgcacttagcggagatttaatatcaaaaacctttctattcatagggtttagttttaccgacccaaatctggattacattttgagtcgtttgtatactcattctggggacaagaggacacactattgctttatgaagaatgaggctaataattccctagatgatgaagaaacagtaaattataagatcagaaaacaaaaactgcgaatcgatgatctcaagagatttggtatacaagtattattaatagatgaatattctgacatccctaaaattctagctaagatagagcaatcatttaaaaagaaaacgatatttatttctggtagtgcagaaaaatatggggatcttgaaagacctaaagcattagattttattcacacattagcatatgagattataaagaataattataggatagtgaatggatttggatggggcgtcggaagttctgtgataaatggtgcgttggatgcaatttatagtaggccagataaattatcagaagaacagctcattgttagaccatttccacaaactgtcagtaaggggaaagatattcaagaactttgggaggagtatagacagagaatgattcctcttggtggtattgcattgtttatttttggaaataaacaagaggaaaataatgatatagtaaatgctaggggagtatttagagagtttgagattgctgttcaacatggccttgtaccaattcctttacccaataccgggtatatgtctaaatatatatttgaacaaatatcacaagatcctaagaaatattatggaagtaatgaatggatatataatgatttgtctgagcttactgaaaaagatttttcggtaaaaaaaacaatagaagttgtaataaaaatcataaacaaactgaataaataa

SEQ ID NO: 18666 - DNA, 612 bp, Escherichia coli KTE113
atggctcatgaaacattcatatcatataaatatagtgaagcacaggatttaagagacaaaattgtcaaggcattaggtgatgatgctgtttactataaaggggaaacatcggagtctcctgatataagtaatacaacagtagataatataaagaacaatcttaaaaatatgattttcgggacatctgttttaatcgttattatttccccgaatatgattaaaagtaaatggattgactgggaaattgaatatgcattgaaagaatacaagagaggaggaaccacttcccgaactaatggtattgttggtgtgataatgaaggttaataatagctatgactggttagtatcttcttcaatcaagcctgatggatgttcatcaagaactattgacacaactaaactatatgacattattaataataataggtttaatttaacttcagaagataaatattgttgccctgagtgcaaatcatatgatcaactgactggttcttatatttcattgatagaagaagaccgatttttagcagatgtatctttatacattgaaaatgcctatgagaaatctaaaaaattaagttcctacgatttatataaacaaaaatag

SEQ ID NO: 18667 - DNA, 1437 bp, Escherichia coli KTE168; identical to SEQ ID NO: 18665

SEQ ID NO: 18668 - DNA, 612 bp, Escherichia coli KTE168; identical to SEQ ID NO: 18666

SEQ ID NO: 18669 - DNA, 1419 bp, Rhodococcus qingshengii BKS 20-40
atgggtgcaacgagtcaacaggtacggaatagatttcttcgcgaatatgtacacgcggttgagaacggaagcgcagctttttttgctggtgctggcctgtcacgcgacgctggcttcgtcgactggcgtggcttacttcgcgaatttgcggaagaactgggactcgacatcgaggtcgaatccgacctgccattggtggcccagtactttatcgacagttcaacatctcaacgagcacgattgaatcagaagctccgtgacgagttcgatcaaagcaccggtgttacatcggcgtaccgcgcactttcgcgcctaccgatcaagagcgtgtggaccacgaattacgaccgcggtgttgaggaagcctacgcggcagttggaagcatcgtagatgtgaagtctagcggcaacaaagcatcctggacgacggtcaaacccaaatcaacattgaccgtatacaaaatgcacggcgatattggagaccccagcaatgttgtcctatcaaaggatgactacgacaggtatgccagggaccatccttatgttttagacgctctcaaatctcaactcgcagagaagacttttttgttctccgggttcagtttcaccgaccccaatctcgatcacgtttttgcccaagtacgagccaatcacggcgataatgcccgtacccactgggccgtgatgaagcgagccgaaggcgatcgcgaggggatcagacagggactgtggatcaagaccatgcatcggtatggcctggaggttgttctcgtggacgattatgacgacattcccgagctactcaccgaagttcagcaacgcctgcgtcgtcggcacgtcttcgtcggcgggtccgcactgaccgcggtgccgttcggaacgccgcgattggacaacttctgcaaaagcgtaggtcagttgatcatcgacgaggggttcaacctggtcagcggattcggactcgggattgggtctgcagttcttgccggagccgcggaatcggtgtatcgcggggacatagatccggcgcggcggcttcggctatttccgttccctcaaccacccgaaggggaaccacgtgaccaaccattagacgagcagtggcgccaatctatgatgcagagcgcaggtttcgcaatctttctttcgggcaacaaaaaggggccggacggcgatccaatcgacgcctctggcgcagtccgcgaatacgaaatcgcggtcgcaaacggcgctcggccgctaccagtgggtgcgactggctgggttgcgaagaacctacacgcaaaagtctccgataggttcgacgaactactgccaggtgcctcgagaacagccttcgacgagctcggacgtgacgacgccactaacgaggaactgctgacagcattgcgtacattactcagcgacatgaccccgtga

SEQ ID NO: 18670 - DNA, 483 bp, Rhodococcus qingshengii BKS 20-40
atgccgaaatcggtcttctacagcttccactaccaacgggacgcgtttcgtgtccagcaggtcatcaacatgggcgcgctcgaacggcaaacgatcctcaatgcccaggaatgggaaaccgtcaagcgccgaggagacaccgcgatcgaagactggatccacaagcagatggcctacaagagtgctgtcatcgtcctggtgggagctgaaacttcaacacgtcgctgggtgaggcatgagatcgccaaagcatgggacgatcgaaggcctatgatcggtgtgcgaattcatggcctctccgatgcccgcggtactgacacggcgggcgcaaatcctttcgagaaggtgtcattgaaaagcggaggtacggtgagcaactacgttcctttgttctcacctcagggatcgaccagccaagctgtatacgccgacatcaagaacaaccttcctacatgggtcgacagcgcatacaagcgcgactag

SEQ ID NO: 18671 - DNA, 585 bp, Rhodococcus qingshengii BKS 20-40
atggcgctgatctcacgacaggaagcattgtcagccggccgtagggtcgtttacaactcgtccgtcacggcacgagacctcctgatcaagtctgccagcgcagcgccacagcagaagttcgatgtctttctcagccatagcattcacgacgccgagacaattcttggtgtccgagcgattctgcaagcagatggcctgtcggtctacgttgattggatcgacgacccgcaactcgaccgtaggtctgtctctcgggctaccgcaaatgtccttcgtgaacgtatgaagaagtgctcgtcattgattttcgtgacctccgactcaagtccgacatccaagtggatgccttgggaactgggttttttcgacggaatgcaaggccctcgtattgctatcatgccgctcgaagacagcacacctggctctcaaggtcaagaatatcttgaactgtatccggcggttgaacgactaccatctacattagcgggtcactctgcactcttcgctgtccgcggcacctattaccgtgagtacctatcgttgaaggaattggccgccggcagccaaacctttcgacgcacctaa

SEQ ID NO: 18672 - DNA, 1455 bp, Serratia marcescens VGH107
atgtttaaccgtgatatagaactgttcattcgtgattacgttaatgatattaaggctggcagcgccgcgctgtttgccggcgccgggctgtccatccccgccggtttcgtcagctggaaagagcttatcggcgatattgcttatgaactggagctggatatcgaaaaagagagcgatcttatttccctggcgcaatatcacctcaatgaaaaaggcaacagacataagataaatcaaaaaataattacagaattcgctgagcaggcggaagaaacagaaaaccaccggattatcgccagattaccgatagcgtcactttggaccactaactacgacgacctgattgaaaaaacctatgcccgttataatcgcgtatgcgacgttaaaaccacaccggaaagcctgaccaataacattcacaaacgtgatgttgttttatataaaatgcatggtgactatagaaatcccaaccaggcgattatcacccgcgaacaatacgaaacttactcccgaacacaccttccctttatcaacatgctgatggcggaactgaccgctaaaacgtttctgtttatcggtttcagcttcgaagatcccaatctgcagtatgtgttgagccgcctctatgcacagtatgccgaagggaaaagaaatcactactgcattatgcggcgcgttcagctcggcgacagcggcagtgaagatcaggcgtcctgtgactacaacagccgtaaacaaagcttgatgatcaacgatctgcgccgttacggcattcaaacgctgctggtggatgactatcggcaaatcaccgacctgctgtatgccatcgaaacgcagttcaagaaaagcacggtgtttatctccggcagcgccgacaactaccatccttatgcccgtgaagagtccatccagttcatacatcgtctggcgcgcctgcttatccgcaaacagcaccgcatcgtcaacggtttcggctggggcgtaggcacggcggtgatcaacggcgcactggaagccatttacgacagccaagggaaaatcagcgaaagccaactggtgctgcgtccgttcccccaattcgccagcgggggcatagcgttgccagagctttggcgggaataccgccagaacatgatttcgctcagcggcatcgcaatctttttgttcggcaacaaacgcaacgccgagggcgagtacgtgctggccgacggtttattgcaagagttccaaatcgccacggaacaaggttgcgtctgtattcctatcggttgtaccggcagcgcatccgccgagatctaccggaaaatcaaggaggaaatgaaagaaaccctctaccactgccaccccgccgccatgaatctgctggatcagcttaacgaaccgggcagcctggcggagaagaaaaaatgcctgttggcactaatcgatatcattactaaggataacccccgatga

SEQ ID NO: 18673 - DNA, 492 bp, Serratia marcescens VGH107
atgaccagaaaatgcttttacagtttccattatgagccggacaactggcgcgcctctcaggtacgcgaaatgggcgcgctggacggtaaccggccggccacggataacgattgggaggaagtgaaaaaaggcggtgacgccgccatcgccgcttggatcaagggccagttggacaaccgcagttgcgccgtgattctcgccggtaaagataccgctaatcgcaaatggattaatttcgaaatatgcgaggcctggaaaaaaggcatgggcgtactggtggtgtatatccacaatttgaaagacagcgccggcgaccaaaccacgaaaggtaaaaacccgttggatcacatcaagctgggtgaaacaaaactctccgctatcgccaaagcctatgatccgccttacctgaccagcaccaatgtctataaccacatcaaagaaaatctggctgagtgggtagaagaagcgatccgcatccgcgaaaattactga

SEQ ID NO: 18674 - DNA, 1455 bp, Serratia marcescens SM39
atgccagaacgtgatatagaactgtttattcgtgattacgttaatgatatcaaagccggcagcgccgcgctgtttgccggcgccgggctgtccatacccgccggctttgtcagctggaaagagcttatcggtgatatcgcttatgaattggggctggatatagaaaaagaaagcgaccttatttctctggctcaatatcatctcaatgaaaaaggcaaccggcataagataaatcaaaaaataattacagaattcgctgagcaagcggaagaaactgaaaatcatcggatcattgccagattgccgatagcgtcactctggacaaccaactacgacgatctgattgaaaaaacctatgcccgttataatcgcgtctgcgacgttaaaaccacgccggaaagtctgaccaacaatattcacaagcgcgatgttgtcttatataaaatgcatggtgattatagaacccccaaccaggcgattatcacccgcgaacaatacgaaacttactcccgtacacaccttccttttatcaacatgctgatggcggagttgaccgccaaaaccttcctgtttatcggtttcagctttgaagaccccaacctgcaatacgtattgagtcgcctttacgcgcagtacggcgaagggaaaagaaaccactactgcatcatgcggcgcgttcagcctggcgacagcggcagcgaggatcaggcgtcttatgattacaacagccgaaaacaaagcctgatgatcaacgatctgcgccgttacggcattcaaacgctgctggtggaggactatcggcaaatcaccgacctgctgtatgccatcgaaacgcaattcaagaaaagcacggtgtttatctccggcagcgccgacaactaccatccctatgcccgtgaagaatccatccagttcatacaccgcctggcgcgcctgcttatccgcaaacagtaccgcatcgtcaacggcttcggttggggcgtgggcacggcggtgatcaacggcgcattggaagctatttacgccagcggggggaaaatcagcgaaagccagctggtattgcgccctttcccccaattcgccagcgggggcattacgctgccggcactttggcacgaataccgccagaacatgatttcgctcagcggcatcgcggtttttttgttcggcaacaggcgtaacgccgaaggcgaatgcgtgctggccgacggtttattgaaagagttccacatcgctgcggaacaaggctgcgtctgcattcctatcggttgtaccggcggcgcatccgccgagatctaccgaaaaatcaaggaggagatgaaagacaccctctatcaccgccatcccgtcgccatgaacctgctggatcaacttaacgagccgggcagcctggcggagaagaaaacatgcctgttggcacttatcgatatcattactaaggataatcctcgatga

SEQ ID NO: 18675 - DNA, 492 bp, Serratia marcescens SM39
atgaccagaaaatgtttttacagtttccattatgagccggacaactggcgcgcttctcagatacgcgaaatgggctcgctggaaggtaaccggccggccacggataacgattgggaggaagtgaaaaaaggcggtgacgacgccatcgccgcttggatcaaaggccagttggacaatcggagctgcgccgtgattctcgcgggtaaagataccgccaatcgcaagtggatcaacttcgaaatctgtgaagcctggaagaaaggcatgggcgtgctggtggtgtatatccataacctgaaagacagcgccggcgaacaagcccgaaaaggcaacaacccgttggatcatatcaagctgggggatagaaagctttccggaatcgccaaagcctatgatccgccttatttgaccagcgccaatgtctataatcacatcaaggaaaatctggcggagtgggtagaagaagcgatccgcattcgcgaaaattactga

SEQ ID NO: 18676 - DNA, 1683 bp, Burkholderia sp. RPE67
atgacgacaaaatacctacaatatttccctcggcctcttctcgacgatctggtatccggccgatggcttccggtggttggtgccggcatgtccttgaacgccaagctgcccgctggcaagaaaatgccgctatggccggatctgggcagcacacttcagggcgagtttcttgaatactcgtcctccggaacattggatgctatatcagcctacgagcacgaatttggccgcgccaagctcatcgaacgcctttccgaaattctctatattaggcatgctcatcccggggatgcgcacaaggcattttgctctataccgttcgatatcgtatgcacaacaaactttgatttcctgcttgaagaacagtacaaagcgatacccagtcatgtgtatcccgtaatcgatgaagaacagctttcaatcaatggatcggccgctggaacactactactcaagctgcacggagatcttcatcatccgagcaggctcgttgtcaccgaggaagactacgatgcgttcttgatgcgctatccgctgctcgccacgtttctgtcgaatcagctcataacgaaaacggccgtgctgattggctatagtctcgatgatccagacttccgacagctttggagcgttgtgacggagcgtcttggcaaaacgcgccgtgttgcctatagcgttatggttaatgcgaaggcctccgacatcgcaagatttgagaggcgcggggtgaaggtcgtcaatcttcccggaaccagggagcgctacggcgccattctggctcaggcgttcagcgaacttcgagagtacatgagggataacgtcatctccgtcagtcaagtgacagaagaagagcccttgcgagagttgatgctaccccgagatgcagcaagtcgcctgtgcttcttttcgatcccggttgagcgactgtcgctttatcgtagtcgcgttttccctgtagtcgaggagatcgggttcgttccagtcacggccgacgacgttatatctccgggtgacaacatcaacgccaaaatcgactctctgatcgatcgagcgtcggtcatggtcgtcgagatgacttcgccatggacccgagcggagttcgaaatggcgattgcccgaaataaggcgacggacggaagcggtagcaagcgtcacaagctagaaatcattgtcgttgacggagatgtcgaaagtcggccaccaggcctgcaagtgtatcgtgtggtgaagcgcagcgaccttctgactgacgacatcgaggatttcgtcgacagtctagtctctgaactaaggtcgatatccgagaatcgcggtgcttttctggcggaggaagcccaaaggctcttcaacgcgcgggagtatcgggttgctgtgatttcggcaatttcgtctctcgaagcttggctgcgccaaaacatagatggcgcgagcaatttcacatcccctattgctcccagtatttctaggttctccacaccccatcggcccaccccttttaggggattgttggatctggccctgcagaatgaggttttgcagttgacagacgtcgagaaaatcctagcatggtcgaaaatccggaatgacgctgttcacaacaactcgccagtcagtagagcagtcgcgaaagaaattgtggatggtgtaagagcaatatttgcaggaccaacgatgtcaggataa

SEQ ID NO: 18677 - DNA, 1458 bp, Burkholderia sp. RPE67
atggcgaaacaccggcttctttatctgcaccgccgccattttggactcgatggtccggacgccatgatgggaaaactgctgtacgaggcattaaagacggacctcgatgctgcagtgacttcgcatatgatcattcccgactcggtttccgagggccttccgcaatctatcctcgatgacgtaatcacgcagagcgaattccatcggtcgggcgtcaacgtggtgtatctagagggcggattagattcccactgtctaacggggttcgacggctcagactggaagatgtcggctccaatgatcgaggagttcgcaaggcgtggagggattgtcgtcgtagcggatcttgatatcaacatcgcacagtcgatcgacgaggaccggttcggacgtctcttcaaggcatggtttcgacgtgaagatggcaggcaaggtaatccgatcgaaatcgtcgaccccggacgctgcgagaactcatattggtcagagatttgggtcgattgtgaagctgcacgaacccattgcgcggaatggctccaaccaatatacaacggcctttccactattctggtaggtggtcctttagaactggggaattctcaaagctggcttgccaatattgtcagtcatactatgggaacaatgtgtcaagactgttggtgggagccccctgagactggattcgacacacaccgccttcgttatcatccacaaagtccgatgggcggaggcagcttcggacctttcgcgtcggtctgccaactgggaagaggctatcttgttgcaatcgcagccagagtctcatcggattatgtgactaaaaaaagccacggcaacatcgagtggattatcaatataatcagacatctccggtcagccgttgagaatcatgaaaggctggggtccatcgctcgttttcgtggggcctgtttatttcttagtcaccgttcggtggacaagcctgttgtcgaagccatttcggataatctgttcaaaaccggaatttcgacctggttggacaaggagagaatgcttccgtcagactctctcgggctttcgttaaatgcgggcttgaccgagtcaagtcactttactatcttttggtcgagacactgcaaggacgcaccgtgggtgcatttcgagctcgggagcgcaatatcggcatgtatcgagagaagaaagccgattctggtcgttgctctagacgacacccctcccccggacagcttagcccagttcatccggataaatggaaagggtacgccgcaagagacttccaggctcatttacgacgccctcgctgcacttgtcgatcgggagtcactgaatcgagttaaagaagcggcggctgttgaacaaacggatgtcggggatgccatcgccggcgaaaagttgaatcgaagggcttcgacggaagttgttggcccgtttcgtcgaagaagacggaagcctcgttaa

SEQ ID NO: 18678 - DNA, 1449 bp, Pseudomonas sp. Os17
atgcggaaaaagttttcggcagaaattgaaatttttattcgccggtacgtccgggatctgaatgaaggtgttgccgcagtctttgcgggggctgggctttctcgggattgcggctacgtgaactggccagagctgatgcgagaggtagcggaagagctcgggctttcggttgacaaggagcacgacctggtttcacttgcccagtttcacgttaacgagcgcagcggatcaggtggactggctcgtcgcatcattgacgagttctccgagcatgcggagccgtcggattcgcaccaaattctggcccgcttgccaatcagaacatactggacgaccaactacgaccaacttattgaaaatacgcttcgtaagaaccagcgtgttccagacgttaagcatcaggtttccgacctcttgaccacgcgacctaagcgggatgccgttgtttacaaaatgcacggagatgcactgtcttccacagaggccattctctataaatctcaatacgagcagtattacaaaacgcacgaggcctttgtcacggctttgagcggtgatttgatctccaagaccttccttttcatcggcttcagcttcaccgatccgaaccttgattacgtactgagtcgactgcacgtgccaccgcatgcgcggcgtgagcactactgcttcctgcgccgcgaaccctccactccgtatgaaaacgaagacgctgaggcggtacgataccgccagcgcaagcaggaattgcacattcgggacctaaagcggtttggaatccaaacgcttctggtcgaggattacaaagacattcccaaagttctgagggcgattgaggagcagttcctcaagaaaaccatcttcattgccggcagcgcggaagaatacggtgattgggaaaaaaatgacgcgctgaacttcatccactcactctcatccagcctaatccgagccggctaccgcgtagtcaatggatttggatggggcgtgggaagcgccgtaatcaacggtgccttggatgctatctattcaaatccagagaagtattcagaagatcagttggttatgaggccatttccccaggtggcatcgcagggccaggatttgggtgtgctatggcaacagtaccgcgagcgcatgatctcgctgtcaggcatcgcgctatttatctttggtaataaggctggccaaaacggcatcgaaaatgccggaggcgtccaaaaggaattcgacatcgccgttgcaaaaggcgtcgttccagtacctattggagcaacgggctatatggcgaaagaactggccgataaagtgattgccgatcccggtagctatatacctgaagatctttggctggccgacgaattgaaaaaactaaacgaaagctcgactgatgccaaagtgatcgaggacatagtactcgggatcgtcaagaaactggcgggggtttga

SEQ ID NO: 18679 - DNA, 477 bp, Pseudomonas sp. Os17
atgaagcgtaacgttttttacagcttccattttggccaggacgtgttgcgcgtccagcagatacgtaacatgggtgttatcgacggggatgaaccggtcagcccaaaccgctgggaagaaatcaagcgctctgatgaaggcgttaagcgttggatcaacgagaatctccagcgcaagacctgcctggtggttttgatcggagcggaaacagcgagccgtaaatgggtgcgatacgaaatcatgagggcatgggaactgggtattccagttctaggtgttcgtatccataacctccgatgcccaaatgctggcatcggagtatacggaactaatcccttcagctccttgactctgaagcgggccaacggaacggtctatacacctaaggtgtacgatccccgttcaaatgacgcgtacggggtcatcaaagcgaatctgcctacctggatcgaaacagctatcaaagagtgcgcataa

SEQ ID NO: 18680 - DNA, 405 bp, Pseudomonas sp. Os17
gtggcgggggccattgaggttatcgctagccatggcggcgtcccctatatcgatgaggtagacccggcaatgccgagtcacacgtcggaagagacggcggagttgttaaagaagcggattgttgagtgcaagcggttcgtactccttacgagtcccaatagcaaagatagccgatgggtgccatgggagctgggcgtcgccgatgggaaaaaagggattcacaaaatcgcgattttcggtgcctctgattctgcaggccttgatggttggtcatcttgggaatacatgggtttgtatccaagaataatctgggggaagcttcagggctactcaaatgagctctggatggtctattcacaaaagacggactcagccgtaacgctggaatcatggttgcggagctaa

SEQ ID NO: 18681 - DNA, 534 bp, Pseudomonas sp. Os17
atggctttttttaccaaggagcaggcaaaggctgctgcgcgccgctcggaaaatatgctcgatcaagttgcgggactagagtcctactcggatgagcggttcgatgtgtttttgtcccattcgatgctggaccaggatctggtagtgggcgtagccatgttgcttaaagagcagggatacagcgtttacattgattgggttgaagatgaagagctggatcgcgagcatgttgacaaggaaacggcggagcgcttgcgtcagcgaatgcgcaactgctcaagcctgatctatatagcgactgatcgatcaggtcagtccaaatggatgccttgggagttgggttatttcgacggttacaaggacggtggtgtcgctatccttcccctcgtagatacagtgaattccggattcgatggccaggaatacttaggcttgtatcccttggtcaaccaagtaaatcagcgattgtatgtagaggatgcctctaaagtgcactcggacttttgggctttcgtaaatgatccgtctcgctag

SEQ ID NO: 18682 - DNA, 849 bp, Pseudomonas sp. Os17
atgtatctgggttttgaaattgagcactataaaccgttcgagatgatcagtaatgcggccattgatgattatcgcaaacaggcccgcgacgcggcggtcaatgacctggctaactatgttataggtcagattgataaaaaggacgtgattgacgccaaggagctcgctaaaaaaatattcccgcagcaggacgcccatgtgttcttgtcgcattcccatcgcgatgagcgtgaagctatcgagtttgcgctttctctggaaaaacggggcgtcaaagtcttcgtggactcctgtgtgtggggctatgtgggtgatttgctattgaagataaatgctcattactccgataaagaagaggtaggtggaaccaccaacttctcttacgataaatgcaatgacgtggcggcttctctgtttttaatgttgaatgaggagctacatcgaatgattgatgcatcggagtgtttcatctttttcaacacccaaaactccgtaagtatcaaaggacatgaagggttcgctgaaggcgatcgcacgttttctccctggatttattctgagttggctttcagtgctaagacgcgatatacactgcggcctcgcaagcgcctccccaggggcattgtaggagcgatggagtcacacaaagtgcatagggcgatggcatcagcatcttttgcgtttgagatcataaacctgcacttacctaagctcagcggtaacgatgttaaatcgttagctgataagacgcctcatgttggttttttctggctagatgcgctgtattacgagcatgacttagaaaatgagttcaaagaccactgtcaggctgctattttaaatggctaa

SEQ ID NO: 18683 - DNA, 1443 bp, Caulobacter crescentus OR37
atgtctcgaaaccggacccgctttctaaaagagtttccgaaggcgatttccgacgagaacgcggccgtcttcatcggcgctggcgtgtccgttggcgccggctacccatcttggaaggagctgcttcgcgagatcggcgacgagttgggggtgaaatccgacgatgtctatgaccttgccgcattggcgcagtggagcgtcagtgataccggcggggcgacccgcattcgacaggtgatcagggatcagatcgctgttgatcatgacattcctgcgccgttgaacatcctagcgcggatgccaatccgccacctgtggacaacgaactacgatcgactgatcgagcgcgctctattggcgattaggcgcccttgcagtgtcatttccgcccagggcgacctggccttgaaagtcacggcaggggcggcccgcgtctacaaaatgcacggaactgtcgaccagttagacgagatcgtcatctcgactgacgactacgagctcttccggtctcgccgcggcgcattcctgccgctgttacaggcgcatctctccagcttctcgatgctgtttctgggccttagcttcacggacccgaacctacgccacgtgctgtccctaatccgcgaaagtttcacggatgcgccgccggcccattttgcgatcgttcgccccccccaaaagggagactttaggtcggcggaagagtttgaagcgcggctggcccagcacaacctctgggccaaagacctccagcgctacggattgttcgcgattgagatcgaggactacgacgaagtgccgggccttctggctgaggtcgagcggcgagttgcgagaaatcgagtctggatcagcggaagttggccgcttgacgaggctacgacaccggaggtgagtttcgtccacgatgttgcggaaagggtcggtggggtggtgggaagctctggattgaccttggtcagcggctcggggcttctcgtcggctcgggcagtatgagcggcttcctatcttctttgcagaagacaggcgcgtgggacctcgaaagacggttgatcgttcgcccattccctcagccgatcgagggcggcgagccagatcgggctcaatgggacttgcttcgggccgaactcgccaggctggccggccacgtcgttttcatcggtggtctgaaagccgaagcgggggcgctggtggactcgtctggcgtccacgccgagcgcgccattgcgcaagcgaagggcgcttatcttctaccgatcggggcgactggcggagccgcggcgaccatcgcggcggagttgattgggtcggaccttcggtttgacggccccgacgcactgcggcccagcgatgagcaactggcttcccttggggacgcgagtgtcggcgcggccgagttggcgaatcgagtcctcaagattctgaagtcccggatgctctga

SEQ ID NO: 18684 - DNA, 492 bp, Caulobacter crescentus OR37
atggcgcgcaaggtgttcttcagcttccactacgacggcgactctcagcgtgcatcacaggtgcgcaacatgggcgtgctcgagggcaaccagacggtttcagacaacgactgggaaacggtcaagaagggtggcgacaaggcgattcagacctggatcgacaaccagttcgctgggcggagctgcgccttagtcctcgtcggcgctggcacggcaggtcgaaagtggatcaactacgagatccagaaagcctgggattctgggaaggggcttctgggtatacgtatccacgggctcaagaatctcgccggtcaaacatcctacgctggtaacaacccttttgatggattcaatgttgctgggaagtcgctctcttcaatcgtaaatctccacaccccgtcgggtttcgacagcaagggcgtatacgacaacatcaagacgaatatagactcctgggtggaaacggcgattgagatccggaaaaagtattga

SEQ ID NO: 18685 - DNA, 585 bp, Caulobacter crescentus OR37
atggcgttctactcggcggaacaattgtacgctgcggcgcgcgacttgcgtcaaagggccaacaagaccaacgaccagcttctgcgtgaggccagggagacggcgaaggacatgttcgatgtctttctctcccacagcagtagagacaaggacctcgttctcggcgctaagaaagtgatcgaggacgccggctataccgtctacgtggattggattgacgacgcccaggtcaacgtcgtggccgatagagctctggcagaccggcttcgccggcgaatgggacagtgcagctcgctattctatttgcacaccccgaatgccgccctctcgaagtggtgcccttgggaacttggctacttcgatgggttgcgcagccctgaggccgcagtgtttgtgtttcctgtcttgagcacggggcagcgctacaaaggccaagaatacctggacctttacgacaccgtggacctgccgaactggaggccgccccggcgatcgcctaggtcgcggcgaccaggcgcgatcgacgagcgcctgttcgacggcgcccctggaatgctctggaggccgggcggtcggatcttctag

SEQ ID NO: 18686 - DNA, 1443 bp, Sphingobium sp. HDIP04
atggtcaaagctgcgatgaggcgattcctcgaggacttcccaacagcgctcaacgacggtgttggtgcggtctttgtgggcgcgggcatgtcgatggccgccggttacccatcatgggcgaaacttctccatgacattggtgaggaattgggcgtcagttcgcggggcattcatgatctagccgcattagcccaatggagtatccaagagagtgggagcgcgacgcgcgttcgcaacgtcatcaaggaaaagattggcaaggcctatcctacgccatcgacccttgaggtcatcgctcgcctcccggtcgcgcatatttggacgactaattacgatcgactcattgagagtgcattcgcggaaattgataggccactggattcaatatcgggagctagcgatctcgcacttaagcctacccccggagcggtacggctttacaagatgcatgggtccatcgatcgccttgacgacattgtgatctcgacggacgactacgaattgtttcgcaagaaacggggagcttttcttccgctactacaggctcacctaacgagcatgtcgatgcttttcgtgggcctcagctttaccgatccaaacatccgtcatgttctctcactcatacgcgaggcgttcactgacgcgccgccagagcattttgcaatcgtccgtcctccacatcctgacgattatgactcggaagaggagtataaggcccgccttgcacagcataacctttgggcgaaggatttgcggcgatacggattaatcgcggttgaaattgacgactatgaagaagtgcctgacttgcttcttcagattgaacggcgggtggcggcgcgacggatatgggtgagcggtagctggccgatcgacgatggcggcgcagccgcatctgatatctaccggctttcggaggatgttggacgctggatagggcgttcggggcgagatcttgtgagtggagccggattgctcgttggttctgcggccatatcaggctttcttgaggcgttgcgagacggaggcggctgggatctgaaccgacgtctaattgcgaggcctttccctcaacctctggctggtgccgagccggacgccgccaagtggactgagcttcgcaaagaactagcacggcaggccggaggaatcatattcatcggaggcgtaaagcaggagggggacaagcttgttcccgcaaggggcgtgcttgaagaatatgaagcggcacgtgaagtaggcgctttcctattaccaatcggtgcaaccggcggagcggcacaagagatcgcggagaagctcatcgggtcggacgtagaggcaacagggccaaaagcgatgcggccgacggatgacgaactcaaaattctattggatcccgccaccaaacggcaagctgtgctggaatgcatcgatgcagtggtgacacggctcaccaagtga

SEQ ID NO: 18687 - DNA, 468 bp, Sphingobium sp. HDIP04
atggcggaaacgaaaaacgtctttatcagccatgtccataaggacgatcatggattgcaaaagctcaaggacctccttgctccgaagggtatggatgtcagggattcgtctatccatacgggcaagttcaataacgccacggaccccgcctacatcaaaacccagatcctcgcgccagccatcaattgggctggcgttttcatttgctatgtcacccctgagaccaaaaacagcgagtgggtgaactgggaaattgaatacgcggctaaacagggcaaacgcattgtcggcatctgggagcacggtgagaaagaatgcgatctaccggaagcgcttgaagaatatgccgacgcgatggtgggatggaacggggaggcaattattgacgcgataaatggcgcggacacttgggaaaagccggatggcggcccgtgtgccccggtgccgctgaagcggcatccctgctaa

SEQ ID NO: 18688 - DNA, 1431 bp, Pseudomonas sp. CFII64
atggctttcgatcacgaaattgaggccttcataaaagagtttgtgaaggatattgccgaaaaaaacgttgctatctttgctggtgcagggatgtcaaaaagttcaggttatgtagattggaaagaactactaagggacatcgcggacgagcttggtttaaaaattgatgatgagcacgacttaatttcacttgcgcaataccacgtaaatcaccgagccagcaaggctggaataacaaaaaaaatccttgaggagttttccgagcaagctgaaagctcgataaaccataaaatactcgcaagacttccaatacctacatattggacaacaaattatgacacattgatcgaagacagccttaaggaagcacttaaagtcgttgatataaagcatgaaatagaccagttagcgaacacaaaacctaaacgagatgttgtcgtttacaagatgcatggagatgcaagctctccatccaaagcaataattgcaaaggagcagtatgaagaatactacaagacacatgaacagttcatcacagctctgagcggagatttaatatcaaagacatttctttttatcggcttcagcttcaccgatccaaacttagactatgttttaagccggcttcgcaccagcagcaacaaacaacattattgcttcatgaaacgtgaaagccggctcagcaatgactgtgacgaagcatttaaatataaaacccgaaaacaagaacttaaaataaacgacctaaaaagatacaaaatccagacggtactcgtagatgaatacgaaaccataacagagatacttaaggagatagaaatacgtttcagaaagaaaactatattcatatcaggaagtgccgaggaatatggcgactggcaaagatctgaagcgcaatcttttattcacgaactaagcaaaaaactcatcatcactaatttacgaattgtaaatggctttggatggggagtcgggagcgcagtaataaacggtgcgcttgaggcaatctactctgcccctgaaaaattctcagaagaccaattgattgttaggccttttccacaatttgagacgaacaacaaaaatctcgcagatctatgggaagattatcgccaaagaatgatcgcgctgacgggtatcgcactcttcattttcggaaataaaaaaagtgataacggctccattattccagcaaatggcgtaatgcgagagtttgaaattgcggttagtaatggcgtcatcccgatccctatcggagcaacaggatatatggcaaagataataacttcacaattggaagaaaatccgactaaatatttcggaaccaacacttggatttatccgctaataaaggaactaaacaacgaaaaacttacacagcatgaaataatcaaaaaaaccattaacatcatacaacgtttaggaaaataa

SEQ ID NO: 18689 - DNA, 483 bp, Pseudomonas sp. CFII64
atggctaagaccaaggttttttatagttttcactttgacaatgacgtaatgagaacccaactagtgcgtaacattggcgcattagaaagtaatcagcctgtggaggccaacgattgggagactgttaaaaagaaaggagacaaagctattgaagattggatcgatagcaaaatgaaagactgtgactgcgtggttgttctagtgggcgaaaaaacctctgaacggccttgggtcaagcatgaaatcaaaaaggcatggaatgacaaaaaaggtttgctcgcgatacatgtaaacgatctcaaggaccctaacgatggagttggtaaaaaaggaaaaaaccctctcgatcactttacatacaaacggaacggtgcttccaaaacacctccttgtatcaccccaaaagcttcagatgcttataatgacattaaaaacaacatagaagattggatttcggatgcaatcaagataagtaaaggctga

SEQ ID NO: 18690 - DNA, 1443 bp, Sphingobium chinhatense IP26; identical to SEQ ID NO: 18686

SEQ ID NO: 18691 - DNA, 468 bp, Sphingobium chinhatense IP26; identical to SEQ ID NO: 18687

SEQ ID NO: 18692 - DNA, 1452 bp, Staphylococcus aureus S1; identical to SEQ ID NO: 18653

SEQ ID NO: 18693 - DNA, 609 bp, Staphylococcus aureus S1; identical to SEQ ID NO: 18624

SEQ ID NO: 18694 - DNA, 1035 bp, Staphylococcus aureus S1; identical to SEQ ID NO: 18625

SEQ ID NO: 18695 - DNA, 1452 bp, Staphylococcus aureus S130
atgactatagataagaaaaaattcattgaaaaatatgtaaaagctttagaaagtaatacagcggctatttttgctggagcaggattatcttgtggagcaggttatgttaattggaagacattgcttaatgaagcagcagaagaattagaattaaatatagataaagaagaacatgatcttgtaggattagcacaacattatattaataagaaaagaagtcgtggaaatctaaatacagtaataatggagcaattttcaacaagagcagaattaacagaaaatcataagcttttagcaaaacttcccattgatacatattggacaactaattatgattgtatgattgaaaaagctcttgattctgagggcagaattgtagatgtgaaaagaaatcaaaatcaattaactgtttcagtagccgataaggatgctacagtttataaaatgcatggggatatagacagtatagacaagattattttaactagagatgattatgaaaaatataatctaactcatccaaagtttcgtgaaatattggaaggagatttactttcaaaaacttttctattcataggttttagctttacagatccaaatattagttatatcttatcgagaataagattagtgttagaagacaatactagaccacattattgtattttaaaagaagtagaagaaaaggaatatgataatacagaagaatttatgtacgcaaagataaaacaacaacttcatatagaagatttaagccgattttcaatagaaactttattagttaaagattatattgaaatcacagaaatattagaaagtatttataaaagatatagaagaaaaacaatttttatatcaggaagtgctacagaatatttaccttttaattcagaaacagggaaatattttttacatcaactaagtaaaaaattagttgaaaatgattttaaattagttacaggttttggattaggagtaggatcatatgttattaatggagtagctgattatattaatagtaataagaagtctaaactacagaatcatttaaatatattgccattttctcaagattcaagtggcgatttagacttaaaagaagtatggaaaaaaaatcgcttggaaatgatttctgagtgtggaatggcattatttttatttggaaataaagaaaaggatggaaaaattgttttagctgatggattagaagaagaatataaaatagcagaaagacaagaattggttagactccctataaatgtgacaggttataaaacaaagaatctttcagaacaatataacgaagagataaatatacaatttaaagagaaaatattaaaaatgtataacgaaataaatgaatacaaatgtgatttttcaaataaacaaagtattgatgaattagttcaaaaaatagtaaatttagtaattgaaataaaaaaaacaaaataa

SEQ ID NO: 18696 - DNA, 609 bp, Staphylococcus aureus S130; identical to SEQ ID NO: 18624

SEQ ID NO: 18697 - DNA, 1035 bp, Staphylococcus aureus S130; identical to SEQ ID NO: 18625

SEQ ID NO: 18698 - DNA, 1452 bp, Staphylococcus aureus S123; identical to SEQ ID NO: 18653

SEQ ID NO: 18699 - DNA, 609 bp, Staphylococcus aureus S123; identical to SEQ ID NO: 18624

SEQ ID NO: 18700 - DNA, 1035 bp, Staphylococcus aureus S123; identical to SEQ ID NO: 18625

SEQ ID NO: 18701 - DNA, 1128 bp, Staphylococcus aureus S100; identical to SEQ ID NO: 18617

SEQ ID NO: 18702 - DNA, 609 bp, Staphylococcus aureus S100; identical to SEQ ID NO: 18618

SEQ ID NO: 18703 - DNA, 1035 bp, Staphylococcus aureus S100; identical to SEQ ID NO: 18625

SEQ ID NO: 18704 - DNA, 1128 bp, Staphylococcus aureus S94; identical to SEQ ID NO: 18617

SEQ ID NO: 18705 - DNA, 609 bp, Staphylococcus aureus S94; identical to SEQ ID NO: 18618

SEQ ID NO: 18706 - DNA, 927 bp, Staphylococcus aureus S94; identical to SEQ ID NO: 18619

SEQ ID NO: 18707 - DNA, 696 bp, Lactobacillus fermentum MTCC 8711
atggcagatattattggagaaatttcaaaagaagattttgttaaaagttatgcattaagcattcaaaaaaaagaggccgctatatttgttggtgcaggaacatctataccttctggaaatcttagttggacaaagcttataaaacctcttgctgatactttggaaattaacattaattcttacaacgatttagttgatatcactcaatactttttgaatgaccaagcaggtaatcgtagctttattaacgacagaattttagattctatgtctgatcagcagaataataatcaaacactacgagcaatttctgaattatcggtttctactttttggacaactaactatgatcacctactagaaaactatcttgaaaaatctggcaaaaaagtagacatcaaaagaaatgaagcttctcttacaaataatattagaggccgagatgctactgtttttaaaatgcacggtgataaagatgacgttaataataccgtaattactagagatgatttcatgaactatactgaaaaccacccaaatatgtctactgcactacgtggggactttattaacaagaccttccttttcattgggtatagttttaacgaccctaatttaaactatattcttggaaagataaagagaacaaacgcgacaaatcrayktcgcgatcgattaaagttaggtagattgtaa

SEQ ID NO: 18708 - DNA, 498 bp, Lactobacillus fermentum MTCC 8711
atggttaaacatcaagttttttttagtttcgaatataacaaagataactggagagctagtcaggtgaaggaaatgggagttgtaagttcatcatctacattttcctcgaatgattgggaagaagttaaagaaaaagacgataaagcaattaaaaagtggattgatgaccaaatggcaatgagagcatgtgtagtcgttcttgtaggaacaacgacttcttccagaaaatgggtcaaatacgaaattgaacatgcaatgtctttaaataaaggtattgttggggtatatattcatgggcttaaagataaatcaggaaaccaaactactaaaggcgcgaacccctttgataacgtaaaaacaattaatggtgatcgactttcaaaatatgttcaatgttatgatactgcttattctactagtaaatatgtttattctgatatcgaagaaagcttgccagatttaatagatgaagcaattaataatcgttttgattactga

SEQ ID NO: 18709 - DNA, 1422 bp, Peptoclostridium difficile DA00065
gtgcttattattaaaggtgaagtatcaaaaaaagatttgattagagaaattgaaaaagctattaaaagtgatgaattaggagcatttattggagcaggactatcaattcctgccggattttgtagttggaaagaacttctaaaagaacctgcagaagaaattggactagatgttgaaaaagaaaatgatttggttaacttggctcagtattattctaattcaaaaaaaagaacatcgatagatgacttgatcaaaggtcaattttctcaattagtaaaacctactgaaaaccataaattattatcacagttaccgatttccactttttggacaactaattatgataagttaattgaaaaaactttagaagataatatgaaaaagccttatgtaaaaacaaaggatgaacaattaagaggtacaaatcatgattttgatgcaatagtatataaattgcatggcgatgtagaatctcctgaagacgcagtactaacaagaagtgattatgaagaatttggatataacaaaagaaaattattcagagaagttttagaaggagatttgcttaccaagacatttctatttttaggatttagttttgaagatccaaactttaactatgtaattggaagattaagggtattgctcgatgaaaagaatacaagaaagcattattgtattatgaaaagagtccaagatactgatgaggattatgaatacaaaaaagcaaaacaggagctacaaattgaagatttaaatagatatggtatttttacatatttagtaaatagatatgatgaaattaccgaattattaagcactcttgtcgatagatttagaaggaaaacaatatttatttcaggcagtgcatacaattatccgggttattctcatgaaaccgctcaaaattttattcataaattatcttttgaactatcgaagaatggttatcgcattgttaatggatatggaaaaggtgtaggagaatttatattaaatggtgttgcagatttttgtttgactcacaaagcaaaaataaatgattttttgacgcttatgccttttcctcaaaatagttcattagaaatagatttagataccttgtataaagaaaatagagagcagatgattgaaaattgtggcatagcaatatttgtttttggaaataatgaaacagaaaatattgcaagtggagttatggacgaatatgagttatctaaagagcatggattagtatgtttgcctattgaaaatactggtggggcatctaaagaaatatatgataaaacaactcaagaaatttcagataaaaatacaataagcgcaattgaacaggcaaataaacaatgcgatggagatattgatatatctgttaaaaacatagtgcaagcagttaaaatattaaataaggaggatttttaa

SEQ ID NO: 18710 - DNA, 426 bp, Peptoclostridium difficile DA00065
atgggaaaggtggatagcagctctactttttctgataatgattgggaggaagtaaaagaaaaaacagacagtaaaatcaaagaatggattgatgaacaattaaataagcgttcatgtttagtggttttaatcggagaaaagactgcaaatagaaaatggataaattatgaaattaaaaaagcatatgagttaaataaaggaattgtaggaatctatattcataaattagagaattcatcaggtgaacaagatgataagggaaataatccatttgattatttgacattagaaggagagaaactttctaagtatgttaaatgttttgattcgagttatgcatcaagtaaatatgtttacaatgatattaaggataacatagaagatttgatcgaatatggcattgagcacaaaccgtctacttggtaa

SEQ ID NO: 18711 - DNA, 1422 bp, Peptoclostridium difficile P71; identical to SEQ ID NO: 18709

SEQ ID NO: 18712 - DNA, 498 bp, Peptoclostridium difficile P71
atgtcaaaaaggcaagtatttttcagttttcattatgacaatgataattggagagcaggacaggtacgcaatatgggaaaggtggatagcagctctactttttctgataatgattgggaggaagtaaaagaaaaaacagacagtaaaatcaaagaatggattgatgaacaattaaataagcgttcatgtttagtggttttaatcggagaaaagactgcaaatagaaaatggataaattatgaaattaaaaaagcatatgagttaaataaaggaattgtaggaatctatattcataaattagagaattcatcaggtgaacaagatgataagggaaataatccatttgattatttgacattagaaggagagaaactttctaagtatgttaaatgttttgattcgagttatgcatcaagtaaatatgtttacaatgatattaaggataacatagaagatttgatcgaatatggcattgagcacaaaccgtctacttggtaa

SEQ ID NO: 18713 - DNA, 1449 bp, Acinetobacter baumannii CI78
atgtttgaacatgaacaaaaaattatgatcgatcgtattgtaaaagaattagaagaaaataattttgcaatatttgcaggtgctggcctatcagctcctgcaggatatgtaaattggaaagaactattacgtccattatctattgagttaaacttagatattgataaagaaactgatttagtttcattagctcagtattatgtaaatgaaaatcatggtcgtaatagattaactgaaagattaattgatgaggttggggtggctcgtgaacctacagcaaatcacaaaattttagctaaattgccaatatcaacatattggacaactaattatgatgatttaattgaaaaagctttagataatgagggaaaaatagcagataaaaaatttactaaaaatcatttatctcaaactaaaaaaggacgatctgctgttgtttacaaaatgcatggtgatgctagtctaccggatcaagcaattattactaaagatcaatacgaatcctacccactacattttgcaccattcgtaacagctctatctggagatttggtttcaaaaacatttttatttttaggatttagttttaacgatccgaatttagattatattcttagtagaataagaattcattttgaacaaaatcaaagacaacattattgcatttttagaaaagttaatcgtactgattacagtaatgatgaagatttctcatataatcttttaaagcagcagtttgttattaaagaccttgctcgttttagtatcaaagttgtattaattgatgcatggaacgatctcactcgaatattggaagaaattacaaaaaaatttcgatgtaaaaatgtattcttgtcaggtagtgctcatgaatttggtccatggggtcaaaccgcaacagaattgtttttatccaaacttggagaggttttaatccaagaaggttttaaaattacatcaggtctaggcttggggattggtaatgcatttattagtggtgcaattaaagaaatttataatagaaaatatacaaaaattgatgattatttaacaatgaaggtatttcctcaatttgtagctgatcctacagaaagaaagagcatttggacagcgtggagaaaagatttattgagtcagacaggaattgctcttttctttatgggaaataaaattattaaagatcctgaatcaggcaaacaaactattgtgttagcagatggtatggatgaagaatttcatatagcacatgaattaggtttaaaactaataccaattggtgcgagtggatataaggcaaaagaattatttaatctgataatttcagacttcgatcgctattaccccaattccacaccaaaatttcgtgaagcttttgaaaaattaaatgaagaagtagatgaaccaattaagttgttatcaaaaattcatgatgtaattaagttaatttaa

SEQ ID NO: 18714 - DNA, 495 bp, Acinetobacter baumannii CI78
atggctagacgaactttttttagctttcattattctggtgatatttgtcgtataggtatagttagaaactcatggctaaccaagaaaaatcgcgatgatgcgggattctgggattcggcaaagtgggaacaagtaagaaaagaaagtgatttggcaattaaaagatggataaatagtcaactcgaaaatacaagtgttactgtcgtcttaataggagctgatactagtacgagagattgggttaactatgaaattgaaaaaagtattgagcgtggtaatgcattactaggtatttatattcataaaataaatggcttaggaaaaggcatctcaagaaaaggaagaaatccgcttgatgatcattatattccatgtactgatggtaaaagttataaagcatcaagtatttatgctacttatgattgggtagatgatggtggatatgaaaatttaggaatatggattgaagctgccgcaaagcgggcaggaaaatag

SEQ ID NO: 18715 - DNA, 1158 bp, Acinetobacter baumannii CI78
atggctggcattattaaaagaaagtatatgtctgaaaatatacagatatataaaaaaatgacgaatcaattaaatttcataaataaaatattacctgagacttacgatggtaatattttatttgatttatatgttgagtatttttattccacaatccagatgctagatgaaagatatgaatattatagatcaaaagatatttttttaagatcagttggaaaaaaacaaagatacaaaatattaaactctaaagattttttctttagctcacaaaaagttaagcacatgctttcatatggacaaagattacggcataagcaacaatacaatgaagaaagtaaaactgaatctttaataaaattagaaaaaaaattaaataaaagccttaataaaaaattagtgattgcaaaaaaaaatgaacatattcaagatatagagccgatatatattgatatttttattaaaatatatcatagatctaaccatttggaaaaaatactaatttttaatgagcttaaaaagtttaatagtaataaaacaataacttttttttataaacttaatgattcagaacataacaatcaaattagaatgatggcctttcaacatctacagaatctaggtaaatatgtcaagttgagaaaaaaatttaaaggaaagaaaaagacatatcatagcgatagtactttaccaacttatagtccagaagaacttgtaaaatttctcaattcaaattcagtagagtcaaagaaaaagtacgatatttttatttcccatagttatttggataaagatttggttaacagcctaaagaatgccttaaatcttcaaaatttattatgttattatgattggacatcagatcaagactttctaaaaagaactttaataagtaattatacaaaagaagttctaaaaaagagaattgagcaatctgaaatatttcttttattgcttactcaaaatgtaatcgctgaagataaaataatttctgagtggatagatatggaaattgaatatgctaagtcattaggaaaaacaatactttgtatcaacttaataaatgcaaaacacaagtttattgatcttaactttgaattacgtgaaaattcgatttatcttacagaagttttgagtagttttttgataaaagcttaa

SEQ ID NO: 18716 - DNA, 336 bp, Acinetobacter baumannii CI78
gtgtatgttgattggctagatagctctatgcctgatagtcccaatcgagaaacagcagttaaaattcaacagaaaattcaagaagctgattatttctttttcctcgcaacaccaaactctgttaaatcaagatggtgcccttgggaaattggctatgcagatggggtaaaagaatatgagtctatttttgtaattcccacacaagaccgttatggttcttattatggaaatgaatatctacagctatatcagagaatcgaggaatctcaacaaggtcctttagcattttggaaacccaacactactactagtggtagatacatgtcatcactataa

SEQ ID NO: 18717 - DNA, 1179 bp, Acinetobacter baumannii CI78
gtgtctgaaaaatactatcaaattatattacttggtaaagttgatgaacgacttgcaagtattcaaaaaagtcttatggatagatttaatgatctgaagattaatccaagttttatcaaatttattcatagtgataattatttatctagagatcctaaataccccactattgcaatttattttgggggtgacaaatctaacattttatacttatcaaatcttatcgaggaatcagtagtcattattccagtcgttcaaagtaatgaactagttccgatagaactacctgatgaaatcattcgtattaatgctttaccgattaatcaaacaaataataatacggaacgattagtttctattatctgtgaaaattttagatttctgaggaaggagcgaaaagtttttattagttatagacgtatagattcacaaggtacagctgacaagctctatgacatcctagatgcaaacggttttgatgtatttctagatactcgatcagtaccacctgcacataatttccaagatcagttatggcatcgtatgactgactcagatgcaataatcttattagatactccacggtttagaacaagtaggtggaccaaagaagaattaatgttcgctaacgaacataacattcacattttgcatattctatggcctcagcaaaaggaagaaggtattgcttcttttaacgagttcattaagctaacctcgaaagattttaaaatgaaaagccttggtagaaaaggcattccatatacagggaaaaatattacaaaaaaaactcttagaaatattgtaataaagactgaacagctcagggcaagagcaatttctcttagatataaatatctcgttgataacttttgtgatgctgctagagatgcaggctacaaaccaaatgtgcaaatagatcaatggatttctatagctgattggaaagacaatggattagctgtaataccagctataggtgtccctacagcagatagaatcaatgacatttataatgctgtatcaaactcaaaattcaaaaacagtgaaaaatggattatttatgataatcgaggaattttaaagcaatggttagatcatttagattggttggatgaacatcttccaattaaagcagtgaatatgactaaagccccttcattattagaaaataagtga

SEQ ID NO: 18718 - DNA, 777 bp, Acinetobacter baumannii CI78
gtgtacaaaagtattcaagttgaagattttgatttttcaatatttccaagcattagttatctagatgtgagtaaatatagagagaaaaatgaaaatagactaattgaaattcaagattacttacttgatagaaaaaatactttgagtgttgataaaatatctaaaaatctttttttagatatcaaaccagatatatttttatcacattcacatgctgatgaaaatgatgcgatacgattggcaattttaatagaaaaagaattaaaattgaatgtatttatagattcttgtatttgggggaatgcttttaaactattaagagaaattgataatatttatagtttggatggagatacatttgactatcatattcgaaatcatacaacttcaaatgtttttatgattctgaattcggctttacatagaataattgataattgtgaagcttttatttttttaggcacagatcaatcaattccaataactgatacattcgaagataaaaaatatctttcatccccttggatttactcggaacttcaatttgcaaaattagtgcgtaggactaaaccaagacgaataccgtttgaaagtagagatataaaaacagaatcagctttcgatagcgctgtagattttgcttattcaattccaatgacagacgctacattaagaaatcaaaaattgaaaagctggatagaaaattctaaaaattcttttataaatgagaatactcattctttagatagtctttataatatcgttacataccgataa

SEQ ID NO: 18719 - DNA, 1446 bp, Vibrio parahaemolyticus VP2007-095
atgaaacgtaagtttccaaatgaaacggaagcatttattcgcacttttgttaaagatcttgaagaaggtgctgcggcaatcttcgcgggtgcggggctatccaaaaattgtgggtttgttgattggagtgaactgttaagcgatattgctgaagagctagggttatctgtggagctggagcatgacctcatatcggtagcacaataccatgttaataaacaaaatagcgctaatgggttagcacgaaagatattagaggagttttctgaacaggctgaaatatctgagtctcacaaaattctagctcgtcttccaattaaaacatattggactaccaactacgatactcttatcgaagacagtttgaaagagaactaccgcgtcgcggatgttaaacgaaaaactgatgatttagttaatactaaacctaaacgtgatgctgtagtgtataaaatgcatggagatgtcgggtcacccagtgaagctgttttatacaaatctcaatatgaacaatattataaaacccatgaggcatttattactgccctaagtggtgatttgatttcaaaaacattcttatttattggttttagtttttccgatccaaatctggattatattttgagtcgtttgcatgtccctaattcttatagacggaaccattactgctttctccgtaaggaaccaagcgagttaatgtgtggggaagatgaacatggggctgaatataggcagcgtaagcaagaacatcatattagagatcttaagaggtttgggattcaagctattcttgttgataaatatgatgatattcctctgatactaaaagaaatagagaataggtttctaagaaaaacaatttttatttctggaagtgcagaagaatatggtcattgggataagcaacttgcattagatttaatacactcactgtcatcctccctagtcaaagcaggttatcgagttgtgaacggatttgggtggggagttggaagcgcagttattaatggtgctttggaggctatatactcaaacccagaaaaatactcagaagaacaattggttatgcgtccatttcctcagcatccatctaacggaaaagacttggctcagttgtggagagagtatagacaacgcatgattagtcagtcaggtgttgctgtttttctttttggtaacaaacttcaagagagcaaagtagttaatgctgatggagtaagaaaagagtttgaaatatcaatcgagaatggccttagcgttattccaattggatgtactggttatatggcaaaagagttatcagaaaccattttgtcagataaagaaaaatactttccaaatagctcttggctagagaaagaaatactagaactgaatgacatatctaataatagtgaagacattgtccgtaaagtgctatcaattattagaaaggttgggaagtga

SEQ ID NO: 18720 - DNA, 315 bp, Vibrio parahaemolyticus VP2007-095
ttgacagtacacatccacaatttaaaagacaaaaatggatatacaacgtcaaaagggatagatcctctatcttgtattggagtctataagtctggcgaaaatatctactttgctgaaaaaaatggtgctaagtgggaaaaatatggcgactatcaatcacctataccagctaaggatctttggttttctgaacccaaagataatggtgttcttccattgtctcgtttctatagtaactatgattttgtaaataacaaagggcgggaaaacatatctaaatggatagattctgccgctaaacaagttggtagataa

SEQ ID NO: 18721 - DNA, 576 bp, Vibrio parahaemolyticus VP2007-095
atggcctattttacgaaaagtgaggcgcgtaatgcgtctgcccgagttcgtggttaccgttctgcaaaatcatttttatcggaatcagtaaaaaagtacaaacagtcagaaagctttgatgtatttctttcccattcaattgaagactacgatcttgtgctaggtgtgatggtgttgttagaacagcagggactaaaggtttatgttgattgggtagttgatgagcagttagacagaagttatgttagcaaagatactgcagaagtacttcgatatagaatgaaaagctcagcttctctgatgtatatagctacagaaaattcctccaactctaagtggatgccgtgggagctgggttattttgatgggctcaagtcagataaagttgctattttgcctctgcaggattctgaaaatcagcgttttgaagggcaggagtaccttgggttataccctttggtcactaaataccttcagaatggacgcgtgaaccactatgttgaagagcacggctctagatggagttcattaggaaattttacaagggctagtagtaacatttggaacaaatactaa

SEQ ID NO: 18722 - DNA, 1455 bp, Serratia marcescens EGD-HP20
atgtttaaccgtgatatagaactgtttattcgtgattacgttaatgatattaaggctggcagcgctgcgctgtttgccggcgccgggctgtccatccccgccggtttcgtcagctggaaagagcttatcggcgatatcgcttatgaactggagctggatatcgaaaaagagagcgatcttatttccctggcgcagtatcacctcaatgaaaaaggcaacagacataagataaatcaaaaaatcattacagagttcgctgaacaggcggaagaaacagaaaaccaccggattatcgccagattaccgatagcgtcactttggaccactaactacgacgacctgattgaaaaaagctatgcccgttataatcgcgtatgcgacgttaaaaccacaccggaaagcctgaccaataacattcacaaacgtgatgttgttttatataaaatgcatggtgactatagaaatcccaaccaggcgattatcacccgcgaacaatacgaaacttactcccgaacacaccttccctttatcaacatgctgatggcggaactgaccgctaaaacgttcctgtttatcggtttcagcttcgaagatcccaatctgcagtatgtgttgagccgcctctatgcacagtatgccgaagggaaaagaaatcactactgcattatgcggcgcgttcagctcggcgacagcggcagtgaagatcaggcgtcctgtgactacaacagccgtaaacaaagcttgatgatcaacgatctgcgccgttacggcattcaaacgctgctggtggatgactatcggcaaatcaccgacctgctgtatgccatcgaaacgcagtttaagaaaagcacggtgtttatctccggcagcgccgacaactaccatccttatgcccgtgaagagtccatccagttcatacatcgtctggcgcgcctgcttatccgcaaacagcaccgcatcgtcaacggcttcggctggggcgtaggcacggcggtgatcaacggcgcactggaagccatttacgacagccaagggaaaatcagcgaaagccaactggtgctgcgtccgttcccccaattcgccagcggcggcattaccctaccggcactttggcacgaataccgtcagaacatgatttcgctcagcggcatcgcaatctttttgttcggcaacaaacgcaacgccgaaggcgaatacgtgctggccgacggtttattgaaagagttccagatcgccacggaacaaggctgcgtctgcatacctatcggttgtactggcagcgcatccgccgagatctaccgaaaaatcaaggaggaaatgaaagaaaccctctaccaccgccaccccgccgccatgaatctgctggatcagcttaacgaaccgggcagcctggcggagaagaaaaaatgcctgttggcacttatcgatatcattactaaggataacccccgatga

SEQ ID NO: 18723 - DNA, 492 bp, Serratia marcescens EGD-HP20
atgaccagaaaatgtttttacagtttccattatgagccggacaactggcgcgcttctcagatacgtgaaatgggcacgctggaaggtaaccggccggccacggataatgattgggaggaggtgaaaaaaggcggcgataaagccattgccgattggatcaaaagccagttggacaatcgcagttgcgccgtgattctcgccggtaaagataccgctaatcgcaaatggattaatttcgaaatctgcgaggcctggaaaaaaggcatgggcgtgctggtggtgtatatccacaatttgaaagacagcgccggcgaccaaaccacgaaaggtaaaaacccgttggatcacatcaagctgggtgacacaaaactctccgctatcgccaaagcctatgatccgccttacctgaccagcaccaatgtctataaccacatcaaagaaaatctggctgagtgggtagaagaagcgatccgcatccgcgcaaattactga

SEQ ID NO: 18724 - DNA, 1422 bp, Megasphaera sp. BV3C16-1
gtgcttattatcaaaggtgaagtatcaaaaaaagatttgattagagaaattgaaaaagctattaaaagtgatgaattaggagcgtttattggagcaggattatcaattcctgctgggttttgtagttggaaagaacttctaaaagaaccagcagaagaaattggattagatgttgaaaaagaaaatgatttggtcaatctggcacagtattattctaattcgaaaaagagggcatcaatagatgatctcatcaaaggtcaattttctcaattagtaaaacctactgaaaatcataaactattatcacaactgccaatttcaactttttggacaacaaattatgataagttaatagaaaaggctttagaaaccaatatgaagaagccttatgtaaaaacaaaggatgaacaactaagaggtacaaatcatgattttgatgcaatcgtatataaactacatggagatgtagaatctcctgaagatgcagtacttacaagaagtgattatgaagaatttggatataacaaaagaaaattattcagagaggttttagagggagatttgcttaccaaaacatttctgtttttaggatttagctttgaagatccaaactttaactatgtaatcggaagattaagggtattactcgacgaaaagaatataagaaaacattattgtattatgaaaagagttcaagatactgatgaggattatgagtacaaaaaagtaagacaagagctgcaaatagaagatttgaataggtatggtatttttacctatttggtaaatgactatagtgaaattactgacatattaagtatacttgtagatagatatagaagaaaaacaatatttatatcgggtagtgcatattgttatccgggttattctcatgaaacgggtaaaaattttattcacaaactatcttttgaactatcaaagaatggttatcgtattgtgaatggatatggcaaaggtgtaggtgaatttatattaaatggtgtcgcagattattgcttgaatcataattccaaaataagtgattttttgacgcttatgcctttcccgcaaaatagctcattaggaatagatttagataagctatataaggaaaatagagagcaaatgattgataattgcggaaccgctatattcatttttggaaacaaagaaacagaaaatattgcaagtggagttatagatgaatttgagttatgtaaaaagcatgggttagtatgtttgccaattgaacatactggtgggtcagctaaagaaatattcaataaaataactcgagaaattacagataaaaatacaataagtgcaattgaacaggcaaataaacaatgcgatggcgatattgatatgtctgttaaaaacatagttcaagcagttaaaatattaaataaggaggaattttaa

SEQ ID NO: 18725 - DNA, 498 bp, Megasphaera sp. BV3C16-1
atggcaaaaagacaggtattttttagctttcattacgataatgataattggagggcaggacaggttcgcaacatggggaaagtagatagtagttctaccttttctgataatgactgggaggaagtaaaagaaaaaactgaaagtaaaattaaagaatggattgatgaacagttaaataagcgttcatgtttagttgttttgattggagaaaaaacagcaaacagaaaatggataaattatgaaataaaaagagcttatgaacttaataaagggattgtaggtatctatatacataagttgaaaaatgtatttggcaaacaagatagtaagggagctaatccgtttgattattacaatataaatggagtaccaatgtctaaatatgttaaatgttttgaatccaattggtcatcaagtgaaaatgtttataacgacataaaagaccatatagaagatttaattgagtatggtattgaacataaaccatcgacttggtaa

SEQ ID NO: 18726 - DNA, 1464 bp, Peptoniphilus sp. BV3C26
ttgaacaatataattaagaaaaaagaattgattgaaattgttgaacaggcattgtatagtgatgaattagcgatttttgctggcgcaggactttctataaatgctggatactataattgggaaaagttattagaaaaacctgcaaaggagttggaattagatatatcaaaagaaaagcatgatttgatttctttggctcaattttattgtaataaaaagaaaagaagtgctattaatgaacttttatcagcttcatttccttctaataaaaaacctacggaaaaccataatatattatcacagcttccaatttctacatattggacaacaaattttgatacgttaattgaagacgccttgaaagaaaataataaaaatgtttctgtcagaaaggatgataaggatttacagctttcatataaaaattatgatgcagttgtatataaaatgcatggagatattcaaagtccatctgatgcagtaataactagagatgattacgaagaatatggaattaatagtagaaaattatttagagatgttttagaaggaacattgctgacaaagacttttttatttttaggattcagttttagtgatcctaattttaattttgtacttagtaaaatgagagttttgctggaagatgataacagaccacattattatatattaaaaaaaattgctgaacctaataggaacaagtttgaagacgaaaaagaatataaaaaagcaatggacgaatacaaatatgatttaattaaacaaagcctacagattgctgatttagacagatatggaataaaaatatgcttaattgatagttatgaagaaatcacggagatattaaaaatcatattaaataggtataaaagaaaaactgtgtttatttctggaagtgcagaaacttatactccattagatgcacaagaagctaaggagtttatcaggaaactatcttttgaacttgttaagaacggatataaagttgttaatggatatggattaggtgtggggacttatgtaataaatggaatcactgaatattgttatgatcacagggacattaaaattgaagatagcttaaaactgatgcctttcccattaagtgcaataaatagtgagcaacttaggacaacttgggaaaaatatagagatgaaatgatttctcaatgtggtatagcaatttatatgtttggtaataaacaaaaggatggagaaattattaaagctgatggtgtaaaacaagaatttaatattgctgaatcatatcaattagtgaatataccattagcatttactgggtttatatctcaggaattatattctgaaaatagtgatatggttaaaaatattttaaatgatgaagaaattcagtatattactaaattttgtgatatagacactaatgttgatgcaataattaaaataataaatagacttaacagtaaggaggaatgttaa

SEQ ID NO: 18727 - DNA, 492 bp, Peptoniphilus sp. BV3C26
atggcaagaagagtattttttagttttcattatgatgaggatatcaatagatcgatgatagtaagaaatagttgggttactcaaggcaaagaagctgcaggttttatcgataaggcggaatttgaaaaaattaaaaggaatggtgaaaatgctgtttgcaaatggatagataagcaactagaaggaacttcaattactatagtcctaattggtaaagaaacattaaaccgtccatttgtccaatatgaaataagaaaaagcatcgaaagaggaaatgcaataattgggattcatatacataatcttagagatatgataactcaaaggacaacagtaaagggtaatccacatactattattggatattataatgatggtacacctgcgtattttgactatatttgtgatgatttgtatgactatttggaagacaatggatattataatttgggaagttggattgaaaaagcagcactaaaaaaaggaaaataa

SEQ ID NO: 18728 - DNA, 1131 bp, Peptoniphilus sp. BV3C26
atgggaaaaacagcaagacaattcaataaaatatatattgattacaaaaagaaatttaaaaagtcaattcaacaagttttgaagttaatgccatatactttttcagacgatgatattgttaatacatttaaagagttatatccacatttgtgggatgatttgaataaacagtataatttttggcataacaaaaatatggttctacttaagtatgggaaaaaaagcagatataattttataaaaccttataattttattttagattgttcttttcatagtgtgaaaaaacttagaaaagataagaatagaattattttgggaaaagatgatatggaaaatttaaagaatgaaataaagcagatatcaaaatccaaatttgataaaagaaaacaaaaagttgacggcacattaagatttattcaagaaatagaaccacaatatacatcgttttttatagataaatattttaaaacctatgacttgcatcaaaaattagagataatgagagaactttcaaaatataaatcatcaaatattacggagtttttttataaggttaattcatgtacaagaaatttttctttaaaagaagaagcccaaaactacattcaatctattggattaccatttatgttaagacgtaagaaaaaaggaaagaaaaattatattgataacgaaattgtaaaaaacaattcaggtcctgaagttttaaaacagagactgtacgtagatgatttagagaaggtaaaaagatttgatgtttttatatctcataactctaatgacatgaatcaaatagttgaattttataaaaccctaaatacaaaaggatatgtggcttatatagactgggttaatgataaatacgatttgaaacgagaatggtgtaatgcttcaacatcagaaattattaaactaagaatacatcagagtaagatttttataatttttttaacagaattaacttttaaatcacaatggtgtccatgggaacttgggtatgcagacgctttggataaaaaaatttatgtttataattcaccaaatttaaaaaatgaagatattcctattttctataaaggttacactgaaataaaaagtgttgatgaaattattatagaaaattattga

SEQ ID NO: 18729 - DNA, 1422 bp, Peptoniphilus sp. BV3C26
gtgtttattattaaaggtgaagtatctaaaaaagatttgattagagaaattgaaaaagccattaaaagtgatgaattgggagcattcattggagcgggactatcaattcctgctggattttgtagttggaaagaacttctaagagagcctgcaaaagaaattgggttaaatgttgaaaaagaaaatgatttggttagcttagctcagtattatgctaattcaaagaagagaacatcaatagatgacttgatcaaagtgcaattttctcaattactaaaacctactgataatcataaactattatcacagttaccgatttccactttttggacgactaattatgataagttaattgaaaaagctttagaagataatatgaaaaagccttatgtaaaaacaacagatgagcaattaagaggcacaaatcatgattttgatgcaatcgtttataaactacacggagatgtagaaactcctgaagatgcagtacttacaagaagtgattatgaagaatttggatataacaaaagaaagttattcagagaagttttagagggagatttgcttaccaagacatttctatttttaggatttagttttgaagatccaaactttaactatgtaattggaagattgagggtattgctcgatgaaaagaatacaagaaaacattactgtattatgaaaaggatccaagataccgatgaggattatgaatacaaaaaagcaagacaggagctacaaattgaagatctaaatagatatggtatttttacatatttagtaaataaatatgatgaaatcactgaaatattaagtactcttgttgatagatttagaaggaaaacaatatttatatcgggtagtgcgtactcctattcgacttattctcaggaaactggagaaaattttattcataaactatcttttgaactatcaaaaaatggttatcatattgtgaatggatatggtaaaggtgtcggtgattttgtattaaatggagttgcagattattgtttgactcataagtccaaaataaatgattttttaacgcttatgccttttcctcaaaatagttcattaggtattgatttagataagctatataaagaaaatagagagcagatgattgaaaattgtggcatcgctatattcatttttggaaacaaaaaaacagaagatattgcacatggagtgatggatgaatttgagttatgtaaaaaacatggattagtatgtttgcctattgaatatactggcggggcagccaaagaaatatttaaacaaacaactcaagaaattttagacaaacatataataagtgcaattgaacaggcaaataaacaaagcaatggcgatatagatatgtctattaaaaacatagtacaagcagttaaaatattaaataaggaggagttttaa

SEQ ID NO: 18730 - DNA, 498 bp, Peptoniphilus sp. BV3C26
atggcaaaaagacaggtgttttttagctttcattacgacaatgataattggagggcaggacaggttcgcaacatggggaaagtagacagtagctctaccttttcagataatgactgggaggaagtaaaagaaaaaactgaaagtaaaattaaagaatggattgatgaacagctaaacaagcgttcatgtttagttgttttgattggagaaaaaacagcaaatagaaaatggataaattatgaaataaaaaaagcatacgagttaaacaaaggtattgttggaatttatatccacaagttggagaatgcattgggagagcaagatgataagggcaacaatccttttgattatttaacattagaaggtgaaaaactgtcaaagtatgttaaatgttttgattctgtatacttatcaagcaaaaatgtttatagcgatattaaagataatattgaagatttaattgagtatggaatagaacataaaccatcaacttggtaa

SEQ ID NO: 18731 - DNA, 1449 bp, Pseudomonas putida SJ3
atgcgtaagaaattttcaccagagattgagattttcatcaggcgctacgttcgtgacttgaacgaaggtgttgcagcagtttttgcaggagcagggctctccaggaacagtggttttgtgaactggccggagctgatgcgcgaggtggccgaagaggtagggttgtcagtcgacaaagagcacgacctcgtggccctcgcccagttccatgtgaacgagcgcagcggctcgggtggcttggctcgtcgtattatcgaagagttttctgagcatgcggaaccgtcaacttcgcatcagatcctggcgcggttgcccattcgtacctactggacaaccaactacgaccaactgattgaggactccctgaggaagcatcagcgtgtaccggatgtgaagcacaagattgatgacttgttgaccacccggcccaagcgtgatgctgtggtttacaagatgcacggtgacgcgttgtccccgacccaagcgatcctctacaaatcacagtacgagcagtactacaagacccacgaagcctttgtgacggctttgagcggcgatctgatctccaaaacgttccttttcatcgggttcagtttcacggatccgaaccttgactacgtgctcagtcgcttgcacgtgccgcagcatgctcgccgtgagcatttctgcttcctgcgtcgcgagccttccagcctgtatgagaacgaagacgaagaagcggctcggtaccgccggcgtaagcaggaactgcacatccaggatctgaaacgcttcggcattcagacgctgctggtggacgaatacgccgatatcccagcgatcctgcgcgccatcgaagagcaattcttgaagaaaaccatcttcatttccggcagcgccgaggagtatggcgactggaaaaaggatgaagcactggatttcattcactccctctcatccagtttggtgaagcatggttatcgggtggtgaacggcttcggctggggggtgggcagcgctgtgatcaacggtgctctggatgcaatctactccaaccctgagaagttctcagaagaccagcttgtgatgaggcccttcccgcaggttgcttcccaggggcaggacctgaaagtgctatggcagcaataccgtgagcggatgatcgcactctcaggcatcgcgcttttcgtcttcggcaacaagactgaaggcggggagatcgtgagcgcgcctggtgtggagcgagagttcgacattgctgtgcgccagggggttgttccggtgccgatcggtgctacggggtacaaggccaaggagcttgcagagaaggtcatggctgatccggccaagtacgctcctgatgatcagtggctggctgaaagccttaagaatctgaacgatccggctgccggtgcgaaatccatcgaagctgcagtgctcaccatcatcaagaagctggaaggggtataa

SEQ ID NO: 18732 - DNA, 477 bp, Pseudomonas putida SJ3
atgaagcgtaacgtgttttatagcttccacttcggcaaggatgtgttgcgcgtgcagcagattcgcaacatgggggtgatcgatggtgatgaacccgtgagcccaaaccactgggaggagatcaagcgttcggaggagggggtcaagcgttggatcaccgagaatctcaagcgcaagacctgcctggtggtactgattggtgaagagacagcatcacgcaaatgggtgaagttcgagatcatgaaggcctgggagttgggcatccctgtggttggtgttcgtatccacaacctcaagtgtccaaatgctggcactggggcatacggcctcaaccccttcgactacgtgacgctcaagcgggctaacggaacggtgtacagcccacgggtttacgacccccgggcagatgatgcttacggttctataaaagcgaacctgccagcatggattgaaactgccatcaaggagtgcgcgtaa

SEQ ID NO: 18733 - DNA, 540 bp, Pseudomonas putida SJ3
atggttcgtaacgtaacgaaatctgagcttcgaaatatttcctcccaggcgacgcagaaccggacttttgccaagtcaatggcgtccacttataatatgacgttcatttctcactcgagtaaagataaagacttggtgatgggggcaattgaagtcatcgccaatcatggtggaatgccgtacatcgacgaagtcgatccagaaatgccgaaacacacatctgaagagactgctgagcttctgaaaaagcgaatcacggactgcaaacgcttcgttctgctcactagccctaacagcaaagacagtcgctgggttccatgggaattgggcgttgctgatggtaagaagggtgtcaaccgaatagccatttttgctgcttcagattatgaaagcgacgatagctggtcgtcgtgggagtacatggggctttatcctcggatcgtctggggcaagctgaaaggctatccaaatgaattgtggatggtctatacggagaagacgaacacggctgaaactctggagtcctggctgcgtcgctga

SEQ ID NO: 18734 - DNA, 552 bp, Pseudomonas putida SJ3
gtggctttctttactaaagaacaggcgcgagctgcggcgaagcgaaccaaggtcacgcttgggtcggttaccggcacgcagtcctattccagtgagcaatatgatccgacccaacggtttgacatcttcctgtcgcactctatcgccgacaaagatctggtgctcggggtcaaggagcttctggaggaaaagcactatacggtttatgtcgactgggtgaacgatgaggagctcgatcgtacgcaggtcaacaaggaaacagcggatctactgcgcaaccgtatgcagcattgttccagtttggtctacattgccacggataacgccgagaactccaagtggatgccttgggaactgggctattttgacggtcaaaaggcaggcggagtcgcgattatgcctctggtagagagcgaacgatcagggtacaacggacaggagtacctcgggctgtatccgctggtgattgaggatgattcacagatttacgttgagggggtatctgagggcaggattggtttgtatgcctttgtgaacgatacctctagatag

SEQ ID NO: 18735 - DNA, 855 bp, Pseudomonas putida SJ3
atgtacatcggctttgagcttgaaaattacaagccttttgagatgattagtgggtcggcggttaataactttcgtgatcaagcgcgagatgtggtcgtgaatgatctggccgattatgtcatcggtcagatcgacaacaaagatatcatagatgtcaaggagctaacgctgaggattttccctcagcaagatgcccagattttcctttcacattcgcaccgggatgagcgtaaagctattgagtttgctttgtccttggagaagcgaggtgtcagcgtgtttgttgattcatgcgtttggggttacgttggtgacctcttgttaaaagtcaacaagcattactccgacagtgaagtggtcggggattttaccaatttttcctatgaaaagtgtaatgaggtcgcagcctcactttatttgatgttgaatgaagagctgcatcgaatgattgacgcggctgagtgctttatttttttcaataccaaaaattcgatcccgattaaaggtcacgagggctttgcagagggtgaccgtacgttgtctccctggatttactccgagctcgctttcagtgccaaggtacgttacaggccattggtgcgtaagcgcttacgcagaaagatcgtaggcgcaatggagtcttacttagtggagaaggcgtttggatcagcttcttttgcattcgaggtcgtcaacgagcaccttccaaagctcgatgggagtacactgaggacattggctcagacgacgcctgagaccggcgatttttggctagatgctttgtactatgcgtatgagctcgaagctaagttcaaaggtctctgtgaggcccgtgctcttgagcccattgcatag

SEQ ID NO: 18736 - DNA, 1464 bp, Pseudomonas aeruginosa VRFPA05
atgactaaagcggctttgaaccgattcctcaatgagtaccctgatgcgctgaacgatggtgtgggggcgattttcgttggtgccggcgtctcaatggcggcgggttacccttcctggtcagagctgctcagtgacatcgctgtagagcttgaggttgactcgaagaacgtccacgacctggcggcgctggctcaatggagcatcctggaaaacggtggtgccacacgcgtccgtaatgtcatcaagaacgagataggccctgacaaacctatccccgagacggttgagatcatctcgcggctaccggtcagacatatctggacgaccaactacgaccgcttgatagaacgtgcatttgaatccattagccggccgctcaaccccatatccggctccaaagatctcgcccttagggtgacacctggcgcagcgctgctctacaagatgcatggttctgtggatcgcctcgacgatgtcgtcatctccacggacgactacgagctgtttcgttcaaaacgaggccagtacctaccgctgtttcaagcgcacctgaccagcatgtccatgctgttcatcggcatcagcttcaccgaccccaatgttcggcatgtcctatcgctgattcgggaaagcttcaccgatgcgccgcccgagcacttcgccatcgtgcgtgcgccgcagaaggccgacttcacgaccgaaggggaattcgcagcgcgcaatgctcagcacaagctgtgggcgaaagatctgaaacgctatggcttgttggcggtagaggtcagtgactatgccgaaattccggcgcttctacgtcagattgaaaagcgagtcgctgcgcgcagaatctgggtgagtggcagctggcctcttgagcggggaggttccgagtcagccgacattcatgcactggccgaggacattggccggcagattggtgagacagggcgccacctggtgactggtgcaggcctgttggttggatcggcgtcattgtcggggttcttgggagcgctgcggcaaggcggcggatgggatctcgagcgacggctgatcgccaggccctttcctcaacccctggcgggagcccagcccaacaacgaagaatgggctgcgctgcggctggagcttgcgcgacaagctggtatcgccattttcattggcggtgcgaagctggccggcgacaagttggaggtcgctcaaggcgtggaacaagagtttgaagttgccaaggcggcaggggtatttctgcttccggtaggggcgtctggtggcgctgcgcagaaaatcagtgacctgctgttgggatcagagctctcctcatctggtcaggacgctgtaaggcccacggataaagaactgaaagtactttctgctccaggattcctggatagcaaagttgggcggcgcaagctcgtttccctagtttttgagatcattgaccgaatagctcatgctacgtga

SEQ ID NO: 18737 - DNA, 504 bp, Pseudomonas aeruginosa VRFPA05
atggcaaggaatgttttcttcagcttccacttcaagaatgatttttggcgcacccagcaagttcggaacatcggtgcattggatggtcagaagctctatacgccgaacgagtgggaagaggtcaagaaaaagggtaatgcagcaattgaaaagtggattgatgacagccttgtagggaagtcatgcgtagtcgtactggtgggctccgagaccgcaagccgaccatgggtggtgaacgaaatcatcaagggttggaacgcgggcaagggcgtcgtgggcattcgcatcaacaagcttctagataccaatggaaactcttcggtggcgggctccaaccctttcgatctggtcacactgaagaacggtactgtgaacctttcgaactatgccaagctgatcacccccgtaggggtcgacagcaaagcggtctacgcatcgatccaggagagcattgagcaatggatcgaggatgccattgccgtccggaagaactacaagccgtga

SEQ ID NO: 18738 - DNA, 552 bp, Pseudomonas aeruginosa VRFPA05
atggcaaggaacgttaccacggccgaacttcgagcttttacagcaaacagatcgcaaagtggccgcgagcagcttctaagatccaatgcatcaagcagtggcacgagcacattcttgtcgcactccagcaaagatcacgaactgttggagggagcgatggaggtgcttcacaaccacggtgcacgggtctatatcgatgaaattgaccctgaaatgccgccctacacctcagcagaaactgctgccttacttaagcagcgcattagtcaaacaagacgctttgttctgctgacgactgagaagagcaaagacagtcggtgggttccctgggagttgggcattgcggatggcgaaaagggtttgatgaaaatcgccctgtttccagcatctgacagcacctacgatgacaattggacgaattgggagtatctcggcttgtaccatcgaatcgcttggggaaaactttcagggtacgagaaagagctgtggatggtgcttgatgctaaagcaaatacagccgtaacgttgagagattggctttcgggatattga

SEQ ID NO: 18739 - DNA, 1443 bp, Enterococcus faecalis NY9
atgaaaaaacaattagtattaacacatgatcaaaaaatgtttatcaaggattttgtaaaggctatcaaaaatgataatgcggccatatttgctggtgcaggattatctatcccatcgggaactatgagttggcctgatttattgaaagatgttgccgaggaactaaaactatctaatgatacaacaacagatatggcaactatggcgcagtactatgaaaatcttaagggctctcgagctgaaatttcagaaataattacgtcaagttttgaggaatatatcgtacccaacattaatcaggaattaatagcacaattgccaataaaaactatttggaccacaaactatgatgatctattagaacaagcttataagaaagaatacaagaaagttttggtgaaacgatcaccaactgatttttctttgaaaggcaaaaatagtgatttaataatttataaaatgcatggtgatgtgcaacaaccaactaaggcaattattactaaaaatgattacgaaacatacaatgatacccattcagtatatactacagcattaaagggagatttagttgagaaaaaatttttatttattgggtttagttttgatgatcctaatttaaactatgtccttgcacgaataagagctttagtaggagagcataagccgaatcactacttttttattgagaagatcaagcaggcgaataatgagagtgaggcagattttgatttacgtaaaacaaaacagaatttaaaaatcaaagatttaaaaagatatggaataaatgcagttttacttgaaagttatgctgaaatcacacaaattttagaagttataaaaagaatggtcaatctaaacaatatttttatctcgggtgcaaaggtgactgatagagaaatggaaagcttagctgatcaattaatagagacagttagtggaaaacttgtaacagaaggcaatatgcttacttctggttttggtgtaggtgtaggttcgcgagtaatagatgcagttatagagactgtttcgaataatccttgggataagttagatgagcatctaaaggtctatccttttccacaaataaaagatactaattggactctatatcgtaaagagatgctggaaaatgttggtatttctattttcttttttgggactaagattgagaaaaaaaaatgcgtagtatcaactggaatgattgaagagtttgaattagcacatgaagcaggagtcaagattgttccagtaggttgtacgggtggtgctagtaaacagattttcgatactgtgatgcaaaatccaaaggaatactatggagaaaatcagaaactgattgaacaaatcaataaattaggatcacatacatttaaagatggaaaagatatcgatgaattagcgcaattgattcttgatacggttagtgaaatgcaaaaaatatag

SEQ ID NO: 18740 - DNA, 426 bp, Enterococcus faecalis NY9
atgggaattgtggatggtagttccacattttcatctaacgaatgggaagaagtaaaagaaaagagtgatcaaaaaattaaagaatggattgattcgcaactagataaacgatcttgcatagtagttttagttggtaccactactgcaagtagaaaatgggtaaagtatgaaattgaaaaggcctatcaattaaataaaggaattgttggtatctatgttcataatttaaaagatgttttaggaaatcaagcaactaaaggtacaaatccattttataacatttttactaataatggatcaaggttatcatcctatgtcacttgttacgaatcaagttatgccacaagcacttatgtatataacgacattgaagaaaaattgcctaatttgattgaaaatgcaattttaaataaagctccaaagtag

SEQ ID NO: 18741 - DNA, 621 bp, Enterococcus faecalis NY9
atggctataaatgtatttatttcatttcgttttagtgacggaaaggaattgaaagaagagttgatagaattatttgattcgtctacagaagtatataaccggtcggaagacaaggatcgtagtgatatgagcgagaaaactatacaaaaatatttatatgaaaagttaaaaaaaacttctgtaacaatagtcttactaacccctaaagcagtcgactatcgtaaagatatttatggaatatatgatgattggttatatgatgagttgagatactctttagaggataggtcagataacagaacaaatggtgttattgcagtctacacagatgaaagcaaagacttgattagagaaagtagtacacatagatgtgacgtatgtggagaagaaaaaacttgtacaactattttagattttgataatttagttagaaagaatatgcttaatgttaaaaatgattataaatctaatcaatgtatgggattgtatgataggaacaaggactcatatatatcattagttcatattgatgattttaaggctgattacgcaacatatattacaaatgctaaaaacaaaagagatagaaaagaagaatttgatcttgttaaaagaatgtga

SEQ ID NO: 18742 - DNA, 1440 bp, Enterococcus faecalis NY9
atgaataagaaaacatttatcaaaaattactcaaaagctgtccatgaaggatatgctgctgtatttgcaggagcaggtacatctgtaggggcgggattcgttgattggaaaacattggtagcgccatttgctgaagaactaaatttagatattgataaagagaaagatttagtgaaggttacgcagtattaccataattcaaaaagaaatagaggtaatattaatcaacaaataatcaacgctttttctagccaagaagagataacagagactgtaaaaatattaactagattaccaatttcaacttattggacgactaattatgaccaagtgttagaagaaggtttaaaaagaaataatcgtaaagcggatataaaaataagtgaaaataatctggcgaataatatatatgacagagatgctgttatatataaaatgcatggagatgtccgcttcccagaaacagcagtactaactaaagacgattacgaactttataatgaaacgcattcattatttacaattgctttaaaaggtgatttgatttcaaaaacattcctttttgtaggatttagttttgaagacccaaatttagatgatatattggcaaaaattagaatattattaggagaaaatacacgtgaacactattgctttttgaaaaaaatagcccaatctgactatataaatagcaatggagtaatcaatgattcggactatttaaatgatgaaatacgtcaaaaactaagaatagaagatttgaaaaggtatggtattgaaacggtgctgttagactcatacgatgaaatccccagaatactttctcaaatagagaaactccatttgaataattctatgtttatttctggaagtatctcatcatacaatgattattggaccgagtcaaaagttaatagtttatgttataatctttcaaaaaaattggtatctcgagattataaagttgtttcaggatttggtttaggtatagggtctagtattatcaatggcgcactagatgaaatatacaaaagtaaattcaaacatataaatgaacatttaagcttacatccttttcctcagattagtgatggcaaaatgaatttaaaagaatcgtggtctaagtatcgaagaaatataatttcagaagcaggtatatgtattttcttgtttggtaacaaattagtaaatggtgaagttgttattgctgatggtatgatggaagaatttgacattgctaaagaactaaataaaataattattcctgtaggaggaacaggaggatctactaaagagatttttgacttaatggaaaaagaaaacaatcagtatgaatatttagagggatactgggaacaacttgaaagtattgatgaagaaaagataatatcaacgattttgacaatagtaactaataaccaaaagcaattggaggaatag

SEQ ID NO: 18743 - DNA, 621 bp, Enterococcus faecalis NY9
atggcaacaaaagtttttatttcatttagatttagtgatggtaaagaattaaaagacgagttaattgagttattcgactcatcaaccgaggtcattaacagatctgaagatgtggatagaagcgagatgagcgaagacactatccaagaatatttatatgaaaaattaaaaaacacttctgttactatagttatcttaactccagaagctgtagactatagaaagaacttatgggggggatacgacgactggttatatgatgaattaagatactcactagaagatagaattagtaatagaactaatggtgttattgcgctctatactgatgatagtgagtccttaattttgaagagtagttctcatacttgtaacaagtgcaatgaaactagaacttgtcgaaccttgacaaattttgataatttagcaaggaaaaatatgttgaatgtaaaagagaagtacaaagcaaataaatgtgataatttgtatgatgacgataaagattcttatatttcgttagttcattttgatgattttaaaaaagattatgaaaaatatatcaattcagcaaaagaaaaaagagatcgtaaagaagaatttagacttgttaaacggatgtaa

SEQ ID NO: 18744 - DNA, 1425 bp, Rhodobacter capsulatus B6
gtgaaaattgaacatgttgtcctgagagttgttcaggcgctacgccaaggtaacttatccgtctttgccggagctgggctttctatgccagcagggtatgttgactggaagggtctgttgcaaccgctcgctagcgaacttggagttgacatcgacagggaaacggatctggttgccattgcccaattctactataacagtaagggtcagaaccgcacaaggctaagtcaaagaataattgacgagataggtgtatctgtatttccaaccaaaaatcacgaaatattggccggccttccgattggaaagtattggacaaccaactacgatgcgctcatcgaaaaagcgctcgagcgcgcaggtaaggtagctgatgttaaacacgatatcggtcaaatagccacaacgaaggctaatagagacagtgtcgtttacaaaatgcacggcgacgcgagtttaccgcaaaaggcggtgctcataaaggatgactacgagcgatacgccgaggaacgcgggcctttcgttacagcgctctctggcgacttggttgagcagacttttcttttcttggggttctctttctccgatccaaacattgattacatactttcccgggttagattacgtcttcaggggaaccagcgggaacactacgcaatatttcgagaacgcagtaagggtgatggagagtctgaggaggatttctcacactttaaggcgaggcaagatttggtaattgctgacctaaagcggttcaatattcaagtcgtccttgtcaaagaatattccgacatcacactttttctcgaaagagtggaggctttgttccgatctccacggtggtttctgtctgctggttgttcgaactttgaaccatggggtgagagtgaagtctcgaacttcatgcgcaaactgggcgcaatcctcattgataatggaatccacatccattgcgggcttggactgggcatcggaaatgcattgctcacaggagcacttgaacaggtgtacaggtccagcgagccaagagttgagaagcacctgactcttaggccatttcctcgattcatcgatgatgacgtcaaacgggctgagctgtggaccgcttatcgaaagcaactgatatccggttgcgggtacgccatcttcattttcggcaacaaaattcaagaccagactactctagtcgccaatgggatgattgaggagttcgaaatttgtctcaagagtggtgttattccattgccgatcggcgccacgggatgggcaagcagggagattatgcgcagacttagagggcttcccacttggaaattgatgccatctacgattcaggcggcagtcgaaggcctgcaacacgaggtagagtcgctcgaattgcttctccacccaatcacagaattgattaagtcaatcgagaggtaa

SEQ ID NO: 18745 - DNA, 498 bp, Rhodobacter capsulatus B6
atgagaaacgtattcttcagctttcactttcagaacgacttttggagaacgcagcaagttcgccaaatgggaaaccttttgggccagccgctttgccgcccaaatgagtgggaagaagtcaaaaggaagggagacgcttccatcgagcgatggatagacgagagcctcgatcgcaagacatgcgtcatcgtgctggtcggctctgaaacttcagagcggaagtgggtgcggagggagattgaaaagggctggaatgcaggcaagggcgtactcggcatcaggatccatcaactgctcgaccagaattctacggcttcggcggcaggtgctaatccgttcgagagtttcacctttggtgcgcagaagagaaacttggcctcgattgttccccttgtgtccccttccgggttcgacagcaagcaggtctatgcttccattagggacggaatcgaagattggattgagcaggcaatttcggttcgagctagtgttcgctaa

SEQ ID NO: 18746 - DNA, 1470 bp, Blastomonas sp. CACIA14H2
ttgatcggggaaggcgacatggtagcggcgacgacgaggcgattcctaaaggactttcccgaggccctcataggcggtgggggcgccgtgttcgtcggtgctggtgtgtcgatgagcgcaggatatccatcgtgggcctcgctcctgaccgaagtcggcgaggaacttggggtcaagtctggggaactgcacgatcttgctgcgctcgcccaatggagcatccaggaaaacgggtcagctacacgggttcgaaacgtcatcaaggagcagatcggcgtcgagcacgctgttcctgccactttagagatcatcgctcgtctgccggtaaagttcatctggacgacaaactacgatagattggtcgaacgcgccttcggcgtagtgaatcggccgctcgacacggtctccggtgccgccgaccttgcacttcgggccacaccgggtgccacccgcctgtttaagatgcatgggtccgtcgagcgattagacgacgtcgtcatctctaccgacgattatgaactctatcggtcaaagcgcggcgcatttcttcccttgcttcaggcacatctttcaagcatgtcgatgctgttcctcggcatcagcttcaccgatcccaacatccggcacgtgctgtccctcatacgcgagagcttcacttccgcgccgcccgagcatttcgccatcgtccgccctccgcaacgggacgactacaagaccgacgccgaatttgaggcgcgcagcactcagcacaaactctggagccgagatctaaagcgctacggtctcgtcgtggtcgagatcgaagactatgccgaggtgcccgacctgctgcgacaagtcgaaaggcgcgtggccgcgcgccgggtgtgggtgagcggcagctggcctcctgaggccggcgacgagattgctaaggtctacaacgttgctcaggcaattggccagctcgtgggcgatcgcaaccgcgacctcgtcagcggagcgggtctggtcgtcggctccgcgtcaatcgctggatttctcgaagcgcttcggtcgagcggtggctgggatctcgaccggcgcctcatcgcccgccccttcccacagccaatcccgggcgaggcgccagacaaagcccaatgggcggcactccgtgcggaattggctaggatcgcgggcgtcgtcatcttcgtcggcggtgtgaagatcgatccgtcctccgggctgcggctgatcgcaggcggcgtcctcgacgagttcgaagccgccaaggccgccaactgcttcgtgatcccaatcggctcgactggcggcgcagcggctcagattaccgacagcctcatcgggtctgacgtcgagacgtccggccaaggcgcaatgcggcccaccgatgacgagctgagggagctcgcgcgagccgacatcactgtcgaggagattgtgaagctggttgccgagatcctgacgcgtatcgacaaacgagcctga

SEQ ID NO: 18747 - DNA, 507 bp, Blastomonas sp. CACIA14H2
atggagaactgcatggctcgccgtgtcttttttagcttccattttgacaacgatttctggcggacacagcaggtcaggaatatgggcgcgctagaggggcaatcgttgtgcaccccgaacgcttgggaggaggtcaagcgaaagggtaaggcgtccatcgagcaatggattgccgacaacatgcacggcaagagctgtgtagtcgtactggttggttcccagacggcgagccgcccgtgggttcaacacgagatcgtcaaggcctggaatgacaagaggggtgtcgtcggcatccgcatacacaagttgcttgatcgcaacagccaaccatcggttgcgggggccaatcccttcgagggaatcaccttcaactctggcaagaagctatctgaggtcgtgcaactgattactccgaccggaaatgacagcaaggctgtttacgcctctatctcgaatggcattgagaagtggattgaggatgcaatagcgatccgtggccgcaactag

SEQ ID NO: 18748 - DNA, 555 bp, Blastomonas sp. CACIA14H2
atggtagaatacattacccgcgaagagctacgcggctacgcgacccgaatgggtttagtcgagacggcaagggtccgaaaagccgccgcttcaagatcgctagcaggttcaacattcctatctcattcaagcaaggacgatgatttggtcgcgggtgcaattcgcattctcgaggaccatggcgcgaaagtctatgtcgacgaaatcgacccggagatgcctccatatacaagcgacaagaccgccgagcttctgaagacccgaattcgcgaaacgagccgcttcgtccttcttgccagcaagaacagcaaggaaagcaaatgggtgccgtgggagctgggcatcgccgatggtgagaaaggcatgtcgaagatcgcgctcttcccggcgtcagattccagatacgaaaaggcatgggcatcttgggagtatcttggcctctatcgccgcatcgtttggggaggccaccagagctacaatggcaacatctggatggtgcttgaagagaagaagaacactgccactgaattgagcaagtggctgaagggatactag

SEQ ID NO: 18749 - DNA, 1437 bp, Eubacterium nodatum ATCC 33099
gtggcatctaaagaagaatttataagagaatatactacagctattacacaaggttatgcagccttgttttctggagcgggtctttcaagagctatgggatttgtcagctggaaagaactcgtgaagccactggccgaagatattgaacttaatgtggataaggaacacgatttgattgcagttgcacaatattataaaaatgaaaaggggggaaatgccggaattaatagacaaatcttgaatagctttaacaaagatgtagagctaaatgaaaatatcaaaattcttaccaaattaccaatacagacctactggacaaccaattatgatcatttgttagaagaagcattgaaatttaacaatagaaaagcagatgtaaaaatcacaaaggagtctttggcgaataacatttatgacagagatgcaattgtttataaaatgcacggagattgtagcatgcctgaaaatgctgttctaaccaaagatgattatgatttatatagtgaaagtcatccactatttagggcagcacttagaggagatttagtatctaaaacatttttatttgtaggatttagctttgaagatcctaatttggattatattctaagtcagattaaggtactattaggggaaaatagaagagatcactattgttttttcgagaaatcgattaagataacaggtgaaacagaaagggattatgaaaatagaagagtaagacaaaaacttaaaatcaatgatttaaaaagatacggaatccaggcagttttattggatagctatgatgaaataacggaaatattgaaagaagttgagaaggctcatttattaaaaaatatttttatttctggtagtttgtcagatcgtttggataaaataaatgattcgtggaatagagaaagaattgcatcttttgcaaataatttatctaaaagattggttaaagaagattatcggattatttccggctttggaaataccataggctcattgataatcaatggtgcacttgaagaaatttttaaatcaaaatataaacatgttgatgaacatctatatttaagaccatttcctcaagttgaattggaaacagattcaaaagaagaaatatggcaaaaatatagagaagatatgattggagagtcggggattgcgatttttatatttggaaacaagtgtgaaaatgaagatgtaaaaattgctgatggaatgataaaagagttttacattgcttgtgaacagaataagttaattatccctgttggtagtactggtggtgcagctagggttatatatgatacagttaaaaataatatgggtgaatattcatatttgaacgaatatattgatgctttaggaactgaaacagagccagacaaacttgttgaattaatatgtaagattataaaagcacagcaaaaaattaggaggtaa

SEQ ID NO: 18750 - DNA, 612 bp, Eubacterium nodatum ATCC 33099
atggcacataaaacttttatatcgtataagtatagtgaagctcaaggtttaagagatgatattattaaaaaattaggggatgatgcgagttattataaaggagaaacaagtgaatcaccagatttaaccgatacatcaactgagaatataaagaaaaatttaactgatatgatgtatgatacttctgtaacaattgtaattatatctcctaatatgaaaaaaagtaaatggattgattgggaaattgagtactgtttaaagaatataagtaggaaaaatagaacttctcatacaaatggtattgttggtgtaattatgaaatataatgacggatatgattggtttaagaacactcataaaaatagtgatggatgcacatcaagcaattatgaggaatccaaagtatatgacattattaatgacaatcgctttaatcaaaatccaaaggtatactcttgcaatacatgtaaaacagtagatgcattaacaggttcttacatagcgtatgttgaggaagaaacatttctatcaaaccctcaaaagtatatagataatgcttatgataaaagtgaaaatgatgcgtatggatataatattacaaagaaaagatag

SEQ ID NO: 18751 - DNA, 668 bp, Aggregatibacter actinomycetemcomitans serotype e str. SA2149
tttttatttcagatttagagcgagtaggaattagtgcgttattaattgatgattattcagaaattacagaaatattgatggaaatagaacaagctcaaaaacgtaaaactatttttatctcaggggcagcagaaaattattctccttattctcagcaagaagttgaacaatttgtttcttctctttctcaagagattttaaaactagggtatcgtattgttacaggttttggattaggaataggtagctcagttatttcaggcgcaataaaacatcttacggaacaaaatttaaaaatagatgaggactatttgatacttcgccaattccctcagaataaagaagggaaagaattgtggtctgcttggcgtgaagatatgatttcttatgctggtatctctatatttctattcggaaataaattacagaatggaaatttgattttatcaaatggtatgcaggaggaatttgatatttccaaaaggaatggaaatgttttaatccctgttgctgctactggatatatggcaaaacaactctgggataatgagatgaataaagagtctgctaaggaggttgaaaatgaaatgcaagcactatctaaagaaaatatttcgctagatgaattaagatctaatattttgtcaattttaaaaaaggttaaataa

SEQ ID NO: 18752 - DNA, 483 bp, Aggregatibacter actinomycetemcomitans serotype e str. SA2149
atgaagagaaatgtattttatagttttcattatgaaaaagatgttttccgtgttcaacaagtaagaaacattggaaagctagaaggcaatccaccagcgacacctaatacctgggaagaaataaaaaggaaaggagataaagaaatacaaaaatggattgatgaaaatttatctggtaaaagctgtctggttgttctgattggagaagatacatctaaacgaaaatgggttaagtatgaaattcaaaaagcttggaatgatggaaaaggcgtattgggtatctatattcataacctgaaagatccaaaaagtggtgaatgtagaaaaggcgacaatccatttgaacaatttacgttcgaaaatggctctaaattatctagcatagtcaaatgttataatcctaaatcttcggatgcctataatgatattgcagataatatagaaaaatggattgaagaggctatttccattcgtaaaaaataa

SEQ ID NO: 18753 - DNA, 645 bp, Aggregatibacter actinomycetemcomitans serotype e str. SA2149
atgggaaataaaatttttatttcgtataaatattctgacaatgctgttaaacaacttaaagaacccaataatttgttttcattctatagtcaatataaaacaactgctcgtgattatgttgatattattcaaaataaatttgagcgtgatgatattcatatcaataaaggggaaaatgataatgaaagtcttgccggctttaaaacggagactattcgttcaaaattcgcagaaaagatttttgatagttccgttaccattgttcttatctcccccaatataaaaaattcttggaaatcagagaaagatcaatggataccttgggaaattgcttattcactaagaagtaagcgacgtccagataaccgaagcaagcgtaatgcaattttattggtcgttctacctgatagatatggttattatgattacgtaaattcatatggcttttattttgatattattcaaagaaacttgaataacctgcatacaccatatactacatataaactaaggaatggttgttctaattcatatatgcttcaatgtaactgggataagtttatctctaatccgaatgcttggattgaagctgcaatagaaattagagataaaggaaataattataatattgtaataagaccataa

SEQ ID NO: 18754 - DNA, 1407 bp, Lachnoanaerobaculum sp. MSX33
gtgtttactattaaaggtgaagtatcaaaaaaaaatttgattagagaaattgaaaaagctattaaaagtgatgaattaggagcatttattggagcaggattatcaattcctgctggattttgtagttggaaagaacttctaagagaacctgcagaagaaattggattagatgttgaaaaagaaagtgatttggttaacttggcacagtattattctaattcaaaaaagagaacatcgatagatgatttaatcaagggtcaattttctcaattagtaaagcctactgaaaatcataaactattatcgcagctgcccatttcaactttttggacaacaaattatgataagttaatagaaaaagctttagaaaataatatgaaaaagccttatgtaaaaacaaaggatgaacaattaagaggtacaaatcataattttgatgcgatagtatataagctgcatggtgatgtagaaaatcctgaagatgcagtaatcacaagaagtgattatgaagagtttggatataacaaaagaaaattatttagagaggttttagagggagacttgcttactaaaacatttctatttttgggatttagctttgaagatccaaattttaactatgtaattggaaggttaagggtattacttgacgaaaaaaatacaagaaagcattattgtattatgaaaaaagttcagaataccgtagagaattcagagtataaaaaagcaaagcaagaactacaaattgaagatttgaataggtatggtatttttacttgcttggttaacgactataatgaaattactgaaatattaagtatacttgtggatagatacagacgaaagacaatattcatatcgggaagtgctgataattacggcgatttttcagatgaagaaggtaaaatctttcttcatactctatcaatgcgattatccgaaaaaggctatcatatcatcaatgggtacggtagaggtgttggagaatacttgctatcaggtgttgcggaatattgcctgataaacggtaaaaatattttagattatcttaccgttatgccgtttccacaaagcaatatctcgcatattgacattggaaagctttataaagagaataggaaacagatgattgaaaaatgcggaattgccatcttcgtttttggaaacaagaatggcaaaattgcaaatggagtattggaggagttttcaatttctaaagaaaaaggcttggtgtgtttgccaataggatatactgagggtgctgccaaagaaatctttgaaagcttatcttcaaatgataattcagaagcagtgattattgctaatgaaaaggttgatggagatatatcttcaactgcagaaaatatcataaaagctgttaatttaatgaacaaggaggacaattaa

SEQ ID NO: 18755 - DNA, 501 bp, Lachnoanaerobaculum sp. MSX33
atggcaagaagagtattttttagttttcactatgataacgatgtttggagagcaaataccgttagaaatagctgggtaactcagggaaaggaagctgcaggatttatagataaagctgagtttgaaaaaattagacgaacaggcgatagagcagttaagaactggatagatgaacaacttataggtacaagtgttacggttgtgcttatcggtagcgaaactttggatagaccttttgttcagtatgaaatagaggcaagccgaagaagaggcaatgctattattggagttacaataggtggtataaagaatcaatatcaaaacacgagccagtcccaaagtaaatacacacagataaacggggtttggtttgatgagattattgatggattttatgattatgtatcagaaaatggttattcaaatatggggacatggattgaatcggctgcgagaaaaaagggaaataaaagcaactcaattttgaagggttgcaattaa

SEQ ID NO: 18756 - DNA, 1371 bp, Bacillus wakoensis JCM 9140
gtggttaattggaaggaactattaagacgtcctgcggcaaggctaggacttgatgtagataaagaaagtgacttggtatcgttggcacaatatatctacaacgattcaaaaactaaaacacctttgacggagttgataaataaccactttagtcaaactggtagaataaaccgcaatcatgaaatcattgcagagttacctatacgaacttactggactactaattacgacaaactaattgaacaagccttaattcaagcagggaagaagcctgatgttaaaaagcgagttaatgatttggcagtgataaaaagtaaaagagatgctattatttacaaaatgcatggtgatgtggaagtagcagatgaggcagttttaattaaaaatgattatgagttatatgagaaaaataaccagatgttcactattgctctaaaaggtgatcttgtttctaaaacatttttatttattggctttagttttgaagacccgaatttagagcatatattgagcagaattaaaattttgttagacgaccatacccgtacccattattattttataaaagaggttgctgaagaggattatccaaataatgcagagggaaaagagcaatttcaatacgataaaatcagacaagaattaaaatgtgctgatttagagcgatattctattaagcccttgattgtaaaaaaatatgaggatataacagcaattttggaaactatcactgaaagatacaatagaaataaccttcttatatctggtagcgcacatgaatttaatgattataaagtatcgggcataaatgcagaagattttattcataaactaagtaaaacattgaatcaaaaagagttcaaggtggcaactggatttggtttaggagtgggtagtgcagttataaatggtgtgttggaaggaatggaagaatcaggtacaagaaatataaatgaacatttaatcatgaggccatttccccaatatgctacaaatggaaaggaaattggccaattatgggaagaatatcgtcaacaactcattagtgaatgtggaatagttatttttatgtttggaaataaactcactaagaaggaagaatcagacgaagatattgtagtagaggcaaatggtgttattagagagtttgatattgcagtagacaaaaacgcaaaagtaattcctattggtgtaacaggatatgctagccgcaagttatgggaacaggtaataaacgattttcagagatattaccctgagtttccttatttaaaagataagtttattaaactaggtgaagacggaatcgaatttaaccaactaattaaaatagtcacagatatagttattgaaattagaggaggagaataa

SEQ ID NO: 18757 - DNA, 486 bp, Bacillus wakoensis JCM 9140
atggctagaaaaacttttttcagttttcattttgaaaaggattcttggagagcaggacaagtaagaaatagtggtctttttaagggagataaatcaggatttattgataaagcagattgggaagaggttaaaagaaaaggtgatcaggcaattaaaaattggattaataaacaattggaaggtactagtacaactgttgtccttattgggagtgaaacatccgaaagaaagtatgttgggtatgaaattgaacaaagtgcaaaaagaggtaatgggctaataggtgtctatatacaccgtgttaaagatgtaaatggaagaactgatgcgaaggggaaaaatcctttcgataactggtattacgaacgaaacggaaaaaatgtctatttttcagaaatatatcctacttatgattgggtaaatgataacggacgagataatttaggtaaatggattgaagcagcagctaagaaggctggaaagtaa

SEQ ID NO: 18758 - DNA, 1356 bp, Sphingomonas parapaucimobilis NBRC 15100
atggccgccgggtatccctcgtggaaggggttgctgcaggaaattgctggtgatctcggcctcgaaatcgaggacgtcgacgatcttacggcagttgctcaatgggcgatcggtgcggatcattcgaaccgcacgaccgtgctaaatgccatacgggagcagatagagccggatcatgccatcccctcggcgctgctgtcgctggcaaggctgccgatccgcgaggtgtggacgacgaattacgaccggctgatcgagcgtgcgttcggcgagcttgggcggccgattgatgttcgggccaaccaggagcagttggcactgcgcaagcgccgcgcgggagcggtccgcatttacaagatgcacgggaccatcgatgcagttgatgatctcgtaatttccaccgaggattacgaactgtaccggcagcggcgcggtgcatttttgggtctgctgcacgctcatttgacaggaatgaccttcctgttcgtgggcatgagcctgacggacccgaacgtccgccacgtgcttgccttgctgcgtgagcattttccaacgaccccgccccgacacttcatgatcgcacggcggccacaacgggcggattttgggtctaatgatgcccacgccgcccggttgaagcggcatgactattgggtgcgcgacttgcgacgctatggtcttgtcgtcgttgagatcgatgcgttcgctgaaattgatgaattgatggatgaactcgaacggcgtgtggcacgtcgtcggatatgggtgtcgggtagctggccgctcgatgccggtgatactagcgcggggttcgttcacgatgtagcgcgcgcgatcgggcgtaggatcggatcgacagatcttttcatgctatccggggccgggctgttggtcggatcagcctcgctgtcagggttcctcgaaaccatgcaggggcgcggtgagtgggactttgatcggcggttggttgttcgtccctttccgcaaccggtcggtgacgctgagccggatcgtcagcattgggcagagttgcgtggtgagttggcgcgcttggcgggtatcgtggttttcgtgggcggtgcgaagatcgagtccggcggactggtgtctgccaccggtgtgttcgaagagcgcgccctcgccgatggtagaggtgcatttctattgcctgttggagccaccggaggcgctgcctcggttatcgccaatgagttgctgacgtcagcccttccgtcggctggcagtaatgcccggcgccccacggacgatgagttgcgcatattgtcagacgcctcggcaacgccagatcaactcgctgatgcggttttgaaaatcattaagcggatcgcacgctga

SEQ ID NO: 18759 - DNA, 432 bp, Sphingomonas parapaucimobilis NBRC 15100
gtgtcgcaggtccgcaatgcctggatgctcccgggaagtcgtgattccaacactattgtcgaccatgcgtcgtgggaagaaatcatgcgcaagggcccgcaggcgatccagaactggatcgatacgcagatgaacggcagtagcgtggtagcggtactgatcggtcgcgatacgcatacgaggccgtgggtggagtatgagatccgcaaggcccaccgcgagggacgcggcatccttggtgtgcacttagctggcatgaaggatagtaacggcaccgttgatccggccggggccgatccgattgcaaagcttgcgcttaccgatcggttcgggaccagagtgacttaccctacctattcctggttgcagggtgacggcagaaagaacttttcgtcatgggttgaagccgctgcccagcgcgccggtcgttaa

SEQ ID NO: 18760 - DNA, 561 bp, Sphingomonas parapaucimobilis NBRC 15100
atgtcctacgttaccgaatctgaggtccgggctgccgctgctcgtgcgaaagcagctacgttcaagtctgcgggcattttgttgcgcgaatcgcgtgacacataccaatcttccttcgatgtattcctgtcgcattctttcatggatcaggaacttgtccttggagccaagcagctgctcgaggaaaaggggctgtccgtctatgtcgactggatcgacgatccgctgctagaccgtaccgccgtaacgcgggcgaccgccgagaagatcagagggcggatgcgccagtgccggacgctgctctatctgcattcggcgaatgccaccaagtccaagtggtgtccgtgggaattgggctatttcgatgccttcacccatccgtcccggcgcgttttcattttccccgtcaccgctgcggatcgatcatatacgagccaggaatatcttaatctctatgatacggtcgacatggcttcgatcggcgtagctacacgcaggcgcgatgatatcagggtcaagggcgcggatagtagcttcagagcgtggagcgttgccgcctga

SEQ ID NO: 18761 - DNA, 1434 bp, Bordetella bronchiseptica RB50
gtgaaaagagaatatctccgactcgtagatagcttgtcaaaagagctagctgaaggaaatttggcgatttttgcaggggcgggtttgtcccgtgcggcaggctttgtggactggaagtcgctgctgaagccgatcgccgacgacctagatctcgacgtcgaaaaagagtgggacttggtaacattggcgcaataccacgcgaatgctaatgcgaccaaccgctccaagctgaatcagatgctggtcaccgaattttcgtccggcgttgcgccgactgaaaatcacgagatcttgaccaggctgccgattcagacttattggactaccaattacgataagctcatcgaaagctcactcgagcgtaacgggaaggttccagacgtcaaatacaccaataaacagttggcaactacccgatctaaacgagatgccgtggtttataaaatgcacggagacgtcgatcatgcgtccgaggccgtgctgatccgtgatgactatgagcgctatcacgtgaagatgcagccgttcatcactgcactgagcggtgatttgatcgccaagacctttctgtttctgggctttagctttaccgatccgaacctcgagtacatcctgagtcgagtccggattcagtttgcgcaagatcaacgccagcactactgcatccttcgcaaggcaagcagaatggagggcgaagggcaggccgacttcgagtatcgccagcgtaaggaagacctcttcaaacacgagctgctacgggttgggatcaaagccgtatatgttgatgagttctcagagatcaccgatatcctgcgagagatcgaacaccgccacaagcggaaaaccatttttatctctggtgcggctcacgactacagcccttggaccaaaaccgaggcggagcagtttgtttacagcctgagcaaggctatcagcaaggagcagtatcgggtcatctcgggcttcggtttgggagttggaagtgccgttatcactggcgtgctcgagcagaccatcatgaacggtggtcgcctcgacagcgatcaactagtcctacgcccgtttccgcagagccaatctggaacgcgcccattgccagaactttggacggagtaccgccgaaacatgctggctcatgccggtattgcactctttctttttggcaataagctggacaagacaggaagggtggtgccatccagcggcatgagagaagagtttgagattgcgatcgccaatggcctcttcgtcattccggttggcattaccggttctatctcagctgagctttggaatgaggtgattcagtcgtacgacgaatcgaagttcgaacatggcaaaaagattggaccgctgcttcacgagctaggcgctacaaacaccgatctggcccgcgctcacgatatcatcctcactctactgtctcttatataa

SEQ ID NO: 18762 - DNA, 582 bp, Bordetella bronchiseptica RB50
atggcaaaaagagtcttcttcagctttcactatcaagacgtcatcgacttccgtgcgaacgttgtacgcaatcactggctgaccaagccagatcgagaggcggcaggatactttgacgcatcggtatgggaaacggcaaaaaaacagggcgaggtcgccctcaagcggctaatcaatggcgcacttgagaacacttcaaataactgcatccttgtaggttcgcagacctatatgcgcccatgggttcgatacgaaatcatgaagagctttagacgcggaaatcaccttttagcagtccatgttaactccgtgaaaggaaaggacggacgtaccaagccagttggccccaatccttttgagcatctcggcgttacttactctgaggatggcaagacaggaactttgtgggagaaaaatggcggtacttggtcgaagtacgagcgaatcgacggaagtgccaactttgccgtgcaagctggccccgagcatcggggaaaagggttcaacttgtcccgcttttatcggatttacgattgggttgccaacgatggatataacaacttctctggatggctcaaatga

SEQ ID NO: 18763 - DNA, 498 bp, Bordetella bronchiseptica RB50
atgccaatacgtcagtctgacctactagccgaaggtaagcgtcgttcaacgcaaggacgctttactaagagcttcggacaaccaacagcttttttaagccatagccatgccgacgcgacactcgctcttggcttacaggaaatgctcaaaaaccagggatgggatgtctatattgactggcaggaccagacgatgcccgaaaaaccggacaccgagacagccttcaatatcaaagcagccattgtccgcgctgactggttcctcttcctcgcaactcaaaactcgatggcatcacgctggtgtccctgggaaatcggctttgccgatggaagaaaacctcatgagcgcatcgtaattgttcccactcaagacagctacggccgtttctacggcaatgagtacctgaacctctataacaaaatcgatgtagcttcaggcactctcggccttgctctatacgacactcggggcagtggcaagtgggtgcgcactctttaa

SEQ ID NO: 18764 - DNA, 1434 bp, Stenotrophomonas maltophilia RA8
atgaacaatgaccagaccaaattggtcgataggctttacaaagaactcgtggctggcaaccttggcatcttcgcaggtgctggattctcccaatcagccggctatgtcaactggaaagagcttctgcggccaattgcgcttgacctcgatctcgacatcgagcaggagactgacctagttgcgcttgctcagtatcacttgaccagacacgaaggccgcaacaagctgaaccaggagcttgtcgaggcgttttcggcaaagcttaagccaacagagaatcatcgaatcttggcgcggctaccgatctctacttattggacaaccaactacgatcagctaatcgaaagatcactggaagatgcccacaagattcctgacatcaagcatagccgtgatcatcttcccgttacaaagtacaagcgcgacgcgatcgtctacaagatgcatggagacgtaggtagccccaacgaggccgtcctcacgcgggatgattacgagcgatatcatgtaaagatggctcccttcatcgatgcactcaaaggcgacctcgtatccaaaacgttgctattcctaggcttctcctttacggatccaaaccttgattacatcctcagccgcgttcgagtgatgtatgagaagaatcgacgccagagcgagtgcatccttcggcatgtgaccagggaagaggacgaggcaccagaacagtttgagtatcgcaagcgcaagcaagaattcttccaaagggagttgattcgctatggacttcgtgtgacgtatgtcgacgagttcagcgaaatcacagacatcctgcgcgcccttgagaccaagtataggcatcgctcgatcttcatctctggagcggcgcacgactactctttactgccgtttcccaaggaggagtccgaaaggttcgtttttgaactcgcgaaagaactcagcaagaaggacaagcggatcttgtccggctttggactaggcattggaggggcggttatttccggcgtggttgaggctaccgccatgggcggcagtgcgctggacgaggatcggctgttggtgaggccgtttccacaagacaaggttggcaacatgagtcgcgacgacctgtggcgcgcgtaccgagatgacatcctaaagcgcgctgggatcgccatcttcgttttcggcaacaagctggagggcggcgaggtcatactgtcaaccggaatgcgccacgagttcgaaattgggcttgaaaacaaggtgtttccaatcccagtcggccgcacaggcggaatggctgaggaactgtggggcgagcttatgcgaaagatcgcagatggttcgttcgtggttgatcccaaggtcgcgcctttaatccaggagctgggtgactcgtcaaagtctctggatgaaatcaaagcaactattctcaatattgtttcacttatctaa

SEQ ID NO: 18765 - DNA, 441 bp, Stenotrophomonas maltophilia RA8
atggcaagaaaggtcttttttagcttccagtacaccgatgtacagcgcgtgatgaatgtgcgcaacagcaacgtcgtggcctcaaatcaaggtgtcggcttcattgacaaggctgagttcgagaaggttgaacgcgagggggacaccgcgatccgcaactggatcaacaagcaactggagggcacgtctgtgacggttgtcctcgttggcgccacgaccaaccagagcaagtgggtcaagtatgagatcgaagccagcaaggcgcgcggcaacggcatcctgacggtcaacatcagccaaatccgagaccttgctcagcaaaccagtggatactgcggcatgacagtgccgggctacagcaactacaactgggtcactcaagacggccgcaccaacctcggcatttgggtggaggcggcagctaaagcagcaggcaggtag

SEQ ID NO: 18766 - DNA, 924 bp, Stenotrophomonas maltophilia RA8
atgtcacgccgtgagcgccaatgggatttccactaccccaagctcggcaggcataatcttcacgtggccgcaacggatcgcggaaacaggggcgggcagcgcttgagctacccgaagttcacatctgcatggaagttcactgtgattcgtgcatttaacatggtttgcgagagtgcaagccagtacagcgcgtggcatccacaagggaaggcgcactttgacaggaagtggccaaagagtagtcgcgatcttgaccagttcatcaatggtggcgagattgccggagatgcactgaagaagcactggttctcagatgtctcacctcacgcattcatctctcactctcacaaggacgaagccttggcggttggcctggcaggctacctgctggatatgggaatagagcccttcgtggactcactggtgtgggggaattcgaattcactactccagaacatcgacaacaacttctgtctagacgatgacaaaaagcactacatctatcagagccggaactactccaccagtcacgttcacatgatgctggcgtcggcgcttgcagaaaccattgatcgcgcagacgctgtcatatttctcaatacgccaaattccattgaagccaaaagcgccaagaatgctggggatgaggtgacggcatcgccgtggatctatcacgagcttgtaacaaccaagcttgtccgtcgacagggcttcggaggtagagctcgagtcaaaccggccttggaacatgtcttcgaccacgttagcgttgagaagcacgctcaagccagcctcaaggttctgcacaaacctcccatggatcacttggttgacctcactcattcgtctcttgcgcaaatcaaggcgcaaggaatgcgtggcttgcccgccttggattcgctctacacgcttaccgacccctaa

SEQ ID NO: 18767 - DNA, 1443 bp, Neorhizobium galegae bv. officinalis
atgaaccacgagatcgaggccttcgttgacgaatatcttggggagatgattgaaggcaacgccgcagtttttgctggcgcaggcctttcgatgccggccggtttcgtcgactggcgcaatctcattgcgcccttaatgaaggaactccaactcaatgttacattggagagcgaccttgttgccgcagcgcaattccacgtgaatgctaacgggaaaaatcgccataagcttcatcaagctgtcatcgaggcgctatcacccgataagccgcctacaaggaaccaccaactcctttctcgtctaccgatcaagacctggtggacaacaaactatgacaagctaattgagaacgcgcttcgcgaggcagggctaatcgtggacgttaaaagcgccacgcaacagctcgctacgacgcggccaggcagagacgtcacgctgttcaagatgcatggcgacgtagatcgccctgatgaagccgttgccacgaaggacgactatgaaaaatatgagaaggagcgtggagcttttaccgccgctctagctggcgacctgacttcaaaaacattcttgttcctgggtttcagcttttccgatccgaatctggaccatgttcttacacgcgtacgcctgacattccgagaaaatcagcgtcgtcactatgcgatcttcaagaatcggaccaaacaacaaggggaaaccgacgaagtattcgaccatcaccgcgttcggcaggcattagttatcgaagatctaaaaaggttcaacgtccgagttctgcttgtcgatgattacgcagaaataacgaaaatacttgaagagttacagagaaggcatagccggagaactatttttgtgtccggcagcgcagcagacttttctccatggggagagcaggcgatttcatctttctgccgcgcccttgggagagcactcgtctccaaaggctcacgcgttgccaccggccttggaagcgggattggggacggaattctgagcggggctctcacggaactgctcgaaacaaaacgacgggtggacgacgggcttgtccttcgtccgtttccgcaagcgatagaggacgctgaaaaacgcaaggaggtatgggaggtttatcgaagggagatcctatctcactgtgggatcgccatcttcctgttcggtaacaaagcggatggcaacaatatcgtactcgccgaaggggtaatccgagaattcgagattgcagtcgaaagcggggttgtggctattccaattggcgcgacgggcgcagccgctgcggagctagctggcaccctgctcaaggatccggagggtcttggcaaatcgcttgagccagacgacataaaggccttaggcaaactagccgaggctgtcgacaatttaaacgagttgatcgaacctctcttagatttggttcataaactccaagccgggagaaaataa

SEQ ID NO: 18768 - DNA, 480 bp, Neorhizobium galegae bv. officinalis
atggcagtgcggcgtgtcttcttcagttttcactatgaacgcgatgttcgacgcatccagcaggtgaggaattcgtgggttgttagagagcgcggtacagcgcagccattttacgaccacgcggatttcgaggaagttaagcggcgatcggggggcattgcaaagtggatcgatgagcagttggagggctcatcggtcaccgccgttctttttggtgccgaaacatatgatcgagaatgggtgaagtacgaagtccgaaagagctacgagttgaagaaaggaattgttgctatagacatccaccggatacgagatcccttacgaggaacagacgttcagggacgaaatccgctaagccatttcaccgctgccggcatcccgttcacgagcctctttcgtacctatgattgggtcacacacgatggctataacaacatcggaagatggatcgaggaggctgcacggaacgcagggagatag

SEQ ID NO: 18769 - DNA, 1407 bp, Lactococcus garvieae
atgagacaagaattatttataaaaaaattttcgaaagctatacaagaaggaaatgcagcagtgtttgctggtgcaggaacatcggtcgatgcaggatttgttaactggaaaaaacttgtagcaccgtttgcggatgaaattgatttagatattgaaaaagaaacggatcttgtaggactgactcaatattatatcaataaaaaaagaaatagaggttcggtgaatcaagaaataattaacaaattttctagtcaatatgcagaaacagaagttatgaatctgttaacacgacttccaatttctacatattggacaactaattatgataaggtaattgaaaatggcttaaaaaataataatcgcagaggagatataaaaaggaagacagatgatttagcaatcagtattcgtgatagcgatgcgattgtttataagatgcacggtgatgtagattcacctaatgatgcagttatttcaaaagatgattatgaaagatatagcgagaaaaactccctatttgtaacagctttacgaggtgacttagtttccaaaacatttttgtttgtggggtttggttttgaagatcctaatttagaatccatcttgggaaagataaaaaatttacttggggagcgtactagagatcattattgtattcaaaagaaggtattaaagaaagattataaaaatcgagaggaatatagctatgctaaaatcaaacaagaattaaaaatagaagatttgaaaaggtacggtatagatacagttctagttgatgattattctgaaatacctaagttgatattaaaaatagaggaagagtattttaaaaatacaatttttatttcaggtagtatctccgattacaatgaaaattggagtcaagaaaaggtaaatcaattttgttataatttatcgcgttcacttgtttcaaaaaattataaaattatatcagggtttggacttggagtaggtagtagtgttattaatggagctcttgatgaaatttataaaactaagtataggcatgtcagtgagcatcttggattatttccttttcctcaacatgatgctggggaaaagtctctagctaaacgttggactgaaaatcgtgaacaaatgatcagtgaggctgggatctgtatttttatatttggtaataaattagttaatggtgaggtagtacttgcatctggaatgatggaggaatttcggattgctaaagaaagaggaaaagtaataattccaattggttctacggggtttgctgcaaaagaaatttttgatgaaatgaaagagtcaggggactattcatatataaacgattattggaatgatttagagaacgaagaagatgttataaaagtttttaatacaataaatgaaattattgaaggagttagataa

SEQ ID NO: 18770 - DNA, 462 bp, Lactococcus garvieae
ttgaaaaagagattatatattaatgatttagaaaagataaaaagatttgatatattcgtatcgcataattctagagacgaagaaaaaattatagagttctataaaaagttcaataaaaaaggacaggtagtttatatagattggataaatgataaatacgatttaaggcgtgaatggtgcaatgcctccacagttgatattatcaaggagcgtataaaacaatcagatgtttttgtattatacttttcaggagaaactttgaattcccaatggtgtacttgggaattgggatatgctgacgcattagggaagaagatatgtgtttacttctcagaagatataaatagaaaaggtattccaaaattctatgtagcttatcctgaattgcaaatgtcaaaaaatatatatgtcaaaattagagggaacgaagatattttacttaaagagtggaaaaaattatag

SEQ ID NO: 18771 - DNA, 714 bp, Streptococcus pneumoniae
atgatagataagcctggggataaaaattttcaactttttatagatgatttaggaaaaaggtacaacataaaagttttgttggtccaaactcccgaagacattaaagaaattttgagggaaataaaagaaaaaacaattagtaaaaatatttatatctcaggtagtttagatgatgcactagaggagactagagcctataacctttcgaaatctttagttgaaaaactaattgacggaggatacaatatagttactggatttggaaagaacattggctattacatttccggttccagcatacaaaaactttactcaattaatgaggctaatattgaaaaacgtttaattatgcgaccattcgctcacgatatgagtttagatgaggatacgtcttatagacgaaatctgatatcggatacaaagtttaccattgttatgtatggtcaggcaatcaatagtaaaggtgacattgtcacttctaggggtgtttgggaagaaattaaaatttcgaaagaacaaggaaattatatcattccaattgctagcactggatttgctgcagcagagttaggggagaaaataaaatcaagtataactgaatacccttatttagaaaattatattgagaaattatgttcggaaaatagtccagacaaactagcggaattagtattacatattattgaagaaatatccttcaattttattgattaa

SEQ ID NO: 18772 - DNA, 747 bp, Streptococcus pneumoniae
ttggaagatagggtatttttttgtttttcaggtaaagatagattagtttatgctcagtctctaaattttcatttaaaaaatttaggaattgaagtgtggtacgattatgaaaaactgtatctaggagatgacggtgactatgtcaatattgaagagggagtagaacaatctaagatatttttactttttatttcaacacaattatttcaaagtacaggagcaatgttagaattagatgcaattaaaaccaaaattgataaatatcaagaaatagtaatcattcccattctttgcgagataaccagtagccaaattcctaagaaatacaattggatttctaagtatatatatggagaaatgaaacttgatatttctagcggaacctatgatttatcaattgatatactaaaacgtttactatacgaacaattaaagtcagtagaaataaaaaatctactgactttagaaaatataacaacagataaatttatcaatgctattgttgataaatataattatattgataaaaattgttttagcattagaatcacaatgctgtatacattgattttatattgtttagaaaaatacaatattaatgataatatttcatattatagtagtagcttcatttttaataaagttaaatttaatattcagccaactttaaaagaaatagcttgtatggaatcaattatactggtattaatcaataaaattgaaggatatttcttcaataatatgtaa

SEQ ID NO: 18773 - DNA, 1503 bp, Bacillus cereus BDRD-Cer4; identical to SEQ ID NO: 18595

SEQ ID NO: 18774 - DNA, 621 bp, Bacillus cereus BDRD-Cer4; identical to SEQ ID NO: 18596

SEQ ID NO: 18775 - DNA, 1431 bp, Bacillus cereus AH1272
atgaaaatgaatccaatagttgaactatttattaaagattttacaaaagaagttatggaagagaatgctgcaatttttgcaggagcgggtttatcaatgtctgttgggtatgttagttgggcgaagttattggagcctattgctcaagaaattggattagatgtaaataaagaaaatgatttagtaagcttggcgcaatattattgtaatgagaatcagggtaatagaggtagaattaatcaaattatcctagatgaattttctcgaaaagtagatttaactgaaaatcacaaaattttagctcgattaccaattcatacttattggacgacaaattatgataggttaattgaaaaggcattagaagaagaaaataagattgctgatgtaaagtatacggtaaaacaattagctactacaaaggtaaaaagagatgcagttgtatataaaatgcatggagacgtggaacatccctctgaggcagttttgattaaagatgattatgaaaagtattctataaaaatggatccgtatattaaggcgttgagtggggatctagtttctaagacatttttatttgttggatttagttttactgatcccaatctagattatatattaagtcgagtaaggagtgcttatgaaagggatcaaagaagacactattgtttaataaaaaaagaagagcgaagaccagatgaattagaggcggattttgagtatagagtaagaaaacaggaattatttattagtgatttatcacgttttaatataaagactattgtacttaataattacaatgagattaccgagatattacaacgaattgaaaataatataaaaactaaaacagtatttttatctggtagtgcggttgaatataatcattgggagacagaacatgctgaacaattcattcatcagttaagtaaagaattaattagaaaggattttaatatagtatctggttttggacttggtgtagggagttttgttatcaatggagttctagaagaattgtatatgaaccagggaactatagatgatgatagacttattctaagaccgtttccacaggggaaaaagggcgaagagcaatgggataaatatagacgagatatgattacaagaactggggtaagcatctttttatatggaaataaaatagacaagggacaggttgttaaggctaagggtgtccaatctgaatttaatatttcttttgaacaaaataattacgttgttccggtaggtgcaactggttatattgcaaaagatttatggaataaagtaaatgaggaatttgaaacgtattacccaggtgctgatgcaaggatgaaaaaattgttcggagaattgaataatgaagcattatcaatagaggaactgattaacactataatagagtttgtagaaatcctatccaactaa

SEQ ID NO: 18776 - DNA, 579 bp, Bacillus cereus AH1272
atggcgaaaagagttttttttagtttccattatcaagatgtaattgattttagagtaaatgttgtaagaaatcattgggtaacaaaattaaatcaaagtgctgcgggggtctttgatgcatctctttgggaagatgcaaaaaaaacaagtgatatagcacttaaaagattaataaatggcgggctaaacaatacctcagttacatgtgttttaattggatctcagacttttaatagaagatgggtgagatatgaaattatgaaaagtatagaaaaaggaaataagataataggaattcatattaatgcttttaaagataaatatggaaatattaaaagtaaagggcctaatcctttcgattatttagggtatcaatatagttcagacggcaaacagttacatttgtatgagtggacagggggaaaatgggaggaatataaggatttggcaccatatagggtgaatcaaattgctccagaatcacttagaggaaaattctatagtttgtcatcggtttatcgtgtgtatgattgggttgctgatgatggatataacaaattttcctcttgggtgaactaa

SEQ ID NO: 18777 - DNA, 420 bp, Bacillus cereus AH1272
ttggatgctcgaaaaattttaggattaaaaaactatattgaaggtttgggttattctgtatatgttgattggattgaagataaacaattagatcgctcaaaagtttcaaaagaaactgctggtattttaagagaacgtatgcaaagttgtaagtcattgttctttgctatatcagaaaactcagatcattctttatggatgccttgggaattgggatactttgatggtattaaacaaaaagtagccattttaccagttttaaaaagcagctatgatgatagttacaacggccaagaatatctaggattatatccatatgttgctaaagggacgataataaattcaacacaggaagaaatttggatacatagttcccaaaagcaatatgtccgttttagaaattggttacagcaaaattaa

SEQ ID NO: 18778 - DNA, 1431 bp, Bacillus cereus AH1273; identical to SEQ ID NO: 18775

SEQ ID NO: 18779 - DNA, 579 bp, Bacillus cereus AH1273; identical to SEQ ID NO: 18776

SEQ ID NO: 18780 - DNA, 420 bp, Bacillus cereus AH1273; identical to SEQ ID NO: 18777

SEQ ID NO: 18781 - DNA, 1422 bp, Finegoldia magna ATCC 53516
gtgtttattattaaaggtgaagtatctaaaaaagatttgattagagaaattgaaaaagccattaaaagtgatgaattgggagcattcattggagcgggactatcaattcctgctggattttgtagttggaaagaacttctaagagagcctgcaaaagaaattgggttaaatgttgaaaaagaaaatgatttggttagcttagctcagtattatgctaattcaaagaagagaacatcaatagatgacttgatcaaagtgcaattttctcaattactaaaacctactgataatcataaactattatcacagttaccgatttccactttttggacgactaattatgataagttaattgaaaaagctttagaagataatatgaaaaagccttatgtaaaaacaacagatgagcaattaagaggcacaaatcatgattttgatgcaatcgtttataaactacacggagatgtagaaactcctgaagatgcagtacttacaagaagtgattatgaagaatttggatataacaaaagaaagttattcagagaagttttagagggagatttgcttaccaagacatttctatttttaggatttagttttgaagatccaaactttaactatgtaattggaagattgagggtattgctcgatgaaaagaatacaagaaaacattactgtattatgaaaaggatccaagataccgatgaggattatgaatacaaaaaagcaagacaggagctacaaattgaagatctaaatagatatggtatttttacatatttagtagataaatatgatgaaatcactgaaatattaagtactcttgttgatagatttagaaggaaaacaatatttatatcgggtagtgcgtactcctattcgacttattctcaggaaactggagaaaattttattcataaactatcttttgaactatcaaaaaatggttatcatattgtgaatggatatggtaaaggtgtcggtgattttgtattaaatggagttgcagattattgtttgactcataagtccaaaataaatgattttttaacgcttatgccttttcctcaaaatagttcattaggtattgatttagataagctatataaagaaaatagagagcagatgattgaaaattgtggcatcgctatattcatttttggaaacaaaaaaacagaagatattgcacatggagtgatggatgaatttgagttatgtaaaaaacatggattagtatgtttgcctattgaatatactggcggggcagccaaagaaatatttaaacaaacaactcaagaaattttagacaaacatataataagtgcaattgaacaggcaaataaacaaagcaatggcgatatagatatgtctattaaaaacatagtacaagcagttaaaatattaaataaggaggagttttaa

SEQ ID NO: 18782 - DNA, 498 bp, Finegoldia magna ATCC 53516
atggcaaaaagacaggtgttttttagctttcattacgacaatgataattggagggcaggacaggttcgcaacatggggaaagtagacagtagctctaccttttcagataatgactgggaggaagtaaaagaaaaaactgaaagtaaaattaaagaatggattgatgaacagctaaacaagcgttcatgtttagttgttttgattggagaaaaaacagcaaatagaaaatggataaattatgaaataaaaaaagcatacgagttaaacaaaggtattgttggaatttatatccacaagttggagaatgcattgggagagcaagatgataagggcaacaatccttttgattatttaacattagaaggtgaaaaactgtcaaagtatgttaaatgttttgattctgtatacttatcaagcaaaaatgtttatagcgatattaaagataatattgaagatttaattgagtatggaatagaacataaaccatcaactttgtaa

SEQ ID NO: 18783 - DNA, 1461 bp, Listeria innocua FSL S4-378
ttggatttaataaaagagcaaggaaatatgattaaagactatgtttcaagtattagagaaggtaaagcgtctatatttgctggtgcaggactatctattccctcaggagcacctagttggaaagacctgttgcgagatattgcacatgaattagaactcaatgttgataaagaaacagacctaatttctttggtacaatattacataaataaaaggggcaaagcgcaaataggagatttaatatcaaaccattttggtaaccatttaaaatgcagaattaatcaacaactaattgcacaattaccgattgatacaatttggactactaattatgacgaattattagaaaatgcttttaaaaatgaacataagaagattgcagtcaaaagatccgtgaaagatttcagcatagttggaacgagaaatgatgctacaatttataaaatgcatggttgtgtaactcaagcaactgacgttattatttcaaaaaaggattacgagcgatacaacgatacccattcagtttatacaactgctcttaaaggagatttagtatccagaacatttttatttataggatttagttttgaagatcccaatttagattatgttttaggacgtataagttttctaatgggtgaaaacaagcctaagcattattttttcgtaaaggaacttcaaaaagaagaaggagaaagtgaagaagatttttcttatcgtaaggttagacaaaatcttaaaattggtgacttatctagtaggtatggtatttatgcggttgtgattaaagagtatgaagatataacaacaattcttaaaataataaacttgaaagttcgaattaataatatttttatttcaggcgcaatcgaagtatttgatatcttaggcgagaaaagtactcatgattttatttcttcattagctagtagattgatagaaaacaacaacaaacttgtttctggttttggagtcggtgttggttctgatgtgataaatggggttctctccaaaatatcaagtcatccatcgatgaggttagatgaacatttaaaagtttatccgttccctcaaacagtttctactaaagatcgaaagcaagtatggcaagaatacagagaacacattatggaagaagttggcattaatataattttatttggaaacaaaattatagatggaaaacgtaccgtttcagatggggtaattgaggaatttgaaattgctcacaatagaggaattaaaattattccagttggatgcacaggtgatgcagcaaagcatatcaatgatattgttttaaaagaaccggaaaagtattatggtaataatgaaaagctaattggaatgattaaatctttgaatgaatatcagcttacacaagaaaatatcaatagtattatagatgatattataagtattattatagagatacaaaataaggaatatggagtgaattaa

SEQ ID NO: 18784 - DNA, 609 bp, Listeria innocua FSL S4-378
atggcacataaaacatttatatcatacaagtatagtgagtcgaaggatttaagaaatactattttggatagtttgggcgaagatgcaaaatattacaagggtgagactgcttcatcaccagatcttagtagtactacggttgaaaacatcaaatcatcattgaaagatatgatatatagcactacagttactattgttatcatatcaccacaaatgattaatagtcgttggattgaatgggaattagagtattccctaaaatctataaagcgtggtgatactaactcttctactaatggtatattaggagttattaagaaggtagatgatggttacgattggctaaaaacgctttctaaaggttctgatggttgcacttctacgtcatatatcacagataaaatgtttcctattattaacaataatcgttttaatcaagatcctcaattgtattcatgtgacaattgtaaaactgtaaatagattatcaggctcatatatttcactgattcctgaggaagagtttttaaatgatcccaatcattatattgaaaatgcttataaaaaaagcaagactctaaccggatataaaattaaaaaagaagcataa

SEQ ID NO: 18785 - DNA, 1464 bp, Pseudomonas fluorescens SS101
atgaccaaagtggccatgaatcgttttctcaccgagtatcctgacgctttgaatgatgggctcggagctgtatttataggcgctggtgtctccatggctgcaggctacccttcatggtcgggcctactgagtgacatcgccgatgagctggaaatcaattcaagaaatgtacacgacctcgccgctcttgctcagtggagcatccaggagagcggtggtgccactcgtgttcgcaatgtcatcagaaaagagattggcccagacaagcctattcctgaaactttggatatcctcgcccgactgcctgtcaggcatatttggacgactaactatgatcggctcgtggagcgcgcatttgcggccattagccgcccgctcaactctatttccgccccaaaagatcttgctctgagaaccacccctggcgcggcattgctctacaaaatgcacggttcggtggatcgtctcgacgatattgtgatatccacagatgactacgagcttttccgatcccggcgtggccaatacctcccgctattccaagcacatctgaccagcatgtcgatgctgttcatcggcatcagtttcactgacccaaatgttagacatgtgctttcgctgatcagagaaagtttcactgagtcgcccccagaacactttgcaatcgtcagagcgccgaaaagatcagatttcaaaactagggatgagttctcagccaggctcgctcagcataatctttggactaaagacctgaagcgctatggtctgcttgcagtagagattgataactatgacgaggtgcccgctctccttcggcagatcgaaaggcgggtagccgcgcgcaggatttgggtaagcggtagctggccacttgaacacgggggcactgaaccggcgaatatttatgccttggccgaagaagttggccgcaaggtaggtgagaccaatagatatctggtcacgggtgctggcttattggtcggctctgcttctctgtctggctttcttgctgctctgcgcaacggtggaggttgggatttagatcgccgactgatcgctagaccgtttcctcagccacttaagggaggagttcccaaggataaggagtgggctgcccttcgtcaggagttagcccgccaggcgggtattgcgattttcattggtggtgcaaagttagctaatggcctccccatacctgcggagggggttgaacgggagttcgagtttgcaaaggccgctggcgttttcgttctgcctattggtgctacaggcggggctgccgaaaaaatatgtaaccagcttcaaggttcagcactttcctacaaggggagctcaccgatgcgacctaccgataaggagctaaaagctctggcagatattaatgctttagctaccgcagaaggccggaaatccttggtaaatttagtatttcagatcattgatagggtcgcccgtgttggttga

SEQ ID NO: 18786 - DNA, 504 bp, Pseudomonas fluorescens SS101
atggctcgaaatgtgttcttcagtttccacttcgctaacgacttctggcgtactcagcaggtacgcaatatcggcgctttggaagggcaaaagctctataccgccaatgaatgggaggaggtcaaaaaaaagggtgacgcggcgattaggaaatggatcgacgatagcctggtcggaaaatcatgtgtagttgtcctcgtgggctcagaaaccgctacccggccttgggtattggaggaggtcattaaggggtggaacgcaggaaaaggcgttgtcgccattcggatcaaccgtcttttagataaccatcagaatacctccgtcgctggctctaaccccttcgattccgtcacgctaaaaaatggcacggtgaggctatccggctatgcgaagctgatgactccagcggggaacgatagcaaagaggtttatgcttccatccaggccaatatcgaaagctggatcgaggacgccatcactattcgtaaaaattacaaaccttaa

SEQ ID NO: 18787 - DNA, 579 bp, Pseudomonas fluorescens SS101
ttgatatcattatctcaggaaagaagtatggctcgtaatgtcacaacggcggagctaagaaatatctccgctaacagctctcaagctactcgcgatcacgtattcaaatctttagcagccacggcatctatgagtacgtttctatcgcactcaagtaaagataaggaagttctacctggcgcgattcaggtacttcagaatcatggggcttctgtgtacatcgatgaaatcgaccccgaaatgccaccttacacatccgaggaaacagcagctttactcaaacaacgcattgcgcagacgaaaagattcgtgctccttactactaaaaacagcaaggagagccggtgggtgccttgggagttaggcatcgctgatggagcgaaggggctctcaaaaattgcaatatttccagcctcggattctgcatatgatgatagctgggtcagctgggagtacctgggcctgtatcaaagagtcgtgtggggcttattgcaaggacatccgcaagagctttggatggtgctcgatacaaaagcaaatacggctgtcccattgaaagactggctagcggggtactga

SEQ ID NO: 18788 - DNA, 1446 bp, Thiomicrospira crunogena XCL-2
atggaaccaacctcggataaacagaagcagcgctttgttactgagttgctaaaagatctttctgaagacaatttagctatttttgctggtgctggtttgtctgctcccgcaggttttgtaagctggcctgaattgttaagacctattgcagacgagttggagcttgaaatagagaaagaaactgatctagttgcattggctcaatatcactgtaatgctaaccaggctaatcgtgggcgattgaatcaaattttggtagatgatctttctcatgatgcgaaaattactgataaccacaaagttatagctagacttcctatttcaactttctggacaacaaactatgacaagttgattgaaagatctcttgttgaggttggaaaagttccagatgttaagcatcgagtaaaacagttaagttttactaaacgtggacgagatgcggttgtatataagatgcatggtgatattgaacaccctgatgaagctgtactaacaaaagatgactatgaatcctatcacgtcaaaatgcagccatttattaatgcccttagtggagaccttgtatcaaagacattcctatttatgggatttagcttcaccgacccaaatttagattacattttaagcagggtgagagtcgcctatacaaaagatcaaaggcaacattattgtattcagaagttagtttcagcgttaccaggagagtcggctgctgatacagaatatcgtcaacgcaaacaagaacttttcatccaagatttattgcgttttggaattaaaacaatccttgtgtctgattattcagaaattacggatttactactttcccttgagtcttcataccgacgtaagtcaatttttatttctggagcagctcatttatacggtagatgggacaaggaagaagccgagaaatttatatacaaactagcaaaagaattatcagctaaggattttagagttgtatcaggctttggtttaggtgttggaagttctgtaatttcgggtgttcttgaaaatgtctatatgaatggcagtaagttggactctgaacagttgatcttaagaccttttcctcaaaatcaagttgggcaacgacctagagatgagttgtggcatgattatagaaatgacatgatttcttatgcaggaatagcgatatttctttttggaaataagttggttaaagatgaagttattgagtcagatggcttaatcaaagagtttgaaattgcacgagagaaaggtcttgtattacttcctattggcgctacaggttttgcaagcgagtttttatacaaacgacttattgacgaagggtattttcacagtgatgttattccggatggaatggattctgaaattcaggtcatcggtaatgaaagttcagatttagaagcgattacaaattcgttacttaaaataattgatgctttaaagtaa

SEQ ID NO: 18789 - DNA, 441 bp, Thiomicrospira crunogena XCL-2
atggctagaaaagtgtttttcagtttcaaatatgaagatgtaaaaagatctatggttgtaagaaatagctgggttgcacaagataagcaatctgcaggattcattgacaaagccgattttgaaaaagttaaaaggaaaggcgatagtgctatcaaaaagtggattgataaccaattaaatggtacttctgttaccgttgtactggttggagcaaaaacctgttctagtcgatgggttaagtatgagattgagcaaagcattgctagaggaaatgggattcttggaattgatattagtaaaattaagggattagatggggttacaacagaacgttgtggtcaaattccaaaaggttaccctttttatctttggaataaagaaaagggatataagaatatgggcgtttggattgaaaaagcagccgaagcggctagtaagtaa

SEQ ID NO: 18790 - DNA, 543 bp, Thiomicrospira crunogena XCL-2
ttggtcctaggaataaaggcagtttttgaaaagctagggtattcagtctatattgattggataaatgatcgtctacttagtcgggaaaaagtcactaaagatacagcatctgtgctccaaaaacggatgaggcaatcaaagagtttaatctatgttacttctgaaagctcttctcattcaaagtggatgccttgggaagcaggttttttcgatggaattcgcgacagaatgattgcgatattacctatcactgatgaagagcaaagtgaaaaaccgtttattggacaagagtatttagggttgtatccatatcttgctctagattcattggataaaaattttattaataaacctatgtttatggagcctaccgcttttgaatcaatgttaaatcagtatagaagtagttataagctttttgtttttcgagattatcagtcttatgttctctttgaaaattggatcaatggtgaaaagccattaagtcgtttggaaattatgaatgagacattggacaaacttaacaagttgagaaataaatag

SEQ ID NO: 18791 - DNA, 789 bp, Thiomicrospira crunogena XCL-2
atgccagcttatgatgtagttatttcttttgcaggcgaggatcgagcggtagcagagtcaatcgcttccaatctcgtcactagggggatcaatgtcttctatgacgagtatgaaaaagcaaatttatgggggaaagatctctatgtacacctaacgaagatctatagggatgactctaaattttgcttgatggtaatttcagaagattatgtaaagaaacaatggaccaaccatgaaagaaaagctgctcaagccagagctttcaatgaaaacagggaatacatcctgcctttaagattagatgatgcggagatagatggaattttaggaacgacggggtacatagattaccggaatacttctgtagaccacatcattgatctccttactgaaaaagtaatccaatacaacaaagaaaatggtatagcctacaaaatcgtaaaagctgaaacagtcttccagcaagccatagacttcaaaggtaatagtgcatttcgtgacagcgacatgaatactgaatgtcctgcttgttgtactcaacaaaagctttccgaagctacattatctcttgatggagatgacacaatttatacttgcaaaaatggttgccagccattggtcgtaattagtcgacctggtatagttgcttggcctggcaggggggttcggctgcaagattacgtaatccgaaatgtcagagagattacgattaaaactgaaagtatgggtatgccaatgcttattcctgcaagcaaggctgcgcttatgaagatgaggtcaagcagataa

SEQ ID NO: 18792 - DNA, 1443 bp, Rhodoferax ferrireducens T118
atggtcaaatgcctcacccgactctcggatattcagagacccaaactcatgccaaattacgcgcagtatcagcaagagatgacggtcgacatcgccaatattctaaagaccgcgcagtgtcaaccaatcttgttcgttggctccggattctcgcgtcggtacgcgaatggcccatcctgggaaatactgctcactgaactcgcagcgaactgcccgttcattgacaaggactttgcctactacaagcagaagtacgatggcgatctttgtaaggtgggttcggtgtttgccgagcagtacttcgagtgggcttggtctccagccggaaagaagaacttcccgccacatttgttcgcggcaggtgtccctcgtgacgcttacattaaacacgccgccgccgataagctcggtagtcttgcaatctctgacacagacgcattgaacgcggaactcagcgcactcaaggcaatgggacctcacgccatcatcactaccaactacgacacactgcttgaacagatattcccgaaatacgaggtcgtggtcggccagaatgtgtttcggacatcgccgctagtgattggtgagatattcaagattcacggctcgatttccgaccccggatcgcttgtgctgactcaagatgactactgcgtcttcgaggaggataagaagtatctcagtgccaagctgcttacctattttgctgagcacccactattattcgtcggctatagcgccagcgacgccaatattcggaacgtgctgcacgacatgagccggatgttcaagccgagcacattgctgattcccaacatttacatcctgcagtgggacgaaatgcagaacgaccaaagttacccgccgcgagagcatgtgctggaagtcggccacgatgtcaacgtgcgtatcaaaagcatcacagcaaactcgtatgagtgggtctataaggcgtttggctccggcggcgcaatggaaaaggtagacctgaaggcgctaaggtcattaatggctcgaatggtgaacctgattcgaactgacattccgaccaagaatgtgcagatcaactacgaggcgttggagcaggccatttctgacggagacagctttgcgaacctgtttggcgttacgaacttgaatgacccagccgcagtgaatgcaaaccacccatatacctcttcaatgttggcaaaaaaggtcggtctcaagcactggactggcagcaatcagctgattaaccgggtcgaaaaggaaactggcttcgacatgaaggcgagcgacaacgttttccatgtccgcataaagagcggtgaagccgaagggagcggggtgcgaaagtattcggatgccgcagtagctctcttaaataaagttaaaaacggcgagatctacacgttgccgacgcacttattgtcgggcgctgccaatgcggaggcggtttga

SEQ ID NO: 18793 - DNA, 474 bp, Rhodoferax ferrireducens T118
atggtaaggcacataaaaaatgtgttcatcagtcacgttcatgcagatgatgcaggtctgggcaagttaaagacgctccttgccaaaagtggcatggacatccgggactcgtccatcaattcatctaatcccaacaacgcgaagagtccagactacatcaagtctgaaatactggcaccccaaattaactgggctgggacgctgttagtttacgtttccccgaagacaaaagacagcgattgggtgaactgggaaattgagtacgccgtgaagcaagggaaaagaatcgtgggcgtctgggaacacggcaccaaggattgcgaggtgccttcggcgctggccgaatacgcggatgcgatggtgggatggaacggaaactcaatcatcgacgccatagttgatgaagttgacaaatgggaaacaccggacggcgggacttgttccccagtagcactcaagcggcatccatgctga

SEQ ID NO: 18794 - DNA, 1440 bp, Janthinobacterium sp. Marseille
atggatcgcgagatcgagctcttcatccaggactatctcaaagagatacgggaagataacgccgccatcttcgcaggtgcaggattgtctgcgcctgctgggttcgtgaactggcgggatttgttgcgcccgattgcggaggagctgcgtcttgatgtcgataaagagcacgatctggtggcagtagcccagtatcactgcaatgaaaatggtggcaaccggcacaaattgaatcaactgctgatcgagcagctcactgttggagctgtcccaacgaataaccacagaatattggctcgccttccgattagcacctactggacgactaactacgaccagctaattgaaacagccttgaaggacacgggaaagatcgcggacgtcaaatacattacagaacaactcgccacgacaaaggcaaggcgagatgcagttgtctacaagatgcacggcgacgtggagcatccacacgacgccgttttgattaaggacgactacgagaaataccacattaagaggggcgcgttcatcaatgcactctcaggagatctcgtttcaaagacgttcttgtttattggtttcagttttactgatccaaacctcgactacgtcctcagtcgagtacgtgtgaattttcgcgaaaatcagcggcggcattactgcattttcaaaaaacgaacgaagcaaagcaatgagagcgatgccgaattcgagaatgcacagatcaagcagcgattggcaattgcggatctgaaacgattcaacatcaaaacactgctgatcgacgagtacacgcaaatcacggaaatcctggcacggatagaacggcagtatcgtcagcgcacgatattcatttcagggagtgccgaggaatacggcgcatggactaaggcggacacggaagagttcctgcgggatctaagccgtgcattagtacagcaaggtttccggatcgcaaccggagtgggcttgggtgtcggggatgcagttatcacaggggccattgaggaggtgtaccgggcacgtaccgggcatattgaggacgcactaatcatgcgcccatttccgcgagcgaatcctgatcctgcaatccgaaagcaactatgggaatcatatcgacaggagcttatttctagtgccggcgtctgcattctggtactaggtaacaagaaggtcggagacgacattgcccttgctgatggtgtccggcgtgagtttgagattgctgttgatcatgggcttagcgtggtgcccatcggtgcgacgggatacatggcgcgcgaactatggaatcaggttgtcggatcaatagaaacgtactacccaggcaagaacggcgacctaaaaggcaagtttgatcagttgggaaatgaggtcgagaaacctgcagagctgatttcacgaatcctagatttcataacgcttatcactaaggagtaa

SEQ ID NO: 18795 - DNA, 492 bp, Janthinobacterium sp. Marseille
atggcgcgacgtgtatttttcagttttcactatgaccgggatatccgacgcgtagtgcaggttagaaactcatggattgtccgggcgggcaatgagactcaacctttcatggacaaggctgagtgggaatccataaagcgcactggcgcgcaagccatcgaaaagtggatcgataagcagctgaacggaacatcggtaacggtcgttttgattggcgctgagacctatgatcgcgaatgggttaagcatgagatcaaacggagctacgaactaggcaaaggaatgatagggatttacattcacaacgtaaaagacccgcagaatggaacggatactaagggtaagaatccgtttgaccattggtcagttaaaaaaaacggacgcgacattttattttcagagctctacaagacgtacgactgggttcgggataatggctacagtaactttgctagctggattgaaggtgccgcagtggcagcgggacgttaa

SEQ ID NO: 18796 - DNA, 594 bp, Janthinobacterium sp. Marseille
atggcgttcctaacaaacagcgaagtcaggcaagcagcacaaggcaggttgcaaaagagtttttcatcatctgcatctcaagtgcttcgggaagcggtgcgagcatccagcacggaagataaattcgatatttttttgtcccacgcatctgaagattctgagatcgttcttggtgtccgtgaaattcttgttggcctcggactgaccgtatatatcgattggattgacgacccgcagatggatcgaggcagcgttactgccgaaaatgctgacatgctgcgtcgtcgtatgcgcgcatcgaaaagcctaatattgctgacgacaaaaaacagtgccacgtcacgttggataccttgggaacttggttactttgatgggcacaagactggttttatcgggatactgccggttgtggactattccggtggcgcgtttgcaggtcaagagtatcttggcttgtatcccttggtcgaaaaactcccactcactggtggtggaaccaaattctgtgtagtcgagcgggctgggaaaggctatcgatttctggacgattttgcccacgggcagtcgacgatacgttcgttcagcggctag

SEQ ID NO: 18797 - DNA, 1434 bp, Shewanella sp. MR-7
atgacaaaagaacaagaacaatttatccaacgttttttaagtgaacttgaagaagataatgtcgccatatttgctggagccggtatgtcctgctcggctggctatgtaaattggagagagctattaaggccgttagctaaagagttgaatcttgacatagataatgaacaagatttagttggggttgcacagttttatttaaacgaaaacggcaggaaccgcataagtcagcaattaatagatgaaatagccacggcaaaaaaacctacagaaaatcacagtattctagccagacttcctatcaggacatattggactaccaactacgataagctgattgaaagatcactggaagagcaaggaaaagtagttgatgtaaagtacacgaataatcacttggccgtaacgaagaagaaaagagatgcgataatctataaaatgcatggcgatatagaacatgctgattcagctgtcataacgaaagatgactatgagagatatccattactcaagaaaccttatattacagctttgtcaggcgatctagtctccaagacttttcttttcttaggtttcagtttcactgacccaaatttggactacataatgagtcgggtcagggcatattttgaagaacaccagaggcaacattactgcatatttaagcagtgcaataaagacgatttccgtgatataccaacgtatgaaaatgcagtaatcaagcagggtctgctgattaaagatctttcaagatttcaagtcaaaacaatactcgtagaatcatattccgatgtaacacttatccttagtcgaattgagagaactttcaggagaaaaaccatatttttatctggtagcgccagtgatttcgggaagtttaaccaagcagatatagaaacattcctttgccaattaggaagagtgttaatcgaaagaaactataaaatttcatctgggattggcttaggtattgggaatgtattcattacaggtgcaatccaaggtgtatatgctcgccacaacggacgtataaatgactatctgaatatgaagccgtttccacaacacatcgacgatatcaatcagcgcaatgaaacatggtcaaaatatcgacatgagataataggttctgcaggaatcgcaatattctttatggggaacaagattgttgatggtaaaattgtttcagcagatggcgtccgaaaggagtttgaaattgctcataagttaggcttagctttaattcctatcggttgtagcggctttatggcacaagagatctggaccgaagtaatgaataatttaaccgtttattatgatgaatcaaatacagaactaatatccgcgctgcaaaaacttggcgaaccagtagataagccagaacagttaatcgaaaaaatattaactgtagtagacttgatgtcacaggagtaa

SEQ ID NO: 18798 - DNA, 495 bp, Shewanella sp. MR-7
ttggattcgttcaaggagggtaaaatgactgacatcaggaatgtctttattagtcatgttcacgaagatgacgcaggtctaaaaaaacttaaggacttgttgtctcccaaaggtgttgaagtcagagattcgtcaatacataccggtaagtttaacgacgccaaagaacccaactatataaagactggcatactcgcaccggcaattaagtgggcaggagtttttatctgttatgtgtccccacaaaccaaaaacagtgactatgtaaattgggaaatcgaatacgctgctaaacaaggtaagcggattgttggcgtttgggctcacggagaaaaagaatgcgacttaccggcagcattaactgaatatgcagacgcagtcgttgggtggaacggtgactcgattatagatgccatcaacggaaaggattcatgggaaaaaccagatggtgaatcttacgacaaagttgggatcaagcggcacccctgctcatga

SEQ ID NO: 18799 - DNA, 483 bp, Shewanella sp. MR-7
atgtcgagaaaacctgtattctttagctttcattttgacaatgatgtgatgcgagtccagcaaatccgtaatattggcgcattggagggtaacaacccagtatcagctaatgagtgggaaacagtaaaaagggggggcgctaaatccatagaaaattggataaatgaaaactttaagtataagcaatgcgtgattgtccttatcggtgaagaaactgccagtcgtccatgggtacaatatgaaattaaaaaagcttggaatgatgggaaaccaatatttggcatttacattcacaacataaaatgtccgagaaatggtacatcaacgaaggggcgtaacccatttgaacaattcacattggaagacggaagaaaactgtcgtcagtggttcgatgttacgatctatcaacaaatgatgcatacaacgatttagctagaaatatgcagcagtgggttgaaaccgctattgctcaacgtaaatag

SEQ ID NO: 18800 - DNA, 1401 bp, Actinobacillus pleuropneumoniae serovar 5b str. L20
atggataaaaaacaatttatcaaagaactggttaacgaattatcagctaacaatttagccattttcgcaggagcaggactttctgtctcagcaggatttgtgaattggaaagaattactaacagatttggcaaaagaacttagtttagacataaataaggaagaaaacgatttagtctcattggctcaatattatgtcaatagcaaatgtggtaagcgttcaaaaataaattatttgatcttgaatgagttttctcgaaaagctgagataactgaaaatcacagaatcttggctcgcttaccaatagatactttttggacaaccaactacgatccggtcatagaaactgcattgaaagaagctggtaaagtcgttgatgttaaacataatgtggaacaactacctgtatctatccataaaagagatgctgtagtttataaaatgcatggtgattataccttgccgaatcaagctgttttaattaaagatgattatgaaaaataccatttaacccgcaatgatttttttacggctttacgaggtgatttactcacaaagcgttttttatttttaggttttagttttgcagatcctaatattgactatattctaagtagaattagggcttcatatagtgaaaatcaaaaagaacattactgtattctgcgtaaagtacaaaaatttgataatgaagaccaagctgattttgagtacagacaacgaaaacaacagttgtttatatccgatttagagcgagttggcgtcaatactttacttattgatgaatatagtgaaattacagaaattttacgcgaagtagagctggctcaaaaacgtaggacagtttttatctctggtgctgcggaagattatgccccatatagccaagaagatgttgaaaaatttgtatcttctttagcgcaagatgttttgaaattaggctatcgtattgttactggttttggattaggtattggtagctcagtaatttctggttcaattaaatatcttactgaacaaaggctaaaaattgatgaagattatttgattttgcgaccatttccacaaaataaggaaggaaaagaattatggtccgcttggcgtaaagatatgattagttatgcaggaatctctattttcttgtttggtaataaatcggaagatggaaatattgtgctatcaaatggcatgcaagaagaatttgatctttcaaaacgcaatggaaatattttaattcctgttgcaagcacaggttatatggcaaaacagttatgggaggaaaattcaaatcaagaacacaatgaaaaattcaaagaagagatggaaatcctatcacaagaaaatgtagagttagatgaattaaaatctaacattctttcaattttaagaaaggttaaataa

SEQ ID NO: 18801 - DNA, 498 bp, Actinobacillus pleuropneumoniae serovar 5b str. L20
atgactagaaaagttttttatagctttcattttgataatgatgcttggcgcgctggacaagtacgtaatatgggggtaatagagggtaatcagcctgttaatggaaatgagtgggaagaagttaaaaagagtgaaaattccattaaaaaatggatagatgataatctcaaaaataaatcttgcttagtggttttaattggcaaacaaacttctgaaagagaatgggttaaatatgaaataaaacgtgcttgggaattaggtaaggcggtttgtggtatttatatccataaacttaaagactcagatgaaaagcaatcttcaaaaggaaaaaatccttttagtcaatttacattaggtaaagataaaaagaattttgcagatattgtgcctgtttttgaatcttcatattccgacagtaaagatgtttatgatgatatttcagaaaatcttgaaaatttagttgaaaaagcaatttctattcgtaatgaatataaataa

SEQ ID NO: 18802 - DNA, 645 bp, Actinobacillus pleuropneumoniae serovar 5b str. L20
atgggtaataaagttttcatttcttacaaatactctgatgatagcgttaaacaacttacaaatccgaatgatttatttgcagcatatagacaagttaaaacaacagctcgcgactatgttgatattattcagaaaaaatttgagcgtgatggcattcatatcaataaaggagaaaacgataacgaaagcctagctgattttaaaacagaatatattcgctcaaaattagcagataaaatctttgatagttcagttaccatcgtactaatttcccctaatatgaaagatgtttggaagtcagaaaacgatcaatggataccttgggaaattgcttattctttaaaaaacaaaactcgttcggataatagaagcaaaaggaatgctattttagcggttatattgcctgatagatatggtagatatgattatgtcaattcatatgggttttattttgagattatccaaaggaacttagataatctacacacacgatatgatgcttataaattgaaaaatggttgctctgactcatatattctaagatgtaattgggataattttatttctaatcctaacggttggatagaagccgcaatagaaattagaaataaaggcgataaatataatatcgtggtaagaccttaa

SEQ ID NO: 18803 - DNA, 1650 bp, Methanococcus maripaludis C5
atggaaattcttgaaaatctacttaaagagctaaatttccatgaattacatgaccatgaattatctttttttgtaggttctgggatttccgtaaattcaggaatgccactagtatccgaattaataaataccattttaaaaaccgtgatggattcaaaaaaacatgtcgataagatatctaaccaaaaaatcccttttgaagtatttatgaatatatttggagaatattcaaaagaattattggatatttattcgggcggcattccaaataccaaccacaaacttattgctaaattagctcgtgaagggcatgtatgttcaatatacacgactaattttgatgagctaattgaacttgcattgaataacgaaggattgtctgaaaatattgattataaggtgtaccgtactgaaaaagaaatagaaaattcttttaaagattctgaacttttaaaaatatataaaattcatggctgcatttctaaaatcaattctttaagacataccataaggaacgtggcatttcgagaaaatatactaattcgtgagaaaatattaaaaaaaatgctaaatgaaacatccaaattaataataatgggctatagcttttctgatttttacgacataaacccaatatttgaacaaaaccagaatataaaaaaggaaattattgtagttaaccatgacttaaggaatgatgttaaaatagataaatcggtcacaaaaccaatgttaaacaataattgttgggatattactataaacactgatgatttcgttaaagtgctttggaaaatacatttaaaagataaatatattctagataatatcaatcatgactggaaaaataatattaaaaattggtttgaaaaaattcattttggctataaagaatatataagtacgatattattcatacaacagggtcagattgaattaggaaactattattgtaataaaggaatgtctaaagcagattcagaatttttaaaattggaactgtatttgcttaaattattaattattagatccttgaaaaaaatagaaaaatcagatcggtatatcaaaaaagccaaaaaatgcattgaattgttaaataaccaggatatagccgcttatggttcagttaatattgcagagttttatttgttggtggaaaattatcctaagtttgaagaagaatatcataatttaaacgtgattatggattcaataacaaataatatcattataagtaaatatcatagactgggtatccaatattgcattataaaaggtcaatacgctgaagttttgacactgtgtgacagattactcgattttcaactaaaaaacggacttattattgatattcctgtcaccatgcatttaaaatttaaggcttatttggaattaaacgatattgttggagcccagaattcattattcgagttaaaaaatattccaggtcttacaaatttgacatatcagccatttatcgagctttcagaaatagaatatatggtaaaatgtaaaaagataaatatttcagaaataaatcatgaaatagaaaaaatatggtttaaaaatgaaaattttcaaaataattttgtttttgatgtatttgataagcatgcagattatttacttaaaaaatataataaggattaa

SEQ ID NO: 18804 - DNA, 516 bp, Methanococcus maripaludis C5
atggtgcgcacaaaattattcttaagttactatcataaagacgatcaatattacaaaaacagatttgaagaactttttggtcatttattcattaataaatccgttaaagatggggatattgcagaagatttgagtacaaactatataaaacgactgattcaagagggttatctaaaagatacgtctgtaatcgtggttttgcttggtgaaaatactcaaaaaagaaaacatgttgactgggaaatttctggtgcaatagacaaaatggttggaaattattctgggttaattggtctttgtttaccaacgcatccggcatacggtaaaaaaaactatactccggatagcataccgccaagacttgaagataatctaaactcaggttatgctagaatgtacgattggacagaaaatccttcaacgataaagaggttggtgaatgaagcatttacacgtaaaaataataattctgatttaattgataattcaagaaaccaatttcagagaaatcggtaa

SEQ ID NO: 18805 - DNA, 1455 bp, Rhodobacter sphaeroides ATCC 17025
atggtgacggctgcgaggacgaatcggttcctaaaagactaccccgaggcactcattggagggtgtggcgccgtgttcgttggtgccggcgtctccatgggggctggctatccatcatgggcgacccttctgacggaggttggcgaggaactcggggtgaagtccggcgaacttcatgatctggccgcgctcgcccagtggagcattcaggagaacggatccgcaacgcgggtcaggaacgtcatcaaggcgcagatcggcgtcgagtacgctgttcccgagacgctggagatcatcgctcgtctgccggtcaagttcatctggaccaccaactacgacagactgatcgaacgcgccttcggaggcgtcaatcggccgatagataccgtctccggggctgccgacctcgtccttcgcgcgactcctggtgcgacccggctgttcaagatgcacgggtcggtcgagcggctggacgatgtcgtcatttccactgacgactacgaactgtaccgatcgaagcgcggcgccttcctacccctgctgcaggcgcatctctcgagcatgtcgatgcttttcctcgggatcagtttcacggatccaaacatcaagcacgtgctctcgctgatccgcgagagcttcacgtcggcaccgccggaacacttcgccattgtccgtccaccgcagcgggaagatttcaagacggacactgagttcgatgcgcgcagcacccaacacaagctgtggagccgggatctgaagcgctacggccttgtcgtggtcgagatcgacgactatgccgaagtgcctgagcttctaaagcaaatcgaacgccgtgtggcggcgcggcgagtgtgggtgagcggcagctggccgcccgacgccagtggcgagatcgcaagagtatacaacgtcgcccaagccatcggccagcttgtgggggaccgtggtctcgacctcgtaaccggtgccggactcgtcgtcggatcggcctccatcgctggcttcctcgattcgctgcggtcgagtggcggatgggacctcgagcggcgcctcatcgcccgtccctttccacagccgatacccggagaactgcctgatagggtgcagtgggcggccctacgggccgagctggctaggattgccggcgtcgtgatcttcgtcggaggcatgaagatcaatccggccaccgacttgccgatggttgcaggcggcgtccttgacgaattcgaagccgccaaggcagctaagtgctttgtcattccgatcggctcaaccggcggtgcggcggcgcagatcgctgacggcctcatcggctctgccatagatgcatccgggcataacgcaatgcggcccaccgacgatgaactgaaggagtttacgcgggctgacatcacgatagaggaaatcgtgaagctgattaccggcattctcacgcgcatcgacaagcgggactga

SEQ ID NO: 18806 - DNA, 498 bp, Rhodobacter sphaeroides ATCC 17025
gtggcccgccgtgtctttttcagcttccacttcgacaatgattactggcggacacagcaggtcaggaacatgggggcgctcgaggggcagccgctgtgcagtcctaacgcttgggaagaagtgaagcgcaagggaaaggcctcaatcgagaaatggatcgccgacaacatgcacggcaagagctgcgtcgtcgtgctggtcggctcccagaccgcgagccgcccttgggtgatacatgagataattaaggcctggaacgacaagaggggcgttctcggcgttcgggtccacgggttgctcgacagcaacggtcagacctcagtagcgggagccaacccattcgattcgatcaccatcggcggcacgagccgcaagctctcgtcggtggtgccgctgatcactcccacgggcaacgacagcaaggctgtctacgcctcgatttcgaacggaatcgagaagtggatcgaggacgcgatttcgattcgtggccgcaactga

SEQ ID NO: 18807 - DNA, 552 bp, Rhodobacter sphaeroides ATCC 17025
atggcacaatacattacacgcgatgctctgcgccgcgtagcgaccgagttaggaattgttgaaacggcgaggatcaggaggaccgctgcttcgagatcgctcgaagggtcaaccttcctctcccattcgagcaaggacgacgacctagtagcaggggcgatccgcattctcgagaatcacggcgcgaaggtctatgtggacgagatcgatccggaaatgcctccctatacaagcgaaaaaacagccgctctcttgaaatacagaattcgtgaaacgagccggttcgtcctcctcgccagcaagaacagcaaagaaagcaagtgggtaccatgggagctaggcattgcggatggcgtgaaaggaacctcaaagatcgcactctttccagcatctgactccaattacgacaaagcgtgggcatcatgggagtatctcggtctctacgaccgcatcgtctggggaaagcttgcaaactaccaagaagaagtctggatggtgatcgacgaaaagaataataccgccaccgaacttagcaagtggctcaaagcttaa

SEQ ID NO: 18808 - DNA, 1437 bp, Clostridium beijerinckii NCIMB 8052
atgaaaaaggaactaatacattttgctgatagatatttaaaagatatcaaagatgaaaacgcagctatttttgctggtgcaggtctttcagtaggaactggattagtaaattggaaagggcttcttaaagatacagctgatgaattgggattaaatgtagataaggaatatgatttgattgctttagctcagtattatgaaaatgaaaaaggtggacgaggcagtataaatgaacagctgatctcagagtttactaaagatgtggaaataagtgagaatcataaaattttagcttctttacctataaaaacttattggacaaccaattatgataaattaatagaaaaaactttagagtactatggtaaaactgttgacacaaaaatttgttctgcaaacttagctgtaaatataccaagaagagatgctgtagtatataagatgcatggagatatatctttaccacatgatgcggtaattacaaaagatgattatgaaaattataatgaaaagcgacaggtctttactactgcattacaaggagatttaataacaaagacttttctatttataggatttagttttgatgatccaaacttagaatatatattaagcagaatacgtattttacttggaaataatacacgagatcattattgctttttaaaaagggtagataaagaagaatttgttgacgaaaaagattatgtatatgaaaaaactaagcaagatttgaaagtaaaagatttaaaaagatatagaattcaagctttgctaatagatgattttagtgaaataactgatgtattattattaattaaatcaaaactaaagagaagtaatatttttatttcaggtgcagctcatgagtatggaaaatggagtaaagatagagcagaaaatattgtttataatctatccaaaagattatcggaagaaaagtttaaaattatttctgggtttggtttaggaataggaagttctgtaattaatggtgtactatcacatgtttattctaatataaagaaacatacagatgattttctaattcttagaccatttcctcaaaatataaaggatgaaaatgaaagagtagcattgtggaataaatatagggaagaaatgatatcagatgcaggtattgcagtatttttctttggaaataagattaaagatggaaatattatagactctgacggagtttttaaggaatttgaaatagcaattagaaaaggattaaaagttattccagtaggatgtactgggtatgtgtcaaataaattatggaatagagtaattgatgcaatggatgattattatcctcaagatgaagaactatacgctgcaattaaatctttgggaaaggatactgaagatgattcttttatcattaataatattattaaatctattaacatacttcaaggtaagaactaa

SEQ ID NO: 18809 - DNA, 690 bp, Clostridium beijerinckii NCIMB 8052
atgggacgtaaaatatttatttcatataaatatgcagataatgatgtaaatcatatagtaggtgagtggtatgaaaacaatacagtacgagattatgtcgacaaacttgaagaatatttaaaagataaatcagacaatatttataaaggagagtcagatgatgaagatttatctaaactaagtgaagataccatatgggaaaagttaaaagatagaatatatgatagtacattgactattgtaatgatatcaaaaaatatgagagaattttataaagttgataaaaaccaatggataccttgggaaatatcttattcattaaaagaggtatcgaggaagaatagtagtggtaattctgttacaagtaaaactaatgcgatgatagcaataattgtaccagatttaaacaattcttatgaatattatacatataataagaattgctgtgatagtgggtgtagagttcttaagaccaatactctatttgatatattaaaaaataatatgtttaatataaaagatacagatacaaaagattgttcagatgggtcaaaaatatattatggtaatagtagttatataaattctgtaaaatgggatgacttcataaatgatatagaatcatatattgatagcgcatatgaattacaggataatatggataaatacaaaatagttaaggaagtttaa

SEQ ID NO: 18810 - DNA, 609 bp, Clostridium beijerinckii NCIMB 8052
atgtcgcataaaacatttatttcatacaaatatagcgaagcacaaaaattgcgagatgatattataaaggcacttggagatgatgcacaatattataaaggtgagactagcgattcaccagacttaacagatactacaactgaaaatattaaaaggcatttaaaagatatgatgtggggtacatctgtaactattgtaataatatcccccaatattaaaaaaagtaaatggattgactgggagattgagtattcattgaaagaaattatgagaagtgataaaacatcacgcagcaacggcatagttggggttattatgaaatataatggaggatatagttggctaagaacaaaaacaataaaaaaagatggtcattttttaattaatatagataagtgtaagttatattctattattataaataaccgtagtaatcaaaatccgaaacaatatttctgtgaagaatgtaaaactattgatgttttaactggttcatatattgctttggtagatgaagaagaatttttatctgatcctcaaaaatatattaataatgcttttgataaaagtcaaaatattagtggatatatcatagaaaaaacaaggtaa

SEQ ID NO: 18811 - DNA, 501 bp, Clostridium beijerinckii NCIMB 8052
atggcaaagagacaagtatttttcagctttgaatacaacaaagattgttggagagcaggtcaggttaggaatatgggaaaggttgatagtagttcaactttttcggataatgattgggaggaagtaaaggaaaaaacagatacaaaaattaaagaatggatagatgatcagatggcaaagcgctcttgtctagttgttttaattggatcaactacatctggacgtaaatggattaattatgaaattgagaaagcttatgaacttaataaaggtattgtcggaatatatatacacaacttaaaagatagtgatggtaatcaaactaataaaggtagtaatccattttatcaaatttacattggtgacaaaaatgaacgtctatcaaaatatgtaacttgttttgactcaacctacaaatcaagccaatatgtatatgatgacataagtcaaaatatcgaacagttaatagaagatgcaattgcaaataaaaataattattag

SEQ ID NO: 18812 - DNA, 1194 bp, Clostridium beijerinckii NCIMB 8052
atgggggaaacagcaaggcagtttaatagtatttatatcaagtataagcaacagtttaaaagaccaatacaaaatgttgctaacttaatgcacagaggattcagtgatgacgattttataaggaaattcaaagaaatttatcctgatttatggcttgatttaaatagtcaatatgaatattggcataagaaaaatgaatatattatttcaaaaggtaaaaaaagtagatataactttcgtaaaccttataattttattttagattgcgggtttcatactattcctaatattagaaaaaaacatgaattgggtaaaatattaccattgtatgaacaagtaaaactttcaaaagatatagttgaaaagtctaaaaacaagttaaagaaaaaaattgataagaaagtgtctatcatgaaatatttacaggaaattcatccacaatatgcagattatttcattgattcatattttaaaacttacgatttacatactaaattagaaataatgagggagttatctaagtataaatcagaaaaaatagttgaatttttctataaagttaatgcaggaacaagaaatttttcgttaaagcaagaagcaatgaaatacattcaagctttacaacttccatttgtattgaggagaaaaaaagaggggaaaactaactatattgataatgaaatagttaaaaataataatagtccagaaatattacttcaaagaatttttgtagatgatcttgaagtacataaaaaatatgatgtttttatatctcataattctagagatgaggaatatgtaattgacatatataaaaattttaataagtatggattagttgcttatgtagattgggtgagtgataaatttgatttgaaacgaacttggtgtaatgcaagcacatcaaaagtgataaaggaaagaatacgtcaatgtcaatgtattgtgtatatttggtcagaaaatgttttgaaatctcaatggtgcccttgggagctaggatatgcagatgctttgggtaaaccgatctgcattttaggattaactgatgaatcaaacatacctcaattttatctttcataccctaagttaattcaattgaatggaaaatattgcattgaaaacaatgagaaaatttcatttaaagattggctaaaaacaggctcaacttcaattttgaaaggaaaaaattaa

SEQ ID NO: 18813 - DNA, 3594 bp, Sinorhizobium medicae WSM419
atgagacttcatcacctcggtcctgatttcccggaagcgctcgtctacgaactgctcgaagggaatgtcgtatttctctgcggtgcaggggtcagcgcgccgcaactgccaaattttcgcgacctcgtgctgaacgtctatgctcgattgggcgaagagcgcacgcctgccgaagaccatgctttccaggcgtctcgttacgaagaagttctgggtgccctgtcacggcgccttgtacgatcagaggatgttatagacgctgcggccgcagaactgcaggttcccgcaaatcctgataccgcgcatcacgacgttatcctgcggctatcacgtgatcaggtgggaaggccgattatcgtcaccacgaactttgacacgctgttcgagcggtcactcatggtttcgcattcggcagctttcgcgacggaggagagcgcggcgggacaggatatacccgctccagggagcgcgaggttcacgggtgtcgtccacatccacggccggctgaccgatgttgagctcaatctttccaaaacagaactggtactgaccagcgctcagtatggggaggcatatctgcgagccggctgggccgctcgcttccttttcgacctcatgcgttgtcgcaccttggttttggtgggctatactgcgaacgatgctccggtgcgctacattctgaacgttctggaaggtgacagggagcgttttaccgatctcaggcgcgtatatgcgctcagctcatcaaatggcgacccccgagccgcggccgccccgtggcaggctctggcagtggagccgctcctattcgaaccagaaggcggcaatccatacggcccactatggtcaagtcttgaaggcctggccaacctcgtggagaatccagatgttcgtcgtcgcgagatgatcgccgccatcgtctcgggcccggtattcgaaactacggaccacgatattcgcaccctcaaatgggcgctgggcgccagggccgaccttttcgagcacttcattacgcgatgcgaagatgctgcatggttcgacacacttgccgtggagatccgagctttcggggaacgcgcgcgagcctggatgcttgcccgatggttcgcaagaggatgggatgacagggtcagatacctaaccgccattaaacatctggggaggggatcacaggagctctccgatgccgtgtttcgcgaactcgatcagaaccgtccacaggatgcgacatgggagaaagcctggcgcttgctcgccgaagcggccgcggcggcatcacacgacagtttgcgagactatcagctccatcaccggctgaaccggggaccggtcgtggagtctgacctcggacgtttggtcaatgcaatcggaccgcacctgacgatcgaggcgccgtttcgcgatgaggatccttccgagcacccgaaccagctctcggatattgctcgtttttcgatggaaagccagcatcaggaattcttgcaggatgttttggcgtcccttgtcggcaacgcggagaacatcctgcggctgctcgaacgggcttcgcagcgactcgcttgccagctcaggactgcgcgtgatgctgaactgatcggggaggtacgcgatgttacggatttcggtgtaccgtccgttgttaatcatccgcaaaatcagcatcgccgcgggtttgtgccgctcaccgttctgatcacatccgcggtgcccatggccgctcaagccaatttggaggggacgaaaagggtgatcgacggatggcgggcggaacccttcaacctgaccacccggctttggatgcacgcacttacacatcaagcgcttttcaccgccgatgaggcgattgacgccttggcgacgagcagcgaggtggccttctggtccttcgcgctggagttcgtcgctattgttcgcgctcgcatcgctcaggcaagcggggagtccgtccaacgtcttgttcggcgcctccttgtcgagggaccacaaagatatgccgaccaggaacagagtgccgacggtatcgactggcaggaccgtgcacgtgaccgcgatatttgggttcgattgaccgggatcggtgagcacgtagttctcccgcaggaggcggaaaccctgctacacgaaattcgtgagcggcgcacatatctgtcgcgtgaaatcgatgagcgggatctgttccgcacttggagctccggagtaagggctgtccgcgggcgcaccgcgcaaattgtgtcggcacaaccaagcgaacgcctcacgatcgccgatcggctcgaggaaagcagcgacatcgaagatcgcgagggctggggagaatattgtcgagaggatccggtcggagcgtatgctgcactccgttctcgtcccctcgaaatgggcgtggttgcacgttgggcgacctggcttgagatcattcccagtcgcgcgaatatgacaagccccgagtggctgcgtgtcattcaagaagcggtcggccttctcggagaggcagatgatgagatcgtcaatgtgcttgtcggacccctggctcgcataacagaacacgcccggcagcttcaactcgctcttcccgctaactggtgggatcgcctgtggcaagccgctgagggcgagcccgaggttgattggggtgatgatgtcgaaacctatgatcgcgtgatcaactcgacgggtggatcgcttgcggaagcactgcttcaagcaatcagctctcaaagggaaaacggagacgacgtgaacgccgcggaccttcatcgtttgcagcggatgatcgtctccacgacctattccggcgaaatggcacgtggagcgtgcgtccggtatctttcattcgttttcagcgtttcgcacgaaattactctcaaccatttgagacccttcatttccgcggacaatgatgaggggaggcggctacgcggggtcttggtcgaatacaatagcttcgttgcggatgctgaaatcagctttgccgatctcattctgcagggagttcgggagagccgccaaaaagatatctcggccgctaatgccgcctcacatcttgtccgagcggtggtagcgtcctttgacgaaccgaatgtggccaggggtatctcgccgcagcaggcgcgtcagacgcttcgggaggctgccgcggacatacgcgtcggagccttgaaaatcatgacaaactggcttgaggaagctcctgtcgacaacagagcagccgcttggactgacttatatggcccaacgttccaggcgatctggccgcgcgatcgcagctacctttcaaatgccgtgagcaaggacgtattctcgttagcaacggcggccggcgcagcgtttgacgctgcagttgaggccctcttaccgtatgtctcgacgtttgaggatgactggctcagccttcatgatctcgaacgcaataacgccgagctcgccacgcggttcccagtcgctgccctcagattggtgtgggccgcatgcgggccgccctgcaagggccgcacatcggatatcgccgccattttggatgctatcgctgcggctaacccggccctggtcattgatcgcaggatgcataagctgcggcttttagccgtcagtcattga

SEQ ID NO: 18814 - DNA, 1926 bp, Sinorhizobium medicae WSM419
atgaagtttgatttctccacactttctccggatgacttcgagaacctgagtcgcgatcttgtgggcgccgaaaccggcgttcggttcgaagcgttcaccgttggcgcagatgagggtatggatgggcgccacgccaaagccgatggttcgatcatcctccaggccaagcactatctccgatctggcttctcgaaactcaagtcgaagatgcgagaggaacgtgtttcaatcgacgaactggccccgcaacgatacattctgacgacgtccgtaccgcttaccccggcaaacaaggcaacgctgtcggaaattatcggaccaagcctagccggacccggcgacatattcggcgcggacgacctcaacggcttgctcagatcctatcctgaggtcgtgaaggctcatgaagggctctgggcacacagcaccccagtgctcgaagaagtcgtcaccaacgcggtgcgcaaggcaatggcgccggcggaggttcccaaaacgctcgctcgcctgatgccgccactcggggcagcgaccgatgctcagatcgagcccgtaaagcgcgatacgatcttcataatcaaggcttcacccagcgacgacgagttcacgctatggcttgctccaaagcttgaggccgagggctaccaggtctttgccgacgtgctcaccctcatgcctggcgaacgttggcgacgggagataaccagtgcgctgcgccatcgcgcggtcaaggtcctgctgctctgccgtgattccagtcttggggatagcagcatccaggacgacctcgacattgctctggaaacgggaaaggaactcggtgatcagcggtttgtcattccgctacgcatggagacgtttcggaagatcaaaggtctcggcgacactgtcgcggtagatttcgttcgaaattggggagaaggcctgctcaagctcatcgataccctgcaacggcaaaaagtcccgcgcagcgtcgacacgatgataaacccgtactgggaaatctatcgccggcgtggcgccgtgccgatcatcgacgttcccgagcgactgacctcaaactggcttctggtcgccgaggcgccagatttcatccgatacttcgaatgctcgggagcgatcaacaaagggcgcctccagggagcgatcgacagctatggacatccttgcgcattggtcgggggatcaggttttctggcattcggtggcgtgccggaaatcgaaatggcattcgaagccgtcggccgcttcaagctgaaacatgaaattccgctcgtggaattcacggagggcggcttccaacgactgcgaattgaccgccagaccgcctccaacctcgttgttgcgatgctcaagaaggcctggttcaactactgcaaacgccacggtttcgtcgaacacggatattcgaatggcatcggcttccacgcgtcgccagaacaggcgccgacgggcaagcgaattccgtgggggaaccaggccgagaagaagcggtcatcgatgctgcgcaattccgctaaaggccatatctggcaattcggtgtgactgccatgccagctttctggccattctggcacttcaagctgaagtcgagggtcctgtttgcgcaagataacggcaccccagccggccttgttgtcgacgatcccaagaagcgacaccgcttgaggcgatcggtgtgtaagggatggcgcaacaagcagtggtacgggcgccttctcgcgtttctagaattgctttccggagaatcggcttttgtgcgcctccctctttccgagacggaaaccttcgttctcgaggcctcgccgatgctgttctcatctccggtcagtaccgttcttccaaacgacctcgatgatgaggacgaggagctggatgaaagcactctcgggcggcctgacagtgatgaggagggcggcgaatga

SEQ ID NO: 18815 - DNA, 1449 bp, Pseudomonas putida W619; identical to SEQ ID NO: 18731

SEQ ID NO: 18816 - DNA, 477 bp, Pseudomonas putida W619; identical to SEQ ID NO: 18732

SEQ ID NO: 18817 - DNA, 540 bp, Pseudomonas putida W619; identical to SEQ ID NO: 18733

SEQ ID NO: 18818 - DNA, 552 bp, Pseudomonas putida W619; identical to SEQ ID NO: 18734

SEQ ID NO: 18819 - DNA, 855 bp, Pseudomonas putida W619
atgtacatcggctttgagcttgaaaattacaagccttttgagatgattagtgggtcggcggttaataactttcgtgatcaagcgcgagatgtggtcgtgaatgatctggccgattatgtcatcggtcagatcgacaacaaagatatcatagatgtcaaggagctaacgctgaggattttccctcagcaagatgcccagattttcctttcacattcgcaccgggatgagcgcaaagctattgagtttgctttgtccttggagaagcgaggtgtcagcgtgtttgttgattcatgcgtttggggttacgttggtgacctcttgttaaaagtcaacaagcattactccgacagtgaagtggtcggggattttaccaatttttcctatgaaaagtgtaatgaggtcgcagcctcactttatttgatgttgaatgaagagctgcatcgaatgattgacgcggctgagtgctttatttttttcaataccaaaaattcgatcccgattaaaggtcacgagggctttgcagagggtgaccgtacgttgtctccctggatttactccgagctcgctttcagtgccaaggtacgttacaggccattggtgcgtaagcgcttacgcagaaagatcgtaggcgcaatggagtcttacttagtggagaaggcgtttggatcagcttcttttgcattcgaggtcgtcaacgagcaccttccaaagctcgatgggagtacactgaggacattggctcagacgacgcctgagaccggcgatttttggctagatgctttgtactatgcgtatgagctcgaagctaagttcaaaggtctctgtgaggcccgtgctcttgagcccattgcatag

SEQ ID NO: 18820 - DNA, 1431 bp, Burkholderia ambifaria MC40-6
atgggttttagccgggaaatcgaggcattcatcaaggaatatgtcaaggatctggcggaggacaacgcggcggtattcgcaggggctggaatgtccaaagctgtcggcttcgtcgactggtcggagttgctgcgggatattgcagatgagatcggtctgaaggttgagattgagcatgatctcatcgcgcttgcccagtttcacgtgaatgaactgaagggcacggccaagctatctagaaaaatcatagaggagttttccgagcaggcggagccgtctgaaactcacgcgattctcgcaagattgccgatccgtacatattggacaaccaactacgacaccctgattgaagatgcgcttcgacgcgcgtacaaagttccggacgtcaagcacaatgtcgagcagctgaacactacacggccaaagcgcgacgccgtcatctataagatgcatggcgacgtgtcgctaccgcaacaggccgtactctacaaggaacagtacgagcgctatttcaagacgcacgagccctttgtgacggcgttgagcggcgaccttgtctctaaaacattcctcttcatcggcttcagtttcactgatccgaatcttgattacgtattgagcaggttgcacacggcaacaaagcgcaatcactattgcttcatgcgtcgcgaatctatccttcctggcgacgacgaggaggttctgcgctataagcgcagaaaacaggagctacgtgtagacgatctgaaacgcttcgggatccagacgctgctgatcgacgactacaaggatgtaccactgatcctgaacgccattgaggcgcgcttcctgaagaagaccatttttgtggcaggcagcgcggatgacttcggaacgtggagtagaagcgaagcacaggatttcattcattctctgtcgggaagtctgctgaagcacaattatcgtgttgtcaatggttttggttggggagtcggcagtgccgtcattaacggcgcccttgaagcaatttactcgaatcctggtcggtattccgaggatcagttggtcatgcgcccttttccacagtttcagagcaagggacaagatctgaaaatactgtgggaggagtaccgccagcggatgattgccctcgccggcgtttccctcttcttgttcggtaataagcgcaacgacacagggcagatcgtgctcgccaacgggatgatgcgcgagttcgaaattaccgttgaagccggccggattcccattccggtcggtgttactggattcgcggctcaagcaatctgggagcagatagctcctcatgcaaatgacatctatcatggcatcgagtggatcattcccatgattggcgaaatctgtgatgcaaacgcggatcgggccctcatcgtcgacaaaataatcaaaattctcaaccgcctcgggaaatag

SEQ ID NO: 18821 - DNA, 408 bp, Burkholderia ambifaria MC40-6
atgggtgtaattgaagggaataccccagtatcgcccaacacttgggaggaggttaagagaaagggcgatgcgtcagtcgagaagtggatcgacgacaacatgaagggaaaatcttgtgtcgtggttttgatcggctccgagacgtcaaagcgtccctgggtcaagtatgaaatcgagaaagcctggaaggatgggaaaggcgtcgtgggcattcacattcataatttgaagtgtccgaacactggcacctgcgccatgggcgcagacccgcttgcgatgttcacgttcaaagtgggtgacaaaattgtcacgccgaaaacatacaatccaaaattcgacgcatacaataatattgctgaaaacctcgataaatgggtggaagaagccattaagattcgggctggctga

SEQ ID NO: 18822 - DNA, 594 bp, Burkholderia ambifaria MC40-6
atgccaaccttttacactaaggcggaggcgcgcgcctttgcctcacggacacttcaaaaatcgttcacgacagacagcaagcgggtgctgagagaagcagttcgatccaccgccagccacgaccgttttgacatctttctgtcgcatgcatccaaagatgcagagcttattcttggcgtcaaggcattgctcgaggatcaaggcttcaaggtatatgtcgattgggtagaggacgcgcaggcagaccggacaaaagttgaccgtgaaaacgcggatctacttcgccaccgcatgcgtcaatcaaactcactaatctgggttgccaccagtgcggcgagtgagtcaaaatggatgccgtgggaactcggttactttgacggcttcaaaccaggtcaggttgcggtaatgccgcttgtggaaaatccgggggcaacatttaaagggcaggaatatctggctttatacccggtagttggcaaggacaggtatactgacggacgtcaggacgtttttgtagaggatctcggcagacaatggtccactctgcgtagtttcggcaaaggtacgaatacctggtcgagatatactggatga

SEQ ID NO: 18823 - DNA, 1029 bp, Aggregatibacter actinomycetemcomitans D11S-1
gtggatgtaaagcactgcgtagaacaacttccaatatcaattcataaaagagatgttgttgtatataaaatgcatggcgatgcttctctgccaaatcaaactgttcttatcaaggacgattatgagaaatttcatttaacaagaaatgacttttttaatgctttgcgtggagatctattaacaaaaagatttttatttttagggtttagcttttctgatcctaatattgattatattctgagtcggattagagcgtcatatagtgaaaatcaaaaagagcatttttgtattttaagaaaagtccaaaagaatgagaatgaaccacaagatgaatttgaatacagacaacggaagcaacaattttttatttcagatttagagcgagtaggaattagtgcgttattaattgatgattattcagaaattacagaaatattgatggaaatagaacaagctcaaaaacgtaaaactatttttatctcaggggcagcagaaaattattctccttattctcagcaagaagttgaacaatttgtttcttctctttctcaagagattttaaaactagggtatcgtattgttacaggttttggattaggaataggtagctcagttatttcaggcgcaataaaacatcttacggaacaaaatttaaaaatagatgaggactatttgatacttcgccaattccctcagaataaagaagggaaagaattgtggtctgcttggcgtgaagatatgatttcttatgctggtatctctatatttctattcggaaataaattacagaatggaaatttgattttatcaaatggtatgcaggaggaatttgatatttccaaaaggaatggaaatgttttaatccctgttgctgctactggatatatggcaaaacaactctgggataatgagatgaataaagagtctgctaaggaggttgaaaatgaaatgcaagcactatctaaagaaaatatttcgctagatgaattaagatctaatattttgtcaattttaaaaaaggttaaataa

SEQ ID NO: 18824 - DNA, 645 bp, Aggregatibacter actinomycetemcomitans D11S-1
atgggaaataaaatttttatttcgtataaatattctgacaatgctgttaaacaacttaaagaacccaataatttgttttcattctatagtcaatataaaacaactgctcgtgattatgttgatattattcaaaataaatttgagcgtgatgatattcatatcaataaaggggaaaatgataatgaaagtcttgccggctttaaaacggagactattcgttcaaaattagcagaaaagatttttgatagttccgttaccattgttcttatctcccccaatataaaaaattcttggaaatcagagaaagatcaatggataccttgggaaattgcttattcactaagaagtaagcgacgtccagataaccgaagcaagcgtaatgcaattttattggtcgttctacctgatagatatggttattatgattacgtaaattcatatggcttttattttgatattattcaaagaaacttgaataacctgcatacaccatatactacatataaactaaggaatggctgttctaattcatatatgcttcaatgtaactgggataagtttatctctaatccgaatgcttggattgaagctgcaatagaaattagagataaaggaaataattataatattgtaataagaccataa

SEQ ID NO: 18825 - DNA, 483 bp, Aggregatibacter actinomycetemcomitans D11S-1; identical to SEQ ID NO: 18752

SEQ ID NO: 18826 - DNA, 1440 bp, Sebaldella termitidis ATCC 33386
atggatagaaaaatattaaaatttattgataaatatgtaaaagaaatcaatgaaagtaatgccgctatttttttaggagctggtttttcagttgattctggctgtattaattggaaagagttattagaagatattgctgaggacttaggattagatattgaaaaagaaagtgatttaatttccttagcacagtatcataaaaatacacttggaaatagatcacaaatcaatcaactaatattaaattcttatggtggaaaagatattagtgaaaatcatagaatattagcaagattacccatctctacattttggactactaattatgattccttaattgaagattctttaaaagaaattaaaaaaattcctgatgttaaatatactaatgcccatttatcgcaaacagaacctaaaagagattccattatttataaaatgcatggcgatagaaatcattcaaatgacacgattattttaaaagaagattatgaagaataccatgttaaatatgctcctttcattacggcattaaatggtgatttgataacaaaaacttttttatttattggcttcagcttttctgatccaaacttaaattatattttaagtcgaatgaaagtagactatgggaatgatactcaaaaaactcattatgcacttatgaaaaaagtagccaaagaacaaaatgaagatgagggagattttatttatagagaaacaaaacagaaattattaattgacgatttaagaagatacaatatacaagttttagaaatagatagttataaaacgataactaatatattaagaaatattgaaaaaaaaataaatcgaaacaatgttttcatttctggcagtgctgttgattatggtgattttaaagaagaaaaatctgtaaattttattgaaaatttatccaaacaattaataagaaaaggttacaatattgtttctggatttggattaggtgtcggaagttatgtcataaaaggtgcattagaggaaatctatttaaaaagtaaaactattaatgacaataggttattattgagaccatttcctcaaggaatagaaaatgaaaaaagtagggttgaattatggaaaaaatatagaaaagatatgatatcaagagttggaatatcaatatttatttttggaaataaaataggagaaaatactgaaataattgaagcttctggagttctggaagaattcaaaatagcccatgacaataataatattataattccaataggatgtactggtggagcttctaaaactatttggaatataataaataatgattttgaaagttatttcaaaaactcttctaataagttaaaacaattatttcaaaaatttaatcataattatgaaaaagaagatgaactaatcaacgacattattaattttattgatataactgttaaaaaataa

SEQ ID NO: 18827 - DNA, 609 bp, Sebaldella termitidis ATCC 33386
atggcaagaaaaacttttatctcatataaatactccgaagcttgtgatttaagagataagatattagattcattgggtgaagatgctaaatattacaatggcgaaacaagtgattcacctgacttaacagataaaaagacagaaacaattaaagaaattttaaaggatatgatatatggaacttcggtattaattgttatattatctcctaaaataaaagaaagtgaatggatagattgggaattagaatattctcttaaagaaattaaaagagaagatcgaacatcaaaaagcaatggaattgttgcagttgtgatgaaatataataaaagctatgattggtttataactaatagcgaaaattgtcatgggactagtaccctaaaatatgatgactcaaaattatattcaataatatcagaaaaccattttaactcaattccacctaagtatcattgctcagaatgtaaaacttatgaagctgatttaggttcttatataagctacataaaagaagatgacttcttacttgaccccaataaatatattgaaaaagcttatgaaaaaagtaatagattaagcgattttaaattaaaaaaacaaaaataa

SEQ ID NO: 18828 - DNA, 978 bp, Geodermatophilus obscurus DSM 43160
gtgctgccccgctgttgcggccctatcaggttacgccggctgatcgacttggtggcggccccctatcttcacgacgtgggtgacccgtgggtctacgagcaactacgcgcggtccgggaccggcatgacctaatccttttcgccggtgccggtctttccgctcaggcccgaaatcaagatggccagcggccgccgctgtggcgtccatgtattgagcagatgcttgcatggtgtgagactgaggggctcattgcttcatctcacggagatgagattcgagaactgctcgcgttgggattcctacccgaggcggcccaggagattgaggacgcagtcaagccggtctccgtgggagcgctacaacgctgtttggccgaagtattgctctacgactcggcggagacaagccttgctcatcggcgtgccgcacgggctggatttcgagccttcataacgacgaattatgatgatctgcttgagaccgcgtatgtccggactcagcggaaagtgctgccgaagtactacgaggacaccctggacaatgtgctggactcctggagaagtcgacagccattcatcctgaagatgcacggcgacgtttcccgccctgggcttctcgtgctgggtaatcgatcctacgagcgggccatccacaccaacggtgcctttagtcgcgttgttgagaccttgatcggcgcatcatcgatactattcgttggttacggcgcgggggatccgaatttggagggcttgttaacgcggggggctctcttcgatggtcgcagtaagcgacactggctcttagctccagccgcatcaatgccagcgctccgcgctaagcggctctgggccgacaaaggaatcaatgtggtgacctacaaggggagccacgtccacgtcgaaaggtttttccaacgcctaggtgcgccagtgacctctccggcaacactcagaattccagcagcgttggtgatctaa

SEQ ID NO: 18829 - DNA, 1266 bp, Geodermatophilus obscurus DSM 43160
gtgtttacagggggagcaagccgcatcttcatttcctatcggcgccaggaagcaaactttctcgctggccacttatatgacaagctagccaatcacttcggcaagcagcgtgtatttattgatgtcgagatggggcctggcctaaaatggcgcgaagtaattgccagcaaggtaggcgcgtgcgatgtgctgctggcagtcatcggcccccaatggctcaggatgacggactcgcagggccagcggcgtcttgaggatcctgatgacttcgtgcgcctggaaattgaggccgcccttcagcgtgacgtccgagtaattccagtcttgaccaacggtgccgtcatgccacgtcggtcggaactacctaagagtttggccaagctagcagaccgccatgcatttaccatacacttcgagggcctccaccacgatgtggcgcgtctcatttcggagatagacccaggacttcgttggcgcggcctctcgctgacggccggactcctgctaattctggctgccggaagtttcatagccgaaagtttcctatccgtgacgggggcgttcagagagtggttaccaactcttattgccgattcgatagctgctgtcgccgtcggcgccgtcggagttgggattttggcagcccgaacgcgaccgtcgattgcgatcggaggcggaatcttacttggcgcttctccattcatcggtctcaggatgtggcggagcgcgcaggtgcgggacccatttgggtgggggtcggaatcggtgccagtcttggccatcgtcgtggcccttggactggttgcactcctgctggcggtgaatcctgatgagcgctttggttaccagcgcccaaccgacagagccggccctatgttgattcttgtcggcgcctttgcccctgtggccctatccctagtcggtagcaccattccgacatctgattccgactttggaacccttaagttctcagacccgatggtactggcctattccgtcatcctggctgctcttgtggcctttactcaaggtgcgctccaaggcgcgatcctcgcgggatgggcggggggcgccgccttcgtactggcaaacaccgtctggttgcgaatctactccgaccctccgttggcaccgattctaaatgcacaactgctcttatgcgggttcacggtagccatattggccgccacggcgagacttgcgctccgaggcgaccgacccttcgcgtcgagcgcaggtgcgcctaatccacataagactccctaa

SEQ ID NO: 18830 - DNA, 2382 bp, Geodermatophilus obscurus DSM 43160
gtgacctctcaggggcaggctgcacgcttcgattgctttgtcagctacaccctagcggaccgggcgtggggggaatggctggcgtggcagctacgtgaagcgggatacaccgtatttttagacccatgggatataacgcccggtgtcgacctcattgatagctttcggggcgtgactgaggcggcagatgttgtcctagttgttctttccgatgtggaccccgagttggcggtgttctcgcgcgcagaattgtcggcacgtgcgttgcgcgtgggtggtcttggggccatcctgccggtacgggtgtctggcgacaaccccagcgggatattcgccggactgcgttacctcgacctagttgggttggatgaggctaatgcgcgagacgccttgctcgacgcgctatacggcatagaggccgcgcattcgactcgtggtgcggcacgggtctctatcgacgatgaagcaccagcctatcccagtcatgccccgtcattctcggtgccgctagcgccctccagtcgatttgtcggaagggacgacgacatgctcaggcttgaccgagcgctggcgacgcggcccaggcgaatggtggctctctcgggcgttggaggcataggaaaaactcggctcgccgtcgagtacgcttactcgcgacgttggaactacgaggttgtttggtggcttcgaggcgagtctcaggccagcctgatggaagacttggggaagctagcaacagaggggccagcggccggtccttcgcgcacacaatcctcaactctggagcagagggctaaacgagctcgcgcttggctcgcggccaataggggctggctgcttattgcagatgacctgaaggatcctcgtacgcttacggacctgctcccggagccgattgaaggtgacgtcattatcacgacgcgcacccaatccttgactggcggtgtaacggccgtcgatctggagccgctcaatcatgaaggcgcggccaaacttcttgagagcgaggcactaccctcgggcatatcccgggcggattttgagcggctcacggcgcacctagggggccaccccctgtcgttgaagctcgccgcagcccagctgacgcacacccgtatgagtgtggacagctttatattccagctcgaaaaggctgatgctgacgctgtaagcggcgcggagcgatcgttagaactagcggtcggcaacagccttcggatgctgaagcaagaggtgccggtagcccatgctctgctaatgctttgttccttcttagatgcttcacctctgcctactgggctcgtcgtggagaaccgcagatcgctgccttcggcgcttaggcgcggccttgccgatccttcatcctatgttgctgcggttgagcaccttcagagcgtcgggttgataaccgcgcgtggcaacggattgctcgtgcacccgatggtcgccgcgatagcacgcagacagttgagtgggcgggaccggcggcgctgggcgcaggcgagcgtgcgcttgatggatgcatgtcttcgaatcgatgcgagccgccccaaggactggtcgcttgttgggcaactcataccgaatgccgtaggggctagcgaatacgcgtcacgcgaaagtgtgggtctggaagaggcgacccggctcttgtcctgggcggggtcttaccttcacacacgcggagataccacgcgggcgctcccacttcttcggcgcgcagccgacctcgcaacccggttgtcagctccaggcaatgcgggggctgagagcccttgggggaacctcggagttgtgttgttcgcccaaggggactatgaggaggctcgccggcacctagttcgggccctgcacgtcgcagaggaggcgtacggtcccgaggcgtcggaaacggcgagacgtcgggaggatctagccctagtgctgcgggcgcttggtgagcgtgcggcctcactcgatcaactgcatatggttcttggcatccgagagcggaccatgggccctgatgacccggaaacgggtaaggcgcatgttaatctcgctgcagtgctgcgtgaaagtgacgactcaaccggttccatggatcaccttcgggttgcactaggcgtcttcgaacgggcgctcggtccagagtcgcgcgaagttgccgctgtcaggagcagcatggctgtcctgctgcgtgagcagggtgagcttgagggcgctcgggccaacttcgaggctgcccttcgaatctacgagcgggtcctgggcccccgacacgagaactggggcagagtgcatcaagccttggctgaaatttacagggagctcggagacctgagccgggcggaagaacatgcggtgacgggccgaaacgccatagcggatcccggtcggtga

SEQ ID NO: 18831 - DNA, 1446 bp, Agrobacterium sp. H13-3
atggtggtgcgctcaggaataacacgcttcctcaaggagtttcctacatccctccatgagggcactggtgcagtgtttcttggcgcaggcgtttcgatggcggctggatatccgtcatggtcgtcattgcttcgcgagatcggagaagaacttggcctgagttcaggcgacatctacgatctggcagcactcgcgcagtggcacatccgagaaagcgggggtgcaacgcgcgttcgtaacgtgatcaagacggaaatcggcaaagatctacccgtgcctgaagcacttgagattatagcgcgccttccggttcgccatatctggacaacaaactacgataggctcgtcgaacgagcgtttgaagccatccggcgaccggtagatgttgtgtctggttctaaagacctttccctgaaggccaaagctggggcagtccgcctctataaaatgcatggctcagtcgatcgactcgacgatatcgtcatctcgactgatgactatgagctctatcgttcgaagcgtggggctttccttccactactgcaagctcatctcaccggaatgtcgatgctgtttgttgggctgagccttacggatcccaacgttcggcatgttctctcaatgatcagagagagcttttctgacgctccaccagaacatttcgctatcgtgaagccaccgaaagctgatgattttaagaatcgggacgaatacaaagcgcgggcggcacagcatgctttatgggccaaagatctccagcgttacggtctgatcgcagctgagatcgatgactatgacgaggtcccggcacttttaaagcaggtagagcgacgagttgccaagcacaggatctgggtgagcgggagttggcctattgaagcgggggacactaaagctgccacgctatatcggctctccgaagcgattggccgcataattggagctaatggactgagtctggtcactgggtcgggtgtgctcgttgggtctgcatctatttcaggtttcctcgaagcacttcgcgcggatggtgggtgggatattgatcaaaggcttgtctcaaggccgtttccgcagcccgcaccaggagacaccaccgataaagcactatggtcggcccatcgtactgagcttgcgcggaactccgggactgcggtttttctcggaggctcgaaaatgtcaggcggaagcgccgttgttgccgatggtgtgcttgaggaatttgaaaaggccaaggcagcaggcgtatttttgctccctgttgggtctaccggcggcgcagcaaagcagattgccgaaacgttgcgcggcagccattggccttccacgggagcggacgccagacggcctaccgatgatgagctcgccgccttgagcgatgaaacaaaaacgaacgacgcgctgttggcgatcattgagaaaatcatcacacgtcaacaaaaatga

SEQ ID NO: 18832 - DNA, 489 bp, Agrobacterium sp. H13-3
atggcgcgcaaagtattttttagctttcattacgatcgggatgtccatcgcgtcgttcaagtccggaactcatgggtgattagagcctccggtgatgctcctccgttttacgacaaggcagaattcgaaacggtaaagaagcgggctggtggcatcgagaattggatcgaagaacaacttcgagggagctctgtaacggtcgtcttgtttggtgccgagacttacgatcgaccgtgggtacgacacgaaatcaagcgaagctatgaactgaaaaagggaattctcgccatcgacatccacaatgtaaagcacccgcagctcggcggggatgttcagggcaagaacccgctctcctattgggaaattacgcaggctggccggaaggttccgtttagtagcctttatcggacctacgactgggttcgggatgatggatacgataacatagcggcttggatcgaggccgccgccaccgcagcaggtcgttga

SEQ ID NO: 18833 - DNA, 393 bp, Agrobacterium sp. H13-3
atggtgctggagaaccatggagcacttgtttacaccgacgagaaagacccagaaatgccaccgtatacaacggcggaaactgccgcgctgttgaaaacgcggattagacagacgaagcgcttcgtcctgctcacaagcaaaaacagcaaagagagcaagtgggtgccgtgggaactcggtgttgcggacggatcgaaagggatgaacccaatcgctttatttccgtcagcagacagcccgactgacatgagttgggcgtcttctgagtatcttggcctctaccagcgtatcgtttggggaaagattagaggccgcgagaaagaggaatggatcgtctgggacgagcgcccccataccgcggtgactttgcggcactggttaacctcaagctga

SEQ ID NO: 18834 - DNA, 1398 bp, Agrobacterium sp. H13-3
atgttgctgcaaactatcttcatcagtcacgccaaacccgaagacaatgacttcgtcagatggctcagcgcgcgcctgacaggagcgggttacaaggtctgggcagagttgattgattcaacaggcggtagtcccttctgggcagacatagaggtggcgataagggagcatagcgccaagttcatcagcgttgtctcgaaggctagcgttgcctcagacaggagaggtttccgaaatgaactttccatcgccgactcgcgcggcagaaccctcaaggatagccgattcattgtcccaataaggctcgacgacgtcaccctagacgagtttccggctcagcttcaccaactccatcatatcgacttctcaagtaattggggggaaggttacctcgacctgatccgctcgcttgaaaagatgggcgtcacgaaggatgcgtccgctgacagcacccttttcgaagactggcgaaggatatcagaatctgcgtcaaacatcgttgaggtggcaagcgagcccgcgctcaccaacctcgtacagatcgtcaaactgccgagggcggttaatgtcttttcgtaccaaggagaccaagacaagttctcggctgcgctcagaaagactggagtgccctgcgcccagttctataggcttgtcatcaccttctccgacatcgtttctcttcaggaaagtttgccagaacacttcaggctgagcgaacattcgtcatatgggttcgaggaattcatcgacggaacggacaagggcgcaacgcgacctaaaaaggcagatgcaagaaacatggcaacggccatgctccgcgcgaacatcgagcggcacctgtcgtcgcgcggtttgcgagagttctccggcaaacaagccgcttacttttttccaagggatttgctgccgaacaataaggtcttctatcagcttgcccaaggaaagcgaacttggaaagcggtggttggtcgaagtgaaaagatgggcgtcttctggcatctggccatgaaggtgaatgtcacgatcagtgaagaccccattgttcgtttcaaaccgtatatctgttggtctgaagacggggtcacgcccatcaccgatcccaagcgaacttctgcaatgaggaagcgcttttgtaaaaactggtggaacccacaatggagagggcttcaggaggcattcatagcatttctcgccgacgataaaccgacaatcgagattgagattggagctggggaagcattctcgcttgatcgtgatctcttctccatcgatctggcgcgacggatgccgaccgatcttcttgtctatgacgagcctgacccgccgcaggaagagcccgatgacgatgtcgaagaccttgatggggacaacctgaacggagagggcgacgaagaatga

SEQ ID NO: 18835 - DNA, 882 bp, Frankia sp. EuI1c
gtggacgaccgagcatgggacaagctcgtgacccagcttcgtaacggtgactgcaccccattcctcggcaccggtgcctgctacccggcgctgccggccgacggcgatctgtcggccgaatgggcggaccgttatggttacccatttccggagtcggcccgggatcttcctcgcgtcatgcagtacgcggcgaccgtcgagcgggacccgatctttgtcaaggggcaggtcagggaggcgctcctggccaggggctacccgaacctcggcgacgcgacacaggcgcacggtctgctggctcggctgcccctggcggtctacgtcacgaccagctacgacgacttcatggtgaccgccctgcggcaggagggcagacagccccgggccctcgtgtgcccctgggacggccagcggccagacgcggacgcgcccgacaccgagctcggcccggccgaccccgaccggcctgtggtcttccatctgcagggaagcctcgccgaggcccggtcgatggtgctcaccgaggacgaccacctcgacttcatggccaccctcgccgagaaccgaacgaccgtcagccggatgattccgacgtcggtgatcgccgccctgaagaaccgtccgctgctcttcgtcggctacagcttcgaggactggacattccggatgctgctgcacggtgtactccgtaccctggctcccgtccacctgcgccggcacgtcagcgtgcagctcacccctagcccgaacggggacggaagcctggagacgcaggtcaaggcctacttcgagcggtacttcgacgagaagcacgtcacggtcttctgggggtccacgtcggagttctgcattcgcctcatgtccttgctggctctgacatga

SEQ ID NO: 18836 - DNA, 1608 bp, Frankia sp. EuI1c
gtggcggtcgcgggggacagaaccggcccggaggcggcggacttcttcatctcgtacggtcccagtgaccaggcctgggccgaatgggttgcctggcagctcgaggcggcggactaccgggtcctgctccaggcgtgggactcggtcgccggttccaactggtcggtccggatggacgagggcatccggacggcgcaccgcacgatcgcgatcctttccgaggcctacctcggctcggtcttcggtgtcggcgaatggcacgcggcgcgggccgcggacccgaccggattcgaccggaggctggtgcccgtccgggtcgagaactgcccgcgacccgggctgctacgaacgatcgtgtcgatcgacctcttcggcctaggaccggacgccgcgcgtacgcggctgctcggcgcgattcgcggggcgatcgccggccgggacaaaccagcgacgcctccgctcttcccagcgtcgtcgcgggcggtcgcaccggccttcccggtcacggccaatgacgcggcaccacgaagcgtggcctcggccccgatttccgctggcggcgacccgccgcaggggctgaccgaccagcccgctgtcggccggtcgcgacccggtcagacgccgctgaccggcccgcgacaccccgggcagcgactcgccggcccggacgacctggtctacgcggtggccttcgccgcgggcggccgcctgctcgcgggtgcgagccgcggcggggccgggcctgagaacggtggaacgatccggctgtgggacgtgacggaaccgccccggccagggccgtggaaaaagtccctggtgggccacaccgactgggtgctcgcggtgacggccgccctgggcggtcagctgctggccagcgccggagctgatggaacggtgcggctgtgggacatggcggagcccgggccgccgcggccgtgcggtgcgccgctcgacggtcaccaggactgggtgctgtcggtcgcgttcagcggtgacggccgaattctggccagcgccggccacgacgggaccgtgcggctgtgggacgtggctgagccacgaagccccaagccgtgcggtgctcctctcgtcgggcacgccggctgggtgcggtcggtggccttctccgggcggggtgacgtcctcgccagcggcagccgcgacgggaccgtgcggctgtgggacgtggccgagccgagccgggcgcgagcggctggccagccgctcgcggaccacgggacgtcggtgcaggcggtggtgttctcgcccagggagcaacttctcgccagcggcggcggtgacggggcggtgcggttgtgggacgtgagcgcgccggcccggccgcggccggcagggccacctatccagggccacgccggcgcggtgctggcggcggccttcgcgccggacgggcggcttctcgccagtggcggcgccgatgggacggtgtggctgtgggacgttacggagcccgccagtccgttgccggtcggtcccccgctggccgaccacggggccgcggtgcgggcggtcgccttctccccgaacggggagttcctggccagtgcgggcaatgaccacacagtgcgactgtggcgactctga

SEQ ID NO: 18837 - DNA, 1038 bp, Carnobacterium sp. 17-4
atgacacagcagtcattagcagataatatttatgatagagatgctgttgtctataaaatgcatggagattcgaaattacctgctcaagcagttttaactaaagatgattacgagatttacgaaaacgaacgacctctttttagaaccgtactacaaggtgacttagtgtcgaaaacatttgtttttattgggtttagttttgaagatcctaatctaaattatgttcttggtcaaattcgagttctcttaaaggaatcaactcgtgatcattattgctttttcgaaaaagtaaaacaagaaaaaggagaaatacaagaagacttcttgtatcgaaaagctaaacagaaattacgtatagaggatctgcaacggtatggtatacaagctattaccttagatagttattcagaaattacaaacttattatctgaaattgaaaatggatatctccgaaaaaatatttttatttctggtagtgcatcaatattttcagaaccttggactaaagagaagtgtgaaagtttagcatatttattatcaaaagaactagtttgcaagaattataaagttatttcaggttttggtttaggaattggttcttctgttgttaatggtgcattagaagaaattatgtctagtaaatttaaacacattgatgaacatctttctttaaggccttttccacaaacaattaacggacttatcccaaaagaagataaatggaaaaaatatcgaactgatatgatcagtcaatctggaattgctatctttatgtttggtaataaacttaaagatgaaaatcctgagatagcaaggggggttttagatgagtatgaaattgctaaaaaaaacaacgtcgcattgattccaatcggaagcactggatgggcagctagagaaatatttaatgaagtcagtcaaaatatttctgattacccctatttagaagaacatattgatatccttagtaaaagtaatgatcaaacacaattgattaatactattttaaaaattatagacagtttacaagtattttag

SEQ ID NO: 18838 - DNA, 549 bp, Carnobacterium sp. 17-4
atggcaataagacaagtatttttcagttttcatttttcgaatgatgtttggagaactggtcaaattagaaatatcggtgttgtagaaagtcaaccaattttttctgataacggttgggaaaaagttcgtttaaaaagcgatacatctattaaatcttggattgataatgaaatgaaaaaacgctcatgtctcgttgttcttataggtagcgagacgtcttcaagaaaatgggttcgttatgaaattgagcaagcttggaaacaaggaaaaggtattgtaggtatctatattcataatcttgaagatatagagggcaagcaatcttcaaaaggagctaatccgttcaaaaatttctgtatagacaaaacatttaattatattgcacagcatgatttacccgcagattctaatgaaataagacttagttcgatttgtagtacttatgaatcaagttatcaaacaagtaagtatgtatacaaagatataaaagataatatagaactattgattgaagaagctattcagattcgcaatagatacccaaaataa

SEQ ID NO: 18839 - DNA, 585 bp, Carnobacterium sp. 17-4
atgaaaaagatattcgaacaaggcgaatttaagaattattctcaacataatttaaatgaagcaagagcatcaataaaaaaaagctatcagttctcagaaactaaaactacaatttttatttcacataagcatgatgaactagaaaatcttaaagatatattaggatttttggaaaaaaattttgatgtgaaagtttacattgatagtaaagatccttcactcccaacaattacatctggagaaacagcttcaagaataaaaaaaagaattaatgattgcgacaagtttatattacttgctacaaatggagctattgaatcaaaatggtgtaattgggaattaggttttggtgacgcaaaaaagttcgaaaaaaatattgccttgtttcctatgaagccggcagaaacatctgattggagttataaaggctcggagtatatgtctatttatccttatattacgttttttgatgggtctgaaactgatattgatggaaactttgttccaaaaggatattatatttttactgataaaaaagatggtacctatataacctctttcaaagaatggcttttagaaaaataa

SEQ ID NO: 18840 - DNA, 1449 bp, Burkholderia gladioli BSR3
atgacaaaagcggccatgacccgttttttgaaggaatatcctgatgcgttgaacgatggcgcaggggcagtgtttgttggggctggggtttcgatggccgccggatacccgtcctggtcaaccttgctacaagagatcggcgacgaacttggcgtcagttcgaaaaatattcaggatctcgccgccctcgcccaatggagcatccaagaaagcggcggcgcaacgcgagtccgaaatgtgatcaaggagcatatcggagtagatcacccactcccggaagcactccagatcgtcgcgcggtttccggttcggcatatttggaccacaaactacgaccgattgattgaacgcgcgttcagggaaattgaccggccaatcgaccccgtttctgccgcgaaggacttggccctgaaggcgactcctggcgccactcggctttacaagatgcatggctctgtagacagactggatgatgtcgtcatttcaaccgacgactacgaactttttcggtcaagacgcggagcttacctgcccttacttcatgctcatctgacgagcatgtccatgctcttcattggccttagttttaccgatccaaatatcaggcatgtcctttcgctcatccgcgagagcttcactgacgccccacccgagcattttgccatcgtaaggccaccaaagcgggaagatttcgactcggacgatgagttccgtgctcgcattacgcaacataaactttgggccaaggatctacgacgctatggattagcggcggttgaaatagacgactatgacgaggtacccgatctgcttcgtcagatcgaacgccgtgttgcagcacgacgcgtatggatcagcggcagttggcctgtcgacactggtggcccagaagccgcgaacatttattccctagcggaagacattgggcgccggattggccatgcaggcctagatctcgtgagtggtgcaggcctcatagtcggctctgcggccatatccgggttcctagatgctttgaggtatggcgggggttgggatctcgatcgaaggctaattgcacgcccctttccccagcctattaccggagagcaagcgcctgatgcgcagtggaccgcgctgcgccgggaactcgcacgtcaagcggggattgttatattccttggtggagcgaaagcaaaggacgggaaactcatccccgcatccggagtgcttgaagaattctccctcgcagaggctgctggcgcgtttctactgcccattgctgtcacagggggtgctgccaaggagattgccgaccgactcttggggtcgtccttgcccgctacaggtgctaacgccacccgtccgacggatgctgaattacggctgctttctgatccagctgtcccacacgatgctcttgtcaaaaacatttttgatatcttgaagcgtattgccaagccggcctaa

SEQ ID NO: 18841 - DNA, 486 bp, Burkholderia gladioli BSR3
atgacgcgcaaggtcttctacagctttcattaccaacgcgatggatggcgtgcctccaaggttcgcaatatcggggtcgtcgaaggcaatccccctgctagcgacaacaaatgggaagaggtcctgcgcggcggcgatgctggtattcagcgctggatcgacgcgcagttggaaaaccggacctgcaccatcgtcctcatcggcgctgagactgcgaaccgccgttgggtgaaatacgaaatcgagaaatcttggaatagcggcaaaggcctgttcggcattcgtatttacaaaattctggaccacaaccagcaaacctcgatagccggagccaatccattcgatggattttctctgaaggatggacgcaagctatccaccctcgccaaagtctacgatcctccttacgcatccagtgctgatgtctacaactacgtcagcaagaatcttgctggttggattgaaactgccatcgcggatcgttaa

SEQ ID NO: 18842 - DNA, 582 bp, Burkholderia gladioli BSR3
atggccaagcgcgtatttttcagctttcactacaaggacgtcattgacttccgcgccaacgtcgtccgtaagcattgggtgttgaaggatgatcgcgaagaggctggttacttcgatgcatccatttgggaagaagccaagaagcagaacgagattggcttgaagcgactaatcaacggggccctagagggcacctcgacaacctgcgttctgatcggcagcagcacctatgcacgcccatgggtacgctacgaaatcatccggagtatctatcgtggcaaccgcgtgttcggagtgcacatcaaccagatcaaaggaaaagatcaactgataaaaaccaacgggcccaaccctttcgactacctggcgttgaagtacagcgatgacggcacaaaggtcgaagtgtttgaggccgtgaacggtaagtgggttacctacacgaaatttccaaactacacgctgaagaaaactgcatccgcgcagaggtggggtaagctgttcaagctttcgagtcttggctgcaaaatatattgctggtcgactgacgatgggtataacaatttcgctacttgggttggctaa

SEQ ID NO: 18843 - DNA, 468 bp, Burkholderia gladioli BSR3
atggcagaacaaagaaacgtattcatcagtcacgtccatgaggacgatgccgggctgcagaagttcaaagatctgctggctccaaaaggaattgacgttcgagattcctcgatccatacggggaaattcaataacgcgaccgacgagcactacatcaagacgcagatcctggcgccggcgattaactgggccggcgtgtttgtctgctacgtctccccacgcacgaaggacagtgaatgggtgaactgggagatcgaatatgcagccaagcagggcaagcgtatcgttggcgtttgggagcatggcgaaaaagagtgcgaccttccggaagcattgaagcagtacgccgatgctatggtgggctggaatggcgatgccattatcgatgcgatcaacggcaaggatacgtgggaaaagccggatggtggcccttgcgaaccggtcccccttaagcggcatccctgctga

SEQ ID NO: 18844 - DNA, 558 bp, Burkholderia gladioli BSR3
atgatccaatacataacgaaatcggaactacgtgacttcgcatcccagcttgcccctaacgagcgggcgaatctgagaaaatccgcatcgtctcgagaccttacaggctccacgttcctgtcacattcgagcaaggacgacgatctagtagttggtgcaatcagggtcctcgaaggccatggcgcacgagtctacgtcgatgaaatcgaccccgagatgcccccttataccagtgaggaaacagcagcactacttcggaaacgaatccatcagaccagccgcttcgtgcttcttgctagcaagaacagtaaagacagcagatgggttccttgggagctaggtattgccgatggcgacaagggactcgaacgtttagccctgtttcctgcattggacagttcctacgataacgattgggcatcgtgggagtacctaggcttatatcgacgcatcgtttggggaaacctagaagggtataaggatcccgtttggatggtgcttgatgaaaaacggaacactgccatagcactacgtcgatggctcactgctgggtcttaa

SEQ ID NO: 18845 - DNA, 1143 bp, Burkholderia gladioli BSR3
atgtctgtgctgtaccagctagccgtgctcggtgagccatccgacgaacaagttaacgagcttgaacagatcgtcgcgcatgcagtgcagttgttcggattaaggcttggccacgaagtgggatgggaagtccgccctactacgttcaatcccgatcagcagaaatcgtccgcagccgttttctacggtgccgccaacgctccgcaagccaatgtggatcaactgctgaaacgcggaatccctatccttccagtggcctccgaaacagagcgcgtcactgaagaaattcccgaattgcttcgtccgctgaactgctttgcatacaacgcgggcggtgcgcagcgagtagcaaccgcgctgctggaatgtgcaggtctactccctcgccagcgtcgtgtatttgttagctatagaaggggggaggcacgcgaagccgcgctgcagcttttcgatgcgttctccgctcggctttttgatgtattcctcgatacgcacggcatcgcgcccgccgaggattttcaagcgatgctttggcatcggctctgcgactccgatgtacttgttatgctcgatactcccggctacttcgagagccggtggactagtgctgagtttggccgggcacttgccaaaggtatcagtgtgctacgtatcggctggccggactccactccatcggtacgcacagccacagccagccgtgcagaactgctaccagaagaagtgaatggggacacaggtcgcttggccgacaccgcgatcgaacgaatctgcctgcaactggaagccgttcgcagtcaaagtcaggcggtacgcagcgtcaatttggtcagcaatctgcgcaatgcggtcgaaacaatcggcgggagcgtagcgggcgtcggcttgaacaaagccgtctacatccagctaccggacggcaaggaagtcgtggtgtaccccactgtcggcgtgccgacttcgacgacactgcatgacgcgtcgatcaattcgccggatcgttcggttgctgttgtttttgaccacgttggactgcatcctcgttggctaggccatctggattggctcggcgatcacattcaaactgcgcgctgggtcaaggccagcgaagcgggttggcagttcgcagattgggaggcttga

SEQ ID NO: 18846 - DNA, 1146 bp, Staphylococcus aureus subsp. aureus 71193; identical to SEQ ID NO: 18629

SEQ ID NO: 18847 - DNA, 609 bp, Staphylococcus aureus subsp. aureus 71193; identical to SEQ ID NO: 18618

SEQ ID NO: 18848 - DNA, 1035 bp, Staphylococcus aureus subsp. aureus 71193; identical to SEQ ID NO: 18625

SEQ ID NO: 18849 - DNA, 1401 bp, Aggregatibacter actinomycetemcomitans ANH9381; identical to SEQ ID NO: 18603

SEQ ID NO: 18850 - DNA, 645 bp, Aggregatibacter actinomycetemcomitans ANH9381; identical to SEQ ID NO: 18605

SEQ ID NO: 18851 - DNA, 483 bp, Aggregatibacter actinomycetemcomitans ANH9381; identical to SEQ ID NO: 18604

SEQ ID NO: 18852 - DNA, 1503 bp, Bacillus cereus F837/76
atgacagttattgaaagagataaaaagaactttgtaaattcatatgtaagggccttaaataacggtagagctgcaatatttgctggcgcaggagtttcgattccatctggtggaatcagctggagtgatttacttagagaggaagctgagtccatagggttagacatatcgaaagaaaatgatttgatatcagttgctcaatatatctataatgagtcaggtactaagcaaactataactaaccttttaaagaataagattgctcgcgaaggaaaaataaataaaaatcatgaaataataagatcattgcccatacgaaaaatttggacgacaaactatgacgatttcttagaaaaggcatatttagatgccaataaagtgattgatgtaaaaaaatctattgaagatatggctactgaaatagatttttctgaaactactatttacaaaatgcatggtgatattggaatcccaagtagtacggtattacttaaagatgattatgaaatttatgataagaagaatgaactttttaccaagactcttcagacagatttacttagtaatacatttttgtttattggatttagttttgatgaccccaacttagaaaatattttatctaaagttcgaattatgttagagggtaacccccgtcgacactactgtttgttgaaaaagattagtgagaatgatcctgaatttgatcagtttgatgacccaaaagaaaaagctagggaactagaatatagaattaataaacaacgattaagagtagcagatttattaagatatggaattaaagcaatattggttgattcctatgatgagatgactcaattactagactcaattaaaagaaagtacatatcaactaaagtatttgtatctggagcatacgaaggagttgataattttctggggaaaaccggtgatgatgctttaaaacaagctgataagttttgtgagaaattaggggaagcactatttactgaaggctttgaaatatcatctggttttggtttgggagtgggtaggaatgtagtaactggtgttttaattcaagaatctcttttaaatcatacaagggtaggttctcagctggtaataagacctttcccaacacaacaaacggtacctgaaaaaagtgcataccgtgagaaaatattgtctgaatgtggtgtgacaatatgtgtttttggaaataaaaaagttagtgatagcaatgaattacaaaattctcctggtgttgaagaagaggcaagaattgctggagagttaggacaacttgttttatctataggttcaactggatacgttgcaaaaaaaatatgggaagatcagctaggaaagataacaactactttttctgagaacctgaaatttttagaaagctataataatcttaacaatccgaatcaaagtattgatcagcttattgatgatattttgattatcttaaaagaatataaaacaaaccctgagaagtttaaaagtgtataa

SEQ ID NO: 18853 - DNA, 621 bp, Bacillus cereus F837/76
atggggacaaacgtatttatttcatttcgttttagtgatggtaacgatttaaaggaagagctagaagaattatttgactcatcaactgaagtctttaatagatctgaaaatgaggacagaagtactatgagcgaagacacaatccagaaatacctatacgaaaaactgaaacaaacctctgttacaattgtattattaactcctaaagcggtttcctataagaaggatgtttttggatcatatgatgattggttatatgatgagttaagatattctttggaggatcgaaatgagaatcgtacaaacggtgtagttgctgtttacacaaatgaaagtaaagacttaatattaagtacaagctcacatacttgtagtgtttgtaatcaagaatcaaactgtgaggtaatactggattttgataatcttgtgagaaaaaatgtcctaaatgtcaaaactgcctataaatctaacccttgtaacaatttatttgatgaggataaagactcttatatttcactggtccatatagatgattttaagaaggattatgtgaaatatattgaagcggcaaaagaaaaacgtgacagaaaagatgaatttgaactagtaaaaaaaatgtaa

SEQ ID NO: 18854 - DNA, 1515 bp, Tistrella mobilis KA081020-065
atggaccgcgccaccttcgtcgaacgctggaccaagagcctggaactcggttccgctgccgccttcattggcgccgggctctcccagcgcgccggctacccgggctggcggcgtctgctccgtgacatcgcgaaggaactcggcctcgacatcgaggaggagcacgacctcgctgcggtggcgcaatacagcgtcaaccgcgcggtcgggaagcgaaaccagctcgcgcgcctcattgccgaggagttcccgcccaaggcggaagcgccggagcccttccgcatcctcgctcgattaccgctgcgacacgtctggacgacgaactacgacgccttaccggagacggcatggcggaacgagcgcaagctcctcgacgtcaagtcacgcaacgaggatcttggcatcgacaagccatgggcgcacaccgtcctctacaagatgcacggctcggtcgaccacccggccgacgtcgtcatcgccaaggacgactacgagctctaccggagcatgcggccggggttcctgcaggttctgaccggccacttggtcagcaagcagatcctcttcctcggcttcagcttcaccgatcccaacctcggccatttgttcggcagcatccgcgaggctttcaaggaaaacggacccgagcattacgcgatcgtccgcaagccagcgctcggcggcggcaagaacgccaagaagcggctcgagacggagctgatccgccatcggctctgggtcgaggacctgcagcgctatggaattcagtgcgtcgagatcgacgagtacgaggaggtcgacgacatcctgcgcgaggtcgagatgacgctcgcccgtcgcagcgtgatgatttccggcagctttcccgacgtgctcgatccggccgagctcgatcgccgccggcgcatcgaggctgtcgctcgcgggattggccggctggtcgccgagcgcagcaagcgcctagtgtccgggttcgggctcgtggtgggcagcgcgtcgatctccggggcgctcggcgtcgtcctgaaagaggatgcgcccaatctggagaagagcctgatgctgcggccgttcccgcaggaggcgccgcccgggatcaaggacgccgatttcaagcgtcgttaccgcgagggccttgtccagcaggccggcgtctgcattgtcatcgctggcgagaaggacgtccagaaaggcggtcgcgccgagcgcgtccttgccgatggcgttctcgatgaatgcgaggccgcgcggcggatcgggcgggccgtcgtcccggtcggcgccaccggcggcgcggccgccgaggtctggcggcagctcgacgccgagttcgacgaccattggcccaaggcgctgcgcaaggatttcgacctgctcaacgacccgaagcggtcgcctgaggatctcgtcgaggcggtcgggcgctttctcgaccatctcgacaaaccggcaccgcaagcttccccgaaacggaagaagggtaggtcgtcgtcggccaataaaggcgcgctttaa

SEQ ID NO: 18855 - DNA, 456 bp, Tistrella mobilis KA081020-065
gtgatcatcatggcaaggcgggtcttcttcagcttccattaccagcgcgatatctggcgcatcaaccagatccgtaatttgcacgagatcgtcggctgcgccgccgcgggctttcaggacgcctccttgtgggaggaggcgaagaagaagggtgacgccgagatcaagaagatgatcgatggagccttggagcggaccacggtcacggtggtgttcatcggggccaagacggctgggcggaaattcatcaactatgagatcgaaaagtcgattgcgcgcggcaatgggttggtgggcattcaaattcatcacttgaaagacaaggacgggaatacggacacgcctggggacacgccggccttgctcacgaagcacggggtgcccgtctacagatatgtggacggcgacaagctggcggctcgaattgaggaagccgccaaaaaggccggcaaatag

SEQ ID NO: 18856 - DNA, 621 bp, Tistrella mobilis KA081020-065
atggccatcctgagcgaaggggcgatccgggcgcgtgcccggcagcgtgcccagcgcgagggagtcagcgtcgacgaagcgctgcggcgcgtgtcgcgccggcaggccacgcggtacgatatctttctgtcgcagacgatccgtgacgccgaggttgtgctcggcgtctatgacctgctggtcgagatgggcttcgtcgtattctgcgactggctcgacgcgcccgaggcggaccgggcggaagtgacgccggcgaacgccgagttcatccgcagcgtgatgtcggtcagcgacaccctgctgtttctcgacaccgcgaatgccgaccagtcgctttggatgtgctgggagctcggctggttcgatggcgcgaaagggcacgtggcggtgctcccggtgctacccgagggccagggctactaccgtggtcgcgagttcctgggcctctacccgtacgtggaaatcgacgcggaaggccaccttaaggtggtgcgtccggctgccgtcaacagccagggcatgatgctgttcgagtcccccaattcgcggagcttcgaacgctggcgcgagggcacccctgccttcatgcgtccgaagatcatcgagcactggcggctctag

SEQ ID NO: 18857 - DNA, 858 bp, Tistrella mobilis KA081020-065
atgccgatcttcataagccacagccagaaggaccgggcgttcgtcgacacgctcgcggccaatctcgtgcagaacaagcaccatatctggatggatcgctgggaattgaaggtcggcgactctctgctcgacaaagtgcaatcggcgctgaccgattcgagcgccatcctcgtcgttctgtcgaagaattcggtcgaatccgcttggtgcaaacgggagttgaacgcgggcttgatgcgtgagcttgaggaacgaaagacgcttctcatgccgtgcgtcatcgacgactgcacgattccgcttttcctgcgcgacaaggtctatgccgatttccgcgccaacccggacgaggcgctcgaacaggtgaaccgcgccttggcaggcatctcgaacccgctgcaggggcgatcggagacgcctcgcttcaacacggactggtcgctcgactggaagagcatcgacgatacccacatcatggaatggacattcgtcgatcatggccacgattggccttacgtaatcctcagccagtgcgtaattgtctgcaacgaagaagccagccggcgcttcgctcaagccatggcgcgggacgaagaagacatcttcatgcgcgacgtgctggctctgctcgtcgcctccctcccgccggacggcttgaccgtaagaatcgaggacgcgcgcgagcggggtgtttcggcccagctttcccggcccggcggagaagcctttgcggtgcgcttctcctaccgccggctgggccaggacaacggcttcgataccgtcgtctacctcgacaacaacctgaagatcgcgctggagcatatgaccaacgtgacgcgccagcctgccgggccttaa

SEQ ID NO: 18858 - DNA, 1455 bp, Serratia sp. SCBI
atgtttaaccgtaatatagaactgtttattcgggattacgttaatgatatcaaagccggcagcgctgcgctatttgccggcgctgggctgtcaatacccgccggcttcgtcagctggaaagagctcataagcgatatcgcttatgaactggggctggatatcgaaaaagagagcgatcttatttctctggcacaatatcacctcaatgaaaaaggcaacagacataagataaatcaaaaaataattacagaattcgctgaacaagcagaagaaacagaaaaccaccgaattatcgccagattaccgatagcgtcactttggaccactaactacgacgacctgattgaaaaaacctatgcccgttataatcgcgtatgcgacgttaaaaccacaccggaaagcctgaccaacaacattcacaaacgtgatgttgtcttatataaaatgcatggtgactatagaaatcccaaccaggcgattatcactcgcgaacaatacgaaacttactcccgtacacatcttccttttatcaacatgctgatggcggagctgactgccaaaaccttcctgtttatcggtttcagctttgaagaccccaacctgcaatatgtattgagccgcctttacgcgcagtacggcgaagggcagagaaaccactactgcgtcatgcggcgcgtccagctcggcgacaacggcagcgaggagaaggcgtcttgcgattacaacagccgcaaacaaggcttgatgattaacgatctgcgccgttacggcattcaaacgctgttggtggatgactatcggcaaatcaccgacctgctgtatgccatcgaaacgcagttcaagaaaagcacggtgtttatctccggcagcgccgacaactaccagccctatgcccgtgaagagtccatccagttcatacatcgtctggcgcgcctgcttatccgcaaacagtatcgcatcgtcaacggtttcgactggggcgtaggcacggcggtgatcaacggcgccttggaagccatttacgacagccagggaaaaatcagcgaaagccagctggtgctgcgtcctttcccccaattcgccagcggcggcattaccctaccggtactttggcacgaataccgtcagaacatgatttcgctcagcggcatcgcaatctttttgttcggcaacaaacgcaacgccgaaggcgaatacgtgctggccgacggtttattgaaagagttccagatcgccacggaacaaggctgcgtctgcattcctatcggttgtaccggcagcgcatctgccgagatctaccgaaaaatcaaggaggagatgaaagaaaccctctactaccgcaaccccgccgccatgaatctgctggatcagcttaacgaaccgggcagcctggcggagaagaaaaaaagcctgttggcgcttatcgatatcattactaaggataacccccgatga

SEQ ID NO: 18859 - DNA, 492 bp, Serratia sp. SCBI
atgaccagaaaatgtttttacagtttccattatgagccggacaactggcgcgcttctcaggtacgcgaaatgggctcgctggaaggtaaccgaccagccacggataacgattgggaggaagtgaaaaaaggcggtgacgccgctatcgccgcttggatcaagggccagttggacaatcgcagctgcgccgtgattctcgccggtaaagataccgctaatcgcaaatggattaatttcgagatctgcgaggcttggaaaaaaggcatgggcgtgctggtggtgtatatacacaatttgaaagacagcgccggcgaccaaaccacgaaaggtaaaaaccctttggattacatcaagctgggtgacgcaaagctttccacaatcgccaaagcctatgatccgccttacctgaccagcaccaatgtctataaccacatcaaagaaaatctggctgagtgggtagaagaagcgatccgcattcgcaaaaactactga

SEQ ID NO: 18860 - DNA, 1431 bp, Rhodanobacter denitrificans
gtggccggattcagcagggaaattgaagcgttcatcaaagatttcgttggccagattgccaacggtacaggagcaatctttgcgggggcgggcatgtcccgcggtgcagggtacgttgactggaaggaactccttcatgacatcgcagaggagctcggacttgagctgcagcttgagcatgacctcatcgcagttgcccagtatcactacaacttaaaaaagggcccggcgggcctcgtccgaaaaatcatcgaggagttttctcaccaggcagaggagaccgagtcgcatcgcatccttgcgcgcttgccgatcccgacatggtggacgaccaactacgacgcactcattgagaaagcactcgaacgggcatttcgcatcgcagatgtgaagttcaacgtcgaccagttgagcaatacgcggccacgccgggacgctgtcatttacaagatgcacggagacgcttcggatcctaagaaggcgattctctacaagtcgcaatacgagcagtaccacaagacccacgaaggcttcatcacggcacttcgcggcgatctggttaccaagacgttcctgttcatcggcttcagttttactgatcctaacctcgattacgtcctgagccggctgccagcagagccctctcgcgagcactactgctttgtgcgtaaggtcgtggctgaagagggtgagtcggaggcctcggtcaattaccgtacacgtcgcgagaagcttcgcaatgacgaccttcaccggtatggcatcaccgctcttgaggttgatgagtacgaggacattccacgcatcctcgccgccatcgaagagcgctatcggatgaagacggtttttatctccgggagtgcacacgaattcggggactgggccatggaggaggcccaaggacttctgcaccgtctgtcagccgccctgatcaggggtggctatcgcgtgatcacggggttcgggtggggcgtcggaagcgctgtcatcaatggcgcattagaaaccatctacctcgaaccggcgaagtacagcgaagaccagctagtcatgcgcccattcccgcagtttgccagcaacggaaaagatcttccggttttgtgggacagctatcgccgccgcatgattgccctcgcgggaaccgcgattttcgtcttcggtaacaaggtcgtggacgggaaggtggtcaaggcaggtggagtgcgtgccgaatatgacatcgcccgcgagctgggcgtcgtcccgcttccgattgcggccacaggatttgtcgcggcggatcttgccggcgacgtgctcgccgacgtggcgcacgtctacggtcaacgcgggtggatagcggactcggtcaaagagcttgaggcagccggcaaagacgccgaggccctgattggcgttgttttgaaattcatggagaggataggcaaatga

SEQ ID NO: 18861 - DNA, 477 bp, Rhodanobacter denitrificans
atgagcaagccagacgtgttttacagctttcatttcgacaacgacgtgatgcgcgtgcagatgattcgcaacatgggggtggtcaccggggatgagccggtcgagccgaatgtctgggagactctcaaaaagacggacagcggcgtggaggcgtggatcgaaaaaaacatgaaaaataaggatgtagtcatcgtcctcatcggtgcggcgactgccggtagaaaatgggttaagtacgaaatgaagcgcgcgtgggagctgggaaagccgatcttcggcatccatatccacaacctcaagtccatgaacgatggcgcgagcacgaaaggctcaaatccgtttgatgcctttaatttcagccacaacggtgtcgtaatcaagcccctcgtatacgacccgaaatcgtcggatgcctacaacgacatcaaggacaatatcgagagctggatcgcagctgccaagcgtcaacgcatctga

SEQ ID NO: 18862 - DNA, 1437 bp, Enterococcus faecium DO; identical to SEQ ID NO: 18577

SEQ ID NO: 18863 - DNA, 486 bp, Enterococcus faecium DO; identical to SEQ ID NO: 18578

SEQ ID NO: 18864 - DNA, 852 bp, Enterococcus faecium DO; identical to SEQ ID NO: 18579

SEQ ID NO: 18865 - DNA, 1332 bp, Pseudomonas putida DOT-T1E
gtgaactggccggagttgatgcgtgaggtcgcggaggaggtagggctgtccgtcgacaaagagcacgacctggtgaccttggcccagttccatgtgaacgagcgtagcgggtctggaggcttggccaggcgtatcatcgaggagttctccgagcatgcagaaccctccagatcccacgacattctggcgcgcctgcctatccgcacgtactggacaactaactacgatcagttgatcgaaaacacgctgaagaagcatcagcgggttccggacgtgaagcatcaggtgtcagacctgctgagtactcgacccaagcgggacgcagtcgtctacaagatgcatggcgatgcgctgtctccgacgcaggcgatcctctacaagtcgcagtacgagcagtactacaagacacacgaggccttcgtcacagccctgagcggtgacctgatttccaagactttcctctttattggattcagcttcaccgatccaaacctggattacgtactgagccgtttgcacgtgccgccgcatgctcgtcgtgaacacttctgctttctgcgccgggagccttccacgccgtacgaaaaagaagacgctgacgcagtgcggtaccgtcagcgcaagcaggaactccacattcaggatctgaagcgcttcggcatccagaccctcttggtagaaaactactccgacatccccgaaatcctgcgggcgatcgaagaacagttcctgaaaaagaccattttcatttccggcagcgctgaagagtacggtgactgggaaaagaatgacgctctgaatttgattcactccctgtcgtcgagcctggtgaaggccggctaccgcgtggtgaatggtttcggctggggtgtgggtagcgcggtcatcaacggtgcgctagacgcaatctacgcaaacccggagaagctgtctgaggatcagctagtaatgaggccgtttccgcaggtcgcctcacaggggcaggatctgggtgttctgtggcaccagtatcgtcagcggatgatcgggttgtcgggtatttcgctatttgtcttcggtaacaaactcggcaaagacggtatcgaaaatgccggcggcgtggaaaaagaattcgatatcgcggtcgagcagggcgtcgtacctgtaccgatcggtgcgacgggctacatggccaaagcgctcgctgagaaagtgattgccgatacagcgaaatatgcgcccgatgatctgtggctggccgaggagctgacgaagctcagtgacctttcgctcggtgccaaaggcatcgaaaggacggtgctggccattatcaaaaaattggaaggggcataa

SEQ ID NO: 18866 - DNA, 402 bp, Pseudomonas putida DOT-T1E
atgggcgcaatggaaatcatcgccaatcatggtggtgtgccgtacatcgatgaggtagatccggcgatgcctaagcacacttcggaagaaactgctgatctcctgaagtcccgtattaccgaatgcaaaaggttcgtgttgctcaccagtcccaacagcaaagacagtcgctgggtgccttgggagttgggggttgcagatggtaagaagggcgttaaccgcattgctatctttgcggcctcggacaatgtcgatgatgacaagtggtcgtcctgggaatacatggggctttatccccgaatcgtgtggggcaggttgcaaggctatcccaatgagctctggatggtttatacagaaaaaacgaactcagctgtgacattgcgctcatggttagccagttga

SEQ ID NO: 18867 - DNA, 534 bp, Pseudomonas putida DOT-T1E
atggcgttcattaccaaggatcaagcgcgtgcggctgcacgacgcggtgaggatatcttcggccaagtcgcgggaatggagtcctttgaaggcgagcgattcgatattttcctgtcccactccatcaaagatcgagagctcgtctacggggtcaaggtgctactggaggaaatgcactacagcgtgtatgtcgattgggtagatgatgagcaattggatcgtgaacgcgtggacagggaaaccgccgagaagctgcgtcagcgcatgcgcagctgctccagcttgatttacatcgcgaccgagcagtcgagtacctccagatggatgccttgggagcttggctactttgacggttacaagccgggtgcagtagcagtcttcccattggtggataccgaaagatcgacctttcatgggcaggaatatctcggtctctaccctgcagtcgattggcacgattcaaatccgtacgttgatggtgttcccgaggggcgcgctgacttgtgggcgttcgtcaacgatacatctcgctaa

SEQ ID NO: 18868 - DNA, 849 bp, Pseudomonas putida DOT-T1E
atgtatatcggtttagaggttgagcactataaatcttttgagatgatcagcgattcagcgattgatgcctaccgtgaaaaggctcgggaagctaccgtaggcgaagtagccaaatacgtgatcggccagatcgacaaaaaagatattatcgatgcgaaggaactcgcccggaagatatttcctcagcagcacgcgcatgtatttctttctcattcccaccgggacgagcgggaggcaattgagtttgcactttccctggaaaagcggggggtcaaggttttcgtggactcctgtgtgtggggttacgtgggcgatctgttgtgggagatcaatgcgcattactcagagaaaaaggaggtgggtagcttcactaacttttcctatgataaatgcaatgaggcagcggcttctctgtatctgatgttgaacgaagagctgcacaggatgattgatgcctgcgagtgcttcattttcttcaacacgaagaactcggtcaggatcaaaggccatgaagggtttgcagagggcgatcgtaccctgtcaccctggatttattccgaactcgccttcagcgccaagacgcgttatcaccaacttacacgcaagcgattgcccagaggcatcgtcgagtcgatggagtcgcaccgagaattggcagttgcatcggcttcatttgcgtttgaggtgatcaacttgcacctccccaagatgagcggcgaagagttgaaatccttggcaaggaagtctcctcatgagtcggagttctggcttgattcgctgtattacgaatataaccttgaaagtaagttcaaggatcaatgcagggcttcgcggctgcaaagtacatag

SEQ ID NO: 18869 - DNA, 1452 bp, Staphylococcus aureus 08BA02176; identical to SEQ ID NO: 18653

SEQ ID NO: 18870 - DNA, 609 bp, Staphylococcus aureus 08BA02176; identical to SEQ ID NO: 18624

SEQ ID NO: 18871 - DNA, 1035 bp, Staphylococcus aureus 08BA02176; identical to SEQ ID NO: 18625

SEQ ID NO: 18872 - DNA, 1656 bp, Rhodococcus opacus PD630
atgtcgaggccattcccgttggaacgctggagtgatggcttgttccgtgcgacggtcgctggacgggactcagccccaccgagcaagcatgggacagacggataccatacgttgcgggatgcgggatcaatgaaagagagcagagaaccctccgagccaaccggaggcaattctggacatgtcttcgtggttcgaggtcggatcgagcttgttgcctgggacgccgtcatcgttcccacgagcaacctattctggccgcgagagatttggtggcccgccctaggaatcacgcggttcgacgcatcagcagtgtcaggtgcagggcgtgttcggtcgtttgcaaccgatgatggtcgtcctgcttggctgctcgacgttgcacgatacaagaacagctctgtcggatggttgatcgacggactgtgcgcagctctgagtgcgattgctgctcatcgtccgactccgggaggcggccgagtgaagccattggtagctctcccgactctcggtgttggccagggtgggtacggtggtgtccgcggggaagtagtccaaacgttgctcgccacgaccggagcattcgccgcagagaatgatatcgacgtcgtctttgtcgtggccgatgcggccgactacgcagcgtttcagtctctccgccgtgagcgagcgcaaacaggtgccacggagacgttgatcgacgatctcgctacgaagatcagacgaggagaagtttcgctcctacttggggcgggcgtgagcattccggcgggactcccgacctggagccaactcctcggcacgctaaaggcggaaatgctgcaggatatatcgcacgacgatttcgaaagcctgagtgtgcttgatcgtgcacaacttctgtctaagtcggcgtcaccggggactctgggtgagcgtgtcgcgaaggtcgcgggagcggcattgcgaccgacactggcacactgtctgctggcatcgctaaagactgcgaaggtcgtgacgacgaactatgacaccctctatgaggatgcattcaaggccgcccatggtgacgacgctatatcggtacttccgcgcgaggacgcggacgccgaacggtcatgggtattgaagatgcatggagacgtggcggaccccgccagcatcgtcttgagccggcgggatttcgtgcggtatgacgcagagcggcgtccactcgggtcgattgttcagtccctcatggcaaccggccacttgttggtgataggtgcgtcgatgaccgatgacaatgtactcagactggcacacgaggtgctagcgctaaatgaacgcaacaatcgacatcgcacgttgggcacagttatcacattgcgcagcgacgagattcgaagcgctttatggcgacacgatttcgactatgtcggtgtttcgacctcgctcgacgacgccacagctgcccgtgatctcgagatctttctcgaccgtattgccatgtccgctagcgacgaggcgcccttcctgttggatgcgcgttatcgcgagctcctcgatgacgaggaggttgacttagccgctacgctgcgagcgtccgcccagaaagtacgtgcactatcgagtaaaggccgtgatcggtggcgtatgctcgagacgattcttgagggactaggggccggccagtag

SEQ ID NO: 18873 - DNA, 1134 bp, Rhodococcus opacus PD630
atgacaataagtgaacagcccgcagggttctggagctacgtccacgccgacaacgatgcggaggatggacgagttcttcgactgtgcgagcgaattgaggcggagtactccctcatcacaggcaacgaaatccacatgttcgtggacagggacgacatctcatggggcggccgatggcgagagaccatcgacgatgcactcgcggcgaccaccttcttcattccgatcgtcaccgcccggtatctcaagaggcccgagtgccggcgcgaactgattcagtttgcacagcacgccgaaaggcgtggggtcaaggaactgttgcttccgatcctgtacacagtggtcccgaacttgaaggaagattcagacgatgaggtgaacgccattgtcgcctcaacgcagtacgaggactggaccgctctgcgactggaagacgagcagggcccgctctaccgagcggctgtcaacaagctcgccctccgactcgccgaaatcgcggatacgatctccgagcggccggaagtgctgaccgccgtcgctgaagacgcggcactcacggaggaagtcagcgacgatgcacccggccttctcgacgacatggccgaggttgaagtgctgtttcccacatggacgaagacgatcgagacgctgtcttcggaaatcacagaaatcggtgatctcttcaccgactacgcaccgaagcttggaaccgccggacggtcctccggggccgcagccaaattggccgtcgctcgacgactggcaagcgaactggacccaatggctgatcgcatcctcgataccgccactgagtacgccgatcaggcgctccggatggatagcgcgatctctggaatcctgctcaacatcgccgacgatttctcgaacgtgggagacgacggcgagttcgagaaattcgccgaaggaattcgaggcctgcgagatggcggcgagaaggcagtccagggcttggacggaatgaacgacagcgcccaacgcgccggatccatgagtcgagacctgaggaagcctctcgcgaagatctcacgcgcgctccagcgcttcatggacggccagggcctcttcgatgaatgggttcggcggatcgacgctatcgaagccgcgcgaggatag

SEQ ID NO: 18874 - DNA, 1455 bp, Serratia marcescens WW4; identical to SEQ ID NO: 18722

SEQ ID NO: 18875 - DNA, 492 bp, Serratia marcescens WW4; identical to SEQ ID NO: 18723

SEQ ID NO: 18876 - DNA, 924 bp, Pseudomonas mandelii JR-1
gtgaaaatgcagccattcatcactgcgctcagtggtgatttgattgcgaagaccttcctgttcttgggcttcagttttaccgaccccaaccttgactacatcttgagccgggtgcgtatccagtacggaaaacaccagcgccagcactactgcattctccgaaaggtcagccaggaaaaggacgaggagcaggctgatttcgagtatcgcgaacgcaaggaagagctattcaagcaggagctgcttcgttttgggatcaaagccatctatgtcgacgatttccctcagatcacggatatcttgcgggagattgaacatcgtcataagcgcaagaccatcttcatatcaggtgctgcccacgactacagcccctggacagaggccgaatccgaacagttcgtctacaagctgagcaaggccatcagcaaagaacagtatcgcgtaatctccgggttcggtctgggcattggcagcgcggtgattacaggcgtcgtcgaacaaaccatcatgaacgggcatcgtctggacagcgatcaactcatcttgaggccctttccgcaaagccaatccggtgagcgtcctttgaaagagctgtggacggaatatcgccgggacatgctcgctcatgcgggcatcgccctcttcctctttggcaacaagctcgaaaaggatggcgaggtagtaccgtcgaatggcatgcgcgaggagttcgatatcgcggtggcaaatggcgtttttgtcattccgatagggatcaccggctcgatctcggcagacctctggaaagaggtcattaagacgtatgacgaaacgaagtacgagcatggaaaaaacatcactcccctgctccacgaattgggcagtaaaggcacagacctcgcgcgcgcccacgacatcatcctccaactgctgcccctcatttaa

SEQ ID NO: 18877 - DNA, 441 bp, Pseudomonas mandelii JR-1
atggcaagaaaggttttcttcagcttccagtacgaagacgtacagcgcgcgatgaacgtgcgcaacagcaacgtcatcgcctccgacgacaaggtaggctttatcgacaaggccgagttcgaagaggtcgagcgcaagggcgaagcggccatcaagaaatggatcaatgatcaactgtacggcacgagcgtcaccgttgtgctggtgggggcaacgacggacaaaagcaaatgggtgaaatatgagattgagcaaagcattgagcgaggcaatggcatcctgaccatcgatatcagcagcatttcggacttcaatggcaacccaaccacttgctgtgcgcttcgtgtacctggtgcaccccattacctatggaagaacaacggtcgcgaagacctcggcaaatggattgagaccgccgcgaaggcagcgggcaagccataa

SEQ ID NO: 18878 - DNA, 498 bp, Pseudomonas mandelii JR-1
atgccgattcgccaatcagatttgctcagcacaagtttcaatcgttcagctcaaggccaaatcggcccacgttcagggcaacctaccgctttcctgagccatagccaccaggatgctccgctcgccttgggtttgcaggaaatgctcaagagacaaggatgggacgtctacatcgactggcaggaccaggcgatgcctgcgacaccggacggtgaaacggctttcaacatcaaggtcgcaattgtcaaagcggactggttcctatttctcgccacacaaaactcgatggtgtcccgttggtgcccttgggaaatcggctttgctgatggtaagaaagcccatgaccgcatcgcgattatccccacctcagacagccggggccagttttacggcaacgagtatctgagcctttacaacaagattgacgtgcccagtaacggtcttggcctcgccctgttcgacacacggggcaatggtacttgggtgcgcaacctttaa

SEQ ID NO: 18879 - DNA, 828 bp, Pseudomonas mandelii JR-1
atgtatctaggctttgaaatcgaacactacgagccgacaaatcacttccgtaattatcgtatcgaccgttatgtagatgacgctgagactcgaattgacgacctcgcacgattcctcatcggcacctacaaccgccgtagtttattggatgccgaagcactggcggcggcaatttttccagaagcgcattacgacgtttttctttctcattcgcatgccgatcaacgtaacgctatcgacttcgcgttggcactgggaaaccgcggcctgaaggtattcgttgactcgaccgtttgggggttttatggcgatcttgtgaggaaaatcatcgaccagacgagtccacacaatgacgaaacgaaagcagagcacatccaccgtatccatgccgatgtccacatgatgctggcaggtgccctgcaccgcacgattgccagggctgagacattcgtttttgtgcgctctaaagagtctgttcctttaaattttggcgacaaagcaagaaccctgtcaccctggatctactccgagctacagttcagcttccaagtccagcatgccactccgaagcgaatacaagacaggatacaaggcgcgactctggacgacgtcaaagggttcaacaacatgagccttgagagcatgcaacatctcatggcgtttagggccttcaacgaccacttgcctcctgtccgtggcagcgacctacgtgaatggctcgttgagctgccggcaagcattcaaggcaatggcatgctggacttgctctacagtcgattcgacctgcctggacaataccgtcgtcgcagggagtcactgaagctttaa

SEQ ID NO: 18880 - DNA, 312 bp, Aeromonas hydrophila ML09-119
atgataggcctttctggcattgcattgtttctattcggcaacaagcttaacgaggacagcaatgtcatcaatgctggaggtgtgcgtaaagaatttgagatcgcccaaggtacaggagtcgctgtacttccaattggcgtaacaggctatatggctaaagagttggctgaggagatgctgagagaaccagggaaaagctttactcagtatccttggctggaaaaggaagtagccagacttttagacccagcaattgatagaactaaaatcaaccaggatattctttctattttgaagaaattaggaggttag

SEQ ID NO: 18881 - DNA, 468 bp, Aeromonas hydrophila ML09-119
atgaaaaggaaggttttctacagttttcattttgataatgatgttatgcgagtgcagcagatccgcaacatgggtctgctggaaggtgatgaacctgttagtgctaatacttgggaggagattaagcgttctgaacaaggggttaagaactggatcaacaaaaatatagaaggtaaatcctgcctggttgtgcttatcgggagccaaacagctaatcgaccttgggttaagtacgagattgaaagagcctggagccaagggaaggccgtagtgggtatttatatccatcgacttaattgccctcgtaatggatatgacaagaaaggagctaatccattcgataaattcactttcaagcgtggcgataaagtaattacaccactggtttatgaacccaactacaacgatgcttataacgatatcaagaataatttggcaacttggatagaaaatgcaataaagcaataa

SEQ ID NO: 18882 - DNA, 1440 bp, Lactobacillus plantarum ZJ316
ttgccagtaaatattgatgagtttgttaatgaatacgttgacagtcttagatgtggggaagctgggctttttgttggtgcagggctttctcttgcttctggtatgccaagttggaagaaattattacagaagcctgctgaatcaataggcatgaacgttgataaagaagaagacttagttactttggcacaatattatgtgaatgaaagtcatgatgctcggactaaaataaatacggaacttaaaagtcaattcggttgtttatctaagataaatgacaatcaaaaaattatagcacagttaccgatagatacaatttggacaacaaattatgacaatttgttagaaaaagcgtttgaggataatgacaagatttgtgatgtgaaaaggagtaaagatgattttacctcttctcctaaaaatagtagtgtgacattttataagatgcatggtgatatttcaaatgttaatgaagcagtaattactaggcgtcaatatgaggaatatgatagaaattttgaattatatgttactgcattaaaaagtgatttagtaagaaaaacttttctttttattggttacagttttcaagatccaaacttaaaatacattttatcccaattaagattgttgttaggaaataaccccagagaacattactttcttataaagaagcctgaaaaatattctggggaaagtacagaaaattttgaatatagagttaataaacaaaggcttcagatagaagatcttgaacaatactgtataaaagctgttgaagtagataattatgaacaaataacaactgttttagaagagataaaatcaaaagtaaaacaaaatcatgtatttttatctagtgcgcaagtggctgatcaaggaattagtcaagaaaatctaaaaaaattactgacaactttgagttataagttaattcaaaataataatgtgattgttaatggttatgggtggcatgctggaaatgccattgttaagggagctcttatggccataatggaagatccatcaaaaagtattgatgaatatttaaaaatctccccttttcctcaacctgataagggtatgagtagagagagtatggggaaagagtggacaaaaattagacaagaaatgcttgataactctggaattgctatttttatatctggaaataaaaatgatcagggtaaaactattttatcaagtggcatgttagaagaatttcaaatagcccaacaaaaaaatgtaattcctatacctattggatatacaggtggggcaagccaggagatatttagcaaaattaatgaaggctatgaatcttattatgggaataacaatgctttaatagaaggtgccaaaaaactatcaaaaacaggactcaaaaataaggaaaccattgatacagtcctttcaatgatatgcaatattcaaaagtag

SEQ ID NO: 18883 - DNA, 630 bp, Lactobacillus plantarum ZJ316
atggcacataaaacctttatttcttacaaatattcagaagcaagagatttacgtgataaaatcatttcgcatttaggtgaagatgctcaatattataaaggggaaacggcagattctcctgatttaactgacgaaaagacagattcgattcggaagtatttaaaagatatgatttatgacacaagtgtaatgatagttattatttctcctaatatgaaatatagtaattggatagattgggaaatagaatatgctcttaaaaatataaaacatggcgatcagacatctcatagtaacggtattttagggattatcatgaataatccaaatgaaaattggtttagatatgaagaaaaaaaacctgacggagacaattgttatgcatataatacggattacgtttatgaaattataaacgataaccggtttaatcagaatccaaaagagtatagttgtgaagtttgcaagacagtagactcattaacagggtcatatatatcttttattacagaagatgatttcttttctgactctaataaatatatagataatgcatttgataaaagtcagaaaattgataattacgatattaaaaagtatgtgaatgaagaccacatagcaacactatag

SEQ ID NO: 18884 - DNA, 1455 bp, Serratia plymuthica 4Rx13
atgttctcgcgcgatatagagttgtttattcgtgattatgttaatgacatcaaagcgggctccgccgctctgtttgccggcgccggtttatccatccctgctggtttcgtcagttggaaagagcttatcagcgatatcgcctacgagctggaactggatattgagaaagaaagcgatcttatttcactggcacaatttcatctcaatgaaaaaggtaatcggcataaaatcaatcagaagattgtcaccgagtttgccgaacaggcgcaggaaacggaaaatcatcgagcgatcgcccgattacccatttcgtcgctttggaccaccaactacgacgatcttttcgaaaaaacctatgcccgttataaccgcgtatgcgatatcaaaaccacacccatcggcctgaccaacaatattcacaaacgtgatgtagttttatacaagatgcatggtgattacagaacgcctaacgaagccattatcacccggcagcaatatgaagcctatcctcgctctcacgcgccatttatcaatatgctgatggcggaactcaccgccaagacctttctgtttatcggattcagtttcgaagatcccaacctgcaatacgtccttagccgtctctatatgcaacatggtgaggggaacagaaaccattattgcgtcatgcgcagggttcaactcggcgataacggcagtgaggatcaggccgcatgcgattacaacagccgcaagcaaacgctgatgatcaacgatctgcgccgttacggcatccaaacgctgctggtagatgattatcaagacataactcgcctgctgttggccatcgaaactcagttcaagaaaagcaccgtattcatttcaggcagcgctgaaagctacgcaccttatacgcgtgaagaatccattcaatgcctgcaccgcctggcgggccagcttatccgcaaacagttccgtatcgttaacggttttggctggggcatagggacggcggtgatcaatggtgcgctggaagctatctatggaagccagggaaaaataaccgaaagccaactcatcctgcgcccctttccacagtttgccagcggcggcacagcgctgcctgaactctggcatgagtaccgtcagcgcatgatctcactcagcggcattgccgtctttttattcggcaacaaaaaagacgctcagggtgcattgaccgatgccgatggcctgctgaaagagttcgccatcgccaacgaacaaggttgcatctgcattccggtcggctgcaccggctacgtatccgccgttctctatcaaatcatcaaggaggaaatgaccgacaccttttatcaccgcaatcccgctgccatggcgctgctggaccagctcaatgagccgggaaagttggcagagaagaaaacgcgcctgttggaactcatcgatatcattgccaaggagaatccctcatga

SEQ ID NO: 18885 - DNA, 492 bp, Serratia plymuthica 4Rx13
atgaccagaagatgcttttacagtttccactaccagcccgacaactggcgcgtttcgcaagtgcgcagcataggcagcctggaaggtaacccgccagccagggataacgactgggaggaggtcacaaaaggcggtgacgccgctattgccgactggatccaaactcaactgaccaaccgtagctgcattattgttctagccggtgaagacacggcaaatcgcaaatggatcaatcacgagatttgcgaagcctggaaaaaaggtatgggggtgttggtggtctacatccacaacctgaaggacagcaccggcaagcaggcagctaaaggtaataacccgttggattacatcaagctgggcgagaacaagctctctgcgatcgctaaagcctacgatccaccctactcaacaagcaccaaagtctacgagtacatcgaagaaaacctggccgattgggtggaggaggctattcgcatccgcaatgactactaa

SEQ ID NO: 18886 - DNA, 1395 bp, Psychrobacter sp. G
atgaaaaagaatgttttagttaagaagctagtgaaagaattatcagctaataatttggcgattttcgcaggagcaggactctcagttggagcaggttatattgactggaaaggtttattgaaagaattagctgaagaaattgacctagacgtcgatagagaagaacatgatctagtctctttagctcaatactatataaatgaaaaaggtggtagtaaacatacaattaatgaacttattcttaacgaattttctcaaaaagctattctgactgacaatcataaaatattagcaagactcccgatagatactttctggacaacaaattatgatcctatgattgagaaagcacttgaggactctggaaaaatagttgatgtaaaacataacactgaccaactacctaattctattagaggtagagatgccgtagtctacaagatgcacggtgatgcttctgattcaactaatgcagtacttacaaaagatgattatgagcaatacaatctaaaccgaaatgggttctttaccgcgctcaaaggggacttgataacaaagaaattcttatttatagggtttagcttctctgatcctaatatcgattatatcctgagccgtgtacgcctatcacatggcaacaataagccagaacattattgcattctaaaacatgtagtaaagattgataatgaagagcaagctgattttgaatatagacaacgtaaacaacagttattcataggtgatcttaagcgatttggtatacaaacagtactaattgaaaaatacgaagaaattactgagatattactagaagttgaaaaagttcaaaagcaaaaaactatttttatctctggtgctgctgaagattatgcaccttattctcaactggaagtagaagtttttgtttcttctttaacgcaagaaattttgaagctcggctatagagttgtaactggttttgggcttggtattggtagctctgtaatctctggtgcagtgaaatacttattagagaatcgtttaaaaataaatgaagatcatctagtccttcgaccctttcctcaaaatgcagaaggaaaacagttgtggacagcatatcgaaaagacatgattagctatgctggtatatcaatttttctttttggtaataagcttaatgaaaatggtgaattagttttatctaatggaatacaggaagagtttgatatttcaaacaataacagtaattttctgctaccggttggtggaactggatatatagcagaaaaactttggaaagacttaactgaagactcaagaaatgaaagtttggatatattatcgccagatataaatgacctaaacacattaaaacaaaatatattaaaaatattgaaggagatacaaaagtga

SEQ ID NO: 18887 - DNA, 477 bp, Psychrobacter sp. G
gtgactaggaaagtattctatagtttccattatgacaatgatgtattccgtgtacagcaaattagaaatatcggcatattagaaggaaatcctcctactactgctaaccaatgggaacatctgaaacagaaaggtgaaaaagcagttcaaaagtggattgacgataatattcatgggaaaagttgcttgattgtactgattggtgaggagacagcatcacgtaagtgggttcaatatgaaattgtaaaagcttggaatgacggaaaaggagttcttggcatttacgtgcataacttgaaagacccaaatactggtataggaaaaaaaggtttaaatccttttgacaaaataaagttagataatggagaaaagctttcaaagtatgtgaggtgcttcaatccaagttcaaataatacatatagtaatatagcgagcaaaattgatggcttaattgaagaagctattaatttaagataa

SEQ ID NO: 18888 - DNA, 780 bp, Psychrobacter sp. G
atgtatagaagtatagaggtcacagactttcatctttttaatccacctgaaaatattagtgattttgatgtaatgttatataaatctcgaaaaaaagaagctttaaatgacttaaaggattatttactaattgatggtagtagtttagatggtagtgaaatacaaaaatatttattccctgatgacgacgttgatatatttttatctcactcgcatagtgatgctgatgaagctataaaactagcaattgctttggaaagtaaaggtttgaaagttttcattgattcatgcatttggggcaatgcgtttgatttattaaaagttatagatgaccagtattgtcgtaatttcgacgatagtatgtatgactataataagagaaatcattcaacatctcatgcatatatgatgctgaatactgctttacataaaatgatagatagatgtgagatttttctattcttaggtacaccgaactctatatcagtaaaacatggtattgaaaatcaagaatcgttaaaatcaccatggattttttcggagcttgcttttatacaacatgttcgtagaaagagttcgttaaagtctacatctctaacagaaagtttagaaagcagagaaaaaatggcaatggactcgctagaagttcattacgataaacctagactagattataaaattgaaagttatgtgttggaaaatctattagcaggatactactcaggaagtaaactggtattgcaacatttatataatcatttaagtagcagatttaattag

SEQ ID NO: 18889 - DNA, 1437 bp, Clostridium beijerinckii ATCC 35702; identical to SEQ ID NO: 18808

SEQ ID NO: 18890 - DNA, 690 bp, Clostridium beijerinckii ATCC 35702; identical to SEQ ID NO: 18809

SEQ ID NO: 18891 - DNA, 609 bp, Clostridium beijerinckii ATCC 35702; identical to SEQ ID NO: 18810

SEQ ID NO: 18892 - DNA, 501 bp, Clostridium beijerinckii ATCC 35702; identical to SEQ ID NO: 18811

SEQ ID NO: 18893 - DNA, 1194 bp, Clostridium beijerinckii ATCC 35702; identical to SEQ ID NO: 18812

SEQ ID NO: 18894 - DNA, 1443 bp, Pandoraea sp. RB-44
atggccaaccaggaaattgagctgttcatcaaggattttcttaaggaaatccgggaagacaatgccgctatttttgcgggagcaggactctctgcggccgctggctttgtgaattggcgcgaactacttcgcccgatagctgatgagctgcgccttgatatagacagggagactgacctcgttgcagtggcgcagtaccactgcaacgaaaacgccggcaaccgacatcgcctgaatcagtcgatcatcgatcagctgactttcggtgctacacccacggcaaaccatagaattttggcccgcctacccatcagcacctattggacaaccaattacgatcaattgattgagtccgctttgagggaggcgggaaagattccggacgtcaagtacacaacggaacagcttgccaccactaaggctaggcgcgacgctgtcgtgtacaagatgcacggcgatgttgagcaccctcatgacgccgtcttgattaaggatgactacgagaagtaccacatcaagcgtggcccgttcatcaatgcgcttgccggtgatttggtgtcaaagacattcctgtttatcggcttcagttttactgatcctaatcttgactacgtgctgagtcgggtccgggtgacgttccgtgagaatcagcgtcggcattactgcatcttcaaaacaaggacacggcaggatggcgaaagcgacgccgagttcgaaaatgctcagatcaagcagcggttggcaatcgaagacctcaagcgatttaacatcaaaaccttgctgattgatgagtacgcgcagatcacagaaatcctggcacgaatcgagcgccagcaccgaaagaaaacgatttttatctctggcagcgcggaagagtatggtgcttggacgaaacaggccgctgaggaattcctgcgtgatttgagccgtgcgctggtgcagcaaggctaccgtgttgcaacaggtgttggcctgggtgttggtgacgccatcatcacgggagcgatcgaagaggtgtaccgcgcccgaacaggccacatagaagattcgttgattgtgcgaccatttccacgagccaaccctgacgaagctgtgcgtcagcgtctttgggaagagtaccgtcaagagttgatttctgctgctggcatttgcctcatcgttcttggcaacaagcgtgttgacaatcagatcgtgcctgccgggggcagccgcagggagttcgaaatcgcctgtcagcacggcttgagcgtcgttccaattggtgcaaccggctatatggccaatgagatttggaccgaaatgtcgtcggtgcttgacacgcattacccagatgcaaaggcagacctgcgcgaaaaattcagcagacttggcgaggcagtagaaaaacctgccgaactcatttctcgcacgctggaatttattggattaatcaccaaggagtaa

SEQ ID NO: 18895 - DNA, 492 bp, Pandoraea sp. RB-44
atggctcgacgtgtatttttcagtttccattttgagcgagatgtctggcgcgcaggccaagtgcgcaacagctgggttacgaagacagacagagagtcggcgggtttctgggatgctgccgattgggaggaagtcaagaaaaagggggatgccgcgatcaagaagtggatcgacaagcagttggacggaacatcggttacagcagttcttataggagcggaaacctcggagcgcgagtacgtcggatacgaaatatcggaaagccacaaacgcggaaacggattactcggaatctacatcaataaggtgaaggattcctcgagcaagactgacaccaaagggaagaatccattcgataactggtacatcacggaaaatggtcggcggcgttacttctccgagatgtataagacttacgattgggccgatgatgacggctacaacaacctttccaagtgggtagaggcggccgcgaaagctgctggtcgttaa

SEQ ID NO: 18896 - DNA, 762 bp, Pandoraea sp. RB-44
atgtatcgagggttcaacctggatattgccgaggtcgatctgtccaagtggttcgacattggcaaccggatgcacaaaaacaacaaggcgcaagtagagagaaagctcgaatcttttaaggacaacaacggcaatcttctagcatctcggatcatagccagttggtttccacccgttgaggcagacgtgttcctgtcacactcgcatcgcgatgccaagcaagtcattggactttctggatggttgttacaagagctcggcctgacttcctttatcgactcttgcatttggggatattcggaagacctactgcggattatcgacaaagagtattgctatagaccaacgacaaatacatatagctacgaaaaacgaaatcgatctacaagtcatgttcacatgatgctctcaacggcattggccaagatgatcaacggctgcgaatgcatcatcttcgtgaacacgccccaatcgatctccccagcagaatacattgaagacgatgacaccacgaactcgccgtggatttattccgagatcgccatgaccagcttggtacagaagcgaactcccgccgaacatcgaggcattatgattaaggcgagaatggcgctcgatgaggcagttaagcccctcaatatccggtatccggtggatatgatgcatctgacacccatgtcggttgataacttgaatacttgggcggaacttggaaagcgaaaatcggaggccttagatgcactatacggcattatggtgtaa

SEQ ID NO: 18897 - DNA, 723 bp, Mycoplasma capricolum subsp. capripneumoniae 87001
atgaaacgagtaagtaagcaagaaaacgaaacaaacgaggattttgggtataggcttgtaaaacaaaacttacaaattcaagatctaagacgttatggaatatttacttgtcttgttgatgagtatgataaaataacagaaattttacaaactcttgtagacatgtacaaaagaaaaacaatttttatttctggtagtgctgataaatattatggttttagaaatgaaaatgatgccaaattatttcttcatacattagcatacaagttagcagaaaataattatcacatagttaatggatatggtaaaggaattggagatttcttgctttctggaataacagagttttgtttgaaaaataataagaaaatctcagatcatttaactgttgctccatttccacaaaataaaatttcaaaagcaaatatagaagaactttatataaaaaatagagaacaaatgatagaaaaatgtggtattgctatttttgtttttggaaataaagataacaataacgcagaaggaataataaaagaatatcaattaacaaatcaaaaaaagttaattccaattcctataaaaattacaggtggtagtgcaaagcaaatttttgatttagaatattcaaatgatattgatgaaattaaaaatgctattgagaaagcaaatagtgaaactacagataacataaacaaaattgtagaaaatattctagagtcataa

SEQ ID NO: 18898 - DNA, 471 bp, Mycoplasma capricolum subsp. capripneumoniae 87001
atggcgagaaaaagttttttcagctttcactatgataatgatgtttgaagggtaaatgtagttagaaatagctgagttattagaggtaagaaaaaagcggggtttatagataaggctgaatttgaaaaaaccaaacttgaaaatgagttagcaattaaaaaatgaattgataaacagttaatgggaactagtgttacagttgctctcattggtagtgaaacattaaatagaaaatttgtacaatatgaaatacaagaaagtataaagagaaaaaatggtattattggaattagcattggtagaataaaaaaccaaaatagacttacaagtatttctcaaagtccatatacaatagtgaatgaatataggtttattgatatctgtgacggtttttatgattatgttctagatgatggctattcaaatatggggaaatgaatagaacaagcagcaaaaaagaaaggaaaataa

SEQ ID NO: 18899 - DNA, 1425 bp, Pseudomonas monteilii SB3078
atgaagtttaacggtgaaatcaatagctttatccgagatttcgttaaagatctcagtgaaaataatgcggccatcttcgcaggagcagggctgtctaagtcctcagggtacgtaaattggaaggagctgttaacagatatcgcggaggaattggagcttaaaattgatcttgaaagtgatctgatttctcttgctcagtatcatgttaacaagaccaaaggccccgcgaagctgactcgaaaaatcgtagaagaattttcacaccaagcggagccttcggagaaccataaaattctggcgcgccttcctatcaggacgttctggactacaaactacgatactttgatcgaggattcgctcaagcaggcgtataaggttgcggatgttaagcataagctaagtcagctcaacattaccaggcccaagcgcgatgcagtggtttataagatgcatggttgcgtatcggacgccacccatgccattctctacaaaaaccagtacgaaacttatcatcgtgattacgctccttttgtaactgctctaagtggtgacttagtttccaaaactttcctatttataggcttcagtttctctgatcctaatctggactatgtgttaagccgccttcatacatctactatcaaaacgcactactgttttgtaaagcgcgaagatgctgagcctggtgatgatgaggaaatgcatcaatataaacggcgtaaacaagagtttcgtgtggaagatttgcggcgctatggtattcagccaattatggttgataaatactcggatataactgagattttgcgtgagattgaacggcgctacctcaagaaaactgtttttatttctgggagcgctgaggtctacggcgagtgggggcgagataaatcattaaaattcatccatgcgctagcttctgagctagtactaaaagatcgtcgagtcgtgaacggatttggctggggtgtcggtagtgcggtaattaatggcgctctagatgcgatttacaaatatccggagaaatactctgaggaccagctggttatgcggccattcccgcaatttccgagcgcgggtcaagatttaaagcagttgtgggaggagtatcgtcagcggatgataggtctgtcaggagtgagtattttcatttttggcaataagattgataacgaacagcttgtcatcgctaatggtgttgtccgggaggctgaaattgcgattgagcagggtcgaatagtcattccggtggccgcgacaggattcgctgctgcggaagtttacaacctgatcaaggccaagccggagctatatgatgctcacaaatggcttttagttgttattgatgaacttgccgatcctgcgttgtcctgcgaggaaatcgtcaagaaaattgctgatgctatcgttaaactggataagtag

SEQ ID NO: 18900 - DNA, 492 bp, Pseudomonas monteilii SB3078
atggctcgtaagtgcttctttagttttcattatgttcccgacaattggcgcgcaagcaccattcgccagattggtgcaatcgagggtaaccaaccggcgctggacaacgattgggaaactgtgaccaaaggtggcgatgctgcaatccagaaatggatcgactctcagatggagggacgtacgtgtgccgttatcttgattggcgaaaatacggccaagcgcaagtggattgactacgaaatcaaaaaagcgtggaagaacggcatgggggtgctcggcatccacattcatggcatcaaaaactcggcggggaacacgtccctgaaaggggcgaatccgtttgctcacctgagcctaggggataaggtattttcgtctgtggttaaagtctacgatccgcaagggctagacagtaaggcaaagtacaactatatctccgacaatattgatgcttggatcgaagaagccatcaagattcgtaagagtaattaa

SEQ ID NO: 18901 - DNA, 411 bp, Pseudomonas monteilii SB3078
atttttctatctcatagtcataaagaccacacgttggccttgggctttgcgcagctcctgcaagatgcgggctgccgagtttatatcgattggctggatggtgagatgcctgaacgaccgaacaaagaaacagcggcccggattcagctcaagattaaggaaaacgattactttgtttaccttgcgaccgaaaactcctccaagtcacgctggtgcccttgggaaataggctatgcagacggtgtcaagatcacggaccgcattgtcattgcgcctactcgcgacagatcggccacatatggccaggagtacctcggcctttatcgacatatagatttggcctctgatggtcagttggctgtatttgatccgaacatgagtaatgggcggtacgcgaaaactatttggtaa

SEQ ID NO: 18902 - DNA, 1425 bp, Pseudomonas monteilii SB3101; identical to SEQ ID NO: 18899

SEQ ID NO: 18903 - DNA, 492 bp, Pseudomonas monteilii SB3101; identical to SEQ ID NO: 18900

SEQ ID NO: 18904 - DNA, 411 bp, Pseudomonas monteilii SB3101; identical to SEQ ID NO: 18901

SEQ ID NO: 18905 - DNA, 1263 bp, Aggregatibacter actinomycetemcomitans HK1651
atgaatttagatatagacaaagaagaaagcaatctagtctctttggctcagtattatgtcaatagtaaatgtggtaaacgttcaaaaatcaaccaactcattttagatgagttttcccagagtgctacattgacagaaaatcataaaatattagctagacttcccatagatactttctggacaaccaattatgactctatgatagaaacagcattaaaagaagctgggaaagttgtggatgtaaagcactgcgtagaacaacttccaatatcaattcataaaagagatgttgttgtatataaaatgcatggcgatgcttctctgccaaatcaaactgttcttatcaaggacgattatgagaaatttcatttaacaagaaatgacttttttaatgctttgcgtggagatctattaacaaaaagatttttatttttagggtttagcttttcagatcctaatattgattatattctgagtcggattagagcgtcatatagtgaaaatcaaaaagagcatttttgtattttaagaaaagtccaaaagaatgagaatgaaccacaagatgaatttgaatacagacaacggaagcaacaattttttatttcagatttagagcgagtaggaattagtgcgttattaattgatgattattcagaaattacagaaatattgatggaaatagaacaagctcaaaaacgtaaaactatttttatctcaggggcagcagaaaattattctccttattctcagcaagaagttgaacaatttgtttcttctctttctcaagagattttaaaactagggtatcgtattgttacaggttttggattaggaataggtagctcagttatttcaggcgcaataaaacatcttacggaacaaaatttaaaaatagatgaggactatttgatacttcgcccattccctcagaataaagaagggaaagaattgtggtctgcttggcgtgaagatatgatttcttatgctggtatctctatatttctattcggaaataaattacagaatggaaatttgattttatcaaatggtatgcaggaggaatttgatatttccaaaaggaatggaaatgttttaatccctgttgctgctactggatatatggcaaaacaactctgggataatgagatgaataaagagtctgctaaggaggttgaaaatgaaatgcaagcactatctaaagaaaatatttcgctagatgaattaagatctaatattttgtcaattttaaaaaaggttaaataa

SEQ ID NO: 18906 - DNA, 645 bp, Aggregatibacter actinomycetemcomitans HK1651
atgggaaataaaatttttatttcgtataaatattctgacaatgctgttaaacaacttaaagaacccaataatttgttttcattctatagtcaatataaaacaactgctcgtgattatgttgatattattcaaaataaatttgagcgtgatgatattcatatcaataaaggggaaaatgataatgaaagtcttgccggctttaaaacggagactattcgttcaaaattagcagaaaagatttttgatagttccgttaccattgttcttatctcccccaatataaaaaattcttggaaatcagagaaagatcaatgtataccttgggaaattgcttattcactaagaagtaagcgacgtccagataaccgaagcaagcgtaatgcaattttattggtcgttctacctgatagatatggttattatgattacgtaaattcatatggcttttattttgatattattcaaagaaacttgaataacctgcatacaccatatactacatataaactaaggaatggttgttctaattcatatatgcttcaatgtaactgggataagtttatctctaatccgaatgcttggattgaagctgcaatagaaattagagataaaggaaataattataatattgtaataagaccataa

SEQ ID NO: 18907 - DNA, 483 bp, Aggregatibacter actinomycetemcomitans HK1651; identical to SEQ ID NO: 18604

SEQ ID NO: 18908 - DNA, 1401 bp, Aggregatibacter actinomycetemcomitans HK1651
atgaataaaaaacaattgataaaagaattagttaacgagttatctgcaaataacctagccatcttcgctggtgcagggttatctgtttcagctggttttgtagattggaagatattgcttcgtgatttagcagatgagatgaatttagatatagacaaagaagaaagcaatctagtctctttggctcagtattatgtcaatagtaaatgtggtaaacgttcaaaaatcaaccaactcattttagatgagttttcccagagtgctacattgacagaaaatcataaaatattagctagacttcccatagatactttctggacaaccaattatgactctatgatagaaacagcattaaaagaagctgggaaagttgtggatgtaaagcactgcgtagaacaacttccaatatcaattcataaaagagatgttgttgtatataaaatgcatggcgatgcttctctgccaaatcaaactgttcttatcaaggacgattatgagaaatttcatttaacaagaaatgacttttttaatgctttgcgtggagatctattaacaaaaagatttttatttttagggtttagcttttctgatcctaatattgattatattctgagtcggattagagcgtcatatagtgaaaatcaaaaagagcatttttgtattttaagaaaagtccaaaagaatgagaatgaaccacaagatgaatttgaatacagacaacggaagcaacaattttttatttcagatttagagcgagtaggaattagtgcgttattaattgatgattattcagaaattacagaaatattgatggaaatagaacaagctcaaaaacgtaaaactatttttatctcaggggcagcagaaaattattctccttattctcagcaagaagttgaacaatttgtttcttctctttctcaagagattttaaaactagggtatcgtattgttacaggttttggattaggaataggtagctcagttatttcaggcgcaataaaacatcttacggaacaaaatttaaaaatagatgaggactatttgatacttcgcccattccctcagaataaagaagggaaagaattgtggtctgcttggcgtgaagatatgatttcttatgctggtatctctatatttctattcggaaataaattacagaatggaaatttgattttatcaaatggtatgcaggaggaatttgatatttccaaaaggaatggaaatgttttaatccctgttgctgctactgggtatatggcaaaacaactctgggataatgagatgaataaagagtttgctaaggaggttgaaaatgaaatgcaagcactatctaaagaaaatatttcgctagatgaattaagatctaatattttgtcaattttaaaaaaggttaaataa

SEQ ID NO: 18909 - DNA, 645 bp, Aggregatibacter actinomycetemcomitans HK1651; identical to SEQ ID NO: 18605

SEQ ID NO: 18910 - DNA, 483 bp, Aggregatibacter actinomycetemcomitans HK1651; identical to SEQ ID NO: 18604

SEQ ID NO: 18911 - DNA, 1437 bp, Yersinia frederiksenii Y225
atggatttaaataaacaggcatttttaagagatgtaggcaaagagctttctgaagaaaatgtggcagtttttgcaggggcgggaatgtccgttagttcaggattcgtgaattgggctgaactacttcgcccaatagctgacgaactcggtttagatgtcgacaaagaaagtgacttggtggcattagcacagtttcattgcaacgataacgcgaataatagaagtcatctaaaccaaaggcttatagatgagttttcacgaaagactcaggaaacggaaaatcataaaatactatgtcggcttccagtgcgtacttattggactacgaattatgataagataattgagactgctcttgataattctggaaaaatagctgatgtaaaatatacaaaagagcacttgtctacaactaagctaaaacgtgacgcgattgtgtataaaatgcatggtgatgtcgagcacgcgagccaagctgttttaaccaaagatgactatgagagatatcatgttaagatggatcaatacttagcaaatttaaaaggcgatctcatttcaaaaattttcatatttattggcttcagttttactgatcctaacttggattatattctcagtcgagttagaattgcctatgaaggtaatcaacgaagacattattgttttataaaaaatattgagcaagaaaccagtgaggattttgttgatttcgagtatcgaaagagaaaacaagattactttgtgaaagacttgggaagattcaatataaaaacgatacttgttgatgccttttctgaaatcacagacttgttgaggcggttagagaaaaactataaaagtaaaactatttttatttctggcgcagctcatgaatatggacatatgggggaacgtaacgctttagaatttgtatataaattgagtcgaactttagtttccaaaaatatgcgtgttgtttccgggtttggtttaggggtaggaagttccgtaatctccggagtcttagagcagacattcactagtccgaaagcaaaaatagaagaccagcttgtattacgaccgttccctcagtcgactgagggcaaattatctctatcagttttgtggacaaaatatagagaagacatgattagccatgctggcattgcattatttctatttggaaacaagttaagtgaaaataatatttctctatctaatggtatgcgtgaggaatacgaaattgccaaaagaaaaggtctgtttttgatcccagtaggagctacaggatatatggcagaacagttatggttggagcaaaatatagaggtgcagaatagtcctaatgtttcaagtgaaatgaagaaactctttgcaaagcttggtgatagtgacactagtgcagcggatataatcgatgtggtaatgggtgtgattaaactgatggatagagaatag

SEQ ID NO: 18912 - DNA, 483 bp, Yersinia frederiksenii Y225
atggctagaaaacccgtgtttttcagtttccattatggaaacgatgttatgcgtgtccaacaagtacgaaacataggctcacttgaaggaaatactccagtttctgctaatgactgggaaacagtaaagcgtggtggtgactcatctatcaagcggtggattgacgaaaacatgaagtataagcaatgtatcattgttctcgtaggtgaggaaacagccaatcgtccatgggtcaagtatgaaattgagaaagcatggagtgatggtaaacctatttttggtatatatattcacaatcttaaatgtccacgtacagggaatagccgaaggggcaaaaatccctttgatcagttcacgcttaataacggtgtgaaactatcaagtatggtaagttgccatgaccccctatcatatgatgcttacaatgatatttcgcgtaatatggaaacatgggttaacgcagctgtagctcaaagaagatga

SEQ ID NO: 18913 - DNA, 1083 bp, Yersinia frederiksenii Y225
atggttttgccttttgattatgacaataatactattctcaatttattcaaggagttatacccatttcaatggagagaccttattcaacgatatgaactgtataatagtaaagatcgtcaccttcagagtataggtaagaaaaaacggtattatcatgatgaaccagaatcattttttttcaatctagataaagttaaacatttagtttcttctggtcagcgagctaaacataagcaatcattcgatttatataaaagtcgagaagcatatgaaaaattagcttcgaaccgaagtcgaaaaataaaaatccatattgaaaaaatcaacactgaaaacaaattagctcaaaacgttgaaccgctctatatagatgtgtttatttctgcttatcataagcgaggggtgacaactaaagataaaatagagatatttaatgaattaataaaatttaattgtacaaaaacaattgattttcttcaaaaaattaacgactgtgagcacaatgatcaagttagaaaaatggcttttaaacatttgcaaaaaataggggtgtttgttaggcttaggagaaatcatcagggtaaaataaaatcatttactaaagagcatgataactttaatgtgacaccaagagatttgttcgaacgaatagaagcaaattccattcaaaacaaaaaaacatacgatatttttatttctcactgttttcttgactcagacttagttctaaaattaaaatctcaccttaatgaacataatttaacagtatattgtgattggacaagtgataatgattttttaaagagaagtttggctggtaaatacactgagattgtattaaaaaaacggattgagcaatccaacgtagttctttttttaaaaacagataactcgatgaattacaatggtaaaatcctatctaaatgggttgaaatggagatggagtttgcaaaaaaaataacaaaaccagtatgttgtcttaacctgaatggtggggaaagtccttttgaatcaatcccatttgatatgaagaatggagtgttatttttatcagagtttgatatagacaagtttcgcatataa

SEQ ID NO: 18914 - DNA, 1419 bp, Paenibacillus odorifer
atgtttaaaactgctattgaggagtctaatgcggctgtatttgctggcgcaggattgtctaaacctgcgggatttgtgaactggaaggatctgcttcgagatatcgctgaagaaatcaatttaaatatcgataaagaaagtgatcttatagcagtagcgcagtaccatgttaatgagaatggtggaaacagagggaaaataaatcaagcattaattgacgaatttacaaaggatgccgaaatcaccgaaaatcataagatattatcaaggctgcctatagatacatattggacaaccaattatgatgctctgatcgaggatgccttaaaagccgaagggaaaaggatcgactcaaaaataactacggaaaacttagcggtaacaaaaccgaatagtgatgccaagatttataaaatgcatggggatatttcattacctcatgaagccgttttaactaaagatgattacgaaaattacaacaacaagcggcagctatttactacggctcttcaaggcgacctcgtttcaaaaacaatgttgtttattggatttagttttgatgatcccaatttggaatatattttgagtcgcataagaatccttttgggtcagaatcaacgcacccattactgctttatgaagcaagtgcagcgagatgattttaaggaagaatcggattttttatatgctgagataaagcagaagttaaaagtgaatgatctgaaaagatacagcattaaagtgcttctagtaagtcaatatgaggatattacggctatactcaaggaagtggaacagcaatataagagaagaaatttattcgtatccggtagtgcttctaactatggaaattggggagagcagcgctgcttagagttcgcaagtaacctcagtaaaaaaataatccaaaacgggaacaatattgtaactggttttggtctcggagttggcagttgtgtaatctcgggtgcgttggaagaaatctataaaacgagaagtcagcgggttgaagaccgtctgatttcgagaccatttcctcaaaatacgactggtcaaatccctataaaggaattatggactaaacacagaaataacatgattcaaaacgttgggatttccatttttatgtttggtaataaaattgatgcttcatcaggtgctgtaatagaagcaaatggcataattgaagagttcgaaataagcgtgaatcacggcgcaatacccattcccattggtgcgaccgactttactgctagaaaaatatgggggactgttataagtgattttggccgctatgttccccaggctgggctagaagataaatatcaattactgggcgatgtgaatcagactgacgaagcattgattaacactgtaattgaaattgtgaatatgcttgaaaaaagaaaaaggcaataa

SEQ ID NO: 18915 - DNA, 645 bp, Paenibacillus odorifer
atggcacgtaaaacattcatttcttataagtacagcgaagctcaacatacaagagatcgaataattaaggctcttggcacagatgctcgttattatcaaggtgaaaccagtacttcacctaatttgacggacagaaagacagaaaccattaaaaatcatcttaagagcatgatttttgatacttcggtaactattgttgttatctctccaaatatgaagcagagtaactggattgactgggagattgaatactctttgaaggagattactagggaagacagaacgtcaagaagtaatggcattgtaggtgtaatccaaaaagattattattttggtgggtatgggtggattcttagttcagttacaaattctgatggctgcaagtcaagaagcattgatgaaagtaagttatatgagattatcatcaagaatcgtacaaaccaaaaaaatcccgtatatgcttgcctgaattgccaaagtgtagattctctaaatggctcgtatatctccttggtaactgaagatgattttgtcgcaagtccagatacgtatctcgaaaatgcgtatgagaagagtaaacggattaatgatttcgaaattacaaaaacgattaaaactcaacaaaattggttgtcaccgtggtga

SEQ ID NO: 18916 - DNA, 705 bp, Paenibacillus odorifer
atggctagatgtacagctccagtaaacggacatcgctcagcaagtgccgcagccaactgcccagcgtgcagagggcgttatggccgctatggtagtggtggcggctacaattcgtactcgccctcatcttactcctcgtccttgacaagtggagggggtcgaagcagcggcggcggttccgtccgcagttcaaaaccacgctggtcaggagtaggttcgtccatattgtacacttctgaagaaattcggtcattaacaccaatccgcaacagcgtcgaaactctagcaaaacaacctgaccttcgagacgtcttcctttgccatgcatgggatgaccggaagggagccgccaaggagttgcacgatctgcttgagtcacacggtgtctccgtctggtttagcgagaaagacgttagcctcggtgtgccgttgcttcgcgctatcgacaaaggcttggccaactcgcgagttggaattgtgcttgtgacccctgcactgctacgccgcctcccagcagagggcatcgccgacaaagaactttcggcactcctggcaggtgatcggctcgttccgattgtgcatgatacaacgtatgaagctctccgcgatgtcagtcccttgctcggatcacgaagcggcttgaacactgcagaagagccaatggcagacgtcgcggccaagctcgcagagttagtcgccctttaa

SEQ ID NO: 18917 - DNA, 1443 bp, Cellulophaga baltica NN016038
atgaaatttagtaacgaaatagaagtatttataaatgactatgtaaaggatttaaatgaaggaactgcttccatttttgcaggtgctggactttctattcctgctggttttgtgaattggtcagaattaatgagtgaaattgctcaagatttaggtttggatattaatcaagagaaagactttgtttcgattgctcaatatcacgtaaatgaaaatcttactcggtcaaaacttaatagaaaaattttagaggaatttactgaagattcagaagaaacagaaaatcatagagttattgctcgcttgcctgtttcatctgtttggacgacaaattatgatgagctaattgaaaaaacatatttaaaagaaaataaggttgttgatgtgaaatacagaaataatcaattattgactacaaagccaaaaagagatttagtaatttataaaatgcacggagatgttaatcatccagaccaagcaattttaacaaagcaagagtatgaacaatatcatcaaacacacgaaccattcataaatgctttaagtggcgaattaacaactaaaacattcttgtttataggttttagttttacagacccaaatcttgattatgtcctaagtcgattgaatttcagattcagtaaacacaaaagacaacatttttgttttattaaaaaacacgaattaggagattccataaatccagaccaagctactttagactataacaacagaagacaatcgcttactatgaatgatttaaaacgatatggcataaaatctttacttatagacaaatacagcgacattacagatgttttaaaagaaatagaaaataggtataaaaaaagaacaatttttatttccggaagtgcagaaacgtacgaaccacataatagagacaacgctattggatttgtgcataatttatcgaagataattattgaaagtgattttagaattgtcaacggatttggctggggaataggaagttcagtaattaatggtgcattagaatcaatccatagcaatcctaataaatactctgagagccaactaatattgaaaccattccctcaatttgaaacaggttctaaagacttaaaagagttatgggccgattacagagaaaaaatgatttctcaatgtggaatttctttttttgtatttggtaataagttagctggtgataaaatcgttgaagccgccggtgtaataagtgaatttgaaattgctcacaaaaatgggtgtatttgtattcctgttggattaaccaaatatgcttctaaaactatatgcaacatcattgcagacgaaccagaaaaattttacaaaaaaccagatttaatgatgccgattcttatggaattagctgatgaaaacacaacatttactcaagccatcaaaataatcaaagggttattaaagactttaaaaatataa

SEQ ID NO: 18918 - DNA, 612 bp, Cellulophaga baltica NN016038
atggctagagaaacatttatcgcttacaagtatagcgaggcacaagatttaagagatgaaataattgaaaagctaggtgcagacgcaagttactatcaaggagaaacggctgaatcgcctgatatgacaggagaaactattgatagaattaaaaatgggctaaaaaatatgatttttggtacatccgttaccattgtaattatttcaccaaatcttaaacaaagcgcatgggttgattgggaaattgaatactctttaaaggagtataaaaggcaaacaataacatctaggacaaatggcatagttggtgtaattatgaagtataatggaagttatgattggctaattggtcgtagtcaaaattcggatggatgtacgactagatacatagatgactcgaaattatacaatatagtgaaaggcaatagatataacttagaaactgatgataagtactcctgcccaaactgtaaatcatttgaccagttaaatggttcatatatagcattagtagaagaagagagttttttaaataacccttctcactacatagaaaacgcatacgacaaaagtaaagcgacaggaaactacaatttaaccaagaaaagatag

SEQ ID NO: 18919 - DNA, 1437 bp, Yersinia kristensenii; identical to SEQ ID NO: 18911

SEQ ID NO: 18920 - DNA, 483 bp, Yersinia kristensenii; identical to SEQ ID NO: 18912

SEQ ID NO: 18921 - DNA, 1083 bp, Yersinia kristensenii; identical to SEQ ID NO: 18913

SEQ ID NO: 18922 - DNA, 1332 bp, Pseudomonas plecoglossicida
gtgaactggccggagctgatgcgcgaggtggccgaagaggtagggttgtcagtcgacaaagagcacgacctcgtggccctcgcccagttccatgtgaacgagcgcagcggctcgggtggcttggctcgtcgtattatcgaagagttttctgagcatgcggaaccgtcaacttcgcatcagatcctggcgcggttgcccattcgtacctactggacaaccaactacgaccaactgattgaggactccctgaggaagcatcagcgtgtaccggatgtgaagcacaagattgatgacttgttgaccacccggcccaagcgtgatgctgtggtttacaagatgcacggtgacgcgttgtccccgacccaagcgatcctctacaaatcacagtacgagcagtactacaagacccacgaagcctttgtgacggctttgagcggcgatctgatctccaaaacgttccttttcatcgggttcagtttcacggatccgaaccttgactacgtgctcagtcgcttgcacgtgccgcagcatgctcgccgtgagcatttctgcttcctgcgtcgcgagccttccagcctgtatgagaacgaagacgaagaagcggctcggtaccgccggcgtaagcaggaactgcacatccaggatctgaaacgcttcggcattcagacgctgctggtggacgaatacgccgatatcccagcgatcctgcgcgccatcgaagagcaattcttgaagaaaaccatcttcatttccggcagcgccgaggagtatggcgactggaaaaaggatgaagcactggatttcattcactccctctcatccagtttggtgaagcatggttatcgggtggtgaacggcttcggctggggggtgggcagcgctgtgatcaacggtgctctggatgcaatctactccaaccctgagaagttctcagaagaccagcttgtgatgaggcccttcccgcaggttgcttcccaggggcaggacctgaaagtgctatggcagcaataccgtgagcggatgatcgcactctcaggcatcgcgcttttcgtcttcggcaacaagactgaaggcggggagatcgtgagcgcgcctggtgtggagcgagagttcgacattgctgtgcgccagggggttgttccggtgccgatcggtgctacggggtacaaggccaaggagcttgcagagaaggtcatggctgatccggccaagtacgctcctgatgatcagtggctggctgaaagccttaagaatctgaacgatccggctgccggtgcgaaatccatcgaagctgcagtgctcaccatcatcaagaagctggaaggggtataa

SEQ ID NO: 18923 - DNA, 477 bp, Pseudomonas plecoglossicida; identical to SEQ ID NO: 18732

SEQ ID NO: 18924 - DNA, 552 bp, Pseudomonas plecoglossicida; identical to SEQ ID NO: 18734

SEQ ID NO: 18925 - DNA, 1443 bp, Geobacter sulfurreducens
atggccaaccgagaagttgaactgttcatcaaggattttctgaaggaaatccgggaagacaatgccgccatttttgcgggagcaggactctctgcgtccgctggctttgtgaattggcgcgaattacttcgcccgatagctgacgagctgcgccttgacatagacagagagactgatctcgttgcagtggcgcagtaccactgcaacgaaaacgcaggcaaccgacatcgcctgaatcagtcgatcatcgatcagctgactgtcggtgttaaaccgacggccaaccacagaattttggcccgcctccccataagtacctattggacaaccaattacgatcaattgatcgagtccgccttgagggaagcgggcaagattccggacgtcaagtacacaacggagcagcttgccaccactaaggccaggcgcgacgcagtcgtgtacaagatgcacggcgacgttgagcacgcccatgacgccgtcttgattaaggacgactacgagcagtatcacatcaagcgcggcgcattcatcaatgcgcttgccggtgatttggtatcaaaaacattcctgtttatcggcttcagctttactgatccaaatcttgactacgtgctgagtcgagttcgagtgaccttccgtgagaatcagcgtcgacattactgcatcttcaagactagaactcggcaggatggcgaaagcgatgccgaattcgagaatgctcaaatcaaacagcgactagcgattgaggatctcaagcgattcaacatcaaaaccctactggttgatgagtacgcacagataacagaaatcctggcacgcatcgagcgccagtaccgacagaagacgatttttatctcaggaagcgctgaagagtacggcgcttggacgaaacaagcaaccgaagaattcctgcgtgatttaagccgtgcactggtgcaacaaggctaccgtgttgcaacaggtgttggcttgggtgttggtgatgccatcatcacgggagcgatcgaagaggtgtatcgagcccggacaggtcacatagaagattcgttaatcatgcggccatttccacgagccaaccctgacgaagccgtgcgtcagcgtctttgggaagagtaccgtcaggagttgatttctgctgctggcatttgcctcgtcgttcttggcaacaagcgtgttgacggtcgcatcgtgcctgctggcggcgttcgaagggagttcgaaatcgcctgtcagcatggattgaacgtcgttccaattggcgcaaccggttatatggccaatgagatttggacagaaatgtcgtcgacgcttgatgcgtattacccagatgcaaaggcagatctgcgtgaaaaattcagcaggcttggcgatgcagtagaaaagcctgccgaactcatttctcgcacactggaatttatcggattaatcaccaaggagtaa

SEQ ID NO: 18926 - DNA, 492 bp, Geobacter sulfurreducens
atggcgcgacgtgtgtttttcagtttccattttgagcgcgatgtctggcgtgctggacaggtgcgcaacagctgggtcacgaaggcggaccgagagtcggcgggtttctgggatgcagccgattgggaggaggtcaagaaaaagggtgacgaggcgattaaaaaatggatcgacaaacaactggagggaacatcagttaccgctgtgcttatcggggcagaaacctcggaacgcgagtatgttggatatgaaatatcgcaaagtcacaagcgcgggaatggtctgcttgggatttacattaataaggtcaaagattcatttggcaagactgacgcgaagggaaagaatccgttcgacaattggtatgtcactgaaaacggccagcgacggtacttctcagagatgtacaagacctacgattgggtcgatgacgacggctacaacaaccttgccaagtgggtagaggcggcggcgaaagcagctggccgttag

SEQ ID NO: 18927 - DNA, 591 bp, Geobacter sulfurreducens
gtggcgtatatcacaaaggatgaggcacggctggcggcaagagcacgtcttcaaaaaagctacggcagctcagcaacacagattttgcgagaggaagtgcgagcatccgctgcagcagaatcttttgacattttcttgtcgcactcatcggaagatgctgagatcgtgcttggtgtccgggaaattctcgtgggccttggtctcaaggtttacatcgattggattgatgacccgcagctcgaccggggaaatgtgacggcggagaatgcagacattcttcgtcgacggatgcgcgcatcaaaaagcctggtgtacctgacaacaaaaagcagttcgacttctcgttggatgccgtgggagcttggctatttcgatgggctaagaaacggcttcattggaattttgccggtagttgacgctgggggtacattctcaggtcaagagtaccttggcctctaccctctggttgagcggcttccattgacgggcggcgggacgaaattctgtgtcgtggagaaggctgggaagggatacaggttccttgacgacttcgctcgaggccaatcctcgattcgtgcatttagcaactga

SEQ ID NO: 18928 - DNA, 1776 bp, Pseudomonas fluorescens
atgaccgttgctactcctgatccaacagctcaaattgccttctccatatttgagaacaaaggcgtctatgccgtgcttcttggctcaggggtgtcccgctcggcaggcataccgaccgggtgggaaatcaccctggagttggtgaagcgttggggcatcgcgatgggtgcgggagagcaggatgattgggtggcatggtacgtaggtcagacaggagaggagcccaattactcaaccctactcgaacgcctggcgaccacccagaccgagcgacgagccatcatccagggttttctggagcctagcgatgaggaattggaagacggcttgaagttgcctacacgtgcccatcgggcgatcgcagccatggtcaaagcgggacatgtgcgcgtgatcgttacgacgaacttcgaccgactcatggagaatgcgctgcgcgatgttggcgttgagccaacagtggtcagctctgaagatactcttgcaggtgctgagccgctcacccatgcttcctgctacatcctgaagatccacggtgattacaaggacgccaggatcctcaataccgatgtagaactgggcgagtacccggcggcgttcaatgcgctgcttgatcgcatcatcgatgagttcgggctcatcgtcgcaggatggtcaggtgagtgggatcatgcgctgagggcggcgtttttgagagcgccgtcacgtcgctacccgacctactggctatcccggggtcgattgagcgagcgtggtcaggagctcatcacccatcgtcgtgccacgaccgtaaccgggatggatgccgacaccttcttcgacgggctaaacctcaagcttgagactatccagcagtcccgtctgccgaatccagctggcatcgagctcactctcgctatggccaaacgctttatggccagacccgagcaccggattcagctcgatgacctagtaaccagccaggctcatcaagcgatcagtcatcttgctcctctcttcgcagcacgacctcagggcagtacttctaaggattttaccgacctggttgagatctacgaagccgctatcgagcccctagcacgcctttgtgcagtgctggggcgatggggtgcagctgcagagcatacgatcgttctggataccattaagggcctgcacgctgcgtctcaggtcgagcagtctggatgggtagctgggcttgcattgaagagttacccgttggcacttgttacctatgcgtatggcatggggcttgtgagggccgatcgcctggctgagctgagcgagctgtttaacatgacgcttatcaaccggcgcgaaatgcctttccatgtgggagttgatctatcaccgttctacgtggagggagctaatggtctgttcgagttatggaaaagctttgaagaccaaagtagagctctcacccccttgtgcaaccgactccatgaccttcttacgcctaaatgggcgcctgactttgcaggtctgcacgatcacgggctgctttacgaacggtttgagtttttgagtttcctgttcttctgcgagcaacgcggaatcagtgaagaatcgctcgcggacgcggtgaaaaaccacggtttcaggaaaatcgcattgggtcggatttcttggcactcagaaacgatccaccgctttgctcacgagtacgcgaccgaggagtacaagacgccggtgattgccgcagggtttgcactcggatctgaaagctacttggagctcatgctcgatggcctaaagcggctgtccaggtactaa

SEQ ID NO: 18929 - DNA, 969 bp, Pseudomonas fluorescens
ttgccgaacgtgttcttctcgtattgccatacagacgaagcgctgcgcgaccagctcgaaaaacagctttccatgctcaagcgccagggcgtcattgagacatggcacgaccgcagaatcggtgctggccaagaaatcgatgcagcgatcgatgatcacatcaacagcgacgaaatcattctgttgctggtgagccccgacttcatcgcttccgaatactgctacaacatcgagatgactcgtgcgatggagcgccatggagcgggagaagcgatcgtcattcctgtaattcttcgcccgagcgattggcaccacgcgccgttcggcaaactgcttggcacgccccaagatggtaagcccgtgacactttggccggatcgtgacgaggcattcttgcaagttgcgaaggaggttcggaaggccgctgagcgatgcagccgtgaccgaccgaattctgctccaagggccgagcgcaacgacttcactggcggttcagcgccctcccctatggcccctgctggccctaggtctagcaaccttcggatgaccaagacgtatacccagctggacaaagatcgcttcctgctcgacagctttgagtacatcgctcgctatttcgagaactcactggaggagcttcaagcacgcaacccagggtacgaaggagtgttccgtcgcgtggatgcaaatcgcttctctgcgagcgtctataaggacggtcacgacgttgcgaaggcgacggtgttcaccggtggccagctaggcgccgggatctattacagtcatggcgactcgtttggcggtggctcatacaacgaggcactcaccgtagagacggacgaccaatccatgtacctgaagacgttcggtatggcgttccacactcggcaagaccagaagctttcacaagaaggcggcgccgaaacattttggagccttctcatcgcaccactacagcgcaatcgttga

SEQ ID NO: 18930 - DNA, 1446 bp, Alteromonas australica
ttgacgcctattactgatcaacagtgtcaaagagtagtttctgacttacttagagatctagcagaagataacctagctatttttgctggagctggtctctccgcgcccgcgggctatgtaagttggtcagaattactacgtccaatcgcagaagatttagaacttgaaattgagaaagaaacggacttagtcgcgttggcgcagtatcactgcaattctaacttggctaatcgcggaaagctaaatcagctacttataaatgagctgtcagacaaagccgatatcactgagaaccataaaattcttgccagacttccgatttcaacctattggacaactaattatgacaggctaattgaaaatgccctagctgatgcaggtaaagttcctgatacaaagtatcgaattaagcaattgagctttactaagcgaggcagagatgcagtagtttataaaatgcatggggatatcgagcatccagatgaagcggtactcacaaaagatgactatgaggcatatcacctcaaaatggagccgttcattaatgcattaagcggtgaccttgtctcgaaaaccttcttgtttctggggtttagttttactgatcctaacttggattatattttaagccgtgtgagagtcgcttactccaaagatcaacgtcaacattactgtattcaaaagattgttgagcccgaggtaggtgagtccgatgccgatgctgaataccgaaagagaaaacaagagctattcatacaggatttgttgcgattcgggataaagacaatcttggtttctgactactcacagataacgaatattctcagtcagctagaatgggccttcaggagaaaaactatatttatctctggctcagcatatgaatacggtaagtgggattcatctgaggctgggcactttatatattctctagctaaggagatagctaatctaggatttagaattgtttcaggttttggattaggagttgggagctcagtcatcacaggtgtactggagagtgtttatatgagtggccggcggctggattcagaacagctcattcttaggccatttccacaaaatgaagttggaagccgcccgatacaacaagtttggcatgaataccgagaagaaatgatttcatattcaggcatagtaatatttctatttggtaacaagttgaaagatggtgaagttgtacttgcggatggtttaatgagtgagtttgaaatagctaagtcaaaagggcttctacttcttcctgttggagcaactggctatgcaagcagaaatatctacacccaacttttacaggaagggtattttgacagtaccgctttcccaaaaaattgtaaggaacatataaccactatctgcgacgataagtcagatttggctcaaattcaacgtggcttaataaatctattaagctcattaaaatag

SEQ ID NO: 18931 - DNA, 501 bp, Alteromonas australica
atgccaaaacgtaattgtttctatagttttcattatttgcctgataactggcgtgcggcaacagttaggagtattggcgcgattgatgggaataagcctacgtcagacaataattgggaaacggtaaaaaaaagcggggatccggcaattaaaaagtggatttcagagcagatgtctggcaagtcatgtgttgtagttcttgttggcagcagtaccgctaataggaagtggataaatcacgaaattgtcaaaggctgggatgatggaaagggagttgtaggaatttatatccacgggttgaaagatagtagtggtaacacaacatcgaagggtgagaatccattcgactatataggttatggcaataccggaaagaaattatcttctattgtaaaatgctacaaccctagcggttcaagcagtcaagaaaaatataattggatcagtaagcacttggccaatgctgtagaggaagcaatagaaattaggaaaaacaactag

SEQ ID NO: 18932 - DNA, 1464 bp, Pseudomonas chlororaphis
atgaccaaagtggccatgaatcgttttctcaccgagtatcctgacgctttgaatgatgggctcggagctgtatttataggcgctggtgtctccatggctgcaggctacccttcgtggtcgggcctactgagtgacatcgccgatgagctggaaatcaattcaagaaatgtacacgacctcgccgctcttgctcagtggagcatccaggaaagcggtggtgctactcgtgttcgcaatgtcatcagaaaagagattggcccagacaagcctattcctgaaactttggatatcctcgcccgactgcctgtcaggcatatttggacgactaactatgatcggctcgtggagcgcgcatttgcggccattagccgcccgctcaactctatttccgccccaaaagatcttgctctaagaaccacccctggcgcggcattgctctacaaaatgcacggttcggtggatcgtctcgacgatattgtgatatccacagatgactacgagcttttccgatcccggcgtggccaatacctcccgctattccaagcacatctgaccagcatgtcgatgctgttcatcggcatcagtttcactgacccaaatgttagacatgtgctttcgttgatcagagaaagtttcactgagtcgcccccagaacactttgccatcgtcagggcgccgaaaagatcagatttcaaaactaaggatgagttctcagcaaggctcgctcagcataatctttggactaaagacctgaagcgctatggtctgcttgcagtagagattgataactatgacgaggtgcccgctctccttcggcagatcgaaaggcgggtagccgcgcgcaggatttgggtaagcggtagctggccacttgaacacgggggcactgaaccggcgaatatttatgccttggccgaagaagttggccgcaaggtaggtgagaccaatagatatctggtcacgggtgctggcttattggtcggctctgcttctctgtctggctttcttgctgctttgcgcaacggtggaggttgggatttagatcgccgactgatcgctagaccgtttcctcaaccacttaagggaggagttcccaaagataaggagtgggctgcccttcgtcaggagttagcccgccaggcgggtattgcgattttcattggtggtgcaaagttagttaatggcctccccatacctgcagagggagttgaacgagagttcgagtttgcaaaggccgctggcgttttcgttctgcctattggtgctacaggcggggctgccgaaaaaatatgtaaccagcttcaaggttcagcactttcctacaaggggagctcaccgatgcgacctaccgataaggagctaaaagctctggcagatactaatgctttagctaccgcagaaggccggacatccttggtgaatctagtatttcagatcattgatagggtcgcccgtgttggttga

SEQ ID NO: 18933 - DNA, 504 bp, Pseudomonas chlororaphis
atggctcgaaatgtgttcttcagtttccacttcgctaacgacttctggcgtactcagcaggtacgcaatatcggcgctttggaagggcaaaagctctataccgccaatgaatgggaggaggtcaaaaaaaagggtgacgcggcgattaggaaatggatcgacgatagcctggtcggaaaatcatgtgtagttgtcctcgtgggctcagaaaccgctacccggccttgggtattggaggaggtcatcaaggggtggaacgcaggaaaaggcgttgtcgccattcggatcaaccgtcttttagataaccatcagaacacctccgtcgctggctctaaccccttcgatgctgtcacgctaaaaaatggcacggtgaggctatccggctatgcgaagctgatgactccagcggggaacgatagcaaagaggtttatgcttccatccaggccaatatcgaaagctggatcgaggacgccattactattcgtaaaaattacaaaccttaa

SEQ ID NO: 18934 - DNA, 552 bp, Pseudomonas chlororaphis
atggctcgtaatgtcacaacggaggagctaagaaatatctccgctaacagctctcaagctactcgcgatcacgtattcaaatctttagcagcctcggcatcgatgagtacgtttctatcgcactccagtaaagataaggaagttctacctggcgcgattcaggtacttcagaatcatggggcttctgtgtacatcgatgaaatcgaccccgaaatgccaccttacacatccgaggaaacagcagctttactcaaacaacgtattgcgcagacgaaaagattcgtgctccttactactaaaaacagcaaggagagccgttgggtgccttgggagttaggcatcgctgatggagcgaaggggctctcaaaaattgcaatatttccagcctcggattctgcatacgatgatagctgggtcagctgggagtacctgggcctgtatcaaagagtcgtgtggggcttattgcaaggacatccgcaagagctttggatggtgctcgatacaaaagcaaatacggctgtcccgttgaaagactggctagcggggtactga

SEQ ID NO: 18935 - DNA, 1464 bp, Sneathia amnii
atgaacaatataattgatgaaaaagaattgattgaaattgttgaacaggcattatataacaatgaattagcgatttttgttggtgctggactttctatagatgctggatactatgattggagaaggttattagaaaaacctgcaaatgatttaaaattagatatatcaaaagaaaagcatgatttaatttctttggcacagttttattgtaataaaaacaaaagaagtgccattaatgaacttttatcagcttcattttcttctaataaaaaaccaacggaaaatcataatatattatcacagcttccaatttttacatattggacaacaaattttgatacgttaattgaagatgccttaaaagaaaataataagaatgtttctgtcagaaagtgtgataatgatttacagctttcttataaaaattatgatgctgttgtatataaaatgcatggagatattcagaatccagctgaggcagtaataactagagatgattatgaagaatatggaattaatagcagaaaattatttagagatgttttagaaggaaaattactaacaaatacttttttatttttaggattcagttttagtgaccctaattttaattttgtgcttagcaaaatgagagttttactaggagataataacagaccgcattattatgtactaaaaaaaattactaaacctaataaagataaatttgaagacgaaaaagaatataaaaaagcattagatgaatacgaatatgatacaattaaacaaaatcttgagattgcagatttaggaagatatggaataaaaatatgcttgattgatagttatgaaaaaatcacggagatattaaaaaatatattaaatagatataaaagaaaaactgtgttcctttcagggagtgcagaaacttatgctccgttagatacacaagtggctaaggattttatcaggaaattatctcttgaacttgttaagaatggttataaagttgttaatggatatggattaggtgtagggacttatgtaataaatggaattgctgaatattgttataacgacagtaacattaaaattgaagatagattaaaactaatgccatttccattaagtgcaaaaaataatgaacaacttcgggcaacttggagaaaatatagaaaagaaatgatttctcaatgtggcatagcaatttatatgtttggcaataaaaaaaaggatggaaaaaatattaatgctaatggtataaaagaagaatttaatattgctgaatcatatcaattagtgaatataccattagcatttactgggtctatggctcagaaattatattctgaaaatggtgatatggttgaaaaaattttaaataatgatgaaattgagtatattactaaattttatgatatagacactaatgttgataaaataattaaaatgataaatagacttaacaataaggaggaatgttaa

SEQ ID NO: 18936 - DNA, 492 bp, Sneathia amnii
atggcaagaagagtattttttagctttcattatgaagaggatattaatagatcaatgacagtgagaaatagttgggttactcgaggcaaagaggctgcaggttttattgataaggcggaatttgaaaaggttaaaagaaatggcgaaaatgctgtttacaaatggatagataagcaactagaaggaacttcagttactgtagtcctaattggcaaagaaacattaaaccgtcaatttgtccaatatgaaatacgaaaaagcattgaaagagggaatgcaataattgggatttatatacataacattagagatgtgagaactcaaagaacatcagtaaagggtaattcacatactgttattggatactataatgattgtacacctatgtattttgactctatttgtgatggtttatatgactattcggaagattatggatattataatttgggaagctggattgaaaaagcagcacaaaaaaaaggaaaataa

SEQ ID NO: 18937 - DNA, 528 bp, Sneathia amnii
attaataacttacaaaaatctaagtgtgctattaaagagtcttttgctttttttgaggaaaaagttcctatctttatatcacataaacatgaggatttagatgatttaaagggtattataggatttcttgaaaaaaattttaatgttattgcatatattgatagtagtgatttatctatgcctaaaataacatctggagagactgctaaaaaaattaaagatagaataaaaaaatgcaaaatgtttattttattagccactgatggagcagtcgaatcaaaatggtgtaattgggagttaggatttgctgatgcgattaaagggaaaaaagttgtactttttcctatgaaagagaaggggagtaactataaaggaaatgagtatatggaaatatattcatatataacatatttttatgggcgagaaaaatataattcagggaaaaaagtgaatgcaggatattatgttatgacaaaatctaaaggtaaaaaatctataatttcactttcaagttggctaaaagagtaa

SEQ ID NO: 18938 - DNA, 1131 bp, Sneathia amnii
atgggaaaaacaaagagacaatttaataaaatttatattaaatataaaaagaaatttaaaaatccaattcaacaagttttgatgttaatgccgcaaactttttcaggcgataatatcgttaatacatttaaagagttatatccatatatgtgggatgatttgaataaacagtataaattttggcataataagaatgtgcttttgcttaggcattgcagaaagagcagatataattttaggaaaccatacaattttattttagattgtgcttatcatagtgcgaagaaacttagaaaagataagaacagaattattttggaaaaagatgaggtggggaatttaaaaaatgaaataaagaagctatcaaaatccaaatttaataaaagaaaacaaaaagtcgacggcacattaagatttattcaagaaatagaaccatcatatacatcattttttatagatagatattttaatacttacgacttgcatcaaaaattagagataatgagagagctttcaaaatataaatcatcaaatattacagagtttttttacaaggttaattcatgtacgagaaatttttctttaaaaatagaagcccaaaactatattcaatctattggattaccatttatgttaagacgtaagaaaaaaggtaagaaaaattataatgataacgaaattataaaaaacaattcaggtcctgaagttttaaaacagagattgtacgtagatgatttagaaaaggtgaaaagatttgatatttttatatctcataactctagtgatatgaatcaagtagttgaattatataaaaaactaaatacaaaaggatatgtggtttatatagattgggttaatgataaatatgatttgaaacgagaatggtgtaatgcttcaacatcagaaattattaaactaagaatacatcaaagtaagaattttataatatttttaacagaatcgactcttaaatcgcagtggtgttcatgggaacttggatatgcagatgctttgaataaaaaaatttatgtttatatttcacccacttttaaaaataaagatattcctattttatataaaagttacactgaaataaaaagtgttgatgaaattataatagaaaattattga

SEQ ID NO: 18939 - DNA, 867 bp, Marinobacter psychrophilus
atgattagttgggataactcgattattaatgcaattgctcgtagacgttgtgtaatagttttaggtgctggtgtttctagaaactccactaatgcaaaagggaaaaggccagatacatgggaagactttttaaagaattgcgtaagcaacttaaccgatgtagatcatattaatactttgatttcccaaaaagacttcttaactgcttgtgagttgattaaagaaagaatgggagctgatgactttacagagaaagtacaacaagaatatcaacgctcaggctaccgccatgcttctattcatgagcaaatttacaaattagattcatcgattgtagcaagcccaaatttcgacaatatttatgatacatatgcctcttctgaatcagctagctctgtggttatcaaagatcatacaagtagtgacatagctaactatttattgggtggggataagcgtctaattatcaagacacatggttcagcgaataacccaacagaaattattttcacaagaaacgattatgccgaagctaggactaagtatgttttattttatgagattttaaaatcactagcattaacacacacttttctatttctaggctgtgggacagatgaccctgatattaggcagctttttgaagaccttcaatttacacatggacgtatgccatatcattatatgacattacctaaaggggaagttcataatgatgtgttagaggttgcttcagcttctatgcgtattaaatttgttgaatactcttcagataatggacatgaagagctttccttgtccttagctgacctcgttacagacgttgaaggagttcgatttgagcttactagaaatgggcaatggtaa

SEQ ID NO: 18940 - DNA, 1437 bp, Marinobacter psychrophilus
atggaaaccccaaaattatttatatcttatagttggtctaatccaacacatgagcaatgggttattgagctagcaaacgagttaaccgaatctggcattcatgtcattctagataagtgggatcttaaggaaggccatgattctgtagctttcatggaaaagatggttactgaccctgaaatatcaaaagtggcaattgtatgcgatgaagtttatgcatcaaaagcagatggtcggtcgggaggtgtgggaactgaaacgcagatcatctcacgtgaggtatatgaaaatcaggagcaaggaaaatttgtagcaatcattcctgaaaaagatgatcaaggtaaagcatttttaccaacatactataaatctaggatatatatagatctgagtgagcctgataattacgcagacaacttcgaaaaattattgcgatggatatatgacaagcctctttatacaaggccagaagtaggaaagcgaccgtcatttttagaggaatcagaaggtatttcattagggactactgcaacccacaaaagagcgctatcagcaattaaagaaaataagccatttttatcaggtgttctagatgaatatttgacgacatttgtgagtaatctagagaaatttagaattacagataaagatggtgagtttgacgatcaagtaatagatagccttgagaaatttatcccgtatcgaaatgaagctatttctttgtttgtagcgttagcgcaatacgcgccaacggaagaaaatatttcgaaattgcatcgttttttcgaggcattaataccttatatgaataagcctgaaagcgtgaatagttggagtaaatgggacttcgacaacttcaagtttattgcacacgaactttttctctacttagtagccattcttataaagcatgaaaagttctcagaagttaaccttctattgaatcaagaatattatgtaccgggtcaatccgattacggcaaagatgtgatggtgggttacgatgcttttcgagcacacttaaggtcgttggagcataggaatactcggttaaaattgaatcgactatcactgcatgctgatctactggagcaacgtagcaaacattcagggattgagtttagacaccttatgcaagctgattttatattgttcatgagagccgaagtacaacagtctgatttttactcccgctggtttccagacaccttagtttatattggtcggtttcacagcgcacttgaggtgttcgcgagatcttcatctaagtcatactttgaaaaatcaaaatgccttctcggcatagataaaccaacagacctcaatgagttgatggaggcttataaaaccgatcgaaataggttgccaaggtggcagtttgattcatttagcccatcggtattgctaggctatgaacaattagcaacaaaggcataa

SEQ ID NO: 18941 - DNA, 1419 bp, Marinobacter sp. CP1
ttggtttctatcgaaaacttcattaagaagttctcgcgcgaagttgacgagaataatgcagctatctttgcaggggcaggactgtcagtcggagcaggattcgtaaattggtcagatttgttgcgtgagattgctgacgaattgaatctggacgttgacaaggaacacgacctagtgtcgttggcccagtatcaccttaacgacagaggcgcaaatcgagacggtctaaatagggcgataatcgaccatttctttaatgagaataccgttacggaaaatcacaggatcttggctcgcttaccgattaccacgttctggacaacgaactatgacgatctaatagagcggtcattgagagatgctgggaagattccagacgttaagcaagccaaggaagatctaccaaggactattcgaaatcgcgatgctgtcgtttataagatgcatggtgatgcgcagcaccctaatgacgcagtgatagcaaaagatgactatcaaacatatatgcaaacgcgtgggtcttttgtaactgcgcttgcaggcgagttggtatcaaaaacatttctgtttttagggttcagctttagtgatccaaatttagatcatgtattaggaaggatacggtcagaaatgggatcttgtcagagaacccattactgcatacttcggaaagaacagaagctggattcagactctcctggtgatttcgagtataggaagataaagcaagagcactttatcaatgatttgaagtgcagatataacattcaaactgtattgatagattcatacgcgcagatcactgacattctaacgaaaattgaacgtgtccataagcaaagaacgatttttgttagtggtgcggcagatgattattctccatgggctgaggcggatgctttggatttgtgtgcgaatatatccgctttgatagtgaaaaaaggattccgaattgttaatggccttggtttaggcgttggaagtgcaatcgtagaaggtgccttaagggaaatatacagaaatcaacgaagcaaactcaccgatcagttgcagattcgcccatttccacaatccgatgacgctaaaaaaatgtggagccgatacagggaagacatgctggattatgccggtgttgccgtctttgttttcggaaacaaggcctcggaaaatggattggttttatccaatggaatgagagaagagtttgatatagccatagcaaaaggagttactcccttgcctttgggattcacggggagtatggcagacgaattatggcgtgaagttgttaatagctttgagaaaataatcccgaagagtcttcacggtattaagcctgattttgtttctctcggcgataaaaccaaatcagggcaggaacatttgaaaacgcttgagcgtatattggatagtttgtag

SEQ ID NO: 18942 - DNA, 588 bp, Marinobacter sp. CP1
atggcttattttacgaaagacgaggcgcgtcaagcagcccgctccagaatgaataaaagttatcagttcaacgctaagtcaatattggagtcggaggccagatctacaacatcttatgaaagcttcgatgtgtttctatcccattcatccaaagatgctgagctcgtcttgggagtaaaagaaattttatcccgcatggggattaaggtgtacgttgactggcatgacgatccacaggcaaatcgtgagaatgtaaccgttgagaccgctgagctcctgagaacgagaatgaaacagtcaaaatcgttgatattcctggctacagacaatgcatcggggtcgaagtggatgccttgggaattaggttactttgatggattcagcggaggctcggttgcagttttgccaatcgttgattatgaaggcgcaacatttaaaggtcaggaatacttaggtttgtatccgttggttgataaaggtaggtataccaatggtcagtcagatacattcgtaaaaaagcagggcgcttggttaacgctcgattcgtttaggaaaggaagtacagcctggaatcgttattcctattag

SEQ ID NO: 18943 - DNA, 1455 bp, Serratia marcescens
atgccagaacgtgatatagaactgtttattcgtgattacgttaatgatatcaaagccggcagcgccgcgctgtttgccggcgccgggctgtccatacccgccggttttgtcagctggaaagagcttatcggtgatatcgcttatgaattggggctggatatagaaaaagaaagtgaccttatttctctggctcaatatcatctcaatgaaaaaggcaaccggcataagataaatcaaaaaataattacagaattcgctgagcaagcggaagaaactgaaaatcatcggatcattgccagattgccgatagcgtcactctggacaaccaactacgacgatctgattgaaaaaacctatgcccgttataatcgcgtctgcgacgttaaaaccacgccggaaagtctgaccaacaatattcacaagcgcgatgttgtcttatataaaatgcatggtgattatagaacccccaaccaggcgattatcacccgcgaacaatacgaaacttactcccgtacacaccttccttttatcaacatgctgatggccgagttgaccgccaaaaccttcctgtttatcggtttcagctttgaagaccccaacctgcaatacgtattgagtcgcctttacgcgcagtacggcgaagggaaaagaaaccactactgcatcatgcggcgcgttcaggctggcgacagcggcagcgaggatcaggcgtcttatgattacaacagccgaaaacaaagcctgatgatcaacgatctgcgccgttacggcattcaaacgctgctggtggaggactatcggcaaatcaccgacctgctgtatgccatcgaaacgcaattcaagaaaagcacggtgtttatctccggcagcgccgacaactaccacccctatgcccgtgaagagtccatccagttcatacaccgcctggcgcgcctgcttatccgcaaacagtaccgcatcgtcaacggcttcggttggggcgtgggcacggcggtgatcaacggcgcattggaagccatttacgccagcggggggaaaatcagcgaaagccagctggtattgcgccctttcccccaattcgccagcgggggcattacgctgccggcactttggcacgaataccgccagaacatgatttcgctcagcggcatcgcggtttttttgttcggcaacaagcgtaacgccgaaggcgaatgcgtgctggccgacggtttattgaaagagttccacatcgctgcggaacaaggctgcgtctgcattcctatcggttgtaccggcggcgcatccgccgagatctaccgaaaaatcaaggaggagatgaaagacaccctctatcaccgccatcccgtcgccatgaacctgctggatcaacttaacgagccgggcagcctggcggagaagaaaacatgcctgttggcacttatcgatatcattactaaggataatcctcgatga

SEQ ID NO: 18944 - DNA, 492 bp, Serratia marcescens
atgaccagaaaatgtttttacagtttccattatgagccggacaactggcgcgcttctcagatacgcgaaatgggctcgctggaaggtaaccggccggccacggataacgattgggaggaagtgaaaaaagggggtgacgacgccatcgccacttggatcaaaggccagttggacaatcggagctgcgccgtgattctcgcgggtaaagataccgccaatcgcaagtggatcaacttcgaaatctgcgaagcctggaagaaagacatgggcgtgctggtggtgtatatccataacctgaaagacagcgccggcgaacaagcccgaaaaggcaacaacccgttggatcatatcaagctgggggatagaaagctttccggaatcgccaaagcctatgatccgccttatttgaccagcaccaatgtctataatcacatcaaggaaaatctggcggagtgggtagaagaagcgatccgcattcgcgaaaattactga

SEQ ID NO: 18945 - DNA, 1458 bp, Brevundimonas sp. DS20
atgcctacgtcaagccgaaatcgctttctcaaggattttccagctgccctccacgaaggcgttggcgcagtgttcgtcggcgccggtgtttcgaaggccgcgggatatccgacttgggcggagcttcttaaggacatcggcgaggaactcggtgtccgctccagcgacatccaggacctcgccgcactggcccagtggcacatcagcgagagcggtgccgcgaccggcgtccgcaacgtgatccggcaagagatcggcaaagatcgaccggttccgccgaccttggaggtgctggcgcgcctccccgttcggcagatctggacgacgaactacgaccgtctggtcgagcgcgccttcgccgtgatcaatcggcctgtcgatgttgtctccggggcggccgacctttcgctccgcgcccggcccggcgcggcacggctctacaagatgcatgggtccgtcgaccgaatggacgacatcgtcatctcgaccgacgactacgaactctatcggtccaagcgtggggccttcctccccctgctgcaggcgcatctcagcagcatgtccgttcttttcatcgggctcagcctgaccgatcccaatgtccggcacgtgctatccctcattcgtgagagcttcactgaagcgccgccggagcacttcgcaatcgtgaagccgcccagcctggcggactgttcttccgaggacgagttcagggcccgcacggcgcagcataagcactgggccaaggaccttcgccgctacggactgaggacaatcgaggtagagcattacgacgaaattcccgaactgatgcgccaggtagagcgccgcgtcgccgcgatgcgggtatgggtcagtggaagctggccgctcgacggcgacgacggtcgcgccggcgatctgtatcgcctttccgaggcggtcggcgggttgatcgcggacaccgggcgggatctggtgagcggatcgggcttactggtcggcccagctgtgattgggggctttatcgaccgtctccgtcaggacggcgggtgggatctggaccgccggctgatcgtccgacccttccctcaaccgctgacggatagggagccggaccagaaacgatggaccgcgcttcgcgccgagatggcgcgacaggccgggattgtgattttcctaggcggcgcaaagctcgagggcggctctcagatcgttgcggacggcgtgttgaaggagttcgaggtcgcgcgcgaggccggggccttcatactgcccatcggtgcgaccggaggcgcggccgagcaaatcgcgcaagatctgactgggtccgctatcccatcgcagggcgcaagcgcggccaggccaaccgacgaagagctagccgtcctgtcaaaccaggccacaacacccgacaagctcctgaagctcgttcgagagatactccaacggctggcgaagccacaggacgacaactga

SEQ ID NO: 18946 - DNA, 447 bp, Brevundimonas sp. DS20
atggcacgtcgggtgttcttcagttttcactatcaacgcgacatctggcgtgtgaatcagattcgcaacatcggcgagatcgtgggcaccgcggcggtcgggttccatgacgcctcgctctgggaagaagccaaaaagaagggcgatacggcgatcaagaagatgatcgacgacgcgctgctcaacacgtcggttacggttgtttgcatcggcgcggcctcagcgggccgcaagtacatcgactacgaaatcagccaatcgatcgcgcggggcaacgggatagtgggcatccagattcacgagctcaaggataggctcggaaatacggatcttgccggcgctaccccggctcttcttacgagggccggggcgcccgtctacaagtatgccgatcacgcccggttggcggctcggattgaagaggcggccaagcgggccggacggtag

SEQ ID NO: 18947 - DNA, 528 bp, Brevundimonas sp. DS20
gtgctggcgttcgcgctcgctctcgactccgcgctgagcgccctgacagatcgcttcgacattttcctctcccattccgttcgggacgctagtctcgtcatgggggtgaagcggatcctggaggaggccggaaagaccgtctacgtggactggatcagcgatccgaaccttgaccgaaacgcagtcaccggcgctacggcagagaggttgcggcatcgtatgaggaagtgcgacgcctgcttctatctcttttcccgacattcgaggcggtcgaggtggatgccgtgggagctcggttttttcgacggccataacggcaacgtcgcgatccttccgctgatccctccaacgggcgaactcgacttcacaggcgaagagtatctagagatttatcccaagatagacttcgcaaacctaagcggcagccccagcatattcgtgaaccaagtacgacgcacggagatggggtcgtacaagtcctatgatgaatggcggcgtggcgctgataagcttagacccacgacctag

SEQ ID NO: 18948 - DNA, 555 bp, Brevundimonas sp. DS20
gtgacccggttcgtaacaagggcggaacttcggggtttcgccgcgaacatcactttgaccgaacaggcctccgtgcttcgcacggcttcggcgcgaagccctgccggctcaactttcctgtcccactccagcaaggaccaggatcttgtcgtgggtgccacgatcgtcctgcagaaccacggcgccgtggtctacatcgatgaaatcgacccggagatgcctccctacaccacggacgaaaccgccaatttgctgaagtctcgcatcaagcagagcagcaggttcgttcttctgacgagcaagaacagtaaggagtcgcgctgggtgccttgggagctgggagtggctgacggctacaagggcctcggacaaatcgctctgtttccgtcctcggacgatctgcacgactcgacctgggcctcatgggaatatctgggcctctatcgccggatcgtttggggccagatgaagggcagcgaccaagacatctggatggtactaaatcacaaagcgaacaccgcaacgcctctccggaaatggctgacgggtgggtag

SEQ ID NO: 18949 - DNA, 1401 bp, Aggregatibacter actinomycetemcomitans; identical to SEQ ID NO: 18603

SEQ ID NO: 18950 - DNA, 486 bp, Aggregatibacter actinomycetemcomitans
attatgaagagaaatgtattttatagttttcattatgaaaaagatgttttccgtattcaacaagtaagaaacattggaaagctagaaggcaatccaccagcgacacctaatacctgggaagaaataaaaaggaaaggagataaagaaatacaaaaatggattgatgaaaatttatctggtaaaagctgtctggttgttctgattggagaagatacatctaaacgaaaatgggttaagtatgaaattcaaaaagcttggaatgatggaaaaggcgtattgggtatctatattcataacctgaaagatccaaaaagtggtgaatgtagaaaaggcgacaatccatttgaacaatttacgttcgaaaatggttctaaattatctagcatagtcaaatgttataatcctaaatcttcggatgcctataatgatattgcagataatatagaaaaatggattgaagaggctatttccattcgtaaaaaataa

SEQ ID NO: 18951 - DNA, 645 bp, Aggregatibacter actinomycetemcomitans; identical to SEQ ID NO: 18605

SEQ ID NO: 18952 - DNA, 1449 bp, Caulobacter henricii
atggccgacgccgcgcggaagcgtttcctcaaagagttccccctagcgctccatgaggggaatggcgtcgtcttcgtcggcgccggcgtctccaaggccgccggctacccgacttgggctgaacttttgaaggacattggtgaagagctaggggtacggtcgagtgacatccacgatctcgcagcgctggcccagtggcacatcagcgagaacggtggcgctggcgtgcgaaacgttatcaaggccgagatcggccaggatcgcgatatccccgaagccttgcaggtactcacgcgactgcccatccggcatatctggaccaccaactacgaccgccttgttgagcgcgcgttcggcgcgatcaaccggccgatcgacaccgtttcgggtgcccaggacctgtcgctaaagcccaagccgggcgccacccgcttctataagatgcacggctcagtcgatcggctcgacgacatcgtaatctctacggacgactatgagctttaccgctccaaacgcggcgcgtttcttccactgctgcaagcgcacctcagcagcatgtcgttgctattcatcggtcttagcctcaccgatcccaatatccgacacgtactctccctgatccgggaaagcttcacagacgcaccgcctgagcacttcgccatcgtcaggccgccaagccgagatgactgcgcctcagatgaggaatatgccgcgcggtcggcccagcacaaacactgggccaaggacctacgtcgctatgggctggtgaccgtcgaggtcgaaaaatacagcgaggtcccggacctgcttcgccaggttgaacgtcgcgttgcctccatgcgcgtatgggtgagcggaagctggcccatagaagcttcggacgccaagacccgcgacctctatcgactcgcggaagaggtggggcacctggtcggcaggacgaagcgagacctcgtcagcgggtctggtctccttgtaggatccgcagcaatcgccggcttcatagacgccctacgcgccgatggaggctgggatctcgatcgacgcctcatcgtgcgcccctttccccagccgctgggcgaccaacagcccgataaggcgcattggacggcgttgcgctcggaaatggcccggcaagctggcatcgtcatcttcctgggcggtgccaagctcgatggcaaagacttggtcacagccggcggcgtgatggaggagttcgaagccgccaaggcggctggcgcattcctccttcctgtcggagcgacaggtggagccgccaaggcgatctccgacgctctgttgggctctgaaacgccatggcagggtgcagacgccgcgcgtccgactgacgaggaactggcgactttgtcagatgagacgtcggggccagctgacctattgaaggtgatcgccgcgatcctcggcagacttgcccgggtgaccgcctag

SEQ ID NO: 18953 - DNA, 447 bp, Caulobacter henricii
atggcacggcgagttttcttcagcttccactaccaacgcgacatctggcgggtgaaccagatccggaacatcggggaaatcgtcggtacgtccgctgccggcttccacgatgcgtctctgtgggaagaggccaagaagaagggtgacacggcgatcaaagcgatgatcgacgaggcgcttaagaacacgtccgtcaccgtcgtttgcatcggtgcggcgaccgccgggcgcaagtatatcgactacgaaattcaacaatccatcgcgcgcggcaacgggatcctcggcgttcaaattcacgggctaaagaaccaggccggcgtagtcgacattgttggcgccacccccgcccgcctgagcgcggcgggcgcgcccatctacaaatacgtcgaccatgccacgctgggaatttgcatcgaacaggcagccagggctgccgggcgatag

SEQ ID NO: 18954 - DNA, 552 bp, Caulobacter henricii
atggccgaattcatcacgcgctccgaacttcgcgcctttgctgccagtaggtcgctgacagagcaagccgaactcaggaagtccacacgccagcgcgcgtccgaagggtcaacgttcttatctcattccagcaaggacgaggatcttgtcgtcggcgcaacgatcgttttggagaaccacggagctcgtgtttacacggatgaagtcgatccagaaatgccgccatacacgacggacgaaacggctaaccttttaaagaaacgcatccagcaaactaaaaagttcgtcctgctggtcaccaagaacagcaaggaaagcaaatgggtgccttgggaattaggcctagccgatggttacaagggcctatccaggatagctctctttccgtctgccgacagcgcccacgacaccacttgggccgagtccgagtacctgggactttacgatcggattgtttggggtcgcatgaaagattatcgcgagccgttgtggatggttctggaccacaaagccaacacagcgacaccgctgagcaattggctagccgcctaa

SEQ ID NO: 18955 - DNA, 312 bp, Aeromonas hydrophila; identical to SEQ ID NO: 18880

SEQ ID NO: 18956 - DNA, 468 bp, Aeromonas hydrophila; identical to SEQ ID NO: 18881

SEQ ID NO: 18957 - DNA, 579 bp, Aeromonas hydrophila
atggcctattttactaaaagtgaggcacgagcagctgccgcatctgctcgcggctataaagccgctaatacggttctgaaggaaggtatggagaaatacacagtacatgataaatttgatgtatttctttctcactcaatggacgatgcagacctggtgttaggggttatgactctattgcaaaagcaaggtctgcgcgtctatgttgattgggttgttgaccgtcaattaaatcgcgattcggtgaataaggagacggctgcggtacttcgggagcggatgaagtcatcaagttctatgatgtatatcgccaccgacaatgcttccagctcaaaatggatgccttgggaactaggtttctttgatgggtataagcctaatcaggtagcgattctcccacttgtagatttcgaaaatcaaagctttgaaggacaagagtatcttggcctttatcccgttgtaacaaagcaccttcaaaataattcgttaaatcattatgtagaggacagaggtcaaaggtggagtaacctgaataactttgctaggggaactccatcgtggaatcgctattcatcataa

SEQ ID NO: 18958 - DNA, 1500 bp, Staphylococcus aureus
atgaatggagatggcaaaatgactatagataagaaaaaattcattgaaaaatatgtaaaagctttagaaagtaatacagcggctatttttgctggagcaggattatcttgtggagcaggttatgttaattggaagacattgcttaatgaagcagcagaagaattagaattaaatatagataaagaagaacatgatcttgtaggattagcacaacattatattaataagaaaagaagtcgtggaaatctaaatacagtaataatggagcaattttcaacaagagcagaattaacagaaaatcataagcttttagcaaaacttcccattgatacatattggacaactaattatgattgtatgattgaaaaagctcttgattctgagggcagaattgtagatgtgaaaagaaatcaaaatcaattaactgtttcagtagccgataaggatgctacagtttataaaatgcatggggatatagacagtatagacaagattattttaactagagatgattatgaaaaatataatctaactcatccaaagtttcgtgaaatattggaaggagatttactttcaaaaacttttctattcataggttttagctttacagatccaaatattagttatatcttatcgagaataagattagtgttagaagacaatactagaccacattattgtattttaaaagaagtagaagaaaaggaatatgataatacagaagaatttatgtatgcaaagataaaacaacaacttcatatagaagatttaagccgattttcaatagaaactttattagttaaagattatattgaaatcacagaaatattagaaagtatttataaaagatatagaagaaaaacaatttttatatcaggaagtgctacagaatatttaccttttaattcagaaacagggaaatattttttacatcaactaagtaaaaaattagttgaaaatgattttaaattagttacaggttttggattaggagtaggatcatatgttattaatggagtagctgattatattaatagtaataagaagtctaaactacagaatcatttaaatatattgccattttctcaagattcaagtggcgatttagacttaaaagaagtatggaaaaaaaatcgcttggaaatgatttctgagtgtggaatggcattatttttatttggaaataaagaaaaggatggaaaaattgttttagctgatggattagaagaagaatataaaatagcagaaagacaagaattggttagactccctataaatgtgacaggttataaaacaaagaatctttcagaacaatataacgaagagataaatatacaatttaaagagaaaatattaaaaatgtataacgaaataaatgaatacaaatgtgatttttcaaataaacaaagtattgatgaattagttcaaaaaatagtaaatttagtaattgaaataaaaaaacaaaataattcatggggttttaatgctttagaaagatag

SEQ ID NO: 18959 - DNA, 609 bp, Staphylococcus aureus; identical to SEQ ID NO: 18624

SEQ ID NO: 18960 - DNA, 1035 bp, Staphylococcus aureus; identical to SEQ ID NO: 18625

SEQ ID NO: 18961 - DNA, 1470 bp, Staphylococcus aureus
atgaatggagatggcaaaatgactatagataagaaaaaattcattgaaaaatatgtaaaagctttagaaagtaatacagcggctatttttgctggagcaggattatcttgtggagcaggttatgttaattggaagacattgcttaatgaagcagcagaagaattagaattaaatatagataaagaagaacatgatcttgtaggattagcacaacattatattaataagaaaagaagtcgtggaaatctaaatacagtaataatggagcaattttcaacaagagcagaattaacagaaaatcataagcttttagcaaaacttcccattgatacatattggacaactaattatgattgtatgattgaaaaagctcttgattctgagggcagaattgtagatgtgaaaagaaatcaaaatcaattaactgtttcagtagccgataaggatgctacagtttataaaatgcatggggatatagacagtatagacaagattattttaactagagatgattatgaaaaatataatctaactcatccaaagtttcgtgaaatattggaaggagatttactttcaaaaacttttctattcataggttttagctttacagatccaaatattagttatatcttatcgagaataagattagtgttagaagacaatactagaccacattattgtattttaaaagaagtagaagaaaaggaatatgataatacagaagaatttatgtatgcaaagataaaacaacaacttcatatagaagatttaagccgattttcaatagaaactttattagttaaagattatattgaaatcacagaaatattagaaagtatttataaaagatatagaagaaaaacaatttttatatcaggaagtgctacagaatatttaccttttaattcagaaacagggaaatattttttacatcaactaagtaaaaaattagttgaaaatgattttaaattagttacaggttttggattaggagtaggatcatatgttattaatggagtagctgattatattaatagtaataagaagtctaaactacagaatcatttaaatatattgccattttctcaagattcaagtggcgatttagacttaaaagaagtatggaaaaaaaatcgcttggaaatgatttctgagtgtggaatggcattatttttatttggaaataaagaaaaggatggaaaaattgttttagctgatggattagaagaagaatataaaatagcagaaagacaagaattggttagactccctataaatgtgacaggttataaaacaaagaatctttcagaacaatataacgaagagataaatatacaatttaaagagaaaatattaaaaatgtataacgaaataaatgaatacaaatgtgatttttcaaataaacaaagtattgatgaattagttcaaaaaatagtaaatttagtaattgaaataaaaaaaacaaaataa

SEQ ID NO: 18962 - DNA, 609 bp, Staphylococcus aureus; identical to SEQ ID NO: 18624

SEQ ID NO: 18963 - DNA, 1035 bp, Staphylococcus aureus; identical to SEQ ID NO: 18625

SEQ ID NO: 18964 - DNA, 1470 bp, Staphylococcus aureus; identical to SEQ ID NO: 18961

SEQ ID NO: 18965 - DNA, 609 bp, Staphylococcus aureus; identical to SEQ ID NO: 18624

SEQ ID NO: 18966 - DNA, 1035 bp, Staphylococcus aureus; identical to SEQ ID NO: 18625

SEQ ID NO: 18967 - DNA, 1449 bp, Rheinheimera sp. F8
atgttaaaagcaattactgaccaacaacgccaaagacttttgaatgaactactgaaagatctagcagaagataatctagctatcttcgcaggcgcgggcctatctgcacctgctggatttgttagttggtctgagttgcttcgtcctatcgcagaagaactcgaacttgaaattgagagagaaactgatttagtggctttagcacagtaccactgcaactccaacctagctaatcgaggtaaattaaatcagttacttattaatgaactgtctgcaaatgccgatgttacagataatcataagatacttgcgagacttccaatatccacttattggacaactaattatgataagctgattgaaaaatctttgatagaaaacggaaagaatcctgatgtaaaacacagagtaaaacaattaagttttaccaagcgaggacgcaacgccattgtatataagatgcatggagatatagaacatcccgacgaggccgtactaacaaaagatgactatgaatcatatcatattaatatgcagccatttataactgctctcagtggtgatcttgtctcgaaaacttttttgtttttaggttttagttttacagacccaaacttagattacatattaagccgtgtacgcgttgcatactccaaagatcaacgacagcattattgtattcaaaaaatcgtcgacccgaagcctgatgaagctgaagctgatacagaataccgaagaagaaaacaagagctttttacgcaggatttattacgttttggtatcaagacaatattcgtaactagttacctagaaataacgaacattcttcgacagttagaatgggcatacagaagaaaaacaattttcatttccggttctgcacatgaatatgctaggtggaactcatctactgccgaaaatttcatttattcactagcaaaagacatagccaaattggactttaaaattgtttctggctttggattgggtgtcggtagttcagtaattactggggtactagagcatgtttatatgaatggacaacgtttggattctgaacagctaatacttagaccatttcctcagtctgctgttggtgctcgacccatagctgaagtttggcatgattaccgcactgacatgatttcacatgcaggcatagctatttttctatttggaaacaagttaaaagatggagaagtcgttatagcggatggtttgctcaaggaatttgaaatagcgaaatttcatggtttgttattgttaccaatcggtgcaacaggatatgcaagtaaacaaatttacactaagctattggacgaaggatattttgatagtgataattttccgaaagaagctagggcatatattgatcaaatttgtgatgaacaatctgatttgactacaattcagcatgcattattttcagtgctagcgtcattaaaataa

SEQ ID NO: 18968 - DNA, 468 bp, Rheinheimera sp. F8
atgagtgatttgagaaatgtgtttataagccatgtccacaaagatgatcatggattacaaaagctgaaagatctgttgtccccgaaaggaatttatatgagagactcgtccattcatacagggaaatttaacaatgcaacagatgaacattatatcaaaactcagattttagctccggcaataaattgggctggtatatttatttgctacgtaactccagagacaaagaacagtgaatgggtaaactgggaaattgaatatgctgccaagcaaggcaaacgaattataggtgtttgggagcatggacaaaaggactgtgagctaccagaggccctaaaagaatatgcggatgctatggtcggttggagcggtgattcgattgtaaacgccataaacggagttgaccgctgggagaaaactgacggtggtgattatggtgctgtacccctgaaaaggcatccttgctaa

SEQ ID NO: 18969 - DNA, 312 bp, Aeromonas hydrophila; identical to SEQ ID NO: 18880

SEQ ID NO: 18970 - DNA, 468 bp, Aeromonas hydrophila; identical to SEQ ID NO: 18881

SEQ ID NO: 18971 - DNA, 579 bp, Aeromonas hydrophila; identical to SEQ ID NO: 18957

SEQ ID NO: 18972 - DNA, 1437 bp, Enterococcus faecium; identical to SEQ ID NO: 18577

SEQ ID NO: 18973 - DNA, 486 bp, Enterococcus faecium; identical to SEQ ID NO: 18578

SEQ ID NO: 18974 - DNA, 852 bp, Enterococcus faecium; identical to SEQ ID NO: 18579

SEQ ID NO: 18975 - DNA, 1428 bp, Clostridium propionicum DSM 1682
atgagtaaaaaagaaatagatagctttatcaacaaatttgtcaaagaaatgaaagatgataatgttgcgatttttgccggagcgggtttttccaagagcggtggttttgtagactggaaaaacttgctcaaaggagtagcggatgaactggatttagacataataaaagagtatgatttagtaacattggcacagtattatgtaaataggaatgggaacaggagcaccttgaatgatattatttttgaagaatttacgaaagatgcagaaataagtgagaatcataaaatccttgcgcgtttgccaatcagtacattttggaccactaattacgattcattattagaagatgcattaaaagaaacacatagagtagtagatgtaaaatatactaataagcatttatcaataacaatgcctcgtagagatgctgttgtttacaaaatgcatggtgataaaagtcatccagatgatgttatactaataaaagacgactatgagaattattataggaagcattcacagtatataactacattaagcggtatgcttatatctaaaacatttttatttgttggctttagcttcactgacccaaatattgattatattttgagtagagttaaaattgattattcacaagaaaaccaaagacaacactattctatcatgagaaaaatatctgcaaatgattttactgataatgctgaatttgaatatgtaaagagaaagcaaaccttttttgtagaagatttaaagcgatataatattaaaactattttagttgatgaatatgatgatattacaaaaatattatcaactattgaaaaaaagctaatagtaaacaatatttttatatcaggaagcgcacatgagtatggtgattttgaggaaaaagaagcgaaagaatttatatcaaagttgagcaatagtcttataaaatccgacttcaatgttgtgtcaggctttggggtaggtattggaagtgctgttatctctggggcattagaagaaatatatatgaaaggtggaacaattaaagaagatcgattattgctcagaccatttcctcaaggtgaagactataaactattatggcaggcatatagggaagatatgattagtcgagctggagtttcaatattcttatttggaaacaaattagttgacggggaaattaaattagcggacggtatccaaaatgagtttctaatagctaaaaataaaggtcattctttgttgcctttaggatacacaggttataaagctttagaattgtggaatgaaataaatgataattttgaaaagtactatccaaacgatgataaactaaaaacagtttttcagcagtttaatttaaagaaatcaaccctagaaaatattcaagatgttttgcattttattaaattattgaaagaaaagatgtga

SEQ ID NO: 18976 - DNA, 498 bp, Clostridium propionicum DSM 1682
atggcaaaacgacaggtgttttttagttttgagtataacaaagatgtatggagagcatcacaaattagaaatatgggaaaagtatctaattcgtcaactttttctgataacgattgggaagaagttaaggaaaaaacagatagtaaaataaaagagtggatagatgagcaaatagctctgcgctcatgcttggtagttttagtgggtaaaacaacttcatctcgtaaatgggttaaatatgaaattgaaaaagcttacgagttgggtaaaggaatagttggagtctatgtacatgggctgaaagatagtcaaggtaaccagactgatcaaggaagtaaccctttttatagtttgttaaataaggatggcaagcgattatcaaattttataacatgctatgaatcaccatataaatcaagcaaatatgtctatgatgatatcgaaagcaaaatagaagaattgatagaaaatgcgatagatgacagaggtacttactaa

SEQ ID NO: 18977 - DNA, 495 bp, Clostridium propionicum DSM 1682
atggcgagaaaagtgttttatagttttcattatgataatgatataatgagggttatgactgtaagaaatcgatgggtaacgcaaggtgggcagctcgcatcggaagtaattgataaagcagagttcgagaaaataaagcgacaaggcgatactgcagtaaataggtggatagataaacagttagaaggaacaagtgtaactgtggtattacttggtgagaaaactttaagcagaccatttgtaaaatatgaaatatgtcagagcattaatcgaggaaacgctattatcggcattcacattaataatattcgagatgctcgaactatgagtatttccaaaaaagctgatgtacatcaaatggtgggaacatataacgatggaaaacctgtatatttcgatgaaatttgtgatggtatttttaattatctaaataatgatggatataataatttaggaaaatgggtagaaaatgctgctcaaaaaaagggtaagtaa

SEQ ID NO: 18978 - DNA, 573 bp, Clostridium propionicum DSM 1682
atgaaaactatatttgaacaaggaacatttaacgcataccaagagcgtagtttacaacatgcaatgaatgaagttgtaagattttctgcacagaccacagtttttatctcacacaagcatgatgatcttggtgatttgcaaggtgtattaggttttctagaaaaacactataatgtaaaagtatatattgatagccgagattcctctatgccagctattacttccgaagttactgcaaacaatataaaatctagaattgaaaaatgtgataaatttattttgcttgcaacaaatggagccatagaatctaagtggtgtaattgggaattaggatttggggatgcgaaaaaatacaaaaatcatattgctttatttccaatgaagcctcaaggaacatatgatagctcatacaaaggaaatgagtatatgcgaatttatccatatatatgttatttcgatggaacagaacgctatacaaatgggacatctatatctaaaggatactatattggagaatttaaggaaacaggaaattacataacaccattgagtgaatggtttaattctaaataa

SEQ ID NO: 18979 - DNA, 1413 bp, Streptococcus mitis
atgaggaaagagcaatttattaaaaaatttacgaaagctgttcaagatagcaatgcggctgtttttgctggcgcaggaacatcagttgacgcaggatttgttaactggaaaaagctcgtaaaaccatttgcggatgagattgatttagatattgataaagagtcagatttagtgggattgactcaatattatatcaattctaaaatgggaaatcgaggttctgtaaatcaggaaatagtttatcaattttctagtcaagaagcagaaacaaaagtaacgaatttactaacacgactacccatttctacatattggacgacaaactatgataacgtaattgaaaacggtttaaagaaaaacaatcgtagaggagatataaagagaaagatagatgatttagcaattagtattcgtgatagcgatgccattgtttataagatgcatggtgatgtagattcgcctaatgatgcagttatttcaaaagatgattatgaaagatatagtgataaaaactctttatttgtaacagctttacgaggtgacttagtttctaaaacatttttatttgtaggttttggttttgaagatcctaatttagaatctattctggggaaggtaaatgtcttgctgggagataataagagagaacattattgtattcaaaaacaagtgttagagagagactatgacgcagacatcgaaggatataattacgctaaaataaaacaagatttaaaaatcaaagatttacagagatatggaattgagaccgttctagtagatgattattctgaaatatctgacttgatacaaaaaattgaggaggagtacttaaaaaatacaatcttcatttcaggtagtatatcagattataatgagaattggagtgaagaaaaggtaaatcaatactgctatgatttatctagttttcttatttcaaaagattataaaataatatcagggtttggactggggataggaagcagtgttattaacggtgcgctggatcaaatttataaaactaaatatagacatgtggatgaacaccttggtttgtttccttttccacaaaatgccaatggagagaaatcgttaaaagaacgttggaccgagaaccgtgaacaaatgattagtgagtcaggggtgtgtatatttatatttggtaacaagctagttgatggtaaggtagaacttgcttcaggcatgatggaggaatttcaaatagctaaagaaaaaggaaagataatcattccgattgcctctactggatttgctgcaaaagaaatttttgatgagatgaaacaatcaggagaatatagttatttagataattactgggaaactttagagactgaaaaggatttcactaaagttttttccatgattgataaaattgtcaatgaggtacgataa

SEQ ID NO: 18980 - DNA, 621 bp, Streptococcus mitis
atggcaaccaaaatatttatttcgttccgttttagtgatggaaaagagattaaagatgaactagttgatttatttgatgaatctactgaggtaattaatagatcagaagatgttgatagaagtcaaatgagtgagaacattattcaggaatatctatatgagaagttaaaagatacatcggttacaattgtattattgactccagaggctgtttcttatagaaagaattggcttggaaattatgatgattggctttatgatgaactaaggtattctttagaggatagaaaaaataacagaacaaatggtgtgatagctgtttatactgatgaagctaaagataaggtactagatgatagtactcattattgtcaacattgtcagcagactaagtcgtgtaggtctttgaaatattttgataatttagctagaaagaacatgctaaatattaagtcggcttataagaaaaatccatgtaatgatctttatgatgatgagcacgattcttatatttctttagtaagtttgagcgatttcaaagaaaattatagtcaatatatacagaatgccaaagacaaaagagaacgattagatgagttcaatatagctaagaggatgtaa

SEQ ID NO: 18981 - DNA, 1167 bp, Streptococcus mitis
atgggcaaagtaatgagacaatataatgaattttatataaaattgcaaaaagagtttaaactggctcataatatgaccatagaagctatgccagcaaaattttccaacaaagattatgttaaaaaatttatttatatgtttcctgataaaatttctagactgataatagaaagaaactattggtatggtaaacgtattattaaaaaaaatttagttaaaattcagagtaaaaggaggtctttagaaactaatgattttattcttgaaacatctaaatatataagaagacgagtaagaaaaaatattttgagtattgaagagagaaaaactcaggcagatgagattcgaaaaaaatctttagcaaaattaaagctgcaaactataaaaagaaaaaaatcattagattatatccaagaaataaatccctcttatctggaacattatcgcaaaagattttttaaaacacatgatttacatgaaagattagaaatcattagagaactttcgaagtatgattcaaaggaagttcataattttttctatgcaataaatggtcatgtaagaaatcaatcgctaaaaaaagaagttcagtcgtactttcaaagtttatctctaccgtttagattgagtagaaaaaagaaaggaaaaacaaattttattgataatgaaatagtaacaaataggaaaggaccagaagagttgaagaagaggttatacattgatgatctagaaaagataaaaaaatttgatatctttctttcacataactctaaagatgaagaaaaaattataaccttttataaaaaactaaacaaaaatggccaagtcgtatatattgactgggttaatgataaatacgatctgaaacgagaatggtgtaatacttcaacagtcgatattatcaaagagcgtataaaacaatcggatgtatttgttttgtacttttcaagtaagacacttaattctcagtggtgtgcttgggaattgggatatgcagatgcaattggaaagaaaatatgtatctatttttcagaaaaaatagatagaacaattattccaaagttctactttaaatatccaaaattacttttttctgaagattttatggttaaaaatcatggacagtcagatattccatttactaaatggaaagagaataaaaaataa

SEQ ID NO: 18982 - DNA, 1434 bp, Pseudomonas putida
atgaaaaaggaacatctgcggctcatagacaacctgtctaaagagctggccgaaggaaatctggcaatttttgcaggtgcgggcatgtctcgagctgcaggctttgtggattggaagtcgctgctgaagccgatcgcggatgacctggatctcgatgtcgagaaagaatgggatctggtgacattggcgcaataccacgctaatgccaatgcgaccaatcgctcgaagctgaatcagatgctggtcactgaattttcttccggcgtagcgccgaccgaaaatcacgagatcctagccaggctcccgattcagacctattggactaccaattacgacaaactcatcgagagctcgcttgagcgcaatgggaaggttccggacgtcaagtacaccaacaagcagttggcaactacccgccccaagcgagacgctgtggtttacaagatgcacggagacgtcgatcacgcgtccgaggccgtgctgatccgtgatgactatgaacgctatcacgtgaagatgcagccattcatcactgcactaagcggtgacctgatcgccaagaccttcctgtttctgggtttcagcttcaccgaccccaacctcgagtacatcctgagccgagtccggattcagttcgcgcaagatcaacgccaacactactgcatccttcgcaaggcaagcaaaatggaaggagaggagcaggccgacttcgaatatcgccagcgtaaggaagacctcttcaagcatgagctgttacgggtcgggatcaaggtcgtctacgtcgatgagttttcagagatcacagacatcctgcgagagatcgagcaccgtcataaacgcaaaaccatctttatctccggcgcggctcatgactacagcccttggaccgagtccgaggcggagcagttcgtttacaagctgagcaaggctatcagcaaggagcagtaccgggtcatttccgggttcggtttgggggtcggcagtgccgttatcaccggtgttcttgaacagaccatcatgaacggtggtcgcctcgacagcgatcaactagtcctacgccccttcccccagagccagtctggcgagcgtccattgccggagctctggacagagtaccgccgcaacatgctcgcccatgccggtgttgcactctttcttttcggcaacaaactggaccagacaggggctgtcgtgccgtccaacggcatgcgcgaagagtttgagatcgcagttgccaatggccttttcgtcattccggttggcattacaggctcgatctcagctgacctatggaatgaggtgatccaggtgtacgacgaatcgaagcacgagcatggcaagaagatcacccccctgcttcacgagctgggagcttcagacaccgatctggtgcgcgctcacgacatcatccttaccctactgcctctgatttaa

SEQ ID NO: 18983 - DNA, 306 bp, Pseudomonas putida
atgcccgaaacgccggacgctgagacggccttcaatatcaaagccgccattgtccgcgccgactggttcctctttctcgcaacgcagaactcgatggcatcgcgctggtgcccctgggaaatcggctttgcggacggcaaaaaggcccatgagcgcatcgcgattgtccccacgcaggacacccagggccatttctatggcaacgaatacctgaacctctataacaaaatcgacgtacctgctggcacggccggtcttgccttctacgacactcggggcaatggcaaatgggttcgcactctttaa

SEQ ID NO: 18984 - DNA, 3810 bp, Yersinia nurmii
atgagattccatcccgaaggacctgccataccggacatcctcttagaacgctgtgatacaggtagagttgtatttctatgtggcgccggggtttcgttaccttcagggatgccaacctttgtagacctcactcaatacgtaattgaatactttgatccaccacacgactcagaaatcatggctgcatttcgcccgtggcttcacgaccaatcttcggcaaatgtccctctcgaccaaattttcaacttgctacatcttgaatatggcaaggatgaagttaatgccctggtcacaaagcgtctgagtgcttcctggactgacagagaggttgggcatgagcatgccctaattaaacgcatttcctcaaatcagagtggaattccgcagattgtcacgacgaactttgatcgacttttcgaggttaaccaagggcaagataacctgacccgatatgtgccgccagctttctcagatctgaatttcggttcgacaattgagggaattacgtatcttcacggtcgtctggtcgatgcaaatgctacaagccatccttatgtgctgagcagtgcagactttggacgagcttacctttcagaaggatgggcgaccaactttattaagcttcttctggaacgatacatcgttgttttggtcggttaccaggcggaagacccgccagttaaatacctccttcaaggtctcaatcatgatggccagtatgatcgttctagactttatgcatttgattgtgggcttgctgaggagatcgaagccaaatggcgtgacagaggtgttactgcaatagcctaccccgatcatccggtcctctggaagagtatggaagcatgggctgaacgagcagatgatccgcgtcggtggcgagcttctatgatcgctaaaagccagcaagacccgaagattatggcaccctatgaacgtggtcaagttgctcacatacttcgtacagcacaaggtgcgagattgttctctgaagctattccccgtcctcatccagaatggctttgtgtgatggatgcgaatattcgatcagtcaaacagaagaaaagatataacgagtttgctgataacgatgcagagaccttcgatccgcaagaagcttatggactcgatgacgatctgcaagatatctctgacgatgaacgtaaacgtggagtgagtaacgataatctccttgaatggcatgatgaagacgataatccggcagattaccatcgttttgctggaggatttgggtctgccccgagaaggctaggtcatctcatgacttggtttagcgaatccctcgatagcccggtaatggcctggtgggctatgcgaaaaagttgccttcatccgcttctactgcaaaagattgagcatcacattgagttttcagtatcgacccacaagcgtgctcgtcatctgtggggtttaatcctcgaacatcataaagactcccgtaatcgtagatatgacgtcgactggtatgacttaaaagctcgaattaatacccagggctggactacaggtgtactacgagagtttcgtaaggtcatgacaccacggttggaaatgaaatcgccatatggcttgggagaattcagaccgccaagtggctcatggaaggagatccaactcagcgaattaggtcaattcgaagttgtgttcactgatagacatgacgacgatttagacatacctgacaatgtattgctgcgggtatttagtgccctagaagagcaattactcacggcatcaggattgctggaggatattgagactttctacttcccaagcccaagctgttatccagtgcgtgcagtggaaggagaagaacacttcgcgaaaggtgctgatgtactgacatggtttgtcccactttttgatcgagtagctgggaagtggcctgaattggctaatgctcatgtaacaacatggccagtaacggagccatttttcttccgaaaacttagactttatgctttcagtaaaacaagcgtctttggggctgatcgtgttgccgaagaagttttgtctttggagcaaaatggattctgggacacaaatgttactcgagagcttctttttttgctgacagatcgatgggaagaattctcacaggacaatcagaatcgaattatcgatcgcattctgactggtccctatcaattgccttatttatctgaggaagaactcccgaaagaaagagaggtattaactgctaaatacgctcgctatcttgaactacacggttgtgaactgaccactattcatagtgatcgactcactgcgataattaatagaattcctgactggaatgatagctgggccacatctgttgtcatcagttggggttcccggtcgggctgggttcgtacagacgaaaaaccagatgtaatcttagatcttcctgcaaacgagataatcccaaaagtaaaagatgtgcttaaacgagaggatgacagctttactagcaggcaaccctttgtcggactgataaaagaaaatccacgtaaggcattgtctgcgctcactatttcagggaaaatcggtgattatcctaaggaattttggtcgccaatgataagtgagctacctgcagatcttaaaccaaggttgagacgagtattcctgaaccgaattgcgcggctaccagttacagctttagtcgaactacgacatacattaagtagttggcttgaacaaaatttagttgcgactcttaaatttgatgatgatctcggctgggcagtttacgatcatgtcatagaaggcatactgagtggtggggctaatgccacgcaaagcggtttcggagaagtcatccggaatggagaggttgtgatacagtcccgacgcacattcagccatgcaatcaatggtccagttggtaagtgtactcgagcactttatcaagcaataccaggagaagaagctgaagctggttcgcttattccgtgttctattaagtctcgtattgaacgtctctttacagctcctggagaaggtgcagaccacgctatagctataacggctagcaatctaaactggctaatgcttgttgatcctagttggacaaaggaacgattgataccgattttggattttaagcacacggctgcagaaccagcatggaatggttatcttcatagtgatgctatgccttcaattgcagtagcggagcttatcaagccttgttttcttaaccttataccttggatcaaaaatctttcttgggagaaagatttttcagttcgagcctcgcaatggcttggtttaatgagaatgttccatcctgatgaaccttccagcccttctggaaatgaaatgcgttccattttgcgatcaatatctgacgaggtgagaaatcgttttatttcttggttgggactggttgggcagaaaaacgagagcggctgggctaattacgtgattccattaatcagagaggattggcccaaagaacgccaatataggacaacaggttcggtgaaggcgtggattggtctacttgacgatacttacgataactttccggtggtctatgatgcagtaaaaacactcttggtgccaatagagacatttgatcaccagttctaccgtttcactcgagagtttggtggtaaaaagccaattaccatgctttttccatcagcgactcttgatctaatggatagaataaccccacagaggctcacccgacctccagatgagttacagaagatacttggcctaattgaagagacagaaccaagcctaatcaaggattcgcggtacttacggcttattgagcttgttgagaaaaattag

SEQ ID NO: 18985 - DNA, 594 bp, Yersinia nurmii
atggctagatgcacagcaccaagaaatggacaccgtacagcgagcggagctgcagcttgccccgcatgcagtagccgttacggaggctatcgctcgtactcttcatattcggttccttcctatccctcttcagggaatagtgtcagtggatctggtagcgacggcggatctagcagcagcagtaaaccaggctggtcgcgaactggctcatccgcagtgtacactcctgccgaggtgagaacgctcacgccagtccgagaaaacgtcgagaaacgagcagccgtacctgatcttcgagatgtctttctttgccatgcatgggacgaccgcaaaggtgcagccaaagaactgcatgaccagctagaatctcgcggtgtatcggtttggttcagtgaaaaggatgtcctcctcggagcaacattgctacgcgaaatagataagggcctagcgaagtcgcgagtaggaattgtgctggtgacccctgcgttgttgaagcgtcttgcaggagaaggcattgcagacaaagagctttcggcactcctggctcgtgatctgctcgttcctattgtacacgacacaaattatgaagcttga

SEQ ID NO: 18986 - DNA, 1434 bp, Yersinia pseudotuberculosis
atgaaaagagaacacctgcgtctcatcgacagcctgtctaaagagctagcagaaggaaatctggcagcttttgcaggtgcaggtttgtccagatcagcaggctttgtggattggaagtcattactgaagccaatcgctgacgacctggatcttgatgtagagagggaatgggatctggttacactggcgcaataccacgctaatgccaatgcgaccaaccgctcgaagctgaatcagatactggtcactgaattttcgttaggcgtagcaccgactgaaaatcacgagatcctaaccaggctacccattcagacctattggacaacaaactacgacaaactcatcgagaacgccctcgagcgaaatggtaaagttcctgacgttaagtacacaaacaagcagttggcaacgacccgtcccaaaagagatgctgtagtttacaagatgcatggggatgttgatcactcatccgaggcggtactaatccgtgatgactatgaacgctatcacgtaaagatgcagccgttcatcactgcactcagcggtgacctaatagctaaaacctttctgtttctgggtttcagcttcactgatcccaaccttgagtacatcctaagtcgagttcgaattcagttcgcgcaggaccaacgccaacactactgcatccttcgtaaggcaagcaggttggaaggcgaggatttggccgaatttgaatatcgtcagcgcaaagaagacctcttcaaacatgaacttctacgggttgggatcaaggctgtatacgtcgatgaattctcagagataactgacattctgagagaaattgaacgtcgtcacaaacgtaaaaccatttttatctctggtgcagcccatgactacagcccctggaccgaatccgaggcggaacagtttgtttacaaactaagtaaggcgataagcaaggagcactaccgggttatttctgggtttggcttgggggttggcagtgctgttatctctggcgtactcgaacagaccatcatgaatggtggtcgcctcgataacgatcaattagtcttgcgcccttttcctcaaagccaatccggcgaacgctcactaccggagctctggacggagtaccgccgcaacatgctcgctcatgccggcgtcgcactctttctatttggcaacaaactggaccgttctggagctgtggtgccatccagcggtatgcgcgaagagtttgatattgcagttgctaacggtcttttcgtcatccccgttggcattaccggctcgatttctgctgacctatggaaagaactaattataacgtacgacgaatcgaagcatgatcaaggtaagaaaattacctctctgcttcacgagttgggcacccaaggtactgacttggagcgtgctcacgacatcatcctgtctctccttcccctcatttaa

SEQ ID NO: 18987 - DNA, 441 bp, Yersinia pseudotuberculosis
atggcaagaaaagtatttttcagtttccagtacgaagatgtgcaacgtgcgatgaatgtacgaaacagcaacgtaatcgcttcagataccaaggctggtttcatcgacaaagctgatttcgaagaggttgagcgtaagggcgatgcggctataaagaaatggataaacgatcagcttcacggtacgagcgtcactgtagttcttattggagccacaaccaataagagtaaatgggtaaagtacgagatagagcaaagcattgagcgagggaatggcatcttaaccatcgatatcagcaaaatcgcagatctcaaagggaacactaccgactgctgttcgcttcgtgttcctggcaccacccactatctatggaacaacggaaatggtcgggaaaacataggtaagtgggttgaggctgcggcgaagacagctggcaaataa

SEQ ID NO: 18988 - DNA, 486 bp, Yersinia pseudotuberculosis
atgccgattcgtcagtcagaccttcttaacgcaggccaacgagggcaatttgccaagcgatttgggcagcccacagcctttctgagccacagccataaagacgcgcaattagcactaggtttacaggcattgctgaatgatcaagggtgggacgtctatatcgactggcaagatcagactatgcccgacaagccggagaccgagacggccctcaatattaaatcagccattgtgcgcgccgactggtttctctttctcgcgacacaatattcgacgacatcacgctggtgtccttgggaaatcggttttgctgatggtaaaaaagtctatgaccgcatcgctattatccccacgcaggacaatctgggccatttctatggtaacgaatatctaaatctctataacaaaatcgatgtatcttctggccatactggccttgcatttttcgacactcgcggcaatggcaaatgggtacaccatctttaa

SEQ ID NO: 18989 - DNA, 1434 bp, Yersinia frederiksenii
atgaaaagagaacacctgcgtctcatcgacagcctgtctaaagagctagcagaaggaaatctggcagtttttgcaggtgcaggtttgtccagatcagcaggctttgtggattggaagtcattactgaagccaatcgctgacgacctggatcttgatgtagagagggaatgggatctggttacactggcgcaataccacgctaatgccaatgcgaccaaccgctcgaagctgaatcagatactggtcactgaattttcgttaagcgtagcaccgactgaaaatcacgagatcctaaccaggctacccattcagacctattggacaacaaactacgacaaactcatcgagaacgccctcgagcgaaatggtaaagttcctgacgttaagtacacaaacaagcagttggctacgacccgtcccaaaagagatgctgtagtttacaagatgcatggggatgttgatcactcatccgaggcggtactaatccgtgatgactatgaacgctatcacgtaaagatgcagccgttcatcactgctctcagcggtgacctaatagctaaaacctttctgtttctgggtttcagcttcactgatcccaaccttgagtacatcctaagtcgagttcgaattcagttcgcgcaggaccaacgccaacactactgcatccttcgtaaggcaagcaggttggaaggcgaggatttggccgaatttgaatatcgtcagcgcaaagaagacctcttcaaacacgaacttctacgggttgggatcaaggctgtatacgtcgatgagttctcagagatcactgacattctgagagagattgaacgtcgtcacaaacgtaaaaccatttttatctctggtgcagcccatgactacagcccctggaccgaatccgaggcggaacagtttgtttacaaactaagtaaggcgataagcaaggagcactaccgggttatttctgggtttggcttgggggttggcagtgctgttatatctggcgtactcgaacagaccatcatgaatggtggtcgcctcgataacgatcaattagtcttgcgcccttttcctcaaagccaatccggcgaacgctcactaccagagctctggacggagtaccgccgcaacatgctcgctcatgccggcgtcgcactctttctattcggcaacaaactggaccgttctggagctgtggtgccatccagcggtatgcgcgaagagtttgatattgcagttgctaacggtcttttcgtcatccccgttggcattaccggctcgatttctgctgacctatggaaagaactaattataacgtacgacgaatcgaagcatgatcaaggtaagaagattacccctctgcttcacgagttgggcacccaaggttctgacttggagcgtgctcacgacatcatcctgtctctccttcccctcatttaa

SEQ ID NO: 18990 - DNA, 441 bp, Yersinia frederiksenii
atggcaagaaaagtatttttcagtttccagtacgaagatgtgcaacgtgcgatgaatgtacgaaacagcaacgtaatcgcttcagataccaaggctggtttcatcgacaaagctgatttcgaagaagttgagcgtaagggcgatgcggctataaagaaatggataaacgatcagcttcacggtacgagcgtcactgtagttcttattggagccacaaccaataagagtaaatgggtaaagtacgagatagagcaaagcattgagcgcgggaatggcatcttaaccatcgatatcagcaaaatcgcagatctcaaagggaatactaccgactgctgttcgcttcgtgttcctggcaccacccactatctatggaacaacggaaatggtcgggaaaacataggtaagtgggttgaggctgcggcgaagacagctggcaaataa

SEQ ID NO: 18991 - DNA, 486 bp, Yersinia frederiksenii
atgccgattcgtcagtcagaccttcttaacgcaggccaacgagggcaattttccaagcgatttgggcagcccacagcctttctgagccacagccataaagacgcgcaattagcactaggtttacaggcattgctgaatgatcaagggtgggacgtctatatcgactggcaagatcagactatgcccgacaagccggacaccgagacggccctcaatattaaatcagccattgtgcgcgccgactggtttctctttctcgcgacacaacattcgacgacatcacgctggtgtccttgggaaatcggttttgctgatggtaaaaaagtctatgaccgcatcgctattatccccacgcaggacaacctgggccatttctatggtaacgaatatctaaatctctataacaaaatcgacgtatcttctggccatactggccttgcatttttcgacactcgcggcaatggcaaatgggtacgcaatctttaa

SEQ ID NO: 18992 - DNA, 1434 bp, Yersinia similis; identical to SEQ ID NO: 18986

SEQ ID NO: 18993 - DNA, 441 bp, Yersinia similis; identical to SEQ ID NO: 18987

SEQ ID NO: 18994 - DNA, 486 bp, Yersinia similis; identical to SEQ ID NO: 18988

SEQ ID NO: 18995 - DNA, 1428 bp, Paraliobacillus sp. PM-2
gtgttagaaaaagcaattttaaaggaactaaaaaataataatttagctgtttttgcaggggcaggattatcaagaggttccggctttgtagattggaaagaattattgagggatattgcagatgaattagaacttgatgttgataaagaaatggatttagtttctgttgctcaataccactataatgctaatggtaggcagacaattaacgaagcaattattgaagagttccaaagaacatctgaaaaaaataaaaatatggatatattgtccaggttgcctattaatacttattggacgactaattatgactcaattattgaggatacattaagtagcgttaagaaagtaactgacgtgaaaataagccaaagtcaaatgaaaaattataagcctgatagagatgctgtagtttacaaaatgcatggagataaggaatttccagatgagactgtcattacaagagatgattatgaaagatacgatagtgacagacgaatgtttaccacacaactaaaaggtgaactaatttcaaagacctttttatttattggtttcagttttgaagatcctaatttagagcaaatattaagtcggattagggttgaattgcttggtaaaagcccaaaaaaccattattgtttctttagaaaagttaaccaatcagatgaacggtataagaatagtgatggatcttttaatgaagaagaatttaagtatgacaaggtcaaacaggatctaaaggttaaagacttaaaaagatacggtattaattcagtacttatagatgaatatgtagaaataactagaatacttgagaatatagaaaaaaagttcaagataaataaagttttcatatcgggaagtgcaaaagaatatgggaaatattcaaatgaagaggcaaaaaacctattgcacaacctctccaaatcattaatttctaggaatcaccatgttatatctggatttggtcttggagttgggagttatgtaataaatggctctttagaagaaatatttaataataaaaataaaagaacaaatgattatttaactcttcgaccatttccacaaaatgaatcaggcgggaaaacacttaaagaattatggaccgagtatagaaaagacatgattaatgatgcgggtgttatgttgttcttgtttggtaacaaggaaagtgatggaaaaactgttgaagcaaatggtatgattgaagaatttcaaatagcaaaagagctaaacaaatttatcatacctatagggtctacaggttatgctactgagaaaatttttaatgaagtaaagaaagacttaaaaaagtattggtacttgaaagaatctattaatatattagaagttgaaaaagatgagagtagaataatcgacgaaattcacaaaatatttgaaaaaataaggaggagtttataa

SEQ ID NO: 18996 - DNA, 483 bp, Paraliobacillus sp. PM-2
atggcgagaaaagtattctttagctttcattatgaaaaagatgcttggagagcaggtcaagtgagaaattcaaacataactcaggaagtaaaagggtaccttgatgctgctgagtgggaagaagttaagaaaaaaggtaacaaatcaataaaagactggatagacggacaactaaagggtacttctgtaactgtggtacttattggtcaagagacttcacaaagaaaatgggttcaatatgaaattgagcagagcttagaaaaaggtaataaactgttgggaatttatatacacaggctcaaaaaccaaaaaggtgaaaaagcaactcggggagataatccacttgataattatactgtagaagttgatggaaaaataaagaaggcttctaatgtatttaaaacttatttctgggatctagataacggctatgagaatttttcagattggattgaagaggctgcaaagatttcttacaagtaa

SEQ ID NO: 18997 - DNA, 1428 bp, Yersinia enterocolitica
atgccttttagtaatgaaatagaagcttttattaaagactatgttaaagatcttagtgaagatagcgcagctatttttgctggtgcaggaatgtcaaaaagccaagggtttgttgattggcctgaactgctaagcgatatagccgatgaacttggtttgagtattgataaggagaaggatttaataagccttgctcagtttcatgtaaatacaaaaaaaaatgcaaataaattaactcggaaaataatagaagagttctcagagcaggcagatgcctcagagacacactgtattctttcaaggctacccatacgaacatattggactacaaattatgactcattaattgaagattctttagaaaaatcttataaaatcccagatgttaaatataatatagaacaattaaacaataacagaccgaagcgtgatgctgttatttataaaatgcatggcgatgtcaaagaagcgaccaaagccgtactatataaagagcaatatgagcgatactataaaactcatgcgccatttattacagcattgagtggagatcttatttctaaaacatttctatttatagggtttagtttcacagacccaaatttagattatatacttagtcgtttatatacaaccaacacattaaacaaaagaacccattattgtttcatgaaagaggaaacagatcaagaccaagaaacacttaattataagaagcgaaagcaaaactttagaattgatgacttaaaaagatttggcatagaaacactgttaatagatgattatagggaaataccaaaaatattatctgaaattgaatttagatatttaaagaaaacagtatttatctcaggaagcgctgaagagtttggaaagtaccctcgtcaagaagctcaaaacttcattcatgatctggctagttcactagttaaaaacaactatagagttgtgaacggttttggatggggagttggcagcgccgtaataaatggtgcattagaagccgtatattccaatcctaaaaagtattctgaagaacaacttgtaatgaagcctttccctcaatcgccaagcaaaaatcatgatttaaaaaccttatgggaagaatatcgacaaaggatgatttcattggctggaattgcgttgtttatatttggaaataaatacagtgatggaaaagtaattaatgcacaaggagttcgtagagaattcgaaattgcaaaagacaaagggcttattttaataccaattgctccaactggttatatatcgcaagaattatatgctgagattgaaaaaaacccttcagaatactacggagataacgagtgggttttcgctatggtaaaagatatctgtagtgaagataataaaccgtcagagataataaaaaaaattatcgatctaattaatagactaaataaatag

SEQ ID NO: 18998 - DNA, 492 bp, Yersinia enterocolitica
atgtcaaacgagattaagaaaaatgtttttgttagtcatcatcataaagatgacgctagtgttgatggggtttcgcgtttagctgcagcaaagggttatcaactacgcaatagttctgtcagaatgaaacctgaaaaccagagacgtgctgatgaaaataaagttagtgataaaactatagcacgtttacttaggatgaaaatgaggtgggctggccaagttatagtcgttatagggaaagagacacatacaagaccctgggtaaattgggaaattcaagcagcgcatcagcttggaaaaccgatcataggtgtatatgagaatggtttaaaaggagatgtaaaactaccagaaaacctcgaaaaatatgcaacttctatcgttgcttggagaggtgaagctattatcaatgcactagaaggtaaaactagctttgaaaaacctgatggtacggatcggggtaaatcacaaggaggcaatgtcgaatgctaa

SEQ ID NO: 18999 - DNA, 603 bp, Yersinia enterocolitica
atgccacgcagaacatttttttcttttcactataaacctgatatctggcgcgcttggaatgtccgtaatagttgggttgtaaaggatgccaatgagatagaccaaggattctttgatagcagcgtgtttgaggcatcgaaaaaagagaatgacgatgcattaaaaacttttcttcgcaagggattagaaaacacttctgttacctgtgtccttgctggaacccaaacatggacacgacgatgggttcgttatgaaattgctcgcagcgttatcaagggcaatggcttgctaaccgtttatattcatggtgtccaaaacaatgacaaagagacatctataaagggtgctaatccattagatcaaatgggactttatagaaccgaacaaggtatctttctcgcagagtggaaaggtaaaaaatgggtgaaatatacagactatacccttgcaattccggagggagacctgtggttcacagcgccaaaaacgaacgatgtagtccaactatcaactcactgcctgagttacgatttcacaagccaagacggcaggaaaaatattggtggatggattgaaactgcagcaggaatggctggccgatga

SEQ ID NO: 19000 - DNA, 618 bp, Yersinia enterocolitica
atggcaagggaaacatttatttcttacaaatacagtgaagcacaagaccttagagatgttattttagaaaggttaggtgatgcagctgtatattacaggggtgaaacagcagattcgccggacataagcaacacgactgttgaaaatattaagataaaattaaaagatatgattttcggaacatcagtaactatattaatagtttcacctgaaatgataagtagcaaatggatagattgggaaataaaatattcaatgagggaggtaacaagagatgagaccacatcaagatgcaacggcatagttggtgttattatgaagataaatgatagttacgattggttagtttcaaaagaaacaaacgaagacggttgcactgttagatctataaaaaacaagaaattattaaaaatacttaatgaaaacagatataacttaataactgaaaatcatttctcatgccctaactgtaaaacttatagtcaattagaaggctctttcatatctttgattgatgaggatgacttccttaagaacccagacaagtatattgaaaatgcttttaataaagcaaataaaataaaagactataatatagttaaagtggatgtagaataa

SEQ ID NO: 19001 - DNA, 1188 bp, Yersinia enterocolitica
atgaacaatacttcaagcataagatctccctatcaggttatcgtgctaggtgcggtaaatgggcatgataatcgcctccgccataatattgatctggcgcttgagggacttggaatcccgactagcgtgatcaaatacctcagcgcgcattctgcctctacccggtgcttgaagtcgccgacgatggcagtatatttcggctcgctagcaaatacggacgatacagcacttgtcgcagagttgattgatgactcgatcgttatagctccggtcgtctccgatttgtcacaagtacctgtagaaataccgccgcagctcaggcatgtaaatgctattgtgttaggcaccgacgatgaaggcattgctcgtctcgtcacattagtccttgagacttttcatctattacgacgtgagcggcggttgttcatcagttacaagcgcacggggtctcagcctctagctgatcgactatatgatgcgctcgatgctcgcggctttgacgttttcattgacgtacggtcggtacctcctgccgcagacttccaatctcaactctggcatagaatgtctgattccgatgttgttgtgctgatcgatacaccaggtttcagagaaggccgctggacagccgaagagttggcgcgcgctaatgcgaccaatattcaaatcttgcacctactatggcctgggcaaaaggaagacccggcatcatccttcagtcatttcatgaagctaagacggagagattttgttggatttataccaatgcgggggcgctgggcaacaaaagggttggtgaaaagaatttgcgacgaggtcgaacggctgcgcgcaccggcaattgctgcccgccaccgatatttggttgataacttttgtgatgctgcgcgcgatgaggggctttatccaagtattcagattgaaggttggatttctcttaaggtcaattcaaaacgggtgctcgctatcgtgccagcagtggggatacctacctccgatcgcattaacgaagttttcgaggccatcacagaccatgcggatgaaacgagagagatatgggtgatttatgacaataggggcatactaaaaacttggctctcacatcttgattggcttgattcctatttaccaatccgtgctgtacagatgtcgaaagcggcacaacttctgcaggagtccattagatga

SEQ ID NO: 19002 - DNA, 1467 bp, Stenotrophomonas maltophilia
atggctaggaaggcgaagcgcgctttctccccagagatcggggccttcatcgagcgatatgtcgatgagctggttaacggcaaggcctccgtgttcgtcggtgccgggatgtcggtggccgccgggttcgtgaattggaaaggtctgctcaaggaagttgctgcggaactgggcttggatgtggaccgtgaaacgaacttggttgcgctggctcagtatcacctcaacgagcgtaacaatcgcagcgtcctgaatcagaagatcctcgctgaattcaccgaagatcagcagctgacgacctcgcatcacgtgctggcgcgtttgcctattggacactactggaccacaaattacgaccggcttattgaaacggctctggtccaggagcagcgccgtcccgacgtcaagttctctgtcgaacagatgaaactaggcaagccggggcacgacgcgatcgtctacaagatgcatggggatgtagagcatcccgaatcagccatcctgaccaaggatgactacgaaggctacttccgtgagcacgagcatttcgtaaccgccctcagcggcgatctggtccagaccacgatgctgttccttggcttcagctttaccgatccgaacatcgactatgtgctcagtcgcgtacgagtgacgttacgcaagaagccgaagaaccactactgcgtgctctgcaaactgcagcgtgctgctcgggagaagctggagaactttgagtaccggaagcgacagcaggagtacctcatcaaggacttgagccgaatcggcatacagtccttgatgatcgatgactacagcgaggttcctctactcctgagtgcaattgaatcgagatatcgacagcgcacggtgtttgtctccggtgcggctcataccttccctgcgccgtgggatccggcgcgtgcgcaccaattcctttccggattgagtgcagctctgatccgcaagcgtttgaatgtggtcacaggattcggcttgggcgtgggcacctcgattgtgagcggggcccttgagaccatccttggcaatccgggtcggtaccgggagaagcagctacaagccagtccattcccggtgtcggccgattcccggaccaggcgccctctatttcgccagcatcgcgaaaagattctggccaaatgcggaatagccattttcgcattcggcacgaagctggaaggcaagaaggtcgtggaagccaaaggcatgcgcgaggaattcgacatcgcacggcaggatggcctgattgtcattccggtcggcgcaactggcggcgttgccaaagaactctgggtccaggcagctgctcggttcgacgagttctatcccaacgcaagtcccgccttcgcgcgaaatttcaagaccttgggacgggaggctgctgcgcctgaagacctgattcgtgctttgacaagcatgatcgatgaactgaggcggcagactttctag

SEQ ID NO: 19003 - DNA, 483 bp, Stenotrophomonas maltophilia
atgactcgcagagttttctacagcttccattaccagcccgatgcttggcgagcggcaatgattcgaaagatcggtgcggttgaaggaaacatctccgccaatgacaacgattgggaaacgatcaagcgtggcggcgactcggccatcacgcgctggatcaacggacagctggacggccgaagttgcaccgtggttctggttggcgccgaaaccgctcagcggcggtgggtgcagtacgagatcgaacaatcatggcgaaagggcatgggggtctttggcatccgcatccatcgcctgctcaacgccaatcgccttccatcagatcgcggcgcaaatccgttcgataccgttcaaatcggtggacagccgctaagcacgattgtgcctctctacgacccgccaggccaagacagccaagcggtctacggcagcatctccgcaaatcttcagaactggatcgagcgtgccgttaacgcccgttag

SEQ ID NO: 19004 - DNA, 675 bp, Stenotrophomonas maltophilia
atgggtcgaaagatcttcgtttcgtataaatacgcagatagtcaggttcagcctgttagaggccaccttcttgggacaacggttcgtcactacgtggatatgctgcaggcaaaactggagcaggccgatcacatcaacaagggcgaggacgatggggagagtctcgtcgccttcgccgaggagaccattgcctccaagctgcgtgatcgaatctacgatagcaccatgaccttggtcatggtttcgccggggatgcacgattccaccaagccagaaaaggaccagtggatgccctgggagatcagctattcgctgcggaagaagactcgaaacgatcggcagagtggtcccaatgcgatgctgggcatcgttcttccggacaccaccggtagctacaactacttctttgaggaaaagaactgccctcactgtgcgtctgttacatggcggacgagtaagaccttctccatcatcggtcgcaatgtcttcaatgccaggaagctggagatggcatcctgcgataaccactcgggcgggaagagctatcgcggcaatcacagctatatcaaatttgtgaggtggagcgacttctacgcggactacggcaagcatctggatcaagcctatgagatccagaagtccatcgatgattacaaaatctcctgtgacgtctaa

SEQ ID NO: 19005 - DNA, 507 bp, Stenotrophomonas maltophilia
atggcaatttcagtcagttcgcttcgccaagcctcttatcgcagcagtgttgccctggccagtacctcaatggaggcgcgcagccgcgggatacgaactgtgtttctatgccatagccacaaggatcaagagctggtgaagggtttcgtgcggatgctgcacgatagcggttggtcggtctacgttgactgggccgacagctccatgccgagcacaccaaacccagaaactgctcgcaagattcgcgaaaagatagtgcaactcgactacttcattttcctggcaactgagaatgcaatggcatctcgctggtgcccgtgggagctggggtacgccgacggaaagaagtcgaatgaccgcattcttgtggtgcccaccgtggagcacggccgtgaacacggcaacgagtatgtaggtctgtacaagcgattggacagcaattccctgggccacgtgcaagtgttcaatccggggtctagctatggcacggcagtgcgatcactgtga

SEQ ID NO: 19006 - DNA, 1419 bp, Roseburia faecis
atgattacaatatcagaatttaaaaaagcttattcgaaagcaatccaagaaggatatgctgcaatatttgcaggtgcaggattatctaaagcatctggatttgtaaattggaaagaactactaaatgatttggcacaagaaattcagttggatgtagaaaaagagccagatttagtggaagtagcacaatattattgtaatgaaaaaagaagtagaaatgaaataaatgaaaagattttaaatcggtttgtaacagaatcgcaggaaagcgaaagtatacgcatattagcggatttaccaattcgagtattttggactaccaattatgaccacttacttgaagatacattaaaaaaatacggaaaacgtattgatattaaaatgaccattgaaagtttagcaactaacttgtcaggaaatgatgcagttgtatataaaatgcatggtgattatttagacccttcatcatgtgtgatattaaaagatgactatgaaatctataatgacaaaagacaattattcacaacaacattgcaaggagatttggtgtcaaaaacttttttatttataggttttagctttgaagacccaaatttaaaatatatactaagtagaataagaatcttattggataaaaatcgcaggacccattatttatttttaaaaaaaatacaaaaagacgattataagaaaagatccaaaaactattattatgatttaaataaacaggaattacaaatacatgatttaaaacgttatggtattgaaacagttcttattgatagttatgatcaaattcctgctattttaaaggaaataaaaacagcatcaaaatgtaaaaatatatttatatctggagctgctcatgaatatggaaaagattgggaaacaacagcaccactatttattaaaaagttagttagtagtttatgtcaaaaagattacagaataatcacaggtcatgcaagaggtatcggaagttacgtgattagttctgtaattgaggaatgccaatcaaatattggaaaacttgaaaaacatttgatgattaaggcttttccttatgaagataaaaatagatttgattatatacaattaaaaaaggagtatcgaaagggaatttataaatacgcaggcatagcaatttttatgtttggaaacaaagagtcagatgctggaactattttggcagatggtgtatatgaagaatataaaattgcattagaatctggagcttacataattcctataggatctactggttatatggcaaagaaaatatgggatgaagtaagtttacatattaacgattttccatatttaaaagaggaggagaatattttacaaaattgtacgaatcctaataaagtaatcgacgcagttttaactgtagttaatataattcaaactaaatattaa

SEQ ID NO: 19007 - DNA, 783 bp, Roseburia faecis
atgaataatacaaaagaaatttttgatttttttatttctcatagtaaagaaaccaagcaattaatagtcattcctctagctcaatgcttgaaaagtattggcattgatgtatggatagatcgtaaagaaatattagtgggtaaccatatttattctgaaatccaagatgctatcacacgttccaaattttgtattgcagtaattgaccaaagtttcttaaaacgcacttggccaatgaaggaactagaactctttaataaaaaaaataatacgagtatcattcctatctttgtagatttagaaaaagcaattgtgtataacgaaattccgtggttagatggaattgcatttgaaaaaatgcatactgagccttttgacttaaatgttcatatgagtatcttttgtagaattataagtcgcctttttaaagataacaatactaataagaattcaattgaaaaaacttttgaaagtattacgaaatacgattttccttgtaaagaaactttatcatcactaatatatttttctaaatataattcttccaatctacgattagcaagtattgatttatgtaatattggtggaataatatatgctatatcaaaaacatactctattcctaataatgttattactcagatgtttctatttagcaatattcttagagattattgctttaatgtgaatttcataccagattataatatttatataggaatgtataatgctatagttgcatcattaacacaactagatttgcttatacaaactattgtataa

SEQ ID NO: 19008 - DNA, 1422 bp, Streptococcus equi subsp. equi
gtgtttattattaaaggtgaagtatccagaaaagatttgattagagaaattgaaaaagctattaaaagtgatgaattaggagcatttattggagcaggattatcaattcctgccggattttgtagttggaaagaacttctaagagaacctgcagaagaaattggattagatgttgaaaaagaaagtgatttggttaacttggctcagtattattctaattcaaaaaagagaacatcaatagatgacttgatcaaaggtcaattttctcaattagtaaagcctactgaaaatcataaattattgtcgcagctgcccatttcaactttttggacaacaaattatgataagttaatagaaaaagctttagaaaataatatgaaaaagccttatgtaaaaacaaaggatgaacaattaagaggtacaaatcataattttgatgcgatagtatataagctgcatggtgatgtagaaactcccgaagatgcagtaataacaagaagtgattatgaagagtttggatataacaaaagaaaattatttagagaggttttagaaggagatttgcttactaaaacatttctatttttgggatttagttttgaagatccaaattttaactatgtaattggaaggttaagggtcttactcgatgaaaaaaatacaagaaaacattattgtattatgaaaagagtccaagatgctgatgaggattatgaatacaaaaaagcaagacaggagctacaaattgaagacctaaatagatatggtatttttacatatttagtaaataaatatgatgaaatcaccgaaatattgagcactcttgtcgatagatttagaaggaaaacaatatttatatctggtagtgcgtactcctattcggcttattctcagaaaactggcgaaaattttattcataaactatcttttgaactatcaaaaaatggttatcatattgtgaatggatatggtaaaggagtcggtgaatttgtattaaatggagttgcagattattgtttgactcacaagtccaaaataaatgattttttaacacttatgccttttcctcaaaatagttcattaggtattgatttagataagctatataaagaaaatagagagcagatgattgaaagttgtggtatagctatatttctttttggtaataaggaggcagaagatattgcaagcggagttatggacgaatatgagttatcaaaaaagcatggattagtatgtttgcctattgaatatactggcggtgcatctaaagaaatatatgatcaaacaactcaagaaatttcagataaaaatacaataagtgcaattgaacaggcaaataaacaatgcgatggcgatattgatatgtctgttaaaaacatagttcaagcagttaaaatattaaataaggaggaattttaa

SEQ ID NO: 19009 - DNA, 498 bp, Streptococcus equi subsp. equi
atggcaaaaagacaggtattttttagctttcattacgacaatgataattggagggcaggacaggttcgcaatatggggaaagtagacagtagttctaccttttctgataatgactgggaggaagtaaaagaaaaaactgaaagtaaaattaaagaatggattgatgaacagttaaataagcgttcatgtttggttgttttgattggagaaaaaacagcgaacagaaaatggataaattatgaaataagaaaagcatatgagttaaataaaggtattgtgggaatttatattcacaagttggagaattcactgggagagcaagatgataagggtaataatccttttgattatttaacattagaaggtgaaaaactttcaaagtatgttaaatgttttgactccaactattcatcaagtaaatatgtttatagcgatattaaagataatattgaaggtttaattgagtatggaataaaccataaaccatcaacttggtaa

SEQ ID NO: 19010 - DNA, 1422 bp, Streptococcus equi subsp. equi; identical to SEQ ID NO: 19008

SEQ ID NO: 19011 - DNA, 498 bp, Streptococcus equi subsp. equi; identical to SEQ ID NO: 19009

SEQ ID NO: 19012 - DNA, 1422 bp, Streptococcus equi subsp. equi; identical to SEQ ID NO: 19008

SEQ ID NO: 19013 - DNA, 498 bp, Streptococcus equi subsp. equi; identical to SEQ ID NO: 19009

SEQ ID NO: 19014 - DNA, 1422 bp, Streptococcus equi subsp. equi; identical to SEQ ID NO: 19008

SEQ ID NO: 19015 - DNA, 498 bp, Streptococcus equi subsp. equi; identical to SEQ ID NO: 19009

SEQ ID NO: 19016 - DNA, 1422 bp, Streptococcus equi subsp. equi; identical to SEQ ID NO: 19008

SEQ ID NO: 19017 - DNA, 498 bp, Streptococcus equi subsp. equi
atggcaaaaagacaggtattttttagctttcattacgacaatgataattggagggcaggacaggttcgcaatatggggaaagtagacagtagttctaccttttctgataatgactgggaggaagtaaaagaaagaactgaaagtaaaattaaagaatggattgatgaacagttaaataagcgttcatgtttggttgttttgattggagaaaaaacagcgaacagaaaatggataaattatgaaataagaaaagcatatgagttaaataaaggtattgtgggaatttatattcacaagttggagaattcactgggagagcaagatgataagggtaataatccttttgattatttaacattagaaggtgaaaaactttcaaagtatgttaaatgttttgactccaactattcatcaagtaaatatgtttatagcgatattaaagataatattgaaggtttaattgagtatggaataaaccataaaccatcaacttggtaa

SEQ ID NO: 19018 - DNA, 1422 bp, Streptococcus equi subsp. equi; identical to SEQ ID NO: 19008

SEQ ID NO: 19019 - DNA, 498 bp, Streptococcus equi subsp. equi; identical to SEQ ID NO: 19009

SEQ ID NO: 19020 - DNA, 1422 bp, Streptococcus equi subsp. equi; identical to SEQ ID NO: 19008

SEQ ID NO: 19021 - DNA, 498 bp, Streptococcus equi subsp. equi; identical to SEQ ID NO: 19009

SEQ ID NO: 19022 - DNA, 1422 bp, Streptococcus equi subsp. equi; identical to SEQ ID NO: 19008

SEQ ID NO: 19023 - DNA, 498 bp, Streptococcus equi subsp. equi; identical to SEQ ID NO: 19009

SEQ ID NO: 19024 - DNA, 1422 bp, Streptococcus equi subsp. equi; identical to SEQ ID NO: 19008

SEQ ID NO: 19025 - DNA, 498 bp, Streptococcus equi subsp. equi; identical to SEQ ID NO: 19009

SEQ ID NO: 19026 - DNA, 1422 bp, Streptococcus equi subsp. equi; identical to SEQ ID NO: 19008

SEQ ID NO: 19027 - DNA, 498 bp, Streptococcus equi subsp. equi; identical to SEQ ID NO: 19009

SEQ ID NO: 19028 - DNA, 1422 bp, Streptococcus equi subsp. equi; identical to SEQ ID NO: 19008

SEQ ID NO: 19029 - DNA, 498 bp, Streptococcus equi subsp. equi; identical to SEQ ID NO: 19009

SEQ ID NO: 19030 - DNA, 1422 bp, Streptococcus equi subsp. equi; identical to SEQ ID NO: 19008

SEQ ID NO: 19031 - DNA, 498 bp, Streptococcus equi subsp. equi; identical to SEQ ID NO: 19009

SEQ ID NO: 19032 - DNA, 1422 bp, Streptococcus equi subsp. equi; identical to SEQ ID NO: 19008

SEQ ID NO: 19033 - DNA, 498 bp, Streptococcus equi subsp. equi; identical to SEQ ID NO: 19009

SEQ ID NO: 19034 - DNA, 1422 bp, Streptococcus equi subsp. equi; identical to SEQ ID NO: 19008

SEQ ID NO: 19035 - DNA, 498 bp, Streptococcus equi subsp. equi; identical to SEQ ID NO: 19009

SEQ ID NO: 19036 - DNA, 1422 bp, Streptococcus equi subsp. equi; identical to SEQ ID NO: 19008

SEQ ID NO: 19037 - DNA, 498 bp, Streptococcus equi subsp. equi; identical to SEQ ID NO: 19009

SEQ ID NO: 19038 - DNA, 1422 bp, Streptococcus equi subsp. equi; identical to SEQ ID NO: 19008

SEQ ID NO: 19039 - DNA, 498 bp, Streptococcus equi subsp. equi; identical to SEQ ID NO: 19009

SEQ ID NO: 19040 - DNA, 1422 bp, Streptococcus equi subsp. equi; identical to SEQ ID NO: 19008

SEQ ID NO: 19041 - DNA, 498 bp, Streptococcus equi subsp. equi; identical to SEQ ID NO: 19009

SEQ ID NO: 19042 - DNA, 1422 bp, Streptococcus equi subsp. equi; identical to SEQ ID NO: 19008

SEQ ID NO: 19043 - DNA, 498 bp, Streptococcus equi subsp. equi; identical to SEQ ID NO: 19009

SEQ ID NO: 19044 - DNA, 1422 bp, Streptococcus equi subsp. equi; identical to SEQ ID NO: 19008

SEQ ID NO: 19045 - DNA, 498 bp, Streptococcus equi subsp. equi; identical to SEQ ID NO: 19009

SEQ ID NO: 19046 - DNA, 1422 bp, Streptococcus equi subsp. equi; identical to SEQ ID NO: 19008

SEQ ID NO: 19047 - DNA, 498 bp, Streptococcus equi subsp. equi; identical to SEQ ID NO: 19009

SEQ ID NO: 19048 - DNA, 1422 bp, Streptococcus equi subsp. equi; identical to SEQ ID NO: 19008

SEQ ID NO: 19049 - DNA, 498 bp, Streptococcus equi subsp. equi; identical to SEQ ID NO: 19009

SEQ ID NO: 19050 - DNA, 1422 bp, Streptococcus equi subsp. equi; identical to SEQ ID NO: 19008

SEQ ID NO: 19051 - DNA, 498 bp, Streptococcus equi subsp. equi; identical to SEQ ID NO: 19009

SEQ ID NO: 19052 - DNA, 1422 bp, Streptococcus equi subsp. equi; identical to SEQ ID NO: 19008

SEQ ID NO: 19053 - DNA, 498 bp, Streptococcus equi subsp. equi; identical to SEQ ID NO: 19009

SEQ ID NO: 19054 - DNA, 1422 bp, Streptococcus equi subsp. equi; identical to SEQ ID NO: 19008

SEQ ID NO: 19055 - DNA, 498 bp, Streptococcus equi subsp. equi; identical to SEQ ID NO: 19009

SEQ ID NO: 19056 - DNA, 1422 bp, Streptococcus equi subsp. equi; identical to SEQ ID NO: 19008

SEQ ID NO: 19057 - DNA, 498 bp, Streptococcus equi subsp. equi; identical to SEQ ID NO: 19009

SEQ ID NO: 19058 - DNA, 1422 bp, Streptococcus equi subsp. equi; identical to SEQ ID NO: 19008

SEQ ID NO: 19059 - DNA, 498 bp, Streptococcus equi subsp. equi; identical to SEQ ID NO: 19009

SEQ ID NO: 19060 - DNA, 1422 bp, Streptococcus equi subsp. equi; identical to SEQ ID NO: 19008

SEQ ID NO: 19061 - DNA, 498 bp, Streptococcus equi subsp. equi; identical to SEQ ID NO: 19009

SEQ ID NO: 19062 - DNA, 1422 bp, Streptococcus equi subsp. equi; identical to SEQ ID NO: 19008

SEQ ID NO: 19063 - DNA, 498 bp, Streptococcus equi subsp. equi; identical to SEQ ID NO: 19009

SEQ ID NO: 19064 - DNA, 1422 bp, Streptococcus equi subsp. equi; identical to SEQ ID NO: 19008

SEQ ID NO: 19065 - DNA, 498 bp, Streptococcus equi subsp. equi; identical to SEQ ID NO: 19009

SEQ ID NO: 19066 - DNA, 1422 bp, Streptococcus equi subsp. equi; identical to SEQ ID NO: 19008

SEQ ID NO: 19067 - DNA, 498 bp, Streptococcus equi subsp. equi; identical to SEQ ID NO: 19009

SEQ ID NO: 19068 - DNA, 1422 bp, Streptococcus equi subsp. equi; identical to SEQ ID NO: 19008

SEQ ID NO: 19069 - DNA, 498 bp, Streptococcus equi subsp. equi; identical to SEQ ID NO: 19009

SEQ ID NO: 19070 - DNA, 1422 bp, Streptococcus equi subsp. equi; identical to SEQ ID NO: 19008

SEQ ID NO: 19071 - DNA, 498 bp, Streptococcus equi subsp. equi; identical to SEQ ID NO: 19009

SEQ ID NO: 19072 - DNA, 1422 bp, Streptococcus equi subsp. equi; identical to SEQ ID NO: 19008

SEQ ID NO: 19073 - DNA, 498 bp, Streptococcus equi subsp. equi; identical to SEQ ID NO: 19009

SEQ ID NO: 19074 - DNA, 1422 bp, Streptococcus equi subsp. equi; identical to SEQ ID NO: 19008

SEQ ID NO: 19075 - DNA, 498 bp, Streptococcus equi subsp. equi; identical to SEQ ID NO: 19009

SEQ ID NO: 19076 - DNA, 1422 bp, Streptococcus equi subsp. equi; identical to SEQ ID NO: 19008

SEQ ID NO: 19077 - DNA, 498 bp, Streptococcus equi subsp. equi; identical to SEQ ID NO: 19009

SEQ ID NO: 19078 - DNA, 1422 bp, Streptococcus equi subsp. equi; identical to SEQ ID NO: 19008

SEQ ID NO: 19079 - DNA, 498 bp, Streptococcus equi subsp. equi; identical to SEQ ID NO: 19009

SEQ ID NO: 19080 - DNA, 1422 bp, Streptococcus equi subsp. equi; identical to SEQ ID NO: 19008

SEQ ID NO: 19081 - DNA, 498 bp, Streptococcus equi subsp. equi; identical to SEQ ID NO: 19009

SEQ ID NO: 19082 - DNA, 1422 bp, Streptococcus equi subsp. equi; identical to SEQ ID NO: 19008

SEQ ID NO: 19083 - DNA, 498 bp, Streptococcus equi subsp. equi; identical to SEQ ID NO: 19009

SEQ ID NO: 19084 - DNA, 1422 bp, Streptococcus equi subsp. equi; identical to SEQ ID NO: 19008

SEQ ID NO: 19085 - DNA, 498 bp, Streptococcus equi subsp. equi; identical to SEQ ID NO: 19009

SEQ ID NO: 19086 - DNA, 1422 bp, Streptococcus equi subsp. equi; identical to SEQ ID NO: 19008

SEQ ID NO: 19087 - DNA, 498 bp, Streptococcus equi subsp. equi; identical to SEQ ID NO: 19009

SEQ ID NO: 19088 - DNA, 1422 bp, Streptococcus equi subsp. equi; identical to SEQ ID NO: 19008

SEQ ID NO: 19089 - DNA, 498 bp, Streptococcus equi subsp. equi; identical to SEQ ID NO: 19009

SEQ ID NO: 19090 - DNA, 1422 bp, Streptococcus equi subsp. equi; identical to SEQ ID NO: 19008

SEQ ID NO: 19091 - DNA, 498 bp, Streptococcus equi subsp. equi; identical to SEQ ID NO: 19009

SEQ ID NO: 19092 - DNA, 1422 bp, Streptococcus equi subsp. equi; identical to SEQ ID NO: 19008

SEQ ID NO: 19093 - DNA, 498 bp, Streptococcus equi subsp. equi; identical to SEQ ID NO: 19009

SEQ ID NO: 19094 - DNA, 1422 bp, Streptococcus equi subsp. equi; identical to SEQ ID NO: 19008

SEQ ID NO: 19095 - DNA, 498 bp, Streptococcus equi subsp. equi; identical to SEQ ID NO: 19009

SEQ ID NO: 19096 - DNA, 1422 bp, Streptococcus equi subsp. equi; identical to SEQ ID NO: 19008

SEQ ID NO: 19097 - DNA, 498 bp, Streptococcus equi subsp. equi; identical to SEQ ID NO: 19009

SEQ ID NO: 19098 - DNA, 1422 bp, Streptococcus equi subsp. equi; identical to SEQ ID NO: 19008

SEQ ID NO: 19099 - DNA, 498 bp, Streptococcus equi subsp. equi; identical to SEQ ID NO: 19009

SEQ ID NO: 19100 - DNA, 1422 bp, Streptococcus equi subsp. equi; identical to SEQ ID NO: 19008

SEQ ID NO: 19101 - DNA, 498 bp, Streptococcus equi subsp. equi; identical to SEQ ID NO: 19009

SEQ ID NO: 19102 - DNA, 1422 bp, Streptococcus equi subsp. equi; identical to SEQ ID NO: 19008

SEQ ID NO: 19103 - DNA, 498 bp, Streptococcus equi subsp. equi; identical to SEQ ID NO: 19009

SEQ ID NO: 19104 - DNA, 1422 bp, Streptococcus equi subsp. equi; identical to SEQ ID NO: 19008

SEQ ID NO: 19105 - DNA, 498 bp, Streptococcus equi subsp. equi; identical to SEQ ID NO: 19009

SEQ ID NO: 19106 - DNA, 1422 bp, Streptococcus equi subsp. equi; identical to SEQ ID NO: 19008

SEQ ID NO: 19107 - DNA, 498 bp, Streptococcus equi subsp. equi; identical to SEQ ID NO: 19009

SEQ ID NO: 19108 - DNA, 1422 bp, Streptococcus equi subsp. equi; identical to SEQ ID NO: 19008

SEQ ID NO: 19109 - DNA, 498 bp, Streptococcus equi subsp. equi; identical to SEQ ID NO: 19009

SEQ ID NO: 19110 - DNA, 1422 bp, Streptococcus equi subsp. equi; identical to SEQ ID NO: 19008

SEQ ID NO: 19111 - DNA, 498 bp, Streptococcus equi subsp. equi; identical to SEQ ID NO: 19009

SEQ ID NO: 19112 - DNA, 1422 bp, Streptococcus equi subsp. equi; identical to SEQ ID NO: 19008

SEQ ID NO: 19113 - DNA, 498 bp, Streptococcus equi subsp. equi; identical to SEQ ID NO: 19009

SEQ ID NO: 19114 - DNA, 1422 bp, Streptococcus equi subsp. equi; identical to SEQ ID NO: 19008

SEQ ID NO: 19115 - DNA, 498 bp, Streptococcus equi subsp. equi; identical to SEQ ID NO: 19009

SEQ ID NO: 19116 - DNA, 1422 bp, Streptococcus equi subsp. equi; identical to SEQ ID NO: 19008

SEQ ID NO: 19117 - DNA, 498 bp, Streptococcus equi subsp. equi; identical to SEQ ID NO: 19009

SEQ ID NO: 19118 - DNA, 1422 bp, Streptococcus equi subsp. equi; identical to SEQ ID NO: 19008

SEQ ID NO: 19119 - DNA, 498 bp, Streptococcus equi subsp. equi; identical to SEQ ID NO: 19009

SEQ ID NO: 19120 - DNA, 1422 bp, Streptococcus equi subsp. equi; identical to SEQ ID NO: 19008

SEQ ID NO: 19121 - DNA, 498 bp, Streptococcus equi subsp. equi; identical to SEQ ID NO: 19009

SEQ ID NO: 19122 - DNA, 1422 bp, Streptococcus equi subsp. equi; identical to SEQ ID NO: 19008

SEQ ID NO: 19123 - DNA, 498 bp, Streptococcus equi subsp. equi; identical to SEQ ID NO: 19009

SEQ ID NO: 19124 - DNA, 1422 bp, Streptococcus equi subsp. equi; identical to SEQ ID NO: 19008

SEQ ID NO: 19125 - DNA, 498 bp, Streptococcus equi subsp. equi; identical to SEQ ID NO: 19009

SEQ ID NO: 19126 - DNA, 1422 bp, Streptococcus equi subsp. equi; identical to SEQ ID NO: 19008

SEQ ID NO: 19127 - DNA, 498 bp, Streptococcus equi subsp. equi; identical to SEQ ID NO: 19009

SEQ ID NO: 19128 - DNA, 1422 bp, Streptococcus equi subsp. equi; identical to SEQ ID NO: 19008

SEQ ID NO: 19129 - DNA, 498 bp, Streptococcus equi subsp. equi; identical to SEQ ID NO: 19009

SEQ ID NO: 19130 - DNA, 1422 bp, Streptococcus equi subsp. equi; identical to SEQ ID NO: 19008

SEQ ID NO: 19131 - DNA, 498 bp, Streptococcus equi subsp. equi; identical to SEQ ID NO: 19009

SEQ ID NO: 19132 - DNA, 1422 bp, Streptococcus equi subsp. equi; identical to SEQ ID NO: 19008

SEQ ID NO: 19133 - DNA, 498 bp, Streptococcus equi subsp. equi; identical to SEQ ID NO: 19009

SEQ ID NO: 19134 - DNA, 1422 bp, Streptococcus equi subsp. equi; identical to SEQ ID NO: 19008

SEQ ID NO: 19135 - DNA, 498 bp, Streptococcus equi subsp. equi; identical to SEQ ID NO: 19009

SEQ ID NO: 19136 - DNA, 1422 bp, Streptococcus equi subsp. equi; identical to SEQ ID NO: 19008

SEQ ID NO: 19137 - DNA, 498 bp, Streptococcus equi subsp. equi; identical to SEQ ID NO: 19009

SEQ ID NO: 19138 - DNA, 1422 bp, Streptococcus equi subsp. equi; identical to SEQ ID NO: 19008

SEQ ID NO: 19139 - DNA, 498 bp, Streptococcus equi subsp. equi; identical to SEQ ID NO: 19009

SEQ ID NO: 19140 - DNA, 1422 bp, Streptococcus equi subsp. equi; identical to SEQ ID NO: 19008

SEQ ID NO: 19141 - DNA, 498 bp, Streptococcus equi subsp. equi; identical to SEQ ID NO: 19009

SEQ ID NO: 19142 - DNA, 1422 bp, Streptococcus equi subsp. equi; identical to SEQ ID NO: 19008

SEQ ID NO: 19143 - DNA, 498 bp, Streptococcus equi subsp. equi; identical to SEQ ID NO: 19009

SEQ ID NO: 19144 - DNA, 1422 bp, Streptococcus equi subsp. equi; identical to SEQ ID NO: 19008

SEQ ID NO: 19145 - DNA, 498 bp, Streptococcus equi subsp. equi; identical to SEQ ID NO: 19009

SEQ ID NO: 19146 - DNA, 1422 bp, Streptococcus equi subsp. equi; identical to SEQ ID NO: 19008

SEQ ID NO: 19147 - DNA, 498 bp, Streptococcus equi subsp. equi; identical to SEQ ID NO: 19009

SEQ ID NO: 19148 - DNA, 1422 bp, Streptococcus equi subsp. equi; identical to SEQ ID NO: 19008

SEQ ID NO: 19149 - DNA, 498 bp, Streptococcus equi subsp. equi; identical to SEQ ID NO: 19009

SEQ ID NO: 19150 - DNA, 1422 bp, Streptococcus equi subsp. equi; identical to SEQ ID NO: 19008

SEQ ID NO: 19151 - DNA, 498 bp, Streptococcus equi subsp. equi; identical to SEQ ID NO: 19009

SEQ ID NO: 19152 - DNA, 1422 bp, Streptococcus equi subsp. equi; identical to SEQ ID NO: 19008

SEQ ID NO: 19153 - DNA, 498 bp, Streptococcus equi subsp. equi; identical to SEQ ID NO: 19009

SEQ ID NO: 19154 - DNA, 1422 bp, Streptococcus equi subsp. equi; identical to SEQ ID NO: 19008

SEQ ID NO: 19155 - DNA, 498 bp, Streptococcus equi subsp. equi; identical to SEQ ID NO: 19009

SEQ ID NO: 19156 - DNA, 1422 bp, Streptococcus equi subsp. equi; identical to SEQ ID NO: 19008

SEQ ID NO: 19157 - DNA, 498 bp, Streptococcus equi subsp. equi; identical to SEQ ID NO: 19009

SEQ ID NO: 19158 - DNA, 1422 bp, Streptococcus equi subsp. equi; identical to SEQ ID NO: 19008

SEQ ID NO: 19159 - DNA, 498 bp, Streptococcus equi subsp. equi; identical to SEQ ID NO: 19009

SEQ ID NO: 19160 - DNA, 1422 bp, Streptococcus equi subsp. equi; identical to SEQ ID NO: 19008

SEQ ID NO: 19161 - DNA, 498 bp, Streptococcus equi subsp. equi; identical to SEQ ID NO: 19009

SEQ ID NO: 19162 - DNA, 1422 bp, Streptococcus equi subsp. equi; identical to SEQ ID NO: 19008

SEQ ID NO: 19163 - DNA, 498 bp, Streptococcus equi subsp. equi; identical to SEQ ID NO: 19009

SEQ ID NO: 19164 - DNA, 1422 bp, Streptococcus equi subsp. equi; identical to SEQ ID NO: 19008

SEQ ID NO: 19165 - DNA, 498 bp, Streptococcus equi subsp. equi; identical to SEQ ID NO: 19009

SEQ ID NO: 19166 - DNA, 1422 bp, Streptococcus equi subsp. equi; identical to SEQ ID NO: 19008

SEQ ID NO: 19167 - DNA, 498 bp, Streptococcus equi subsp. equi; identical to SEQ ID NO: 19009

SEQ ID NO: 19168 - DNA, 1422 bp, Streptococcus equi subsp. equi; identical to SEQ ID NO: 19008

SEQ ID NO: 19169 - DNA, 498 bp, Streptococcus equi subsp. equi; identical to SEQ ID NO: 19009

SEQ ID NO: 19170 - DNA, 1422 bp, Streptococcus equi subsp. equi; identical to SEQ ID NO: 19008

SEQ ID NO: 19171 - DNA, 498 bp, Streptococcus equi subsp. equi; identical to SEQ ID NO: 19009

SEQ ID NO: 19172 - DNA, 1422 bp, Streptococcus equi subsp. equi; identical to SEQ ID NO: 19008

SEQ ID NO: 19173 - DNA, 498 bp, Streptococcus equi subsp. equi; identical to SEQ ID NO: 19009

SEQ ID NO: 19174 - DNA, 1422 bp, Streptococcus equi subsp. equi; identical to SEQ ID NO: 19008

SEQ ID NO: 19175 - DNA, 498 bp, Streptococcus equi subsp. equi; identical to SEQ ID NO: 19009

SEQ ID NO: 19176 - DNA, 1422 bp, Streptococcus equi subsp. equi; identical to SEQ ID NO: 19008

SEQ ID NO: 19177 - DNA, 498 bp, Streptococcus equi subsp. equi; identical to SEQ ID NO: 19009

SEQ ID NO: 19178 - DNA, 1422 bp, Streptococcus equi subsp. equi; identical to SEQ ID NO: 19008

SEQ ID NO: 19179 - DNA, 498 bp, Streptococcus equi subsp. equi; identical to SEQ ID NO: 19009

SEQ ID NO: 19180 - DNA, 1422 bp, Streptococcus equi subsp. equi; identical to SEQ ID NO: 19008

SEQ ID NO: 19181 - DNA, 498 bp, Streptococcus equi subsp. equi; identical to SEQ ID NO: 19009

SEQ ID NO: 19182 - DNA, 1422 bp, Streptococcus equi subsp. equi; identical to SEQ ID NO: 19008

SEQ ID NO: 19183 - DNA, 498 bp, Streptococcus equi subsp. equi; identical to SEQ ID NO: 19009

SEQ ID NO: 19184 - DNA, 1422 bp, Streptococcus equi subsp. equi; identical to SEQ ID NO: 19008

SEQ ID NO: 19185 - DNA, 498 bp, Streptococcus equi subsp. equi; identical to SEQ ID NO: 19009

SEQ ID NO: 19186 - DNA, 1422 bp, Streptococcus equi subsp. equi; identical to SEQ ID NO: 19008

SEQ ID NO: 19187 - DNA, 498 bp, Streptococcus equi subsp. equi; identical to SEQ ID NO: 19009

SEQ ID NO: 19188 - DNA, 1422 bp, Streptococcus equi subsp. equi; identical to SEQ ID NO: 19008

SEQ ID NO: 19189 - DNA, 498 bp, Streptococcus equi subsp. equi; identical to SEQ ID NO: 19009

SEQ ID NO: 19190 - DNA, 1422 bp, Streptococcus equi subsp. equi; identical to SEQ ID NO: 19008

SEQ ID NO: 19191 - DNA, 498 bp, Streptococcus equi subsp. equi; identical to SEQ ID NO: 19009

SEQ ID NO: 19192 - DNA, 1422 bp, Streptococcus equi subsp. equi; identical to SEQ ID NO: 19008

SEQ ID NO: 19193 - DNA, 498 bp, Streptococcus equi subsp. equi; identical to SEQ ID NO: 19009

SEQ ID NO: 19194 - DNA, 1422 bp, Streptococcus equi subsp. equi; identical to SEQ ID NO: 19008

SEQ ID NO: 19195 - DNA, 498 bp, Streptococcus equi subsp. equi; identical to SEQ ID NO: 19009

SEQ ID NO: 19196 - DNA, 1422 bp, Streptococcus equi subsp. equi; identical to SEQ ID NO: 19008

SEQ ID NO: 19197 - DNA, 498 bp, Streptococcus equi subsp. equi; identical to SEQ ID NO: 19009

SEQ ID NO: 19198 - DNA, 1422 bp, Streptococcus equi subsp. equi; identical to SEQ ID NO: 19008

SEQ ID NO: 19199 - DNA, 498 bp, Streptococcus equi subsp. equi; identical to SEQ ID NO: 19009

SEQ ID NO: 19200 - DNA, 1422 bp, Streptococcus equi subsp. equi; identical to SEQ ID NO: 19008

SEQ ID NO: 19201 - DNA, 498 bp, Streptococcus equi subsp. equi; identical to SEQ ID NO: 19009

SEQ ID NO: 19202 - DNA, 1422 bp, Streptococcus equi subsp. equi; identical to SEQ ID NO: 19008

SEQ ID NO: 19203 - DNA, 498 bp, Streptococcus equi subsp. equi; identical to SEQ ID NO: 19009

SEQ ID NO: 19204 - DNA, 1422 bp, Streptococcus equi subsp. equi; identical to SEQ ID NO: 19008

SEQ ID NO: 19205 - DNA, 498 bp, Streptococcus equi subsp. equi; identical to SEQ ID NO: 19009

SEQ ID NO: 19206 - DNA, 1422 bp, Streptococcus equi subsp. equi; identical to SEQ ID NO: 19008

SEQ ID NO: 19207 - DNA, 498 bp, Streptococcus equi subsp. equi; identical to SEQ ID NO: 19009

SEQ ID NO: 19208 - DNA, 1422 bp, Streptococcus equi subsp. equi; identical to SEQ ID NO: 19008

SEQ ID NO: 19209 - DNA, 498 bp, Streptococcus equi subsp. equi; identical to SEQ ID NO: 19009

SEQ ID NO: 19210 - DNA, 1422 bp, Streptococcus equi subsp. equi; identical to SEQ ID NO: 19008

SEQ ID NO: 19211 - DNA, 498 bp, Streptococcus equi subsp. equi; identical to SEQ ID NO: 19009

SEQ ID NO: 19212 - DNA, 1422 bp, Streptococcus equi subsp. equi; identical to SEQ ID NO: 19008

SEQ ID NO: 19213 - DNA, 498 bp, Streptococcus equi subsp. equi; identical to SEQ ID NO: 19009

SEQ ID NO: 19214 - DNA, 1422 bp, Streptococcus equi subsp. equi; identical to SEQ ID NO: 19008

SEQ ID NO: 19215 - DNA, 498 bp, Streptococcus equi subsp. equi; identical to SEQ ID NO: 19009

SEQ ID NO: 19216 - DNA, 1422 bp, Streptococcus equi subsp. equi; identical to SEQ ID NO: 19008

SEQ ID NO: 19217 - DNA, 498 bp, Streptococcus equi subsp. equi; identical to SEQ ID NO: 19009

SEQ ID NO: 19218 - DNA, 1422 bp, Streptococcus equi subsp. equi; identical to SEQ ID NO: 19008

SEQ ID NO: 19219 - DNA, 498 bp, Streptococcus equi subsp. equi; identical to SEQ ID NO: 19009

SEQ ID NO: 19220 - DNA, 1422 bp, Streptococcus equi subsp. equi; identical to SEQ ID NO: 19008

SEQ ID NO: 19221 - DNA, 498 bp, Streptococcus equi subsp. equi; identical to SEQ ID NO: 19009

SEQ ID NO: 19222 - DNA, 1422 bp, Streptococcus equi subsp. equi; identical to SEQ ID NO: 19008

SEQ ID NO: 19223 - DNA, 498 bp, Streptococcus equi subsp. equi; identical to SEQ ID NO: 19009

SEQ ID NO: 19224 - DNA, 1422 bp, Streptococcus equi subsp. equi; identical to SEQ ID NO: 19008

SEQ ID NO: 19225 - DNA, 498 bp, Streptococcus equi subsp. equi; identical to SEQ ID NO: 19009

SEQ ID NO: 19226 - DNA, 1422 bp, Streptococcus equi subsp. equi; identical to SEQ ID NO: 19008

SEQ ID NO: 19227 - DNA, 498 bp, Streptococcus equi subsp. equi; identical to SEQ ID NO: 19009

SEQ ID NO: 19228 - DNA, 1422 bp, Streptococcus equi subsp. equi; identical to SEQ ID NO: 19008

SEQ ID NO: 19229 - DNA, 498 bp, Streptococcus equi subsp. equi; identical to SEQ ID NO: 19009

SEQ ID NO: 19230 - DNA, 1422 bp, Streptococcus equi subsp. equi; identical to SEQ ID NO: 19008

SEQ ID NO: 19231 - DNA, 498 bp, Streptococcus equi subsp. equi; identical to SEQ ID NO: 19009

SEQ ID NO: 19232 - DNA, 1422 bp, Streptococcus equi subsp. equi; identical to SEQ ID NO: 19008

SEQ ID NO: 19233 - DNA, 498 bp, Streptococcus equi subsp. equi; identical to SEQ ID NO: 19009

SEQ ID NO: 19234 - DNA, 1422 bp, Streptococcus equi subsp. equi; identical to SEQ ID NO: 19008

SEQ ID NO: 19235 - DNA, 498 bp, Streptococcus equi subsp. equi; identical to SEQ ID NO: 19009

SEQ ID NO: 19236 - DNA, 1422 bp, Streptococcus equi subsp. equi; identical to SEQ ID NO: 19008

SEQ ID NO: 19237 - DNA, 498 bp, Streptococcus equi subsp. equi; identical to SEQ ID NO: 19009

SEQ ID NO: 19238 - DNA, 1422 bp, Streptococcus equi subsp. equi; identical to SEQ ID NO: 19008

SEQ ID NO: 19239 - DNA, 498 bp, Streptococcus equi subsp. equi; identical to SEQ ID NO: 19009

SEQ ID NO: 19240 - DNA, 1422 bp, Streptococcus equi subsp. equi; identical to SEQ ID NO: 19008

SEQ ID NO: 19241 - DNA, 498 bp, Streptococcus equi subsp. equi; identical to SEQ ID NO: 19009

SEQ ID NO: 19242 - DNA, 1422 bp, Streptococcus equi subsp. equi; identical to SEQ ID NO: 19008

SEQ ID NO: 19243 - DNA, 498 bp, Streptococcus equi subsp. equi; identical to SEQ ID NO: 19009

SEQ ID NO: 19244 - DNA, 1422 bp, Streptococcus equi subsp. equi; identical to SEQ ID NO: 19008

SEQ ID NO: 19245 - DNA, 498 bp, Streptococcus equi subsp. equi; identical to SEQ ID NO: 19009

SEQ ID NO: 19246 - DNA, 1422 bp, Streptococcus equi subsp. equi; identical to SEQ ID NO: 19008

SEQ ID NO: 19247 - DNA, 498 bp, Streptococcus equi subsp. equi; identical to SEQ ID NO: 19009

SEQ ID NO: 19248 - DNA, 1422 bp, Streptococcus equi subsp. equi; identical to SEQ ID NO: 19008

SEQ ID NO: 19249 - DNA, 498 bp, Streptococcus equi subsp. equi; identical to SEQ ID NO: 19009

SEQ ID NO: 19250 - DNA, 1422 bp, Streptococcus equi subsp. equi; identical to SEQ ID NO: 19008

SEQ ID NO: 19251 - DNA, 498 bp, Streptococcus equi subsp. equi; identical to SEQ ID NO: 19009

SEQ ID NO: 19252 - DNA, 1422 bp, Streptococcus equi subsp. equi; identical to SEQ ID NO: 19008

SEQ ID NO: 19253 - DNA, 498 bp, Streptococcus equi subsp. equi; identical to SEQ ID NO: 19009

SEQ ID NO: 19254 - DNA, 1422 bp, Streptococcus equi subsp. equi; identical to SEQ ID NO: 19008

SEQ ID NO: 19255 - DNA, 498 bp, Streptococcus equi subsp. equi; identical to SEQ ID NO: 19009

SEQ ID NO: 19256 - DNA, 1422 bp, Streptococcus equi subsp. equi; identical to SEQ ID NO: 19008

SEQ ID NO: 19257 - DNA, 498 bp, Streptococcus equi subsp. equi; identical to SEQ ID NO: 19009

SEQ ID NO: 19258 - DNA, 1422 bp, Streptococcus equi subsp. equi; identical to SEQ ID NO: 19008

SEQ ID NO: 19259 - DNA, 498 bp, Streptococcus equi subsp. equi; identical to SEQ ID NO: 19009

SEQ ID NO: 19260 - DNA, 1422 bp, Streptococcus equi subsp. equi; identical to SEQ ID NO: 19008

SEQ ID NO: 19261 - DNA, 498 bp, Streptococcus equi subsp. equi; identical to SEQ ID NO: 19009

SEQ ID NO: 19262 - DNA, 1422 bp, Streptococcus equi subsp. equi; identical to SEQ ID NO: 19008

SEQ ID NO: 19263 - DNA, 498 bp, Streptococcus equi subsp. equi; identical to SEQ ID NO: 19009

SEQ ID NO: 19264 - DNA, 1422 bp, Streptococcus equi subsp. equi; identical to SEQ ID NO: 19008

SEQ ID NO: 19265 - DNA, 498 bp, Streptococcus equi subsp. equi; identical to SEQ ID NO: 19009

SEQ ID NO: 19266 - DNA, 1422 bp, Streptococcus equi subsp. equi; identical to SEQ ID NO: 19008

SEQ ID NO: 19267 - DNA, 498 bp, Streptococcus equi subsp. equi; identical to SEQ ID NO: 19009

SEQ ID NO: 19268 - DNA, 1422 bp, Streptococcus equi subsp. equi; identical to SEQ ID NO: 19008

SEQ ID NO: 19269 - DNA, 498 bp, Streptococcus equi subsp. equi; identical to SEQ ID NO: 19009

SEQ ID NO: 19270 - DNA, 1422 bp, Streptococcus equi subsp. equi; identical to SEQ ID NO: 19008

SEQ ID NO: 19271 - DNA, 498 bp, Streptococcus equi subsp. equi; identical to SEQ ID NO: 19009

SEQ ID NO: 19272 - DNA, 1422 bp, Streptococcus equi subsp. equi; identical to SEQ ID NO: 19008

SEQ ID NO: 19273 - DNA, 498 bp, Streptococcus equi subsp. equi; identical to SEQ ID NO: 19009

SEQ ID NO: 19274 - DNA, 1422 bp, Streptococcus equi subsp. equi; identical to SEQ ID NO: 19008

SEQ ID NO: 19275 - DNA, 498 bp, Streptococcus equi subsp. equi; identical to SEQ ID NO: 19009

SEQ ID NO: 19276 - DNA, 1422 bp, Streptococcus equi subsp. equi; identical to SEQ ID NO: 19008

SEQ ID NO: 19277 - DNA, 498 bp, Streptococcus equi subsp. equi; identical to SEQ ID NO: 19009

SEQ ID NO: 19278 - DNA, 1422 bp, Streptococcus equi subsp. equi; identical to SEQ ID NO: 19008

SEQ ID NO: 19279 - DNA, 498 bp, Streptococcus equi subsp. equi; identical to SEQ ID NO: 19009

SEQ ID NO: 19280 - DNA, 1422 bp, Streptococcus equi subsp. equi; identical to SEQ ID NO: 19008

SEQ ID NO: 19281 - DNA, 498 bp, Streptococcus equi subsp. equi; identical to SEQ ID NO: 19009

SEQ ID NO: 19282 - DNA, 1422 bp, Streptococcus equi subsp. equi; identical to SEQ ID NO: 19008

SEQ ID NO: 19283 - DNA, 498 bp, Streptococcus equi subsp. equi; identical to SEQ ID NO: 19009

SEQ ID NO: 19284 - DNA, 1422 bp, Streptococcus equi subsp. equi; identical to SEQ ID NO: 19008

SEQ ID NO: 19285 - DNA, 498 bp, Streptococcus equi subsp. equi; identical to SEQ ID NO: 19009

SEQ ID NO: 19286 - DNA, 1422 bp, Streptococcus equi subsp. equi; identical to SEQ ID NO: 19008

SEQ ID NO: 19287 - DNA, 498 bp, Streptococcus equi subsp. equi; identical to SEQ ID NO: 19009

SEQ ID NO: 19288 - DNA, 1422 bp, Streptococcus equi subsp. equi; identical to SEQ ID NO: 19008

SEQ ID NO: 19289 - DNA, 498 bp, Streptococcus equi subsp. equi; identical to SEQ ID NO: 19009

SEQ ID NO: 19290 - DNA, 1422 bp, Streptococcus equi subsp. equi; identical to SEQ ID NO: 19008

SEQ ID NO: 19291 - DNA, 498 bp, Streptococcus equi subsp. equi; identical to SEQ ID NO: 19009

SEQ ID NO: 19292 - DNA, 1422 bp, Streptococcus equi subsp. equi; identical to SEQ ID NO: 19008

SEQ ID NO: 19293 - DNA, 498 bp, Streptococcus equi subsp. equi; identical to SEQ ID NO: 19009

SEQ ID NO: 19294 - DNA, 1422 bp, Streptococcus equi subsp. equi; identical to SEQ ID NO: 19008

SEQ ID NO: 19295 - DNA, 498 bp, Streptococcus equi subsp. equi; identical to SEQ ID NO: 19009

SEQ ID NO: 19296 - DNA, 1422 bp, Streptococcus equi subsp. equi; identical to SEQ ID NO: 19008

SEQ ID NO: 19297 - DNA, 498 bp, Streptococcus equi subsp. equi; identical to SEQ ID NO: 19009

SEQ ID NO: 19298 - DNA, 1422 bp, Streptococcus equi subsp. equi; identical to SEQ ID NO: 19008

SEQ ID NO: 19299 - DNA, 498 bp, Streptococcus equi subsp. equi; identical to SEQ ID NO: 19009

SEQ ID NO: 19300 - DNA, 1422 bp, Streptococcus equi subsp. equi; identical to SEQ ID NO: 19008

SEQ ID NO: 19301 - DNA, 498 bp, Streptococcus equi subsp. equi; identical to SEQ ID NO: 19009

SEQ ID NO: 19302 - DNA, 1422 bp, Streptococcus equi subsp. equi; identical to SEQ ID NO: 19008

SEQ ID NO: 19303 - DNA, 498 bp, Streptococcus equi subsp. equi; identical to SEQ ID NO: 19009

SEQ ID NO: 19304 - DNA, 1422 bp, Streptococcus equi subsp. equi; identical to SEQ ID NO: 19008

SEQ ID NO: 19305 - DNA, 498 bp, Streptococcus equi subsp. equi; identical to SEQ ID NO: 19009

SEQ ID NO: 19306 - DNA, 1422 bp, Streptococcus equi subsp. equi; identical to SEQ ID NO: 19008

SEQ ID NO: 19307 - DNA, 498 bp, Streptococcus equi subsp. equi; identical to SEQ ID NO: 19009

SEQ ID NO: 19308 - DNA, 1422 bp, Streptococcus equi subsp. equi; identical to SEQ ID NO: 19008

SEQ ID NO: 19309 - DNA, 498 bp, Streptococcus equi subsp. equi; identical to SEQ ID NO: 19009

SEQ ID NO: 19310 - DNA, 1422 bp, Streptococcus equi subsp. equi; identical to SEQ ID NO: 19008

SEQ ID NO: 19311 - DNA, 498 bp, Streptococcus equi subsp. equi; identical to SEQ ID NO: 19009

SEQ ID NO: 19312 - DNA, 1422 bp, Streptococcus equi subsp. equi; identical to SEQ ID NO: 19008

SEQ ID NO: 19313 - DNA, 498 bp, Streptococcus equi subsp. equi; identical to SEQ ID NO: 19009

SEQ ID NO: 19314 - DNA, 1422 bp, Streptococcus equi subsp. equi; identical to SEQ ID NO: 19008

SEQ ID NO: 19315 - DNA, 498 bp, Streptococcus equi subsp. equi; identical to SEQ ID NO: 19009

SEQ ID NO: 19316 - DNA, 1422 bp, Streptococcus equi subsp. equi; identical to SEQ ID NO: 19008

SEQ ID NO: 19317 - DNA, 498 bp, Streptococcus equi subsp. equi; identical to SEQ ID NO: 19009

SEQ ID NO: 19318 - DNA, 1422 bp, Streptococcus equi subsp. equi; identical to SEQ ID NO: 19008

SEQ ID NO: 19319 - DNA, 498 bp, Streptococcus equi subsp. equi; identical to SEQ ID NO: 19009

SEQ ID NO: 19320 - DNA, 1422 bp, Streptococcus equi subsp. equi; identical to SEQ ID NO: 19008

SEQ ID NO: 19321 - DNA, 498 bp, Streptococcus equi subsp. equi; identical to SEQ ID NO: 19009

SEQ ID NO: 19322 - DNA, 1422 bp, Streptococcus equi subsp. equi; identical to SEQ ID NO: 19008

SEQ ID NO: 19323 - DNA, 498 bp, Streptococcus equi subsp. equi; identical to SEQ ID NO: 19009

SEQ ID NO: 19324 - DNA, 1422 bp, Streptococcus equi subsp. equi; identical to SEQ ID NO: 19008

SEQ ID NO: 19325 - DNA, 498 bp, Streptococcus equi subsp. equi; identical to SEQ ID NO: 19009

SEQ ID NO: 19326 - DNA, 1422 bp, Streptococcus equi subsp. equi; identical to SEQ ID NO: 19008

SEQ ID NO: 19327 - DNA, 498 bp, Streptococcus equi subsp. equi; identical to SEQ ID NO: 19009

SEQ ID NO: 19328 - DNA, 1422 bp, Streptococcus equi subsp. equi; identical to SEQ ID NO: 19008

SEQ ID NO: 19329 - DNA, 498 bp, Streptococcus equi subsp. equi; identical to SEQ ID NO: 19009

SEQ ID NO: 19330 - DNA, 1422 bp, Streptococcus equi subsp. equi; identical to SEQ ID NO: 19008

SEQ ID NO: 19331 - DNA, 498 bp, Streptococcus equi subsp. equi; identical to SEQ ID NO: 19009

SEQ ID NO: 19332 - DNA, 1422 bp, Streptococcus equi subsp. equi; identical to SEQ ID NO: 19008

SEQ ID NO: 19333 - DNA, 498 bp, Streptococcus equi subsp. equi; identical to SEQ ID NO: 19009

SEQ ID NO: 19334 - DNA, 1422 bp, Streptococcus equi subsp. equi; identical to SEQ ID NO: 19008

SEQ ID NO: 19335 - DNA, 498 bp, Streptococcus equi subsp. equi; identical to SEQ ID NO: 19009

SEQ ID NO: 19336 - DNA, 1422 bp, Streptococcus equi subsp. equi; identical to SEQ ID NO: 19008

SEQ ID NO: 19337 - DNA, 498 bp, Streptococcus equi subsp. equi; identical to SEQ ID NO: 19009

SEQ ID NO: 19338 - DNA, 1422 bp, Streptococcus equi subsp. equi; identical to SEQ ID NO: 19008

SEQ ID NO: 19339 - DNA, 498 bp, Streptococcus equi subsp. equi; identical to SEQ ID NO: 19009

SEQ ID NO: 19340 - DNA, 1422 bp, Streptococcus equi subsp. equi; identical to SEQ ID NO: 19008

SEQ ID NO: 19341 - DNA, 498 bp, Streptococcus equi subsp. equi; identical to SEQ ID NO: 19009

SEQ ID NO: 19342 - DNA, 1422 bp, Streptococcus equi subsp. equi; identical to SEQ ID NO: 19008

SEQ ID NO: 19343 - DNA, 498 bp, Streptococcus equi subsp. equi; identical to SEQ ID NO: 19009

SEQ ID NO: 19344 - DNA, 1422 bp, Streptococcus equi subsp. equi; identical to SEQ ID NO: 19008

SEQ ID NO: 19345 - DNA, 498 bp, Streptococcus equi subsp. equi; identical to SEQ ID NO: 19009

SEQ ID NO: 19346 - DNA, 1422 bp, Streptococcus equi subsp. equi; identical to SEQ ID NO: 19008

SEQ ID NO: 19347 - DNA, 498 bp, Streptococcus equi subsp. equi; identical to SEQ ID NO: 19009

SEQ ID NO: 19348 - DNA, 1422 bp, Streptococcus equi subsp. equi; identical to SEQ ID NO: 19008

SEQ ID NO: 19349 - DNA, 498 bp, Streptococcus equi subsp. equi; identical to SEQ ID NO: 19009

SEQ ID NO: 19350 - DNA, 1422 bp, Streptococcus equi subsp. equi; identical to SEQ ID NO: 19008

SEQ ID NO: 19351 - DNA, 498 bp, Streptococcus equi subsp. equi; identical to SEQ ID NO: 19009

SEQ ID NO: 19352 - DNA, 1422 bp, Streptococcus equi subsp. equi; identical to SEQ ID NO: 19008

SEQ ID NO: 19353 - DNA, 498 bp, Streptococcus equi subsp. equi; identical to SEQ ID NO: 19009

SEQ ID NO: 19354 - DNA, 1422 bp, Streptococcus equi subsp. equi; identical to SEQ ID NO: 19008

SEQ ID NO: 19355 - DNA, 498 bp, Streptococcus equi subsp. equi; identical to SEQ ID NO: 19009

SEQ ID NO: 19356 - DNA, 1422 bp, Streptococcus equi subsp. equi; identical to SEQ ID NO: 19008

SEQ ID NO: 19357 - DNA, 498 bp, Streptococcus equi subsp. equi; identical to SEQ ID NO: 19009

SEQ ID NO: 19358 - DNA, 1422 bp, Streptococcus equi subsp. equi; identical to SEQ ID NO: 19008

SEQ ID NO: 19359 - DNA, 498 bp, Streptococcus equi subsp. equi; identical to SEQ ID NO: 19009

SEQ ID NO: 19360 - DNA, 1422 bp, Streptococcus equi subsp. equi; identical to SEQ ID NO: 19008

SEQ ID NO: 19361 - DNA, 498 bp, Streptococcus equi subsp. equi; identical to SEQ ID NO: 19009

SEQ ID NO: 19362 - DNA, 1422 bp, Streptococcus equi subsp. equi; identical to SEQ ID NO: 19008

SEQ ID NO: 19363 - DNA, 498 bp, Streptococcus equi subsp. equi; identical to SEQ ID NO: 19009

SEQ ID NO: 19364 - DNA, 1422 bp, Streptococcus equi subsp. equi; identical to SEQ ID NO: 19008

SEQ ID NO: 19365 - DNA, 498 bp, Streptococcus equi subsp. equi; identical to SEQ ID NO: 19009

SEQ ID NO: 19366 - DNA, 1422 bp, Streptococcus equi subsp. equi; identical to SEQ ID NO: 19008

SEQ ID NO: 19367 - DNA, 498 bp, Streptococcus equi subsp. equi; identical to SEQ ID NO: 19009

SEQ ID NO: 19368 - DNA, 1422 bp, Streptococcus equi subsp. equi; identical to SEQ ID NO: 19008

SEQ ID NO: 19369 - DNA, 498 bp, Streptococcus equi subsp. equi; identical to SEQ ID NO: 19009

SEQ ID NO: 19370 - DNA, 1422 bp, Streptococcus equi subsp. equi; identical to SEQ ID NO: 19008

SEQ ID NO: 19371 - DNA, 498 bp, Streptococcus equi subsp. equi; identical to SEQ ID NO: 19009

SEQ ID NO: 19372 - DNA, 1422 bp, Streptococcus equi subsp. equi; identical to SEQ ID NO: 19008

SEQ ID NO: 19373 - DNA, 498 bp, Streptococcus equi subsp. equi; identical to SEQ ID NO: 19009

SEQ ID NO: 19374 - DNA, 1422 bp, Streptococcus equi subsp. equi; identical to SEQ ID NO: 19008

SEQ ID NO: 19375 - DNA, 498 bp, Streptococcus equi subsp. equi; identical to SEQ ID NO: 19009

SEQ ID NO: 19376 - DNA, 1422 bp, Streptococcus equi subsp. equi; identical to SEQ ID NO: 19008

SEQ ID NO: 19377 - DNA, 498 bp, Streptococcus equi subsp. equi; identical to SEQ ID NO: 19009

SEQ ID NO: 19378 - DNA, 1422 bp, Streptococcus equi subsp. equi; identical to SEQ ID NO: 19008

SEQ ID NO: 19379 - DNA, 498 bp, Streptococcus equi subsp. equi; identical to SEQ ID NO: 19009

SEQ ID NO: 19380 - DNA, 1422 bp, Streptococcus equi subsp. equi; identical to SEQ ID NO: 19008

SEQ ID NO: 19381 - DNA, 498 bp, Streptococcus equi subsp. equi; identical to SEQ ID NO: 19009

SEQ ID NO: 19382 - DNA, 1422 bp, Streptococcus equi subsp. equi; identical to SEQ ID NO: 19008

SEQ ID NO: 19383 - DNA, 498 bp, Streptococcus equi subsp. equi; identical to SEQ ID NO: 19009

SEQ ID NO: 19384 - DNA, 1422 bp, Streptococcus equi subsp. equi; identical to SEQ ID NO: 19008

SEQ ID NO: 19385 - DNA, 498 bp, Streptococcus equi subsp. equi; identical to SEQ ID NO: 19009

SEQ ID NO: 19386 - DNA, 1422 bp, Streptococcus equi subsp. equi; identical to SEQ ID NO: 19008

SEQ ID NO: 19387 - DNA, 498 bp, Streptococcus equi subsp. equi; identical to SEQ ID NO: 19009

SEQ ID NO: 19388 - DNA, 1422 bp, Streptococcus equi subsp. equi; identical to SEQ ID NO: 19008

SEQ ID NO: 19389 - DNA, 498 bp, Streptococcus equi subsp. equi; identical to SEQ ID NO: 19009

SEQ ID NO: 19390 - DNA, 1422 bp, Streptococcus equi subsp. equi; identical to SEQ ID NO: 19008

SEQ ID NO: 19391 - DNA, 498 bp, Streptococcus equi subsp. equi; identical to SEQ ID NO: 19009

SEQ ID NO: 19392 - DNA, 1422 bp, Streptococcus equi subsp. equi; identical to SEQ ID NO: 19008

SEQ ID NO: 19393 - DNA, 498 bp, Streptococcus equi subsp. equi; identical to SEQ ID NO: 19009

SEQ ID NO: 19394 - DNA, 1422 bp, Streptococcus equi subsp. equi; identical to SEQ ID NO: 19008

SEQ ID NO: 19395 - DNA, 498 bp, Streptococcus equi subsp. equi; identical to SEQ ID NO: 19009

SEQ ID NO: 19396 - DNA, 1422 bp, Streptococcus equi subsp. equi; identical to SEQ ID NO: 19008

SEQ ID NO: 19397 - DNA, 498 bp, Streptococcus equi subsp. equi; identical to SEQ ID NO: 19009

SEQ ID NO: 19398 - DNA, 1422 bp, Streptococcus equi subsp. equi; identical to SEQ ID NO: 19008

SEQ ID NO: 19399 - DNA, 498 bp, Streptococcus equi subsp. equi; identical to SEQ ID NO: 19009

SEQ ID NO: 19400 - DNA, 1422 bp, Streptococcus equi subsp. equi; identical to SEQ ID NO: 19008

SEQ ID NO: 19401 - DNA, 498 bp, Streptococcus equi subsp. equi; identical to SEQ ID NO: 19009

SEQ ID NO: 19402 - DNA, 1422 bp, Streptococcus equi subsp. equi; identical to SEQ ID NO: 19008

SEQ ID NO: 19403 - DNA, 498 bp, Streptococcus equi subsp. equi; identical to SEQ ID NO: 19009

SEQ ID NO: 19404 - DNA, 1422 bp, Streptococcus equi subsp. equi; identical to SEQ ID NO: 19008

SEQ ID NO: 19405 - DNA, 498 bp, Streptococcus equi subsp. equi; identical to SEQ ID NO: 19009

SEQ ID NO: 19406 - DNA, 1422 bp, Streptococcus equi subsp. equi; identical to SEQ ID NO: 19008

SEQ ID NO: 19407 - DNA, 498 bp, Streptococcus equi subsp. equi; identical to SEQ ID NO: 19009

SEQ ID NO: 19408 - DNA, 1422 bp, Streptococcus equi subsp. equi; identical to SEQ ID NO: 19008

SEQ ID NO: 19409 - DNA, 498 bp, Streptococcus equi subsp. equi; identical to SEQ ID NO: 19009

SEQ ID NO: 19410 - DNA, 1422 bp, Streptococcus equi subsp. equi; identical to SEQ ID NO: 19008

SEQ ID NO: 19411 - DNA, 498 bp, Streptococcus equi subsp. equi; identical to SEQ ID NO: 19009

SEQ ID NO: 19412 - DNA, 1422 bp, Streptococcus equi subsp. equi; identical to SEQ ID NO: 19008

SEQ ID NO: 19413 - DNA, 498 bp, Streptococcus equi subsp. equi; identical to SEQ ID NO: 19009

SEQ ID NO: 19414 - DNA, 1422 bp, Streptococcus equi subsp. equi; identical to SEQ ID NO: 19008

SEQ ID NO: 19415 - DNA, 498 bp, Streptococcus equi subsp. equi; identical to SEQ ID NO: 19009

SEQ ID NO: 19416 - DNA, 1422 bp, Streptococcus equi subsp. equi; identical to SEQ ID NO: 19008

SEQ ID NO: 19417 - DNA, 498 bp, Streptococcus equi subsp. equi; identical to SEQ ID NO: 19009

SEQ ID NO: 19418 - DNA, 1422 bp, Streptococcus equi subsp. equi; identical to SEQ ID NO: 19008

SEQ ID NO: 19419 - DNA, 498 bp, Streptococcus equi subsp. equi; identical to SEQ ID NO: 19009

SEQ ID NO: 19420 - DNA, 1422 bp, Streptococcus equi subsp. equi; identical to SEQ ID NO: 19008

SEQ ID NO: 19421 - DNA, 498 bp, Streptococcus equi subsp. equi; identical to SEQ ID NO: 19009

SEQ ID NO: 19422 - DNA, 1422 bp, Streptococcus equi subsp. equi; identical to SEQ ID NO: 19008

SEQ ID NO: 19423 - DNA, 498 bp, Streptococcus equi subsp. equi; identical to SEQ ID NO: 19009

SEQ ID NO: 19424 - DNA, 1422 bp, Streptococcus equi subsp. equi; identical to SEQ ID NO: 19008

SEQ ID NO: 19425 - DNA, 498 bp, Streptococcus equi subsp. equi; identical to SEQ ID NO: 19009

SEQ ID NO: 19426 - DNA, 1422 bp, Streptococcus equi subsp. equi; identical to SEQ ID NO: 19008

SEQ ID NO: 19427 - DNA, 498 bp, Streptococcus equi subsp. equi; identical to SEQ ID NO: 19009

SEQ ID NO: 19428 - DNA, 1422 bp, Streptococcus equi subsp. equi; identical to SEQ ID NO: 19008

SEQ ID NO: 19429 - DNA, 498 bp, Streptococcus equi subsp. equi; identical to SEQ ID NO: 19009

SEQ ID NO: 19430 - DNA, 1422 bp, Streptococcus equi subsp. equi; identical to SEQ ID NO: 19008

SEQ ID NO: 19431 - DNA, 498 bp, Streptococcus equi subsp. equi; identical to SEQ ID NO: 19009

SEQ ID NO: 19432 - DNA, 1422 bp, Streptococcus equi subsp. equi; identical to SEQ ID NO: 19008

SEQ ID NO: 19433 - DNA, 498 bp, Streptococcus equi subsp. equi; identical to SEQ ID NO: 19009

SEQ ID NO: 19434 - DNA, 1422 bp, Streptococcus equi subsp. equi; identical to SEQ ID NO: 19008

SEQ ID NO: 19435 - DNA, 498 bp, Streptococcus equi subsp. equi; identical to SEQ ID NO: 19009

SEQ ID NO: 19436 - DNA, 1422 bp, Streptococcus equi subsp. equi; identical to SEQ ID NO: 19008

SEQ ID NO: 19437 - DNA, 498 bp, Streptococcus equi subsp. equi; identical to SEQ ID NO: 19009

SEQ ID NO: 19438 - DNA, 1422 bp, Streptococcus equi subsp. equi; identical to SEQ ID NO: 19008

SEQ ID NO: 19439 - DNA, 498 bp, Streptococcus equi subsp. equi; identical to SEQ ID NO: 19009

SEQ ID NO: 19440 - DNA, 1422 bp, Streptococcus equi subsp. equi; identical to SEQ ID NO: 19008

SEQ ID NO: 19441 - DNA, 498 bp, Streptococcus equi subsp. equi; identical to SEQ ID NO: 19009

SEQ ID NO: 19442 - DNA, 1422 bp, Streptococcus equi subsp. equi; identical to SEQ ID NO: 19008

SEQ ID NO: 19443 - DNA, 498 bp, Streptococcus equi subsp. equi; identical to SEQ ID NO: 19009

SEQ ID NO: 19444 - DNA, 1422 bp, Streptococcus equi subsp. equi; identical to SEQ ID NO: 19008

SEQ ID NO: 19445 - DNA, 498 bp, Streptococcus equi subsp. equi; identical to SEQ ID NO: 19009

SEQ ID NO: 19446 - DNA, 1422 bp, Streptococcus equi subsp. equi; identical to SEQ ID NO: 19008

SEQ ID NO: 19447 - DNA, 498 bp, Streptococcus equi subsp. equi; identical to SEQ ID NO: 19009

SEQ ID NO: 19448 - DNA, 1422 bp, Streptococcus equi subsp. equi; identical to SEQ ID NO: 19008

SEQ ID NO: 19449 - DNA, 498 bp, Streptococcus equi subsp. equi; identical to SEQ ID NO: 19009

SEQ ID NO: 19450 - DNA, 1422 bp, Streptococcus equi subsp. equi; identical to SEQ ID NO: 19008

SEQ ID NO: 19451 - DNA, 498 bp, Streptococcus equi subsp. equi; identical to SEQ ID NO: 19009

SEQ ID NO: 19452 - DNA, 1422 bp, Streptococcus equi subsp. equi; identical to SEQ ID NO: 19008

SEQ ID NO: 19453 - DNA, 498 bp, Streptococcus equi subsp. equi; identical to SEQ ID NO: 19009

SEQ ID NO: 19454 - DNA, 1422 bp, Streptococcus equi subsp. equi; identical to SEQ ID NO: 19008

SEQ ID NO: 19455 - DNA, 498 bp, Streptococcus equi subsp. equi; identical to SEQ ID NO: 19009

SEQ ID NO: 19456 - DNA, 1446 bp, Escherichia coli
atgagtgttcagttttcggctgaagttgaagcttttatcaggacttatgtgaaggatctcgaagaaggggttgccgccgtttttgctggtgcgggcctatctagaaccagcggcttcgttaattggagtgaactgctgcgtgaaattgctgaagaattaggcctttctgttgagctagagcacgacttaatttcggttgcacaataccatgtcaacaagaacaacagctcaactggtttagctagaaaaatcctagaggaattctcggagcaagcggaaccttccgaagcccataaaatccttgctagactacccattagaacttattggacaaccaactatgacactttgattgaagatagtctcaaagaaaactaccgtgtcgcagatattaaacgcagaaccgatgatcttatttccactcgtcctaaacgagatgctgttgtttacaaaatgcatggtgatgttagctcgccaggtgacgccatactttataaagctcagtatgagcagtactacaagacccatgaggggtttgttacagcattgagtggagatttgatttctaagacattcttatttattggcttcagttttactgatcctaatcttgattacatattgagccgattgcatgttccggagaagcatcgtcgtagacactactgctttcttcgtaaggaaccctctctgccgcaaggaaatgaagatgaagctggcgctatgtataggcagcgtaggcaagaacatcatattcgcgatttgctccgttttggcattcaggctgtattagtaaacgagtacgatgatattccacttatattgaaagagattgagagtcgcttcctcaagaagaccatatttatatctggtagtgcagaagagtatggcgcttgggacaaacaggaagcactaaactttgtacacatactttcgtcatctttggtgaagaatggctatcgagttgtcaatgggtttggatggggtattggtagtgcggtcatcaacggagctcttgaagccatttattctaagcctgataagtactcagaagagcaacttatcatgcggccattccctcaacactcatcaaacgataaagccctgagcgagctatgggacgaatatcggcagcgtatgattggtctttctggaatcgctatattcctttttgggaataaactccatgatggtcgaatcgttaatgctgatggggtccgaagggagtttcaaattgctcaggaaacaggggttgtcgtgcttccacttggcgtcactggttatatggccaaggaactagctgacgagatgctgacggatccaagtaaacattttgtccggtacccttggttggaaaaggaagttgctcagcttgcagatctctctgctaatcgggcaaatatcgaaatgaaagttttagaaattttaaagaaactaggaggttag

SEQ ID NO: 19457 - DNA, 468 bp, Escherichia coli
atgaaacgtaaggtattttacagctttcactttgataacgatgttatgcgggtacagcagattcgtaacatgggagtgctggagggggatgaaccggttagcccaaatacttgggaacaaattaaacgaactgagcagggcgtgaagaattggattaatcagagcttaaatggcaaatcctgcttagtagtactgatcgggagtcaaacggctaatcgcccatgggtcaagtatgagatcgaaagagcctggaaagagggtaaggctgtggtgggtatttatattcatcgactgaaatgccctcgtaacggctatgggacaaaaggaccgaatcctttcgaccaatttacatttaagcgaggcgatcgagtaattaaaccactcgtatatgaacctaactttaacgacgcttatagcgatatcaagaacaatttggcgacatggatagaaaacgccattaaacaataa

SEQ ID NO: 19458 - DNA, 1446 bp, Escherichia coli; identical to SEQ ID NO: 19456

SEQ ID NO: 19459 - DNA, 468 bp, Escherichia coli; identical to SEQ ID NO: 19457

SEQ ID NO: 19460 - DNA, 1476 bp, Bacillus pumilus
ttgaaaacaaaaaaattaaacttaacacagaaccagaaaatttttgtgagagattttgtaagtgctttgaagaataatgatgcggctatattcgctggtgctggactatcaattccttctggaatgatgagttggaatgaattattacatgatgcagcagaagaattggagctgaagaaagactccatcacagatttggctactttagcccaatattatcaaaaccatagaggcactagacttgatgttgcacagcttataatggacagtatttcacaatatgcggaaccaaatgaaaatcaaaaattgattgctcaattacccatagagacagtttggacaacaaactatgatgatttattagaaagagcatatcgttcagcatataaaagcacttcggtaaaaatttccccagaagacttttctttaagtaatggaaagaaagatgtaacgatttataaaatgcatggtgatagaactcagccaacaaaggcagtaattacaaaaaatgattacgagacatataacgatacgcatttagtgtatacaacagcattaaaaggtgatttggttgagaagaaattcttgtttatcggatttagttttgaagaccctaatttagattacattttagcgaggattaaagcgctagtaggtgaaaatcaaccaacgcattacttctttattgaggaagtaaaacaaaaaaaagatgaatctgaaaatgattttaatcttcgtaaaaaaattcaagaattaaagataatagatttaaagagatatggtataagagccgtgttgttaaatagttataatgacattagtgaaattctaagtattattaagagaatgtctagcgttaacaatattttcctatctggtgctaaagagtttccagacggtgaagtagattcagattcagaacaattgtttaataaattagtgaaaaagattacaaaggggattgtaagcaagagaaataagattatatctggatttggacaaggggtgggttctcttgtaattaataccgttttagaggaagtatctaataatcaatggttcaaattagacgataagttaaaaatttatccattcccccaaaataaaaataccaattggactatgtatcgtaaagaaatattaaaaaatgcaggcatatctatttttttatttggagaaaaaaaatcaaaaaatggagatattgtgatttcagatggtatgttagaagagtttcaaatagctcatgaatacggtatcaagattttacctcttggttgtacaggaggagctagtaaaaagatttttgaaatggtgttggagaagcctcatgagtattatggtaatgatctagagttaatagaaatgataagaaatttaggtaatcatgatcttaagaatacggatgatgttactagtgtggcaaatttgacattggaaatagtaagtaaaatacagaaattaaagggggattcttaa

SEQ ID NO: 19461 - DNA, 498 bp, Bacillus pumilus
atggttaagcgtcaagtgttttttagttttgaatataataaagataattggagagctgctcaggtaaagaatatggggttagtagatgggagttcaactttttcagcaaatgaatgggaagaagtaaaggaaaaaagtgataaaaaaattaaagaatggattgactctcaattaagtaaaagatcttgcctaatagtactgattggtgcaacaacttcaagtaggaaatggattaagtatgaaattgagaaggcttatgagttaaataaaggaattgttggtgtttatgtcaataaacttaatgatagtgcgggtaatcaaacacaaagaggagataatcctttttacaacattctaacaaatgatggaacgagattatcttctcacgtaacttgctatgaatcaccttcttttacgagtaaatttgtatatagtgatataaaagaaaatttacctaatttaatagaagatgctttaaataataaagctcctcaataa

SEQ ID NO: 19462 - DNA, 1449 bp, Achromobacter sp. 2789STDY5608606
atgacaaaagcggccatgacccgttttttgaaggaatatcctgatgcgttgaacgatggcgtaggggcagtgtttgttggggctggggtttcgatggccgccggatatccgtcctggtcaaccttgctacaagagatcggcgacgaacttggcgtcagctctaaaaatattcaggatctggccgctctcgcccaatggagcatccaagaaagcggcggcgcaacgcgagtccggaatgtgatcaaggagcatatcggagtagatcacccactcccggaagcactccagatcgtcgcgcggtttccggcccggcatatttggaccacaaactacgaccgattgattgaacgcgcgttcagggaaattgaccggccaatcgactccgtttctgccgcgaaggacttggccctgaaggcgactcctggcgccactcggctttacaagatgcatggctctgtagacagactggatgatgtcgtcatttcaaccgacgactacgaactttttcggtcaagacgcggagcttacctgcccttacttcatgctcatctgacgagcatgtccatgctcttcattggtcttagttttaccgatccaaatatcaggcatgtcctttcgctcatccgcgagagcttcactgacgccccacccgagcattttgccatcgtaaggccgccaaaacgggaagatttcgactcggacgatgagttccgagctcgcataactcaacataaactttgggccaaggatctacgacgctatggattagcggcggttgaaatagacgactatgacgaagtacccgatctgcttcgtcagatcgaacgccgtgttgcagcacgacgcgtatggatcagcggcagttggcctgtcgacactggcggcccagaagccgcgaacatttattccgtagcggaagatatcgggcgccggattggccatgcaggcctagatctcgtgagtggagccggcctcatagtcggctccgcggccatatccgggttcctagatgctttgaggtatggcgggggctgggatctcgatcgaaggctaattgcacgcccttttccccagcctattaccggagagcaggcgcctgatgcgcagtggaccgcgctgcgccgggaactcgcacgtcaagcggggattgttatattccttggtggagcgaaagcaaaagacgggaaactcatccccgcatccggagtgcttgaagaattctctctcgcagaagctgctggcgcgtttttactacccattgctgtcacagggggtgctgctaaggagattgccgaccgactcttgggatcgtccttgcccgctaccggtgctaacgccacccgtccgacggacgctgaattacggcagctttctgatccatctgtcccacacgatactcttgtcaaaaacattttcgatatcttgaagcgtattgccaagccggcctaa

SEQ ID NO: 19463 - DNA, 486 bp, Achromobacter sp. 2789STDY5608606
atgacgcgcaaggtcttctacagctttcattaccaacgcgatggatggcgtgcctccaagatccgcaatatcggggtcgtcgaaggcaatccccctgctagcgacaacaaatgggaagaggtcctgcgcggcggcgatgctggtattcaacgctggatcgacgcgcagttagaaaaccggacctgcaccatcgtcctcatcggcgctgagacggcgaatcgccgttgggtgaaatacgaaatcgagaaatcttggaatagcggcaaaggtgtgttcggcattcgtattcacaaaattctggaccacaagcagcaaacctcgatagccggagccaatccattcgatggactctctttgaaggatggacgcaagctatccactcttgccaaagtttacgatcctccttacgcatccagtgctgatgtgtatgactacatcagcaagaatcttgctggttggattgaaactgccatcgcggatcgttaa

SEQ ID NO: 19464 - DNA, 582 bp, Achromobacter sp. 2789STDY5608606
atggccaagcgcgtatttttcagctttcactacaaggacgtcatcgacttccgcgccaacgtcgtccgtaagcattgggtattgaaggatgaccgcgaagaggccggttacttcgatgcttccatttgggaggaagccaagaagcagaacgagattggcttaaagcgactaatcaacggggccctagagggcacatcgacaacctgcgttctgatcggaagcgacacatatgcacgcccgtgggtacgctacgaaatcatccggagtatctatcgtggcaaccgcgtgttcggagtgcacatcaatcagatcaaaggaaaagatcaactgataaaaactaacggccccaatcctttcgactatctggcgttgaagtacagtgatgacggcacaaaggtcgaagtgtttgaggccgtgaacggtaagtgggttacctacacgaaatttccaaactacacgctgaagaaaactgcatccgtgcagcggtggggtaagctattcaagctttcgagtcttggttacaaaatatattgctggtcggctgacgatgggtataacaatttcgctacttgggtgggctaa

SEQ ID NO: 19465 - DNA, 468 bp, Achromobacter sp. 2789STDY5608606
gtggcagaacaaagaaatgtattcatcagtcacgtccatgcggacgatgccggactgcagaagtttaaagatctgctggctccaaaaggaattgacgttcgagattcctcgatccatacggggaaattcaataacgcgacggacgagcactacatcaagacgcagatactggctccggcgatcaactgggccggtgtgttcgtctgctacgtctccccgcgcacgaaggacagtgaatgggtgaactgggagatcgaatatgcagccaagcagggcaagcgtatcgttggcgtttgggagcacggcgaaaaggagtgcgatctcccggaagcattgaagcagcatgccgatgctatggtgggttggaatggcgatgccattatcgatgcgattaacggcaaggacacgtgggagaagccagatggcggcccttgcgatccagtccctcttaagcggcatccctgctga

SEQ ID NO: 19466 - DNA, 1143 bp, Achromobacter sp. 2789STDY5608606
atgtctgtgctgtaccagctagccgtgctcggtgagccaaccgacgaacaagttaatgagcttgagcaggtcgtcgcgcatgcagtgcagttgttcggattgaggcttggccacgaggtgggatgggaaatctgccctactctgttcaatcccgatcagcagaaatcgtccgcagccgttttctacggtgccgccaacgctccacgagccaatgtggagcaactgctgaaacgcggaatccctatccttccagtagcctccgaaacagagcgggtcactgcagaaattcccgaattgcttcgtccgctgaactgccttgcatacaacgcgggcggtgcccaacgagtagcaaccgcgctgctggaatgtgcagccctacttccccgccagcgtcgtgtatttgttagctatagaaggggggaggcacgcgaagccgcgctacagcttttcgatgcgttctccgctcgactttttgatgtattcctcgatacgcatggcatcgcgcccgccgaggattttcaagcaatgctttggcatcggctctgcgactccgatgtacttgttatgctcgatactcccggctactttgagagccggtggactagtgctgagtttggccgagcacttgccaaaggcatcagtgtgctacgtatcggctggccggactccactccatcggtacgcacagccacagccagccgtgcagaactcctgccagaagaagtgaatggagacacaggtcgcttggccgacacagcgatcgaacgaatctgcctgcaactggaagctgttcgcagtcaaagtcaggcggtacgcagcgtcaatttagttagcaatctgcgcaatgcaatcgaaacaatcggcgggagcgtagcgggcgtcggcttgaacaaagccgtctacatccagctaccggacggcaaggaagtcgtggtgtaccctactgtcggcgtgccgacttcgacgacactgcatgacgcgtcgatcaattcgccggatcgttcggctgctgttgtttttgaccacgttggactgcatcctcgttggctaggccatctggattggctcggcaatcacattcaaactgcgcgctgggtcaaggccagcgaagcgggttggcagttcgcagattgggaggcctga

SEQ ID NO: 19467 - DNA, 1422 bp, Achromobacter sp. 2789STDY5608615
atgtctccacaacacgtcatcaatggcttcatcaaagaattcgtccaagacctgcacaatggcagtgcggcgatcttcgcgggcgctggcatgtccaagggtagcggttatgtggactggcccgagctactgcgcgacatcgccaatgaactcgggctggacgtcgccaaggagcacgacctaatctcgctggcccagttccatgtgaacaacaagcggacggccgacggtttgtcaaagaagattctcagggagttttcagagcaggccgaaccgtccgaggtacacgacatcatcgctcggttgccgatatacagcttctggaccaccaattacgacacccttatcgaggactcactgcgccgggcgtaccgggtgccggatattaagtcgcaggtagatcaactctccctcagtaggcctaagcgcgacgccattgtctacaagatgcatggtgacgtccagatggcccaggacgccgtcatatacaaggagcagtacgagaagtactacctcactcacgcttccttcatcaccgcactgagcggcgacctagtgtccaagacctttctctttatcggcttcagttttactgaccccaacctcgattatgtgctgagcaggctgcacggtggcgctaccaagcgcacccattactgcttcatgcgcgaggcgcatcgggacgttggcgacgacgacgagctcttcagatacaagatccgcaaacaggagctgcgcattgaagacttgaagcgcttcggcatccaaacgctgctggtcgacaactattccgatatcaacgatatccttaagaaggtcgaagctctgtaccggaagcgaaccgtattcttctcaggtagcgccgaagattatggtgagtgggccaggcaggacgcgcagaatttcatacacgacgtcgcggccaactgcgtgcgagccaactgccgggtggtcaacggttttggctggggcgtgggcagcgccgtaatcaacggcgccctggaggccatctatggcgacccacagaagtactcggaggcccaattgattgttcggccgttcccccagcatggcagcaacctgaaagatctgtgggaacagtaccgtcagcgaatgatcagcttagcgggggtcaccctgttcttcttcggtaacaagcgtgacggtggcaaggtggtcaacgctaacggcgttcggcgtgagttcgagatcgcactggaacaccacctgttacccatcccggtcggcgccaccggcttcatggctgaggagctttggaacgaaatttctgccgatctagataagtactatggaggttataaatgggtgattcccatggtccaaaagcttgtcgatgcaaaaactccaccgaacgaaatggtgaagaccattaccgaaataattaagcaattgaataaataa

SEQ ID NO: 19468 - DNA, 441 bp, Achromobacter sp. 2789STDY5608615
atggctcgcaaagtatttttcagcttcaagtatgacgacgtgcatcgcgcgatgaatgtgcgcaacagcaatgtcatcggcggcatcatgaaatccggattcatcgacaaggccgattttgaaaaagtcgaacgcgagggcaaccgagcaatccaaacttggatcgacaaccagctgaatggcacgtcggtcacggtggttttggtcggcgccaacactcacaagagcaaatgggtaaagtacgagatcgaccagagtatcgcccgcggcaacggcgtattgaccatcgacatcagcaaaatcgcggacatgcagggcgtcaccaccgactgttgctcgctacgtgtgcccggatacaaacactattactggaataatgataacggccgcgcaaacctaggcgcttgggttgatgccgcagccaaggcagccggcaaatag

SEQ ID NO: 19469 - DNA, 342 bp, Achromobacter sp. 2789STDY5608615
atggagctctatatcgactggcaggacccacacatgcccgacctccccgatgggacgaccgcagatcgcattcgcacggtgatcaagagggcggagatattcctctttctcgccactaacgactcgatgtcgtctcgctggtgtccgtgggagcttgggttcgcagacggtgtcaagcgcaacgaacaaattgccttgatcgcaacgcgcgacacttcgggcaactactacggcaacgaataccttcacctctaccgccggatcgaccaggccacagccagcaatgcgctgcaatggttccccaagggatcgcaatcccctcagaacctgacgagcttctga

SEQ ID NO: 19470 - DNA, 1461 bp, Listeria monocytogenes
ttggatttaacaagagagcaagaaaatatgattaaagactatgtttcaagtattagagaaggtaaagcgtctatatttgctggtgcaggactatctattccctcaggggcacctagttggaaagacctgttgcgagatattgcatatgaattagaactcaatgttgataaagaaacagacctaatttctttggcacaatattacataaataaaaggagcaaagcgcaaataggagatttaatatcaagcaattttggtaaccatttaaaatgcacaattaatcaacaactaattgcacaattaccgattgatacaatttggactactaattatgacgaattattagaaaatgcttttaaaaatgaacataagaagattgcagtcaaaagatccgtgaaagatttcagcatagttggaacaagaaatgatgctacaatttataaaatgcatggttgtgtgactcaagcaactgacgttattatttcaaaaaaggattacgagcgatacaacgatacccattcagtttatacaactgctcttaaaggagatttagtatccagaacatttttatttataggatttagttttgaagatcccaatttagattatgttttaggacgtataagttttctaatgggtgaaaacaagcctaagcattattttttcgtaaaggaacttgaaaaagaagtgggagaaagtgaagaagatttttcttatcgtagagttagacaaaagcttaagattgatgacttatccagtaggtatggtatttatgctgtcatggttaaagagtatgaagatataacaacgattcttaaaataataaatttgaaagttcgaattaataatatctttatttcaggcgcaattgaaacatttggtatcttagaagagaaatgtactcatgactttatttcttcgttagccagtaaattgatagagaaaaactacaaacttgtttctggttttggcgtaggtgtgggctctgatgtgatacatggggttctctccaaaatatcaagcgatccatcgatgagattagacgatcatttaaaagtttatccgttccctcaaacagttgctactaaggaccgaaagcaagtatggcaagaatatagagaacacattttagaagaagttggaattaacataatcttatttgggaacaaaattatagatggaaaatgtatcatttcagatggggttattgaggaatttgaaattgcttgtaatagaggaattaaaattattccagttggatgcacaggtgatgcagcaaagcatatcaatgatattgttttaaatgaaccggaaaagtattatggaaataatgaaaagctaattggaatgattaaatctttgaatgaatatcagcttacacaagaaaatatcaatagtattatagatgatattataaatattattatagagatacaaaataaggaatatggagtgaattaa

SEQ ID NO: 19471 - DNA, 609 bp, Listeria monocytogenes
atggcacgtaaaacatttatatcttacaagtatagtgagtcaagggatttaagagatactattttggatagtttgggtgaggatgcaagatattacagtggtgagactgcttcatcaccagatcttagtagtactacggttgaaaacatcaaatcatcattgaaagatatgatatatagcactacagttactattgttatcatatcaccacaaatgattaatagtcgttggattgaatgggaattagagtattccctaaagtctataaaacgtggggataataactcttctaccaatggtatagtaggagttattaaaaaggtagatggtaattacgattggttaaaaacgctttctaaaggttctgatggttgtacttctacgtcatatatcacagataaaatgtttccaattattaacaataatcgttttaatcaagaccctccgttgtactcatgtgacaactgtaaaactgtaaatagattatcaggctcatatatttcactgattcctgagggagagtttttaaataatccaaattattatattgaaaatgcttatgcaaaaagcaaggccctaaccggatataaaataaaaaaagaagcataa

SEQ ID NO: 19472 - DNA, 1461 bp, Listeria monocytogenes; identical to SEQ ID NO: 19470

SEQ ID NO: 19473 - DNA, 609 bp, Listeria monocytogenes; identical to SEQ ID NO: 19471

SEQ ID NO: 19474 - DNA, 1461 bp, Listeria monocytogenes; identical to SEQ ID NO: 19470

SEQ ID NO: 19475 - DNA, 609 bp, Listeria monocytogenes; identical to SEQ ID NO: 19471

SEQ ID NO: 19476 - DNA, 1386 bp, Eubacterium ventriosum ATCC 27560
atgtttattggagcaggtttttctaaaagtgtgggatatgttgattggaaaaatttacttaaagatgtagcagatgatttggggttggatatagataaggagtatgatttagtttctttagctcagtattgttataataaaaatagaaatagaagtattattaatgatttgattttggatgagtttaataaagaaaaagggattgatgaaaatcatcgtattatcgcacgtttaccgatttttacatattggacaacaaattatgactccttgattgaagacgcattagaggaagctcaaaggattgtagatataaagtataataataaacaactttctcttacaaaacaacacagggatgccgttatatataaaatgcatggagataagaacaaccctgacgaagcgatattaataaaagatgattatgaaaaatattatagagagcatgcacaattcattacggcattaagtggagatttgatttcaaaaacatttttatttatcggatttagtttttcagatccaaatattgattatatattaagtcgggttagaattgattatggagagcaaaataatagacagcattatgcaattatgcgtaaagtaaatgaaaaagattatgataatcgagcagagtatgagtatgcacaacgtaaatatgatttttttattgaagaccttaaacgctataatatacgtgttctccttattgatgagtatgaagaaattacggatattttaaatgaaatagataaaagactgaatcataataatgtttttatttcaggtagtgctcaagaatatggcgagtatactgaaaaagaggctttagaatttatcgaatcattaagtaaagaattaattttgcaggattttaatataatttcgggttttggtttaggtgtgggtagttctgttattattggtgcattacaagaaatatatatgaaacgaaaaagtataaatgaggatagattacttttacgcccgtttccacaaggaatagaggacaataatagtcggcagattttatggaaaaagtatagagaagatatgatttctaggtctggtgtgtcaatcttcttatttggtaacaaattagtcgatggagaaattgtattggctaatggtgtggaatcagaattcgagattgctttagaacgacattgtttgatagttcctgttggatgtacagggtatatggcgaaagaaatatggaaaaaagtggattcaaatatgtcagacttttatacgaatgttgatgatgtattgattgaagcatttaaaaaattaaattctaaatctagtaaatcagaactaatacctgacattctttcgtttattaaattgtttgaaaatggcaaatatagtccaagataa

SEQ ID NO: 19477 - DNA, 612 bp, Eubacterium ventriosum ATCC 27560
atggcacataagacatttatttcgtataaatggagtgaagcacaggatttacgagatgatattataactgctcttggtgaggatgctacatactataaaggtgaaacaagtgaatcaccagatttgacggatacatcgactgaaaatattaaaaagaatttgaaagatatgatgtatgatacttctgttacaattgtgattttatcacccaacatgaaagagagtaaatggattgactgggagattgaatattgtttgaaagatataacgcgtaaagatagaacttcacatacaaatggagttgtagctgttattatgaaagtggataatagttatgagtggttcaaaaaaagtggaacaaattgtcatggttcttcgacggtatcatatgaattagataaagtgttcgacattatttcacagaatcattttaattcaaatccggaacaatggcattgtgataaatgtaaaacatatgattggttaaatggttcgtatattacttttgttgaagaagaaacatttttggatgatccggaaaaatatattaataatgcgtatgataaaagtgagaatgatgcgagtggatatgatcttgtaaaacaaagataa

SEQ ID NO: 19478 - DNA, 567 bp, Eubacterium ventriosum ATCC 27560
atgggaaaaaagatatttgtttcgtataaatataaagacaataatgtgaaggaattacctaatgtaacgcaaccaacatggccgtgtgattacgttgattatattaggaataatgttttaaaagatgatgatatttataaaggtgaaaatagtgatgaagatatttctgcatggagcgaagataaaatttggaatcatttaaaaggaaaaatctatgatagtacaatcactattgttttggtgtcacctaatatgaaagaagattgtaaatggcaacgatcacaatggattccgtgggaaattagttattcggttaaagaaacgaccaggaataaccgaatgagtcatcggaatgctcttcttgttgtagttttaccagataaattaggatcatataaatattatgacaaaaaaaacctttttccaatattaaaaagtaatattgataatgggtatgcttatgttgttacatgggaagattttttgaaatatgcaagcacagatataagcattgcatttggccataaagatagtacaccatcatatgaaattgtgaaatctctttaa

SEQ ID NO: 19479 - DNA, 849 bp, Eubacterium ventriosum ATCC 27560
atgtttgcaggttttaatttagaaattaatgaacattttttttgttcacagaagaaaacattttctgaatatcaaaaaataggaaaagaacatcttgcttcgcaaggcaaaggtgtggaaaaagcgttaagtgaatatatcaagaacaatattgtggatggatcagaaatacaaaaagattggtttccagagattgaagcagatatatttttatcacattcaagtaaggacacagaattagtgaatgccattgcaggatggctttatgattcatttggtttaaagtgttttgttgactcgaatgtttggtgttatgctggtaatattgctgatatgctcaattcagactacagtaataagaggtcagatgttgatggtggatatttatatgatcataaaaaatgtcttaaagtttctgagcatgttaatacaatgctgaatgttgcgcttcaaaaaatgattgataaaagcgaaagtgtttttttgattaatacggataagtctattcatataaatcgtgattcaaatagcattgatttgacatattctccatggatatatatggaattagtgtgcagtgaaattgttcgaaagaaaccattgtctttttatagatatgataaaaaagtatgtcatgcaattagtgaaaaatatcaatttgatgaaattaacaatgatttgacaatatcatataatgcgccgactcaatatttaataaaaataaatcaagatgttttgaaaaaatggaaaaatcaatttaatgggaaacatccttttccgttagatatattgtataatgattattttgaatctgaggtagaaaagaacaaaaaatattttaaatattaa

SEQ ID NO: 19480 - DNA, 1455 bp, Serratia marcescens
atgccagaacgtgatatagaactgtttattcgtgattacgttaatgatatcaaagccggcagcgccgcgctgtttgccggcgccgggctgtccatacccgccggctttgtcagctggaaagagcttatcggtgatatcgcttatgaattggggctggatatagaaaaagaaagcgaccttatttctctggctcaatatcatctcaatgaaaaaggcaaccggcataagataaatcaaaaaataattacagaattcgctgagcaagcggaagaaactgaaaatcatcggatcattgccagattgccgatagcgtcactctggacaaccaactacgacgatctgattgaaaaaacctatgcccgttataatcgcgtctgcgacgttaaaaccacgccggaaagtctgaccaacaatattcacaagcgcgatgttgtcttatataaaatgcatggtgattatagaacacccaaccaggcgattatcacccgcgaacaatacgaaacttactcccgtacacaccttccttttatcaacatgctgatggcggagttgaccgccaaaaccttcctgtttatcggtttcagctttgaagaccccaacctgcaatacgtattgagtcgcctttacgcgcagtacggcgaagggaaaagaaaccacttctgcatcatgcggcgcgttcagcctggcgacagcggctgcgaggatcaggcgtcttatgattacaacagccgaaaacaaagcctgatgatcaacgatctacgccgttacggcattcaaacgctgctggtggaggactatcggcaaatcaccgacctgctgtatgccatcgaaacgcaattcaagaaaagcacggtgtttatctccggcagcgccgacaactaccacccctatgcccgtgaagagtccatccagttcatacaccgcctggcgcgcctgcttatccgcaaacagtaccgcatcgtcaacggcttcggttggggcgtgggcacggcggtgatcaacggcgcattggaagccatttacgccagcggggggaaaatcagcgaaagccagctggtattgcgccctttcccccaattcgccagcgggggcattacgctgccggcactttggcacgaataccgccagaacatgatttcgctcagcggcatcgcggtttttttgttcggcaacaagcgtaacgccgaaggcgaatgcgtgctggccgacggtttattgaaagagttccacatcgctgcggaacaaggctgcgtctgcattcctatcggttgtaccggcggcgcatccgccgagatctaccgaaaaatcaaggaggagatgaaagacaccctctatcaccgccatcccgtcgccatgaacctgctggatcaacttaacgagccgggcagcctggcggagaagaaaacatgcctgttggcacttatcgatatcattactaaggataatcctcgatga

SEQ ID NO: 19481 - DNA, 492 bp, Serratia marcescens
atgaccagaaaatgtttttacagtttccattatgagccggacaactggcgcgcttctcagatacgcgaaatgggctcgctggaaggtaaccggccggccacggataacgattgggaggaagtgaaaaaagggggtgacgacgccatcgccgcttggatcaaaggccagttggacaatcggagctgcgccgtgattctcgcgggtaaagataccgccaatcgcaagtggatcaacttcgaaatctgcgaagcctggaagaaaggcatgggcgtgctggtggtgtatatccataacctgaaagacagcgccggcgaacaagcccgaaaaggcaacaacccgttggatcatatcaagctgggggatagaaagctttccggaatcgccaaagcctatgatccgccttatttgaccagcaccaatgtctataatcacatcaaggaaaatctggcggagtgggtagaagaagcgatccgcattcgcgaaaattactga

SEQ ID NO: 19482 - DNA, 1455 bp, Serratia marcescens
atgccagtacgtgatatagaactgtttattcgtgattacgttaatgatatcaaagccggcagcgccgcgctgtttgccggcgccgggctgtccatacccgccggtttcgtcagctggaaagagcttatcggcgatatcgcttatgaattggggctagatatagaaaaagaaagcgaccttatttctctggctcaatatcatctcaatgaaaaaggcaaccggcataagataaatcaaaaaataattacagaattcgctgagcaagcggaagaaactgaaaatcatcggatcattgccagattgccgatagcgtcactctggacaaccaactacgacgatctgattgaaaaaacctatgcccgttataatcgcgtctgcgacgttaaaaccacgccggaaagtctgaccaacaatattcacaagcgcgatgttgtcttatataaaatgcatggtgattatagaacccccaaccaggcgattatcacccgcgaacaatacgaaacttactcccgtacacaccttccttttatcaacatgctgatggcggagttgaccgccaaaaccttcctgtttatcggtttcagctttgaagaccccaacctgcaatacgtattgagtcgcctttacgcgcagtacggcgaagggaaaagaaaccactactgcatcatgcggcgcgttcagcctggcgacagcggcagcgaggatcaggcgtcttatgattacaacagccgaaaacaaagcctgatgatcaacgatctgcgccgttacggcattcaaacgctactggtggaggactatcggcaaatcaccgacctgctatatgccatcgaaacgcaattcaagaaaagcacggtgtttatctccggcagcgccgacaactaccacccctatgcccgtgaagagtccatccagttcatacaccgcctggcgcgcctgcttatccgcaaacagtaccgcatcgtcaacggcttcggctggggcgtgggcacggcggtgatcaacggcgcattggaagccatttacgccagcggggggaaaatcagcgaaagccagctggtgctgcgccctttcccccaattcgccagcgggggcattacgctgccggcactttggcacgagtaccgccagaacatgatttcgctcagcggcatcgcggtctttttgttcggcaacaagcgtaacgccgaaggcgaatgcgtgctggccgacggtttattgaaagagttccacatcgctgcggaacaaggctgcgtctgcattcctatcggttgtaccggcggcgcatccgccgagatctaccgaaaaatcaaggaggagatgaaagacaccctctatcaccgccatcccgtcgccatgaacctgctggatcaacttaacgaaccgggcagcctggcggagaagaaaacatgcctgttggcacttatcgatatcattactaaggataatcctcgatga

SEQ ID NO: 19483 - DNA, 492 bp, Serratia marcescens
atgaccagaaaatgtttttacagtttccattatgagccggacaactggcgcgcttctcagatacgcgaaatgggctcgctggaaggtaaccggccggccacggataacgattgggaggaagtgaaaaaagggggtgacgacgccatcgccgcttggatcaaaggccagttggacaatcggagctgcgccgtgattctcgcgggtaaagataccgccaatcgcaagtggatcaacttcgaaatctgcgaagcctggaagaaaggcatgggcgtgctggtggtgtatatccataacctgaaagacagcgccggcgaacaagcccgaaaaggcaacaacccgttggatcatatcaagctgggcgacacaaaactctccgctatcgccaaagcctatgatccgccttatttgaccagcaccaatgtctataatcacatcaaggaaaatctggcggagtgggtagaagaagcgatccgcattcgcgaaaattactga

SEQ ID NO: 19484 - DNA, 1455 bp, Serratia marcescens
atgccagaacgtgatatagaactgtttattcgtgattacgttaatgatatcaaagccggcagcgccgcgctatttgccggtgccgggctgtccatacccgccggtttcgtcagctggaaagagcttatcggtgatatcgcttatgaattggggctggatatagaaaaagaaagcgaccttatttctctggctcaatatcatctcaatgaaaaaggcaaccggcataagataaatcaaaaaataattacagaattcgctgagcaagcggaagaaactgaaaatcatcggatcattgccagattgccgatagcgtcactctggacaaccaactacgacgatctgattgaaaaaacctatgcccgttataatcgcgtctgcgacgttaaaaccacgccggaaagtctgaccaacaatattcacaagcgcgatgttgtcttatataaaatgcatggtgattatagaacacccaaccaggcgattatcacccgcgaacaatacgaaacttactcccgtacacaccttccttttatcaacatgctgatggcggagttgaccgccaaaaccttcctgtttatcggtttcagctttgaagaccccaacctgcaatacgtattgagtcgcctttacgcgcagtacggcgaagggaaaagaaaccactactgcatcatgcggcgcgttcagcctggcgacagcggcagcgaggatcaggcgtcttatgattacaacagccgaaaacaaagcctgatgatcaacgatctgcgccgttacggcattcaaacgctactggtggaggactatcggcaaatcaccgacctgctatatgccatcgaaacgcaattcaagaaaagcacggtgtttatctccggcagcgccgacaactaccacccctatgcccgtgaagagtccatccagttcatacaccgcctggcgcgcctgcttatccgcaaacagtaccgcatcgtcaacggcttcggttggggcgtgggcacggcggtgatcaacggcgcattggaagccatttacgccagcggggggaaaatcagcgaaagccagctggtgctgcgccctttcccccaattcgccagcgggggcattacgctgccggcactttggcacgagtaccgccagaacatgatttcgctcagcggcatcgcggtctttttgttcggcaacaagcgtaacgccgaaggcgaatgcgtgctggccgacggtttattgaaagagttccacatcgctgcggaacaaggctgcgtctgcattcctatcggttgtaccggcggcgcatccgccgagatctaccgaaaaatcaaggaggagatgaaagacaccctctatcaccgccatcccgtcgccatgaacctgctggatcaacttaacgagccgggcagcctggcggagaagaaaacatgcctgttggcacttatcgatatcattactaaggataatcctcgatga

SEQ ID NO: 19485 - DNA, 492 bp, Serratia marcescens; identical to SEQ ID NO: 19483

SEQ ID NO: 19486 - DNA, 1455 bp, Serratia marcescens
atgccagaacgtgatatagaactgtttattcgtgattacgttaatgatatcaaagccggcagcgccgcgctatttgccggtgccgggctgtccatacccgccggtttcgtcagctggaaagagcttatcggtgatatcgcttatgaattggggctggatatagaaaaagaaagcgaccttatttctctggctcaatatcatctcaatgaaaaaggcaaccggcataagataaatcaaaaaataattacagaattcgctgagcaagcggaagaaactgaaaatcatcggatcattgccagattgccgatagcgtcactctggacaaccaactacgacgatctgattgaaaaaacctatgcccgttataatcgcgtctgcgacgttaaaaccacgccggaaagtctgaccaacaatattcacaagcgcgatgttgtcttatataaaatgcatggtgattatagaacacccaaccaggcgattatcacccgcgaacaatacgaaacttactcccgtacacaccttccttttatcaacatgctgatggcggagttgaccgccaaaaccttcctgtttatcggtttcagctttgaagaccccaacctgcaatacgtattgagtcgcctttatgcgcagtacggcgaagggaaaagaaaccactactgcatcatgcggcgcgttcagcctggcgacagcggcagcgaggatcaggcgtcttatgattacaacagccgaaagcaaagcctgatgatcaacgatctgcgccgttacggcattcaaacgctgctggtggaggactatcggcaaatcaccgacctgctgtatgccatcgaaacgcaattcaagaaaagcacggtgtttatctccggcagcgccgacaactaccaaccctatgcccgtgaagagtccatccagttcatacaccgcctggcgcgcctgcttatccgcaaacagtaccgcatcgtcaacggcttcggttggggcgtgggcacggcggtgatcaacggcgcattggaagccatttacgccagcggggggaaaatcagcgaaagccagctggtattgcgccctttcccccaattcgccagcgggggcattacgctgccggcactttggcacgaataccgccagaacatgatttcgctcagcggcatcgcggtttttttgttcggcaacaagcgtaacgccgaaggcgaatgcgtgctggccgacggtttattgaaagagttccacatcgctgcggaacaaggctgcgtctgcattcctatcggttgtaccggcggcgcatccgccgagatctaccgaaaaatcaaggaggagatgaaagacaccctctatcaccgccatcccgtcgccatgaacctgctggatcaacttaacgagccgggcagcctggcggagaagaaaacatgcctgttggcacttatcgatatcattactaaggataatcctcgatga

SEQ ID NO: 19487 - DNA, 492 bp, Serratia marcescens
atgaccagaaaatgtttttacagtttccattatgagccggacaactggcgcgcttctcagatacgcgaaatgggctcgctggaaggtaaccggccggccacggataacgattgggaggaagtgaaaaaagggggggacgacgccatcgccgcttggatcaaaggccagttggacaatcggagctgcgccgtgattctcgcgggtaaagataccgccaatcgcaagtggatcaacttcgaaatctgcgaagcctggaagaaaggcatgggcgtgctggtggtgtatatccataacctgaaagacagcgccggcgaacaagcccgaaaaggcaacaacccgttggatcatatcaagctgggcgacacaaaactctccgctatcgccaaagcctatgatccgccttatttaaccagcaccaatgtctataatcacatcaaggaaaatctggcggagtgggtagaagaagcgatccgcattcgcgaaaattactga

SEQ ID NO: 19488 - DNA, 1455 bp, Serratia marcescens
atgcccgaacgtgatatagaactatttattcgtgactatgttaatgatattaaaagcggcagcgctgcgctctttgccggcgctgggctgtccatacccgccggcttcgtcagctggaaagagctcataagcgatatcgcttatgaactggggttggacatagaaaaagagagcgaccttatttctctggcacaatatcatctcaatgaaaaaggcaaccggcataagataaatcaaaaaataattacagaattcgctgagcaagcggaagaaacagaaaaccatcgaatcattgccagattgccgatagcgtcactttggactaccaactacgacgatctgattgaaaaaacctatgcccgttataatcgcgtctgcgacgtcaaaaccacgccggaaagcctgactaataacattcataaacgtgatgtggttttatataaaatgcatggtgactataaaacccccaaccaagcggttatcacccgagagcaatacgaaacctattcccgctcacaccagccttttgtcaatatgctgatggcggagctgactgccaaaaccttcctgtttatcggtttcagtttcgaagaccctaacctgcaatatgtattgagtcggctctatgcgcagtacggcgaagggaaaagaaaccactactgcatcatgcggcgcgtccagcttggcgacagcggcagcgaagagcaggcgtcttgcgattacaacagccgcaaacaaggcttgatgatcaacgatcttcgccgctacggcattcaaacgctgttggtaaacgactatcgcgaaatcaccgacctgctgtatgccatcgaaacgcagttcaagaaaagcacggtgtttatctccggcagtgccgacaactaccagccctatgcccgtgaagaatccatccagttcatacatcgtctggcgcgccagcttatccgcaaacagtaccgcatcgtcaatggctttggctggggtataggcacggcggtgatcaacggcgcattggaagccatttacgacagccaaggaaaaatcagcgaaagccagctggtgctgcgccctttcccccaattcgccagcgggggcattacgctgccggcactttggcacgagtatcgccagaacatgatttcgctcagcggcatcgcggtctttttgttcggcaacaagcgtaacaccgaaggcgaatgcgtgctggccgacggtttattgaaagagttccacatcgctgcggaacaaggctgcgtctgcattcctatcggttgtaccggcggcgcatccgccgaaatctaccgaaaaatcaaggaggagatgaaagaaaccctctaccaccgcaaccccaccgccatgaatctgctggatcagcttaacgaaccgggcagcctggcggagaagaaaaaatgcctgttggcacttatcgatatcattactaaggataacccccgatga

SEQ ID NO: 19489 - DNA, 492 bp, Serratia marcescens
atgaccagaaaatgtttttacagtttccattatgagccggacaactggcgcgcttctcagatacgtgaaatgggcacgctggaaggtaatcggccggccacggataatgattgggaggaagttaaaaagggcggtaacgacgccatcgctgattggatcaaaggccagttggacaatcgcagctgcgccgtaattctcgccggtaaagataccgccaatcgtaagtggatcaacttcgaaatctgcgaggcctggaagaaaggcatgggcgtgctggtgatatatatccataacctgaaagacagcgccggcgaaaaaacccaaaaaggcaacaacccgttggatcacatcaagctgggtgacgcaaagctttccacaatcgccaaagcctatgatccgccttattcaaccagcaccaatgtctataaccacatcaaagaaaacctggctgagtgggtagaagaagcgatccgcattcgcaaaaactactga

SEQ ID NO: 19490 - DNA, 1455 bp, Serratia marcescens
atgccagaacgtgatatagaactgtttattcgtgattacgttaatgatatcaaagccggcagcgccgcgctgtttgccggcgccgggctgtccatacccgccggtttcgtcagctggaaagagcttatcggtgatatcgcttatgaattggggctggatatagaaaaagaaagcgaccttatttctctggctcaatatcatctcaatgaaaaaggcaaccggcataagataaatcaaaaaataattacagaattcgctgagcaagcggaagaaactgaaaatcatcggatcattgccagattgccgatagcgtcgctctggacaaccaactacgacgatctgattgaaaaaacctatgcccgttataatcgcgtctgcgacgttaaaaccacgccggaaagtctgaccaacaatattcacaagcgcgatgttgtcttatataaaatgcatggtgattatagaacccccaaccaggcgattatcacccgcgaacaatacgaaacttactcccgtacacaccttccttttatcaacatgctgatggcggagttgaccgccaaaaccttcctgtttatcggtttcagctttgaagaccccaacctgcaatacgtattgagtcgcctttacgcgcagtacggcgaagggaaaagaaaccactactgcatcatgcggcgcgttcagcctggcgacagcggcagcgaggatcaggcgtcttatgattacaacagccgaaaacaaagcctgatgatcaacgatctgcgccgttacggcattcaaacgctgctggtggaggactatcggcaaatcaccgacctgctgtatgccatcgaaacgcaattcaagaaaagcacggtgtttatctccggcagcgccgacaactaccacccctatgcccgtgaagagtccatccagttcatacaccgcctggcgcgcctgcttatccgcaaacagtaccgcatcgtcaacggcttcggttggggcgtgggcacggcagtgatcaacggcgcattggaagccatttacgccagcggggggaaaatcagcgaaagccagctggtattgcgccctttcccccaattcgccagcgggagcattacgctgccggcactttggcacgaataccgccagaacatgatttcgctcagcggcatcgcggtttttttgttcggcaacaagcgtaacgccgaaggcgaatgcgtgctggccgacggtttattgaaagagttccacatcgctgcggaacaaggctgcgtctgcattcctatcggttgtaccggcggcgcatccgccgagatctaccgaaaaatcaaggaggagatgaaagacaccctctatcaccgccatcccgtcgccatgaacctgctggatcaacttaacgagccgggcagcctggcggagaagaaaacatgcctgttggcacttatcgatatcattactaaggataatcctcgatga

SEQ ID NO: 19491 - DNA, 492 bp, Serratia marcescens
atgaccagaaaatgtttttacagtttccattatgagccggacaactggcgcgcttctcagatacgcgaaatgggctcgctggaaggtaaccggccggccatggataacgattgggaggaagtgaaaaaagggggtgacgacgccatcgccgcttggatcaaaggccagttggacaatcggagctgcgccgtgattctcgcgggtaaagataccgccaatcgcaagtggatcaacttcgaaatctgcgaagcctggaagaaaggcatgggcgtgctggtggtgtatatccataacctgaaagacagcgccggcgaacaagcccgaaaaggcaacaacccgttggatcatatcaagctgggggatagaaagctttccggaatcgccaaagcctatgatccgccttatttgaccagcaccaatgtctataatcacatcaaggaaaatctggcggagtgggtagaagaagcgatccgcattcgcgaaaattactga

SEQ ID NO: 19492 - DNA, 1455 bp, Serratia marcescens; identical to SEQ ID NO: 19482

SEQ ID NO: 19493 - DNA, 492 bp, Serratia marcescens; identical to SEQ ID NO: 19483

SEQ ID NO: 19494 - DNA, 1455 bp, Serratia marcescens
atgccagaacgtgatatagaactgtttattcgtgattacgttaatgatatcaaagctggcagcgccgcgctgtttgccggcgccgggctgtccatacccgccggtttcgtcagctggaaagagcttatcggcgatatcgcttatgaattggggctggatatagaaaaagaaagcgaccttatttctctggctcaatatcatctcaatgaaaaaggcaaccggcataagataaatcaaaaaataattacagaattcgctgagcaagcggaagaaactgaaaatcatcggatcattgccagattgccgatagcgtcactctggacaaccaactacgacgatctgattgaaaaaacctatgcccgttataatcgcgtctgcgacgttaaaaccacgccggaaagtctgaccaacaatattcacaagcgtgatgttgtcttatataaaatgcatggtgattatagaacccccaaccaggcgattatcacccgcgaacaatacgaaacttactcccgtacacaccttccttttatcaacatgctgatggcggagttgaccgccaaaaccttcctgtttatcggtttcagctttgaagaccccaacctgcaatacgtattgagtcgcctttacgcgcagtacggcgaagggaaaagaaaccactactgcatcatgcggcgcgttcagcctggcgacagcggcagcgaggatcaggcgtcttatgattacaacagccgaaaacaaagcctgatgatcaacgatctgcgccgttacggcattcaaacgctgctggtggaggactatcggcaaatcaccgacctgctgtatgccatcgaaacgcaattcaagaaaagcacggtgtttatctccggcagcgccgacaactaccacccctatgcccgtgaagagtccatccagttcatacaccgcctggcgcgcctgcttatccgcaaacagtaccgcatcgtcaacggcttcggttggggcgtgggcacggcggtgatcaacggcgcattggaagccatttacgccagcggggggaaaatcagcgaaagccagctggtattgcgccctttcccccaattcgccagcgggagcattacgctgccggcactttggcacgagtaccgccagaacatgatttcgctcagcggcatcgcggtttttttgttcggcaacaagcgtaacgccgaaggcgaatgcgtgctggccgatggtttattgaaagagttccacatcgctgcggaacaaggctgcgtctgcattcctatcggttgtaccggcggcgcatccgccgagatctaccgaaaaatcaaggaggagatgaaagacaccctctatcaccgccatcccgtcgccatgaacctgctggatcaacttaacgagccgggcagcctggcggagaagaaaacatgcctgttggcacttatcgatatcattactaaggataatcctcgatga

SEQ ID NO: 19495 - DNA, 492 bp, Serratia marcescens
atgaccagaaaatgtttttacagtttccattatgagccggacaactggcgcgcttctcagatacgcgaaatgggctcgctggaaggtaaccggccggccacggataacgattgggaggaagtgaaaaaaggcggtgacgacgccatcgccgcttggatcaaaggccagttggacaatcggagctgcgccgtgattctcgcgggtaaagataccgccaatcgcaagtggatcaacttcgaaatctgcgaagcctggaagaaaggcatgggcgtgctggtggtgtatatccataacctgaaagacagcgccggcgaacaagcccgaaaaggcaacaacccgttggatcatatcaagctgggggatagaaagctttccggaatcgccaaagcctatgacccgccttatttgaccagcgccaatgtctataatcacatcaaggaaaatctggcggagtgggtagaagaagcgatccgcattcgcgaaaattactga

SEQ ID NO: 19496 - DNA, 1455 bp, Serratia marcescens; identical to SEQ ID NO: 19482

SEQ ID NO: 19497 - DNA, 492 bp, Serratia marcescens; identical to SEQ ID NO: 19483

SEQ ID NO: 19498 - DNA, 1455 bp, Serratia marcescens; identical to SEQ ID NO: 19482

SEQ ID NO: 19499 - DNA, 492 bp, Serratia marcescens; identical to SEQ ID NO: 19483

SEQ ID NO: 19500 - DNA, 1455 bp, Serratia marcescens; identical to SEQ ID NO: 19486

SEQ ID NO: 19501 - DNA, 492 bp, Serratia marcescens; identical to SEQ ID NO: 19487

SEQ ID NO: 19502 - DNA, 1455 bp, Serratia marcescens
atgccagaacgtgatatagaactgtttattcgtgattacgttaatgatatcaaagccggcagcgccgcgctgtttgccggcgccgggctgtccatacccgccggctttgtcagctggaaagagcttatcggtgatatcgcttatgaattggggctggatatagaaaaagaaagcgaccttatttctctggctcaatatcatctcaatgaaaaaggcaaccggcataagataaatcaaaaaataattacagaattcgctgagcaagcggaagaaactgaaaatcatcggatcattgccagattgccgatagcgtcactctggacaaccaactacgacgatctgattgaaaaaacctatgcccgttataatcgcgtctgcgacgttaaaaccacgccggaaagtctgaccaacaatattcacaagcgcgatgttgtcttatataaaatgcatggtgattatagaacacccaaccaggcgattatcacccgcgaacaatacgaaacttactcccgtacacaccttccttttatcaacatgctgatggcggagttgaccgccaaaaccttcctgtttatcggtttcagctttgaagaccccaacctgcaatacgtattgagtcgcctttacgcgcagtacggcgaagggaaaagaaaccactactgcatcatgcggcgcgttcagcctggcgacagcggcagcgaggatcaggcgtcttatgattacaacagccgaaaacaaagcctgatgatcaacgatctgcgccgttacggcattcaaacgctgctggtggaggactatcggcaaatcaccgacctgctgtatgccatcgaaacgcaattcaagaaaagcacggtgtttatctccggcagcgccgacaactaccacccctatgcccgtgaagagtccatccagttcatacaccgcctggcgcgcctgcttatccgcaaacagtaccgcatcgtcaacggcttcggttggggcgtgggcacggcagtgatcaacggcgcattggaagccatttacgccagcggggggaaaatcagcgaaagccagctggtattgcgccctttcccccaattcgccagcgggagcattacgctgccggcactttggcacgaataccgccagaacatgatttcgctcagcggcatcgcggtttttttgttcggcaacaagcgtaacgccgaaggcgaatgcgtgctggccgacggtttattgaaagagttccacatcgctgcggaacaaggctgcgtctgcattcctatcggttgtaccggcggcgcatccgccgagatctaccgaaaaatcaaggaggagatgaaagacaccctctatcaccgccatcccgtcgccatgaacctgctggatcaacttaacgagccgggcagcctggcggagaagaaaacatgcctgttggcacttatcgatatcattactaaggataatcctcgatga

SEQ ID NO: 19503 - DNA, 492 bp, Serratia marcescens; identical to SEQ ID NO: 19481

SEQ ID NO: 19504 - DNA, 1455 bp, Serratia marcescens; identical to SEQ ID NO: 19482

SEQ ID NO: 19505 - DNA, 492 bp, Serratia marcescens; identical to SEQ ID NO: 19483

SEQ ID NO: 19506 - DNA, 1455 bp, Serratia marcescens; identical to SEQ ID NO: 19480

SEQ ID NO: 19507 - DNA, 492 bp, Serratia marcescens; identical to SEQ ID NO: 19481

SEQ ID NO: 19508 - DNA, 1455 bp, Serratia marcescens; identical to SEQ ID NO: 19482

SEQ ID NO: 19509 - DNA, 492 bp, Serratia marcescens; identical to SEQ ID NO: 19483

SEQ ID NO: 19510 - DNA, 1455 bp, Serratia marcescens; identical to SEQ ID NO: 19482

SEQ ID NO: 19511 - DNA, 492 bp, Serratia marcescens; identical to SEQ ID NO: 19483

SEQ ID NO: 19512 - DNA, 1455 bp, Serratia marcescens; identical to SEQ ID NO: 19484

SEQ ID NO: 19513 - DNA, 492 bp, Serratia marcescens; identical to SEQ ID NO: 19483

SEQ ID NO: 19514 - DNA, 1455 bp, Serratia marcescens; identical to SEQ ID NO: 19488

SEQ ID NO: 19515 - DNA, 492 bp, Serratia marcescens; identical to SEQ ID NO: 19489

SEQ ID NO: 19516 - DNA, 1455 bp, Serratia marcescens; identical to SEQ ID NO: 19490

SEQ ID NO: 19517 - DNA, 492 bp, Serratia marcescens; identical to SEQ ID NO: 19481

SEQ ID NO: 19518 - DNA, 1455 bp, Serratia marcescens; identical to SEQ ID NO: 19488

SEQ ID NO: 19519 - DNA, 492 bp, Serratia marcescens; identical to SEQ ID NO: 19489

SEQ ID NO: 19520 - DNA, 1455 bp, Serratia marcescens; identical to SEQ ID NO: 19494

SEQ ID NO: 19521 - DNA, 492 bp, Serratia marcescens; identical to SEQ ID NO: 19495

SEQ ID NO: 19522 - DNA, 1455 bp, Serratia marcescens; identical to SEQ ID NO: 19486

SEQ ID NO: 19523 - DNA, 492 bp, Serratia marcescens; identical to SEQ ID NO: 19487

SEQ ID NO: 19524 - DNA, 1455 bp, Serratia marcescens; identical to SEQ ID NO: 19494

SEQ ID NO: 19525 - DNA, 492 bp, Serratia marcescens; identical to SEQ ID NO: 19495

SEQ ID NO: 19526 - DNA, 1455 bp, Serratia marcescens; identical to SEQ ID NO: 19494

SEQ ID NO: 19527 - DNA, 492 bp, Serratia marcescens; identical to SEQ ID NO: 19495

SEQ ID NO: 19528 - DNA, 1455 bp, Serratia marcescens; identical to SEQ ID NO: 19482

SEQ ID NO: 19529 - DNA, 492 bp, Serratia marcescens; identical to SEQ ID NO: 19483

SEQ ID NO: 19530 - DNA, 921 bp, Serratia marcescens
atgctgatggcggagttgaccgccaaaaccttcctgtttatcggtttcagctttgaagaccccaacctgcaatacgtattgagtcgcctttacgcgcagtacggcgaagggaaaagaaaccactactgcatcatgcggcgcgttcaggctggcgacagcggcagcgaggatcaggcgtcttatgattacaacagccgaaaacaaagcctgatgatcaacgatctgcgccgttacggcattcaaacgctgctggtggaggactatcggcaaatcaccgacctgctgtatgccatcgaaacgcaattcaagaaaagcacggtgtttatctccggcagcgccgacaactaccacccctatgcccgtgaagagtccatccagttcatacaccgcctggcgcgcctgcttatccgcaaacagtaccgcatcgtcaacggcttcggttggggcgtgggcacggcggtgatcaacggcgcattggaagccatttacgccagcggggggaaaatcagcgaaagccagctggtattgcgccctttcccccaattcgccagcgggagcattacgctgccggcactttggcacgaataccgccagaacatgatttcgctcagcggcatcgcggtttttttgttcggcaacaagcgtaacgccgaaggcgaatgcgtgctggccgacggtttattgaaagagttccacatcgctgcggaacaaggctgcgtctgcattcctatcggttgtaccggcggcgcatccgccgagatctaccgaaaaatcaaggaggagatgaaagacaccctctatcaccgccatcccgtcgccatgaacctgctggatcaacttaacgagccgggcagcctggcggagaagaaaacatgcctgttggcacttatcgatatcattactaaggataatcctcgatga

SEQ ID NO: 19531 - DNA, 492 bp, Serratia marcescens
atgaccagaaaatgtttttacagtttccattatgagccggacaactggcgcgcttctcagatacgcgaaatgggctcgctggaaggtaaccggccggccacggataacgattgggaggaagtgaaaaaaggcggtgacgacgccatcgccgcttggatcaaaggccagttggacaatcggagctgcgctgtgattctcgcgggtaaagataccgccaatcgcaagtggatcaacttcgaaatctgtgaagcctggaagaaaggcatgggcgtgctggtggtgtatatccataacctgaaagacagcgccggcgaacaagcccgaaaaggcaacaacccgttggatcatatcaagctgggggatagaaagctttccggaatcgccaaagcctatgatccgccttatttgaccagcaccaatgtctataatcacatcaaggaaaatctggcggagtgggtagaagaagcgatccgcattcgcgaaaattactga

SEQ ID NO: 19532 - DNA, 1455 bp, Serratia marcescens; identical to SEQ ID NO: 19480

SEQ ID NO: 19533 - DNA, 492 bp, Serratia marcescens; identical to SEQ ID NO: 19481

SEQ ID NO: 19534 - DNA, 1455 bp, Serratia marcescens
atgtttaaccgtgatatagaactgttcattcgtgattacgttaatgatattaaagctggcagcgccgcactgttcgccggcgccgggctgtccatccccaccggtttcgttagctggaaagagcttatcggcgatatcgcttatgaactggggctggatatcgaaaaagagagcgatcttatttccctggcgcagtatcacctcaatgaaaagggcaacagacataagataaatcaaaaaataattacagaattcgctgaacaggcggaagaaacagaaaaccaccgtattatcgccagattaccgatagcgtcactttggaccaccaactacgacgacctgattgaaaaaacctatgcccgctataatcgcgtatgcgacgttaaaaccacaccggaaagcctgaccaataacattcacaaacgtgatgttgttttatataaaatgcatggtgactatagaaatcccaaccaggcgattatcacccgcgaacaatacgaaacttactcccgtacacaccttccttttatcaacatgctgatggcggagctgaccgctaaaaccttcctgtttatcggtttcagcttcgaagatcccaatctgcaatatgtgttgagtcgcctttacgcgcagtacggcgaagggcagagaaaccactactgcatcatgcggcgcgtccagctcggcgacagcggcagcgaggatcaggcgtcctgtgactacaacagccgcaaacaaggcttgatgattaacgatctgcgccgttacggcattcaaacgctgttagtggatgactatcggcaaatcactgacctgctgtatgccatcgaaacgcagttcaagaaaagcacggtgtttatctccggcagcgccgacaactaccagccctatgcccgtgaagagtccatccagttcatacatcgtctggcgcgcctgcttatccgcaaacagtatcgcatcgtcaacggtttcggctggggcgtaggcacggcggtgatcaacggcgcactggaagccatttacgacagccaaggaaaaatcagcgaaagccagttggtgttgcgtcctttcccccaattcgccagcggcggcattaccctaccggctctttggcacgaataccgtcagaacatgatttcgctcagcggcatcgcaatctttttgttcggcaacaaacgcaacgccgaaggcgaatacgtgctggccgacggtttattgaaagagtaccagatcgccacggaacaaggctgcgtctgcattcctatcggttgtaccggcagcgcatccgccgagatctaccggaaaatcaaggaggaaatgaaagaaaccctctactaccgcaaccccgccgccatgaatctgctggatcagcttaacgaaccgggcagcctggcggagaagaaaaaaagcctgttggcgcttatcgatatcattactaaggataacccccgatga

SEQ ID NO: 19535 - DNA, 492 bp, Serratia marcescens
atgaccagaaaatgtttttacagtttccattatgagccggacaactggcgcgcttctcaggtacgcgaaatgggctcgctggaaggtaaccggccagccacggataacgattgggaggaagtgaaaaaaggcggtgacgccgccatcgccgcttggatcaagggccagttggacaatcgcagctgcgccgtgattctcgctggtaaagataccgctgatcgcaaatggattaatttcgaaatatgcgaggcttggaaaaaaggcatgggcgtgctggtggtgtatatacacaatttgaaagacagcgccggcgaccaaaccacgaaaggtaaaaacccgttggattacattaagctgggtgacgcaaagctttccacaatcgccaaagcctacgatccgccttattcgaccagcaccaatgtctataaccatataaaagacaatttggctgagtgggtagaagaagcgatccgcattcgcaaaaattactga

SEQ ID NO: 19536 - DNA, 1455 bp, Serratia marcescens; identical to SEQ ID NO: 19488

SEQ ID NO: 19537 - DNA, 492 bp, Serratia marcescens; identical to SEQ ID NO: 19489

SEQ ID NO: 19538 - DNA, 1455 bp, Serratia marcescens; identical to SEQ ID NO: 19482

SEQ ID NO: 19539 - DNA, 492 bp, Serratia marcescens; identical to SEQ ID NO: 19483

SEQ ID NO: 19540 - DNA, 1455 bp, Serratia marcescens; identical to SEQ ID NO: 19494

SEQ ID NO: 19541 - DNA, 492 bp, Serratia marcescens; identical to SEQ ID NO: 19495

SEQ ID NO: 19542 - DNA, 1455 bp, Serratia marcescens; identical to SEQ ID NO: 19486

SEQ ID NO: 19543 - DNA, 492 bp, Serratia marcescens; identical to SEQ ID NO: 19487

SEQ ID NO: 19544 - DNA, 1455 bp, Serratia marcescens; identical to SEQ ID NO: 19480

SEQ ID NO: 19545 - DNA, 492 bp, Serratia marcescens; identical to SEQ ID NO: 18675

SEQ ID NO: 19546 - DNA, 1455 bp, Serratia marcescens; identical to SEQ ID NO: 19490

SEQ ID NO: 19547 - DNA, 492 bp, Serratia marcescens; identical to SEQ ID NO: 19481

SEQ ID NO: 19548 - DNA, 1455 bp, Serratia marcescens; identical to SEQ ID NO: 19484

SEQ ID NO: 19549 - DNA, 492 bp, Serratia marcescens; identical to SEQ ID NO: 19483

SEQ ID NO: 19550 - DNA, 1455 bp, Serratia marcescens; identical to SEQ ID NO: 19484

SEQ ID NO: 19551 - DNA, 492 bp, Serratia marcescens; identical to SEQ ID NO: 19483

SEQ ID NO: 19552 - DNA, 1455 bp, Serratia marcescens; identical to SEQ ID NO: 19482

SEQ ID NO: 19553 - DNA, 492 bp, Serratia marcescens; identical to SEQ ID NO: 19483

SEQ ID NO: 19554 - DNA, 1455 bp, Serratia marcescens; identical to SEQ ID NO: 19486

SEQ ID NO: 19555 - DNA, 492 bp, Serratia marcescens; identical to SEQ ID NO: 19487

SEQ ID NO: 19556 - DNA, 921 bp, Serratia marcescens; identical to SEQ ID NO: 19530

SEQ ID NO: 19557 - DNA, 492 bp, Serratia marcescens; identical to SEQ ID NO: 19531

SEQ ID NO: 19558 - DNA, 1455 bp, Serratia marcescens; identical to SEQ ID NO: 19486

SEQ ID NO: 19559 - DNA, 492 bp, Serratia marcescens; identical to SEQ ID NO: 19487

SEQ ID NO: 19560 - DNA, 1455 bp, Serratia marcescens
atgccagaacgtgatatagaactgtttattcgtgattacgttaatgatatcaaagccggcagcgccgcgctgtttgccggcgccgggctgtccatacccgccggctttgtcagctggaaagagcttatcggtgatatcgcttatgaattggggctggatatagaaaaagaaagcgaccttatttctctggctcaatatcatctcaatgaaaaaggcaaccggcataagataaatcaaaaaataattacagaattcgctgagcaagcggaagaaactgaaaatcatcggatcattgccagattgccgatagcgtcactctggacaaccaactacgacgatctgattgaaaaaacctatgcccgttataatcgcgtctgcgacgttaaaaccacgccggaaagtctgaccaacaatattcacaagcgcgatgttgtcttatataaaatgcatggtgattatagaacacccaaccaggcgattatcacccgcgaacaatacgaaacttactcccgtacacaccttccttttatcaacatgctgatggcggagttgaccgccaaaaccttcctgtttatcggtttcagctttgaagaccccaacctgcaatacgtattgagtcgcctttacgcgcagtacggcgaagggaaaagaaaccactactgcatcatgcggcgcgttcagcctggcgacagcggcagcgaggatcaggcgtcttatgattacaacagccgaaaacaaagcctgatgatcaacgatctgcgccgttacggcattcaaacgctgctggtggaggactatcggcaaatcaccgacctgctgtatgccatcgaaacgcaattcaagaaaagcacggtgtttatctccggcagcgccgacaactaccacccctatgcccgtgaagagtccatccagttcatacaccgcctggcgcgcctgcttatccgcaaacagtaccgcatcgtcaacggcttcggttggggcgtgggcacggcggtgatcaacggcgcattggaagccatttacgccagcggggggaaaatcagcgaaagccagctggtattgcgccctttcccccaattcgccagcgggagcattacgctgccggcactttggcacgaataccgccagaacatgatttcgctcagcggcatcgcggtttttttgttcggcaacaagcgtaacgccgaaggcgaatgcgtgctggccgacggtttattgaaagagttccacatcgctgcggaacaaggctgcgtctgcattcctatcggttgtaccggcggcgcatccgccgagatctaccgaaaaatcaaggaggagatgaaagacaccctctatcaccgccatcccgtcgccatgaacctgctggatcaacttaacgagccgggcagcctggcggagaagaaaacatgcctgttggcacttatcgatatcattactaaggataatcctcgatga

SEQ ID NO: 19561 - DNA, 492 bp, Serratia marcescens
atgaccagaaaatgtttttacagtttccattatgagccggacaactggcgcgcttctcagatacgcgaaatgggctcgctggaaggtaaccggccggccacggataacgattgggaggaagtgaaaaaaggcggtgacgacgccatcgccgcttggatcaaaggccagttggacaatcggagctgcgccgtgattctcgcgggtaaagataccgccaatcgcaagtggatcaacttcgaaatctgcgaagcctggaagaaaggcatgggcgtgctggtggtatatatccataacctgaaagacagcgccggcgaacaagcccgaaaaggcaacaacccgttggatcatatcaagctgggggatagaaagctttccggaatcgccaaagcctatgatccgccttatttgaccagcaccaatgtctataatcacatcaaggaaaatctggcggagtgggtagaagaagcgatccgcattcgcgaaaattactga

SEQ ID NO: 19562 - DNA, 921 bp, Serratia marcescens; identical to SEQ ID NO: 19530

SEQ ID NO: 19563 - DNA, 492 bp, Serratia marcescens; identical to SEQ ID NO: 19531

SEQ ID NO: 19564 - DNA, 1455 bp, Serratia marcescens; identical to SEQ ID NO: 19480

SEQ ID NO: 19565 - DNA, 492 bp, Serratia marcescens; identical to SEQ ID NO: 19481

SEQ ID NO: 19566 - DNA, 1455 bp, Serratia marcescens; identical to SEQ ID NO: 19488

SEQ ID NO: 19567 - DNA, 492 bp, Serratia marcescens; identical to SEQ ID NO: 19489

SEQ ID NO: 19568 - DNA, 1455 bp, Serratia marcescens; identical to SEQ ID NO: 19484

SEQ ID NO: 19569 - DNA, 492 bp, Serratia marcescens; identical to SEQ ID NO: 19483

SEQ ID NO: 19570 - DNA, 1455 bp, Serratia marcescens; identical to SEQ ID NO: 19502

SEQ ID NO: 19571 - DNA, 492 bp, Serratia marcescens; identical to SEQ ID NO: 19481

SEQ ID NO: 19572 - DNA, 1455 bp, Serratia marcescens; identical to SEQ ID NO: 19490

SEQ ID NO: 19573 - DNA, 492 bp, Serratia marcescens; identical to SEQ ID NO: 19481

SEQ ID NO: 19574 - DNA, 1455 bp, Serratia marcescens; identical to SEQ ID NO: 19494

SEQ ID NO: 19575 - DNA, 492 bp, Serratia marcescens; identical to SEQ ID NO: 19495

SEQ ID NO: 19576 - DNA, 1455 bp, Serratia marcescens; identical to SEQ ID NO: 19494

SEQ ID NO: 19577 - DNA, 492 bp, Serratia marcescens; identical to SEQ ID NO: 19495

SEQ ID NO: 19578 - DNA, 1455 bp, Serratia marcescens; identical to SEQ ID NO: 19494

SEQ ID NO: 19579 - DNA, 492 bp, Serratia marcescens; identical to SEQ ID NO: 19495

SEQ ID NO: 19580 - DNA, 1455 bp, Serratia marcescens; identical to SEQ ID NO: 19494

SEQ ID NO: 19581 - DNA, 492 bp, Serratia marcescens; identical to SEQ ID NO: 19495

SEQ ID NO: 19582 - DNA, 1455 bp, Serratia marcescens; identical to SEQ ID NO: 19494

SEQ ID NO: 19583 - DNA, 492 bp, Serratia marcescens; identical to SEQ ID NO: 19495

SEQ ID NO: 19584 - DNA, 1455 bp, Serratia marcescens; identical to SEQ ID NO: 19484

SEQ ID NO: 19585 - DNA, 492 bp, Serratia marcescens; identical to SEQ ID NO: 19483

SEQ ID NO: 19586 - DNA, 1455 bp, Serratia marcescens; identical to SEQ ID NO: 19484

SEQ ID NO: 19587 - DNA, 492 bp, Serratia marcescens; identical to SEQ ID NO: 19483

SEQ ID NO: 19588 - DNA, 1455 bp, Serratia marcescens; identical to SEQ ID NO: 19482

SEQ ID NO: 19589 - DNA, 492 bp, Serratia marcescens; identical to SEQ ID NO: 19483

SEQ ID NO: 19590 - DNA, 1455 bp, Serratia marcescens; identical to SEQ ID NO: 19482

SEQ ID NO: 19591 - DNA, 492 bp, Serratia marcescens; identical to SEQ ID NO: 19483

SEQ ID NO: 19592 - DNA, 921 bp, Serratia marcescens; identical to SEQ ID NO: 19530

SEQ ID NO: 19593 - DNA, 492 bp, Serratia marcescens; identical to SEQ ID NO: 19531

SEQ ID NO: 19594 - DNA, 1455 bp, Serratia marcescens; identical to SEQ ID NO: 19482

SEQ ID NO: 19595 - DNA, 492 bp, Serratia marcescens; identical to SEQ ID NO: 19483

SEQ ID NO: 19596 - DNA, 1455 bp, Serratia marcescens; identical to SEQ ID NO: 19482

SEQ ID NO: 19597 - DNA, 492 bp, Serratia marcescens; identical to SEQ ID NO: 19483

SEQ ID NO: 19598 - DNA, 921 bp, Serratia marcescens; identical to SEQ ID NO: 19530

SEQ ID NO: 19599 - DNA, 492 bp, Serratia marcescens; identical to SEQ ID NO: 19531

SEQ ID NO: 19600 - DNA, 921 bp, Serratia marcescens; identical to SEQ ID NO: 19530

SEQ ID NO: 19601 - DNA, 492 bp, Serratia marcescens; identical to SEQ ID NO: 19531

SEQ ID NO: 19602 - DNA, 1455 bp, Serratia marcescens; identical to SEQ ID NO: 19482

SEQ ID NO: 19603 - DNA, 492 bp, Serratia marcescens; identical to SEQ ID NO: 19483

SEQ ID NO: 19604 - DNA, 1455 bp, Serratia marcescens; identical to SEQ ID NO: 19482

SEQ ID NO: 19605 - DNA, 492 bp, Serratia marcescens; identical to SEQ ID NO: 19483

SEQ ID NO: 19606 - DNA, 1455 bp, Serratia marcescens; identical to SEQ ID NO: 19480

SEQ ID NO: 19607 - DNA, 492 bp, Serratia marcescens; identical to SEQ ID NO: 19481

SEQ ID NO: 19608 - DNA, 1455 bp, Serratia marcescens; identical to SEQ ID NO: 19494

SEQ ID NO: 19609 - DNA, 492 bp, Serratia marcescens; identical to SEQ ID NO: 19495

SEQ ID NO: 19610 - DNA, 1455 bp, Serratia marcescens; identical to SEQ ID NO: 19494

SEQ ID NO: 19611 - DNA, 492 bp, Serratia marcescens; identical to SEQ ID NO: 19495

SEQ ID NO: 19612 - DNA, 1455 bp, Serratia marcescens; identical to SEQ ID NO: 19494

SEQ ID NO: 19613 - DNA, 492 bp, Serratia marcescens; identical to SEQ ID NO: 19495

SEQ ID NO: 19614 - DNA, 1455 bp, Serratia marcescens; identical to SEQ ID NO: 19494

SEQ ID NO: 19615 - DNA, 492 bp, Serratia marcescens; identical to SEQ ID NO: 19495

SEQ ID NO: 19616 - DNA, 1455 bp, Serratia marcescens; identical to SEQ ID NO: 19494

SEQ ID NO: 19617 - DNA, 492 bp, Serratia marcescens; identical to SEQ ID NO: 19495

SEQ ID NO: 19618 - DNA, 1455 bp, Serratia marcescens; identical to SEQ ID NO: 19482

SEQ ID NO: 19619 - DNA, 492 bp, Serratia marcescens; identical to SEQ ID NO: 19483

SEQ ID NO: 19620 - DNA, 1455 bp, Serratia marcescens; identical to SEQ ID NO: 19486

SEQ ID NO: 19621 - DNA, 492 bp, Serratia marcescens; identical to SEQ ID NO: 19487

SEQ ID NO: 19622 - DNA, 1455 bp, Serratia marcescens; identical to SEQ ID NO: 19494

SEQ ID NO: 19623 - DNA, 492 bp, Serratia marcescens; identical to SEQ ID NO: 19495

SEQ ID NO: 19624 - DNA, 1455 bp, Serratia marcescens; identical to SEQ ID NO: 19488

SEQ ID NO: 19625 - DNA, 492 bp, Serratia marcescens; identical to SEQ ID NO: 19489

SEQ ID NO: 19626 - DNA, 1455 bp, Serratia marcescens; identical to SEQ ID NO: 19484

SEQ ID NO: 19627 - DNA, 492 bp, Serratia marcescens; identical to SEQ ID NO: 19483

SEQ ID NO: 19628 - DNA, 1455 bp, Serratia marcescens; identical to SEQ ID NO: 19494

SEQ ID NO: 19629 - DNA, 492 bp, Serratia marcescens; identical to SEQ ID NO: 19495

SEQ ID NO: 19630 - DNA, 1455 bp, Serratia marcescens; identical to SEQ ID NO: 19482

SEQ ID NO: 19631 - DNA, 492 bp, Serratia marcescens; identical to SEQ ID NO: 19483

SEQ ID NO: 19632 - DNA, 921 bp, Serratia marcescens; identical to SEQ ID NO: 19530

SEQ ID NO: 19633 - DNA, 492 bp, Serratia marcescens; identical to SEQ ID NO: 19531

SEQ ID NO: 19634 - DNA, 1455 bp, Serratia marcescens
atgccagtacgtgatatagaactgtttattcgtgattacgttaatgatatcaaagccggcagcgccgcgctgtttgccggcgccgggctgtccatacccgccggtttcgtcagctggaaagagcttatcggcgatatcgcttatgaattggggctagatatagaaaaagaaagcgaccttatttctttggctcaatatcatctcaatgaaaaaggcaaccggcataagataaatcaaaaaataattacagaattcgctgagcaagcggaagaaactgaaaatcatcggatcattgccagattgccgatagcgtcactctggacaaccaactacgacgatctgattgaaaaaacctatgcccgttataatcgcgtctgcgacgttaaaaccacgccggaaagtctgaccaacaatattcacaagcgcgatgttgtcttatataaaatgcatggtgattatagaacacccaaccaggcgattatcacccgcgaacaatacgaaacttactcccgtacacaccttccttttatcaacatgctgatggcggagttgaccgccaaaaccttcctgtttatcggtttcagctttgaagaccccaacctgcaatacgtattgagtcgcctttacgcgcagtacggcgaagggaaaagaaaccactactgcatcatgcggcgcgttcagcctggcgacagcggcagcgaggatcaggcgtcttatgattacaacagccgaaaacaaagcctgatgatcaacgatctgcgccgttacggcattcaaacgctactggtggaggactatcggcaaatcaccgacctgctatatgccatcgaaacgcaattcaagaaaagcacggtgtttatctccggcagcgccgacaactaccacccctatgcccgtgaagagtccatccagttcatacaccgcctggcgcgcctgcttatccgcaaacagtaccgcatcgtcaacggcttcggttggggcgtgggcacggcggtgatcaacggcgcattggaagccatttacgccagcggggggaaaatcagcgaaagccagctggtgctgcgccctttcccccaattcgccagcgggggcattacgctgccggcactttggcacgagtaccgccagaacatgatttcgctcagcggcatcgcggtctttttgttcggcaacaagcgtaacgccgaaggcgaatgcgtgctggccgacggtttattgaaagagttccacatcgctgcggaacaaggctgcgtctgcattcctatcggttgtaccggcggcgcatccgccgagatctaccgaaaaatcaaggaggagatgaaagacaccctctatcaccgccatcccgtcgccatgaacctgctggatcaacttaacgagccgggcagcctggcggagaagaaaacatgcctgttggcacttatcgatatcattactaaggataatcctcgatga

SEQ ID NO: 19635 - DNA, 492 bp, Serratia marcescens; identical to SEQ ID NO: 19483

SEQ ID NO: 19636 - DNA, 1455 bp, Serratia marcescens; identical to SEQ ID NO: 19634

SEQ ID NO: 19637 - DNA, 492 bp, Serratia marcescens; identical to SEQ ID NO: 19483

SEQ ID NO: 19638 - DNA, 1455 bp, Serratia marcescens; identical to SEQ ID NO: 19634

SEQ ID NO: 19639 - DNA, 492 bp, Serratia marcescens; identical to SEQ ID NO: 19483

SEQ ID NO: 19640 - DNA, 1455 bp, Serratia marcescens; identical to SEQ ID NO: 19634

SEQ ID NO: 19641 - DNA, 492 bp, Serratia marcescens; identical to SEQ ID NO: 19483

SEQ ID NO: 19642 - DNA, 1455 bp, Serratia marcescens; identical to SEQ ID NO: 19502

SEQ ID NO: 19643 - DNA, 492 bp, Serratia marcescens; identical to SEQ ID NO: 19481

SEQ ID NO: 19644 - DNA, 1455 bp, Serratia marcescens; identical to SEQ ID NO: 19494

SEQ ID NO: 19645 - DNA, 492 bp, Serratia marcescens; identical to SEQ ID NO: 19495

SEQ ID NO: 19646 - DNA, 1455 bp, Serratia marcescens; identical to SEQ ID NO: 19502

SEQ ID NO: 19647 - DNA, 492 bp, Serratia marcescens; identical to SEQ ID NO: 19481

SEQ ID NO: 19648 - DNA, 921 bp, Serratia marcescens; identical to SEQ ID NO: 19530

SEQ ID NO: 19649 - DNA, 492 bp, Serratia marcescens; identical to SEQ ID NO: 19531

SEQ ID NO: 19650 - DNA, 1455 bp, Serratia marcescens; identical to SEQ ID NO: 19494

SEQ ID NO: 19651 - DNA, 492 bp, Serratia marcescens; identical to SEQ ID NO: 19495

SEQ ID NO: 19652 - DNA, 1455 bp, Serratia marcescens; identical to SEQ ID NO: 19482

SEQ ID NO: 19653 - DNA, 492 bp, Serratia marcescens; identical to SEQ ID NO: 19483

SEQ ID NO: 19654 - DNA, 1455 bp, Serratia marcescens; identical to SEQ ID NO: 19494

SEQ ID NO: 19655 - DNA, 492 bp, Serratia marcescens; identical to SEQ ID NO: 19495

SEQ ID NO: 19656 - DNA, 1455 bp, Serratia marcescens; identical to SEQ ID NO: 19486

SEQ ID NO: 19657 - DNA, 492 bp, Serratia marcescens; identical to SEQ ID NO: 19487

SEQ ID NO: 19658 - DNA, 1455 bp, Serratia marcescens; identical to SEQ ID NO: 19486

SEQ ID NO: 19659 - DNA, 492 bp, Serratia marcescens; identical to SEQ ID NO: 19487

SEQ ID NO: 19660 - DNA, 1455 bp, Serratia marcescens; identical to SEQ ID NO: 19484

SEQ ID NO: 19661 - DNA, 492 bp, Serratia marcescens; identical to SEQ ID NO: 19483

SEQ ID NO: 19662 - DNA, 1455 bp, Serratia marcescens; identical to SEQ ID NO: 19494

SEQ ID NO: 19663 - DNA, 492 bp, Serratia marcescens; identical to SEQ ID NO: 19495

SEQ ID NO: 19664 - DNA, 1455 bp, Serratia marcescens; identical to SEQ ID NO: 19494

SEQ ID NO: 19665 - DNA, 492 bp, Serratia marcescens; identical to SEQ ID NO: 19495

SEQ ID NO: 19666 - DNA, 1455 bp, Serratia marcescens; identical to SEQ ID NO: 19494

SEQ ID NO: 19667 - DNA, 492 bp, Serratia marcescens; identical to SEQ ID NO: 19495

SEQ ID NO: 19668 - DNA, 1455 bp, Serratia marcescens; identical to SEQ ID NO: 19494

SEQ ID NO: 19669 - DNA, 492 bp, Serratia marcescens; identical to SEQ ID NO: 19495

SEQ ID NO: 19670 - DNA, 1455 bp, Serratia marcescens; identical to SEQ ID NO: 19482

SEQ ID NO: 19671 - DNA, 492 bp, Serratia marcescens; identical to SEQ ID NO: 19483

SEQ ID NO: 19672 - DNA, 1455 bp, Serratia marcescens; identical to SEQ ID NO: 19482

SEQ ID NO: 19673 - DNA, 492 bp, Serratia marcescens; identical to SEQ ID NO: 19483

SEQ ID NO: 19674 - DNA, 1455 bp, Serratia marcescens; identical to SEQ ID NO: 19494

SEQ ID NO: 19675 - DNA, 492 bp, Serratia marcescens; identical to SEQ ID NO: 19495

SEQ ID NO: 19676 - DNA, 1455 bp, Serratia marcescens; identical to SEQ ID NO: 19494

SEQ ID NO: 19677 - DNA, 492 bp, Serratia marcescens; identical to SEQ ID NO: 19495

SEQ ID NO: 19678 - DNA, 921 bp, Serratia marcescens; identical to SEQ ID NO: 19530

SEQ ID NO: 19679 - DNA, 492 bp, Serratia marcescens; identical to SEQ ID NO: 19531

SEQ ID NO: 19680 - DNA, 1455 bp, Serratia sp. 2880STDY5682894; identical to SEQ ID NO: 19488

SEQ ID NO: 19681 - DNA, 492 bp, Serratia sp. 2880STDY5682894; identical to SEQ ID NO: 19489

SEQ ID NO: 19682 - DNA, 1455 bp, Serratia marcescens; identical to SEQ ID NO: 19494

SEQ ID NO: 19683 - DNA, 492 bp, Serratia marcescens; identical to SEQ ID NO: 19495

SEQ ID NO: 19684 - DNA, 1455 bp, Serratia marcescens; identical to SEQ ID NO: 19482

SEQ ID NO: 19685 - DNA, 492 bp, Serratia marcescens; identical to SEQ ID NO: 19483

SEQ ID NO: 19686 - DNA, 1455 bp, Serratia marcescens; identical to SEQ ID NO: 19494

SEQ ID NO: 19687 - DNA, 492 bp, Serratia marcescens; identical to SEQ ID NO: 19495

SEQ ID NO: 19688 - DNA, 1455 bp, Serratia marcescens; identical to SEQ ID NO: 19482

SEQ ID NO: 19689 - DNA, 492 bp, Serratia marcescens; identical to SEQ ID NO: 19483

SEQ ID NO: 19690 - DNA, 921 bp, Serratia marcescens; identical to SEQ ID NO: 19530

SEQ ID NO: 19691 - DNA, 492 bp, Serratia marcescens; identical to SEQ ID NO: 19531

SEQ ID NO: 19692 - DNA, 1455 bp, Serratia marcescens; identical to SEQ ID NO: 19634

SEQ ID NO: 19693 - DNA, 492 bp, Serratia marcescens; identical to SEQ ID NO: 19483

SEQ ID NO: 19694 - DNA, 1455 bp, Serratia marcescens; identical to SEQ ID NO: 19482

SEQ ID NO: 19695 - DNA, 492 bp, Serratia marcescens; identical to SEQ ID NO: 19483

SEQ ID NO: 19696 - DNA, 921 bp, Serratia marcescens; identical to SEQ ID NO: 19530

SEQ ID NO: 19697 - DNA, 492 bp, Serratia marcescens; identical to SEQ ID NO: 19531

SEQ ID NO: 19698 - DNA, 921 bp, Serratia marcescens; identical to SEQ ID NO: 19530

SEQ ID NO: 19699 - DNA, 492 bp, Serratia marcescens; identical to SEQ ID NO: 19531

SEQ ID NO: 19700 - DNA, 1455 bp, Serratia marcescens; identical to SEQ ID NO: 19494

SEQ ID NO: 19701 - DNA, 492 bp, Serratia marcescens; identical to SEQ ID NO: 19495

SEQ ID NO: 19702 - DNA, 921 bp, Serratia sp. 2880STDY5682895; identical to SEQ ID NO: 19530

SEQ ID NO: 19703 - DNA, 492 bp, Serratia sp. 2880STDY5682895; identical to SEQ ID NO: 19531

SEQ ID NO: 19704 - DNA, 1455 bp, Serratia marcescens; identical to SEQ ID NO: 19484

SEQ ID NO: 19705 - DNA, 492 bp, Serratia marcescens; identical to SEQ ID NO: 19483

SEQ ID NO: 19706 - DNA, 1455 bp, Serratia marcescens; identical to SEQ ID NO: 19494

SEQ ID NO: 19707 - DNA, 492 bp, Serratia marcescens; identical to SEQ ID NO: 19495

SEQ ID NO: 19708 - DNA, 1455 bp, Serratia marcescens; identical to SEQ ID NO: 19484

SEQ ID NO: 19709 - DNA, 492 bp, Serratia marcescens; identical to SEQ ID NO: 19483

SEQ ID NO: 19710 - DNA, 1455 bp, Serratia marcescens; identical to SEQ ID NO: 19502

SEQ ID NO: 19711 - DNA, 492 bp, Serratia marcescens; identical to SEQ ID NO: 19481

SEQ ID NO: 19712 - DNA, 1455 bp, Serratia marcescens; identical to SEQ ID NO: 19484

SEQ ID NO: 19713 - DNA, 492 bp, Serratia marcescens; identical to SEQ ID NO: 19483

SEQ ID NO: 19714 - DNA, 1455 bp, Serratia marcescens; identical to SEQ ID NO: 19480

SEQ ID NO: 19715 - DNA, 492 bp, Serratia marcescens; identical to SEQ ID NO: 19481

SEQ ID NO: 19716 - DNA, 1455 bp, Serratia marcescens; identical to SEQ ID NO: 19494

SEQ ID NO: 19717 - DNA, 492 bp, Serratia marcescens; identical to SEQ ID NO: 19495

SEQ ID NO: 19718 - DNA, 1455 bp, Serratia marcescens; identical to SEQ ID NO: 19502

SEQ ID NO: 19719 - DNA, 492 bp, Serratia marcescens; identical to SEQ ID NO: 19481

SEQ ID NO: 19720 - DNA, 1455 bp, Serratia marcescens; identical to SEQ ID NO: 19488

SEQ ID NO: 19721 - DNA, 492 bp, Serratia marcescens; identical to SEQ ID NO: 19489

SEQ ID NO: 19722 - DNA, 1455 bp, Serratia marcescens; identical to SEQ ID NO: 19484

SEQ ID NO: 19723 - DNA, 492 bp, Serratia marcescens; identical to SEQ ID NO: 19483

SEQ ID NO: 19724 - DNA, 921 bp, Serratia marcescens; identical to SEQ ID NO: 19530

SEQ ID NO: 19725 - DNA, 492 bp, Serratia marcescens; identical to SEQ ID NO: 19531

SEQ ID NO: 19726 - DNA, 1455 bp, Serratia marcescens; identical to SEQ ID NO: 19482

SEQ ID NO: 19727 - DNA, 492 bp, Serratia marcescens; identical to SEQ ID NO: 19483

SEQ ID NO: 19728 - DNA, 1455 bp, Serratia marcescens; identical to SEQ ID NO: 19482

SEQ ID NO: 19729 - DNA, 492 bp, Serratia marcescens; identical to SEQ ID NO: 19483

SEQ ID NO: 19730 - DNA, 1455 bp, Serratia marcescens; identical to SEQ ID NO: 19482

SEQ ID NO: 19731 - DNA, 492 bp, Serratia marcescens; identical to SEQ ID NO: 19483

SEQ ID NO: 19732 - DNA, 1455 bp, Serratia marcescens; identical to SEQ ID NO: 19634

SEQ ID NO: 19733 - DNA, 492 bp, Serratia marcescens; identical to SEQ ID NO: 19483

SEQ ID NO: 19734 - DNA, 1455 bp, Serratia marcescens; identical to SEQ ID NO: 19634

SEQ ID NO: 19735 - DNA, 492 bp, Serratia marcescens; identical to SEQ ID NO: 19483

SEQ ID NO: 19736 - DNA, 1455 bp, Serratia marcescens; identical to SEQ ID NO: 19494

SEQ ID NO: 19737 - DNA, 492 bp, Serratia marcescens; identical to SEQ ID NO: 19495

SEQ ID NO: 19738 - DNA, 1455 bp, Serratia marcescens; identical to SEQ ID NO: 19494

SEQ ID NO: 19739 - DNA, 492 bp, Serratia marcescens; identical to SEQ ID NO: 19495

SEQ ID NO: 19740 - DNA, 1455 bp, Serratia marcescens; identical to SEQ ID NO: 19482

SEQ ID NO: 19741 - DNA, 492 bp, Serratia marcescens; identical to SEQ ID NO: 19483

SEQ ID NO: 19742 - DNA, 1455 bp, Serratia marcescens; identical to SEQ ID NO: 19484

SEQ ID NO: 19743 - DNA, 492 bp, Serratia marcescens; identical to SEQ ID NO: 19483

SEQ ID NO: 19744 - DNA, 1455 bp, Serratia marcescens; identical to SEQ ID NO: 19484

SEQ ID NO: 19745 - DNA, 492 bp, Serratia marcescens; identical to SEQ ID NO: 19483

SEQ ID NO: 19746 - DNA, 1455 bp, Serratia marcescens; identical to SEQ ID NO: 19480

SEQ ID NO: 19747 - DNA, 492 bp, Serratia marcescens; identical to SEQ ID NO: 19481

SEQ ID NO: 19748 - DNA, 1455 bp, Serratia marcescens
atgccagaacgtgatatagaactgtttattcgtgattacgttaatgatatcaaagccggcagcgccgcgctgtttgccggcgccgggctgtccatacccgccggctttgtcagctggaaagagcttatcggtgatatcgcttatgaattggggctggatatagaaaaagaaagcgaccttatttctctggctcaatatcatctcaatgaaaaaggcaaccggcataagataaatcaaaaaataattacagaattcgctgagcaagcggaagaaactgaaaatcatcggatcattgccagattgccgatagcgtcactctggacaaccaactacgacgatctgattgaaaaaacctatgcccgttataatcgcgtctgcgacgttaaaaccacgccggaaagtctgaccaacaatattcacaagcgcgatgttgtcttatataaaatgcatggtgattatagaacacccaaccaggcgattatcacccgcgaacaatacgaaacttactcccgtacacaccttccttttatcaacatgctgatggcggagttgaccgccaaaaccttcctgtttatcggtttcagctttgaagaccccaacctgcaatacgtattgagtcgcctttacgcgcagtacggcgaagggaaaagaaaccacttctgcatcatgcggcgcgttcagcctggcgacagcggctgcgaggatcaggcgtcttatgattacaacagccgaaaacaaagcctgatgatcaacgatctacgccgttacggcattcaaacgctgctggtggaggactatcggcaaatcaccgacctgctgtatgccatcgaaacgcaattcaagaaaagcacggtgtttatctccggcagcgccgacaactaccacccctatgcccgtgaagagtccatccagttcatacaccgcctggcgcgcctgcttatccgcaaacagtaccgcatcgtcaacggcttcggttggggcgtgggcacggcggtgatcaacggcgcattggaagccatttacgccagcggggggaaaatcagcgaaagccagctggtattgcgccctttcccccaattcgccagcgggagcattacgctgccggcactttggcacgagtaccgccagaacatgatttcgctcagcggcatcgcggtttttttgttcggcaacaagcgtaacgccgaaggcgaatgcgtgctggccgacggtttattgaaagagttccacatcgctgcggaacaaggctgcgtctgcattcctatcggttgtaccggcggcgcatccgccgagatctaccgaaaaatcaaggaggagatgaaagacaccctctatcaccgccatcccgtcgccatgaacctgctggatcaacttaacgagccgggcagcctggcggagaagaaaacatgcctgttggcacttatcgatatcattactaaggataatcctcgatga

SEQ ID NO: 19749 - DNA, 492 bp, Serratia marcescens; identical to SEQ ID NO: 19495

SEQ ID NO: 19750 - DNA, 1455 bp, Serratia marcescens; identical to SEQ ID NO: 19486

SEQ ID NO: 19751 - DNA, 492 bp, Serratia marcescens; identical to SEQ ID NO: 19487

SEQ ID NO: 19752 - DNA, 921 bp, Serratia marcescens; identical to SEQ ID NO: 19530

SEQ ID NO: 19753 - DNA, 492 bp, Serratia marcescens; identical to SEQ ID NO: 19531

SEQ ID NO: 19754 - DNA, 1455 bp, Serratia marcescens; identical to SEQ ID NO: 19502

SEQ ID NO: 19755 - DNA, 492 bp, Serratia marcescens; identical to SEQ ID NO: 19481

SEQ ID NO: 19756 - DNA, 1455 bp, Serratia marcescens; identical to SEQ ID NO: 19482

SEQ ID NO: 19757 - DNA, 492 bp, Serratia marcescens; identical to SEQ ID NO: 19483

SEQ ID NO: 19758 - DNA, 1455 bp, Serratia marcescens; identical to SEQ ID NO: 19482

SEQ ID NO: 19759 - DNA, 492 bp, Serratia marcescens; identical to SEQ ID NO: 19483

SEQ ID NO: 19760 - DNA, 1455 bp, Serratia marcescens; identical to SEQ ID NO: 19482

SEQ ID NO: 19761 - DNA, 492 bp, Serratia marcescens; identical to SEQ ID NO: 19483

SEQ ID NO: 19762 - DNA, 1455 bp, Serratia marcescens; identical to SEQ ID NO: 19482

SEQ ID NO: 19763 - DNA, 492 bp, Serratia marcescens; identical to SEQ ID NO: 19483

SEQ ID NO: 19764 - DNA, 1455 bp, Serratia marcescens
atgtttaaccgtgatatagaactgtttattcgagattacgttaatgatatcaaagccggcagcgctgcgctgtttgccggcgccgggctgtccatccccgccggtttcgttagctggaaagagcttatcggcgatatcgcttatgaactggagctggatatcgaaaaagagagcgatcttatttctctggcgcaatatcacctcaatgaaaaaggcaacagacataagataaatcaaaaaataattacagaattcgctgaacaggcggaagaaacagaaaaccaccggattatcgccagattaccgatagcgtcactttggaccactaactacgacgacctgattgaaaaaacctatgcccgttataatcgcgtctgcgacgtcaaaaccacgccggaaagcctgactaataacattcataaacgtgatgttgttttatataaaatgcatggtgactatagaaatcccaaccaggcgattatcacccgcgaacaatacgaaacttactcccgtacacaccttccttttatcaacatgctgatggcggagctgactgccaaaaccttcctgtttatcggtttcagctttgaagaccccaacctgcaatatgtattgagccgcctttacgcgcagtacggcgaagggcagagaaaccactactgcatcatgcggcgcgtccagctcggcgacagcggcagcgaggatcaggcgtcttgcgattacaacagccgcaaacaaggcttgatgattaacgatctgcgccgttacggcattcaaacgctgttggtggatgactatcggcaaatcactgacctgctgtatgccatcgaaacgcagttcaagaaaagcacggtgtttatctccggcagcgccgacaactaccagccctatgcccgtgaagagtccatccagttcatacatcgtctggcgcgcctgcttatccacaaacagtatcgcatcgtcaacggtttcggctggggcgtaggcacagcggtgatcaacggcgcattggaagccatttacgacagccaaggaaaaatcagcgaaagccagctggtgctgcgtcctttcccccaattcgccagcggcggcattaccctaccggcactttggcacgaataccgtcagaacatgatttcgctcagcggcatcgcaatctttttgttcggcaacaaacgcaacgccgaaggcgaatacgtgctggccgacggtttattgaaagagttccagatcgccacggaacaaggctgcgtctgcattcctatcggttgtaccggcagcgcatctgccgagatctaccgaaaaatcaaggaggagatgaaagaaaccctctactaccgcaaccccgccgccatgaatctgctggatcagcttaacgaaccgggcagcctggcggagaagaagaaaagcctgttggcgcttatcgatatcattactaaggataacccccgatga

SEQ ID NO: 19765 - DNA, 492 bp, Serratia marcescens
atgaccagaaaatgtttttacagtttccattatgagccggacaactggcgcgcttctcaggtacgcgaaatgggctcgctggaaggtaaccggccagccacggataacgattgggaggaagtgaaaaaaggcggtgacgccgccatcgccgcttggatcaagggccagttggacaatcgcagctgcgccgtgattctcgccggtaaagataccgctgatcgcaaatggattaatttcgaaatatgcgaggcttggaaaaaaggcatgggcgtgctggtggtgtatatacacaatttgaaagacagcgccggcgaccaaaccacgaaaggtaaaaacccgttggatcacatcaagctgggtgacgcaaagctttccacaatcgccaaagcctatgatccgccttattcgaccagcaccaatgtctataaccatataaaagacaatttggctgagtgggtagaagaagcgatccgcattcgtaaaaattactga

SEQ ID NO: 19766 - DNA, 1455 bp, Serratia marcescens; identical to SEQ ID NO: 19486

SEQ ID NO: 19767 - DNA, 492 bp, Serratia marcescens; identical to SEQ ID NO: 19487

SEQ ID NO: 19768 - DNA, 1455 bp, Serratia marcescens; identical to SEQ ID NO: 19482

SEQ ID NO: 19769 - DNA, 492 bp, Serratia marcescens; identical to SEQ ID NO: 19483

SEQ ID NO: 19770 - DNA, 1455 bp, Serratia marcescens; identical to SEQ ID NO: 19486

SEQ ID NO: 19771 - DNA, 492 bp, Serratia marcescens; identical to SEQ ID NO: 19487

SEQ ID NO: 19772 - DNA, 1455 bp, Serratia marcescens; identical to SEQ ID NO: 19502

SEQ ID NO: 19773 - DNA, 492 bp, Serratia marcescens; identical to SEQ ID NO: 19481

SEQ ID NO: 19774 - DNA, 1455 bp, Serratia marcescens; identical to SEQ ID NO: 19484

SEQ ID NO: 19775 - DNA, 492 bp, Serratia marcescens; identical to SEQ ID NO: 19483

SEQ ID NO: 19776 - DNA, 1455 bp, Serratia marcescens; identical to SEQ ID NO: 19484

SEQ ID NO: 19777 - DNA, 492 bp, Serratia marcescens; identical to SEQ ID NO: 19483

SEQ ID NO: 19778 - DNA, 1455 bp, Serratia marcescens
atgccagaacgtgatatagaactgtttattcgtgattacgttaatgatatcaaagccggcagcgccgcgctatttgccggtgccgggctgtccatacccgccggtttcgtcagctggaaagagcttatcggtgatatcgcttatgaattggggctggatatagaaaaagaaagcgaccttatttctctggctcaatatcatctcaatgaaaaaggcaaccggcataagataaatcaaaaaataattacagaattcgctgagcaagcggaagaaactgaaaatcatcggatcattgccagattgccgatagcgtcactctggacaaccaactacgacgatctgattgaaaaaacctatgcccgttataatcgcgtctgcgacgttaaaaccacgccggaaagtctgaccaacaatattcacaagcgcgatgttgtcttatataaaatgcatggtgattatagaacacccaaccaggcgattatcacccgcgaacaatacgaaacttactcccgtacacaccttccttttatcaacatgctgatggcggagttgaccgccaaaaccttcctgtttatcggtttcagctttgaagaccccaacctgcaatacgtattgagtcgcctttacgcgcagtacggcgaagggaaaagaaaccactactgcatcatgcggcgcgttcagcctggcgacagcggcagcgaggatcaggcgtcttatgattacaacagccgaaaacaaagcctgatgatcaacgatctgcgccgttacggcattcaaacgctactggtggaggactatcggcaaatcaccgacctgctatatgccatcgaaacgcaattcaagaaaagcacggtgtttatctccggcagcgccgacaactaccacccctatgcccgtgaagagtccatccagttcatacaccgcctggcgcgcctgcttatccgcaaacagtaccgcatcgtcaacggcttcggttggggcgtgggcacggcggtgatcaacggcgcattggaagccatttacgccagcggggggaaaatcagcgaaagccagctggtgctgcgccctttcccccaattcgccagcgggggcattacgctgccggcactttggcacgagtaccgccagaacatgatttcgctcagcggcatcgcggtctttttgttcggcaacaagcgtaacgccgaaggcgaatgcgtgctggccgacggtttattgaaagagttccacatcgctgcggaacaaggctgcgtctgcattcctatcggttgtaccggcggcgcatccgccgagatctaccgaaaaatcaaggaggagatgaaagacaccctctatcaccgccattccgtcgccatgaacctgctggatcaacttaacgagccgggcagcctggcggagaagaaaacatgcctgttggcacttatcgatatcattactaaggataatcctcgatga

SEQ ID NO: 19779 - DNA, 492 bp, Serratia marcescens; identical to SEQ ID NO: 19483

SEQ ID NO: 19780 - DNA, 1455 bp, Serratia marcescens; identical to SEQ ID NO: 19482

SEQ ID NO: 19781 - DNA, 492 bp, Serratia marcescens; identical to SEQ ID NO: 19483

SEQ ID NO: 19782 - DNA, 1455 bp, Serratia marcescens; identical to SEQ ID NO: 19748

SEQ ID NO: 19783 - DNA, 492 bp, Serratia marcescens; identical to SEQ ID NO: 19495

SEQ ID NO: 19784 - DNA, 1455 bp, Serratia marcescens; identical to SEQ ID NO: 19486

SEQ ID NO: 19785 - DNA, 492 bp, Serratia marcescens; identical to SEQ ID NO: 19487

SEQ ID NO: 19786 - DNA, 1455 bp, Serratia marcescens; identical to SEQ ID NO: 19494

SEQ ID NO: 19787 - DNA, 492 bp, Serratia marcescens; identical to SEQ ID NO: 19495

SEQ ID NO: 19788 - DNA, 1455 bp, Serratia marcescens; identical to SEQ ID NO: 19488

SEQ ID NO: 19789 - DNA, 492 bp, Serratia marcescens; identical to SEQ ID NO: 19489

SEQ ID NO: 19790 - DNA, 1455 bp, Serratia marcescens; identical to SEQ ID NO: 19494

SEQ ID NO: 19791 - DNA, 492 bp, Serratia marcescens; identical to SEQ ID NO: 19495

SEQ ID NO: 19792 - DNA, 1455 bp, Serratia marcescens; identical to SEQ ID NO: 19494

SEQ ID NO: 19793 - DNA, 492 bp, Serratia marcescens; identical to SEQ ID NO: 19495

SEQ ID NO: 19794 - DNA, 1455 bp, Serratia marcescens; identical to SEQ ID NO: 19494

SEQ ID NO: 19795 - DNA, 492 bp, Serratia marcescens; identical to SEQ ID NO: 19495

SEQ ID NO: 19796 - DNA, 1455 bp, Serratia marcescens; identical to SEQ ID NO: 19494

SEQ ID NO: 19797 - DNA, 492 bp, Serratia marcescens; identical to SEQ ID NO: 19495

SEQ ID NO: 19798 - DNA, 921 bp, Serratia marcescens; identical to SEQ ID NO: 19530

SEQ ID NO: 19799 - DNA, 492 bp, Serratia marcescens; identical to SEQ ID NO: 19531

SEQ ID NO: 19800 - DNA, 1455 bp, Serratia marcescens; identical to SEQ ID NO: 19482

SEQ ID NO: 19801 - DNA, 492 bp, Serratia marcescens; identical to SEQ ID NO: 19483

SEQ ID NO: 19802 - DNA, 1455 bp, Serratia marcescens; identical to SEQ ID NO: 19482

SEQ ID NO: 19803 - DNA, 492 bp, Serratia marcescens; identical to SEQ ID NO: 19483

SEQ ID NO: 19804 - DNA, 921 bp, Serratia marcescens; identical to SEQ ID NO: 19530

SEQ ID NO: 19805 - DNA, 492 bp, Serratia marcescens; identical to SEQ ID NO: 19531

SEQ ID NO: 19806 - DNA, 1455 bp, Serratia marcescens; identical to SEQ ID NO: 19494

SEQ ID NO: 19807 - DNA, 492 bp, Serratia marcescens; identical to SEQ ID NO: 19495

SEQ ID NO: 19808 - DNA, 1455 bp, Serratia marcescens; identical to SEQ ID NO: 19494

SEQ ID NO: 19809 - DNA, 492 bp, Serratia marcescens; identical to SEQ ID NO: 19495

SEQ ID NO: 19810 - DNA, 1455 bp, Serratia marcescens; identical to SEQ ID NO: 19494

SEQ ID NO: 19811 - DNA, 492 bp, Serratia marcescens; identical to SEQ ID NO: 19495

SEQ ID NO: 19812 - DNA, 1455 bp, Serratia marcescens; identical to SEQ ID NO: 19482

SEQ ID NO: 19813 - DNA, 492 bp, Serratia marcescens; identical to SEQ ID NO: 19483

SEQ ID NO: 19814 - DNA, 1455 bp, Serratia marcescens; identical to SEQ ID NO: 19486

SEQ ID NO: 19815 - DNA, 492 bp, Serratia marcescens; identical to SEQ ID NO: 19487

SEQ ID NO: 19816 - DNA, 1455 bp, Serratia marcescens; identical to SEQ ID NO: 19480

SEQ ID NO: 19817 - DNA, 492 bp, Serratia marcescens; identical to SEQ ID NO: 19481

SEQ ID NO: 19818 - DNA, 1455 bp, Serratia marcescens; identical to SEQ ID NO: 19502

SEQ ID NO: 19819 - DNA, 492 bp, Serratia marcescens; identical to SEQ ID NO: 19481

SEQ ID NO: 19820 - DNA, 1455 bp, Serratia marcescens; identical to SEQ ID NO: 19486

SEQ ID NO: 19821 - DNA, 492 bp, Serratia marcescens; identical to SEQ ID NO: 19487

SEQ ID NO: 19822 - DNA, 1455 bp, Serratia marcescens; identical to SEQ ID NO: 19484

SEQ ID NO: 19823 - DNA, 492 bp, Serratia marcescens; identical to SEQ ID NO: 19483

SEQ ID NO: 19824 - DNA, 1455 bp, Serratia marcescens; identical to SEQ ID NO: 19486

SEQ ID NO: 19825 - DNA, 492 bp, Serratia marcescens; identical to SEQ ID NO: 19487

SEQ ID NO: 19826 - DNA, 1455 bp, Serratia marcescens; identical to SEQ ID NO: 19482

SEQ ID NO: 19827 - DNA, 492 bp, Serratia marcescens; identical to SEQ ID NO: 19483

SEQ ID NO: 19828 - DNA, 1455 bp, Serratia marcescens
atgtttaaccgtgatatagaactgtttattcgagattacgttaatgatatcaaagccggcagcgctgcgctgtttgccggcgccggactgtccatccccgccggtttcgttagctggaaagagcttatcggcgatatcgcttatgaactggagctggatatcgaaaaagagagcaatcttatttctctggcgcaatatcacctcaatgaaaaaggcaacagacataagataaatcagaaaataattacagaattcgctgagcaggcggaagaaacagaaaaccaccggattatcgccagattaccgatagcgtcactttggaccactaattacgacgacctgattgaaaaaacctatgcccgttataatcgcgtctgcgacgtcaaaaccacgccggaaagcctgactaataacattcataaacgtgatgttgttttatataaaatgcatggtgactatagaaatcccaaccaggcgattatcacccgcgaacaatacgaaacttactcccgtacacaccttccttttatcaacatgctgatggcggagctgactgccaaaaccttcctgtttatcggtttcagctttgaagaccccaacctgcaatatgtattgagccgcctttacgcacagtacggcgaagggcagagaaaccactactgcatcatgcggcgcgtccagctcggcgacagcggcagcgaggatcaggcgtcttgcgattacaacagccgcaaacaaggcttgatgattaacgatctgcgccgttacggcattcaaacgctgttggtggatgactatcggcaaatcactgacctgctgtatgccatcgaaacgcagttcaagaaaagcacggtgtttatctccggcagcgccgacaactaccagccctatacccgtgaagagtccatccagttcatacatcgtctggcgcgcctgcttatccacaaacagtatcgcatcgtcaacggtttcggctggggcgtaggcacagcggtgatcaacggcgcattggaagccatttacgacagccaaggaaaaatcagcgaaagccagctggtgctgcgtcctttcccccaattcgccagcggcggcattaccctaccggcactttggcacgaataccgtcagaacatgatttcgctcagcggcatcgcaatctttttgttcggcaacaaacgcaacgccgaaggcgaatacgtgctggccgacggtttattgaaagagttccagatcgccacggaacaaggctgcgtctgcattcctatcggttgtaccggcagcgcatctgccgagatctaccgaaaaatcaaggaggagatgaaagaaaccctctactaccgcaaccccgccgccatgaatctgctggatcagcttaacgaaccgggcagcctggcggagaagaaaaaaagcctgttggcgcttatcgatatcattactaaggataacccccgatga

SEQ ID NO: 19829 - DNA, 492 bp, Serratia marcescens; identical to SEQ ID NO: 19765

SEQ ID NO: 19830 - DNA, 1455 bp, Serratia marcescens; identical to SEQ ID NO: 19488

SEQ ID NO: 19831 - DNA, 492 bp, Serratia marcescens; identical to SEQ ID NO: 19489

SEQ ID NO: 19832 - DNA, 1455 bp, Serratia marcescens; identical to SEQ ID NO: 19494

SEQ ID NO: 19833 - DNA, 492 bp, Serratia marcescens; identical to SEQ ID NO: 19495

SEQ ID NO: 19834 - DNA, 1455 bp, Serratia marcescens; identical to SEQ ID NO: 19488

SEQ ID NO: 19835 - DNA, 492 bp, Serratia marcescens; identical to SEQ ID NO: 19489

SEQ ID NO: 19836 - DNA, 1455 bp, Serratia marcescens; identical to SEQ ID NO: 19482

SEQ ID NO: 19837 - DNA, 492 bp, Serratia marcescens
atgaccagaaaatgtttttacagtttccattatgagccggacaactggcgcgcttctcagatacgcgaaatgggctcgctggaaggtaaccggccggccacggataacgattgggaggaagtgaaaaaagggagtgacgacgccatcgccgcttggatcaaaggccagttggacaatcggagctgcgccgtgattctcgcgggtaaagataccgccaatcgcaagtggatcaacttcgaaatctgcgaagcctggaagaaaggcatgggcgtgctggtggtgtatatccataacctgaaagacagcgccggcgaacaagcccgaaaaggcaacaacccgttggatcatatcaagctgggcgacacaaaactctccgctatcgccaaagcctatgatccgccttatttgaccagcaccaatgtctataatcacatcaaggaaaatctggcggagtgggtagaagaagcgatccgcattcgcgaaaattactga

SEQ ID NO: 19838 - DNA, 1455 bp, Serratia marcescens; identical to SEQ ID NO: 19634

SEQ ID NO: 19839 - DNA, 492 bp, Serratia marcescens; identical to SEQ ID NO: 19483

SEQ ID NO: 19840 - DNA, 1398 bp, Serratia marcescens
atgccagaacgtgatatagaactgtttattcgtgattacgttaatgatatcaaagccggcagcgccgcgctatttgccggtgccgggctgtccatacccgccggtttcgtcagctggaaagagcttatcggtgatatcgcttatgaattggggctggatatagaaaaagaaagcgaccttatttctctggctcaatatcatctcaatgaaaaaggcaaccggcataagataaatcaaaaaataattacagaattcgctgagcaagcggaagaaactgaaaatcatcggatcattgccagattgccgatagcgtcactctggacaaccaactacgacgatctgattgaaaaaacctatgcccgttataatcgcgtctgcgacgttaaaaccacgccggaaagtctgaccaacaatattcacaagcgcgatgttgtcttatataaaatgcatggtgattatagaacacccaaccaggcgattatcacccgcgaacaatacgaaacttactcccgtacacaccttccttttatcaacatgctgatggcggagttgaccgccaaaaccttcctgtttatcggtttcagctttgaagaccccaacctgcaatacgtattgagtcgcctttatgcgcagtacggcgaagggaaaagaaaccactactgcatcatgcggcgcgttcagcctggcgacagcggcagcgaggatcaggcgtcttatgattacaacagccgaaagcaaagcctgatgatcaacgatctgcgccgttacggcattcaaacgctgctggtggaggactatcggcaaatcaccgacctgctgtatgccatcgaaacgcaattcaagaaaagcacggtgtttatctccggcagcgccgacaactaccaaccctatgcccgtgaagagtccatccagttcatacaccgcctggcgcgcctgcttatccgcaaacagtaccgcatcgtcaacggcttcggttggggcgtgggcacggcggtgatcaacggcgcattggaagccatttacgccagcgggggcattacgctgccggcactttggcacgaataccgccagaacatgatttcgctcagcggcatcgcggtttttttgttcggcaacaagcgtaacgccgaaggcgaatgcgtgctggccgacggtttattgaaagagttccacatcgctgcggaacaaggctgcgtctgcattcctatcggttgtaccggcggcgcatccgccgagatctaccgaaaaatcaaggaggagatgaaagacaccctctatcaccgccatcccgtcgccatgaacctgctggatcaacttaacgagccgggcagcctggcggagaagaaaacatgcctgttggcacttatcgatatcattactaaggataatcctcgatga

SEQ ID NO: 19841 - DNA, 492 bp, Serratia marcescens; identical to SEQ ID NO: 19487

SEQ ID NO: 19842 - DNA, 1455 bp, Serratia marcescens; identical to SEQ ID NO: 19634

SEQ ID NO: 19843 - DNA, 492 bp, Serratia marcescens; identical to SEQ ID NO: 19483

SEQ ID NO: 19844 - DNA, 1455 bp, Serratia marcescens; identical to SEQ ID NO: 19486

SEQ ID NO: 19845 - DNA, 492 bp, Serratia marcescens; identical to SEQ ID NO: 19487

SEQ ID NO: 19846 - DNA, 1455 bp, Serratia marcescens; identical to SEQ ID NO: 19484

SEQ ID NO: 19847 - DNA, 492 bp, Serratia marcescens; identical to SEQ ID NO: 19483

SEQ ID NO: 19848 - DNA, 1455 bp, Serratia marcescens; identical to SEQ ID NO: 19488

SEQ ID NO: 19849 - DNA, 492 bp, Serratia marcescens; identical to SEQ ID NO: 19489

SEQ ID NO: 19850 - DNA, 1455 bp, Serratia marcescens
atgccagaacgtgatatagaactgtttattcgtgattacgttaatgatatcaaagccggcagcgccgcgctatttgccggtgccgggctgtccatacccgccggtttcgtcagctggaaagagcttatcggtgatatcgcttatgaattggggctggatatagaaaaagaaagcgaccttatttctctggctcaatatcatctcaatgaaaaaggcaaccggcataagataaatcaaaaaataattacagaattcgctgagcaagcggaagaaactgaaaatcatcggatcattgccagattgccgatagcgtcactctggacaaccaactacgacgatctgattgaaaaaacctatgcccgttataatcgcgtctgcgacgttaaaaccacgccggaaagtctgaccaacaatattcacaagcgcgatgttgtcttatataaaatgcatggtgattatagaacacccaaccaggcgattatcacccgcgaacaatacgaaacttactcccgtacacaccttccttttatcaacatgctgatggcggagttgaccgccaaaaccttcctgtttatcggtttcagctttgaagaccccaacctgcaatacgtattgagtcgcctttacgcgcagtacggcgaagggaaaagaaaccactactgcatcatgcggcgcgttcagcctggcgacagcggcagcgaggatcaggcgtcttatgattacaacagccgaaaacaaagcctgatgatcaacgatctgcgccgttacggcattcaaacgctactggtggaggactatcggcaaatcaccgacctgctatatgccatcgaaacgcaattcaagaaaagcacggtgtttatctccggcagcgccgacaactaccacccctatgcccgtgaagagtccatccagttcatacaccgcctggcgcgcctgcttatccgcaaacagtaccgcatcgtcaacggcttcggctggggcgtgggcacggcggtgatcaacggcgcattggaagccatttacgccagcggggggaaaatcagcgaaagccagctggtgctgcgccctttcccccaattcgccagcgggggcattacgctgccggcactttggcacgagtaccgccagaacatgatttcgctcagcggcatcgcggtctttttgttcggcaacaagcgtaacgccgaaggcgaatgcgtgctggccgacggtttattgaaagagttccacatcgctgcggaacaaggctgcgtctgcattcctatcggttgtaccggcggcgcatccgccgagatctaccgaaaaatcaaggaggagatgaaagacaccctctatcaccgccatcccgtcgccatgaacctgctggatcaacttaacgaaccgggcagcctggcggagaagaaaacatgcctgttggcacttatcgatatcattactaaggataatcctcgatga

SEQ ID NO: 19851 - DNA, 492 bp, Serratia marcescens; identical to SEQ ID NO: 19483

SEQ ID NO: 19852 - DNA, 1455 bp, Serratia marcescens; identical to SEQ ID NO: 19634

SEQ ID NO: 19853 - DNA, 492 bp, Serratia marcescens; identical to SEQ ID NO: 19483

SEQ ID NO: 19854 - DNA, 1455 bp, Serratia marcescens
atgccagaacgtgatatagaactgtttattcgtgattacgttaatgatatcaaagctggcagcgccgcgctgtttgccggcgccgggctgtccatacccgccggtttcgtcagctggaaagagcttatcggtgatatcgcttatgaattggggctggatatagaaaaagaaagtgaccttatttctctggctcaatatcatctcaatgaaaaaggcaaccggcataagataaatcaaaaaataattacagaattcgctgagcaagcggaagaaactgaaaatcatcggatcattgccagattgccgatagcgtcactctggacaaccaactacgacgatctgattgaaaaaacctatgcccgttataatcgcgtctgcgacgttaaaaccacgccggaaagtctgaccaacaatcttcacaagcgcgatgttgtcttatataaaatgcatggtgattatagaacacccaaccaggcgattatcacccgcgaacaatacgaaacttactcccgtacacaccttccttttatcaacatgctgatggcggagttgaccgccaaaaccttcctgtttatcggtttcagctttgaagaccccaacctgcaatacgtattgagtcgcctttatgcgcagtacggcgaagggaaaagaaaccactactgcatcatgcggcgcgttcagcctggcgacagcggcagcgaggatcaggcgtcttatgattacaacagccgaaagcaacgcctgatgatcaacgatctgcgccgttacggcattcaaacgctgctggtggaggactatcggcaaatcaccgacctgctgtatgccatcgaaacgcaattcaagaaaagcacggtgtttatctccggcagcgccgacaactaccacccctatgcccgtgaagagtccatccagttcatacaccgcctggcgcgcctgcttatccgcaaacagtaccgcatcgtcaacggcttcggttggggcgtgggcacggcggtgatcaacggcgcattggaagccatttacgccagcggggggaaaatcagcgaaagccagctggtattgcgccctttcccccaattcgccagcgggggcattacgctgccggcactttggcacgaataccgccagaacatgatttcgctcagcggcatcgcggtttttttgttcggcaacaagcgtaacgccgaaggcgaatgcgtgctggccgacggtttattgaaagagttccacatcgctgcggaacaaggctgcgtctgcattcctatcggttgtaccggcggcgcatccgccgagatctaccgaaaaatcaaggaggagatgaaagacaccctctatcaccgccatcccgtcgccatgaacctgctggatcaacttaacgagccgggcagcctggcggagaagaaaacatgcctgttggcacttatcgatatcattactaaggataatcctcgatga

SEQ ID NO: 19855 - DNA, 492 bp, Serratia marcescens
atgaccagaaaatgtttttacagtttccattatgagccggacaactggcgcgcttctcagatacgcgaaatgggctcgctggaaggtaaccggccggccacggataacgattgggaggaagtgaaaaaagggggggacgacgccatcgccgcttggatcaaaggccagttggacaatcggagctgcgccgtgattctcgcgggtaaagataccgccaatcgcaagtggatcaacttcgaaatctgcgaagcctggaagaaaggcatgggcgtgctggtggtgtatatccataacctgaaagacagcgccggcgaacaagcccgaaaaggcaacaacccgttggatcatatcaagctgggggatagaaagctttccggaatcgccaaagcctatgatccgccttatttgaccagcgccaatgtctataatcacatcaaggaaaatctggcggagtgggtagaagaagcgatccgcattcgcgaaaattactga

SEQ ID NO: 19856 - DNA, 1455 bp, Serratia marcescens; identical to SEQ ID NO: 19490

SEQ ID NO: 19857 - DNA, 492 bp, Serratia marcescens; identical to SEQ ID NO: 19481

SEQ ID NO: 19858 - DNA, 1455 bp, Serratia marcescens; identical to SEQ ID NO: 19494

SEQ ID NO: 19859 - DNA, 492 bp, Serratia marcescens; identical to SEQ ID NO: 19495

SEQ ID NO: 19860 - DNA, 1455 bp, Serratia marcescens; identical to SEQ ID NO: 19482

SEQ ID NO: 19861 - DNA, 492 bp, Serratia marcescens; identical to SEQ ID NO: 19483

SEQ ID NO: 19862 - DNA, 1455 bp, Serratia marcescens; identical to SEQ ID NO: 19482

SEQ ID NO: 19863 - DNA, 492 bp, Serratia marcescens; identical to SEQ ID NO: 19483

SEQ ID NO: 19864 - DNA, 1455 bp, Serratia marcescens; identical to SEQ ID NO: 19502

SEQ ID NO: 19865 - DNA, 492 bp, Serratia marcescens; identical to SEQ ID NO: 19481

SEQ ID NO: 19866 - DNA, 1455 bp, Serratia marcescens; identical to SEQ ID NO: 19850

SEQ ID NO: 19867 - DNA, 492 bp, Serratia marcescens; identical to SEQ ID NO: 19483

SEQ ID NO: 19868 - DNA, 1455 bp, Serratia marcescens; identical to SEQ ID NO: 19502

SEQ ID NO: 19869 - DNA, 492 bp, Serratia marcescens; identical to SEQ ID NO: 19481

SEQ ID NO: 19870 - DNA, 1455 bp, Serratia marcescens; identical to SEQ ID NO: 19482

SEQ ID NO: 19871 - DNA, 492 bp, Serratia marcescens; identical to SEQ ID NO: 19483

SEQ ID NO: 19872 - DNA, 1455 bp, Serratia marcescens; identical to SEQ ID NO: 19494

SEQ ID NO: 19873 - DNA, 492 bp, Serratia marcescens; identical to SEQ ID NO: 19495

SEQ ID NO: 19874 - DNA, 1455 bp, Serratia marcescens; identical to SEQ ID NO: 19502

SEQ ID NO: 19875 - DNA, 492 bp, Serratia marcescens; identical to SEQ ID NO: 19481

SEQ ID NO: 19876 - DNA, 1455 bp, Serratia marcescens; identical to SEQ ID NO: 19494

SEQ ID NO: 19877 - DNA, 492 bp, Serratia marcescens; identical to SEQ ID NO: 19495

SEQ ID NO: 19878 - DNA, 1455 bp, Serratia marcescens; identical to SEQ ID NO: 19494

SEQ ID NO: 19879 - DNA, 492 bp, Serratia marcescens; identical to SEQ ID NO: 19495

SEQ ID NO: 19880 - DNA, 1455 bp, Serratia marcescens; identical to SEQ ID NO: 19494

SEQ ID NO: 19881 - DNA, 492 bp, Serratia marcescens; identical to SEQ ID NO: 19495

SEQ ID NO: 19882 - DNA, 1782 bp, Burkholderia cordobensis
atgccgatgtcagagattaaagaaattgatttccgtcagcaagtcatccagaacgggcaacaactaatgtggtttctgggggctggggcgtcacgtagttccgggcttccgaccgcaacagacttaatttgggaccttaagcttcgttactactgcgctcaggaaaaccaagacgtagttgcacacgacgtgagcaatagggctgtgcaagcccgcattcaggcgtacatggacagtaaaagctttccgccactttgggatccggccgaatactcgttctatttcgagctgctatttggaggagactattcgtcgcaacaaaaatatctcaataaagcacttgccacagagaaaatatcctcgacgatcggtcagcgcgcacttgctgcactcatgcaaatgggtcttgcccggatcatctttactacgaatttcgacgaggttgtggaatctacctatgcctcaattgcaggcaagaatcttacgacattccaccttgaaggatcctacgccgcgcttgaggcattgaactccgaacggtttcctttcttagcaaaggttcacggtgactttcgttaccagacggttaaaaatcttgcagccgatttgctaagcaacgatagagaaattcaaaaatgtttcgtggctgcctctgtccgtttcggcatggtcgtgagtgggtacagtgggcgcgatcgcaacgtgatggcgatgttcggcgaagccattgaacagaacaactcgtttccacatggtctttattggacggtgccacgcatttcccatgttgaagcgtcggtgcgtcagttgatggattacgccaacagcaagggcgttaagggcgggattgtcgaaaccggcacatttgatgaaatgcttgcgaagatatggcgattggtctccgataagaatccggccgtcgacgcaaaagttaggagtgctacggcgaagcaagtgaggattcctctacctcctgccggatcgggataccccattcttcgcacgaacgcgcttcaaatcaaaagggtgccagttagctgcggcgccatcgattatgacggagctgtggaccttgcgcagttgaagagtgtcttgtttgaaaagcgcccccaatgctcagtctgctacacggatcgcattctgttttggggaaacggaaaggaacttgtcaagatatacgaaccggaccgagtgaaatcagtttcgtcattcgagattgatgatctagtcgtcgcaatcaacacttcaacctattttaagtcgatggtggaggaaacggttgcgaatgcattaatttacgaaaagcctctcgttcttcgcaagcagagaaaaacttggtatgcgattactgaccacaaagaagcgagcagtgatacgttaaaaccattgcgagaggcactttcctggaaggatagagacggcaaaatgcacaacggtgttgtaaacggccaggtggctggactcaaggatgtgtattgggctgaggctgtttcgctgagggttgaagagcggaacggccagatatggttgcttctgaaaccggatatttggatttctccaaataagatgcgcgaacaggcaactgactttgtctacaagaaaaaaatacgtcgatacaataaacaggcttcagaaattctgagcgcttggatcaaaattcttctcggaagcattgggaagggcgaggcaatagtcaccgcgtacaaaggcacggaccatcccgcgcaattccaaattattacacgctctgcatttagcaagaggagcggcacaaatgactaa

SEQ ID NO: 19883 - DNA, 1518 bp, Burkholderia cordobensis
atgaggaatcgttcgggccggtgtcgcaccggagtgatcgatcgattcgtgggggtatcaatggcgaaaaaccggcttctttatttgcaccgccgccattttggactcgacggtccggacgccattatgggaaaactgctgtacgaggcattaaaggcggacctcgatgctgcagtgacttcgcatatgatcattccagactcggtttccgagggacttccagaatctattctcgatgacgtaatcacgcagagcgaattccatcggtcgggcgtcaacgtggtgtatctagagggcggattagattcccactgtctaacggggttcgacggctcagactggaagatgtcggctccaatgatcgaggagttcgcaaggcgtggagggattgtcgttgtagcggatcttgatatcaacatcgcacggtcgattgacgaagaccgcttcggacgtctcttcaaggcatggtttcgacgtgaagatggcaggcaaggtaatccgatcgaaatcgtcgacccgggacgctgcgagaactcatattggtcagagatttgggtcgattgtgaagctgcacgaacccattgtgcggaatggctccagccaatatacaacggcctttccactattctggtaggtggtcctttagatctggggaattctcaaagctggctcgccaatattgtcagtcatactatgggaacaatgtgtcaagactgttggtgggaaccccctgagactggattcgatcagcaccgccttcgttatcatccacaaagtccgatgggcggaggcagcttcgggcctttcgcgtcggtctgccaactgggaagaggctatctggttgcaatcgcagccagagtctcatcgaattatgtgactaagaaaagccacggaaacatcgagtggattatcaatataatccgacatctccgggcagccgttgagaatcatgaaaggctgggatccatctctcgttttcgtggggtctgtttatttctcagtcaccgttcggtggacaagcctgtcgtcgaagccatttcggataatctgttcaaaaccggaatttcgacctggttggacaaagagagaatgcttccgtcagactctctcgggctttcgttgaatgcgggcttgaccgagtctagtcactttactatcttttggtcgaggcactgcaaggacgcaccttgggtgcatttcgagctcgggagcgcaatatcggcatgtatcgagagaagaaagccgattctggtcgttgctctagacgacacccctcccccggacagcttagcccagttcatccggataaatggaaagggtacgccgcaagagacttccaggctcatttacgacgccctcgctgcacttgtcgatcgagagtcactgaatcgagctaaggaagcgtctgctgttgaacaaacggatgtcgggaatgccatcgccagcggaaagttgaatcgaagggcttcgacggaagttgttggcccgtttcgtcgaagacgacggaagcctcgttaa

SEQ ID NO: 19884 - DNA, 1440 bp, Paraburkholderia sordidicola
atgtcgactaatgatttagaagcctttgtaaatgagtatgtgaaggagctccacgagggaacggccgccgtgtttctcggagcagggatgtcagccccagcgggatttgtggattgggtgaagttgctggaaccgcttgcaaagcagcttggcctcgacgcaaagatggaggctgaccatttggtcgcactcgcgcaataccacgtcaacgacaacggccagaatcgaagcggattgactaagcgcctcatccaagagttcccgacctacgctaagccaccggaaaatcacaagctactggccaggcttcccatatccacttactggactaccaattacgataagctcatcgaaagagctcttgaagatgctggaaaaatcgtcgacgtcaaatttcgaacgccccaccttgctagcacgaagccacgcagagacgccattgtcttcaagatgcacggcgacgttgaacacgcggatgaggctgttatcacgaaagatgactacgagcgatattcactcgaccggggcgcattcgtaaatgcgttgacgggtgacttggtttccaaaacctttttgtttttgggattcagctttaaagacccgaatctggactacattctttccagaattcgcatcactttccagcagcatagtcgccagcattactgcatcttcaagaaggtgatgaaggaggcaggagagtcgctcgcagacttcgagtacaagcagcagaagcaacgacatctcattgaagacttgaaacgcttcaatgttcggacgctattggtcagcgactaccctgaaattaccgccatccttcaacaaatctaccggacatatcggcgtaggacgatattcatctccggaagtgccgatgaactaaacggttgggacgaaaaggatgtgcatgaatttctgttcagccttggacggattctcattcaaaaggggtatcgactggtatcaggcttcggattgggtatcagcaacgaactcctctcaggtgccatcgaacaaatttatgcacaacgtcaggggcacatccaggaccatttagtcgtgcgtccgttcccccgcgcgatagccgacgacaataaacgaaaagcgttctggcacgagttcagaaccgacttgatatcacaggctggaatcgctctattcctgttcggaaatactcggttggacggtaagattgttcatgctgatggcgtggacaaggagtttcgaatcgctcaatcactagatttggttatgttgccggtgggcgccacgggatattccgcgaaatcattagcagaggaaatgagcccagcggtcgaaagcaccacggagaacccagaattcaaggacgcattccgtcgactgcaggaggttgtcacaaaacctcaggagttgctcgacaaaatctctagtgcacttgattctctgagtaagcactga

SEQ ID NO: 19885 - DNA, 501 bp, Paraburkholderia sordidicola
atggctcgaaaatgcttcttcagttttcattacaagccggattgtgtacgtgcagcacgagttcgcaatatcggggtagtggaaggaaatgaacccgcgaaagataacgattgggaaaaagtcactggcggcggagacagagctatcgaaaagtggattagcgaccagatggccggcaaaacctgtatggtgctgctagtaggggagaacacagcaaatcggaagtggattaaccacgaaattatcaaggcatggaacgatggcctcggggtcgtagcaatccgcatccacggacttgtgaattttgaaggccatacggcgaaccagggcgcgaaccctcttgattacatctctctcaagaacggcacaaagaaattatccgaggtcgcgaagtgctacaacccgcccggcgtcgacagtagagctcgctacaactggattgcggacaacatggcggcaatggtggagcaggctatcaccattcggaaggactatcgttag

SEQ ID NO: 19886 - DNA, 774 bp, Paraburkholderia sordidicola
atgtttaaaggatttaacctcaagtttgatgatgcttcggactttagtacccgcttgattacccagtatggtgctctctccgagcgttttcgaaccagaaaacttgatgcaagaagccacatttcgagttatctaaaaaatggcgcagttgacgccagaaagcttcagagcgattggtttgcagccgtaaaagccgatgtcttcatatcgcattcacatgccgatgaagcgttggccatggcactcggtgctgctctcgagtacaagtttgatttgcggtgttttatcgactcttgtgtctggggtaactctgacgagttgttaaaagaaatcgacaatgagttttgcctgcgcccctcaaaagaaacgtacgactatgacaagagaaatcggtcgacaagtcacgtccatatgatgttgcagggcgcactcacgaagatgattgaccatactgaatgcgtgatttttctcaacacgccacagtcgatggtgacgggcacagggctgacgcaagagtcgcaaacggcgtccccttggatttatgccgaggtattggcgaccaaagtcatccgcaagcaacagcctaaacgagagattgaaggtcaccgcaaatcagcgatggagagcgaagccgcagtctatgatagcgtccccgccttctaccatgacttagacctccagcaccttacattgctacgctctcacgaggtcgagcggtggttaagaagtggagaacgagggctcaaggcgctggattatctgtacctgatgtag

SEQ ID NO: 19887 - DNA, 1008 bp, Paraburkholderia choica
gtgctgacgcaacctgactatcagggctttaacgagcgaaatgcatatcttgcggccaagctgattactatttttgtcgagcaccccgtgatttttatgggttattcgctgaacgatgggaacatcatttctctattgcgcgcaatctgcgcctgcattggccaagacaagctgcagcagctgaataacaacctgattttcgtgcagcgcgcgcgtgatgctgagccggagtccgtctcccagaccatcatcgccctagaaacggttcaaatccccatcacgcttgtcaaagcaaactcgttcaccggaatctttgaagccattgaatcgacgaagcggaagattccggcacgggtgctccgatactgcaaggagcagctctacgagttggtgaaaacgaccgaaccgcacggcaagttggtcgtggtggacgtagaccaggttaacggccgccgggatattgaattcgtggtcggcgtcggcgtagcggcagaacgtgaggaagaagaacgtcgtaggcttggcgatgtaggttacaggggaattaccccgctcgatttgttccatgaccttgttttcagagacaaggggtacgaggcaccgagggtactggcggaagctatgccgcgcctatcaagagggctaacatacctgcccgtatttttcctgcttcgtgccgtaggcatcacgtctgcggcacaatatgcggcctccggaatcgacgttgataaatacgtcgacttgccgccgaatgctttccagttgaagagtcttaagaaggggttcatgcgcaactaccgcgacatgacggtcacagagatgattcagcgcaacacgcccgagattgtcgcccagtatctgccgttcacgaagtggaccctggacgactacggcacgatacacgcgttccttgtggctcacgctgaccgcttcagcaactcgaactattcgacagcattccgcaagttggcctgtctgtatgaccgcgctgcttacggctgggaataa

SEQ ID NO: 19888 - DNA, 882 bp, Paraburkholderia choica
atgatagaccgtcagccctaccgcatggatacaagatggcctctctgttttttttcgtattcgcatgtcgacgaacggcttcgcgaccagttggaaattcacctcgctcagctaaagcgggacggcctcattgaagcctggcacgaccgacgcattctcgcgggctcgaatctcgacgacagcattaacgagcagcttcaggctgctgatatcgtgctgctgcttgtcagtccggatttcatcaattccgactactgctattcacgcgagatggcgctcgcgctggagcgtcaggcacgcaaggaagcgcacgtgctcgctgtgattcttcgcgcgtgcgactggacgagttcgccgcttggcaagctgctcgcgttcccgaccgacgcgcgcgctgtaacgtcgtggccgaatcaggacgaagcatttacagatgtcgcaaaggcgattcgcaaggttgtcaattcgctggcgtccaagaatgcggttgccgcgacgaccattcgtccggctcctgttgctagcgctgccgcacctgccggggcctccgctgtgccagcgcccgagccgcttcccaggtcgagcaacctgagattaaagaaagaattttctgacttggaccgcgatgtattcatcaaggacagcttcgatttcatggcccgcttcttcgagggcagccttcaggagctggaagcgcgccacctgatttcaaaggtcggtttgagcgaattgactcgcgcaaatttacggccagcatctacaaaggcgggaaggccgtcgcgcaatgcactgtcgccctcggcgcgttcgggcgggcgactggcggaatcacgtactccgaccaagtctcgactcacgcgaacagctacaacgaagcgctaa

SEQ ID NO: 19889 - DNA, 1461 bp, Listeria monocytogenes; identical to SEQ ID NO: 19470

SEQ ID NO: 19890 - DNA, 609 bp, Listeria monocytogenes; identical to SEQ ID NO: 19471

SEQ ID NO: 19891 - DNA, 1461 bp, Listeria monocytogenes; identical to SEQ ID NO: 19470

SEQ ID NO: 19892 - DNA, 609 bp, Listeria monocytogenes; identical to SEQ ID NO: 19471

SEQ ID NO: 19893 - DNA, 1410 bp, Streptococcus pneumoniae; identical to SEQ ID NO: 18614

SEQ ID NO: 19894 - DNA, 621 bp, Streptococcus pneumoniae; identical to SEQ ID NO: 18615

SEQ ID NO: 19895 - DNA, 1167 bp, Streptococcus pneumoniae
atgggcaaagtaatgagacaatataatgaattttatataaaattgcaaaaagagtttaaactggctcataatatgaccatagaagctatgccagcaaaattttccaacaaagattatgttaaaaaatttatttatatgtttcctgataaaatttctagacttataatagaaagaaactattggtatggtaaacgtattattaaaaaaaatttagttaaaattcagagtaaaaggatgtctttagaaactaatgattttattcttgaaacatctaaatatataagaagacgagtaagaaaaaatattttgagtattgaagaaagaaaaactcaggcagatgaaattcgaaaaaaatctttagtaaaattaaagctgcaaactataaaaagaaaaaaatcattagattatatccaagaaataaatccctcttatctggaacattatcgcaaaagattttttaaaacacatgatttacatgaaagatttgaaatcattagagaactttcgaagtatgattcaaaggaagttcataattttttctatgcaataaatggtcatgtaagaaatcaatcgctaaaaaaagaagttcagtcgtactttcaaagtttatctctaccgtttagattgagtagaaaaaagaaaggaaaaacaaattttattgataatgaaatagtaacaaataggaaaggaccagaagagttgaagaagaggttatacattgatgatctagaaaagataaaaaaatttgatatctttctttcacataactctcaagatgaagaaaaaataataaccttttataaaaacctaaacaaaaatggccaagtcgtatatattgactgggttaatgataaatacgatctgaaacgagaatggtgtaatacttcaacagtcgatattatcaaagagcgtataaaacaatcggatgtatttgttttgtacttttcaagtaagacacttaattctcagtggtgtgcttgggaattgggatatgcagatggaattggaaagaaaatatgtatctatttttcagaaaaaatagatagaacaattattcccaaattttattctatttatccagagctacatctttctgaaaacattacaattgaagttgataaacaatcatctattatatttaatgattggaaaaataggagtagttaa

SEQ ID NO: 19896 - DNA, 1407 bp, Streptococcus suis
gtgtttattattaaaggtgaagtatccagaaaagatttgattagagaaattgaaaaagctattaaaagtgatgaattaggagcatttattggagcaggattatcaattcctgccggattttgtagttggaaagaacttctaagagaacctgcagaagaaattggattagatgttgaaaaagaaagtgatttggttaacttggctcagtattattctaattcaaaaaagagaacatcaatagatgatttaatcaagggtcaatttgctcaattagtaaagcctactgaaaatcataaactattgtcgcagctgcccatttcaactttttggacaacaaattatgataagttaatagaaaaagctttagaaaataatatgaaaaagccttatgtaaaaacaaaggatgaacaattaagaggtacaaatcataattttgatgcgatagtatataagctgcatggtgatgtagaaactcccgaagatgcagtaataacaagaagtgattatgaagagtttggatataacaaaagaaaattatttagagaggttttagaaggagatttgcttactaaaacatttctatttttgggatttagttttgaagatccaaattttaactatgtaattggaaggttaagggtcttactcgatgaaaaaaatacaagaaaacattattgtattatgaaaagagttcaggataccgtagagaattcagaatatgaaaaagcaaagcaagaactgcaaattgaagatttgaataggtatggtatttttacttgcttggttaatgactacaatgaaattactgaaatattaagtacacttttagatagatatagacgaaagacaatattcatatcgggaagcgctgataattacggcgatttttcagatgaagaaggtaaaatctttcttcatacgctatcaatgcgattatccgaaaaaggctatcatatcgtcaatgggtacggtagaggtgttggagaatacttgctatcaggtgttgcggaatattgcctgataagcggtaaaaatattttagattatcttaccgttatgccgtttccgcaaagcaatatctcgcatattgacattggaaagctttataaagagaataggaaacagatgattgaaaaatgcggaattgccatcttcgtttttggaaacaagaatggcaagattgcaaatggagtattggatgagttttctatttctaaagaaaaaggcttggtgtgtttgccaataggatatactgagggtgctgccaaagaaatctttgaaagcttatattcagatgataattcagaagcaatgattactgctaatgaaaaggttgaaggagatatatctttaactgtggaaaatatcataaaagctgttaatttaatgaacaaggaggacaattaa

SEQ ID NO: 19897 - DNA, 471 bp, Streptococcus suis
atggcaagaagagtattttttagttttcactatgataacgatgtttggagggcaaataccgttagaaatagctgggtaactcagggaaaggaagcggcaggatttatagataaagctgagtttgaaaaagttagacgaacaggcgatagggcagttaagaactggatagatgaacaacttataggtacaagtgttacggttgtgcttatcggtagcgaaactttggatagaccttttgttcagtatgaaatagaggcaagccgaagaagaggcaatgctattattggagttacaataggtggtattaaggatcaatatcaaagcacgagccattcccaaagtaaatacacgcagataaacggggtttggtttgacgagattattgatggattttatgattatgtatcagaagatggttattcaaatatggggacatggattgaatcggctgcaagaaaaaaagggaaataa

SEQ ID NO: 19898 - DNA, 1410 bp, Streptococcus suis
atgagacaagaagtatttataaaaaaattttcaaagactatacaagaaggaaatgcagcagtgtttgctggtgcaggaacatcagttgatgcaggatttgttaattggaaaaagcttgtagcaccatttgcaactgaaattggtttagatattgaaaaagagactgatttaatcggattaactcaatattatataaactataaatctggaaatagaggtcctgttaaccaagaaattattagccagttttctagtccaggtgcggaaactgaggttatgaatctattaacacgacttcctattactacatattggacaaccaattatgataaggtaattgaaaatggattaattaagaataatcgtagaggagatataaagagaaaaatagatgatttagcagttagccgaccggatagtgacgcagttgtttataaaatgcatggtgacgtagattcaccggatgaagcagttatctcaaaagatgattatgaaaggtatagtgataaaaattcgttattcgtaacagcattacggggtgatttagtatctaaaacatttttatttgtgggatttagtttcgaagatccgaacttagagtctattttagggaaggtaaaaattttactaggagagcgtacaagagaacattattgtattcaaaagcaggtattagaacaagattatgatgatcaagatgactacctatatgataaaatcaaacaagatttaaaaattagagatttaatgcgctatggaatagatacagttctagttgatgattattctgagataccaaagctaatatccaaaattgaggaagagtatttcaaaaatacaatttttatttcaggtagtatctctgattacaatgaaaattggagtgaagaaaaagtgaagcaattctgctacaatttatcacgttcccttgtttcaaaaaattataaaattatttcaggatttggacttggggtaggtagtagtgttattaatggagctcttgatgaaatctataataccaaatatagacatgtcagtgagcatcttggattatttccttttcctcaacatgatgatggagaaaagtccttagttgaacgttggactgagaatcgtgaacaaatgattagtgaggcgggggtctgtatatttatatttggtaataaattagataatggtgaggtagtaattgcaaatggaatgctggaggaattccagattgccaaagaaagaggaaaaataataattccaattggttctacggggtttgcagcaaaagaaatttttgatgcaatgaaagagtcaggggactattcatatctaaatgattattgggagattttagagaccgaagaagatgttataaaagttgttaatacaataaatgaaattattgaaggagttagataa

SEQ ID NO: 19899 - DNA, 621 bp, Streptococcus suis
atggcaacaaaagtatttatttcatttcgttttagtgatggaaaagagattaaagatgaactagttgatttatttgatgaatctactgaggtaattaatagatcagaagatgttgatagaagtcaaatgagtgaggacactattcaggaatatctatatgagaagttaaaagatacatcggttacaattgtattattaactccagaggccgtttcttataaaaagaattggattggaaattatgatgattggctttatgatgaacttagatactccttggaagatagaaataacaacagaacaaatggcgtagtagcagtatatacagatgatgctaaggatatgatactagaaagtagttcacactattgtgcacattgtcaagaaactaaatcatgtagaactttgaaatcttttgacaatttagcacgaaagaatatgttgaatataaagcaaagctataagaaaaatccatgtaatgatctttatgatgatagtcatgactcttatatttctttagtaagtttggaggagtttaaacagaattatactaaatatattgataatgcaaaagataaaagagataggctagatgaatttagtatatataaaagaatgtga

SEQ ID NO: 19900 - DNA, 1149 bp, Streptococcus suis
atgaggcagtataataatttttatataaaatttcaaagacagtttaagaaagctcatggacaagttatagaaacaatgccattagaattttctaataaagaatatatagaacgctttaaatatatgtttccagataaaatattgctgatagagagggaaagaaattattggtatggaaaacgtattattagaaagaatctttccaaaattcgatgtaaaggtatgtctttagaaactgatagttttatactttcaacttcaaaacatattaggaagataaaaagagagagtctagctagtaacgaagagatggtaaaaaaagtgaatactgcccgaacaatttctttagaaaaattaaaagcagagtccttgagaagaaagagaaaattaaattatattcaggaagttgaacctccatatttaagaaattatcgaaatagattctttaaaactcatgatttacatgaacgattggaaattataagagaactttctaagtatgattcaaaagaagttcggaagtttttctatgcaataaatggacatattagaaatcaatcattaaaaatagaagttcaattatattttcagagtttatctttaccttttaggttgagcagaaaaaagaaaggtaagaagaattttattgataacgaaattataaaaaataaaaaaggaccggatgaattgaaaaagagattatatattaatgatttagaaaagataaaaaagttcgacgtgtttttatcgcataattccagagatgaggaaaaaattatagagttctataaaaagttcaataaaaaaggacaggtggtttatatagattggataaatgataaatatgatttaaggcgtgaatggtgcaatgcctccacagttgatattatcaaggagcgtataaaacaatcagatgtttttgtattatacttttcaggagaaactttgaattcccaatggtgtacttgggaattgggatatgctgacgcattagggaagaagatatgtgtatacttctcagaagaaataaatagaaaaggtattccaaaattctatgtagcttatcctgaattgcaaatgtcaaaaaatatatatgtcaaaattaaagggaatgaagatattttacttgaagagtggaaaaaattatag

SEQ ID NO: 19901 - DNA, 1410 bp, Streptococcus suis; identical to SEQ ID NO: 19898

SEQ ID NO: 19902 - DNA, 621 bp, Streptococcus suis; identical to SEQ ID NO: 19899

SEQ ID NO: 19903 - DNA, 1149 bp, Streptococcus suis; identical to SEQ ID NO: 19900

SEQ ID NO: 19904 - DNA, 378 bp, Streptococcus pneumoniae
gtggctaaacaccttggtttgtttccttttccacaaaatgccaatggagagaaatcgttaaaagaacgttggaccgagaaccgtgaacaaatgattagtgagtcaggggtgtgtatatttttatttggtaacaagctagttgatggtaaggtagaacttgcttcaggcatgatggaggaatttcaaatagctaaagaaaaaggaaagataatcattccgattgcctttactggatttgctgcaaaagaaatttttgatgatatgaaacaatcaggagaatatagttatttagataattactgggaaactttggagactgaaaaggatttcactaaagttttttctatgattgataaaattgtcaatgaggtacgataa

SEQ ID NO: 19905 - DNA, 555 bp, Streptococcus pneumoniae
atggcaaccaaaatatttatttcgtttcgttttagtgatggaaaagagattaaagatgaactagttgatttatttgatgaatctactgaggtaattgatagatcagaagatgttgatagaagtcaaatgagtgagaacattattcaggaatatctatatgagaagttaaaagatatatcggttacaattgtattattaattccagaggctgtttcttatagaaagaattggactggaaattatgatgattggctttatgatgaactaaggtattctttagaggatagaaaaaataacagaacaaatggtgtgatagctgtttatactgatgaagctaaagataaggtactagatgatagtactcattattgtcaacattgtcagcagactaagtcgtgtaggtctttgaaatattttgataatttagctagaaagaacatgctaaatattaagtcggcttataagaaaaatccatgtaatgatttttatgatgatgagcacgattcttatatttctttagtaagcttgagcgatttcaaagaagattatagctaa

SEQ ID NO: 19906 - DNA, 378 bp, Streptococcus pneumoniae; identical to SEQ ID NO: 19904

SEQ ID NO: 19907 - DNA, 555 bp, Streptococcus pneumoniae; identical to SEQ ID NO: 19905

SEQ ID NO: 19908 - DNA, 378 bp, Streptococcus pneumoniae; identical to SEQ ID NO: 19904

SEQ ID NO: 19909 - DNA, 555 bp, Streptococcus pneumoniae; identical to SEQ ID NO: 19905

SEQ ID NO: 19910 - DNA, 378 bp, Streptococcus pneumoniae; identical to SEQ ID NO: 19904

SEQ ID NO: 19911 - DNA, 555 bp, Streptococcus pneumoniae; identical to SEQ ID NO: 19905

SEQ ID NO: 19912 - DNA, 1422 bp, Streptococcus equi subsp. equi 4047; identical to SEQ ID NO: 19008

SEQ ID NO: 19913 - DNA, 498 bp, Streptococcus equi subsp. equi 4047; identical to SEQ ID NO: 19009

SEQ ID NO: 19914 - DNA, 1038 bp, Eubacterium rectale M104/1
atgaccattgaaagtttagcaactaacttgtcaggaaatgatgcagttgtatataaaatgcatggtgattatttagacccttcatcatgtgtgatattaaaagatgactatgaaatctataatgataaaagacaattattcacaacaacattgcaaggagatttggtgtcaaaaacttttttatttataggttttagctttgaagatccaaatttaaaatatatactaagcagaataagaatcttattggataaaaatcgcagaacccattatttatttttaaaaaaaatacaaaaaaacgattataagaaaagatccaaaaactattattatgatttaaataaacaggaattacaaatacatgatttaaaacgttatggtattgaaacagttcttattgatagttatgatcaaattcctgctattttaaaggaaataaaaacagcatcaaaatgtaaaaatatatttatatctggagctgctcatgaatatggaaaagattgggaaacaacagcaccactatttattaaaaagttagttagtagtttatgtcaaaaagattacagaataatcacaggtcatgcaagaggtattggaagttacgtgattagttctgtaattgaggaatgccaatcaaatattggaaaacttgaaaaacatttgatgattaaggcttttccttatgaagataaaaatagacctgattatatacaattaaaaagggagtatcgagagggaatttataaatacgcaggcatagcaatttttatgtttggaaataaagagtcagatgctggaactattttggcagatggtgtatatgaagaatataaaattgcattagaatctggagcttacataattcctataggatctactggttatatggcaaagaaaatatgggatgaagtaagtttacatatttacgattttccatatttaaaagaggcggaggatattttacaaaattgtacgaatcctaataaagtaatcgacgcagttttatctgtagttaatataattcaaactaaatattaa

SEQ ID NO: 19915 - DNA, 783 bp, Eubacterium rectale M104/1
atgaataatacaaaagaaaattttgacttttttatttctcatagtaaagaaaccaagcaattaatagtcattcctctagctcaatgcttgaaaagtattggcattgatgtatggatagatcgtaaagaaatattagtgggtaaccatatttattctgaaatccaagatgctatcacacgttccaaattttgtattgcagtaattgaccaaagtttcttaaaacgcacttggccaatgaaggaactagaactctttaataaaaaaaataatatgagaatcattcctatctttgtagatttagaaaaagcaattgtgtataacgaaattccgtggttagatggaatcgcatttgaaaaaatgcatactgagccttttgacttaaatgttcatatgagtatcttttgtagaattataagtcgcctttttaaagataacaatactaataagaattcaattgaaaaaacttttgaaagtattacaaaatacgattttccttgtaaagaaactttatcatcactaatatatttttctaaatataattcttccaatttacgattagcaactattgatttatgtaatattggtggaataatatatgctatatcaaaaacatactctattcctaataatgttattactcagatgtttctatttagcaatattcttagagattattgctttaatgtgaatttcataccagattataatatttatataggtatgtataatgctatagttgcatcattaacacaactagatctgcttatacaaactattgtataa

SEQ ID NO: 19916 - DNA, 1452 bp, Staphylococcus argenteus
atgactatagataagaaaaaattcattgaaaaatatgtaaaagctttagaaagtaatacagcggctatatttgctggagcaggattatcttgtggagcaggttatgttaattggaagacattgcttaatgaagcagcagaagaattagaattaaatatagataaagaagaacatgatcttgtaggattagcacaacattatattaataagaaaagaagtcgtggaaatctaaatacagtaataatggagcaattttcaagaagagcagaattaacaaaaaatcatatgcttttagcaaaacttcccattgatacatattggacaactaattatgattgtatgattgaaaaagctcttgattctgagggcagaattgtagatgtgaaaagaaatcaaaatcaattaactgtttcagtagccgataaggatgctacagtttataaaatgcatggggatatagacagtatagacaagattattttaactagagatgattatgaaaaatataatctaactcatccaaagtttcgtgaaatattggaaggagatttactttcaaaaacttttctattcataggttttagctttacagatccaaatattagttatatcttatcgagaataagattagtgttagaagacaatactagaccacattattgtattttaaaagaagtagaagaaaaggaatatgataatacagaagaatttatgtatgcaaagataaaacaacaacttcatatagaagatttaagccgattttcaatagaaactttattagttaaaaattatagtgaaatcacagaaatattagaaagtatttataaaagatatagaagaaaaacaatttttatctctggaagtgctacagaatatttaccttttaattcagaaacagggaaatattttttacatcaactaagtaaaaaattagttgaaaatgattttaaattagttacaggttttggattaggagtaggatcatatgttattaatggagtagctgattatattaatagtaataagaagtctaaactacagaatcatttaagtatattgccattttctcaagattcaagtggggatttagacttaaaagaagtatggaaaaaaaatcgcttggaaatgatttctgagtgtggaatggcattatttttatttggaaataaagaaaaggatggaaaaattgttttagctgatggattagaagaagaatataaaatagcaaaaagacaagaattggttagactccctataaatgtgacaggttataaaacaaagaatctttcagaacaatataacgaagagataaataaacaatttaaagagaaaatattaaaaatgtataacgaaataaatgaatacaaatgtgatttttcaaataaacaaagtattgatgaatttgttcaaaaaatagtaaatttagtaattgaaataaaaaaaacaaaataa

SEQ ID NO: 19917 - DNA, 609 bp, Staphylococcus argenteus
ttggcgcgtaaaacatttatttcatataaatactctgaagcaaaagatttaagagataaaatagtggaatctctaggagaagatgctaaatattatcaaggagagacaagtgattctcctgatatgtccgatagaataacagagtatattaaagaagaattaaaaaataagatatattcaacttcagtaacaattgtagttatttcacctaatatgaaagaaagtaattggattgattgggaaatagaatactcagttaaacaaatgaaaagaggagatagaacatctagtactaatggtgttgtaggggttgttatgaagcataatggtgattattcatggttaagaaattctgttactaattcagatggtcataccgctattcatactgacaatagttatttatatgacataatagtgaagaatagatttaatcaagaacctatagaatatacgtgtgatgaatgtaaaaatatagatgcattaacaggatcttttatttctttagtagaagaagatgaatttttgggtaatccaactaaatatatagaaaatgcatatgaaaaaagtaaaaaagcaacgaattataatatctgtagaagaaaataa

SEQ ID NO: 19918 - DNA, 1089 bp, Staphylococcus argenteus
tttgggaaagtaaagagaaaacatgatcacgaagaagtttattttaataaaagcttgaagtaccctatacgacaagtagcagaaattttgccagagaaatatacgaggtatattttactaaaagaatttcagcgattatttccataccagtggaatataattgtggaaagacagcaaacttacaaagaaaaagcgcaacacctatataaagttaaaaaaatcaaaaatagatataatacgaaaagtgcagaagaatattttttctcgattcctcaagtaaaatacattctttcagcaggaagaatgaaaaaacataaagagaattatattgcttcagagataaaaataaaaaaagcagctttagaaaagagtaggaagaataagaattggaaaattgaagaacgtttaataaaagctaagagatatactcaaaaagttgatccagaatacttaaatatttatatgaaagcttatcataagaaagatataactacagaagaaaaactagaaattctaacggaattaaaaaaatttgatacagaaaatatagtgcgtttttttagaaaattaaatgatgctgaacaaaataaaatgattagaaatttagcctttaaatatttacaagattacggtcactatgtgaaactaagggaaaattttaaaggaaagaagaaagtatatcaaactgagagagcttctttagacactaaaaaacctgaagatttatataatgatttaacaaataagaatattcaatctcaaaaagtctatgatatttttatttctcatagtacgaaagataagaagacagttgaagatattataagagtttttaatgaacaaaataaaacgtgttattgtgattggactatggatcaagattatttaaaaaggaagtatgttggtgaatatacaaaacaagtattgaaggctcgtatggagcaaagtaaaatgctagttttgttgagaacggagaattcagttcaatctgattgggttagttttgaaatagaatactttgaaaatctaaaaaaacctatatatatagtagagtctcttgaagaattattagaggctttttcagattag

SEQ ID NO: 19919 - DNA, 1419 bp, Ruminococcus sp. CAG:9
atgaatagtgaaataaatgcttttataaataagtatgttaaagaaataagaaataacaatgcggccttttttgctggagcaggcttttcaaaagaatctggttacgttgattggaaaacattgttagaatctattgcttcagaattagggcttgaggttgaaaaagagcatgatttagttgcattggcacaatattgctataataaacatcaaaatcgagggataattaatgatgttatttttgaagaattttcaaagcaaaaagaaccaactcaaaatcatagaattcttgcaagattgccaattggtgtgatttggacaacgaattatgacgatttgattgaaaaggcatttgataatgtgcaaaaaatagtggatgtaaaaagtagaaatgaacatttgtcaaatacattagcgaatagagaatgcattttatataaaatgcatggtgataaaaataaccctaatgatgcaatattgattaaagatgattatgaaagatattataaagcacataaacaatttttgtctgctttaacaggtgatttaatatctaaaacttttttatttgtagggtttagttttcaagatcccaacttggattatattttgagtcgtataagagttgattatgaggaaaatccaagacaacattatgctattatgaaatcaattgatagaaaagattatgaatcagatgcagattatgattatgcaaaaagaagaaatgacctttttctagaagatttaaagagatatagaataagtgctcttgtgatagatgatttttcagaaattacagaaatacttcaggaaatagagagaagattaaatcaaaacaatatttttatctctgggagtgcagaagagtatggtgtatttacgaaggaagaagccgaaaatttgattaaattattaagtgcgagattaattcaagatgaatttaatataatatctggatttggggttggcgtaggaagcgctgttattacaggtgcacttgaagaaatatatatgcataataccagaataaataatcaaaggttattgttaagaccatttccacaaggtaaagaggcaagagtgttatggcaacagtatagagaagatatgatttcacgcgcaggaatttctctttatatattcggcaataaaaaacaagatgataatatagtagaggcaaatggcgtaaaaacggaatttgatatagcaattgatgctaaacatattgtaattccagttggatgtacaggttatatggctcaaaaattgtgggagcagatcaatttgaatattgaagaatattatggtaaagtaaatgatgaggtaagaaagacatttcagagtcttaatacaaaaatgtcaaatgatgaaattgtgtcaaatatagttaaattaataaagcttctaaggaggtag

SEQ ID NO: 19920 - DNA, 501 bp, Ruminococcus sp. CAG:9
atggcaaagagacaggtgttttttagttttgagtacaataaggatgcttggagagcaagtcaggttagaaatatgggaaaagtagataattcctccactttttctgataatgactgggaagaagtaaaagaaaagacagatgcaaagattagagagtggattgataatcagatggcaaagcgttcttgtttggtggtgttaattggggcaactacatcaggaagaaagtggataaattatgaaattgaaaaggcatatgagctaaacaaggggattgtaggtatatatatacatggattgaaggataagaatggaaatcaaacaacaaaggggagcaatccgttttataatattttgataggaaaaaataaagaacgtttatcaaaatatgttgaatgttatgaatcatttcatttaacaagtacatatgtgtacgatgacattaaaaataatatagaacaactaatagaagatgctattagtaatgctggaacatattaa

SEQ ID NO: 19921 - DNA, 591 bp, Ruminococcus sp. CAG:9
atggctaaagatatatttgataaaacgatatttgatggatatagagtggaaagtttaactgaatcagcacaagatattattcccaaatataatttcgatggctctacaaaaactactgtatttatttcgcacaagcatgatgatttagatgaaacaaaaggattgataggacttctagaaagaaagtacaatattaaggcatacattgacagtttggataaatcaatgccgaaaaaaacatctggtgaaacggcaagtaaaataaaacaaaggataaatagatgtaataaatttatcttattagcaactaatggggcagtagagtctaaatggtgtaattgggaacttgggtatggcgatgctcaaaaatttgatacagataatattgcactttttccaattaagccagataagactaacgattacgattataaaggtaatgaatacatgcggatttatccacatattgcatattactatgggagtgaaagatattcgaatgggactgtaataaaagaaggcttttatgtatgtacggatacagaaaatggtcgaacaatagttccacttgaaaaatggcttaagaaatga

SEQ ID NO: 19922 - DNA, 1419 bp, Clostridium hylemonae DSM 15053
atggcgacaaaaaaacaatttcttcgagattatataaaggcaattagagatggaaatgcagccgtgtttgcaggagcagggttatcacgatcttcgggatttgttgtgtggaaagaactccttcgtcctttagcagaagatataggattgaatattgatgatgagtatgatctcacggctgttgctcagtatgtgagaaataaatcgggaaatcgtgcggctattaattcaactatacttgatgcttatggaaaagatgttgcaaggaatgaaaatgtttctattcttacaaggttaccgatttatacgtattggacaactaattatgaccatcttattgaggaaggacttcatgatgctaatcgtaattcagatgttaagatagattataaacaattgtctaatacaaaaagagatcgagatgctgtagtatataaaatgcatggtgatgtagatcatgccgctgatgcagttttgactaaagacgattatgctcagtatgaaaggaattatccatttttcagaagcgtattgcagggtgatttgatatcgaaaacattcgtttttataggtttcagttttgaagatccaaatctagatagtatacttggacaaatcaggttattgctagatgaaaatattaggaatcattattgttttgtgaaaagagtaaatcgaacagatacaatggatgatgaaagttttggctatcaaaaagcaagacaggatttaagagaggaagacttgaaacgatatggtattcaaacagtttttattgacgattattcggagattacagaaatattaagagaattagaaagtgcagttttggcaaataacatttttatttctggtagtgcagattttttcgagggtgtttgggaaaaaacaaaggttgaagaattagcatataaattggcaaatcaacttgtgaaagaagagtttaggataacatctggttttggactaggcataggttcagcggttataaatggtgcgttagacgaaatttatagtagtagatataagcatatatctgaacatttgtgcttgcgcccatttccacaaggaatagtagatgcagaagaatgtaaatcaaaatggaagaagtatagagaaaatattataaaagagaatggtgtagtcatatttatgctaggtaataagaaggctgacggtaaaaagtcaatagcagatggatgtttgcaagaatatgaaattgctaagaaaaataaatgtgtgattataccaatcgggagtacgggagatgcggctgaaatcatttatcatgaaatgaaggaaaacaaggcagatttcccatatcttgaaaaatatctggatattcttggaacagaaacggatatagataagattttaggtgctgtgacagagattttaaaagctaagaggatagtataa

SEQ ID NO: 19923 - DNA, 612 bp, Clostridium hylemonae DSM 15053
atggcgcataaaacatttatttcttataaatatgacgaagctcaaagattgagagatgatattattgaagcacttgacgatgatgcaacatactataaaggcgaaacaagtgattctcctgatttgacagatacctcaacagaaaatataaaaaagaatttaagagatatgatgtatgatacatcagttacaatagtgattatttcgcctaatatgaaaaatagtaagtggattgattgggaaatagaatattgtttgaaagataatacaagaaaaggtagaacatctcataccaatggagttgttggtgtaattatgaaatataatagtggttatagttggtttaaaagtacacatataaatgatgatggttgttcttccaccacatatgaggaatctaaagtctatgatattattaacaataatcgatttaatcaaaatccgaaaaaatatagttgtgatgtatgtaaaacagtaaatgcattgacgggctcctatattgcatatgttgatgaagaaactttcttaagtaatcctaccaagtatataaacaatgcgtatgacaaaagtgaaaatgatgcggaaggttatgatttgactaaaaaaagataa

SEQ ID NO: 19924 - DNA, 1275 bp, Shuttleworthia satelles DSM 14600
ttgggattttatgatgtttttaagtttaaaaataaaagaagtgctattaatgaactcttatcagaatcatttccttctaataaaaaaccaacggaaaatcatagaatactatcacagcttccaatttccacatattggacaacaaattttgatacgttaattgaggatgcgttgaaaaagaataataaaaatgtttctgtaagaaaggatgataaggatttacagctttcatacaaaaattatgatgcagttgtatataaaatgcatggagatattcaatgtccatctgaagcagtaataactagagatgattatgaagaatatggagttaatagtagaaaattatttagagatgttttagaaggaacattattaacaaaaacttttttgtttttaggatttagctttagtgatcctaattttaattttgtactcagcaaaatgagagttttattgggggatgataatagaccgcattattatatattaaaaaaaattactgaacctaatagagacaattttgaagacgaagaatacaaaaaagcactagaagaatacaaatatgatttaattaaacaagaactgcagattgcagatttagacagatatggaataaaaatatgcttgattgatagctatgaagaaatcacggagatattagaaattatattaaatagatataaaagaaaaactgtgttcctttcaggaagtgcagaaacttatgctccgttagatatacaagtagctaaggattttatcaggaaactatcttttgaacttgttaagaacggatataaagttgttaatggatatggattaggtgtagggacttatgtaataaatggaatcactgaatattgctatgaccacaggaatattaaaattgaagatagtttaaaactaatgccattcccattaagtgcaataaatagtgagcaacttcggacaacttgggaaaaatatagagaagaaatgatttcccaatgtggtatagcaatatatatgtttggtaataaacaaaaggatggagaaattattaaagctgatggtgtaaaaagagaatttaatattgctgaatcatatcaattagtgaatataccattagcatttactgggtctatggctcaggaattatattctgaaaatggtgatatggttgaaaatgttttaaataatgatgaaattgagtatattgctaattttcatgatatagacactaatgttgataaaataattaaaatgataaatagacttaacaataaggaggaatgttaa

SEQ ID NO: 19925 - DNA, 492 bp, Shuttleworthia satelles DSM 14600
atggcaagaagagtattttttagctttcattatgatgaggatattaatagatcaatgacagtgagaaatagttgggttactcaaggcaaagaagctgcaggttttattgataaggcggaatttgaaaaggttaaaaggaatggtgaaaatgctgtttacaaatggatagataagcaactagaaggaacttcagttactgtagtcctaattggcaaagaaacattaaaacgtccatttgtccaatatgaaatacgaaaaagcattgaaagaggaaatgcaataattgggatttatatacataacattagagatatgagaactcaaagaacatcagtaaagggcaattcacatactgttattggatactataatgatgatacacctgcgtattttgactctatttgtgatggtttgtatgactattcgcaagacaatggatattataatttgggaagctggatcgaaaaagcagcacgaaaaaaaggaaaataa

SEQ ID NO: 19926 - DNA, 570 bp, Shuttleworthia satelles DSM 14600
atgaaagagatttttgagcaaggagaatttagtgaatataggattaataacttacaaaaatctaggggtgttattaacgagtcttttgctttttttgaggaaaaagttcctgtctttatatcacataaacatgatgatttagatgatttaaagggtattataggatttcttgaaaaaaattttaatgttattgcatatattgatagtagagatttatctatgcctaaaataacatctggagagactgctgaaaaaattaaagatagaataaaaaaatgcaaaaggtttattttattagccactgatggagcagtcgaatcaaaatggtgtaattgggagttgggatttgctgatgcgattaaaggaaaaaaagctgtactttttcctatgaaagagaaggggagtaactataaaggaaatgagtatatggaaatatattcatatataacatatttcgatgggcgagaggaatatgattcagggaaaaaagtggaggcaggatattatgttatgacaaaatctaaagataaaaaatctataattccactttcaagttggctaaaagagtaa

SEQ ID NO: 19927 - DNA, 1131 bp, Shuttleworthia satelles DSM 14600
atgggaaaaacagcaaggcaatttaataaaatttatattgattataaaaagaaatttaaaaagccaattcaacaagttttgatgttaatgccatatactttttcagacgatgatattgttaatacatttaaagagttatatccacatatgtgggatgatttgaataaacagtataatttttggcataacaaaaatatggttctgattaagtatgggaaaaagagcagatataattttagaaaaccatataattttattttagattgtgcttttcatagtgtgaataaacttagaaaagataagaacagaattattttgggaaaagatgaggtgggaaatttaaagaatgaaataaagcagctatcaaaatccaaatttgataaaagaaaacaaaaagtcgacggcacattaagatttattcaagaaatagaaccatcatatacatcattttttatagatagatattttaatacttacgacttgcatcaaaaattagagataatgagagagctttcaaaatataaatcatcaaatattacggagtttttttacaaggttaattcatgtacgagaaatttttctttaaaaatagaagcccaaaactatattcaatctattggattaccatttatgttaagacgtaagaaaaaaggtaagaaaaattatattgataacgaaattgtaaaaaacaattcaggtcctgaagttttaaaacagagactgtacgtagatgatttagaaaaggtgaaaagatttgatgtttttatatctcataactctagtgatatgaatcaaatagttgaattatataaaaacctaaatacaaaaggatatgtggcttatatagattgggttaatgataaatatgatttgaaacgagaatggtgtaatgcttcaacatcagaaattattaagctaagaatacagcaaagtaagatttttataatctttttaacagaatcaacatttaaatcgcagtggtgtccatgggaacttggatatgcagatgctttgaataaaaaaatttatgtttatatttcacctaattttaaaaatgtagatattcctattttctatagaagttacactgaaataaaaagtgttgatgaaattataatagaaaataattaa

SEQ ID NO: 19928 - DNA, 1428 bp, Anaerococcus tetradius ATCC 35098
atgaagataggaataagtaaaatggagctacttgatgagttagaaaaagctataagtatcaatgagttttctgtgtttattggtgcaggcttatccaaaggtgctggatattttgattggaaaggcctgttaagagctcctgcaatgaaactcgatttagatgttgacgaggagcatgaccttgttagtcttgcgcaatattattgtaacaaagaaggtaggcctgagataaacaaacttattagagatacttttccgactagtcttccgttaaatgagaattatagactattgtcatatttaccaatagacacttattggacaacaaactacgatatattaattgagaaatcattgagacaaaattcaagagaacctctggttattacagaagacaaaaacatgcatcttcaaagcaaaaaatacgatgctgttgtatataaaatgcacggcgatgttgaaaatccaaatgatgctgttttaaccagagatgattatgagagatatgggataactgaaagggccctttttaaagatgtgcttgaaggacatcttattacaaatacttttttgtttttaggctttagcttcactgaccccaattttaattttatccttggaaaattaaatgcattaactgataggaatactagaaaacattattgtgtaataaaaaaagttttagcagaagattttacaaaggaagttgatggtaaaaaggtatttgatgaagaaaagtataaatataatcaggtaaagcaaaagctatttattgaagatttaaaatctagatataaaatagagacatacttaattgaatcatatgatgaaatcactgaggttttaagtgatttatatagtagatataaaaagaaaactgtttttatttctggtagtgctgatgattatgaccctttagatgaacaagatgcccaaagactaattagtcggctttcttatcgaatggctgaggaaggatatcatattgtaagtggatatgggaaaggtattgggtcttatattattgatggagttacagaatattgctattcaaaacataataaaaaaataagtgattatttgacgttaatgccttttcctcttaattcagtttcgaataaagatttaaaagatacttggagtcagtatcgagatgaaatgattcaatctgcaggtattgctttatttatgtttggaaacaaattaaaagacggaaatctggaaactgcagatggaatgattgaagagtttgagatatctaaaaaatataagttagacattatttctctagagtatacaggtaacacatcgaagcaaattagcgaattaaatagagagaagtcaaacaactttaagacatttaaggatgttaattcatctgttgaagaaattattgaaaaattagctgttatgagtaggaggaggtaa

SEQ ID NO: 19929 - DNA, 618 bp, Anaerococcus tetradius ATCC 35098
atggctagaaatgtatttgtttcctttagatttagtgatggagaaaaatataaaaatgagttatgtgaaaaatttaaaagcgaagatgtaatagattattccgaaaatgaggatagatcctcaatgtcagatgaatctattcaaaaatatttatataataagctaaaaagaacgagtataactattataattttgactcctgacgcagtgaaccataaaaagaatttcttttgtcagtatgatgattggatgtacgatgaaattagatattcactagaagatagaagtgaaaacagaacgaatgggttgattgctctatacacatctgaagcggagagtttactttacacgaactcaacacacacctgtgacaaatgtaaagtagaaaaatgtgttaagagcataaatgattttgataatcttgtaagaaaaaatatgatgaatgtgaagagctattataaagaaaatgcatgtgagggactttatgatagcttaaaagatagctactgttcgctagtttctttcgactcattcctaaataacatggatttttatttagacaaaacaatagaaaaacgagaacgaaaagatgaattcaatctttgtaagagaatgtag

SEQ ID NO: 19930 - DNA, 1437 bp, Enterococcus faecium 1,231,502; identical to SEQ ID NO: 18577

SEQ ID NO: 19931 - DNA, 486 bp, Enterococcus faecium 1,231,502; identical to SEQ ID NO: 18578

SEQ ID NO: 19932 - DNA, 852 bp, Enterococcus faecium 1,231,502; identical to SEQ ID NO: 18579

SEQ ID NO: 19933 - DNA, 1458 bp, Paenibacillus sp. oral taxon 786 str. D14
atgtcaactgacaaagaagttctaatacgggaattcctgaaagctcttcatgaagaaaatgcagctattttcgcaggagcgggtttatccgctgcttcaggatatgttaattggaaaggacttttaaaggaggtagcagaggagcttcaccttgatatagaaaaagagactgacttaatatctttagcacagtatttctataataaaaatggcaggcaaagattatcgcagttggttattgataatttttcagcgcaggctcaaataaatgagaaccaccgaatcctagctaagttacctatagatacttactggacaacaaattatgatagattaattgaaatgtcattgattgaggcaggaaagaacccagacgttaaaataaagcaaaccgattttgccctattaaagcccagaagagatgcgattgtatacaaaatgcatggagatattgaaagagctgatgaaactgttttgataaaagatgaatacgaaacattttatgaaaagaatcagctttttgcaatggggcttaaaggtgatttaatttcaaaaacctttttattcattggttatagctttgaagaccctgatttagagtatatattaagtcgcatccgagtattaatgggccaagacggaagaacccactattgtttttttagaaaggtcagtcgcaatgattactgccatcttccccaagaagaaggcgatgaaatgttcaggtacaattcagttaaacaggaactaaagtgcgcagatttagaaaggtatcacatcaaaccagtgttagttgatgaatatgaagatattaccgaaattttaaataccatttaccaacgttacattagatcaaacatacttatatctgggagtgcagcagagtacgcccagttcgatagtgatgagaaagttgcccagatgtttattcatcaactaagtcatgagatagtgaaagctgatttcaaaatagcatctggatttggtttaggagttggaagtgctgttattaacggatcattagattttatttactccacgaacaaacgaaaaatcagtgattatttaattttaaggccgttcccccagtttgcaacaaacggaatggacttgaaggatttatgggacaaatataggagagatttaatctcggatgtgggctgtgctgtgtttatatttgggaataaagatgaaaatggtcaagtagtagatgcagatggtgtaagaaaagaattcgatattgctgtttcaaaaggggttaaggttatacctataggtgctacaggttatgtatccaaggcattatgggaagaagtaatcgcagatttcgataaatactattttgatttcccggcacttaaaccagactttgaattcattggggatgcaaagaatgatcatcaggaaatcattagaagagtaataaaaataattagagtccttagggatggcaggtaa

SEQ ID NO: 19934 - DNA, 684 bp, Paenibacillus sp. oral taxon 786 str. D14
gtgaataaaatggggagaaagatttttatttcctataagtattccgatagcaatgtatatcctttaaataatgactattctacaactgtaagacattatgtagatgagcttcaagacaaactaaaggaagacgatcacattaataaaggtgaagctgacggtgaagaccttagtgaattcaaggatgaaacgatttggactaaattaaaggataagatctttgatagtagcatcaccattgtgtttatttcaaagaatatgaaatcggcatttgtcagcgaagaagaccagtggatcccatgggagatctcgtattcgttgaaagaacttacgagaaacggaaggactagtagcgccaatgcaatgctggcagttgttttgccagataaaaataatagctacgaatatttcatccaggacaactcgtgtccctattgtaattgtaggacactaaagacctatactttatttacaatattgagagaaaatatgtttaacataaaatctcctacttataacgactgtagtaaccatagtgaattaaacaaggtatacaccggagaagcctcatatatacgatcggttaagtgggtcgattttattaataatatcgattattatcttcagatagcatacgacattaataaaaatatagattcatataacattcgaaaaagtgtgtaa

SEQ ID NO: 19935 - DNA, 1416 bp, Acinetobacter junii SH205
atggtaactaaagcaagtttaattagaaacttagttaaagaattacaagcagacaatctagccatttttgctggtgctggattatctaagccagctggatttgttgattggaagaatttattacgagaggttgctgaagagttagatttagatattgaaaaagaatcagatttagtaacgcttgcgcaatatcatgtaaactcaaaaagaaataatcgagctaaaataaatcaggttattattgatgaattttcaaaagatataagtattactgagaatcatagaattcttgccagattgccaatttctacatattggacaacaaattatgataatttaattgaaaaatctttaagtgaaataagaaaagttgtagatattaaacatgagcctattcaattgctaacatcgttgagaaaacgagacgttgtaatatataaaatgcatggcgattatttacaccctacgaaggctattattattaaagatgattatgaaaaatatcttttaaataatggagagttctatacggctttaagaggtgatttgttaactaaaaaatttttatttttggggtttagttttgccgaccctaatatcgattatattctaggaaaaatacgcgcatcatattcggaacatcatcaaacccattattgtatattaaaaagagttcaaaggctggaaaatgaagagctcgctgattttgagtatagagagagaaagcagaaatattttattgatgatttgcaaagggttggtgttgagactttattagttaaggaatattctgagataacagatatcttaattgcggttgaaagagagtttaaaaggaaaacaatttttatttcaggtgcagctcatgatttttcacctttctctaaagaaaatgttgaaaagttcatttttgaattatctaaagaaatcataaaattagattttagaattgttactggttttggtttgggaataggaagttctgtgatagcaggtgctattgaagaactgcttttaagtggtaaaaggattactgaagatgaattaattttacgaccatttcctcagactacttcgggtgaaaagaatttaggagagctatggagtgcttatagaaaagatatgatttcttttgctggaatatcactgtttctttttggtaataaatatgatcagaaaactgagaaagttattgattctagtggaatgattgaagagttcgaaattgcaaaagcaaataattgtgtactacttcctataggtgctacaggaagtatggcacaaaaattagctgataaagtattggagcaaaatttacagccttcaatttcactagatagtgttaatgaaaaaattacagatttagaagtattgaaagaacgtattttagaaattttaaaatcacttaaaaagtag

SEQ ID NO: 19936 - DNA, 696 bp, Acinetobacter junii SH205
atgagtagaaaaatttttgtttcatataaatatgcagatactaatgtcttatcacttaccgataacatttgggaaacaaccaaatcacgagattatgtaacagccttacaagatcttcttaatgaaaatgatgaaatttataaaggtgaaaatgatggcgaagatttaagtgactttgccgatagtacaattgaaacaaagttaaaaaagaaaattttcgatagtagtattactttagtaattatttcacctaatatgaaaaacctcttagaaagtgaaaaagaccaatggataccatgggaaatatcttactctcttagaaataaaactattggtgacagagtaagccgtccaaatggtatgttaatggtagtcttacctgacaaaaatggaaaatatgattattacattgaagacaatacttgtagctactgcaactgtcggactctaaaaacaaatttcttgtttccagtattgagaaagaatacttttaatcacaaaaaaaaggttgaatcagactgtgaccaacatagtagttcccctgtatatactggggatcactcctatattgaatcagtaaaatggcaggattttattaaaaacccttccatttatcttgataatgccactagaaaacgtgaaattattgaaaattttgatataagtaaaatgttatgcgacgattttgtattttaa

SEQ ID NO: 19937 - DNA, 585 bp, Acinetobacter junii SH205
gtggctttttttacaaaggattttatatcaaaatattcagataaaacgagaagatattcttttgaatcttacaatgatcttttaaatgaatcaattaaagaacaaagcgcattaagaaattatgatgtttttctttcacactctgtcaaagatgccaaaattgtcttaggtgtcaaaaactggcttgaagcaaatggaatgtatgtctatgttgattggattgatgacaagcaactagatagatctcaagtaactagtagaacagctgaaactctacgtaatagaatgcgacaatcctcttgtttactttatatagcaacagataactcatcccaatctaagtggatgccatgggaattagggtattttgatgggtatagtattggtaaagtagccatcttaccaattttgaattctgaagatgattacttttatggacaagaatatctgggattatacccttctgttaaaaactggactcatcgcgacataggtatttatgggatcgataaaggctatattcctataaatggtaaattagttgacctttcaaaatttattaaagagagtccttatcaatggtaa

SEQ ID NO: 19938 - DNA, 1437 bp, Enterococcus faecium TX0082; identical to SEQ ID NO: 18577

SEQ ID NO: 19939 - DNA, 486 bp, Enterococcus faecium TX0082; identical to SEQ ID NO: 18578

SEQ ID NO: 19940 - DNA, 852 bp, Enterococcus faecium TX0082; identical to SEQ ID NO: 18579

SEQ ID NO: 19941 - DNA, 1437 bp, Streptococcus sanguinis SK408
atgattggaaaaataggagtagttaatatggaaaaagagctatttattaaaaaatatactgaagttattcaagaagggaatgctgcagtatttgctggtgcagggacatcagttgatgccggttttgttaattggaaagaattggtaagaccattctcagaagaaataaatttggacattgataaagaaacagatttaattggagtggcgcaatactatatcaattctaaaatgggaaatcgtggtactgtgaatcaaaaaataattaatcagttttctagttcagatgcagaaacggatgttatgaatatattaacacgtcttcccatttctacatattggacaacaaattatgatgaggtcatagaaaatggattggaaaaaaataatcgcaggggggatataaaaagaaaagtagatgatttggctattaatatttatgatagtgatgctatcgtatataaaatgcacggtgatataagatctccccaagatgcagttatttcaaaagatgattatgaaagatatggtgagaaaaattcgttatttgttacagccttgcgtggggacttagtctcaaaaacgttcctatttgtagggttcagttttgaagatccaaacctagagtctattttaggaaaggtgaatgttttattaggagataacaaaagagaacattattgtattcagagaactgtattaagaaaagattataaaacgaaaaaagagtatgactatgcaaaaataaagcaaggtttaaaaataatagacttaaaacgatatggtattgagactgttttggtaaatgattatactgagattccccaattattactagaaattgaaagagaatattttaaaaatacaatcttcatttcaggtagtatatcagattataatgagaattggagtgaagaaaaggtaaatcaatactgctatgatttatctagttttcttatttcaaaagattataaaataatatcagggtttggactggggataggaagcagtgttattaatggtgcgctggatcaaatttataaaactaaatatagacatgtggctgaacaccttggtttgtttccttttccacaaaatgctaatggagagaaatcgttaaaagaatgttggaccgagaatcgtgaacaaatgattagtgagtcaggggtgtgtatatttttatttggtaacaagctagttgatggtaaggtagaacttgcttcaggcatgatggaggaatttcaaatagctaaagaaaaaggaaagataatcattccgattgcctctactggatttgctgcaaaagaaatttatgatgagatgaaacaatcaggagaatatagttatttagataattactgggaaactttggagactgaaaaggatttcactaaagttttttccacgattgataaaattgtcaatgaggtacgataa

SEQ ID NO: 19942 - DNA, 621 bp, Streptococcus sanguinis SK408
atggcaaccaaaatatttatttcgttccgttttagtgatggaaaagagattaaagacgaactagttgatttatttgatgaatctactgaggtaattaatagatcagaagatgttgatagaggtcaaatgagtgagaacattattaaggaatatctatatgagaagttaaaagatacatcggttacaattgtattattaactccagaggctgtttcttatagaaagaattggattggaaattatgatgattggctttatgatgaactaaggtattctttagaggatagaaaaaataacagaacaaatggtgtgatagctgtttatactgatgaagctaaagataaggtactagatgatagtactcattattgtcaacattgtcagcagactaagtcgtgtaggtctttgaaatattttgataatttagctagaaagaacatgctaaatattaagtcggtttataagaaaaatccatgtaatgatctttatgatgatgagcacgattcttatatttctttagtgagtttgaacgatttcaaagaagattatagtcgatatattcagaatgcacaagacaaaagagaacgattagatgagttcaatatagctaagaggatgtaa

SEQ ID NO: 19943 - DNA, 1167 bp, Streptococcus sanguinis SK408
atgggcaaagtaatgagacaatataatgaattttatataaaattgcaaaaagagtttaaactggctcataatatgaccatagaagctatgccagcaaaattttccaacaaagattatgttaaaaaatttatttatatgtttcctgataaaatttctagacttataatagaaagaaactattggtatggtaaacgtattattaaaaaaaatttagttaaaattcagagtaaaaggatgtctttagaaactaatgattttattcttgaaacatctaaatatataagaagacaagtaagaaaaaatattttgagtattgaagaaagaaaaactcaggcagatgaaattcgaaaaaaatctttagcaaaattaaagctgcaaactataaaaagaaaaaaatcattagattatatccaagaaataaatccctcttatctggaacattatcgcaaaagattttttaaaacacatgatttacatgaaagattagaaatcattagagaactttcgaagtatgattcaaaggaagttcataattttttctatgcaataaatggtcatgtaagaaatcaatcgctaaaaaaagaagttcagtcgtactttcaaagtttatctctaccgtttagattgagtagaaaaaagaaaggaaaaacaaattttattgataatgaaatagtaacaaataggaaaggaccagaagagttgaagaagaggttatacattgatgatctagaaaagataaaaaaatttgatatctttctttcacataactctcaagatgaagaaaaaataataaccttttataaaaaactaaacaaaaatggccaagtcgtatatattgactgggttaatgataaatacgatctgaaacgagaatggtgtaatacttcaacagtcgatattatcaaagagcgtataaaacaatcggatgtatttgttttgtacttttcaagtaagacacttaattctcagtggtgtgcttgggaattgggatatgcagatggaattggaaagaaaatatgtatctatttttcagaaaaaatagatagaacaattattcccaaattttattctatttatccagagctacatctttctgaaaacattacaattgaagttgataaacaatcatctattatatttaatgattggaaaaataggagtagttaa

SEQ ID NO: 19944 - DNA, 1431 bp, Dysgonomonas gadei ATCC BAA-286
atgtttacaaaagaacaagaagaatttattgaaaactatgttaaagcattgagggaaaaaaatgcagtagtttttgcaggtgcgggaatgtctattccatgtgggtttttgaattggaaaaaattacttgatcctattgcaaagagtatggatctggatattgatgaagaacatgatttaacagctctagctcaattatatgtcgataataacagtggcgtaagaggcagactaaatcaacttcttcaagatagttatgggaaaattggcataaaagaatctactaatcatgaaattttagccagactgccaattgaaatttattggactactaattatgataacttaattgaaagtgctctcataaaagcggggaaaactccagatgtaaaaagtaaacacaatgatttaacagtaaataaatctaagcgagatgctattgtatataagatgcatggcgatattggagatgtcgctgagacagttttaactaagcatgaatatgaagattataatgaaaaaagagaatattttagtaatgcttttaaaaatgatcttatatcaagaacttttctattcattggttttagttttacggatccaaatttggattacttaataagtagaataagaactgcatacaaacaaaatattaggggagatgattactatttcatcgagaaagagacagatgcaaaaaaaataaataagcaacgtcttaaaattgtttctttgaaacgctatggtcttaaccctgttgttgtagatagttatgagaaagatatcccacgtatattgagagaaatagaaattcgttatttaaggaatacagttcttatttcgggcagtgcagaagaatatgggcattatgtagaaaaaaaagcaggagagttcttacacaacttaagtaaagagttttctaaaaattcctataaaatactatctggtttcggatggggtgtcggaagtgcagtcattaatggagttcttgataatatggagttggaaaaagtccaacgattagatgattacttgttgttaaggccttttcctcaatttgaaactggaaaaaaagagcttaaggagctatggactgattatcgtaagaacttcattccactagcagggatcgctattttcgtttttggaaataagaaaaaggtggacacaggtgaaatagttaaagctgatggaatgattgaagagtttaatattgcaatagagaatggtctaaaagtaattcctattggagcaacaggttatgtcgcggaagatttatggcagaaagtcatgagtgattttgataaatattatccaaaagaaactggtgtaacaaaagaggatttccagctaattggaaataaagatttatccgaccaagaactcatttctgcaacaattaaaattattaacaaattaaataaaaactaa

SEQ ID NO: 19945 - DNA, 612 bp, Dysgonomonas gadei ATCC BAA-286
atggctagaaaaacttttatatcatataaatacagtgaggctagaggattgcgagatactattataaaaaggcttggtgaagatgcaaaatattatcaaggtgaaacctctgcttctccagatttgacagatgcttcaactgaaagaataaaagagcatcttaaagatatgatttacgatacttctgttacaatcgtagttatatctcctaatttaaaagaaagtgattggatagattgggagatagaatattcattgaaagaggttaaacgtggagacagatgttccaaatctaatggagtggtcggagtgattatgaaatataatggaggatatgattggctcgtatcacaaaatcgaaataatgatggatgtgtaagtcgtcagattgatagttccaagctctatggcataattaataacaatagatataatcttaatactgataataaatatgcctgttctacttgcaagacgtttaatcagttagatggatcttacattgctctgattaatgaagaaaactttctatcagatgtagactattatattgaaaatgcttatcaaaaaagtcagtgtattgatgactatgatattataaagaaaaaataa

SEQ ID NO: 19946 - DNA, 576 bp, Dysgonomonas gadei ATCC BAA-286
atgggaataataaataagtcacaattatttgagtatagaaatgctaatcgatatatcaatgaaaacctcagatatttttcagcagaatctaaagtcggaaaagtatcagtttttttatctcataagcatgatgaattgaaagagcttgatggagctatttcttttcttaagaaacagggagtaagtgtatatgtcgattggttggatgatgaaatgccaaaatctacttctggcgtaactgcccaaagaataaaaactaaaatcaaggaaaatagtaaattcatattattagcgacagaaggagcgatcaattctaaatggtgtaattgggagttaggatatggcgattattgtaaatatctaaataatatcgctatcttgcctgtcagagatgattattctgatttttctggtagtgagtatttacaaatatatccgagaatcgaatatgttggttatatgtcagttccaagaaagattggtggatatttcgatgaaggctattatgtaattatgcctactaataacgaaggagtgagtacatatactaaattaagtgaatggctaagacgataa

SEQ ID NO: 19947 - DNA, 4140 bp, Saccharothrix espanaensis DSM 44229
atgagtaacaagacattcatcaaacagttgaaacgtgacagcgagacgaacaaaatcgcactcatcctgggcgcaggtgtgagttcggcggccaccaaaggggcgttggtcgcgacctggcagggactactgctcgacgggctagaattcttagccgacatagactcggatccgggaccggcgaaaatcttccacaccgcgctgtcgaccgccactgacgccgacgcgttggtggcggtcgcccagtgggtcaggagccgtttcaacagggtgccgggtgagttcagcgactggctgaaccggacggtcggcgacctagagatcaaggacacgacgttgctctcgactctgccgaacgtcgagcgcatagtaaccacgaactacgacatcctggtcgagcgacacctggggcgccagtcgcttaattggaccgacgacaatgcgtccaacgagtaccggcgcaatccgaagccgtacgtcttccacgcccacggtctctataaggatccacggtcgatcattctcagcggagaggactacggtcgactcgaagaggacaacggcgtccatcggatgctcaccgacctcgccagctcgtactccctgttgtttatcggcttcggccaagggttcgaggatcccaatttccgccgattggtcaactggctacggaacgaacaaggcacctctccctatcgacactacctactcctcctcgattccgagcgaacatcggtcgacttctaccgcaacctgtctggcaggatcacccccatcttctacggcgctgaccactccaatttgcccaacttcctcgccgacctgactcggagcaacacaagacctgcggacgagttgctttccgtcgtcgccgagccgccggccgagcagaaactcacctatgcacagctactgccgagcgaaatggctctcatcatcggggacgtggaacgggagctaggcgcagctctccagctctcacctttccaactctccgccttgaagctgtgccggtcggccgtagtcgacggcaagtccggcctcctgagcgccgtgaccggaaccggcaagaccacgatcgcgagaatagcggtcaatatggcggtcgccttggggaaatcaggcatagaactgctgccgaccaaagcgctggtcgcgcaggagaggagcgagtgggatcgctggatcgacgcctggaccaccaactctcacaagaagatgcgggtgtacggttcgagccgggactacccggagaacgaccgcccggtgtcacggggacgatacgaagtcgccttggcgatctacgagaagctgggtgtatacctggtgagcggtcggacaccactggccaacacccgcattgccgtagtcgacgagttgcagatgctcgtcgagaacagccagcgcgcggcgaagctagaagccatcctcacctccattcggctcatgccggaagccctgcgaccggcgattctcgggctctccgcgaccctacccgcggacgcgaccgagtcgctaaggcggtggttgggcgtgaacgaggacatgatcgcgatgtccaatcaacgcccgatccccctcgacacctacgtgatggacgcgatcggctggaaggtccagcccgatgcccacctgttcaacatccccggtcaggcgccgccgccgccgtcggactaccggaagcacgacctgaacggccgcctgcagcaaaacagggaaacgctctcaggcaagatcccccacctggccaccggtgaactggccgccacgctgatcgaccacgtcctcgagaaggacgagaaccgcagaatcatctgcttcgtaccttcgaggacatcggccctcgaactcgcgtcggccgtgcacgctctgctcaagaaccgcaccggcgcgcccaccaagggttccccgtggagccacggcaggttcgccacggagcagaccgccgagaactccgaggagcgctacaacgccctgcgctactccgacctaccccaggctgacgtcgtggtcaggggattgagggagggcgtcgccgcgcacagcgcatcgttccccgccccgctgcgcaggctgctggaggacgagttccgccgcgaagacggtctgctccgcgtgctcatcgccacggacacgctcgcggtcggggtgaacctgcccgccgacacggtgatcgccacgagcatctccgggtacacgggaacacccaggcgcaggcacctcctcacgccgtccgacctcgacaataaggcgggccgcgctgggcgccggggcaagacccaacgctcccgcggtgagttctacctgatcgccagcgcgttcgacctggagaacatcgaagggctgtcagcccccgacctacagaccctgtccaccgtcgaaggtatctacaacgagttcgtggccaccgacacccgcaccagcaagatcgcttcctgttaccgcaccacccctgagttgagcagcctagtgctgcacatcctctgccaggacgggttcgcccgcgaggaatcggcgtggttgcgtcgggtcgaggaaatcctgtcctgcgtgctgctcgcccacgagaaagacgccccagcactgccttcggcgcaagaggtgctggacgagctcgtcacccgcaagctggtggtcaagcggcataacgggaagctcaccctttccggaatcggagtcgccttggccaggtctagcctggacctcgacgcggccaacaccctggagcggctcgcccgcttggtgtccgccaacgccggcgacatcgatctgctctggaacacctgtcgcagtcagtccatccagacgacaacagactgggtctcactgccgccggtcgcgacgaagcactacccttcgctcaaagaagccgtgatccgcctcggcaatgcctactgcgccgagtcggaactgctccgccgcgacgcggcacggcgctgtggcgcgaataactaccccgtgcgcgaagcgctggtcgaacgcggttcctctgtcgtctcgacggagttgcgggaactgctcctctcggacggggagaccgcgtccgactctgacgtgacggcactccttcgcgccctggtctcgtacgagtggtcccgcggcctgccgttcggcgagattaaggcccgcttctccaccgtcgtcaagtcggaggagagccagcccggcgaggcgcccataaccatcaagatccattattcggatgtcgagcaactgtgcgagcagatcgccggcgtgatcagcagcgcagcggagatctgcgtggcgatggacggcttggactactcaggcagggcgatgaggctcggccaagaggtcgaaaccggcctcccggcctggctggcgccgatcgccaagatgaggataccggccctgcaccgggagcggctcgccttcctgtgggacgccaagccgcccgccgactcgatcgtggaggtgctcgaacgccccgagttcgtcgaacaccccggtatccgccgatccgacctccagagcgcggcgcagaccatcagcctgcgcgaacaggaggaccagacgttccgcaaccgcatcgcgcagcgctgggcggctaccttcatcccgggcggcgagggcgaagtgttcgaggacatcagcgaccgcctagacgctgcacaggacgccaaggactacctcggcgtcctgtgcgacctcgcgaatagcctgcgggtcgacgtcgggttgatcgagcgggagaagcagttcgtctcggtgttgtggcaggcggggcagaggatcgcgcgcatctacgtgccgagcggtccgttgacccaggctggcgtcgagtgggtgggcaagaggaaggggatggtcatcttgagcactcggatggtgccgggtgccatcacggcgtccgaccaacccactcaagcgcggttcgtccagcccgagcatctgctgtcgatgctggctcgattgatcgacacccgcgagacgggcctgcaccccgaggaagtcgtcgacggcgtgtcgcggattatggtctcgtcgttcagctcggagagctggtatctctacgaaccggactccgtgggcgcgccgcccccgttccccggcgacgaactgccgtccctggaacgagcggtggccgttccctctgccgacgactccatgctcgactga

SEQ ID NO: 19948 - DNA, 1215 bp, Saccharothrix espanaensis DSM 44229
gtggattcaacgccaggtgtcacgatcgagctcgcggtcctggaccaggacagcaagaggttcggtgtcgcgtctagtccgatcaggaccggatcggttcaggtacacggctggcaagttcacccgatcagagttgcgccaggacagttcgacgacgccaaggcataccttgtcaagctcaactacgagctggagaccacgccgagcacaccggagctgaactggttcgagttcggtgtggagctgcgagcgggttcggtggtggacgcggtcccccaccacacccagcccacccagacttccctgtcgtacgtggtgaacgaccacctcaacctggtaccggccacgaacgggacgacctccgccgcgcaccttcctgcggcgggcgagacgatccacacgttcggcgtcggaagcaacggtgtccgctggcagcacagggcagagccggacgcgggagtgcggccggggtcgcgggtggtgtggctcgtgacgctggtcgagcagggctctacgcacctggacctcaccgtggtcgcgcgcttcgaccagcggccgacactcgactggaacgtcctgcccgcactcacaccggcggacctgcggatcgatctccctactgcgccgaacctccgccccgcggtgacaacccaacccgcgaacgccacaaccgtgacgctacttccctccggcccgcgggtgttcatctcctacgcgcacgacaacgacgctcacaagcagcaggtccgggacttcgcgaacctcctgatggggtgcgggtccgacgtccggctcgaccagtttgcagggccaggacgcaaggattggttcctctgggccatcgacaacatcgacaacgcggacttcgtgatcgtcgtcgcgtcgcccaagtgcatggcggtcggtgagggcaaggccgaccggaacgagaatcccggtatgcactgcgagttgggcgtcattcgcgaccgcctgcagggagaccgcgagctttgggagcgaaagctcctgccggtcgtgctgcccggcgagtcggtcgacaatctcccggtcttcttgcagccccaggcgatgaaccgctacgagatcgacgagctgaccgaggacgcgctcagcgacctgctggccgcgatccaccacgggatcgaggacgacggcaggtcgccggtcgtgctcacggtgacgaccaccggtcgtgcgctcgcggattcctga

SEQ ID NO: 19949 - DNA, 1422 bp, Bordetella bronchiseptica Bbr77
atgtcgccacaacacgtcatcaatggcttcatcaaagaattcgtccaggacctgcacaatggcagtgcggcgatcttcgcgggcgctggcatgtccaagggcagcggttatgtggactggcccgagctactgcgggacatcgccaatgaactcgggctggatgtcgccaaggagcatgacctaatctcgctggcccagttccatgtgaacaacaagcggacggccgacggtttgtcaaagaagatcctcagagagttttcagagcaggccgaaccgtccgaggtacacgacatcgtcgctcggttgccgatctacagcttctggactaccaattacgacaccctcattgaggactcactgcgccgggcgtaccgggtgccggatattaagtcgcaggtggatcaactctccctcagcaggcctaagcgcgacgccattgtctacaagatgcatggtgacgtccagatggcccaggacgccgtcatatacaaggagcagtacgagaagtactacctcactcacgctcccttcatcagggcactgagcggcgacctggtgtccaagacctttctcttcatcggcttcagttttactgaccccaacctcgattacgtgctgagcaggctgcacggtggcgctaccaagcgcacccattattgcttcatgcgcgaggcgcaacgggacgttggcgacgacgacgagcttttcagatacaaggtccgtaaacaggaactgcgcattgaagacttgaagcgcttcggcatccaaacgctgctggtcgacaactattccgatatcaacgatatccttaagaaggtcgaagctctgtaccggaagcgaaccgtgttcttctcaggtagcgccgaagattatggcgagtgggccaggcaggacgcgcagaacttcatccacgacgtcgcggccaactgcgtgcgagccaactgccgggtggtcaacggttttggctggggcgtgggcagcgccgtaatcaacggcgccctggaggccatctacggcgacccacagaagtattcggaggcccaactgatcgttcggccgttcccccagcatggcagcaacctgaaagatctgtgggaacagtaccgtcagcgaatgatcagcttagccggggtcgccctgttcttcttcggtaacaagcgtgatggtgacaaggtggtcaacgctaacggagttcggcgtgagttcgagatcgcactggagcaccacctgttacccatcccggtcggcgccactggcttcatggccgaggagctttggaacgaaatttctgccgacctagctaagtactacggaggttataaatgggtgattcccatggtccaaaagcttgtcgatccgaaaactccgccaaacgaaatggtgaaggtcattaccgaaataattaagcaattgaataaataa

SEQ ID NO: 19950 - DNA, 441 bp, Bordetella bronchiseptica Bbr77
atggctcgcaaagtatttttcagcttcaagtatgacgacgtgcatcgcgcgatgaatgtgcgcaacagcaatgtcatcggcggcatcatgaaatccggattcatcgacaaggccgatttcgaaaaggtcgaacgcgagggcaaccgagcaatccaaacttggatcgacaaccagctgaatggcacgtcggtcacggtggtgctggtcggcgccaacacccacaagagcaaatgggtaaagtacgagatcgatcagagtatcgcccgcggcaacggcgtgttgaccatcgacatcagcaaaatcgccgacatgcagggcgtcaccaccaactgttgctcgctgcgtgtgcccggatacaagcactactactggaataatgataacggccgtgcaaacctgggcgcttgggttgatgccgcagccaaggcagccggaaaatag

SEQ ID NO: 19951 - DNA, 1455 bp, Serratia marcescens subsp. marcescens Db11
atgcccgaacgtgatatagaactatttattcgtgactatgttaatgatattaaaagcggcagcgctgcgctatttgccggcgctgggctgtccatccccgccggcttcgtcagctggaaagagctcataagcgatatcgcttatgaactggggttggacatagaaaaagagagcgatcttatttctctggcgcaatatcacctcaatgaaaaaggcaacagacataagataaatcaaaaaataattacagaattcgctgaacaggcggaagaaacagaaaaccaccggattatcgccagattaccgatagcgtcactttggaccactaactacgacgacctgattgaaaaaacctatgcccgttataatcgcgtctgcgacgtcaaaaccacgccggaaagcctgactaataacattcataaacgtgatgttgttttatataaaatgcatggtgactatagaaatcccaaccaggcgattatcacccgcgaacaatacgaaacttactcccgtacacaccttccttttatcaacatgctgatggcggagctgactgccaaaaccttcctgtttatcggtttcagctttgaagaccccaacctgcaatatgtattgagccgcctttacgcacagtacggcgaagggcagagaaaccactactgcatcatgcggcgcgtccagctcggcgacagcggcagcgaggatcaggcgtcttgcgattacaacagccgcaaacaaggcttgatgattaacgatctgcgccgttacggcattcaaacgctgttggtggatgactatcggcaaatcactgacctgctgtatgccatcgaaacgcagttcaagaaaagcacggtgtttatctccggcagcgccgacaactaccagccctatacccgtgaagagtccatccagttcatacatcgtctggcgcgcctgcttatccacaaacagtatcgcatcgtcaacggtttcggctggggcgtaggcacagcggtgatcaacggcgcattggaagccatttacgacagccaaggaaaaatcagcgaaagccagctggtgctgcgtcctttcccccaattcgccagcggcggcattaccctaccggcactttggcacgaataccgtcagaacatgatttcgctcagcggcatcgcaatctttttgttcggcaacaaacgcaacgccgaaggcgaatacgtgctggccgacggtttattgaaagagttccagatcgccacggaacaaggctgcgtctgcattcctatcggttgtaccggcagcgcatctgccgagatctaccgaaaaatcaaggaggagatgaaagaaaccctctactaccgcaaccccgccgccatgaatctgctggatcagcttaacgaaccgggcagcctggcggagaagaaaaaaagcctgttggcgcttatcgatatcattactaaggataacccccgatga

SEQ ID NO: 19952 - DNA, 435 bp, Serratia marcescens subsp. marcescens Db11
atgaccagaaaatgtttttacagtttccattatgagccggacaactggcgcgcttctcaggtacgcgaaatgggctcgctggaaggtaaccggccagccacggataacgattgggaggaagtgaaaaaaggcggtgacgccgtcatcgccgcttggatcaagggccagttggacaatcgcagctgcgccgtgattctcgccggtaaagataccgctgatcgcaaatggattaatttcgaaatatgcgaggcttggaaaaaaggcatgggcgtgctggtggtgtatatacacaatttgaaagacagcgccggcgaccaaaccacgaaaggtaaaaacccgttggatcacatcaagctgggtgacgcaaagctttccacaatcgccaaagcctatgatccgccttattcgaccagcaccatgtctataaccatataa

SEQ ID NO: 19953 - DNA, 1458 bp, Xenorhabdus bovienii str. kraussei Becker Underwood
atggcaagtttaaataaccaacctatagatctctttataagagacttcgttaaagagcttaacgagaataacaccgcaatatttgctggggcaggtctatccgtacctgctggttatgtaaactggaagcgactgttaaccccattagctgaagaactgggaatcgatattgaacgcgaacatgacctagtgagtcttgctcaatatcacaataatgcgaatggtaggggaaaacttaatcagcaattgatggatgaaataggggtaagccgagaaccaacaatcaaccataacattctcgctcgattgccgatttcaacatattggacgactaattatgacaagcttattgaaaaagcactagagcaggcagggaaaatcccagatgttaaatacacaaccaaccaacttgcgataactaaaaaaaagcgagatgcagttgtctacaaaatgcacggtgatatcgaccatccagataaagctgtaataacgaaagatgattatgaacgttaccaaatgtcatttgggcctttcatcaatgcattaagtggtgatctaatatcaaaaacatttcttttccttggctttagttttactgacccgaatctcgattatgttatgagtcgaattcgaattcattttaatgaacatcaacggcagcattactgcatatttaaaacatgtagtcgaacagactacgacaatgacgaagactttaaccatgcagagattaaacaacaactagtcattaacgatctgaagcggttccaagtcaaagttctcttaatcgacagctacgaccagatagctacgatcttgaggcgaatcgaaatgacttatcggtgtaataccatttttctgtccgggagtgctcatgtctttgaaccttggacacgaactaaagttgaaggatttttgtgtagattagggcatatcctgattgaaaaaggatatcgtatttcatcaggaatcggtttaggcattggaaatgctttgattacaggggctattcagaaggtatatcaaaatcacggtgatagtattgctgatcatctaataatgagaccatttccgcaatacatcaaagaggtagatgaacggcaaaggatatggagacaataccgtcaagaagttattggttatgctggtattgcaattttcttcatgggtaacaaaagcgaaggtggtaaggtcgttgtagccgatggatgcatcaaggaatttgaaattgcacataatctcggtcttgttgtaattccagttggggcaagtggtcacgctgcacaagatatatttgagtctattaaagctgattacacaaaatactatccccaagctgatgcagcattcttggagtatattgaacaattaaacaacacaacagacgatcctgaaactctcttatcaagtcttcttgcagttatagactttgcctcaaaatttcaaaaacaaacttaa

SEQ ID NO: 19954 - DNA, 591 bp, Xenorhabdus bovienii str. kraussei Becker Underwood
atggcaaagcgagtatttttcagttttcactaccaagatgtaatcgattttcgagcaaatgtcgtgcgcaatcactggagaacgaaaccaaatagagagcaagcaggttacttcgatgcatctatctgggaagaagcaaggaaaaaaggtgatattggattaaaacgtcttatcaatggagggctaacaaataccagtaccacgtgcgttttgattggatctcagacttacctccgcccatgggttcgttatgaaatatttaaaagctttaaacgagaaaaccatctactaggcgttcacatcaatagcatcaaaggcaaagacagtgccactaaagagcttggaaaaaacccttttgattatcttgctgtggagtggagtgagtcaggtaaaacagtcacaatgtttgaattgaaaaatggcaaatggaatccgtatactcaaattgatggttcggcaagctaccgattggaaaatctagcacctgttgaatatcgaggcaaattcattcagatatctaagcttaaagctgtatacgactgggtggaaaatgatggttacaacaatttctctgattggatggaaggttaa

SEQ ID NO: 19955 - DNA, 1437 bp, Enterococcus faecium VSE1036; identical to SEQ ID NO: 18577

SEQ ID NO: 19956 - DNA, 486 bp, Enterococcus faecium VSE1036; identical to SEQ ID NO: 18578

SEQ ID NO: 19957 - DNA, 852 bp, Enterococcus faecium VSE1036; identical to SEQ ID NO: 18579

SEQ ID NO: 19958 - DNA, 1437 bp, Enterococcus faecium VRE0576; identical to SEQ ID NO: 18577

SEQ ID NO: 19959 - DNA, 486 bp, Enterococcus faecium VRE0576; identical to SEQ ID NO: 18578

SEQ ID NO: 19960 - DNA, 852 bp, Enterococcus faecium VRE0576; identical to SEQ ID NO: 18579

SEQ ID NO: 19961 - DNA, 1437 bp, Enterococcus faecium VRE1044; identical to SEQ ID NO: 18577

SEQ ID NO: 19962 - DNA, 486 bp, Enterococcus faecium VRE1044; identical to SEQ ID NO: 18578

SEQ ID NO: 19963 - DNA, 852 bp, Enterococcus faecium VRE1044; identical to SEQ ID NO: 18579

SEQ ID NO: 19964 - DNA, 1440 bp, Vibrio parahaemolyticus M0605
atgaaattaagaaaacaagcatttttaagagatttacaaaaagaacttgctgaagaaaatgtggctgtgtttgctggggctggaatgtcagctggttctggctttgttaattgggccgaacttcttcgtcctatagcagaagaactaggcttagatgtcgataaagagaacgatctcgttgctcttgctcagtttcattgcaatgataacgcaaataatagaagccaactaaaccaaagacttatagaggagttttcacgtaaatcaattgaaacggaaaaccacagaatcctttgtcgcctacctataagaacttactggactaccaattatgataagttaattgaaaatgccctcgaaaaatcagggaaaattgctgatgtgaaacacacgaaggagcatttatcgacaacgaaaccaaaacgtgacgctgttgtgtataagatgcacggtgatgtggaacatgctagtcaagcagtattgacaaaagatgattatgaacgctaccacgtaaagatggagcaatatttagccaacctaaaaagtgaccttatttcaaaaacgtttatattcataggctttagcttcaccgacccaaacttagattatattcttagtagagtgagagttgcttatgaaaacaatcaaagaagacattattgttttattagaaatattaaaaaatataagaatgaggaaatagtagactttgaatacagacaaagaaaacaagatttttttgtaaaagacttagagagatttaatataaagacaattattattgatgaatatgaagaaataacagaacttcttagaaaactcgaaataaaatacaagtctagaactatatttatttctggagcggcctgtgagtatggtgatttaaaagaaaatgaagcattaagatttgtctatgatttaagtaaacgactagttaaaaataatctacgtgttgtttctggctttggtgttggaattggcagcactgtaatttctagtgtacttgaagaaacttttaatactaaattagccaaaatcgaagatcatcttgttttgagacctttccctcaatctacagagggtgttgaacctttgggaactctatggacaaaatatcgtgaagatatgatcaactatgctggtattgccttatttttgttcggtaacaaaaagtcagacagtgacgttattttatcaaacggcatgcgtgaagaatatgagatagcgaaaaaacaagggcttttgttacttcctattggttctactggttacatggctagagaactttggtctgagttaaatgatgagattcaaaatagttcaactgcttcttcgaaaatgaaaaggctgtacgaaagattagggactgagcagtttgagagtgatagcgtcattgagctaatcatggaaataattgagttaatggataacgagcagtaa

SEQ ID NO: 19965 - DNA, 492 bp, Vibrio parahaemolyticus M0605
atgactaaagatattaagaaaaatgtttttataagtcaccatcacaaagatgatgctagtgttgacggagtagcacgtttagctgcagccaaaggttatcagctacgtaatagttcagtcagaatgaaacctgaaaaccaaaggcgtgttgatgaaaaaaaagttagcgatagaacgatagcacgattacttagaatgaaaatgaggtgggctagtcaagtaatagttgttattgggaaagagacacatacaagaccgtgggtaaattgggaaattcaagcagctcatcaacttggaagacctatcataggtgtgtacgaaaatggtttaacaggggacgttaagttaccagaaaaccttgagaaatatgcaacttctatagtttcttggcgaagtgatgccatcatcaatgcattagaaggtaagactagctttcaaaaaactgatggtacggagcgtgataaagtaaaaggagggaatgtcgtatgttag

SEQ ID NO: 19966 - DNA, 1443 bp, Sphingobium lucknowense F2; identical to SEQ ID NO: 18686

SEQ ID NO: 19967 - DNA, 468 bp, Sphingobium lucknowense F2; identical to SEQ ID NO: 18687

SEQ ID NO: 19968 - DNA, 738 bp, Atopobium sp. ICM42b
atgaacaatattgtcaataaaaaagaattgattgggattattgaacaggcattgtataataatgaactagcagtttttgctggtgcaggactctccattgatgctggatattatagttgggaaaagttattagaagaacctgcaaaaaagttggaattagatatatccaaagaaaaacatgatttgatttctttggctcagttttattgtaataaaaataaaagaagtgctattaatgagcttttattagattcattcccatctaataaaaaaccaacggagaaccacaaaatattatcacagcttccaatttctacatattggacaacaaattttgatacattaattgaagatgcgttgaaagaaaataataaaaatgtttcagttagaaaggctgataaggatttacagctttcatataaaaattatgatgcagttgtatataaaatgcatggagatattcaaagtccatctgaggctgtaataactagagacgattatgaagaatatggaattaatagtagaaaattatttagagatgttttagaaggagcattgctgacaaagacttttttatttttaggattcagttttagtgatcccaattttaattttgtactcagcaaaatgagagttttgttgggagatgataatagatcacattattatatattaaaaaaattgttgaacctaataaggataagtttgaagaagaagaagaatataaaaaagcactag

SEQ ID NO: 19969 - DNA, 1131 bp, Atopobium sp. ICM42b
atgggaaaaacagcgagacaatttaataaaatttatattgattataaaaagaaatttaaaaagccaattcaacaagttttgatgttgatgccgtatactttttcagacaatgatattgttaatacatttaaagagttatatccgcatatgtgggatgatttgaataaaaagtataatttttggtataacaaaaatatggttctgatcaagtatgggaaaaagagcagatataattttagaaaaccatataattttattttagattgtgcttctcctagtgtgaataaacttagaaaagataagaatagaattattttgggaaaagatgaggtggcaaatttaaagaatgaaataaagcagctatcaaaatccaaatttgataaaagaaaacaaaaaatcgacgacacattgagattcattcaagaaatagaaccatcatatacatcattttttattgatagatattttaatacttacgatttgcatcaaaaattagagataatgagagagctttcaaaatataaatcatcaaatattacggagtttttttataaggttaattcatgtacgagaaatttttctttaaaaatagaagctcaaaactatattcaatctattggattaccatttatgttaagacgtaagaaaaaaggtaagaaaaattatattgataacgaaattgtaaaaaacaattcaggtcctgaagttttaaaacagagactgtacgtagatgatttagaaaaggtgaaaagatttgatgtttttatatctcataactctagtgatatgaatcaaatagttgaattatataaagacctaaatacaaaaggatatgtggcttatatagattgggttaatgataaatatgatttgaaacgagaatggtgtaatgcttcaacatcagaaattattaaactgagaatacatcaaagtaagatttttataatttttttaacagaatcaacttttaaatcacagtggtgtccatgggaacttggatatgcagatgctttgaataaaaaaatttatgtttatatttcacctaattttaaaagtgtagatattcctattttctatagaggctacactgaaataaaaagtgttgatgaaattataatagaaaataattga

SEQ ID NO: 19970 - DNA, 1512 bp, Sorangium cellulosum
atgtcaaccctgatggacaacgcgaacacgacgagcgcggaggtcgacgccgcggtgatcgaagagctccgcgaggcgttcgagagcggagagctcgtgctcttcgtggggggaggcatctcggccgcggccgggctgccgacgtggcgccagctcgtcgacctgctcgtcgagcgggtgcgcgagcaggtcggcgacgacgtcgtgaccgccgaggtcgcgtcgctcgcgcgatcgcagcgctacagcgaggcgctcggcgcggcggagcacgcgctcggcgcggcggagttcaacgcgttcgtcgaggatgcgctggacgacgaggggctcgatccgccgcgcatcgcgctcgcgatcgcggcgctgcgcggcaagctgcgcgcggtgctcacgacgaacctcaaccacctgctcgagcgcgccttcggccacgagtgggagaccatgtggcgcgtcaccgacgacgtcgcgtggcgccggcgcttcatcctcaagctgcacggcacgctgaaggagccggggagctgggtgttcgcgcgagagcgcttcctcgcgtccatcgcggcccccgacgtgcgcaggtcgctcacggccgtgctctcgaactgccccgtgctcttcatcggcttcgggcgcgctgacggcaacttcgacgagatgctgtcggacatccacgcgctctctggcagctcgccgccgccccgcttcgtcatcgtcccgagcgcgagcctgacgccctaccgccgcacgatgctcgtggacatggggttcctgctcctttcttacgagacgccggacggcagccacgacagggccctcgagatcctcgagcgcatgagcgagccgcgcgcgcgcgcggcgacgacgacgtcgcgcccgtcgcggtcgatcctcccgcccccgatccccgacctggagctgccgccgtcgtcgtcgccgctcggcttcccggcttacgagctcccgcccgactcggccggctacgacgacaccgtcacggtgccgggggcgctcggcgcgccgcggcgcgatcgcgcgtccgagccgccggcgagcccgatcgaggtgttcttctcgtactcggagagcaaccgcgagctgcgcgacaagctcgagacgcacctcgccatcctcaagcgcaagggcgtcatccgcggctggcacgacggcgagatcggcgccggcgaggagcgcgacagggcgctcgccgagcacctcgagaccgcgaaggtcatcctcctgctcatcagcgcggatttcctcgcgtcggacttctgttacgacgtcgagatgcagaaggcgatcgagcgccacgagcggggtgaggcgcgcgtcatccccgtcatcctcgacgcctgcgactgggagggcgcgccgttcggcaggctgacgagcctgccgcggggcggccgccccgtgacgagctgggtcaaccagagcgaggccttcaccgacatcgccaagggcatccgaaagcaggtcgagcagctcacccaaaaccccccgtag

SEQ ID NO: 19971 - DNA, 2871 bp, Sorangium cellulosum
atggttgccttggcgacgagccccgccgacgtgttcttctcctactccccgagggacgaggacctacggcccaagctcgagacccacctcgacgcgctcaagcggcaaggggtcatccggacgtatcaaggcttcgcgctcggcggagggaaggagcggcgcgaggtgatcgccgcgcggctgcgcgaggcccgggtggtgttgctgctcgtgagcgcggatttcctctccgccgacgggtggctcacgccggagatccgggacgcgctcgcccggcacgacgcgggcgagtgccgggtcatccccgtcatcctgcgcccctgcgcgtgggagaagacgctgctaggcaggctgcagccgctcccgaaccgcgcgcggccggtgacgagctaccccaaccagagcgaggcgttcaccgagatcgcgaaggggatccggagcgccgtccgcgagacggagccgccgacgctgcggccggtcacccggcggccgtcgagctcgcccgacgcggagccgcacatcaagaagctgccgccgcgcaacccgggcttcaccgggcgcgaccggctcctcgacgagctgcggagcgcgctcaccacggggggaccggcggcgctcacgcaggcgatcagcggcctcggcgggatcggcaagacgcagctcgccgcggagtacgcgcaccggtacgcgagccagtacaacgtcgtctggtgggtccgcgccgaggagccggcgacggcggccgaggacttcgcccgcctcgccgcggcgctcgacctgccggagcagaacgaggccgaccagcggatcgcgatcgaggcggtccgctcctggctgtcgcgcaacgacaggtggctgctcgtcttcgacaacgtcaacgacccgaaggacgtggcgccgtacctcccgcacccgcgcgccggccacatcctgatcacctcgcggaacccgagcttccgcggcatcgccacgccgctcaccgtgccggcgctcgatcgcgccgactcggtgaagttcctgctcggccggaccgggcagagcgacgagcgggccgcggagaggctcgccgagacgctcggcgatctgccgctcgcgctggtgcaggcggccgcgaccatcaaggagacgaggtcgtcgatcgcgacgtaccacgccgtcttcggcgaccaccagcgcgagctgttgctccgcggcgtgccgatggattatccgacgcccgtcgccaccacctggggcctcgcgttccaggaggcgcagcgcttctcccccgtcgccgtcgatctcctcagcctgtgcgcgttcctcgcgcccgacgacatcccgcgcgagggcctcgccgacgccgcgccgcacctgccgcccgcgctcgcggaggcgctgagcgatccgctgatgctcgacgaggcggtcgccgcgctccgccgctattcgttcatcgacgtccacgagggcgcgctctcggtgcaccggctcgtccaggcggtggtccgcgatcgcctcgcgcccgaggaccggcggatgtgggccgaggcggcggtgcgcctcgtggaccacgcgttccccgagagcagcgacgacgtggagacgtggccgttctgcgcccgctggctgccgcacgcgctcgccgcggccagccaggccgaggcccacgacgtcgcgaaggaggtgcgcgggcggctgctcgccaggttcgcggtctacctgcagggccgagcggcgtacgcggaggcgaaggggtacctggagcgggcgctcgcgctgcacgaggcggtgttcggccccgacgaaccgaaggtcgcggccgtgctgcgcagcctcggcagcgtcctccacgacctcggcgatctcggcggcgcgcgggcccacctggagcgcgcgctggcgatcgacatcgcgagcgtcggccccgatcacccggacgtcgcgcgcgacgtgaacgacctcggcagcgtgctcatggatcagggcgacctgcccggcgcgcgcaagcacctggagcgcgccctcgccatcgacgaggcgacgtacggccccgacgacccgagcgtcgcgatacggctgaacaacctcggcgcgctgttccgcgatctcggcgacttcgcgggcgcgcgcgtgcacctcgagcgcgcgctcgcgatcgacatccgcgcctacggaccggaccacccgacggtcgcgatcggccgcacgaacctcggacggctgctccacgacctcggcgacctgaagggcgcgcgcgagcagttcgaggaggcgctcaagatcgatgagcacagctacggctgctaccacccgcgcttcgcgctggcgctgaacaaccgcggccgcgtgctgcgcgatctcggcgacctggccggagcgcgcgccgacttcgagcgcgcgctcgcgatcgtcgaggacacgtacggcccggatcacccggacgtcgcgcgggacatcaacaacctcggcagcgtgctgcgcgatctcggcgacctcgagggcgcgcgggcgaacttcgcgcgcgtgctgaggatcgccgaggcgacctacggcccggatcaccccgcggtggcgatcggctgcaacaacctcggcagcgtgctgcaggcgctcggcgagctgcccggcgcgcgcgagcagctcgagcgggcgctcggcatcgcgcaggccacctacggcccggatcacccggtcgtggcgagcatcgtgaacaacctcggccgcgtgctgcaggcgctcggtgacttatcgggcgcatggcagcagatagagcgggccgtggcgatcgcgacgaaggcgctcgggccgacgcacccgtccgtgcagatcttctcgcggaacctggcgcgcctcggcgacgcgctcggcggcggcgccgaggcgacctga

SEQ ID NO: 19972 - DNA, 5061 bp, Sorangium cellulosum
ttgtccagcggcacggcgcgggcgatcgtggcgccgatgacgacgtctcaggagccagcgagcagcgataccgaggtgcccagcgatccggtgctgcaggacctccgcaaggcctacgagagcgggcagctcgtcgtgttcgcgggggccggcgtctccgcggcggcggggctgccgggctggcggaggctcaccgagcagctggcggagcgcctcagggcgcgcggggcaggggagggcaccctcgcggagatcgaggagctcgcgcagaagcaccagtacatcgaggcgctgtcggcggtgaagctcgcgctcggagcgccggagttctgcgccgcggtcgaaagggccctcgacgacagcgaccgcgacgtgcccgacgtggcgtgcgtcatcgcctcgatgcggccaaggctgcgggccgtgctcacgacgagcctggatcgcctcctcgaccgggcgttcgagggggagtgggacgtcctcgcgcgggcgccggccgacatcgcgtcacgccgccggtacatcctcaagcttcacggggcgctccgcgagcgggacacgtgggtgttcacgcgcgagcagtatgaccgcgcgatcttcgcctcgccgggccttcaggccgctgtcagggcgctgtttcacgcttgcccgatcctcttcgtcggcttcggcttcgccgacgacaacctcgaccaggcgctcggcgagatccgcgccctggctggcgaacagcccccgccgcacttcgcgctcctcgtgggcgacaccctgacgccgttcaggcggcgcaagctcgaggccgcgggggtcaggatcatcgcctacgagaacccggacggcgcgcacgcccgcgtgccagcgatcctgcggtgggtcgcccggggtgccgatgggggccgcgacggcgccgcgatcggcagtcggggcaccgagcagatcgagcagagcgacttcctcgcgcgcgtcgagcgcgtctgtcgcctgaaagagccggaggacgcgacgatcgagcggcttcctgcgcctgcacccttcggcgcgctcctgcgcgtgtcggcgcgcagggggcgcatcgtgcggacataccctgtcgccgccatcgaacaacgcgtgaccgacgagatcctgagaatgtttctggagcgcgtcgacgcgccgtaccggagggatgatccggggctgatctccacgctcgtttaccgggggagtagcgcgccggaagcgctcgtccgcgcggcggagcgagcccgggtgagcgtggagagcttcattgagtaccaggggctgctcgacttcactcactacctcgagcggcagacgcagcggctcgcgagcgaccttgtctatccaccctcgctttacgtcgatcagcgcctcggcttcaaggtgggggtcgacgaggcggaggagggagacgcgctctcgaccgtgtcggagtggctggattcgccgcgcggtcggttcatcgtcatcctgggcgacttcggcacgggcaagacgttcctgctgcacgagctcgcgcggcgcctggggagcgcgggcggcccgctcgtgccggtgctcgtcgagatgcgatcgctcgagaagggtcgcacgctcgaggagctcctggcgcagcacttcgcgagggcgcggttcgagcggttccagatggagtcgttcctctacatgctgtccgaggggaggatcgtgctcctgttcgacggcttcgacgagctcgcgctgcgtgtgagcttcgaccgggcggaggagcatttcgacacgctcatccaggcggcgagcgggaacgcgaaggtcgtcgtcacgagccgaacgcagcacttcctgtccgatcggcgcgtggagacggcgctcgcgaagcgcgcgggctcgatccctggctaccggatcgcgaagctctcgccgttcacggaggaccagatacgccgcttcctcgtgaaccggctcggcggtgaggccgacgcggagcggcgcttctcgctgctcggcggcgtgaaagacctgctcgggctctccaggaacccgaggatgctggggttcatcgcgggcatcgacgagggcaggttgcaggaggtggcggccagcgacggagaggtcacgtcggcggagctctaccggctgctgctcgaccagtggctgcgcaaggaggacgagcgcgcgcacccgaggggagcgcaggtgggcctcacgctggagcagcggtggagggccgtgaccgagctcgccgtccagctctggcagcgcggcgagcgcaccgtcgacgtgagcgcgctcccctccgagatcctggccgccgcgcaggagctcgcgaagaacaagctggatcctggcgccatcgcgcacgaggtcggcgccgggacgctgctcgtgagggacgaggaagggagcttctcgttcatccatcagtcggtgccggagtggctcgtggcgcggcgcgcggccgaggaggtcgcgggcgggggcgagccggtgtcactgggcctgcgcgagatgtcggagctgatggccgacttcttctcggcgcttgctggcacggacaccgcggtgacgtgggcccgcgcggcgctcgcgtcgggctcgaaggagtccgcgaagaagaacgcgttgctcgtgctcaagcggctcggggtcgaggcgcacgtgggggtgaacctggccggccaagatctcagggggcgcgacctgtcgaggcaggacctgcggggcgccgatctcaccggtgccgacctgaccggcgcgcggctggtcgaggccgacctgcgcgacgcgtcgctcgagcgcgcggtgctcctgcgcgcggatctctcgcgggcgcgcctggagggcgcgaacctccgggacgccgagctctcgttcgcccgcctgctcggcgccgatcttcgcgacgcctcgctcgcgggcgcgcgcctgcgcgtcgccgagctcgtcggcgcccagctcagcccgggcgcgctggacggctgtctcacgaccggcgccgccatgccggagccggcgcacgtcgagccgatgatcgcgccggtctcggactccaccgccgtcgccttcagcccggacggcgtattcctcgcgtcgggtcacgtgaacggatcggtccgcatctgggacctcgcgaccggggtcgtgcgggtggtcctggtcggtcacaagggggttgtccacagcctggcgtggagcgcggacagcggcacgctcgcctcgggctccagcgccgcgacggttcgcctgtgggacgtcgcgagcggggccgttcggttcatccgccggcgtcatcgggattcggtgacgagcatcgcgtttagcccggatggttccatgctggcctcgggctcgaaagacgcgaccatccagctgtgggatgcggtgagcggcgctgtccggtacgtcatcatatgccacccgggcgcggtgcacgatatcgcctggagccctgacgggaccaccctcgcgtcggcgcacgaggacggttcggtgcggctatgggacgctatgagcggtgccgagcggggcgtcctcgccggtcaccaccgccgcgttcagagcgttgcgtggagccccgacggcgcgacgctcgcttcgggctcgtacgactcgaccatccggctctgggacgtcgcgaccggctccacccggcttgtcctcgaggagcatcagagctgggtcgtgacgctggcgtggaggccggatggatcaacgctcgcctcgggctcgtacgactcgacggtccggctgtgggatgcctcgactggcgttgctccgctcgtgctgaggggccacggggggttcgtcgctggcgtggcgtggagcgtcgacggcgcgacgctcgcctccacgtccctcgacgggacgatccggctgtgggatggctcgaccggcgccatccggctcacgctgaagaacctctcggatgtcgtctggtgtgtcgcgctcgatcgggcgggaacgatgctggctgcaggctcgcaggtgtcggggatccggctgttcgatccggtgaccggcacgatccgtcgcaagatcgaggtgcccacgcgcgtatggagcctcgctttcagccctgacggggcgacgatcgcctcgcgctccgaggcggccgcggtcaggctgtgggacgtcgcgtccggcgccgcgcggctcactctggacggcagcggcagcgtcgccctgagcctcgccttcagccccgacggcgcgacgctcgccgcgggctggcagcgctcggatctctggctgtgggacgcggtcaccggcgaccgcaggctggtcttcaaggggcacaaggccgaaatctggagcgtggccttcagccccgacggcgcgacgctcgcctctggctctggcgacgcgaccatccggctgtgggacaccgcgactgccgttgtccggcatgtgctcaaggggcatgatggccttgtccggagcgtggccttcagccccggcggcgcgatgctcgcctccggctcgttcgacgcgacggtgcggctgtgggatgcaacaaccggggcttgcttgcttgtcatcaagaagcatcggggctggatcatgagcatcgcgtggagccccgacggcacgatgctcgcctccggctcgggcgactccacggtgcggctgtgggacccgtcgacaggagcctgccgtcttgtcctcaagggccatcagagcggcgtaaccagcgtcgccttcaacgccgacgggcgcatcctcgtctccggctcgggcgactccacggtgcggctgtgggacgtggcgacgggggcatgcctcgccgtcctcctgtgcttgccggagggctgggtcgctttcacgggcgacggtcgctacaagctcggcggcgatatcgggcgcgcgttctggtacgcaatcgggctttgccggttcgagcccggcgagctcgatccttacctgcgctcgctgagccgcctcggtgaggacgatccgctgtacgagccggtcaggagacaccgctttttcgaccacgatagcgcgaccttggaggacgacagcgcgacgcttccttcgactgtaggcgatcgtctgacaaggggaggtgatccgtga

SEQ ID NO: 19973 - DNA, 2862 bp, Sorangium cellulosum
atggccgcgaccggcggcaacccggtcgcctcctggaccgggctcctccgggacggggtgagccgctgcgagcacgtggtgccaggtctgccgcgcggctgggcgagccgggtccgacaagagatcgagtccggggacatcgacgatctgctatcggccgcggagaagatctccagcaagctgaacccacagagcggggagtatcgccgctggcttcgtgagaccatcggggccctgcgcgtcacggatccttcggtgatcgaggcgctccaggccctgcgggtgccgatcgcgacgaccaactacgacggtctcatcgaggacgtcacgggcctcgctgcggtgacgtggcggcacggcagcgaggtggagcgcgttctgcgcggcgacgacccaggcgtcgttcatctccacggccactggcgggagtcggagtcggttgtcctcggcatccgctcctacgacgcggtgctcggtgacgcgcacgcgcagacgatgctacgcgcccttcgcgcgacgcggacctttctcttcgtcgggttcggcgcaggcctcgcagaccccaatttcggcgccttgctgcgctggtcgcgcggcgtgttcgccggctcggactaccgccacttccggctcgcgctggccgaggatgtcgcccgcttccaggcggagcaccagcccgaggagcgtgtcttcgtgctgccgtacgggaccacgcggaccgacctcgccagcttccttcggtccctcgtgcccggcgcgccggcgacccggccggctacctcccatgccccacccccggcgatcgccacggcgccgatgtcagcgccccgtgcggcggccgcgggcgttatcaccccgcctgcgcggcgcccgctccgcgttgtgttcggctactcgcgccgggacgacgaatatcgagacagactccatgtgcatttgacgcctctcaggcggcaagggctgatcgacacctggcacgacgcgctcatggatccgggcgtcaatgtgcgcgcggccgtgaacgaccggttcgacgccgcggacatcgtgctgctgctcatcagcgcctcgttcctggcctcggacttctcctatggcgacgtcatgcagcgggtgctcgcgcggcataacgccggggagaccagggtcgtaccgatcctcctcagcccctgcgactggcagggctcgccgtatggagaactgcaggccctcccgcggaacgcgcgcccgatcacctcctggacggatcacgacgaggccttcctcgacgtcgtccgtagcatcaggctcctcgtcgaggagctggcagccaagctcaccatggtcacctcgacgagcaccgttccgcaggccacgccggaaagggcctaccagctgttcgacgtcttcatgaaatcgggcatgccaaccgtcacgttcgtggccaccaagcggtttcaggatctgaagctcgccctcgcccagccggggcgtggcgtcgtcatcgaaggcccgtccggcatcggcaagacgaccgcgctccggcaggccatcaagcaactccgtgaggaggggcacctcgtggcgggcggcagcgctcccgagatactgagcgcgcggaagcaagccgatgttgcccgcctcgcgaccatcgagcagtggcaccgcggcacggtcgccatcgacgactttcatcgcctcccgcgggagctcctccagcgaatggcggattacctgaagtcgctcgccgacgaggacgccgcggatcgcaagctggtcgtcgtcggcatcccgaagaccggccaagcgctcattgatctcgcgttcgacctggccaaccgaatcgaggtcatcacattcaaccgggtcgatagcgcgctcgttcagaagatgatcgtgcagggcgagcgagcgctcaacgtgcgtttcgatcgtcgtgcggagatcatcctggcgtctgacggcagcctgaacatcgcccagtttctctgcttctacttgtgtcaggcggagagcgtcttcacgacccggagtaagaccgccaccgtgcgttgcgacatcggcgacgccataaggaacgtgctcaccgcgctctcgccgaagttccgcgagccgatgcggcgcttcgcacggatggcggggccccaggaccgcgtctgcgtccggctgctcgaggagctccggcgcagcgacgaaggctccgtatccctgctcatgttgaaggacacggccccagcgctcgccacgccgctgcgccgcttcgaagaggagcaatggatgcagacgctccaggcgagctacccggagctggagatgttcctcttctacgatccgagcatgcaccggatcaccatcgatgatccgcagctcgcgttctacctgcgcagcgtccatctcgaggagatcgcccgagaggccggcgtgctgaagcagcagggcggcagccggatcttcatctcgtacgtcctcagtgacctgcgatggctcgagcgcctgcaggtacacctcggtcccctgactaaacgtgggctggtcctcgatatctgggaggagagcaggctgacccgacacgctggcgcttacagcgagcttcgccaggtgattgaggctgccgcgatgtcgatcgtgctcgtcagcgcggattacctggtgtccgagttctcagggaacccggaccggggagggatcgatgtcctgctcggcgtggcggccgagaacggcgccagcgtgcgtcctgtcgtgctgaagccgtgcttgttgaccggatcggggctcgatcgctttcccgtcctcaaccccgatgccgcgctcagcgagatgggggagagcgctgtcgagagcacgctggtgaggctggctgaggagatcgcgcgcctcttgtga

SEQ ID NO: 19974 - DNA, 1449 bp, Acinetobacter baumannii 532279
atgtttgaacatgaacaaaaaattatgatcgatcgtattgtaaaagaattagaagaaaataattttgcaatatttgcaggtgctggcctatcagctcctgcaggatacgtaaattggaaagaactattacgtccattatctattgagttaaacttagatattgataaagaaactgatttagtttcattagctcagtattatgtaaatgaaaatcatggtcgtaatagattaactgaaagattaattgatgaggttggggtggctcgtgaacctacaccaaatcacaaaattttagctaaattgccaatatcaacatattggacaactaattatgatgatttaattgaaaaagctttagataatgagggaaaaatagcagataaaaaatttactaaaaatcatttatctcaaactaaaaaaggacgatctgctgttgtttacaaaatgcatggtgatgctagtctaccggatcaagcaattattactaaagatcaatacgaatcctacccattacactttgcaccatttgtaacagctttatctggagatttggtttcaaaaacgttcttatttctaggatttagttttaacgatccaaatttagattatattcttagtagaataagaattcattttgaacaaaatcaaagacaacattattgcatttttagaaaagttaatcgtgctgactacagtaatgatgaagatttctcatataatcttttaaagcagcagtttgttattaaagaccttgctcgttttagtatcaaagttgtattaattgatgcatggaatgatctcactcgcatattagaagaaattacaaaaagatttcgatgtaaaaatgtattcttgtcaggtagtgcccatgaatttggttcatggggtcaaacagcaacggaattgttcctatccaaacttggagaagttttaatccaagaaggttttaaaattacatcaggtttaggtttgggtattggtaatgcatttattagtggtgcaattaaagaaatctataatagaaaatatacaaaaattgatgactatttaacaatgaaagtatttcctcaatttgtagctgatccaacagaaagaaagaatatttggacagcatggagaaaagatttattaagtcagacaggaattgctcttttctttatgggaaataaaattattaaagatcctgaatcaggcaaacaaactatagtgttggcagatggtatggatgaagaatttcatatagcacatgaattaggtttaaaactaataccaattggtgcgagtggatataaagcaaaagaattatttaatcagataatttcagacttcgatcattattacccaaattcctcaccaaaatttcgtgaagcttttgaaaaattaaatgaagaagtagatgaaccagttaagctgttatcaaaaatccatgatgtaattaagttaatttaa

SEQ ID NO: 19975 - DNA, 600 bp, Acinetobacter baumannii 532279
atggcacgtagagcattcttttcatttcattatcaaaatgatatttggcgagtttggaacgttaaaaactcttgggtagttagtggtagtagagaagcatatggcttttttgatggaagcgttattgaaaaaaagaaaagagagtccgatgattcacttaaacgttttcttagagaaggtttagataacacctcagtaacatgtattcttgcaggtcaatacactcatcaaagaagatgggttagatatgaaattgcacaaagtatcattaagggcaatggtttattatctgtttttattcaccaattaaaagacaaaaatggatatatttcaagaaaagggattaatccacttgatgaaatgggtatatatcttgctaacggatcttattacttagctgaatggcatgataacaaatggatcaaataccgagattttctcaatccaattactttgaactctagatttacaccaaaaccaaattcgaactcagtagtacgactttcaagtttttttaaaacgtatgactttataagtaataatggaagattgttattatcttcatggatcgaaaatgctgcaaatcaaatgggaaaataa

SEQ ID NO: 19976 - DNA, 498 bp, Acinetobacter baumannii 532279
atggctagaaaagttttttttagttttcattatcaaccggataattggagagtatctcaagtaagaaatattggtgtaattgaaggcaatcaaccagctaaagataatgattgggaaactgttgtaggtggtggtgatacccaaattaaacaatggatatctaaccaaatggctgggagaacttgtacagtgattcttgctggcaaagacacagctaatagaaagtggattaatcatgaaattgtagagtcttggaatcaaggaaaaggtgttgttgtaatttacattcataatctaaagaactcacaaggtgaacaatcaaataaaggacaaaatcctttagattacataacgcataatcctacagggaaaaaactatccgaaattgcaaaagcttatgacccaccttattcaactagtcagtttgtctatgaatatattaaggataatattgatagctggatagaagaagctattaaaattaggagtgtaaattaa

SEQ ID NO: 19977 - DNA, 501 bp, Acinetobacter baumannii 532279
atggctatttctctagacaccttgacctataattctacacgttttagtaggagtgcgaatagctacacttttaatcagaggtctaaaaaggcctttttatgccatagtcatattgatgctcaatatgtcaaaggatttattcagttattaaaagatgaaaatattgatgtttatgttgattggcaagatagctctatgcccgagactactaatcgagaaacagcggttaaaattcaacagaaaattcaagaagctgattatttcttttttctcgcaacaccaaactctgttaaatcaagatggtgtccttgggaaattggttatgccgatggagtcaaaaaatatgagtctatttttattatcccaactgtagaccgtcacggtatttattatggaaatgaatatttgcagttatatcaaaaaattgaccgttcaactacgggtaacttatgtttctggaaaccacatgagcaatacggtaaatttgtatcttctttataa

SEQ ID NO: 19978 - DNA, 1218 bp, Acinetobacter baumannii 532279
atggatcgaaaatgctgcaaatcaaatgggaaaataattttgtctgaaaattactatcaaattatattgcttggaaaagttgatgaacggcttacaagtattcaaaaaagtcttacggatagatttattgatctgaaaattaatccacgttttatcaaatttattcatagtgataattattcatctatagatcctaaatatccaacaattgcaatttattttggtggtaataaatcagacattttacacttatcaaatcttattgaagactcaatagtcattattcctatagtccaaagtaatgaactagttcccaaagaattgccaaaaataattagccatataaatgctttaccgattaatcaaacaaataataatacggaacgattagtttctattatctgtgaaaattttagatttctaaggaaggagcgaaaagttttcattagttatagacgtattgattcccaaggagcagctaacaaactctatgacatattagatgcaaatggtttcgatgttttcctagacacacgttctgttccacctgcatataattttcaagatcaattatggcatcgtatgactgactcagatgcaattatattattagatacaccacaatttagaactagtagatggaccaaagatgagctaatgtttgctaacgaaaataatattcacattttacatgttctgtggcctcagcaaaaggaagaagatgttgcttcatttaacgagtttattacactaacacctagagactttaaaatgaaaagccttggtagaaaaggcattccatatactgggaaaaaaattacagaaaaaacacttaggaatattgtaataaagaccgaacagctcagggcaagagcaatttctcttagatataaatatctcattgataacttttgtgatgctgctagagatgcaggatacaatccaaatgtacaaatagatcaatggatttctatagctgattggaaagacaaaggattagctgtaataccagctataggtgtccctacagcagataggattaatgatatttataatgctgtatcaaactcaaaattcaaaaacagtgaaaaatggattatttatgataatcgaggaattttaaaacaatggttagatcatttagattggttggatgaacatcttccaattaaagcagtgaatatgactaaagcctcttcattattagaaaataagtga

SEQ ID NO: 19979 - DNA, 786 bp, Acinetobacter baumannii 532279
atgtataaaagtattcaaattgaagattttgacttctctatatttccttatattactgacagaaaagtaaatacatataaagaaagaaataaaaatacactaatcaatattcaagactacttacttaataaaaaaaatacattaagtgttgaaaaaatatatgaaaaattatttgtaaatgtcaaacctgatatatttctatcgcactcacatgctgatgaagatgatgttatccgcttggcaattttaatagaagaagagctaaatttaaaagtatttattgactcttgtatttggggggatgcatttaaacttttaagagaaattgataaatcatattgtttgaatggcagtaattttaattatcgaaagcgtaattatacaacttcaaatatattcatgattcttaactcagctttaaacagagtaatttataattgtgaagcatttatttttttaggcacagataattcaattcctattaatgaagtgtttgaaaataaaaaatatctctcatccccatggatttactcggaacttcaatttgcaaaattagtccgtagaaccccaaaaccaagacaaatttcaattgaaagtagagatcaagcattagctgaatcactagcttttgataatgatctaaatttcgcttatccattaccagaaacagatgctactttaagtaatcaaaaattaaaaaaatggattgaagcctaccaatattcctctacaaaccgaaatattcatcctttagatattctttataaagctatctcatatcgataa

SEQ ID NO: 19980 - DNA, 1305 bp, Vibrio fortis
atggatcacttttacgaactatcctttgccctagaatccaattcgttgtgtttctttgtaggtacaggtttttcaatgcatgtaaccgatggtaatgcaccaaactggctatcactattaaaagatgccacattaggcgttgaaggcggaaatgagctcattgagcagttgtttccagagaataagccgataatgtcactggaagagtgtgctagcgttatacaggctaaaatgcatactcaagataagtgccttcatgctgaaatagctaaaatcatcaatagcttgaaaattactgataacaagttgaaagcattcgactttattcggaaatacacgaacgtaaagtatatcacgaccaattacgatggattaatcgaaacgcaaattctgaaaggtatcccttcaacctcattttcgattggttacccaatccatcgacaatcaaaaggtgttcacgtttatcatgtacatggttcaattaagtatccgaagaagatggttgtaacggcagatgattactttcgatttataaatagccctgactatttttcgcataaggttgaaacgctttttcaggaaaatagtgttgtgatcattggttactcgctaggtgatattaactttaagtccatacttaataaacatagaagtaatcgtcatcatgatataaacaggcagcacttattttatttatctcgttctccaattgatcagcatatcaaagattattacgaccgagtgtatggactacgagttattgataatttgggtattgacgaattcttccagtgtctggaagacacttacaacgtagttaagccagatgtaaacctcttcaaagacttcctttatccagtgctaaatggagatgcgagccttactgagagttacctaaagaaaaatgattcattttttgaaattatagcgatgttgacggctaatggaataattgtgtctcaccctacaatagtagagtttctagccgatgtacttgaaagaaaaagggttttgactacagctaatggtgcatggggacaatatgttcatttggcagggtggttaattcacattggctcaattatggacattaaggatacgccgttagaagaaacatacttaagtgctgtgaaacgctcttttaatactatgtccaaaggaatggtaatggggtgttcgtggcacgcattcaataaatggaagtctggctggtatcacctgacttatgataaccgtgttatggtatctaaatacatgcgtaataacgatgttgacgaagatggattggaagtcatcaatcaataa

SEQ ID NO: 19981 - DNA, 816 bp, Vibrio fortis
atggaacataaatcgtatctaattgctctagattatggtgatcgagcaaaagaaagggtgtttgtgggggatgtgttagataagtttgacaatgatacgctcgtcggggcaatgctttacgtgaacaataacatttacgctttatcttgccacttgtttctcaattttgaaaaagattctgaagtttttgaagaatggataaacattcattacccagagaagcatcgaatttataatctattttctcgtgatttaatgaaagctatcggtaagcgaagttgcaatggtatgggactattagatagtgatatgcttgagtaccaaatgccttcaagtacaaatgaaatatttcttcatcctgatcgttcaatttacgatgaaactttccctccggtgttaaaagaaatgacaaattattcagtattcttatcacactccagtgttgacaaggcattagtagatacgttttttaatgaacttcaaaaatcagaagttgaagcttggttcgatagatatgaaatatcgccgggtgatagcataactgacaaaattaatgatggtttagataaaagtaaagtagggcttctatttctttccaaaagctttattagtggaaagtccggttggacgatgaatgaagcgaattactttttccagaaacgtatgagacacagtgacaagaatttcatcgtgataaatatagatctcgaacatgatgaaatgcccccattgttacaagactatctatatctgaactacgacgatcctgaatgtgtgactaaaattgtaaatgagctccgaaaattaaatacttag

SEQ ID NO: 19982 - DNA, 1449 bp, Sinorhizobium americanum CCGM7
atggttggtaatggtcgaacgcgttttcttcgtgaatttccggcctcgttgcacgaagggactggtgccatttttgtcggcgctggcgtctcgatggcggcgggctatccctcctggtcaaagttgctgaccgaaataggcgaggagatcggcgtaaactcccgagacattcaggatctcgccgccttggcgcaatggcacatccgtgagacagggaatgcgacgggtgtgcgcaatgtgatcaagcgcgaaatcggcttcgaccggccgcttccggaaaccgttagaacccttgctcgccttcctgtccgccatatctggaccacgaactacgaccgactgattgaacgggcctttgcggagattagtcggccgttggatccggtcgccggcgcgaaggacctcgcgcttaaggtgacgcccggagcaacccgactctacaaaatgcatggttccgtcgacaggctggatgatatcgtcatctcgacggacgattatgagctgtttcgcacgaagcggggagcgttccttccgctactgcaggcccatctgagtagcatgtccatgcttttcgtcggcctcagcttaaccgatcccaatgtccgtcatgtcctgtcgctcattagagaaagcttcaccgacgcgccgccggagcatttcgcgatccttaagccgccgaaagcggaggatttcacaaacgacgacgagttcaatgcccgtcttgctcaacacaaactttgggcgaaggatctcagccgatatggccttgttgcggttgaagtcgatgattacgatgaagtccccgaactgctgcgcgaggtcgaaaggcgagtcgccgctaagcgtgtttgggtcagcgggagctggccactggaagacggcaattcattcaccccccgagtctatgcagtggctgaagagattggccgcctgatcggcaagacccatcgggatctggtcacaggcacgggcctgcttgtcggtccagctgtcgtttccgggtttatggacgcgcttcgggaaggtggcggttgggatatcgaccgtaggcttatcgcccggccgtttcctcaaggagtctcggggcgagcggtggaccgcgcccaatggacggcccttcgaactgagatggctcgtttggcgggcgtgacaatctttctgggtggcttgaaaactaacaaaggatcccccgttgtcgccgacggagtgatggaagaattcgcactagcacagacagcaggctccttcgttctacccgttggagcattcggcggtgctgccgaacagatcgccaaaaaaatgatcggagccagcgctcccccagacggcccgaaagcctccaggccaaaagatgacgaactcattgccctcttgaacccttcggctagcgacaaacagattctcgctacggttcgcgcgatcctcgaccgactcgccaaggtcgcatag

SEQ ID NO: 19983 - DNA, 477 bp, Sinorhizobium americanum CCGM7
atggcgcgcaaagtgtttttcagctttcattatgatcgtgacgttcaccgtgtcatgcaagtaagaaattcttggatctttcggcctgaaggcgaagcttcccctttttttgataaggccgagtttgaacaggtaaagaaacgtgcgggcggtatcgagaaatggattgaggagcagcttgctgggacgtcagttactgtagtcctctacggtgctgaaacctatcatcgtccttgggtacgtcacgagatcaagcgcagctatgagcttcgtaaagggctactcgctatcgacatccataacatcaagcatccacagaacggagcggacgttcagggtctcaatccgctttcttatttcaatgtcaaccagacacctttgaacacgatgtaccgccagtacaattgggttaccgacaacggctatgccaacatcagttcctggatcgaagccgcggcaaacgctgtagggcgatag

SEQ ID NO: 19984 - DNA, 486 bp, Sinorhizobium americanum CCGM7
gtgtggtacacgcctgaacaagtgcaggcgctcatgccggttcgcgagaacgtcgagaacctagcggcgtcgcagcctgaccttcgagacgtgtttctctgtcacgcgtgggatgacaggcagggctccgctaaggaactgcatgatctgctcgaagcgcgcggtgttcgcgtgtggttcagcgagaaggaccttggcctcggggtgccgatgatgcgggcgatcgacaagggcttggtgaattcgcgtgtcggtatcgttttggtgaccccggctatgttgcggcgcctcccggcagaaggcatcgcagacaaagagctttcggcgctactccggcgagagcggctcgtcccggttgtccacggaaccacctatgaagagcttgagcgggtcagcctcctgctagcctcccgagccgggctgaataccgccgaagagtcgatggcggaagtcgccaccaaaatcgccgaactggtcgctacttag

SEQ ID NO: 19985 - DNA, 1422 bp, Bordetella bronchiseptica MBORD675; identical to SEQ ID NO: 19949

SEQ ID NO: 19986 - DNA, 441 bp, Bordetella bronchiseptica MBORD675; identical to SEQ ID NO: 19950

SEQ ID NO: 19987 - DNA, 1431 bp, Peptoniphilus indolicus ATCC 29427
atgagggaggtgttttttattaaaggtgaagtatccaaaaaagatttgattagagaaattgaaaaagctattaaaagtgatgaattaggagcatttattggagcaggattatcaattcctgctgggttttgtagttggaaagaacttctcagagaaccagcagaagagattggattagatgttgaaaaagaaaatgatttggttaatttggctcagtattattctaattcgaaaaagagaacatcaatagatgatcttatcaaaggtcaattttctcaattagtaaaacccactgaaaatcataaattattatcacagttacccatttcaactttttggacaacaaattatgataagttaatagaaaaggctttagaaaccaatatgaaaaagccttatgtaaaaacaaaggatgaacaactaagaggtacaaattataattttgatgcaatagtatacaaattgcatggcgatgtagaatctcctgaagatgcagtacttacaagaagtgattatgaagaatttggatataacaaaagaaaattattcagagaggttttagagggcgatttgcttaccaagacatttctatttttaggatttagctttgaagatccaaactttaactatgtaataggaagattaagggtattactcgacgaaaagaatacaagaaaacattattgtattatgaaaagagttcaagatactgatgaggattatgagtacaaaaaagtaagacaagagctgcaaatagaagatataaataggtatggtatttttacctatttggtagatgactataatgaaattactgacatattaagtatacttgtagatagatatcgaagaaaaacaatatttgtatcgggtagtgcatattgttatccgggttattctcatgaaactggtaaaaattttattcacaagctatcttttgaactatcaaagaatggttatcgtattgtgaatggatatggcaaaggtgtaggtgaatttatattaaatggtgtcgcagattattgcttgaatcataattccaaaataagtgattttttgacgcttatgcctttcccgcaaaatagctcattgggaatagatttagataagttatataaagaaaatagagagcaaatgattgataattgcggaatcgctatattcatttttggaaacaaagaaacagaaaatattgcaagtggagttatagatgaatttgagttatgtaaaaagcatgggttagtatgtttaccaattgaacatactggtgggtcagctaaagaaatattcaataaaataactcgagaaattacagataaaaatacaataagtgcaattgaacaggcaaataaacaatgcgatggcgatattgatatgtctgttaaaaacatagttcaagcagttaaaatattaaacaaggaggagctttaa

SEQ ID NO: 19988 - DNA, 300 bp, Peptoniphilus indolicus ATCC 29427
ttgattggagaaaaaacagcaaacagaaaatggataaattatgaaataaaaaaagcatatgagttaaataaaggaattgtaggaatctatattcacaaactgaaaaacgcaaagggtgaacaagatagtaaaggttctaatccttttgattactataatataagcggagtatcaatgtctaaatatgttaaatgttttgagtccaattggtcagcaagtgataatgtttataatgacatcaaggataacatagaagatttgatagaatatggtattgaacacaaaccatcaacttggtaa

SEQ ID NO: 19989 - DNA, 1527 bp, Rhodococcus opacus PD630
atgaaagagagcagagaaccctccgagccaaccggaggcaattctggacatgtcttcgtggttcgaggtcggatcgagcttgttgcctgggacgccgtcatcgttcccacgagcaacctattctggccgcgagagatttggtggcccgccctaggaatcacgcggttcgacgcatcagcagtgtcaggtgcagggcgtgttcggtcgtttgcaaccgatgatggtcgtcctgcttggctgctcgacgttgcacgatacaagaacagctctgtcggatggttgatcgacggactgtgcgcagctctgagtgcgattgctgctcatcgtccgactccgggaggcggccgagtgaagccattggtagctctcccgactctcggtgttggccagggtgggtacggtggtgtccgcggggaagtagtccaaacgttgctcgccacgaccggagcattcgccgcagagaatgatatcgacgtcgtctttgtcgtggccgatgcggccgactacgcagcgtttcagtctctccgccgtgagcgagcgcaaacaggtgccacggagacgttgatcgacgatctcgctacgaagatcagacgaggagaagtttcgctcctacttggggcgggcgtgagcattccggcgggactcccgacctggagccaactcctcggcacgctaaaggcggaaatgctgcaggatatatcgcacgacgatttcgaaagcctgagtgtgcttgatcgtgcacaacttctgtctaagtcggcgtcaccggggactctgggtgagcgtgtcgcgaaggtcgcgggagcggcattgcgaccgacactggcacactgtctgctggcatcgctaaagactgcgaaggtcgtgacgacgaactatgacaccctctatgaggatgcattcaaggccgcccatggtgacgacgctatatcggtacttccgcgcgaggacgcggacgccgaacggtcatgggtattgaagatgcatggagacgtggcggaccccgccagcatcgtcttgagccggcgggatttcgtgcggtatgacgcagagcggcgtccactcgggtcgattgttcagtccctcatggcaaccggccacttgttggtgataggtgcgtcgatgaccgatgacaatgtactcagactggcacacgaggtgctagcgctaaatgaacgcaacaatcgacatcgcacgttgggcacagttatcacattgcgcagcgacgagattcgaagcgctttatggcgacacgatttcgactatgtcggtgtttcgacctcgctcgacgacgccacagctgcccgtgatctcgagatctttctcgaccgtattgccatgtccgctagcgacgaggcgcccttcctgttggatgcgcgttatcgcgagctcctcgatgacgaggaggttgacttagccgctacgctgcgagcgtccgcccagaaagtacgtgcactatcgagtaaaggccgtgatcggtggcgtatgctcgagacgattcttgagggactaggggccggccagtag

SEQ ID NO: 19990 - DNA, 1134 bp, Rhodococcus opacus PD630; identical to SEQ ID NO: 18873

SEQ ID NO: 19991 - DNA, 1464 bp, Hungatella hathewayi WAL-18680
atggctgaagtttatttatctaataaaatggaggaactagaaaaatttctaaatattgtttcggaagccattttacagggaaatatgagcctgtttttgggggccggctcttcaatgcagtatcaagctcctagttggaatgagttaatcgataatatagatggcaactataacgctggaagtaatattgacaaggctcaatatgctgaactgaaaggtgttgatatcaaaacagaaatttcaaagaaaacagcgcttataaagtttgataaacagaataaaaatacatatctaaactatcttttaaattttgactataaaagtttatggacaactaattatgaccttattatagaaaaagttttggaacaaaaagcgaaagcctataaagttatatataaatatagccattttcaagacttatcttatccgggcggatgttttttatttaaaattaacggcagctgtgatgaccccaaaactattattgttactaaagaagattttattaattatagaaaatctcatgaagcatatttaattttgttaaaaagagaattattgtgccagaatttcttatttttaggttgttcatttgaagatgatatacttcgaatatgtattaaagacatattaaactgtattgaaaatagcgaagaaaattatgtgtcagagcattatgcaattatagtggaagaaaaagctgaaaagttagagtatatttcaaaggatttatcaattcattacagtattaaatgcctgacagttcaaaatgtaaatcaggcatataaaattgcatatggaatatcctgtaaagttaaatatggttccgtatttgtttccggtgcaaaaaaatatgaaaggcattccgatgaagaaaactatggaaaaatagtatgtcagaatatcgttaatgcctttatgcagtttaaagatttcccttttaaatttatttcgggcatgggcatgagcattggccattttatatgtggcacgataaaacaaaattgcaaggaaaaaaatcttaatcttaatcgatatttacagatggagcctttcccatttaccagcaaaaatgataatgataaacatcgggagaatatcataaataaagccggaatatttttgtttgtatttggtgatttagatgaagcatctgatggtattcaaaatagcgggatatggagagaatatattttagcaaagaaaaataaagaaaatatattaattccattaccgtgtggaattgactccatttcttatcggatatttgaagaagaaaagaaggaagaagattcattttcggcaaaatattgtgatttattacaaaattttgattataaagccaccaacacagatttttatgatgctttggtagataaaattattttaacagtcagagaaaaaatggataacattttagatgatattgaatcctctttaaaaatagtggaagcactttag

SEQ ID NO: 19992 - DNA, 720 bp, Hungatella hathewayi WAL-18680
atgaacctatttctttctttttctggtgaagcaagagaaacttttgcagtaaagtttttaaacttctttaacaattatgggatacactgctggtatgaccagcatgaacttttcctgggagataatttaaagaattccattatcaaagaaggtgtagaaactgcaaattattgtatcattatcataaacaaatcctttctttcccggccctggccttgtgaagaagccaaaagattatatgaaagcctggaaagcagaaaacataacgctattttccctatattattagatatcgaaaaagaggaagttagaaattctgaattggattttttacttaatataaaatatcaatttttacataccggcgagagtattgataagataggattacaaattttaaatagaatttttcacgacatagctatgcagactaaatttgccacactcaatgacgctctaaattattttaaacgattgacattaacaaatagtatagacatctataatgcattaaatgtggtgaataattttgatcatacaaattataaagaacgaacaattattttaatatgtttaactaacttattttttaataatccttataaaaaggcattaaatagaatatcttataccatttatgacaataaagatgtctcatttgatatgtataaaatcgtagaatccatttttttaattaatgcttctattttttcctgttaa

SEQ ID NO: 19993 - DNA, 1446 bp, Odoribacter laneus YIT 12061
atgaaagctgaatttgaatctttcgttagagatttcgttaatcatctacgggataataatgttgcaatatttgcaggtgcaggactttcgaaggctgcaggttatgtcaattggaaagaattattagaagaaatagcagaagatgttgggttaaaaatagagctggaagatgatttgatatctttggctcaatatcatgtaaatcaaaataatagacataaaataaatcagaaaatattagatgaatttgttgaagggagcaaccctactgaaaatcatgtaatattaagtagattaccaattgcaacatattggactacaaattacgataagttattagaagacagtttagccaaaaatcacaaaagatatgatgttaaaataagagaaacagattttcatcattcaatacacagaagggatgctgtcatttataaaatgcatggcgatgtaagcaacccctcagaggccgtaattactaaagaggattatgagagatactatttatatcataattcgtttttaacagcgttaaatggagacttgactactaaaacctttctatttctcggctttagctttacagaccctaacataacatatataattagccgtcttaataatgttattgataagaagtcaagtaggcaacattatttatttctaaaaagacctattattggtgatagtaatataacaaatgaggctgaattagactatgcgaaaacaaaacaaagacttctgattgatgatttaaaaataagatataatataaaggctttgttgattgatgaattctctgaaattaccgatgtcttaaaagagatagagagaagatataaaaagcaaacaattttcatatctggcagttcatgtggagagtatgggagatttggagaaaaacgagctaccgatttcatacataatctaactaagcagattatacaaaaatcttatacaatcgtaaatggtttcggtgttggcgttggaagtgcagtcattaatggagctcttgatgcaattgattctgaacctcaaaaattcagcgactcacaattagtgatgaaaccttttccacaatttgtacctgaaggaaaaaatattcaagagctatgggaagcttatcgtaaaaggattattccaatagcaggtattgctatttttgtttttgggaataaaaaagatactactggaaatgtcgtacttgctgacggtgtcaaaaaggaatttaatattgctatagaaaatggagtgattccaatacctattgcagcaactggttacatgagtaaagagatatttgatattatttcagaagactcgtctaagtatctcgctccttataactggctgtggaaagaattatgtcaaatggactcagatgtaatatcagaggatgagataatagacaaagttattaatataattttaaaattaaacaaataa

SEQ ID NO: 19994 - DNA, 492 bp, Odoribacter laneus YIT 12061
atgggaagaagagtatttactagttttcattatattccagataactggcgagctagtcagattaggaatatgggtaaaattgaaggaaacggtattgtttctgcaaataaatgggaagaggttaccaaaggggggaataaagctatcgaaaaatggatagatgacaacatgagtggtaaatcttgtgttattgttttcgttggtgaaaatactgcaaatagaaaatggatagattatgagataaaaaaagcatgggaagaaggacgtggtatttttggaatatatattcataatctaaaagatcgagatggcaatcaagccaataaaggtgataatccatttgatggttttactatcaatggaaaatcaatgtcatctattgtaaaatgctacaatccaccatataaaactagtacaaatgtttatgagtacatagaaaataatattgaagattggattgaagaagcaatagagattcgtaataaatattag

SEQ ID NO: 19995 - DNA, 546 bp, Odoribacter laneus YIT 12061
atggctattattaccaaaaacaggctctctgaaatatcaaataataaatcagggggatacacacaaaaatcaattattctaaatgaatcaagaagctatagtagaggtttctataaaacatctatatttttatcacatagtcatcttgatagagattatataactgatactgttgtttttctcagaaaaatgggagtaaacgtctatatagattggatggatgataatatgccgaaagaaactagcggtaaaactgcagatattttaaaacaaaaaataaaagagaatgataaatttatatttctagcaacgaataattctatatcctcaaaatggtgtaattgggaaataggctttggcgatgcacataaatatatagatagaattgcactacttcctttagctgacaactatacagagtggaaaggaaatgagtatctccaaatctaccctcatattgttgaatcagattatacaaatgattattacaaagttattttccctagtggaaaggaaatgagtctttatgaatggttaaaccgttaa

SEQ ID NO: 19996 - DNA, 1233 bp, Helcococcus kunzii ATCC 51366
ttggttagcttagctcagtattatgctaattcaaagaagagaacatcaatagatgacttgatcaaagtgcaattttctcaattactaaaacctactgataatcataaactattatcacagttaccgatttccactttttggacgactaattatgataagttaattgaaaaagctttagaagataatatgaaaaagccttatgtaaaaacaacagatgagcaattaagaggtacaaatcatgattttgatgcaatcgtttataaactacacggagatgtagaaactcctgaagatgcagtacttacaagaagtgattatgaagaatttggatataacaaaagaaagttattcagagaagttttagagggagatttgcttaccgagacatttctatttttaggatttagttttgaagatccaaactttaactatgtaattggaagattaagggtattgctagatgaaaagaatacaagaaaacattattgtattatgaaaaggatccaagataccgatgaggattatgaatacaaaaaagcaagacaggagctacaaattgaagatctaaatagatatggtatttttacatatttagtaaataaatatgatgaaatcactgaaatattaagtactcttgttgatagatttagaaggaaaacaatatttatatcgggtagtgcgtactcctattcgacttattctcaggaaattggagaaaattttattcataaactatcttttgaactatcaaaaaatggttatcatattgtgaatggatatggtaaaggtgtcggtgaatttgtattaaatggagttgcagattattgtttggctcataagtccaaaataaatgattttttaacgcttatgccttttcctcaaaatagttcattagatattgatttagataagctatatatagaaaatagagagcagatgattgaaaattgtggtatcgctatattcatttttggaaataaagaaacagaagatattgcacatggagtgatggatgaatttgagttatgtaaaaagcatggattagtatgtttgcctattgaacatactggtggggcagctaaagaaatatataataaaacaactcaagaaatttcagatgaaaatataataagtgcaattgaacaggcaaataaacaatgcgatggcgatatagatatgtctattaaaaacatagtgcaagcagttaaaatattaaataaggaggagttttaa

SEQ ID NO: 19997 - DNA, 498 bp, Helcococcus kunzii ATCC 51366
atggcaaaaagacaggtgttttttagctttcattacgacaatgataattggagggcaggacaggttcgcaacatggggaaagtagacagtagttctaccttttcagataatgactgggaggaagtaaaagaaaaaactgaaagcaaaattaaagaatggattgatgaacagttaaacaagcgttcatgtttagttgtcttgattggagaagaaacagcaaatagaaaatggataaattatgaaataaaaaaagcgtacgagttaaacaaaggtattgttggaatttatatccacaagttggagaatgcattgggagagcaagatgataagggcaacaatccttttgattatttaacattagaaggtgaaaaactttcaaaatatgttaaatgttttgattctgtatacttatcaagcaaaaatgtttatagcgatattaaagataatattgaagatttaattgagtatggaatagaacataaaccatcaacttggtaa

SEQ ID NO: 19998 - DNA, 1416 bp, Bacteroides dorei CL02T00C15
atgccaatacaaaaggatgttttcataaaaaattatcttaaagcacttaataatggcgatgctgctgtttttgcaggagctggattgtctgcatcaagtggatgtgttaattggaaacaattattaaaagaaattgccgaggaattagaacttgatattgaaaaggaatccgatttggttgcagtagctcagtattattataatagaagtggtaataatcgtgcaagattaaatgagataattaaagatgcgttccagactggtaagttgccaaatgataatcatcatatacttgctcgcctaccgatttctacatattggactactaattatgacaaactgatagagaaatcattagagaataacggcaaaatatgtgatgttaaagtttgttgtgcaaatctgactacaacattaaaaggacgtgatgctgtagtttataaaatgcatggagatatagatcgtcctgaagaatctgtattaattcgagatgattatgaatcttatcatcatgagaaaactccttttataaatgcattgtctggagatttaatgactaaaacatttatgtttattggttttagttttacagatcctaatttctcgtatatatgcgcccacctaagagcgcatttgaaaggaaatatgagggaacattattgcttcttaaaagatgtttctgagactgattatcctgacagagatcaatttgaatatgaaaaaagaaaattgtcatatttcatagatgatttaaaacgctttaacatcaaaaccgtacttattaaagaatactcggagataacggaaatattacagagcattaaaagaagatataatagtcgaaccgtgtatatatctggggcagcagcggaatatgagcctgatggtaaagaggcgtatgaagaatttataagtaaattaagtggtcttttaatccataaaggatttaaaatagtttcaggatatggtttaggtgtgggtagtgcggtaattagtggtgctctttctgaaatatatcacaatcagaaaaaatcgctgacagaccaattgattctgaggccttttccacagggtgatgatgcaaaagcaatgtgggaagcttatagacaagacatgatatcatatagtggtatatcaatttttttgttgggtaataagaaggaaaatggaattactgttttatctaatggaatgtggtcagaatatgaaatttcaaaaaaacagggcaatttcctaataccaattggcagaacaggatatatatctaaagaattgtggagagagttactagacgaaaaacaagatgaccatactttcgacatttatcgttgtgatattgaatctttgggcgatgataccaaaacattagacgaagtgatggaaatagtaatagagttaataaaaaaagtaaaatag

SEQ ID NO: 19999 - DNA, 612 bp, Bacteroides dorei CL02T00C15
atggcacataaaacatttatttcatataaatatagcgaagcgcaagaacttcgtgataggataataaaggcttttggggatgatgcgagctactatcaaggagaaacaagtgcttcacctgatttaacagatacatctactgagaatataaagaagaatctaaaagatatgatgtacgatacatctgtaacgattgtaattgtttctccgcatataaaagaaagtaagtggattgattgggagattgagtattgtcttaagaatataacaagaaaaaatagaacatctcacactaatggaattgttggagtcataatgaaagtaaatggagggtatgattggtttaagtatacctcaactaaatcagatgggtgttctgtttctaattattatgattcaaaggtttatgatattattaataataatagatataatcagaaccccaaagtgtattcttgtaatcaatgcaaatgtgtaagtgcattgacagggtcttatatcgcttttgttgaagaagatgaattcttatcaaatcctaaaaagtatattgataatgcctatgataaaagtgaaaacgatgcagatgggtacgatttaacaaagcagcgatag

SEQ ID NO: 20000 - DNA, 549 bp, Bacteroides dorei CL02T00C15
atgacaaaaaggcaagtattttacagctttcattttaagaatgattcatggagagctgggcaggttcgtaacattggagttgtagaaggtaatactccggtttcttccaatgattgggaggaagtaaagcgtaaaggaaatgtggctgtaaaaagatggattaatagccatatggagtatcgatcttgcattattgtattaattggttctgaaacttcatcaagagagtggtgtagatacgagatagagcatgcttggaaagagggaaaagggattgttggtatttatgtgcaccatctgaaggatttcaatggtgaacagagtataaaagggaataatccatttaaattattctatatcgatagaacatataattatatagcagaacgcaactatccggttgatggtaatgaaattaacctatcagaaatatgcaagacttataatcctccatataaaataagtaccaatgtatatgattatatcaaagagcatataaatgaatgggtagaagaggctattagaattcgaaatcagtatcctaaataa

SEQ ID NO: 20001 - DNA, 1197 bp, Bacteroides dorei CL02T00C15
gtgtcaggtgttacaaaacatatttttgaacatgagttggacgacattctgtcaatgtggaataccgagattaaatctgtgactccattgttgccacgtaagtatacaaaagcagatataatagcattactaaagtattattatccacatgaatggcaatctgtggaatctaaatataaatattaccgcactaaagacaaatatttaaaaagacgctttgggaagtctcgttataatatgtctgaacccgaattattgatacaaagagtttccgcctttaaaaaaatcttttcagaaagttataaatatgcacattggaatgcgtattcagaaaggaaccgcgtggattcaagcgtaaagttgtgggaggcaagaaaatataagattgatcgtataaatagtaagattgagattgctctatctaaaacgcagcaggtgactccttcattcataaatcaattaatcggattgtatgagcgaaagaatacaactcaaaaagacaaagtatatattcttttagaactaaaaaaatattactgcgaaaaaacaatacaatttttcttcaagctcaatgatacagaacttaataagcaattaagggaagaggcattctttcatcttcaatcttttaatttcaatcctcgcttaaggaagcaacggtttatgcggattcatgcaaaaactaaaaaacgaaaatgttatctaagagaagtgtatcctaacgagagatatgatataccacggaatcctgatgaactcgaatatagaattgagaattcaaaggaacaaaaattgaagtcatacgattattttatttcgcatagcagtaaagatagtaaagaggttcagaaactcatatatgtcgagaatcaacaaggcaagaatgttttttgcgattggataaatgatattgattatttaaagcgtcatttactttgtgatgctacgcttaaagttctagaagaaagaatgaaacaatcaaaggctttaatttttgtgcagtctgaaaattcactaaaatcaatatggtgtaaatatgaattaaattacttcctcgccctcaatagacctatttatgtagttgatagagaatctatagtcaacaatctttttagccttagccaattggacgacaattggtttgttgatcccaattacaaaaaaacagctctaattacaggggaagaaattaattaa

SEQ ID NO: 20002 - DNA, 1416 bp, Bacteroides dorei CL02T12C06; identical to SEQ ID NO: 19998

SEQ ID NO: 20003 - DNA, 612 bp, Bacteroides dorei CL02T12C06; identical to SEQ ID NO: 19999

SEQ ID NO: 20004 - DNA, 549 bp, Bacteroides dorei CL02T12C06; identical to SEQ ID NO: 20000

SEQ ID NO: 20005 - DNA, 1197 bp, Bacteroides dorei CL02T12C06; identical to SEQ ID NO: 20001

SEQ ID NO: 20006 - DNA, 1434 bp, Bacteroides fragilis CL05T00C42
atgaaaataacgactgaaataaatggctttattgaagactacgttaaagaattaagagagggcaatgcctctttatttgtaggagctggtatttctagaggggcaggatatgttgattggaaaggattgttatgtgatatcgctaactccttaggactggatataaataaagaatatgatttgctctcaatagctcaatatcacgtgaataaacacggaagaactaggataaataaaacgattcttgaagaatttacagaagaattagaagagactgagaatcataatattatagcaagattgccatttcaaacgatttggacaactaactatgatactttaattgaagatgcttgtaagaagtataataaaatagttgatgtaaaatcttctgtcaaacaacttttctacaataaacctaaaagagatttagtgctatataaaatgcatgggagtattgagtatccagatgatgctgtattaacaaaagaagattacgaaggatattttactactcatgaagcatttattacagctcttagtggagaattaatttctaaaactttattgttcataggttttagttttagtgatccgaatattgattatatattaagtagacttaattttaagtataaacataaggaaaaggaacattattgcttattgaaaaaatatagtttgaatgattttgataattgtcaagctgatttagagtataatctaaggaaacaacaattattaataatggaactaaaacgttatggaataactactattttgatagaacaatattctgatattacattgattttatacgagatagaaagaagatttagaaaaaaatccatttttatttctgggagtgctgaagaatatactccctttagtaatttgcaagctcaaaaatttgttcatttattagcaaaatcaattattcagaaagggtatgtgataataaatgggtttggatgggggattggaagtgccgtcataaatggtgcattagaggctatttacaaaaatcctaaaaaatactcagaaaatcaactggtattaaaaccatttccacaatttgaaacaggaagtaagaaacttccggaattatgggaggaatacagatacaatatgatttctcagtcaggtgtatctataattatattcggtaataaaaaagataatgatggtaatataataaatgctgatggcgtatatagggaatttgaaattgctaatgaaaaaggagtaataccaattcctatattttacacaggttatatggctaatgaaatatttgaaaagataaaagaagatcctttgaaatattacaacagcaatgaaacgttcgaaaaaatagaaaaattaaaaattgattttgatgatatagagacttctgtaaaattaattatggatataataaattgtttaaattag

SEQ ID NO: 20007 - DNA, 492 bp, Bacteroides fragilis CL05T00C42
atgattagaaaagttttttatagttttcattttgataatgataactggagagcaggccaagtaagaaatattggtgctgttgaaggagacaaacaagttaatggtaataaatgggaggacattaaatcttcgtctgaaacaaaaattaaggcgtggatagatgataatctcaaagataaatcttgtttaattgtgttgattggctcacaaacaagtcagagacattgggttgattatgaaataaaaaaagcttgggaattgggtaaagctgtatgtggagtttatatacataatttaaaagatgtttatggtaatcaatcgaaaaaaggaaaaaatccctttgaaaattacactatcggaggaaaatctatggctaatatagcacctgttttcgactcaaaatattcaacaagcacatatgtgtatgatgatataaaagacaatattgcagatttagttgaaaaagcgatacaaattaggaatcaatattaa

SEQ ID NO: 20008 - DNA, 1434 bp, Bacteroides fragilis CL05T00C42; identical to SEQ ID NO: 20006

SEQ ID NO: 20009 - DNA, 492 bp, Bacteroides fragilis CL05T00C42; identical to SEQ ID NO: 20007

SEQ ID NO: 20010 - DNA, 1434 bp, Bacteroides fragilis CL05T00C42; identical to SEQ ID NO: 20006

SEQ ID NO: 20011 - DNA, 492 bp, Bacteroides fragilis CL05T00C42; identical to SEQ ID NO: 20007

SEQ ID NO: 20012 - DNA, 1434 bp, Bacteroides fragilis CL05T12C13; identical to SEQ ID NO: 20006

SEQ ID NO: 20013 - DNA, 492 bp, Bacteroides fragilis CL05T12C13; identical to SEQ ID NO: 20007

SEQ ID NO: 20014 - DNA, 1434 bp, Bacteroides fragilis CL05T12C13; identical to SEQ ID NO: 20006

SEQ ID NO: 20015 - DNA, 492 bp, Bacteroides fragilis CL05T12C13; identical to SEQ ID NO: 20007

SEQ ID NO: 20016 - DNA, 1434 bp, Bacteroides fragilis CL05T12C13; identical to SEQ ID NO: 20006

SEQ ID NO: 20017 - DNA, 492 bp, Bacteroides fragilis CL05T12C13; identical to SEQ ID NO: 20007

SEQ ID NO: 20018 - DNA, 1434 bp, Bacteroides fragilis CL05T12C13; identical to SEQ ID NO: 20006

SEQ ID NO: 20019 - DNA, 492 bp, Bacteroides fragilis CL05T12C13; identical to SEQ ID NO: 20007

SEQ ID NO: 20020 - DNA, 1470 bp, Bacillus cereus VDM062
atggaatttacgccagaaattgaatccttcattagtgagtatgtgaaagctcttaaagcagacagtgcatctatctttgctggagctggtctatccattcctgctggagctgttccatggaaagagttacttcgacagcctgctagggaattacaattagatgttgatagagaacatgatttagttattttagctcaatacttttataacaaacatcaaagtcgacaaaaactaagtcaactaatcattgatcattttcatcaaaacgggagaatcacagataatcatcaccttttagctagattaccaatcaattcatattggactacaaattatgatcgcttaattgaaaatgcactggaacaaaatggaaagactcctgatacaaaaaggcgtatagaagatttttctatcattcgtccaagaagggatgccattgtttacaaaatgcatggcgatgtcgatttagccgacaaagtaacgttaacaaaagatgattatgagacttatcaagaaaataatcatttatttacattaagccttaaaggcgagttggtatcaaaaacgtttttattcattggatttagttttgaagatccaaatcttgaatatattttgagtcgaattcgtggattagttgatgggcacactcgtacacattattgtttttttaaaaagattaatagatctagttatccgaagggaaaaaaaggtaccgatcaatatcgatatgatactgtaaagcaagatttaaaatgcgcagatttaatccgctatcatattcaacctatattggtggatgactatcctgatattacagaaatattaagtgtaatctatgggcaatatagaagacagaaagtctttgtttcggggagcgcggcacaatatgatggttttgagctcgaagatatgaagcctacagaatttatccataaattaagtcatcgattaaatgaagagggatgtaaaattgtcactggattcggaaatggtgtaggaagtgctgtaataaatggagtgctcgagagaatttatcaaacaacagaaagaaagctagataatcatcttctcatgagacctttcccacagttcattacgcatgatcaatctaaagatgaattatgggataagtatagaagaatgctaattccggaggccggtattgccatttttatttttggtaataaagaagttgatgggaaaattattgacggtgacggggttcaaaaagaatttgcaattgctgaagagcaaggattgaaagtgatcccaattggtattacaggatatgtaagcaaatccttatggcaagaagtaatgacaaactttgaaaaatattacaaagactatcgttcactaaaatccgaatttaataaactcggaaacaataaacttagcgctaacgaaataatagaaacagtcattacgattgtaaaaagaattaatggaggagatatcaatgggtag

SEQ ID NO: 20021 - DNA, 495 bp, Bacillus cereus VDM062
atgggtagaaaagtattttatagctttcattatacaaaggataatgctagagctgcacaggttcgtaatatgggggtaattgaagggaataacccaattaaggataatgaatgggaaaaagtaaaacaaacggatgcatctataaaaaaatggattgatgaacaacttacaggtagatcttgtacagttgtattagtaggggaagagacggctgatcgtaaatggattaattatgaaattaaaaaatcatgggagcttggaaaagggattgtcgggattcggatccataatttaaaaaatctcgatggtgaacaatcgaaagaggggaaaaatccttttgacggatttaccttaggtggaaaatcactttcaaaaacagtgaaattgtataactcaccttataaaattagtaccaatgtttatagccatattaaagaaaatatcgaatcttggatagaagaagctattgaaataagaaagaattataaaaactaa

SEQ ID NO: 20022 - DNA, 1485 bp, Bacillus cereus VDM022
atgggttataaacgagaaaaaatgatacatacttttattaagaactatactgaggatctattagatagtaaggttgcggtttttggaggtgcggggctatcagtaggagctggggctgtcagttggaaggagttattaagagaagcggcggatgatattggggtagatgtagataaagaatatgacttagtttcggtagcgcagtatatatataatgagtctaattctaggaataaaattactaagttaattaaaaatcatattcaaaaaaagggagaggtcacagaaaatcatagaatattggctaatcttccaattaaaacattttggacaactaattatgatgagtatatagagaaaagttttgaacaaaacagtaaactatatgatgtgaaaaaaagtgtccaggatttatcatcagaagtgaaaaattcagaagtaacagtttataaaatgcatggtgatattaatcgtgctcatgatgcagttttaattaaagatgattatgaaatatatggtaaaaagaatgagttatttacacaggctttaaagggggatttaatttctaagactttcttatttattggatttagttttgatgatcctaacctagagaatattttatcaagagtaagaattatgttagaagggaatactaggacacattattgtttttttaaggaaattaataaaaatgactatgagtttaggaaaataaaaaaaaagaaagaggccgcatggaagtatgctgaaaataaacaatatctaaaaattaaagacctcgaaagatacggtataaaggcaattttggttgaggaatattcagatataacgaatatattaaagaaaatagaatctatctacttaagtaaaaatatatttatatcagggagttttgatgactttgaaaaatattgtgttagaggaaaggtagagagttttgtagagaacttatcaaaaaaattgcatgaagaagattataaaataaccagtggttatggtatgggaattggtagctctgttattacaggtgttttaaggggaagtaagactaccgggaaagagaatttagatagaattttaagtttaaagcctttcccttttcatattgaagatggaatagaacgggaaaaaatttggcataagtacaggcaagatatgttgaaaaattgcgggactgcaattttcttattggggaataaaaagaaagaaggggggatacagctggctgatggtgtaaggaaagaatttgcaattgctaaaacacaaggtatgaatttaattcctataggtgctacaggatatgttagcaaagaatgtttcaaagatatgtgtaataattttgaacaatattatccaaacagtgataaaaatttaaataaagcgtttcaaaagttaggaagtaaaaatgtatcagagaaaaaaatgattggaaatataattgattttcttaagttgttaagaaaatatcatatggaaatgtga

SEQ ID NO: 20023 - DNA, 609 bp, Bacillus cereus VDM022
atggcttataaaacatttatttcttataaatattcagaagctaaagagctaagagaacgtattttagatgctttaggagcggatgctaaatattatcaaggagagactagtgaatctcctgatatgtcagatagaacaacggagtatattaaggaaaaacttaaagatatgatttactctacttcagttactattgtaataatatctcctaacatgaaaaagagtaaatggattgattgggagattgaatattctcttaaacaaataaaacgtggggataaaaaatctaatactaatgggattgtcggggtggtgatgaaatataatggtgattattcttggttaagaactatgattactaattcagatggacatactgcaatacgaataaataataattacctatatgatattattatcaataatagattcaatcaagagccaaaggaatatacttgtgaaatatgtaaggatattgatagtttcacaggatcatttattgctttaataaaagaagaagattttcttgaaaatcctaataaatatattaataatgcttatgaaaaaagtaaaaaactagataattataatatatccagaaaaaaatag

SEQ ID NO: 20024 - DNA, 1425 bp, Bacillus cereus MSX-D12
atgaatccaatagttgaactatttattaaagattttacaaaagaagttatggaagagaatgctgcaatttttgcaggagcgggtttatcaatgtctgttgggtatgttagttgggcgaagttattggagcctattgctcaagaaattggattagatgtaaataaagaaaatgatttagtaagcttggcgcaatattattgtaatgagaatcagggtaatagaggtagaattaatcaaattatcctagatgaattttctcgaaaagtagatttaactgaaaatcacaaaattttagctcgattaccaattcatacttattggacgacaaattatgataggttaattgaaaaggcattagaagaagaaaataagattgctgatgtaaagtatacggtaaaacaattagctactacaaaggtaaaaagagatgcagttgtatataaaatgcatggagacgtggaacatccctctgaggcagttttgattaaagatgattatgaaaagtattctataaaaatggatccgtatattaaggcgttgagtggggatctagtttctaagacatttttatttgttggatttagttttactgatcccaatctagattatatattaagtcgagtaaggagtgcttatgaaagggatcaaagaagacactattgtttaataaaaaaagaagagcgaagaccagatgaattagaggcggattttgagtatagagtaagaaaacaggaattatttattagtgatttatcacgttttaatataaagactattgtacttaataattacaatgagattaccgagatattacaacgaattgaaaataatataaaaactaaaacagtatttttatctggtagtgcggttgaatataatcattgggagacagaacatgctgaacaattcattcatcagttaagtaaagaattaattagaaaggattttaatatagtatctggttttggacttggtgtagggagttttgttatcaatggagttctagaagaattgtatatgaaccagggaactatagatgatgatagacttattctaagaccgtttccacaggggaaaaagggcgaagagcaatgggataaatatagacgagatatgattacaagaactggggtaagcatctttttatatggaaataaaatagacaagggacaggttgttaaggctaagggtgtccaatctgaatttaatatttcttttgaacaaaataattacgttgttccggtaggtgcaactggttatattgcaaaagatttatggaataaagtaaatgaggaatttgaaacgtattacccaggtgctgatgcaaggatgaaaaaattgttcggagaattgaataatgaagcattatcaatagaggaactgattaacactataatagagtttgtagaaatcctatccaactaa

SEQ ID NO: 20025 - DNA, 579 bp, Bacillus cereus MSX-D12; identical to SEQ ID NO: 18776

SEQ ID NO: 20026 - DNA, 582 bp, Bacillus cereus MSX-D12
ttgacactattcaccgaaaacgatttacttaataattcttataaatcaattcaaaaaagttatcattttagcgaaaatcaagctgcaaaaaatatactagaacaagcatacaaaaattacgataaaaataaaatttacgatatatttctatctcacagttttttggatgctcgaaaaattttaggattaaaaaactatattgaaggtttgggttattctgtatatgttgattggattgaagataaacaattagatcgctcaaaagtttcaaaagaaactgctggtattttaagagaacgtatgcaaagttgtaagtcattgttctttgctatatcagaaaactcagatcattctttatggatgccttgggaattgggatactttgatggtattaaacaaaaagtagccattttaccagttttaaaaagcagctatgatgatagttacaacggccaagaatatctaggattatatccatatgttgctaaagggacgataataaattcaacacaggaagaaatttggatacatagttcccaaaagcaatatgtccgttttagaaattggttacagcaaaattaa

SEQ ID NO: 20027 - DNA, 1443 bp, Bacillus cereus HuA2-1
ttgaagtataattcaagtattcaagagtttttaagaacttatgtaaaagcaattcaaagctcaaatgcagcagtattcgctggggccggtctttcgcgtcctgctggccatgtagactggaaggaattgttacgagaagttgctgaagatctccaactcgatatcgaccaagaagtagacctaatagctttagctcaatatcatgttaatgataatggacgaagtaaaataaaccaaattttgattgatgaatttactaaaagtgtgacaacaactgataatcataaaattttatcgcagcttcccatagagacatattggactacaaattatgaccaattaattgaatctaatttagttgcatcgggtaagaaggtagacaaaaagataacacctgaaaacttgagttattcagtaccaggaagcgatgcagttgtttataaaatgcatggagatagtagcttaccccatgatgcggttttaactaaagatgattatgaaggttataaccaaaaaaggaaattatttagtacagccctgcggggggatttggtatctaaaacatttttatttatcggttttagttttgatgatcctaatttatctcaaattttaagtaaaattagaatattattaaatgaaaatgcgagaactcattattgctttatgaaaagagtagataaaaatgattataaaaataatgagcaagaatttcgttatgcaacaattaagcaagatttaaagattaaagatttaaaaagatacagtattaaagttcttttagttgatgactaccctgaaataacagaaatactgcaatatatagcttcactggtaatacgaaaaaatatatttgtatctggaagtgcgagtgattatggcgaatggggtgaaaaaaaatcttttgaatttagtacatcattaagcaaagcccttattaaaaataataataatattgtttctggatttggtttagggataggaagttgtatcatttctggtgcattagaagaactctattcaagtcaaaataacaatgtagaagaaagactcaagtgcagaccattcccacaggttacaactggacaaattgctataactgaattatggactaaatatcgtagggaaatgctttctaatgttggggttgcggtttttatattcggaaacaagattgatactgaaactacaaaggtaatcgatgctaatggtatgatagaagaatttgatatttctgtagaaaacgatgcagttcctattcctgtaggggcaacgggttttactgctaaagttttatgggagaaggttatgaatgattttaatcattatgttgggattgaaaccttaaaacctttgtataccgatttaggtaatgaaagtaagactcctgaagaattaattgaaattgtagtgaaaatcattaagcaattagaaaagcgctaa

SEQ ID NO: 20028 - DNA, 606 bp, Bacillus cereus HuA2-1
ttggcatataaaacttttatatcttataagtattctgaagctaaggatttaagagacaggattgtgaaagcactaggagatgacgctaaatattatcaaggggaaaccagtgaatcaccggatatgtccgataaaacaacggattatatcaaagataaattaaaggatatgatttattctacttccgttactattgttataatctccccaaatatcaaattaagtaattggattgattgggaaatcgaatattcgcttaagcaaataaaacgaaatgatcgcacctctggaactaatggagttttaggagtagtcatgaaatacaatggtggatattcttggttaagaccttcaaggaccaattcggatggacatacttctatacaaacgaataatgaatatctctatgatattattcacaaaaatagattcaatcaagaccctcctgaatatacttgtgatgaatgtgaaatagtaaattctttaacaggttcgtatatttctttgattaatgaagaagattttcttaaaaatccaaataaatatattgataatgcatacgataaaagcaaaaatacaagcaactatactataagcaaaaaataa

SEQ ID NO: 20029 - DNA, 1431 bp, Enterococcus faecalis 599
atggaggaaaaaatgaataagcagtattttataaaaaattatgctaaggctattcaagaagggtatgctgctgtttttgcaggtgctggaatatcagtaggcgcaggatatgtagattggaaaggactcgtggctccgtttgctgatgaaatgggtttagatattgacaaagaatatgatctaactagagtgattcaatattatataaattataagagaagaagaaatggtgtcagtcaaacaattattaataagtttattagtcatgaggaaagtacaaaaactattgatttattaactcaattacctgtacagacctattggacaactaattatgataagttactagaaaagaatcttgagaagcaaaataagaaagtagatgtaaaagttactgacaaaaatttaactaccaatgtatatgatagagatgtagtaatttataaaatgcatggagatgtatcaaatcccgatgaaattgttttatctaaagatgattatgaattatataatgatactcatagtttatttactacagcattaagaggagatttagttacaaagacttttttatttataggttttagttttgaagatcccaatttggataatattttaagtagaataagagttttattgggaaatgaaactagggaacattattgttttttagagaagataacaaaagaaaaatatgatgatgatgacgaatttaaaaatgactcccgcaaacaagaattaagaattgaagatttgaaaagatatggtatagaaacaattcttttagattcttataaggaaatttcagatatattgttacagataaagaaagtatatttgagtagaaatatatttatctctggcagtatttctagctatgaaaatacttgggatatggagaaggttaataagtttagctatcttttgtctaacaatttagtgaagaaaaataataaaattatatctggatttgggttagggataggttcaaacataattaacggagccttagatgaaatttacacaagtaaatttaagcatacgtcagagcatttaagtttgcatccgtttccacaatatgatgtcaatcctaataatttaaaggaaagatggacaaaacttcgcgtaaatatgatttcagaagcgggaatatgtattttcatttttggaaataaaattgaagataagctcgtaaaagatgctaatggaatgattgaagaatataaaatagctaaaaagctgaataagtttataattccagtgggagctactgggtatgctgccaaatctatatttgatgatatgaaagctgaacaagataattatccttatttggatggattttgggatattcttgaaaaagaagatgaccaaaaaataagtgaaacagtaatgaaaattattgagaatattcaacaaaaaggagtgtaa

SEQ ID NO: 20030 - DNA, 624 bp, Enterococcus faecalis 599
atggcttcaaatgtttttatttcttttagatttaaggatggtatagaattaaaagatgaattagttgaattgttttctaattcaagagaagtttttaatagatctgaagatgttgatagaacacatatgtcagaagatactattcaaaaatatttatatgacaagcttaaaaatacctcgattacaattgttattcttactccagaagctgttaattacaagaaggatatttttggcgtgtatgatgattggttgtatgatgaacttcgatactcactagaggatcgacaatcgaatcgaacaaatggtgttatagctctttatacagaagaaagtaagcatttagtcaaagaaaagagcattcatacttgttctgtgtgtaataaagagagaacgagtaatacaattttaaattttgataatttggtcagaaagaatatgatgaatgttaaagagtcctataagtgtaataaatgtagtaacttgtttgatggtgattacgactcatatatttctttagtgcattttgacgattttaaaagtaacatcaaaaaatatatagagattgctaaagaaaaaagagatagaaaagaacaattcaatattgtaaaaagaatgtcttaa

SEQ ID NO: 20031 - DNA, 927 bp, Enterococcus faecalis 599
atgactggtagaaatcccaaagtatttatatcatattcatgggagaataaggaaaataaagaatgggctagagaactagcagacaaattacttgaaaacggtattgatgcatatatagatcagtatgatttaagtttaggtgatagattacctcagtttatggagcaacaaatatccgattcagattatgttctaattatatgtacaccagagtataaaagaagggcaaataatcgtacaagtggtgttgggtatgaaggtcatattatctcagcagaattgctttctggaaaaaatgaacgtaaatttatcccaataattaaagaaggacgtgcaagcgaagtacttcctacttttcttgctggaaagcttggaattgatttatcagatagccaacattacgatgaaaacttagatgatttaattacaactatatttggtgttaagagaaaaccagcattaggtgatatacctgggcatattaaagtcagtcctttactacctatagaacataatgaaaataaagatattgaaatcttaggaattatcactgataaagtaactgtacctaaaatggatggctcaaggggttctgcattatataaaattccatttagattaaatagagtaccaagtcagctttggaaagagttgtttgttagaaattggaattcaccaccacggtatacaacaatgcatagaccaggaattgcttctgttgtaggcgatgaaattttacttaacggaacaactattgaggaagtccgggaatatcatcgggaaactttaaaactttgcattgaaaaaagtaatactcaagaaaaaaaaatattgctagaggaggaacaaaaaaaagagagagagaatgatcgagtcagatcacataaagaaagtgttcggaaattagcagatgaattagagttctag

SEQ ID NO: 20032 - DNA, 1437 bp, Enterococcus faecium S447; identical to SEQ ID NO: 18577

SEQ ID NO: 20033 - DNA, 486 bp, Enterococcus faecium S447; identical to SEQ ID NO: 18578

SEQ ID NO: 20034 - DNA, 852 bp, Enterococcus faecium S447; identical to SEQ ID NO: 18579

SEQ ID NO: 20035 - DNA, 1437 bp, Enterococcus faecium R446; identical to SEQ ID NO: 18577

SEQ ID NO: 20036 - DNA, 486 bp, Enterococcus faecium R446; identical to SEQ ID NO: 18578

SEQ ID NO: 20037 - DNA, 852 bp, Enterococcus faecium R446; identical to SEQ ID NO: 18579

SEQ ID NO: 20038 - DNA, 1437 bp, Enterococcus faecium P1986; identical to SEQ ID NO: 18577

SEQ ID NO: 20039 - DNA, 486 bp, Enterococcus faecium P1986; identical to SEQ ID NO: 18578

SEQ ID NO: 20040 - DNA, 852 bp, Enterococcus faecium P1986; identical to SEQ ID NO: 18579

SEQ ID NO: 20041 - DNA, 1437 bp, Enterococcus faecium R496; identical to SEQ ID NO: 18577

SEQ ID NO: 20042 - DNA, 486 bp, Enterococcus faecium R496
atggtgagaagggttttttttagtttccattatgcagatgtaacaagagcaatggtagttagaaacagctggactttgcgaggaacaaaggaagctggttttgtagataaggctgaatttgagaaagttaaacgtaatggagatattgctataaaaaactggatagataatcaattaattggaacatcagtgactgtggtgctgataggtaaagaaactcttgatcgagaatatgttaaatatgaaatccaggagagttataagcgaggaaatgctattttggccgttaatataggtaaaataaaagattttaaccagatgacaattactagtcaatcagtaattaaaataattgggcaaaaaccagatggagaatatttgtggtttgacgaaattattgatggccaatatgattatataagtgatgatggatacaacaatttaggaacttggattgacagtgcagcatacaaaaaaggtaaataa

SEQ ID NO: 20043 - DNA, 852 bp, Enterococcus faecium R496; identical to SEQ ID NO: 18579

SEQ ID NO: 20044 - DNA, 1437 bp, Enterococcus faecium P1140; identical to SEQ ID NO: 18577

SEQ ID NO: 20045 - DNA, 486 bp, Enterococcus faecium P1140; identical to SEQ ID NO: 18578

SEQ ID NO: 20046 - DNA, 852 bp, Enterococcus faecium P1140; identical to SEQ ID NO: 18579

SEQ ID NO: 20047 - DNA, 1437 bp, Enterococcus faecium ERV168; identical to SEQ ID NO: 18577

SEQ ID NO: 20048 - DNA, 486 bp, Enterococcus faecium ERV168; identical to SEQ ID NO: 18578

SEQ ID NO: 20049 - DNA, 852 bp, Enterococcus faecium ERV168; identical to SEQ ID NO: 18579

SEQ ID NO: 20050 - DNA, 1437 bp, Enterococcus faecium ERV165; identical to SEQ ID NO: 18577

SEQ ID NO: 20051 - DNA, 486 bp, Enterococcus faecium ERV165; identical to SEQ ID NO: 18578

SEQ ID NO: 20052 - DNA, 852 bp, Enterococcus faecium ERV165; identical to SEQ ID NO: 18579

SEQ ID NO: 20053 - DNA, 1437 bp, Enterococcus faecium ERV161; identical to SEQ ID NO: 18577

SEQ ID NO: 20054 - DNA, 486 bp, Enterococcus faecium ERV161; identical to SEQ ID NO: 18578

SEQ ID NO: 20055 - DNA, 852 bp, Enterococcus faecium ERV161; identical to SEQ ID NO: 18579

SEQ ID NO: 20056 - DNA, 1437 bp, Enterococcus faecium ERV102; identical to SEQ ID NO: 18577

SEQ ID NO: 20057 - DNA, 486 bp, Enterococcus faecium ERV102; identical to SEQ ID NO: 18578

SEQ ID NO: 20058 - DNA, 852 bp, Enterococcus faecium ERV102; identical to SEQ ID NO: 18579

SEQ ID NO: 20059 - DNA, 1437 bp, Enterococcus faecium C621; identical to SEQ ID NO: 18577

SEQ ID NO: 20060 - DNA, 486 bp, Enterococcus faecium C621; identical to SEQ ID NO: 18578

SEQ ID NO: 20061 - DNA, 852 bp, Enterococcus faecium C621; identical to SEQ ID NO: 18579

SEQ ID NO: 20062 - DNA, 1437 bp, Enterococcus faecium E422; identical to SEQ ID NO: 18577

SEQ ID NO: 20063 - DNA, 486 bp, Enterococcus faecium E422; identical to SEQ ID NO: 18578

SEQ ID NO: 20064 - DNA, 852 bp, Enterococcus faecium E422; identical to SEQ ID NO: 18579

SEQ ID NO: 20065 - DNA, 645 bp, Aeromonas veronii AMC35
atgacatttgaacgagaaactgaaatatttataagagactatgtaaaagatataaatgagggaaatgctgcagtctttgcgggagcaggattatcaattccagctggctacgtcaattgggctgaactattaagtgaaattgcgtacgacttaggcttagatatagataaagaatctgatttagtttcattggcacaatttcatgtaaacgaaaatagaactaaatcaaaggtttgcaggaaagtactggaagaatttgttgaatgtactgaagtcacagaaaatcataaaattttatcaagacttccaatatcatctgtatggacaacaaattatgatgatcttcttgaacgatcttttctctccgaaggaaaaaacccagatataaaacacaacattaaacaattactaaccaataaacctaaaagagatgttgttatatacaaaatgcatggcgatgtatcttgtcctattgatgcaataataactaaagaacaatatgaaagatatcatcaaacacatgaaccatttataaatgcactgacaggtgaacttactacgaagacatttttatttcttggatttagctttacagaccctaatttagattatgttctaagcagactaaactttagattctcatag

SEQ ID NO: 20066 - DNA, 495 bp, Aeromonas veronii AMC35
atgtctagacgagttttttttagtttccactatactggtgacgttaatagaattggaatagtacgaaactcttgggtaaccaaaaccacaaggagtgatgcaggtttttgggatgccgcagaatgggaacaagttcaaaaagataccgatttagctataaaaagatggatcaacaaacaactggaatacacttcagttactgttgttctaatcggtgagaagacatctcaacggccatgggtaaattatgagattgaaaagagcattgaacgcggaaatggtcttttaggtgtatatatacataatataaatggtcttggcaaaggaactagttcgaaagggaaaaatccttttgataatcactctataaaatgtacagatggaaattattataatgcttccagaatatataaaacatatgactgggtatctgatgatggatataacaatttaggcgcttggattgaagaggccgccaaaatagccgggaaatga

SEQ ID NO: 20067 - DNA, 546 bp, Aeromonas veronii AMC35
atggttagtttcacaacatttaatgacctaaaatattttaatagcaacctaacattaaatgagcaagcgcaactaaggtctcgagtcgcatcaaaaaatagtaaaaatacttttttatctcactcttctaaggatgcagaatatctaccaggagtaattaagattttagaaaatcatggagcttcagtttattgtgatctaggagatgacaggcttccagaaaatccaaatccagaaacagcattcataattaaagatcaaattaaacggtctaagaaatttgtgctctttgtgacaacaaacagtaaagactctaagtgggttccatgggagctgggtattggcgactccagtctattaaccagtaatgttgctctacttcctgcggctgtaagtgaacacgatcaatcttgggctaggcaagaatacttaggtctctatcgacatatagtatggggaaatctacaaggagaacacaaacctttgtggatggtttacgatcatagaaataacacagcaacgaagctatctgattggttaaagtaa

SEQ ID NO: 20068 - DNA, 1485 bp, Pseudomonas syringae pv. avellanae str. ISPaVe013
atggatttttttgctttggaagagcgtgtggcgtcttacggctctgggggatatctgtttctggaggcgttccttaccaagcttcttcaaattgaagcggctcattacggtcaggaggtcaatattctcgacactcacacatcactgttcgaagctgtcgcacctcaaggcattggggatctatctactcccattgttattgaatatatttttactgcaactaaagataaagtcaaattgttgttggacgcttttcgaatgcatggcgagccgggattcgggctgttaattattgcgccaaagatgcccgagtcaacactgatttacatgctccacgcacctgatgctcatggccgtgcccccgtggttatctggggggagaaaaaaatcaatgatctcatgcgcaaacataaagaggaggtgggcaagctcactgatagtttgttttcattacgtttaaaaatggccgtgactcgtccaacgaaaccgtggttggaagagcgagatcaacttattaagctagtcgcagagcagtatcggtccgggagtttttcgttagttttaggtgcgggggtatcgagtagcgcaggtttgccagactggaacactcttctaaattctctttttgtctctatgttggctcaagaaaatattggaggggataaaagcgatactgctcaagtctctcagattgtttctaggctaatggaggttgatgggccctccgctctgatgctggccaggtatatcaggaagggactttctgttgggtcgcagactgaacaacaaagcttcattgaagcaatcactcatcagctatattctctacgtaacgaagttttccagatagagtcagagcttattacggccattgctcgtctctgcacgcctaccaggacaggtgccaaggtaaaatcaattctcacttataactttgatgatttcattgagcgcgctctgtcagggcgaggccttgtccataaaagtatttttgaggagtttgaaactcctagtgctgaggaactgccgatttaccatgttcacggttttttgcctgaagtcagagaaaaatattctaatttagatcgatgcactttggttttttcagaagaaggctatcatctgatttatcgcgattcttatcattggtcaaacttggtgcagttaaatggcttcaaggaaacatcgtgtcttatgattggtctttctctcactgatccgaatttgcgacgtttgttagagatcgcgtccaaatccattgagaagccaaagcattttgcatttatgcgtcgtttgacctcaaaaaaattcaagagtggcgatcgtggacatcagttgaaaatcccaagctcggtgattgaccgtttcttggacaggcaccacagcacaaacgaagaactcatgcgggagctcggcgtaacggtgatctggtatgaggagtatggcgatattcctaaaattcttaatcgtatccgcgagggctaa

SEQ ID NO: 20069 - DNA, 978 bp, Pseudomonas syringae pv. avellanae str. ISPaVe013
atgctcataatctgccaccaccaaaacgcgagaatggacatgtcgcccaaagtattcgtaagtcatgcgagtgaagacaaagatcgttttgtattggatttcgcaaagcagttaagggctaacggagttgatgcgtggcttgacaaatgggaaatgctgccaggcgacagcctcataacaaagatttttgaagaagggatcaaggacgcccaagcagtaatagttgtattgtcgaaaaatagcgttgaaaagccttgggtcaagcatgagcttgatgccgcgtgtgtgaagcgaatcaatactgggagcaagttaatccccattgttatcgacgattgcaaagttcctgaggttttgaaagcgactctttgggagagcattagcgatacagcctcatatcagtccagccttgaacgtatcgttgcttcaatttttggtgcttcggacaagccggctctgggcaaaccaccggcatatgtgagcagatttggcgcaggtgtcgctggccacaataatgtggacagcctaatatgcaaactggcatgcgagtttgtgctggaaacaggctcaagacacgtaagcatctcagctttttgcaaagacggtgaattgattatcccagagcatcaactaagagaatcagttgaggtgctcggtgagcacgggacattcgatcttcagcatcgtttgggagaaggatttccatctatctcagtaactgattctggatttgagctttatgcccgcgaccatgtggggaactacgatgaggtgtttcgctcagtcgtctccgccattgtaaataatggatttacgactctttcgcaaatgagaagagaacttaatctcaggccattcttggttgaacatgttctgagaattcttgcgagtggaaacaaaatttctgtttcttggtatctcggtggggactgctcaattaacagcatctccccatctttgcgtcgatcactatcgtga

SEQ ID NO: 20070 - DNA, 1446 bp, Escherichia coli 1-176-05_S1_C1
atgagtgttcagttttcggctgaagttgaagcttttatcaggacttatgtgaaggatctcgaagaaggggttgccgccgtttttgctggtgcgggcctatctagaaccagcggcttcgttaattggagtgaactgctgcgtgaaattgctgaagaattaggcctttctgttgagctagagcacgacttaatttcggttgcacaataccatgtcaacaagaacaacagctcaactggtttagctagaaaaatcctagaggaattctcggagcaagcggaaccttccgaagcccataaaatccttgctagactacccattagaacttattggacaaccaactatgacactttgattgaagatagtctcaaagaaaactaccgtgtcgcagatattaaacgcagaaccgatgatcttatttccactcgtcctaaacgagatgctgttgtttacaaaatgcatggtgatgttagctcgccaggtgacgccatactttataaagctcagtatgagcagtactacaagacccatgaggggtttgttacagcattgagtggagatttgatttctaagacattcttatttattggcttcagttttactgatcctaatcttgattacatattgagccgattgcatgttccggagaagcatcgtcgtagacactactgctttcttcgtaaggaaccctctttgccgcaaggaaatgaagatgaagctggcgctatgtataggcagcgtaggcaagaacatcatattcgcgatttgctccgttttggcattcaggctgtattagtaaacgagtacgatgatattccacttatattgaaagagattgagagtcgcttcctcaagaagaccatatttatatctggtagtgcagaagagtatggcgcttgggacaaacaggaagcactaaactttgtacacatactttcgtcatctttggtgaagaatggctatcgagttgtcaatgggtttggatggggtattggtagtgcggtcatcaacggagctcttgaagccatttattctaagcctgataagtactcagaagagcaacttatcatgcggccattccctcaacactcatcaaacgataaagccctgagcgagctatgggacgaatatcggcagcgtatgattggtctttctggaatcgctatattcctttttgggaataaactccatgatggtcgaatcgttaatgctgatggggtccgaagggagtttcaaattgctcaggaaacaggggttgtcgtgcttccacttggcgtcactggttatatggccaaggaactagctgacgagatgctgacggatccaagtaaacattttgtccggtacccttggttggaaaaggaagttgctcagcttgcagatctctctgctaatcgggcaaatatcgaaatgaaagttttagaaattttaaagaaactaggaggttag

SEQ ID NO: 20071 - DNA, 468 bp, Escherichia coli 1-176-05_S1_C1; identical to SEQ ID NO: 18646

SEQ ID NO: 20072 - DNA, 1476 bp, Staphylococcus aureus ZTA11/03130-3ST
atgactatagataagaaaaaattcattgaaaaatatgtaaaagctttagaaagtaatacagcggctatttttgctggagcaggattatcttgtggagcaggttatgttaattggaagacattgcttaatgaagcagcagaagaattagaattaaatatagataaagaagaacatgatcttgtaggattagcacaacattatattaataagaaaagaagtcgtggaaatctaaatacagtaataatggagcaattttcaacaagagcagaattaacagaaaatcataagcttttagcaaaacttcccattgatacatattggacaactaattatgattgtatgattgaaaaagctcttgattctgagggcagaattgtagatgtgaaaagaaatcaaaatcaattaactgtttcagtagccgataaggatgctacagtttataaaatgcatggggatatagacagtatagacaagattattttaactagagatgattatgaaaaatataatctaactcatccaaagtttcgtgaaatattggaaggagatttactttcaaaaacttttctattcataggttttagctttacagatccaaatattagttatatcttatcgagaataagattagtgttagaagacaatactagaccacattattgtattttaaaagaagtagaagaaaaggaatatgataatacagaagaatttatgtatgcaaagataaaacaacaacttcatatagaagatttaagccgattttcaatagaaactttattagttaaagattatattgaaatcacagaaatattagaaagtatttataaaagatatagaagaaaaacaatttttatatcaggaagtgctacagaatatttaccttttaattcagaaacagggaaatattttttacatcaactaagtaaaaaattagttgaaaatgattttaaattagttacaggttttggattaggagtaggatcatatgttattaatggagtagctgattatattaatagtaataagaagtctaaactacagaatcatttaaatatattgccattttctcaagattcaagtggcgatttagacttaaaagaagtatggaaaaaaaatcgcttggaaatgatttctgagtgtggaatggcattatttttatttggaaataaagaaaaggatggaaaaattgttttagctgatggattagaagaagaatataaaatagcagaaagacaagaattggttagactccctataaatgtgacaggttataaaacaaagaatctttcagaacaatataacgaagagataaatatacaatttaaagagaaaatattaaaaatgtataacgaaataaatgaatacaaatgtgatttttcaaataaacaaagtattgatgaattagttcaaaaaatagtaaatttagtaattgaaataaaaaaaaacaaaataattcatggggttttaatgctttag

SEQ ID NO: 20073 - DNA, 609 bp, Staphylococcus aureus ZTA11/03130-3ST; identical to SEQ ID NO: 18624

SEQ ID NO: 20074 - DNA, 927 bp, Staphylococcus aureus ZTA11/03130-3ST; identical to SEQ ID NO: 18619

SEQ ID NO: 20075 - DNA, 1452 bp, Staphylococcus aureus ZTA09/03739-9HSA; identical to SEQ ID NO: 18653

SEQ ID NO: 20076 - DNA, 609 bp, Staphylococcus aureus ZTA09/03739-9HSA; identical to SEQ ID NO: 18624

SEQ ID NO: 20077 - DNA, 219 bp, Staphylococcus aureus ZTA09/03739-9HSA
atggatcaagattatttaaaaaggaagtatgttggtgaatatacaaagcaagtattgaaggctcgtatggagcaaagtaaaatgctggttttgttgagaacggagaattcagttcaatctgattgggttagttttgaaatagaatactttgaaaatctaaaaaaacctatatatatagtagagtctcttgaagaattattagaggctttttcagattag

SEQ ID NO: 20078 - DNA, 1452 bp, Staphylococcus aureus ZTA09/03576-9HST; identical to SEQ ID NO: 18653

SEQ ID NO: 20079 - DNA, 609 bp, Staphylococcus aureus ZTA09/03576-9HST; identical to SEQ ID NO: 18624

SEQ ID NO: 20080 - DNA, 927 bp, Staphylococcus aureus ZTA09/03576-9HST; identical to SEQ ID NO: 18619

SEQ ID NO: 20081 - DNA, 1452 bp, Staphylococcus aureus VET1918S; identical to SEQ ID NO: 18653

SEQ ID NO: 20082 - DNA, 609 bp, Staphylococcus aureus VET1918S; identical to SEQ ID NO: 18624

SEQ ID NO: 20083 - DNA, 927 bp, Staphylococcus aureus VET1918S; identical to SEQ ID NO: 18619

SEQ ID NO: 20084 - DNA, 1452 bp, Staphylococcus aureus VET1915R; identical to SEQ ID NO: 18653

SEQ ID NO: 20085 - DNA, 609 bp, Staphylococcus aureus VET1915R; identical to SEQ ID NO: 18624

SEQ ID NO: 20086 - DNA, 927 bp, Staphylococcus aureus VET1915R; identical to SEQ ID NO: 18619

SEQ ID NO: 20087 - DNA, 1452 bp, Staphylococcus aureus VET1910R; identical to SEQ ID NO: 18653

SEQ ID NO: 20088 - DNA, 609 bp, Staphylococcus aureus VET1910R; identical to SEQ ID NO: 18624

SEQ ID NO: 20089 - DNA, 927 bp, Staphylococcus aureus VET1910R; identical to SEQ ID NO: 18619

SEQ ID NO: 20090 - DNA, 1452 bp, Staphylococcus aureus VET1907R
atgactatagataagaaaaaattcattgaaaaatatgtaaaagctttagaaagtaatacagcggctatttttgctggagcaggattatcttgtggagcaggttatgttaattggaagacattgcttaatgaagcagcagaagaattagaattaaatatagataaagaagaacatgatcttgtaggattagcacaacattatattaataagaaaagaagtcgtggaaatctaaatacagtaataatggagcaattttcaacaagagcagaattaacagaaaatcataagcttttagcaaaacttcccattgatacatattggacaactaattatgattgtatgattgaaaaagctcttgattctgagggcagaattgtagatgtgaaaagaaatcaaaatcaattaactgtttcagtagccgataaggatgctacagtttataaaatgcatggggatatagacagtatagacaagattattttaactagagatgattatgaaaaatataatctaactcatccaaagtttcgtgaaatattggaaggagatttactttcaaaaacttttctattcataggttttagctttacagatccaaatattagttatatcttatcgagaataagattagtgttagaagacaatactagaccacattattgtattttaaaagaagtagaagaaaaggaatatgataatacagaagaatttatgtatgcaaagataaaacaacaacttcatatagaagatttaagccgattttcaatagaaactttattagttaaagattatattgaaatcacagaaatattagaaagtatttataaaagatatagaagaaaaacaatttttatatcaggaagtgctacagaatatttaccttttaattcagaaacagggaaatattttttacatcaactaagtaaaaaattagttgaaaatgattttaaattagttacaggttttggattaggagtaggatcatatgttattaatggagtagctgattatattaatagtaataagaagtctaaactacagaatcatttaaatatattgccattttctcaagattcaagtggcgatttagacttaaaagaagtatggaaaaaaaatcgcttggaaatgatttctgagtgtggaatggcattatttttatttggaaataaagaaaaggatggaaaaattgttttagctgatggattagaagaagaatataaaatagcagaaagacaagaattggttagactccctataaatgtgacaggttataaaacaaagaatctttcaaaacaatataacgaagagataaatatacaatttaaagagaaaatattaaaaatgtataacgaaataaatgaatacaaatgtgatttttcaaataaacaaagtattgatgaattagttcaaaaaatagtaaatttagtaattgaaataaaaaaaacaaaataa

SEQ ID NO: 20091 - DNA, 609 bp, Staphylococcus aureus VET1907R; identical to SEQ ID NO: 18624

SEQ ID NO: 20092 - DNA, 927 bp, Staphylococcus aureus VET1907R; identical to SEQ ID NO: 18619

SEQ ID NO: 20093 - DNA, 1452 bp, Staphylococcus aureus VET1898R; identical to SEQ ID NO: 18653

SEQ ID NO: 20094 - DNA, 609 bp, Staphylococcus aureus VET1898R; identical to SEQ ID NO: 18624

SEQ ID NO: 20095 - DNA, 927 bp, Staphylococcus aureus VET1898R; identical to SEQ ID NO: 18619

SEQ ID NO: 20096 - DNA, 1452 bp, Staphylococcus aureus VET1896R; identical to SEQ ID NO: 18653

SEQ ID NO: 20097 - DNA, 609 bp, Staphylococcus aureus VET1896R; identical to SEQ ID NO: 18624

SEQ ID NO: 20098 - DNA, 927 bp, Staphylococcus aureus VET1896R; identical to SEQ ID NO: 18619

SEQ ID NO: 20099 - DNA, 1452 bp, Staphylococcus aureus VET1876R; identical to SEQ ID NO: 18653

SEQ ID NO: 20100 - DNA, 609 bp, Staphylococcus aureus VET1876R; identical to SEQ ID NO: 18624

SEQ ID NO: 20101 - DNA, 927 bp, Staphylococcus aureus VET1876R; identical to SEQ ID NO: 18619

SEQ ID NO: 20102 - DNA, 396 bp, Staphylococcus aureus VET1869R
ttgccattttctcaagattcaagtggcgatttagacttaaaagaagtatggaaaaaaaatcgcttggaaatgatttctgagtgtggaatggcattatttttatttggaaataaagaaaaggatggaaaaattgttttagctgatggattagaagaagaatataaaatagcagaaagacaagaattggttagactccctataaatgtgacaggttataaaacaaagaatctttcagaacaatataacgaagagataaatatacaatttaaagagaaaatattaaaaatgtataacgaaataaatgaatacaaatgtgatttttcaaataaacaaagtattgatgaattagttcaaaaaatagtaaatttagtaattgaaataaaaaaaacaaaataa

SEQ ID NO: 20103 - DNA, 609 bp, Staphylococcus aureus VET1869R; identical to SEQ ID NO: 18624

SEQ ID NO: 20104 - DNA, 927 bp, Staphylococcus aureus VET1869R; identical to SEQ ID NO: 18619

SEQ ID NO: 20105 - DNA, 1452 bp, Staphylococcus aureus VET1858R; identical to SEQ ID NO: 18653

SEQ ID NO: 20106 - DNA, 609 bp, Staphylococcus aureus VET1858R; identical to SEQ ID NO: 18624

SEQ ID NO: 20107 - DNA, 927 bp, Staphylococcus aureus VET1858R; identical to SEQ ID NO: 18619

SEQ ID NO: 20108 - DNA, 1452 bp, Staphylococcus aureus VET1842R; identical to SEQ ID NO: 18653

SEQ ID NO: 20109 - DNA, 609 bp, Staphylococcus aureus VET1842R; identical to SEQ ID NO: 18624

SEQ ID NO: 20110 - DNA, 927 bp, Staphylococcus aureus VET1842R; identical to SEQ ID NO: 18619

SEQ ID NO: 20111 - DNA, 1452 bp, Staphylococcus aureus VET1833R; identical to SEQ ID NO: 18653

SEQ ID NO: 20112 - DNA, 609 bp, Staphylococcus aureus VET1833R; identical to SEQ ID NO: 18624

SEQ ID NO: 20113 - DNA, 927 bp, Staphylococcus aureus VET1833R; identical to SEQ ID NO: 18619

SEQ ID NO: 20114 - DNA, 1452 bp, Staphylococcus aureus VET1515S; identical to SEQ ID NO: 18653

SEQ ID NO: 20115 - DNA, 609 bp, Staphylococcus aureus VET1515S; identical to SEQ ID NO: 18624

SEQ ID NO: 20116 - DNA, 927 bp, Staphylococcus aureus VET1515S; identical to SEQ ID NO: 18619

SEQ ID NO: 20117 - DNA, 1452 bp, Staphylococcus aureus VET1422S; identical to SEQ ID NO: 18653

SEQ ID NO: 20118 - DNA, 609 bp, Staphylococcus aureus VET1422S; identical to SEQ ID NO: 18624

SEQ ID NO: 20119 - DNA, 927 bp, Staphylococcus aureus VET1422S; identical to SEQ ID NO: 18619

SEQ ID NO: 20120 - DNA, 1452 bp, Staphylococcus aureus VET1419S; identical to SEQ ID NO: 18653

SEQ ID NO: 20121 - DNA, 609 bp, Staphylococcus aureus VET1419S; identical to SEQ ID NO: 18624

SEQ ID NO: 20122 - DNA, 927 bp, Staphylococcus aureus VET1419S; identical to SEQ ID NO: 18619

SEQ ID NO: 20123 - DNA, 1452 bp, Staphylococcus aureus VET1103S; identical to SEQ ID NO: 18653

SEQ ID NO: 20124 - DNA, 609 bp, Staphylococcus aureus VET1103S; identical to SEQ ID NO: 18624

SEQ ID NO: 20125 - DNA, 927 bp, Staphylococcus aureus VET1103S; identical to SEQ ID NO: 18619

SEQ ID NO: 20126 - DNA, 1452 bp, Staphylococcus aureus VET0798S; identical to SEQ ID NO: 18653

SEQ ID NO: 20127 - DNA, 609 bp, Staphylococcus aureus VET0798S; identical to SEQ ID NO: 18624

SEQ ID NO: 20128 - DNA, 927 bp, Staphylococcus aureus VET0798S; identical to SEQ ID NO: 18619

SEQ ID NO: 20129 - DNA, 1452 bp, Staphylococcus aureus VET0765S; identical to SEQ ID NO: 18653

SEQ ID NO: 20130 - DNA, 609 bp, Staphylococcus aureus VET0765S; identical to SEQ ID NO: 18624

SEQ ID NO: 20131 - DNA, 927 bp, Staphylococcus aureus VET0765S; identical to SEQ ID NO: 18619

SEQ ID NO: 20132 - DNA, 1452 bp, Staphylococcus aureus VET0612S; identical to SEQ ID NO: 18653

SEQ ID NO: 20133 - DNA, 609 bp, Staphylococcus aureus VET0612S; identical to SEQ ID NO: 18624

SEQ ID NO: 20134 - DNA, 927 bp, Staphylococcus aureus VET0612S; identical to SEQ ID NO: 18619

SEQ ID NO: 20135 - DNA, 1452 bp, Staphylococcus aureus VET0489R; identical to SEQ ID NO: 18653

SEQ ID NO: 20136 - DNA, 609 bp, Staphylococcus aureus VET0489R; identical to SEQ ID NO: 18624

SEQ ID NO: 20137 - DNA, 927 bp, Staphylococcus aureus VET0489R; identical to SEQ ID NO: 18619

SEQ ID NO: 20138 - DNA, 1128 bp, Staphylococcus aureus VET0473R; identical to SEQ ID NO: 18617

SEQ ID NO: 20139 - DNA, 609 bp, Staphylococcus aureus VET0473R; identical to SEQ ID NO: 18624

SEQ ID NO: 20140 - DNA, 927 bp, Staphylococcus aureus VET0473R; identical to SEQ ID NO: 18619

SEQ ID NO: 20141 - DNA, 1452 bp, Staphylococcus aureus VET0472R; identical to SEQ ID NO: 18653

SEQ ID NO: 20142 - DNA, 609 bp, Staphylococcus aureus VET0472R; identical to SEQ ID NO: 18624

SEQ ID NO: 20143 - DNA, 927 bp, Staphylococcus aureus VET0472R; identical to SEQ ID NO: 18619

SEQ ID NO: 20144 - DNA, 1452 bp, Staphylococcus aureus VET0471R; identical to SEQ ID NO: 18653

SEQ ID NO: 20145 - DNA, 609 bp, Staphylococcus aureus VET0471R; identical to SEQ ID NO: 18624

SEQ ID NO: 20146 - DNA, 927 bp, Staphylococcus aureus VET0471R; identical to SEQ ID NO: 18619

SEQ ID NO: 20147 - DNA, 1452 bp, Staphylococcus aureus VET0469R; identical to SEQ ID NO: 18653

SEQ ID NO: 20148 - DNA, 609 bp, Staphylococcus aureus VET0469R; identical to SEQ ID NO: 18624

SEQ ID NO: 20149 - DNA, 927 bp, Staphylococcus aureus VET0469R; identical to SEQ ID NO: 18619

SEQ ID NO: 20150 - DNA, 1452 bp, Staphylococcus aureus VET0467R; identical to SEQ ID NO: 18653

SEQ ID NO: 20151 - DNA, 609 bp, Staphylococcus aureus VET0467R; identical to SEQ ID NO: 18624

SEQ ID NO: 20152 - DNA, 927 bp, Staphylococcus aureus VET0467R; identical to SEQ ID NO: 18619

SEQ ID NO: 20153 - DNA, 1452 bp, Staphylococcus aureus VET0437R; identical to SEQ ID NO: 18653

SEQ ID NO: 20154 - DNA, 609 bp, Staphylococcus aureus VET0437R; identical to SEQ ID NO: 18624

SEQ ID NO: 20155 - DNA, 927 bp, Staphylococcus aureus VET0437R; identical to SEQ ID NO: 18619

SEQ ID NO: 20156 - DNA, 1452 bp, Staphylococcus aureus VET0436R; identical to SEQ ID NO: 18653

SEQ ID NO: 20157 - DNA, 609 bp, Staphylococcus aureus VET0436R; identical to SEQ ID NO: 18624

SEQ ID NO: 20158 - DNA, 927 bp, Staphylococcus aureus VET0436R; identical to SEQ ID NO: 18619

SEQ ID NO: 20159 - DNA, 1452 bp, Staphylococcus aureus VET0426R; identical to SEQ ID NO: 18653

SEQ ID NO: 20160 - DNA, 609 bp, Staphylococcus aureus VET0426R; identical to SEQ ID NO: 18624

SEQ ID NO: 20161 - DNA, 927 bp, Staphylococcus aureus VET0426R; identical to SEQ ID NO: 18619

SEQ ID NO: 20162 - DNA, 1452 bp, Staphylococcus aureus VET0424R; identical to SEQ ID NO: 18653

SEQ ID NO: 20163 - DNA, 609 bp, Staphylococcus aureus VET0424R; identical to SEQ ID NO: 18624

SEQ ID NO: 20164 - DNA, 927 bp, Staphylococcus aureus VET0424R; identical to SEQ ID NO: 18619

SEQ ID NO: 20165 - DNA, 1452 bp, Staphylococcus aureus VET0422R; identical to SEQ ID NO: 18653

SEQ ID NO: 20166 - DNA, 609 bp, Staphylococcus aureus VET0422R; identical to SEQ ID NO: 18624

SEQ ID NO: 20167 - DNA, 927 bp, Staphylococcus aureus VET0422R; identical to SEQ ID NO: 18619

SEQ ID NO: 20168 - DNA, 1452 bp, Staphylococcus aureus VET0414R; identical to SEQ ID NO: 18653

SEQ ID NO: 20169 - DNA, 609 bp, Staphylococcus aureus VET0414R; identical to SEQ ID NO: 18624

SEQ ID NO: 20170 - DNA, 927 bp, Staphylococcus aureus VET0414R; identical to SEQ ID NO: 18619

SEQ ID NO: 20171 - DNA, 1452 bp, Staphylococcus aureus VET0400R; identical to SEQ ID NO: 18653

SEQ ID NO: 20172 - DNA, 609 bp, Staphylococcus aureus VET0400R; identical to SEQ ID NO: 18624

SEQ ID NO: 20173 - DNA, 927 bp, Staphylococcus aureus VET0400R; identical to SEQ ID NO: 18619

SEQ ID NO: 20174 - DNA, 1452 bp, Staphylococcus aureus VET0368R; identical to SEQ ID NO: 18653

SEQ ID NO: 20175 - DNA, 609 bp, Staphylococcus aureus VET0368R; identical to SEQ ID NO: 18624

SEQ ID NO: 20176 - DNA, 927 bp, Staphylococcus aureus VET0368R; identical to SEQ ID NO: 18619

SEQ ID NO: 20177 - DNA, 1452 bp, Staphylococcus aureus VET0361R; identical to SEQ ID NO: 18653

SEQ ID NO: 20178 - DNA, 609 bp, Staphylococcus aureus VET0361R; identical to SEQ ID NO: 18624

SEQ ID NO: 20179 - DNA, 927 bp, Staphylococcus aureus VET0361R; identical to SEQ ID NO: 18619

SEQ ID NO: 20180 - DNA, 1452 bp, Staphylococcus aureus VET0358R; identical to SEQ ID NO: 18653

SEQ ID NO: 20181 - DNA, 609 bp, Staphylococcus aureus VET0358R; identical to SEQ ID NO: 18624

SEQ ID NO: 20182 - DNA, 927 bp, Staphylococcus aureus VET0358R; identical to SEQ ID NO: 18619

SEQ ID NO: 20183 - DNA, 1452 bp, Staphylococcus aureus VET0353R; identical to SEQ ID NO: 18653

SEQ ID NO: 20184 - DNA, 609 bp, Staphylococcus aureus VET0353R; identical to SEQ ID NO: 18624

SEQ ID NO: 20185 - DNA, 927 bp, Staphylococcus aureus VET0353R; identical to SEQ ID NO: 18619

SEQ ID NO: 20186 - DNA, 1452 bp, Staphylococcus aureus VET0343R; identical to SEQ ID NO: 18653

SEQ ID NO: 20187 - DNA, 609 bp, Staphylococcus aureus VET0343R; identical to SEQ ID NO: 18624

SEQ ID NO: 20188 - DNA, 927 bp, Staphylococcus aureus VET0343R; identical to SEQ ID NO: 18619

SEQ ID NO: 20189 - DNA, 1452 bp, Staphylococcus aureus VET0342R; identical to SEQ ID NO: 18653

SEQ ID NO: 20190 - DNA, 609 bp, Staphylococcus aureus VET0342R; identical to SEQ ID NO: 18624

SEQ ID NO: 20191 - DNA, 927 bp, Staphylococcus aureus VET0342R; identical to SEQ ID NO: 18619

SEQ ID NO: 20192 - DNA, 1452 bp, Staphylococcus aureus VET0332R
atgactatagataagaaaaaattcattgaaaaatatgtaaaagctttagaaagtaatacagcggctatttttgctggagcaggattatcttgtggagcaggttatgttaattggaagacattgcttaatgaagcagcagaagaattagaattaaatatagataaagaagaacatgatcttgtaggattagcacaacattatattaataagaaaagaagtcgtggaaatctaaatacagtaataatggagcaattttcaacaagagcagaattaacagaaaatcataagcttttagcaaaacttcccattgatacatattggacaactaattatgattgtatgattgaaaaagctcttgattctgagggcagaattgtagatgtgaaaagaaatcaaaatcaattaactgtttcagtagccgataaggatgctacagtttataaaatgcatggggatatagacagtatagacaagattattttaactagagatgattatgaaaaatataatctaactcatccaaagtttcgtgaaatattggaaggagatttactttcaaaaacttttctattcataggttttagctttacagatccaaatattagttatatcttatcgagaataagattagtgttagaagacaatactagaccacattattgtattttaaaagaagtagaagaaaaggaatatgataatacagaagaatttatgtatgcaaagataaaacaacaacttcatatagaagatttaagccgattttcaatagaaactttattagttaaagattatattgaaatcacagaaatattagaaagtatttataaaagatatagaagaaaaacaatttttatatcaggaagtgctacagaatatttaccttttaattcagaagcagggaaatattttttacatcaactaagtaaaaaattagttgaaaatgattttaaattagttacaggttttggattaggagtaggatcatatgttattaatggagtagctgattatattaatagtaataagaagtctaaactacagaatcatttaaatatattgccattttctcaagattcaagtggcgatttagacttaaaagaagtatggaaaaaaaatcgcttggaaatgatttctgagtgtggaatggcattatttttatttggaaataaagaaaaggatggaaaaattgttttagctgatggattagaagaagaatataaaatagcagaaagacaagaattggttagactccctataaatgtgacaggttataaaacaaagaatctttcagaacaatataacgaagagataaatatacaatttaaagagaaaatattaaaaatgtataacgaaataaatgaatacaaatgtgatttttcaaataaacaaagtattgatgaattagttcaaaaaatagtaaatttagtaattgaaataaaaaaaacaaaataa

SEQ ID NO: 20193 - DNA, 609 bp, Staphylococcus aureus VET0332R; identical to SEQ ID NO: 18624

SEQ ID NO: 20194 - DNA, 927 bp, Staphylococcus aureus VET0332R; identical to SEQ ID NO: 18619

SEQ ID NO: 20195 - DNA, 1452 bp, Staphylococcus aureus VET0319R; identical to SEQ ID NO: 18653

SEQ ID NO: 20196 - DNA, 609 bp, Staphylococcus aureus VET0319R; identical to SEQ ID NO: 18624

SEQ ID NO: 20197 - DNA, 927 bp, Staphylococcus aureus VET0319R; identical to SEQ ID NO: 18619

SEQ ID NO: 20198 - DNA, 1452 bp, Staphylococcus aureus VET0306R; identical to SEQ ID NO: 18653

SEQ ID NO: 20199 - DNA, 609 bp, Staphylococcus aureus VET0306R; identical to SEQ ID NO: 18624

SEQ ID NO: 20200 - DNA, 927 bp, Staphylococcus aureus VET0306R; identical to SEQ ID NO: 18619

SEQ ID NO: 20201 - DNA, 1452 bp, Staphylococcus aureus VET0301R; identical to SEQ ID NO: 18653

SEQ ID NO: 20202 - DNA, 609 bp, Staphylococcus aureus VET0301R; identical to SEQ ID NO: 18624

SEQ ID NO: 20203 - DNA, 927 bp, Staphylococcus aureus VET0301R; identical to SEQ ID NO: 18619

SEQ ID NO: 20204 - DNA, 1452 bp, Staphylococcus aureus VET0298R; identical to SEQ ID NO: 18653

SEQ ID NO: 20205 - DNA, 609 bp, Staphylococcus aureus VET0298R; identical to SEQ ID NO: 18624

SEQ ID NO: 20206 - DNA, 927 bp, Staphylococcus aureus VET0298R; identical to SEQ ID NO: 18619

SEQ ID NO: 20207 - DNA, 1452 bp, Staphylococcus aureus VET0293R; identical to SEQ ID NO: 18653

SEQ ID NO: 20208 - DNA, 609 bp, Staphylococcus aureus VET0293R; identical to SEQ ID NO: 18624

SEQ ID NO: 20209 - DNA, 927 bp, Staphylococcus aureus VET0293R; identical to SEQ ID NO: 18619

SEQ ID NO: 20210 - DNA, 1452 bp, Staphylococcus aureus VET0251R; identical to SEQ ID NO: 18653

SEQ ID NO: 20211 - DNA, 609 bp, Staphylococcus aureus VET0251R; identical to SEQ ID NO: 18624

SEQ ID NO: 20212 - DNA, 927 bp, Staphylococcus aureus VET0251R; identical to SEQ ID NO: 18619

SEQ ID NO: 20213 - DNA, 1452 bp, Staphylococcus aureus VET0244R; identical to SEQ ID NO: 18653

SEQ ID NO: 20214 - DNA, 609 bp, Staphylococcus aureus VET0244R; identical to SEQ ID NO: 18624

SEQ ID NO: 20215 - DNA, 927 bp, Staphylococcus aureus VET0244R; identical to SEQ ID NO: 18619

SEQ ID NO: 20216 - DNA, 1452 bp, Staphylococcus aureus VET0235R; identical to SEQ ID NO: 18653

SEQ ID NO: 20217 - DNA, 609 bp, Staphylococcus aureus VET0235R; identical to SEQ ID NO: 18624

SEQ ID NO: 20218 - DNA, 927 bp, Staphylococcus aureus VET0235R; identical to SEQ ID NO: 18619

SEQ ID NO: 20219 - DNA, 1452 bp, Staphylococcus aureus VET0232R; identical to SEQ ID NO: 18653

SEQ ID NO: 20220 - DNA, 609 bp, Staphylococcus aureus VET0232R; identical to SEQ ID NO: 18624

SEQ ID NO: 20221 - DNA, 927 bp, Staphylococcus aureus VET0232R; identical to SEQ ID NO: 18619

SEQ ID NO: 20222 - DNA, 1452 bp, Staphylococcus aureus VET0229R; identical to SEQ ID NO: 18653

SEQ ID NO: 20223 - DNA, 609 bp, Staphylococcus aureus VET0229R; identical to SEQ ID NO: 18624

SEQ ID NO: 20224 - DNA, 927 bp, Staphylococcus aureus VET0229R; identical to SEQ ID NO: 18619

SEQ ID NO: 20225 - DNA, 1452 bp, Staphylococcus aureus VET0219R; identical to SEQ ID NO: 18653

SEQ ID NO: 20226 - DNA, 609 bp, Staphylococcus aureus VET0219R; identical to SEQ ID NO: 18624

SEQ ID NO: 20227 - DNA, 927 bp, Staphylococcus aureus VET0219R; identical to SEQ ID NO: 18619

SEQ ID NO: 20228 - DNA, 1452 bp, Staphylococcus aureus VET0203R; identical to SEQ ID NO: 18653

SEQ ID NO: 20229 - DNA, 609 bp, Staphylococcus aureus VET0203R; identical to SEQ ID NO: 18624

SEQ ID NO: 20230 - DNA, 927 bp, Staphylococcus aureus VET0203R
gtggaaagacaacaaacttacaaagaaaaagcgcaacacctatataaagttaaaaaaatcaaaaatagatataatacgaaaagtgcagaagaatattttttctcgattcctcaagtaaaatacattctttcagcaggaagaatgaaaaaacataaagagaattataatgcttcagagataaaaataaaaaaagcagctttagaaaagagtaggaagaataagaattggaaaattgaagaacgtttaataaaagctaagatatatactcaaaaagttgatccagaatacttaaatatttatatgaaagcttatcataagaaagatataactacagaagaaaaactagaaattctaacggaattaaaaaaatttgatacagaaaatatagtgcgtttttttagaaaattaaatgatgctgaacaaaataaaatgattagaaatttagcctttaaatatttacaagattacggtcactatgtgaaactaaggaaaaattttaaaggaaagaagaaagtatatcaaactgagagagcttctttagacactaaaaaacctgaagatttatataatgatttaacaaataagaatattcaatctcaaaaagtctatgatatttttatttctcatagtacaaaagataagaagacagttgaagatattataagagtttttaatgaacaaaataaaacgtgttattgtgattggactatggatcaagattatttaaaaaggaagtatgttggtgaatatacaaagcaagtattgaaggctcgtatggagcaaagtaaaatgctggttttgttgagaacggagaattcagttcaatctgattgggttagttttgaaatagaatactttgaaaatctaaaaaaacctatatatatagtagagtctcttgaagaattattagaggctttttcagattag

SEQ ID NO: 20231 - DNA, 1452 bp, Staphylococcus aureus VET0197R; identical to SEQ ID NO: 18653

SEQ ID NO: 20232 - DNA, 609 bp, Staphylococcus aureus VET0197R; identical to SEQ ID NO: 18624

SEQ ID NO: 20233 - DNA, 927 bp, Staphylococcus aureus VET0197R; identical to SEQ ID NO: 18619

SEQ ID NO: 20234 - DNA, 1452 bp, Staphylococcus aureus VET0191R; identical to SEQ ID NO: 18653

SEQ ID NO: 20235 - DNA, 609 bp, Staphylococcus aureus VET0191R; identical to SEQ ID NO: 18624

SEQ ID NO: 20236 - DNA, 927 bp, Staphylococcus aureus VET0191R; identical to SEQ ID NO: 18619

SEQ ID NO: 20237 - DNA, 1452 bp, Staphylococcus aureus VET0184R; identical to SEQ ID NO: 18653

SEQ ID NO: 20238 - DNA, 609 bp, Staphylococcus aureus VET0184R; identical to SEQ ID NO: 18624

SEQ ID NO: 20239 - DNA, 927 bp, Staphylococcus aureus VET0184R; identical to SEQ ID NO: 18619

SEQ ID NO: 20240 - DNA, 1452 bp, Staphylococcus aureus VET0183R; identical to SEQ ID NO: 18653

SEQ ID NO: 20241 - DNA, 609 bp, Staphylococcus aureus VET0183R; identical to SEQ ID NO: 18624

SEQ ID NO: 20242 - DNA, 927 bp, Staphylococcus aureus VET0183R; identical to SEQ ID NO: 18619

SEQ ID NO: 20243 - DNA, 1452 bp, Staphylococcus aureus VET0159R; identical to SEQ ID NO: 18653

SEQ ID NO: 20244 - DNA, 609 bp, Staphylococcus aureus VET0159R; identical to SEQ ID NO: 18624

SEQ ID NO: 20245 - DNA, 927 bp, Staphylococcus aureus VET0159R; identical to SEQ ID NO: 18619

SEQ ID NO: 20246 - DNA, 1452 bp, Staphylococcus aureus VET0158R; identical to SEQ ID NO: 18653

SEQ ID NO: 20247 - DNA, 609 bp, Staphylococcus aureus VET0158R; identical to SEQ ID NO: 18624

SEQ ID NO: 20248 - DNA, 927 bp, Staphylococcus aureus VET0158R; identical to SEQ ID NO: 18619

SEQ ID NO: 20249 - DNA, 1452 bp, Staphylococcus aureus VET0157R; identical to SEQ ID NO: 18653

SEQ ID NO: 20250 - DNA, 609 bp, Staphylococcus aureus VET0157R; identical to SEQ ID NO: 18624

SEQ ID NO: 20251 - DNA, 927 bp, Staphylococcus aureus VET0157R; identical to SEQ ID NO: 18619

SEQ ID NO: 20252 - DNA, 1452 bp, Staphylococcus aureus VET0154R; identical to SEQ ID NO: 18653

SEQ ID NO: 20253 - DNA, 609 bp, Staphylococcus aureus VET0154R; identical to SEQ ID NO: 18624

SEQ ID NO: 20254 - DNA, 927 bp, Staphylococcus aureus VET0154R; identical to SEQ ID NO: 18619

SEQ ID NO: 20255 - DNA, 1452 bp, Staphylococcus aureus VET0150R; identical to SEQ ID NO: 18653

SEQ ID NO: 20256 - DNA, 609 bp, Staphylococcus aureus VET0150R; identical to SEQ ID NO: 18624

SEQ ID NO: 20257 - DNA, 927 bp, Staphylococcus aureus VET0150R; identical to SEQ ID NO: 18619

SEQ ID NO: 20258 - DNA, 1452 bp, Staphylococcus aureus VET0141R; identical to SEQ ID NO: 18653

SEQ ID NO: 20259 - DNA, 609 bp, Staphylococcus aureus VET0141R; identical to SEQ ID NO: 18624

SEQ ID NO: 20260 - DNA, 927 bp, Staphylococcus aureus VET0141R; identical to SEQ ID NO: 18619

SEQ ID NO: 20261 - DNA, 1452 bp, Staphylococcus aureus VET0136R; identical to SEQ ID NO: 18653

SEQ ID NO: 20262 - DNA, 609 bp, Staphylococcus aureus VET0136R; identical to SEQ ID NO: 18624

SEQ ID NO: 20263 - DNA, 927 bp, Staphylococcus aureus VET0136R; identical to SEQ ID NO: 18619

SEQ ID NO: 20264 - DNA, 1452 bp, Staphylococcus aureus VET0125R; identical to SEQ ID NO: 18653

SEQ ID NO: 20265 - DNA, 609 bp, Staphylococcus aureus VET0125R; identical to SEQ ID NO: 18624

SEQ ID NO: 20266 - DNA, 927 bp, Staphylococcus aureus VET0125R; identical to SEQ ID NO: 18619

SEQ ID NO: 20267 - DNA, 1452 bp, Staphylococcus aureus VET0120R; identical to SEQ ID NO: 18653

SEQ ID NO: 20268 - DNA, 609 bp, Staphylococcus aureus VET0120R; identical to SEQ ID NO: 18624

SEQ ID NO: 20269 - DNA, 927 bp, Staphylococcus aureus VET0120R; identical to SEQ ID NO: 18619

SEQ ID NO: 20270 - DNA, 1452 bp, Staphylococcus aureus VET0113R; identical to SEQ ID NO: 18653

SEQ ID NO: 20271 - DNA, 609 bp, Staphylococcus aureus VET0113R; identical to SEQ ID NO: 18624

SEQ ID NO: 20272 - DNA, 927 bp, Staphylococcus aureus VET0113R; identical to SEQ ID NO: 18619

SEQ ID NO: 20273 - DNA, 1452 bp, Staphylococcus aureus VET0111R; identical to SEQ ID NO: 18653

SEQ ID NO: 20274 - DNA, 609 bp, Staphylococcus aureus VET0111R; identical to SEQ ID NO: 18624

SEQ ID NO: 20275 - DNA, 927 bp, Staphylococcus aureus VET0111R; identical to SEQ ID NO: 18619

SEQ ID NO: 20276 - DNA, 1452 bp, Staphylococcus aureus VET0102R; identical to SEQ ID NO: 18653

SEQ ID NO: 20277 - DNA, 609 bp, Staphylococcus aureus VET0102R; identical to SEQ ID NO: 18624

SEQ ID NO: 20278 - DNA, 927 bp, Staphylococcus aureus VET0102R; identical to SEQ ID NO: 18619

SEQ ID NO: 20279 - DNA, 1452 bp, Staphylococcus aureus VET0081R; identical to SEQ ID NO: 18653

SEQ ID NO: 20280 - DNA, 609 bp, Staphylococcus aureus VET0081R; identical to SEQ ID NO: 18624

SEQ ID NO: 20281 - DNA, 927 bp, Staphylococcus aureus VET0081R; identical to SEQ ID NO: 18619

SEQ ID NO: 20282 - DNA, 1452 bp, Staphylococcus aureus VET0078R; identical to SEQ ID NO: 18653

SEQ ID NO: 20283 - DNA, 609 bp, Staphylococcus aureus VET0078R; identical to SEQ ID NO: 18624

SEQ ID NO: 20284 - DNA, 927 bp, Staphylococcus aureus VET0078R; identical to SEQ ID NO: 18619

SEQ ID NO: 20285 - DNA, 1452 bp, Staphylococcus aureus VET0058R; identical to SEQ ID NO: 18653

SEQ ID NO: 20286 - DNA, 609 bp, Staphylococcus aureus VET0058R; identical to SEQ ID NO: 18624

SEQ ID NO: 20287 - DNA, 927 bp, Staphylococcus aureus VET0058R; identical to SEQ ID NO: 20230

SEQ ID NO: 20288 - DNA, 1452 bp, Staphylococcus aureus VET0050R; identical to SEQ ID NO: 18653

SEQ ID NO: 20289 - DNA, 609 bp, Staphylococcus aureus VET0050R; identical to SEQ ID NO: 18624

SEQ ID NO: 20290 - DNA, 927 bp, Staphylococcus aureus VET0050R; identical to SEQ ID NO: 18619

SEQ ID NO: 20291 - DNA, 1452 bp, Staphylococcus aureus VE08/02242ST1; identical to SEQ ID NO: 18653

SEQ ID NO: 20292 - DNA, 609 bp, Staphylococcus aureus VE08/02242ST1; identical to SEQ ID NO: 18624

SEQ ID NO: 20293 - DNA, 927 bp, Staphylococcus aureus VE08/02242ST1; identical to SEQ ID NO: 18619

SEQ ID NO: 20294 - DNA, 1128 bp, Staphylococcus aureus USA_6; identical to SEQ ID NO: 18617

SEQ ID NO: 20295 - DNA, 609 bp, Staphylococcus aureus USA_6; identical to SEQ ID NO: 18624

SEQ ID NO: 20296 - DNA, 927 bp, Staphylococcus aureus USA_6; identical to SEQ ID NO: 18619

SEQ ID NO: 20297 - DNA, 1452 bp, Staphylococcus aureus Tur-5; identical to SEQ ID NO: 18653

SEQ ID NO: 20298 - DNA, 609 bp, Staphylococcus aureus Tur-5; identical to SEQ ID NO: 18624

SEQ ID NO: 20299 - DNA, 927 bp, Staphylococcus aureus Tur-5; identical to SEQ ID NO: 18619

SEQ ID NO: 20300 - DNA, 1452 bp, Staphylococcus aureus Tur-4; identical to SEQ ID NO: 18653

SEQ ID NO: 20301 - DNA, 609 bp, Staphylococcus aureus Tur-4; identical to SEQ ID NO: 18624

SEQ ID NO: 20302 - DNA, 927 bp, Staphylococcus aureus Tur-4; identical to SEQ ID NO: 18619

SEQ ID NO: 20303 - DNA, 1452 bp, Staphylococcus aureus S64_POEL; identical to SEQ ID NO: 18653

SEQ ID NO: 20304 - DNA, 609 bp, Staphylococcus aureus S64_POEL; identical to SEQ ID NO: 18624

SEQ ID NO: 20305 - DNA, 927 bp, Staphylococcus aureus S64_POEL; identical to SEQ ID NO: 18619

SEQ ID NO: 20306 - DNA, 1452 bp, Staphylococcus aureus S63_POEL; identical to SEQ ID NO: 18653

SEQ ID NO: 20307 - DNA, 609 bp, Staphylococcus aureus S63_POEL; identical to SEQ ID NO: 18624

SEQ ID NO: 20308 - DNA, 927 bp, Staphylococcus aureus S63_POEL; identical to SEQ ID NO: 18619

SEQ ID NO: 20309 - DNA, 1452 bp, Staphylococcus aureus Rd.290; identical to SEQ ID NO: 18653

SEQ ID NO: 20310 - DNA, 609 bp, Staphylococcus aureus Rd.290; identical to SEQ ID NO: 18624

SEQ ID NO: 20311 - DNA, 927 bp, Staphylococcus aureus Rd.290; identical to SEQ ID NO: 18619

SEQ ID NO: 20312 - DNA, 1452 bp, Staphylococcus aureus MSSA-47; identical to SEQ ID NO: 18653

SEQ ID NO: 20313 - DNA, 609 bp, Staphylococcus aureus MSSA-47; identical to SEQ ID NO: 18624

SEQ ID NO: 20314 - DNA, 927 bp, Staphylococcus aureus MSSA-47; identical to SEQ ID NO: 18619

SEQ ID NO: 20315 - DNA, 1128 bp, Staphylococcus aureus MSSA-37; identical to SEQ ID NO: 18617

SEQ ID NO: 20316 - DNA, 609 bp, Staphylococcus aureus MSSA-37; identical to SEQ ID NO: 18624

SEQ ID NO: 20317 - DNA, 927 bp, Staphylococcus aureus MSSA-37; identical to SEQ ID NO: 18619

SEQ ID NO: 20318 - DNA, 1128 bp, Staphylococcus aureus MSSA-123; identical to SEQ ID NO: 18617

SEQ ID NO: 20319 - DNA, 609 bp, Staphylococcus aureus MSSA-123; identical to SEQ ID NO: 18624

SEQ ID NO: 20320 - DNA, 927 bp, Staphylococcus aureus MSSA-123; identical to SEQ ID NO: 18619

SEQ ID NO: 20321 - DNA, 1452 bp, Staphylococcus aureus GD2010-169; identical to SEQ ID NO: 18653

SEQ ID NO: 20322 - DNA, 609 bp, Staphylococcus aureus GD2010-169; identical to SEQ ID NO: 18624

SEQ ID NO: 20323 - DNA, 927 bp, Staphylococcus aureus GD2010-169; identical to SEQ ID NO: 18619

SEQ ID NO: 20324 - DNA, 1452 bp, Staphylococcus aureus GD2010-159; identical to SEQ ID NO: 18653

SEQ ID NO: 20325 - DNA, 609 bp, Staphylococcus aureus GD2010-159; identical to SEQ ID NO: 18624

SEQ ID NO: 20326 - DNA, 927 bp, Staphylococcus aureus GD2010-159; identical to SEQ ID NO: 18619

SEQ ID NO: 20327 - DNA, 1452 bp, Staphylococcus aureus C3452; identical to SEQ ID NO: 18653

SEQ ID NO: 20328 - DNA, 609 bp, Staphylococcus aureus C3452; identical to SEQ ID NO: 18624

SEQ ID NO: 20329 - DNA, 927 bp, Staphylococcus aureus C3452; identical to SEQ ID NO: 18619

SEQ ID NO: 20330 - DNA, 1452 bp, Staphylococcus aureus C0676; identical to SEQ ID NO: 18653

SEQ ID NO: 20331 - DNA, 609 bp, Staphylococcus aureus C0676; identical to SEQ ID NO: 18624

SEQ ID NO: 20332 - DNA, 927 bp, Staphylococcus aureus C0676; identical to SEQ ID NO: 18619

SEQ ID NO: 20333 - DNA, 1452 bp, Staphylococcus aureus C0626; identical to SEQ ID NO: 18653

SEQ ID NO: 20334 - DNA, 609 bp, Staphylococcus aureus C0626; identical to SEQ ID NO: 18624

SEQ ID NO: 20335 - DNA, 927 bp, Staphylococcus aureus C0626
gtggaaagacaacaaacttacaaagaaaaagcgcaacacctatataaagttaaaaaaatcaaaaatagatataatacgaaaagtgcagaagaatattttttctcgattcctcaagtaaaatacattctttcagcaggaagaatgaaaaaacataaagagaattataatgcttcagagataaaaataaaaaaagcagctttagaaaagagtaggaagaataagaattggaaaattgaagaacgtttaataaaagctaagagatatactcaaaaagttgatccagaatacttaaatatttatatgaaagcttatcataagaaagatataactacagaagaaaaactagaaattctaacggaattaaaaaaatttgatacagaaaatatagtgcgtttttttagaaaattaaatgatgctgaacaaaataaaatgattagaaatttagcctttaaatatttacaagattacggtcactatgtgaaactaaggaaaaattttaaaggaaagaagaaagtatatcaaactgagagagcttctttagacactaaaaaacctgaagatttatataatgatttaacaaataagaatattcaatctcaaaaagtctatgatatttttatttctcatagtacaaaagataagaagacagttgaagatattataagagtttttaatgaacaaaataaaacgtgttattgtgattggactatggatcaagattatttaaaaaggaagtatgttggtgaatatacaaagcaagtattgaaggctcgtatggagcaaagtaaaatgctggttttgttgagtacggagaattcagttcaatctgattgggttagttttgaaatagaatactttgaaaatctaaaaaaacctatatatatagtagagtctcttgaagaattattagaggctttttcagattag

SEQ ID NO: 20336 - DNA, 1452 bp, Staphylococcus aureus 81629; identical to SEQ ID NO: 18695

SEQ ID NO: 20337 - DNA, 609 bp, Staphylococcus aureus 81629; identical to SEQ ID NO: 18624

SEQ ID NO: 20338 - DNA, 927 bp, Staphylococcus aureus 81629; identical to SEQ ID NO: 18619

SEQ ID NO: 20339 - DNA, 1452 bp, Staphylococcus aureus 63-D10; identical to SEQ ID NO: 18695

SEQ ID NO: 20340 - DNA, 609 bp, Staphylococcus aureus 63-D10; identical to SEQ ID NO: 18624

SEQ ID NO: 20341 - DNA, 927 bp, Staphylococcus aureus 63-D10; identical to SEQ ID NO: 18619

SEQ ID NO: 20342 - DNA, 1452 bp, Staphylococcus aureus 53180-1; identical to SEQ ID NO: 18653

SEQ ID NO: 20343 - DNA, 609 bp, Staphylococcus aureus 53180-1; identical to SEQ ID NO: 18624

SEQ ID NO: 20344 - DNA, 927 bp, Staphylococcus aureus 53180-1; identical to SEQ ID NO: 18619

SEQ ID NO: 20345 - DNA, 1452 bp, Staphylococcus aureus 45(2607); identical to SEQ ID NO: 18653

SEQ ID NO: 20346 - DNA, 609 bp, Staphylococcus aureus 45(2607); identical to SEQ ID NO: 18624

SEQ ID NO: 20347 - DNA, 927 bp, Staphylococcus aureus 45(2607); identical to SEQ ID NO: 18619

SEQ ID NO: 20348 - DNA, 1452 bp, Staphylococcus aureus 28(3K2-5); identical to SEQ ID NO: 18653

SEQ ID NO: 20349 - DNA, 609 bp, Staphylococcus aureus 28(3K2-5); identical to SEQ ID NO: 18624

SEQ ID NO: 20350 - DNA, 927 bp, Staphylococcus aureus 28(3K2-5); identical to SEQ ID NO: 18619

SEQ ID NO: 20351 - DNA, 1452 bp, Staphylococcus aureus 22(2K81-5); identical to SEQ ID NO: 18653

SEQ ID NO: 20352 - DNA, 609 bp, Staphylococcus aureus 22(2K81-5); identical to SEQ ID NO: 18624

SEQ ID NO: 20353 - DNA, 927 bp, Staphylococcus aureus 22(2K81-5); identical to SEQ ID NO: 18619

SEQ ID NO: 20354 - DNA, 1452 bp, Staphylococcus aureus 2011-60-2275-7; identical to SEQ ID NO: 18653

SEQ ID NO: 20355 - DNA, 609 bp, Staphylococcus aureus 2011-60-2275-7; identical to SEQ ID NO: 18624

SEQ ID NO: 20356 - DNA, 927 bp, Staphylococcus aureus 2011-60-2275-7; identical to SEQ ID NO: 18619

SEQ ID NO: 20357 - DNA, 1452 bp, Staphylococcus aureus 1484-9; identical to SEQ ID NO: 18653

SEQ ID NO: 20358 - DNA, 609 bp, Staphylococcus aureus 1484-9; identical to SEQ ID NO: 18624

SEQ ID NO: 20359 - DNA, 927 bp, Staphylococcus aureus 1484-9; identical to SEQ ID NO: 18619

SEQ ID NO: 20360 - DNA, 1452 bp, Staphylococcus aureus 1111001578; identical to SEQ ID NO: 18653

SEQ ID NO: 20361 - DNA, 609 bp, Staphylococcus aureus 1111001578; identical to SEQ ID NO: 18624

SEQ ID NO: 20362 - DNA, 927 bp, Staphylococcus aureus 1111001578; identical to SEQ ID NO: 18619

SEQ ID NO: 20363 - DNA, 1452 bp, Staphylococcus aureus 10S00488; identical to SEQ ID NO: 18695

SEQ ID NO: 20364 - DNA, 609 bp, Staphylococcus aureus 10S00488; identical to SEQ ID NO: 18624

SEQ ID NO: 20365 - DNA, 927 bp, Staphylococcus aureus 10S00488; identical to SEQ ID NO: 18619

SEQ ID NO: 20366 - DNA, 1452 bp, Staphylococcus aureus 1(04GN_04-02-52-07); identical to SEQ ID NO: 18653

SEQ ID NO: 20367 - DNA, 609 bp, Staphylococcus aureus 1(04GN_04-02-52-07); identical to SEQ ID NO: 18624

SEQ ID NO: 20368 - DNA, 927 bp, Staphylococcus aureus 1(04GN_04-02-52-07); identical to SEQ ID NO: 18619

SEQ ID NO: 20369 - DNA, 1452 bp, Staphylococcus aureus 09S01694; identical to SEQ ID NO: 18695

SEQ ID NO: 20370 - DNA, 609 bp, Staphylococcus aureus 09S01694; identical to SEQ ID NO: 18624

SEQ ID NO: 20371 - DNA, 927 bp, Staphylococcus aureus 09S01694; identical to SEQ ID NO: 18619

SEQ ID NO: 20372 - DNA, 1452 bp, Staphylococcus aureus 09-00736; identical to SEQ ID NO: 18653

SEQ ID NO: 20373 - DNA, 609 bp, Staphylococcus aureus 09-00736; identical to SEQ ID NO: 18624

SEQ ID NO: 20374 - DNA, 927 bp, Staphylococcus aureus 09-00736; identical to SEQ ID NO: 18619

SEQ ID NO: 20375 - DNA, 1452 bp, Staphylococcus aureus 08-01229; identical to SEQ ID NO: 18653

SEQ ID NO: 20376 - DNA, 609 bp, Staphylococcus aureus 08-01229; identical to SEQ ID NO: 18624

SEQ ID NO: 20377 - DNA, 927 bp, Staphylococcus aureus 08-01229; identical to SEQ ID NO: 18619

SEQ ID NO: 20378 - DNA, 1452 bp, Staphylococcus aureus 08-01062; identical to SEQ ID NO: 18653

SEQ ID NO: 20379 - DNA, 609 bp, Staphylococcus aureus 08-01062; identical to SEQ ID NO: 18624

SEQ ID NO: 20380 - DNA, 927 bp, Staphylococcus aureus 08-01062; identical to SEQ ID NO: 18619

SEQ ID NO: 20381 - DNA, 1452 bp, Staphylococcus aureus 08-01059; identical to SEQ ID NO: 18653

SEQ ID NO: 20382 - DNA, 609 bp, Staphylococcus aureus 08-01059; identical to SEQ ID NO: 18624

SEQ ID NO: 20383 - DNA, 927 bp, Staphylococcus aureus 08-01059; identical to SEQ ID NO: 18619

SEQ ID NO: 20384 - DNA, 1446 bp, Escherichia coli 1-176-05_S1_C3; identical to SEQ ID NO: 20070

SEQ ID NO: 20385 - DNA, 468 bp, Escherichia coli 1-176-05_S1_C3; identical to SEQ ID NO: 18646

SEQ ID NO: 20386 - DNA, 1446 bp, Escherichia coli 1-176-05_S1_C2; identical to SEQ ID NO: 20070

SEQ ID NO: 20387 - DNA, 468 bp, Escherichia coli 1-176-05_S1_C2; identical to SEQ ID NO: 18646

SEQ ID NO: 20388 - DNA, 1452 bp, Burkholderia cenocepacia
atggtcgcggcgacgacgaagcgattcctgaaggactataccgaggctctcatcggagggggcggtgcagtcttcgtcggtgccggggtttccatgggcgcgggctatccgtcgtgggcgtcgctcttgactgaggtcggcgaagaactgggtgtaaagtcgggtgagctgcacgatctagcagcgctagcccagtggagcatccaggagaacgggtcggctacgcaggtccgcaacgtgatcaaggcgcagatcggcgtcgaacatcccattcctccgaccctcgaaatcatctcgagactgccggtcaagtatatttggacgaccaactacgatcgactggtcgaacgcgcattcggcgcggtaaaccggccgatcgacaccgtctccggagcggccgaccttgccctacgtgcgacgcccggcgcttcccgccttttcaagatgcatggctcggtcgagcgcctcgatgacgtagtaatctccaccgacgactatgaactgtatcggtcgaagcgcggagcattcctcccgctcctgcacgcgcatctctcgagcatgtcgatgctcttcctcggaattagcttcacggatccgaacatccggcacgtgctatcgctgatccgcgagagctttacgtccgcgccgccagagcacttcgccatcgtgcggccgccgcagcgcgacgactacaaatcggaggccgaattcgaagcgcgcagcactcagcacaggctctggagccgcgatctgaagcgctatggcctagtagtggtcgagatcgacgattatgcggaggtgcccgagcttctgcgccaggtcgaacggcgcgtggccgcgcggcgggtatgggttagcggtagctggccccctgaggccagcgctgacatcgccaaagtctacggcgtcgcgcacgccatcggtcaactcgtgggggcccgcggctgcgatctcgtcagcgggacgggtgtcgttgtcggatcagcctctatcgcgggctttcttgatgcccttcgctccgacggcggatgggaccttgagcgccggctcattgcccgtccttttccccagccgatctctggtgcggcgccggatcgtggccagtgggccgccctgcgtgcggagctggcgcggatagcgggcgtcgtggtgttcgtcggtggcatgaagatcgattccgataccggcgccacggtgatggctgatggcgttctcgatgaatttgaggccgcgatggcggcagacagttttgttattcccattggcacgaccggcggcgctgcggctcacatctccgatcgtctcatcggttcgggagtcgacgcgtcggggagaaatgcgatgcgtcccacggacgaggaactcagggaactggcgcgccctgacatttgcattggggagatcgtgaatttagtgtctgcgattctcgcgcggatcgataaacgagtttaa

SEQ ID NO: 20389 - DNA, 498 bp, Burkholderia cenocepacia
gtgacacgtcgtgttttcttcagcttccactttgacaacgattactggcgcacccagcagattcggaacatgggagctctcgaggggcagtcgctgtgcacccccaacgcatgggaggaagtgaagcgaaagggcaacgctgctatcgagaaatggattgccgacaacatggacggcaagagctgcgttgtcgtgctggtcggctcccagactgccaaccgcccttgggtccaacatgagatcgtaaaagcttggaacgacaagcggggcgtcctgggcatccgcgtcgacaggctgctcgaccgcaacagccagacatctgctgcgggcgccaacccgttcgatgcgatcacctttcgcaattcgagtcgcaagctctcctctgttgtgccgctgattactcccaaaggcaacgacagcaaggccgtttacgcctcaatctcgaacggcatagagaagtggatcgaggaagcgatcgccatccgcaaccgcaactaa

SEQ ID NO: 20390 - DNA, 555 bp, Burkholderia cenocepacia
atggcgcaatatattactcggggcgaacttcgcagtttcgctgccgaactgggtgggtttgaggcagcgagattgcgccgaaacgcagcttcgagatcgctggcgggcgcaaccttcctctcccactccagcaaggacgatgagcttgtcgcgggtgcgatccgggtgctcgagaatcacggcgcaaaggtctacgtcgatgaaatcgatccggagatgcctccctacacgagtgaggaaacagcggcactattgaagacgcggatccgcgacaccagccgattcgtacttctcgccagcaagaacagcagggatagcaaatgggtgccttgggaactcggcatcgccgatggtacgaagactccatcgcagattgcgctgtttccagcgtcagactccagcttcgatcaggcatgggcgtcgtgggagtatctcgggctgtacgaccgcatcgtctggggaaagctcgacggatatcagaaggaagtctggatggttattgacgagaagcgcaatactggcgttgaactgagcaagtggttgagagggtattag

SEQ ID NO: 20391 - DNA, 399 bp, Vibrio navarrensis
atgactgatcggaatgctccgaaatatgcacctcagactgaagttggtactcgaccaatcgcgcaagtttggcacgactaccgaacagacatgatttcattttctggtatagccatttttctatttgggaataaattgaaagatggagaggtggtagttgcagatggattgatcaaggaatttaaaatagcaaagtcaaatggtttgctattaatccctgtaggagcaactgaatatgcaagtagagaaatttattgcgagcttctgaaagaggggtattttgacagtgatgctttccctgaaagtgcaagaaaatttatagacaaaatttgcgacaaggaatctgagttgaccacgattcagagtgaaataattgacttactaaaatcattaaaataa

SEQ ID NO: 20392 - DNA, 501 bp, Vibrio navarrensis
atgcctaaacgtaactgtttttacagctttcactatttgcctgataactggcgtgcgggaacagtacgaaatattggagcaatcgatggaaataagcctacatcagataacaattgggaaacagttaaaaaaggaggggatgcggcgataaaaaaatggattgcaaatgaaatgtctggaaagtcatgcgttgtagttcttgtcggcagcaataccgcagataggaagtggattaatcatgaaatagttaagggctgggacgatggcaaaggagtcgtaggaatatatgtccatggacttaaagatagtggtggtaacacctcatcaaaaggtagcaacccgtttgattatattggttatggcaacacagggaaaaaactatcatcaatagtgaagtgctacaaccctacagggacaaccagccaagagaaatatgattggatcagcaaacacttggctaatgctgtagaagaggcaatagaaattaggaaaaataactaa

SEQ ID NO: 20393 - DNA, 1440 bp, Flavobacterium seoulense
atgaatcaagaaatagaaatttttattaaagattttgttaaagatcttaatgaaggcaccgcttcaatttttgctggtgcagggttaagtgttaatgccggatttgtgaactgggctgagttaatgagtgaaattgcacatgatttaggactcaacatagaaaatgaaaaagatcttgtttcacttgctcaatttcacgtaaatgaaaatcaaacacgttcaaagattaatagaaaaatattagaagaatttactgaagatgcaaaagagacagaaaatcacaaactaattgcccgccttcctttatcatctatatggacaaccaattatgaccagcttttagaaacaacatttaaaaatgaaaataaagttgtagatataaaatatagaaataatcaattattaacaacaaagcctaaaagagatattgttatattcaaaatgcatggagatgttaatcatgcagatgaagcaataataactaaacaacaatatgaacaatatcattccacccacgaaccttttataaatgctttggctggagaacttacaacaaaaacttttttatttatagggtttagctttactgatcctaatctagactatattttaagtaggttgaattttagatatgataaacaacaaaggcaacattactgtttcgttaaaaaacataaattaggcgattctcaaaatcctgatgaagcaacactttattataactctcgaaaacaatatttgactataaatgacctaaagagatatggtataaaatcattactcatagatgaatatgaagacattacagaaatacttaaagaaattgaatatcgatataagaaaaaaacaatttttatttcaggcagcgctgaaacttatgaaccattcgataaaaatgaagcaataggttttgttcacaatctttctaaagttattatagagaatgattacagaatagttaatggattcggatggggtattggaagctctattatcaatggtgctttagaagctatttataaaaatccaattaaatattctgaaagtcaattaatactaaaaccatttccacaatttgaaaccggagacaaacctttaaaaattatgtgggaagaatatcgtcaaaaaatgatttctcaatgtggaatatctctattcatttttggtaataaaaaaaatgatgataatgaaataattgatgcagatggagtcttgagagaatttgaaatatctaaaaataacggcaacatttgtatcccaataggtttgacaggatatgcaacttatcaaatttatgagaggatatctaatgacccaaaaaaatattttgagtcaccagaatcattaatgccaataatcaatcttcttgcgaaagaaccaactaatctagatgcagttattatagaaattgataaacttttaaaacaactaaaaaaataa

SEQ ID NO: 20394 - DNA, 612 bp, Flavobacterium seoulense
atggctagagaaacatttatatcatataagtatagcgaagcccaagaattaagggacttaataattgaaaaacttggtaaagatgcatcttattataaaggagaaacaggtgaatctcctgatttaacaggctcttcaattgaaaatataaaagaaaatcttaagaatatgattttcggtacatcagttacaattgttattatttcaccaaacataaaaaaaagcaaatggatagattgggaaattgaatattctcttaaagaatataaaagagggagtactacctctaaaacaaatggtattgttggagttgttatgaaaattaacggtaactataactggcttatatcatcttatcaaaattctgatggttgcacttcaagatcaattgacaattcataccttcatgatattaaagtaaagaacagatttaatttaataactaacaataaatattcttgtccaaattgtaaaacatttgatcaattaacaggttcttatatttcactaatagaggaagaccgttttctaaaaaatcctcaatatttcatagaaaatgcatttcaaaaaagtcagaatattaaaaactatgaactatcaaagaatagatag

SEQ ID NO: 20395 - DNA, 549 bp, Flavobacterium seoulense
atggcaattctaacaaaatccagactcacagctctaactgaaaacaaactaggtacgcgtatgtttagtcaaactttaaatgaagctaaattccaaaacaaatcaactgcaactgtaacagtctttttatcacactgtcatgatgatttagaacaaattgaagtaaataaggtaattgttttacttagaaattctggagttagtgtttatattgattcacttgattcttcattacctccatttactagcgctataactgcacaaaggattaaagaccaaataaaacaaaacagaaaatttattcttgtagcaacaaataaagctattcaatcaaaatggtgcaattgggaattaggttttggtgatgctcacaagtacattgatcatattgcaataattccacttgctgatagctctcaagtatggaatggaaacgagtacttacagatatatcctcgaatagaagaaagtgaattaacttctgaatacataaaagttatttatccaaacaaaacctacaaaagcctatctgaatggttaaaatcttaa

SEQ ID NO: 20396 - DNA, 1416 bp, Bacteroides vulgatus str. 3975 RP4; identical to SEQ ID NO: 18592

SEQ ID NO: 20397 - DNA, 612 bp, Bacteroides vulgatus str. 3975 RP4; identical to SEQ ID NO: 18594

SEQ ID NO: 20398 - DNA, 549 bp, Bacteroides vulgatus str. 3975 RP4; identical to SEQ ID NO: 18593

SEQ ID NO: 20399 - DNA, 1446 bp, Escherichia coli 4-203-08_S1_C1; identical to SEQ ID NO: 20070

SEQ ID NO: 20400 - DNA, 468 bp, Escherichia coli 4-203-08_S1_C1; identical to SEQ ID NO: 18646

SEQ ID NO: 20401 - DNA, 1590 bp, Escherichia coli 2-222-05_S1_C2
atgaatttcaagaaaaaactcgaagagcattttaagcagtttgaggcatcccctgtgttatttgttggctccggagtgtctcgtcgttaccttggtgtgccatgttggcaagaccttttgaagcattttgctgaggcgattggggaaaatcatataaaattaaaaacaaaatctaatggtgacttacccgaatatgcacaattattagtgtcggcatacgctgagaaatggtgggatactaaagaaggacaattagcattaagtgaaaaagaacaggagaaaattttcattaacgaacagtctcctttgaagttgtcaatatctaaatatattgagaatgcacataaaaatattatagaaaatgatgagttaaaacacgaaatttctctttttgcgaaagcaaatattgatggggttattaccacaaactgggatgtttttctagaaagccttttccctaaatttacaacctttataggccaggacgggttgattactggcaggagtcacggcattgccgaaatatataaaatacatggttgctgcactgagcctaactcattgattttaacatcaagtgactatgataaatataggaagaaaaacccctacctatcatctaagttactaactatgtttatagagaggcctgttattttcttaggttactctttaacagatgaacatatagctgaaatcctggaagatatagttagttgttttcctgatgctagtttggattttttacagaacaaattattgtttgttgaatggaaacctgaacttgaagaggccgacattagtgattctgttattcataaaaaaataccagtaaaatatgttcaggcaccatcttataaagaaatatttgaagtgctgagtgaaactaaaaaaaggattccagcacatttattccgaatgataaaagatgaactttatgaattagtcttaactgatgatccgaaagggaaattatatgtgagggactcagagaagattgaagagggcgccaatacaacagagtttgttgtgggatatggtgctatttcgatggtgaaaaaatcagaatcgatggcagcaaaaggattggttgggctggagcgtgtagacctcatccgtgaagttgtattcgaaaatggacattatgattgggaatgcgttgttaatgatgttctgccaaatatttgcaaaggtaatgcgcgcattcctatttttcatttcttaaatcatgctaatttaattaatcctgacgggagtataattaacgagcctgaacttgcaggtggtgttttatcacgattagatattactcctgtaagttttcagtctcaaggttgggataaacgacgttctgaaaacgttcctgaagttagagttggtgtaaatgagttatatcttgcttatgatttcggtttttttttgaggatgatgccctatatggaaccaggtttaattaatcgagatatgaatgaactacataaaatactgaaaaagcatattgatgaagcgatgagcattcaggctctatcaagtaatttttgtagactggtctgtctgtatgattttataaagaatagcaataaattttaa

SEQ ID NO: 20402 - DNA, 972 bp, Escherichia coli 2-222-05_S1_C2
atgactactctcgttttttcctactctcatgcggatgaagcacaacgcaatgagctagagaaacatctgtccccgctgaagcgaatggggaaaatcaccacatggcacgatcgccgaatcgttcctgggcaagagtttgaacatcagatcgaccactatttttcgcaagcagatattatcctgttgctaattagcagtgatttcatcgcttctgactattgttatcagatagagatgaccaacgcactggagcggcataaaaaaggtgaggcggtggtcattccggtgattttaagagagtgtgcctggcatcagttgccattcggcagcatcatggcagcgacaatcgacggtaaagccataagcaggtttgccagtcacgatgagggttacgttcaggtcgccgatgctgtctcccgagccattgccaatttggaagcgaaaaagccgcagcagattgtgcacgccccagctccggctaatccgatgcttcaggcaacggataccgtctttacaccgcgttcgagcaatctttctctgccaaagagttttactgaccttgataaagatcgtgcccgtcgcgagggttttgagtatgtcgctcgttactttgctaactcgctggacgaactcaaaaagcgccatgcagggctagacgttgatttccaccgacctgataacgattccttcacatgtgccgtgtatatcaacggtggcaaggttggtcagtgcggagtctggtgtggccgtcgtaatatgggattcggggatatctgctacagtcaaagcggtgtgactcgcaatagttgcaatgaaagtcttagtgttgcggataatgggcagacgcttgggttccgcaccttgatgggactgggttacagtaattcaagggattcgttgctgactaacgaaggcatggcagaacatctatgggatatgttctttagcccgattcaacagcgtaatcgataa

SEQ ID NO: 20403 - DNA, 1590 bp, Escherichia coli 2-222-05_S1_C3; identical to SEQ ID NO: 20401

SEQ ID NO: 20404 - DNA, 972 bp, Escherichia coli 2-222-05_S1_C3; identical to SEQ ID NO: 20402

SEQ ID NO: 20405 - DNA, 1446 bp, Escherichia coli 2-427-07_S3_C3; identical to SEQ ID NO: 19456

SEQ ID NO: 20406 - DNA, 468 bp, Escherichia coli 2-427-07_S3_C3; identical to SEQ ID NO: 19457

SEQ ID NO: 20407 - DNA, 1446 bp, Vibrio parahaemolyticus; identical to SEQ ID NO: 18719

SEQ ID NO: 20408 - DNA, 576 bp, Vibrio parahaemolyticus; identical to SEQ ID NO: 18721

SEQ ID NO: 20409 - DNA, 1446 bp, Vibrio parahaemolyticus; identical to SEQ ID NO: 18719

SEQ ID NO: 20410 - DNA, 576 bp, Vibrio parahaemolyticus; identical to SEQ ID NO: 18721

SEQ ID NO: 20411 - DNA, 1446 bp, Vibrio parahaemolyticus; identical to SEQ ID NO: 18719

SEQ ID NO: 20412 - DNA, 603 bp, Vibrio parahaemolyticus
atgtcgaggaaaactttcttttcatttcattatacatcagatgtatggagagtatggaacgtaaggaattgttgggttgttaaacctgaagagcaggttgctgaaggtttttttgatagcagtgtatttgaagcgtctaaaaaagaaagtgtagacaatctaaaaacatttttgagaaatggtttaaaaaatacgtcggttacttgtgttttagctggtaaagaaacgtatcaacgacgttgggtcaggtatgagatagttagaagtgtattgaaagggaatggactattgacagtacacatccacaatttaaaagacaaaaatggatatacaacgtcaaaagggatagatcctctatcttgtattggagtctataagtctggcgaaaatatctactttgctgaaaaaaatggtgctaagtgggaaaaatatggcgactatcaatcacctataccagctaaggatctttggttttctgaacccaaagataatggtgttcttccattgtctcgtttctatagtaactatgattttgtaaataacaaagggcgggaaaacatatctaaatggatagattctgccgctaaacaagttggtagataa

SEQ ID NO: 20413 - DNA, 576 bp, Vibrio parahaemolyticus; identical to SEQ ID NO: 18721

SEQ ID NO: 20414 - DNA, 1446 bp, Vibrio parahaemolyticus; identical to SEQ ID NO: 18719

SEQ ID NO: 20415 - DNA, 603 bp, Vibrio parahaemolyticus; identical to SEQ ID NO: 20412

SEQ ID NO: 20416 - DNA, 576 bp, Vibrio parahaemolyticus; identical to SEQ ID NO: 18721

SEQ ID NO: 20417 - DNA, 1446 bp, Vibrio parahaemolyticus; identical to SEQ ID NO: 18719

SEQ ID NO: 20418 - DNA, 603 bp, Vibrio parahaemolyticus; identical to SEQ ID NO: 20412

SEQ ID NO: 20419 - DNA, 576 bp, Vibrio parahaemolyticus; identical to SEQ ID NO: 18721

SEQ ID NO: 20420 - DNA, 1446 bp, Vibrio parahaemolyticus; identical to SEQ ID NO: 18719

SEQ ID NO: 20421 - DNA, 603 bp, Vibrio parahaemolyticus; identical to SEQ ID NO: 20412

SEQ ID NO: 20422 - DNA, 1428 bp, Vibrio parahaemolyticus
ttggagaaacaacactttataacaaattttctcagggaaattcaggacggtaatgcggctgtattcgctggagctggtctatcaattggcgctgggtttgttgattggcgaaatttattaaaaccgttagctgatgagttaaatttagatataacgcatgaacaagacttggtttctgtagctcaatatttttgtaatggtcataatagaaatagaataactcagcagcttattgacgaattaggtgttgcagccaaacctacaaaaagtcatgaaattcttgctgcattaccaatcgacacctattggacaactaattatgatcgtttaatagagaaagctctggaaaatgagaataaagtatatgactcaaaatatcgaaaagagcaccttgcaaatacaaagagagggcgtgatgttactttgtataaaatgcatggagatatagaaaactcacatgagacaattcttaccaaagatgaatatgaaaaatatccatatacccatgctccatttattactgctttatctggtgatttagtatcaaaaacatttttatttttaggttttagtttctcagatcctaacctggattatatattgagcagagtcaggattcactttaaggataatcaaagaaatcattactgcatatttaaacgttgtgcactagatgagtttgataatgaagaagaattccgaaatgcttcagtaaaacaaaatctagtcgcgttggacttgaaacggtttcatattaatgtggttttcatagataattactcggaagtcgaggaattactggcgttaatatacaaaaaatatataagaaaaacagtttttatgtctggttcagctgatgattttggtgcttggaataaaaaagatgttgaagaagcactattccgtcttggtagtacaattgtagacaaaaacttcagaatcgcatccggcattggtttgggaataggtaatgcactaatatctggtgctatttctagaacttatcaatcacaatactctcatcttgatgaccatgttttaatgaggccatttccgcaatatatagaaaacgaagttgaaaggaaatccgtttggaagcgttatagagaggaaataatcggcaaggcaggtattgctatattcttcatgggtaacaaagtagtagataacaatatagttattgcagatggagttatagaagagtttaacattgctgttgagaagggagtgttagttatacctgttggctgttctggatttgcagcgaaacaattgtgggaaaaggtaatttcatcaccagatacttactactcaaatattaatgaaaaatttattgaaaaattgcaagagttaggaaaagacattgataacccaaaagaagtgatctcattaattattgaaatattagagctttctataacggaataa

SEQ ID NO: 20423 - DNA, 687 bp, Vibrio parahaemolyticus
atggctagaaaagtatttgtctcatacaaatatggagatacgcaggttaagtcattaacagatgattggtttgttagtacaaaagttagggattatgtaacagagttacaggatttgctaaaagaaaatagtgaaatttataaaggggaagatgacggcgaagatttaagtgactttaaagatagcactatagagtctaaactgcgtaataaaatatttgatagtagtgtcactattgtgatgatatcaaaagggatgaaagaatggtttaccccagagaaagaccaatggattccatgggaagtttcttactcactaaaagaattaactaaaaatggaagaacaagtttagctaatggtgttttgatggttgtgttgcctgatgagaataatgactacgattattacattaaagagaacacttgtccccactgcaattgtagaacactgatgactgactttttgtttggtattttgaagaggaatgtattcaataataaatctttgagtgagtcaagttgcggtcatcatgaatataatcctgtttatgttggagatcattcttacataacgtctgttaagtggagtgattttattaaatcacctactgaatatttagatgaatgtgttagattacgtggtaaaattgatgacttcaatatatctaaagtaattcacaatgattga

SEQ ID NO: 20424 - DNA, 1425 bp, Pseudomonas plecoglossicida
atgaagtttaacggtgaaatcaatagctttatccgagatttcgttaaagatctcagtgaaaataatgcggccatcttcgcaggagcagggctgtctaagtcctcagggtacgtaaattggaaggagctgttaacagatatcgcggaggaattggagcttaaaattgatcttgaaagtgatctgatttctcttgctcagtatcatgttaacaagaccaaaggccccgcgaagctgactcgaaaaatcgtagaagaattttcacaccaagcggagccttcggagaaccataaaattctggcgcgccttcctatcaggacgttctggactacaaactacgatactttgatcgaggattcgctcaagcaggcgtataaggttgcggatgttaagcataagctaagtcagctcaacattaccaggcccaagcgcgatgcagtggtttataagatgcatggttgcgtatcggacgccacccatgccattctctacaaaaaccagtacgaaacttatcatcgtgattacgctccttttgtaactgctctaagtggtgacttagtttccaaaactttcctatttataggcttcagtttctctgatcctaatctggactatgtgttaagccgccttcatacatctactatcaaaacgcactactgttttgtaaagcgcgaagatgctgagcctggtgatgatgaggaaatgcatcaatataaacggcgtaaacaagagtttcgtgtggaagatttgcggcgctatggtattcagccaattatggttgataaatactcggatataactgatattttgcgtgagattgaacggcgctacctcaagaaaactgtttttatttctgggagcgctgaggtctacggcgagtgggggcgagataaatcattaaaattcatccatgcgctagcttctgagctagtactaaaagatcgtcgagtcgtgaacggatttggctggggtgtcggtagtgcggtaattaatggcgctctagatgcgatttacaaatatccggagaaatactctgaggaccagctggttatgcggccattcccgcaatttccgagcgcgggtcaagatttaaagcagttgtgggaggagtatcgtcagcggatgataggtctgtcaggagtgagtattttcatttttggcaataagattgataacgaacagcttgtcatcgctaatggtgttgtccgggaggctgaaattgcgattgagcagggtcgaatagtcattccggtggccgcgacaggattcgctgctgcggaagtttacaacatgatcaaggccaagccggagctatatgatgctcacaaatggcttttagttgttattgatgaacttgccgatcctgcgttgtcctgcgaggaaatcgtcaagaaaattgctgatgctatcgttaaactggataagtag

SEQ ID NO: 20425 - DNA, 492 bp, Pseudomonas plecoglossicida; identical to SEQ ID NO: 18900

SEQ ID NO: 20426 - DNA, 516 bp, Pseudomonas plecoglossicida
attttgatttcgaccgactcccttcgcaacgccgcataccgaagatctcaattcaatgggcaggctagatcgattcagcaggctaagagtctcggccagtcaactatttttctatctcatagtcataaagaccacacgttggccttgggctttgcgcagctcctgcaagatgcgggctgccgagtttatatcgattggctggatggtgagatgcctgaacgaccgaacaaagaaacagcggcccggattcagctcaagattaaggaaaacgattactttgtttaccttgcgaccgaaaactcctccaagtcacgctggtgcccttgggaaataggctatgcagacggtgtcaagatcacggaccgcattgtcattgcgcctactcgcgacagatcggccacatatggccaggagtacctcggcctttatcgacatatagatttggcctctgatggtcagttggctgtatttgatccgaacatgagtaatgggcggtacgcgaaaactatttggtaa

SEQ ID NO: 20427 - DNA, 1446 bp, Escherichia coli 4-203-08_S1_C2; identical to SEQ ID NO: 20070

SEQ ID NO: 20428 - DNA, 468 bp, Escherichia coli 4-203-08_S1_C2; identical to SEQ ID NO: 18646

SEQ ID NO: 20429 - DNA, 1446 bp, Escherichia coli 4-203-08_S1_C3; identical to SEQ ID NO: 20070

SEQ ID NO: 20430 - DNA, 468 bp, Escherichia coli 4-203-08_S1_C3; identical to SEQ ID NO: 18646

SEQ ID NO: 20431 - DNA, 900 bp, Escherichia coli 4-203-08_S1_C3
ttgagtggagatttgatttctaagacattcttatttattggcttcagttttactgatcctaatcttgattacatattgagccgattgcatgttccggagaagcatcgtcgtagacactactgctttcttcgtaaggaaccctctttgccgcaaggaaatgaagatgaagctggcgctatgtataggcagcgtaggcaagaacatcatattcgcgatttgctccgttttggcattcaggctgtattagtaaacgagtacgatgatattccacttatattgaaagagattgagagtcgcttcctcaagaagaccatatttatatctggtagtgcagaagagtatggcgcttgggacaaacaggaagcactaaactttgtacacatactttcgtcatctttggtgaagaatggctatcgagttgtcaatgggtttggatggggtattggtagtgcggtcatcaacggagctcttgaagccatttattctaagcctgataagtactcagaagagcaacttatcatgcggccattccctcaacactcatcaaacgataaagccctgagcgagctatgggacgaatatcggcagcgtatgattggtctttctggaatcgctatattcctttttgggaataaactccatgatggtcgaatcgttaatgctgatggggtccgaagggagtttcaaattgctcaggaaacaggggttgtcgtgcttccacttggcgtcactggttatatggccaaggaactagctgacgagatgctgacggatccaagtaaacattttgtccggtacccttggttggaaaaggaagttgctcagcttgcagatctctctgctaatcgggcaaatatcgaaatgaaagttttagaaattttaaagaaactaggaggttag

SEQ ID NO: 20432 - DNA, 468 bp, Escherichia coli 4-203-08_S1_C3; identical to SEQ ID NO: 18646

SEQ ID NO: 20433 - DNA, 938 bp, Escherichia coli 4-203-08_S1_C3
agcagtactacaagacccatgaggggtttgttacagcattgagtggagatttgatttctaagacattcttatttattggcttcagttttactgatcctaatcttgattacatattgagccgattgcatgttccggagaagcatcgtcgtagacactactgctttcttcgtaaggaaccctctttgccgcaaggaaatgaagatgaagctggcgctatgtataggcagcgtaggcaagaacatcatattcgcgatttgctccgttttggcattcaggctgtattagtaaacgagtacgatgatattccacttatattgaaagagattgagagtcgcttcctcaagaagaccatatttatatctggtagtgcagaagagtatggcgcttgggacaaacaggaagcactaaactttgtacacatactttcgtcatctttggtgaagaatggctatcgagttgtcaatgggtttggatggggtattggtagtgcggtcatcaacggagctcttgaagccatttattctaagcctgataagtactcagaagagcaacttatcatgcggccattccctcaacactcatcaaacgataaagccctgagcgagctatgggacgaatatcggcagcgtatgattggtctttctggaatcgctatattcctttttgggaataaactccatgatggtcgaatcgttaatgctgatggggtccgaagggagtttcaaattgctcaggaaacaggggttgtcgtgcttccacttggcgtcactggttatatggccaaggaactagctgacgagatgctgacggatccaagtaaacattttgtccggtacccttggttggaaaaggaagttgctcagcttgcagatctctctgctaatcgggcaaatatcgaaatgaaagttttagaaattttaaagaaactaggaggttag

SEQ ID NO: 20434 - DNA, 468 bp, Escherichia coli 4-203-08_S1_C3; identical to SEQ ID NO: 18646

SEQ ID NO: 20435 - DNA, 885 bp, Streptococcus mitis
atgaggaaagagcaatttattaaaaaatttacgaaagctgttcaagatagcaatgcggcagtttttgctggcgcaggaacatcagttgacgcaggatttgttaactggaaaaagctcgtaaagccatttgcggatgagattgatttagatattgataaagagtcagatttagtgggattgactcaatattatatcaattctaaaatgggaaatcgaggttctgtaaatcaggaaatagtttatcaattttctagtcaagaagcagaaacaaaagtaacgaatttactaacacgactacccatttctacctattggacgacaaactatgataacgtaattgaaaacggtttaaagaaaaacaatcgtagaggagatataaagagaaagatagatgatttagcaattagtattcgtgatagcgatgccattgtttataagatgcatggtgatgtagattcgcctaatgatgcagttatttcaaaagatgattatgaaagatatagtgataaaaactctttatttgtaacagctttacgaggtgacttagtttctaaaacatttttatttgtaggttttggttttgaagatcctaatttagaatctattctggggaaggtaaatgtcttgctgggagataataagagagaacattattgtattcaaaaacaagtgttagagagagactatgacgcagacatcgaaggatataattacgataaaataaaacaagatttaaaaatcaaagatttacagagatatggaatagagaccgttctagtagatgattattctgaaatatctgacttgatacaaaaaattgaggaggagtacttaaaaaatacaatcttcatttcaggtagtatttcagattataatgagaattag

SEQ ID NO: 20436 - DNA, 621 bp, Streptococcus mitis
atggtaaccaaaatatttatttcgttccgttttagtgatggaaaagagattaaagatgaactagttgatttatttgatgaatctactgaggtaattaatagatcagaagatgttgatagaagtcaaatgagtgagaacattattcaggaatatctatatgagaagttaaaagatacatcggttacaattgtattattaactccagaggctgtttcttatagaaagaattggcttggaaattatgatgattggctttatgatgaactaaggtattctttagaggatagaaaaaataacagaacaaatggtgtgatagctgtttatactgatgaagctaaatataaggtactagatgatagtactcattattgtcaacattgtcagcagactaagtcgtgtaggtctttgaaatattttgataatttagctagaaagaacatgctaaatattaagtcggcttataagaaaaatccatgtaatgatctttatgatgatgagcacgattcttatatttctttagtaagtttgagcgatttcaaagaaaattatagtcaatatatacagaatgccaaagacaaaagagaacgattagatgagttcaatatagctaagaggatgtaa

SEQ ID NO: 20437 - DNA, 543 bp, Streptococcus mitis
ttgagtagaaaaaagaaaggaaaaacaaattttattgataatgaaatagtaacaaataggaaaggaccagaagagttgaagaagaggttatacattgatgatctagaaaagataaaaaaatttgatatctttctttcacataactctaaagatgaagaaaaaattataaccttttataaaaaactaaacaaaaatggccaagtcgtatatattgactgggttaatgataaatacgatctgaaacgagaatggtgtaatacttcaacagtcgatattatcaaagagcgtataaaacaatcggatgtatttgttttgtacttttcaagtaagacacttaattctcagtggtgtgcttgggaattgggatatgcagatgcaattggaaagaaaatatgtatctatttttcagaaaaaatagatagaacaattattccaaagttctactttaaatatccaaaattacttttttctgaagattttatggttaaaaatcatggacagtcagatattccatttactaaatggaaagagaataaaaaataa

SEQ ID NO: 20438 - DNA, 1410 bp, Streptococcus mitis
atggaaaaagagctatttattaaaaaatatactgaagttattcaagaagggaatgctgcagtatttgctggtgcggggacatcagttgatgccggttttgttaattggaaagaattggtaagaccattctcagaagaaataaatttggacattgataaagaaacagatttaattggagtggcgcaatactatatcaattctaaaatgggaaatcgtggtactgtgaatcaaaaaataattaatcagttttctagttcagatgcagaaacggatgttatgaatatattaacacgtcttcccatttctacatattggacaacaaattatgatgaggtcatagaaaatggattggaaaaaaataatcgcaggggggatataaaaagaaaagtagatgatttggctattaatatttatgatagtgatgctatcgtatataaaatgcacggtgatataagatctccccaagatgcagttatttcaaaagatgattatgaaagatatggtgagaaaaattcgttatttgttacagccttgcgtggggacttagtctcaaaaacgttcctatttgtagggttcagttttgaagatccaaacctagagtctattttaggaaaggtgaatgttttattaggagataacaaaagagaacattattgtattcagagaactgtattaagaaaagattataaaacgaaaaaagagtatgactatgcaaaaataaagcaaggtttaaaaataatagacttaaaacgatatggtattgagactgttttggtaaatgattatactgagattccccaattattactagaaattgaaagagaatattttaaaaatacaatcttcatttcaggtagtatatcagattataatgagaattggagtgaagaaaaggtaaatcaatactgctatgatttatctagttttcttatttcaaaagattataaaataatatcagggtttggactggggataggaagcagtgttattaatggtgcgctggatcaaatttataaaactaaatatagacatgtggctgaacaccttggtttgtttccttttccacaaaatgctaatggagagaaatcgttaaaagaatgttggaccgagaatcgtgaacaaatgattagtgagtcaggggtgtgtatatttttatttggtaacaagctagttgatggtaaggtagaacttgcttcaggcatgatggaggaatttcaaatagctaaagaaaaaggaaagataatcattccgattgcctctactggatttgctgcaaaagaaatttatgatgagatgaaacaatcaggagaatatagttatttagataattactgggaaactttggagactgaaaaggatttcactaaagttttttccacgattgataaaattgtcaatgaggtacgataa

SEQ ID NO: 20439 - DNA, 621 bp, Streptococcus mitis
atggcaaccaaaatatttatttcgttccgttttagtgatggaaaagagattaaagacgaactagttgatttatttgatgaatctactgaggtaattaatagatcagaagatgttgatagaggtcaaatgagtgagaacattattaaggaatatctatatgagaagttaaaagatacatcggttacaattgtattattaactccagaggctgtttcttatagaaagaattggattggaaattatgatgattggctttatgatgaactaaggtattctttagaggatagaaaaaataacagaacaaatggtgtgatagctgtttatactgatgaagctaaagataaggtactagatgatagtactcattattgtcaacattgtcagcagactaagtcgtgtaggtctttgaaatattttgataatttagctagaaagaacatgctaaatattaagtcggtttataagaaaaatccatgtaatgatctttatgatgatgagcacgattcttatatttctttagtgagtttgaacgatttcaaagaagattatagtcgatatattcagaatgcaaaagacaaaagagaacgattagatgagttcaatatagctatgaggatgtaa

SEQ ID NO: 20440 - DNA, 933 bp, Streptococcus mitis
atgtctttagaaactaatgattttattcttgaaacatctaaatatataagaagacaagtaagaaaaaatattttgagtattgaagaaagaaaaactcaggcagatgaaattcgaaaaaaatctttagcaaaattaaagctgcaaactataaaaagaaaaaaatcattagattatatccaagaaataaatccctcttatctggaacattatcgcaaaagattttttaaaacacatgatttacatgaaagattagaaatcattagagaactttcgaagtatgattcaaaggaagttcataattttttctatgcaataaatggtcatgtaagaaatcaatcgctaaaaaaagaagttcagtcgtactttcaaagtttatctctaccgtttagattgagtagaaaaaagaaaggaaaaacaaattttattgataatgaaatagtaacaaataggaaaggaccagaagagttgaagaagaggttatacattgatgatctagaaaagataaaaaaatttgatatctttctttcacataactctcaagatgaagaaaaaataataaccttttataaaaaactaaacaaaaatggccaagtcgtatatattgactgggttaatgataaatacgatctgaaacgagaatggtgtaatacttcaacagtcgatattatcaaagagcgtataaaacaatcggatgtatttgttttgtacttttcaagtaagacacttaattctcagtggtgtgcttgggaattgggatatgcagatggaattggaaagaaaatatgtatctatttttcagaaaaaatagatagaacaattattcccaaattttattctatttatccagagctacatctttctgaaaacattacaattgaagttgataaacaatcatctattatatttaatgattggaaaaataggagtagttaa

SEQ ID NO: 20441 - DNA, 1455 bp, Serratia marcescens
atgccagaacgtgatatagaactgtttattcgtgattacgttaatgatatcaaagccggcagcgccgcgctgtttgccggcgccgggctgtccatacccgccggctttgtcagctggaaagagcttatcggtgatatcgcttatgaattggggctggatatagaaaaagaaagcgaccttatttctctggctcaatatcatctcaatgaaaaaggcaaccggcataagataaatcaaaaaataattacagaattcgctgagcaagcggaagaaactgaaaatcatcggatcattgccagattgccgatagcgtcactctggacaaccaactacgacgatctgattgaaaaaacctatgcccgttataatcgcgtctgcgacgttaaaaccacgccggaaagtctgaccaacaatattcacaagcgcgatgttgtcttatataaaatgcatggtgattatagaacacccaaccaggcgattatcacccgcgaacaatacgaaacttactcccgtacacaccttccttttatcaacatgctgatggcggagttgaccgccaaaaccttcctgtttatcggtttcagctttgaagaccccaacctgcaatacgtattgagtcgcctttacgcgcagtacggcgaagggaaaagaaaccactactgcatcatgcggcgcgttcagcctggcgacagcggcagcgaggatcaggcgtcttatgattacaacagccgaaaacaaagcctgatgatcaacgatctgcgccgttacggcattcaaacgctgctggtggaggactatcggcaaatcaccgacctgctgtatgccatcgaaacgcaattcaagaaaagcacggtgtttatctccggcagcgccgacaactaccacccctatgcccgtgaagagtccatccagttcatacaccgcctggcgcgcctgcttatccgcaaacagtaccgcatcgtcaacggcttcggttggggcgtgggcacggcggtgatcaacggcgcattggaagccatttacgccagcggggggaaaatcagcgaaagccagctggtattgcgccctttcccccaattcgccagcgggagcattacgctgccggcactttggcacgaataccgccagaacatgatttcgctcagcggcatcgcagtctttttgttcggcaacaagcgtgacgccgaaggcgaatgcgtactggccgacggtttattgaaagagttccacatcgctgcggaacaaggctgcgtctgcattcctatcggttgtaccggcggcgcatccgccgagatctaccgaaaaatcaaggaggagatgaaagacaccctctatcaccgccatcccgtcgccatgaacctgctggatcaacttaacgagccgggcagcctggcggagaagaaaacatgcctgttggcacttatcgatatcattactaaggataatcctcgatga

SEQ ID NO: 20442 - DNA, 492 bp, Serratia marcescens
atgaccagaaaatgtttttacagtttccattatgagccggacaactggcgcgcttctcagatacgcgaaatgggctcgctggaaggtaaccggccggccacggataacgattgggaggaagtgaaaaaaggcggtgacgacgccatcgccgcttggatcaaaggccagttggacaatcggagctgcgccgtgattctcgcgggtaaagataccgccaatcgcaagtggatcaatttcgaaatctgcgaagcctggaagaaaggcatgggcgtgctggtggtgtatatccataacctgaaagacagcgccggcgaacaagcccgaaaaggcaacaacccgttggatcatatcaagctgggggatagaaagctttccggaatcgccaaagcctatgatccgccttatttgaccagcaccaatgtctataatcacatcaaggaaaatctggcggagtgggtagaagaagcgatccgcattcgcgaaaattactga

SEQ ID NO: 20443 - DNA, 1455 bp, Serratia marcescens
atgtttaaccgtgatatagaactgtttattcgagattacgttaatgatatcaaagccggcagcgctgcgctgtttgccggcgccggactgtccatccccgccggcttcgttagctggaaagagcttatcggcgatatcgcttatgaactggagctggatatcgaaaaagagagcgatcttatttctctggcgcaatatcacctcaatgaaaaaggcaacagacataagataaatcaaaaaataattacagaattcgctgaacaggcggaagaaacagaaaaccaccggattatcgccagattaccgatagcgtcactttggaccactaactacgacgacctgattgaaaaaacctatgcccgttataatcgcgtctgcgacgtcaaaaccacgccggaaagcctgaccaataacattcataaacgtgatgttgttttatataaaatgcatggtgactatagaaatcccaaccaggcgattatcactcgcgaacaatacgaaacttactcccgtacacaccttccttttatcaacatgctgatggcggagctgactgccaaaaccttcctgtttatcggtttcagctttgaagaccccaacctgcaatatgtattgagccgcctttacgcacagtacggcgaagggcagagaaaccactactgcatcatgcggcgcgtccagctcggcgacagcggcagcgaggatcagacgtcttgcgattacaacagccgcaaacaaggcttgatgattaacgatctgcgccgttacggcattcaaacgctgttggtggatgactatcggcaaatcactgacctgctgtatgccatcgaaacgcagttcaagaaaagcacggtgtttatctccggcagcgccgacaactaccagccctatacccgtgaagagtccatccagttcatacatcgtctggcgcgcctgcttatccacaaacagtatcgcatcgtcaacggtttcggctggggcgtaggcacagcggtgatcaacggcgcattggaagccatttacgacagccaaggaaaaatcagcgaaagccagctggtgctgcgtcctttcccccaattcgccagcggcggcattaccctaccggcactttggcacgaataccgtcagaacatgatttcgctcagcggcatcgcaatctttttgttcggcaacaaacgcaacgccgaaggcgaatacgtgctggccgacggtttattgaaagagttccagatcgccacggaacaaggctgcgtctgcattcctatcggttgtaccggcagcgcatctgccgagatctaccgaaaaatcaaggaggagatgaaagaaaccctctactaccgcaaccccgccgccatgaatctgctggatcagcttaacgaaccgggcagcctggcggagaagaaaaaaagcctgttggcgcttatcgatatcattactaaggataacccccgatga

SEQ ID NO: 20444 - DNA, 492 bp, Serratia marcescens
atgaccagaaaatgtttttacagtttccattatgagccggacaactggcgcgcttctcaggtacgcgaaatgggctcgctggaaggtaaccggccagccacggataacgattgggaggaagtgaaaaaaggcggtgacgccgccatcgccgcttggatcaagggccagttggacaatcgcagctgcgccgtgattctcgccggtaaagataccgctgatcgcaaatggattaatttcgaaatatgcgaggcttggaaaaaaggcatgggcgtgctggtggtgtatatacacaatttgaaagacagcgccggcgaccaaaccacgaaaggtaaaaacccggtggatcacatcaagctgggtgacgcaaagctttccacaatcgccaaagcctatgatccgccttattcgaccagcaccaatgtctataaccatataaaagccaatttggctgagtgggtagaagaagcgatccgcattcgtaaaaattactga

SEQ ID NO: 20445 - DNA, 1428 bp, Pectobacterium carotovorum subsp. brasiliense
atgccgtttagtaatgaaatagaagctttcattaaagactatgttaaagatcttagtgaagatagcgcagctatttttgctggtgccggaatgtcaaaaagccaagggtttgttgattggcctgaactgctaagcgatatagcagatgagcttggtttgagtatagataaggagaaggatttaataagtcttgctcagtttcatgtaaatacaaaaaaaaatgcaaataaattaactagaaaaataatagaagagttctcagaacaggcagatgcctcagagacacattgtattctttcaaggttacccatacgaacatattggactacaaactatgactcattaattgaagattctttagaaaaatcctataaaatcccagatgttaaatataacattgaacaattaaataatagcagaccgaagcgtgacgctgttatttataaaatgcatggtgatgtcaaagaagccacgaaagccgtactatacaaagaacaatatgaacgatactatcaaacccacgcaccatttattacagcattaagtggagatttgatttctaaaacatttttatttataggatttagtttcacagatccaaatttagattatatacttagtcgtttatatacgactaacacattaaacaaaagaactcattactgtttcatgaaagaggaaacagataaagaccaagaaatacttaattataaaaagcgaaagcaaaactttagaatcgatgacctaaaacgatttggcatagaaacactgttgataaatgattatggggaaataccaaaaatattatctgaaatcgaatttagatatttaaagaaaactgtatttatctcaggaagcgctgaagagtttggaaaatactctcgtcaagatgcccaaaacttcattcatgatctagctagctctctagttaaaaataactatcgagttgtgaacgggtttggatggggagttggaagcgccgtaataaatggagcactagaagctgtatattcaaatcccaaaaaatattctgaagaacagcttgtaatgaaacctttccctcaatcatcaagtaaaaatcatgatttaaaaaatttatgggaagaatatcggcaaaggatgatttcattggctggaattgcattgtttatatttggaaataaatgtagcaatgaaaaaataatcaatgcgccaggagttcgtagagagttcgaaattgcaaaaaataaaggactaattttaatacctattgctccaactggttacatgtcccaagagttgtattctgaaatggaaaaaaatccttcagaatactatggagataatgagtggatattcgctatggtaaaagatatctgtagtgaagataacaaaccatcagatataataaataaaattaccgttctaattaacagactaaacaaatag

SEQ ID NO: 20446 - DNA, 618 bp, Pectobacterium carotovorum subsp. brasiliense
atggcaaggaaaacatttatatcatacaaatatagtgaagctcaagaccttagagatgatattttaaaaaagttaggtgatgcagccaaattttacagaggcgaaacagcagattctccagacataagtaatacgactgttgaaaatataaagaaaaaattaaaggacatgatttttggaacatcagtaactatattaatagtttcaccagaaatgataaatagcaaatggatagattgggaaataaaatattcaatgagggaggtaacaagagatgagaccacatcaaggtgtaatggcatagttggtgttataatgaaaataaatgatggttatgattggttagtttcaaaagaaacaaacgaagacggttgcactgcaagatctattaataacaaaagattattaaaaatacttaatgaaaacagatataatttaataactgaaaatcatttctcatgccctaactgtaaaacttatagtcaattagatggttctttcatatctttgattgatgaggatgacttccttaagaacccagaaaaatatattgaaaatgcttttaataaagcaaaaaaaataaaagactataagatagttaaagtggatgtagaataa

SEQ ID NO: 20447 - DNA, 603 bp, Pectobacterium carotovorum subsp. brasiliense
atgccacgcagaacatttttttcttttcactataaacctgatatctggcgtgcttggaatgtccgtaacagttgggttgtaaaggaagacaatgagatagaccaaggattctttgatagcaacgtatttgaggcatcgaaaaaagagaatgactatgcattaaaaacttttcttcgcaagggattggaaaacacttctgttacctgtgtccttgctggaacccaaacatggacacgacgatgggttcgttatgaaattgctcgcagcgttatcaagggcaatggcttgctaaccgtttacattcatggtgtccaaaacaatgacaaagagacatctataaagggtgctaatacattagatcaaatgggactttatagaaccgaacacggcatctttctcgccgagtggaagggtgaaaaatgggtgaaatatacagactatacccttgcaattcctgagagaaacctgtggttcacagcgccaaaaacgaacgatgtagtccaactattaactcactgcctgagttacgatttcgcaggccaagacggcaggaaaaatattggtggatggattgaaattgcagcaggaatggctggccgatga

SEQ ID NO: 20448 - DNA, 1188 bp, Pectobacterium carotovorum subsp. brasiliense
atgagcaatgcttcaagaataagatccccctatcagcttatcgtgctaggcgcggtaaatgggcatgataatcgcctacgccataatattgatctggcgcttgagggacttggaataccgactagcgtgatcaaatacctcagcgcgcattctgcctatggccggtgcttgaagtcgccgacgatggcagtatatttcggctctccagccaatacggccgatatagcacttgtcgcagagttgattgatgactcaatcgttatagctccggtcgtctcggatttgtcccaagtacctgtagaaataccgccgcagctcaggcacgtaaatgctattgtgttaggcaccgacgatgaagggattgctcgtctcgtcacattagtccttgagactttccatctattacgacgtgagcggcggttgttcatcagttacaagcgcacgggttctcagcctctggctgatcgattgtatgatgcgctcgatgctcgcggttttgacgttttcattgacgtacggtcggtaccccctgccgcagacttccaatctcaactatggcatagaatgtctgattccgatgttgttgtgctgatcgatacacctggtttcagagaaggccgttggacagccgaagagttggcgcgtgctaatgcgaccaatattcaaatcttgcacctactatggcctgggcaaaaggaagatccggcatcatccttcagtcatttcatgaagctaagactgagagattttgttggatttataccaatgcgggggcgctgggcaaaaaaagcgttggtgaaaagaatttgcgacgaggtcgaacggctgcgcgcaccggcaattgcagcccgctaccgatatttggttgataacttttgtgatgccgcgcgcgatgtggggcttgatccaagtgttcagattgaaggttggatttctcttaaggtcaattcaaaacgggggctcgctatcgtgccagcagtggggataccaacctccgatcgtattaacgaagttttcgaggccattacagaccatgctgatgaaacgagagagatatgggtgatttatgacaataggggcgtactaaaaacttggctctcacatcttgattggcttgattcctatttgccgatccgtgctgtacaaatgtcgaaagcggcacaacttctgcaggagtccattaaatga

SEQ ID NO: 20449 - DNA, 837 bp, Pectobacterium carotovorum subsp. brasiliense
atgtttgcagatgtaggtattcgcaatttcaacgctagttcgctcagtttcaatgaagatgaagttagcgcttatcgtgaagataatagacgccatttcgatactcgaaaactagaggaataccttctagactggaataacgttttagatgtagagaaaatatcgaaggattttttcccaaaagttgaggcagatgtttttctatcacattcccactacgatgagaatgatgtaataaaactagcgattgaacttgagcgcaagggattgaaagtattcgtagattcgtgtgtctgggggtgggctgacaacctccttaaaaaaattgatgacaaatactgtctaaaggatgatggttattataattacaagagtcgcaatagaactacgtcaaatatatacatgatattaaacagtgccttgcatagcaccatatcacaaagtgagttattcctttttctacatactgagagctcaattagcatgagttctatttatacgggcgatgagcatattgcatcgccgtggatattctctgagttaaactttgcaaagctttgtcaacgaaccccccgaaaacaacacatttgtatacgcgagagcctagctggcatggaaaaaagagcatgtgactttgccgatgtacaatttgcctacccaaatccaggtactcgttatgaaatagacagtcatgatttttttcaatggctagatatgccggtagagcaattttatgacaacaatgagctctctgctttatatcatctagataaactctatgaaaaaattgaagtaccacatattttacttgaggagccacgctacattgtaaggtga

SEQ ID NO: 20450 - DNA, 1461 bp, Listeria monocytogenes; identical to SEQ ID NO: 19470

SEQ ID NO: 20451 - DNA, 609 bp, Listeria monocytogenes; identical to SEQ ID NO: 19471

SEQ ID NO: 20452 - DNA, 1401 bp, Aggregatibacter actinomycetemcomitans RhAA1; identical to SEQ ID NO: 18620

SEQ ID NO: 20453 - DNA, 645 bp, Aggregatibacter actinomycetemcomitans RhAA1; identical to SEQ ID NO: 18622

SEQ ID NO: 20454 - DNA, 1434 bp, Vibrio vulnificus
atgacaagagatcaagatctttttatacagcgctttgtaagtgaacttgaggaaagtaacgttgcaatatttgctggtgccggactgtcatcatccgctggctatgtaaattggaaagaattgcttcgacctctagcgaatgaaataaatttagatattgatgaagaaaaagatctagtcggtgttgctcaattctatttaaatgaaaatggacgaaatagaataagtcaacagttaatggatgaaattgcaacagcaaaacaacccacagaaaatcataatattctatctagattgccaataaaaaccttttggactacaaattatgataagttaattgaaaagtctttggaaaatattaataagattgttgacgttaagtacacaaataatcatcttgcaatcactaagaaaaagagagatgcaattttatataagatgcatggtgattgtgatcatcctgatagcgcagtattaactaaggatgattatgagcgttatccccttaaaatgaagccttatataacagccctttctggtgatttagtatcaaaaacctttctatttttaggctttagttttactgatcctaatcttgattacatcatgagccgtgtcagggcatattttgaagagcatcaaagacagcattattgtatttttaaagagtgttgtgagacagactttgatacaccgcagttgtttgaaaatgcaaaagtaaaacaagccttactaataaaagatctttctcgatttcaagtgaaaacggttttggttaaaagctatgctgaaattacagaaattttgtataaaatcgaaaggcaatttagaaggaaaactgttttcttgtctggaagtgcccatgactttactccttttaatcagtctgatgtagaatcttttctatgtcgcctagggaacatattaattgaaaaaaattacaagatttcttcaggcattggattaggtattggcaatgcatttataacaggagctatccaaggagtatatgaatatcataacggtcatatcaatgattatataaatatgaagcctttccctcagtatatagaaaataaggtggaaagagatgctacatgggaaaaatatagatttgaaattattggttctgctggtgttgcaatttttttcatgggtaacaaacttgtcaatggagagactttaagtgctgatggtgttagaaaagagtttgagattgctcataagttagggttagcactaatacctatcggttgtagcggttttatggcaaaagaactttgggaagaggttatggctaatgtttcaaaatattatgatgaatccaatggaaaattaatagaagctattaatgaacttggtgtcgtagttgaaaaacctgagcaattaatctcaaagattattaacgttattgacttaatgtcaaaggagtaa

SEQ ID NO: 20455 - DNA, 498 bp, Vibrio vulnificus
atggctagacgtgtattttatagttttcattatgtacctgatgtaatgagggtctctcaagttaggaatattggtgctttagaagctaataaacctgcttcagacaatgattgggaaacagtaaaaagtggtaaggatgcagcgataaagaaatggattgctgaacaaatgaaaggtcgcacttgtactgttgtattagttggcgaagagacggctaatagaaagtggattaatcatgaaattgtcgagtcatggaacaatggcatgggtgtggttggaatttacatccatggattaaaaaatatggctggaaatatcgcgaataaaggagaaaatccttttgactatatttcatatggtgattcagggaaaaaactatcaagcatagtgaaatgctacaatccacaaggtacaaatagtaaggatcgttatgcatggattgcagagcatcttgaaaatgctgttgaagaagcaattcagatcagaaagcaaaattaa

SEQ ID NO: 20456 - DNA, 678 bp, Vibrio vulnificus
atgggtaaaaagatattcgtttcttacaaatacggagacaaaaatgtaaaggctttaacaagtatattagatgatacaaaagttagagattatatagatttattgcaggacatgctgagcgaagaagatcacataaacaaaggtgaggctgatggcgaggacatgagtgactttaaagacagcacaattgagtcaaagcttcgcgataaaatatacgacagtagtattactatcagtgtcatatcaaagggcatgaaagagtttctagtatcagaggatgaccagtggatcccatgggaaatatcgtattcgcttaaggagcattctagaaatggcagaaaaagccaaaccaatggaattttagcgcttgtattgccagatgaaaacgggagttatagctatttcattgaggatgaaagttgcactcattgtaagtgtagaacattgaaaaccgattttttgtttaaaatacaacgagagaatatgtttaacatcaaatcaccaacctataacgattgtgaaaatcatggctccggtgggaaagtttatctagggtactcttcctatatttactctgtgaaatggtgtgatttcgagaacaatgttcagtattacttagacattgccagcgaaattaacgaaaaaattgatgattacgatatcacaaaagcagtttag

SEQ ID NO: 20457 - DNA, 1449 bp, Pectobacterium carotovorum subsp. brasiliense
atgtttagtcatgaacaaaacacgatgattgatcgtatagttaaagaattagaagaacataattttgcaatttttgctggggctggtttatctgctcctgctgggtacttaaattggaaagaacttttgcgcccactatcagttgaattaaaattgaacattgacaaagaaactgatttagtttctttagcccaatattatgttaatgaaaatcatagccggagccggctaacagaacgattaattgatgagattggcatatcccaaaaagtaacaatcaaccatcagattttagcaaagttacctatatctacttattggaccacaaattatgatgatttaattgaaagatcattagaagatgagggtaaacttcccgataaaaaatttacaaaaaaccacttatctcaaacaaaaaaaggtcgctcagcaatcgtttataagatgcacggtgatgctagcttaccggaacaagcaattataactaaagatcaatatgaatcttactctttgcatttcgcaccgtttgtaacagcattatctggcgatttggtttcgaagacattcctattcctaggatttagcttcaccgaccctaacttagattatattttaagcagaattagaatccattttgagacaaaccaaagacagcatttttgcatttttagagaagtgaacagagatgattatcataatgatgatgaattttcatacaaccaactaaaacaacaatttgttattaaagatctcgctcgatttagtataaaagtaatattaataagtgcatggacagatttaacatctatactgaaagaaataacgaagagatttaggtgtaaaaatgtatttttatctgggagcgcacatgaatttggtaattgggaacaaaatgcaacagagatttttttatcaaaactcggcgaaattctaatacaggagggatttaaaataacatcaggtttgggtttaggtatcggtaatgcttttattagtggtgctattaaagaaatctatgataaaaaacatgctaaaattgacgactacttaaccatgaaggtctttcctcaatttgttgaggataaaaacacgagaaaaagaatttggagtttatggcgaaaggatttattaattcaagctggaattgcaatatttttcatgggaaataaatcaacaaaagatattaattctgaaaaatcaaacattactctagcagatggaatggaagaggaatttcaaatagctaagaactttggattaaaaataattccaattggtgctagcggttataaagcaaaagaattatttgaccgagtcatggccgacttcaatacttattatccaaatgcgacacctgaatttcatgatgcatttactaaattagatgaatctgttgacgagccaataaaattactatctaaaattcacaatatcattaaattaatttaa

SEQ ID NO: 20458 - DNA, 603 bp, Pectobacterium carotovorum subsp. brasiliense
atgtcaaaaaaagtattttttagctttcattatcaggacgttatagatttcagagcaaatattgtaagaaatcactgggttcttaaagaggaaaaagatgatgcaggattttttgataaatccatatgggaagaagctaaaaaaacaagccctatagctttgaaaaaattaattaacaaagcactagttggcacatctgttacgtgcgtattgataggaaccaatacttatcagcgcccttgggttagatatgaaatattcagaagcatatataaaggaaatgactgtttaggtgtaaacataaacactataactggaaaaaatggtcaaaaaaaacctgtaggtcaaaatccatttagctatacaggagtatattttaacgatgatggttcaaaatattcatttgctactagagaattaattagtgacaattggtcctactgggaagaaattgaatcaaaaagagaacatgacaatgattattttgataaagaatatgcaaaaatcaatgcagggaaatttattccactaatagaatttttctcaacatatgattgggttaaagatgatggatacaataaatttagtgaatggataggctaa

SEQ ID NO: 20459 - DNA, 1809 bp, Porphyromonas sp. COT-108 OH2963
atgaacccaaatgaagccatcaaaatccttgccccagaattaaagaaaaaaagcttagtacctttttgcggagcaggaatatccattccctcaggcctaccaagcgctaaatcatttataaatgaaaatggatttgacagattgccatttccaacagcaatgtccatagctcattttcacccaaactttaataaaaatttcaataaagtattcgacaacaataatatcaaacctaatattttacaccaactaataacaagactaaatgccaatatctatatcactacaaactatgatcaactaatagaaaaatcatttaaaaattctgcgctaaataataatgacgaattgatcatagtcagaacagcatcagacattcccaagatcaatcaaggaaaaaacatattaataaaactccatggcgacactgagatacgagacttacttattttaacaaaagaagattatatcgaaagaataaaaactcctaatttagtggatgagttcgtgagaataatttttgcttcaaatacaatactgtttattggttatagccttcaggatgataatattttcagaattcttgaaggcgaaaaaaaattaaattctggagctcttcctgataaatatattgtattgccaaggcgagacgaagagtttgaaaaatatttaaagcatattaatgtcatccctatatacttagactgccaagatgataaaataacagaacagctgtctgatttcttatttaaactgtggtgtcagtatgatttttttgaagatttaacaaataaaactgagataaaaagtgaaaactccattgaggtttcaattcaaaaagcattaatgtacagaaacgacaataaaccagaggaagcaaaaaaaatactagataaaataattaaagaaagtgattgggaaaacaatattgaaataattcctagaattttatggctatatgtaggtatttttgacagtactgaagattgggatagtttagagacaatccaagatagtaaactaagtataatattaaacaaattgagcaagtctctacctatacaaatatcaaacttgatgaaaggagtacacgaaagttcattagcgttgctaagatatcattcattaaacataataaaagcacagaggagctatataaaggccgatcagaatattgttatagacgatacttctccctcttcaatacgcatattgaaagcaaataatttaactataggtgcaataattgaatactacaattatatagcgactaattcagatgagagtttgaaaaaggctttgaccaatctaaaaaatgcagaatcaatatttaaaccaattgaatccgagcgagaaccatttcatcatttaggtcgtttctggggggcaaaagcacttatccacttaaatttagtaaacgaaacagatattgacaatattttagattgggccagaaaggcacattctggtccttttcgaacagaaaatggtaaaatcgctggccgttattgtcatgcttattgttgttacttcttatccaaaatctgtgaagaaagaaaagatgaattgctacgacaggccattaaacttctccaagaaaataacataaaaataaacaagaatacgcaacggattgcagcatataaaaatagcttgctgtacaaccatgtcaattatgatttaaataaaaaaacctatttcttgcgctctgatttaaaagaactctctaaaaatattaatgagaaattcgctagcaatataaaaaattcgctgtcaataaagaaatggttgaaattaccaataaattaa

SEQ ID NO: 20460 - DNA, 1176 bp, Porphyromonas sp. COT-108 OH2963
atgaaatacaagtatcaattaatcttattaggttcaatagagaatcctattatcaaaggaatcaagggccaaattatatctggaatcattgatttaaagttaccacaagatatcataaatataatagacagaaataattggaaagatgagtatgtgggaaatcaacccgcattctgtatataccttggaaatgataatgggcctttcgaagatttggctatagttgaaaagcttattaaagatggaacaatgattcttcctgtatttttcaatgatttctcaaaggagatacccgaagaactcaaaaaacaaaatggaattaaatatgatgataaccagcgaagtcgtattgctaatgttgttttacaagcatttgaactcttgagaagcacaagaaaagtattcatcagttataaaagatcagaatcaacttctgtagctatacaaatgtatgaagctctagaatcccatcacttcgatgtctttttagatacacattctatcgaaaaaggtgaacttttccaagaggagttgtggcacagaatgaccgattgcgatgttatactattactaaatacccctggatttttggaaagttattggtgtaaggaagaactcgcagaagcaggttcaaaacaaataggaattgttcaattagtttggcctaagcataagattaatgctatttcccatctaagtttccccttaaatttagaaagcactgatttcgtcgatacaatctatgatgataaggataaatcaaaactaaaaaatgataaggttgaggaaatagtacaatttgttgagtctgtacgagccaggaatctagcatctaggcaagataatttaataaccgaatttatgagtatagccaagcaatgtggtagaagcattacagttcaacccgaaagatttttgacagaagaactatcaggcaaaaagataatctatatacctactattggaataccacaatctactgattgtcaatcagcagaaattcgacatgagtttgaaaaaatccctaataacacttgtattagattgatttacgatgatttaagaattagagataaatggttaaagcatttagattggctaaatgacaacttcaaaaaagacatacatacactaaaaaaacaagattttgaaaaatggctacaacagaaaaaatga

SEQ ID NO: 20461 - DNA, 1437 bp, Enterococcus faecium; identical to SEQ ID NO: 18577

SEQ ID NO: 20462 - DNA, 486 bp, Enterococcus faecium; identical to SEQ ID NO: 18578

SEQ ID NO: 20463 - DNA, 852 bp, Enterococcus faecium; identical to SEQ ID NO: 18579

SEQ ID NO: 20464 - DNA, 1416 bp, Prevotella bivia DNF00650
atggctatatcaagagaagatttcgttaataagtacttagaagctttgaacgagggtgacgctgccatatttgctggtgcaggactatctgcttcaagtggttgtgttaattggaaagaattgttatgtgatattgcaaaagaattaagtttggacatagataaggaacaggacttagttagtcttgcgcaatattattttaataaaaatcgaaatcgaacaaaattcaatgatattatagtaaatgcctttggtaatgaaaaaagacccaatgataatcataaaatactttctgatttacctattgcaactttttggacaacgaattatgataaacttattgaagagtctttaagacaaaaaggaaagcgatatgatgtaaaagcaacttgctcctcgcttacaaggagagtaaaaggtgtagatgctgtgatatataaaatgcatggtgatgttgataatcccgactctattattttaatacgtgatgattatgagaattattctcacaagaatcacccttttattgatgctttaaaaggagatttaatgaataaaactttcctttttataggatttagtttcactgatccaaacttctcctatataagttcacaacttagggtgcagctggaaggtaatcagagagaacactattgtattttaagagatatttctatagataactatcctgatgaatccgattatcgttatgaaaaggtaaagcttcaatattttattgatgatttaaaaagattcaatataaagacagttctcgtggagcagtattctgaaataacagacatgttacgagagattaaatttaaatataatagtaaaactgtgtatatatctggagctgctgctgagtttgaaccagatggaagacaagcatatgaatattttataagtaaattaagtggtgctttaataaataaaaactataggatagtctcaggttatggattaggtgtagggagctctgttattagtggagctctaacagaaatataccaaaatcagaagaaatcattgacaaatcagattattttgcggccatttcctcaaggtgatgatgaaataaaaaaactatggcaacagtatagagaagatatgatatcctatagtggtatttcaatctttatcttaggcaataaactagaaaatgataaaattgttttatcagatggcatgcgtgcagaatttgacatatccagaaaacaaggtaatttcttgatacccgtaggaagaactggctatatctcaaaagaactgtggaaagaatatatggacgaaattagttcaaaagaagaatttgcactatataaacagtctttccaaaagattggagacgaatcaaccccgttaaacgaattaattaatgaagtcttaacaataatacaaaatattaaataa

SEQ ID NO: 20465 - DNA, 612 bp, Prevotella bivia DNF00650
atggcacataaaacttttatctcgtataaatatagtgaagctcaatctctaagagacaaaataataggagcacttggagatgatgcgaagtattatcaaggagaaactagtgattctccagatttaacagacacttctacagaaaacatcaaaaagaatcttaagaatatgatgtttgatacctctgtgactattgttataatttcacctaatatgaaagaaagccattggatagattgggaaatagaatactgcctcaagaaaatatcaagaaaggacagaacatctcaacgggatggagtggttggagtgataatgaaaagcaatggagggtatgactggtttaaacagattcaaactaattctgatggatgtagggttagaacatataaaaccgaaaaagtatttgatataataaacaataatagattcaatcaaaatcctcaacaatattcttgtaatgtatgtaaatgtatagatgccttaacaggttcgtatatagcctttgttgaagaagatgatttcttgaagaatccgcagctttatattgacaatgcgtatgataagagtgaaaacgatgcatcaggctatgacatttcacctacacgataa

SEQ ID NO: 20466 - DNA, 549 bp, Prevotella bivia DNF00650
atggcaaaacatcaggttttttacagttttcattttgcaaatgatgcctggagagcaggacaggtaagaaatatgggagttttagaaagtaatccccctgtctcttctaataaatgggaagaagttaagcgagaaggaaatatttctatcaaacgctggataaacaataatatgaattataggttatgtgttattgtattaattggtagcgagacttcgaagaggcaatggtgtaaatatgaaattgaacgagcttggaaggaagggaaaggtattgtaggtgtctatatacacaatcttaaggacgtatttggttttcaaagtttacaaggcgtaaacccttttagtttattttgtattgataagactataaattatattgttgagcgtaatattcctgcagataaagatgagattaacctctctaaaatttgtaaagcatataatcctccgttcagttctagtacatctgtctatgattatataaactgtcatatagacgaatgggtagatgaagccatagtaattagaaaccaatatcctaaatag

SEQ ID NO: 20467 - DNA, 1422 bp, Streptococcus uberis
gtgtttattataaaaggagaaataacaaaacaacaactgatagatgaacttatgaaatctattgaaggtgaagaacttggagccttcattggtgcaggtttgtcaatcccagcaggttatagtgattggaaaaaattattgaaagagcctgctaagaaaattggattagacgtagagaaagaatctgacttagttaatttagcacaatattattctaattcgagaaatagatcagcaattgataatttgattcgagaaagtttttcaaagaaagctattccaacaacaaatcataaactacttgctaaattaccaataaccacttattggactacaaattatgataagttaatagaaaaatctttagaagataatatgaaattacctttcatgaaaacaaaagatgaacatctaagagctttgaattcaaacttcgatgtaatagtttataaattacatggtgatattgactcgcctgaagatgcagttatcactagaagtgattacgaggaattcggctataaaaaaagaaaattatttagagatgttttggaaggagacttgttaacaaagacctttttattcttgggctttagcttctctgaccctaatttcaattatgttatcggaaagttaagggttttgcttgatgataacaatacaagaaatcactactgtataataaaaaaagtttcacctttatcagataattatgcatatgaaaaagtcaaacaagagttacaaattgaagatttgaatagatatggtattttgacttgcttagtagatgagtatgatgaaattacggatattttaaaagaggtcgtaaatagattctgtagaaaaactatatttatttctggaagtgcagaaaattatcaaccattttcaatagatggagggagagaatttattcacaaacttgcttataagcttattgaaaatggttatcaaattgtgaacggttatggaaaaggaattggggagtttgttctaaatggagtttcagagtattgtctagccaatggcttaaaaataaaagataatctaaccttaattccatttccacaacaaagttcttcagatattaatcttgaggaattatatgaaaaaaatcgtaatcaaatgattgaaaattgtggtattgcattattcctatttggaaataaaaaagataatgaaatagcagaaggggtattaaaagaatttgagattgcgaattcacatggactagtttgtttaccattaggttatactggtggagcgtctaagtatatttttgataataataaaccaaataagcaggaagaggatatttgtattgcttttaatgatattaatgtataccaggaagagaaactggatgatactatagattatataatcaagataattaataatttaaataatggaggaagataa

SEQ ID NO: 20468 - DNA, 501 bp, Streptococcus uberis
atgtcaaagagacaagtattttttagctttagttacaaaaatgataattggagagcttcccaagtaaggaatatgggaaaggtggaacaaaattctactttttcagataatgagtgggaagaagttaaagaaaagtcagatgataaaataaaagagtggattgataatcagcttagaaagcgatcatgtttagtagttttaataggtcaaaatacagcaaatagaaaatggataaattatgaaataaaaaaagcttatgaattagataagggaattgtgggtatttacataaataaactagaaaattcagttgggaaacaagatcaaagaggggaaaatccatttgattatttaaaactaagaaatcaaaagatttctaagtatgttaagtgttttgaatcaaaatatgttactagtagatttgtttatggtgatataaaagacaatattgaggaattaattgagtacggtattactcataagccatcaagttggaaataa

SEQ ID NO: 20469 - DNA, 1437 bp, Enterococcus faecium; identical to SEQ ID NO: 18577

SEQ ID NO: 20470 - DNA, 486 bp, Enterococcus faecium; identical to SEQ ID NO: 18578

SEQ ID NO: 20471 - DNA, 852 bp, Enterococcus faecium; identical to SEQ ID NO: 18579

SEQ ID NO: 20472 - DNA, 636 bp, Actinobacillus pleuropneumoniae
ttggctcgcttaccaatagatactttttggacaaccaactacgatccggtcatagaaactgcattgaaagaagctggtaaagtcgttgatgttaaacataatgtggaacaactacctgtatctatccataaaagagatgctgtagtttataaaatgcatggtgattataccttgccgaatcaagctgttttaattaaagatgattatgaaaaataccatttaacccgcaatgatttttttacggctttacgaggtgatttactcacaaagcgttttttatttttaggttttagttttgcagatcctaatattgactatattctaagtagaattagggcttcatatagtgaaaatcaaaaagaacattactgtattctgcgtaaagtacaaaaatttgataatgaagaccaagctgattttgagtacagacaacgaaaacaacagttgtttatatccgatttagagcgagttggcgtcaatactttacttattgatgaatatagtgaaattacagaaattttacgcgaagtagagctggctcaaaaacgtaggacagtttttatctctggtgctgcggaagattatgccccatatagccaagaagatgttgaaaaatttgtatcttctttagcgtaa

SEQ ID NO: 20473 - DNA, 498 bp, Actinobacillus pleuropneumoniae; identical to SEQ ID NO: 18801

SEQ ID NO: 20474 - DNA, 645 bp, Actinobacillus pleuropneumoniae; identical to SEQ ID NO: 18802

SEQ ID NO: 20475 - DNA, 924 bp, Actinobacillus pleuropneumoniae
atggataaaaaacaatttatcaaagaactggttaacgaattatcagctaacaatttagccattttcgcaggagcaggactttctgtctcagcaggatttgtgaattggaaagaattactaacagatttggcaaaagaacttagtttagacataaataaggaagaaaacgatttagtctcattggctcaatattatgtcaatagcaaatgtggtaagcgttcaaaaataaattatttgatcttgaatgagttttctcgaaaagctgagataactgaaaatcacagaatcttggctcgcttaccaatagatactttttggacaaccaactacgatccggtcatagaaactgcattgaaagaagctggtaaagtcgttgatgttaaacataatgtggaacaactacctgtatctatccataaaagagatgctgtagtttataaaatgcatggtgattataccttgccgaatcaagctgttttaattaaagatgattatgaaaaataccatttaacccgcaatgatttttttacggctttacgaggtgatttactcacaaagcgttttttatttttaggttttagttttgcagatcctaatattgactatattctaagtagaattagggcttcatatagtgaaaatcaaaaagaacattactgtattctgcgtaaagtacaaaaatttgataatgaagaccaagctgattttgagtacagacaacgaaaacaacagttgtttatatccgatttagagcgagttggcgtcaatactttacttattgatgaatatagtgaaattacagaaattttacgcgaagtagagctggctcaaaaacgtaggacagtttttatctctggtgctgcggaagattatgccccatatagccaagaagatgttgaaaaatttgtatcttctttagcgtaa

SEQ ID NO: 20476 - DNA, 498 bp, Actinobacillus pleuropneumoniae; identical to SEQ ID NO: 18801

SEQ ID NO: 20477 - DNA, 645 bp, Actinobacillus pleuropneumoniae; identical to SEQ ID NO: 18802

SEQ ID NO: 20478 - DNA, 924 bp, Actinobacillus pleuropneumoniae; identical to SEQ ID NO: 20475

SEQ ID NO: 20479 - DNA, 498 bp, Actinobacillus pleuropneumoniae; identical to SEQ ID NO: 18801

SEQ ID NO: 20480 - DNA, 645 bp, Actinobacillus pleuropneumoniae; identical to SEQ ID NO: 18802

SEQ ID NO: 20481 - DNA, 924 bp, Actinobacillus pleuropneumoniae; identical to SEQ ID NO: 20475

SEQ ID NO: 20482 - DNA, 498 bp, Actinobacillus pleuropneumoniae; identical to SEQ ID NO: 18801

SEQ ID NO: 20483 - DNA, 645 bp, Actinobacillus pleuropneumoniae; identical to SEQ ID NO: 18802

SEQ ID NO: 20484 - DNA, 924 bp, Actinobacillus pleuropneumoniae; identical to SEQ ID NO: 20475

SEQ ID NO: 20485 - DNA, 498 bp, Actinobacillus pleuropneumoniae; identical to SEQ ID NO: 18801

SEQ ID NO: 20486 - DNA, 645 bp, Actinobacillus pleuropneumoniae; identical to SEQ ID NO: 18802

SEQ ID NO: 20487 - DNA, 924 bp, Actinobacillus pleuropneumoniae; identical to SEQ ID NO: 20475

SEQ ID NO: 20488 - DNA, 498 bp, Actinobacillus pleuropneumoniae; identical to SEQ ID NO: 18801

SEQ ID NO: 20489 - DNA, 645 bp, Actinobacillus pleuropneumoniae; identical to SEQ ID NO: 18802

SEQ ID NO: 20490 - DNA, 1464 bp, Pectobacterium carotovorum
atgaccaaagcggccatgaatcgcttcttaaaagaatatccgaatgcgttgaatgacggtacgggcgccatttttattggagcaggcgtttcaatggctgcaggttatccatcctggtttgagctattgggagaaattggcgaagaactggggatcagctccaaaaacgtacatgatcttgcagcattggcacagtggagcattcaggcaaccggaggggcaacacgcgtccgcgaagttatcaagaaagaaattagtcccgacagaccgataccagacacggtggaagtgattgcccggttgcctatccggcatatctggacaactaactatgatcggttgattgagcgagccttccaagccatcaatcggcctcttgagccaatctccggtgtagacaacctggcgcttaaagcaacgccgggcgccacacgactttataagatgcatggctcggttgataggctagacgatatcgtgatatccaccgacgactatgaattattcaggtcgaaaaggggagcctatctacctcttttccaggctcatctgacaagtatgtcaatgcttttcgtaggaatcagtttcactgaccctaatattagacatgtgctatcactaatccgggaaagcttcaaagatgctccccccgagcatttcgccatcgtacgcccaccacaacgtgctgatttttcatccgatgatgaatacaacgcgcgttcaacccaacatgacttgtgggcaaaagatctgaaacgctacgggcttcttgtcgttgaaattgacaattatgacgaagtccctgagttgctacgaaaagtagagcgtcgcgtcgctgccaagcgtgtttgggtgagtgggagttggccgattgagcatggtggcgcggaggcctccaacattcacgcctttgccgaaagtataggccgccagattggcgaatcgaatcgagatttggtgactggggcaggcgtattgatcggctctgcgtctatatcaggatttctggcggccctacgtaatggcggagggtgggatctggaccgccgccttgttgcacgcccattcccccagcctctgcaaggtagcgtgccgaatgagcgcgagtggaaggccctgaggaacgagctggctaggcaagcagggatagtgatttttgtggggggcgtaaaactactggacggagcactaatttcagccgacggcgtgttgcaagagttcgaatgtgcaaaagtaagtggtgccttcttaatccccatcgcagcaactggcggggcagctaaagacatttgcgagcaactgattggctctcccctgtccaccgaaggagccatggcacaacgcccctctgataaggaactgagagcgcttgctgatccgtcgctacttcttgaccaaaaaagccgcgaccgactagttactgtgctctttgaacttattgatagaatagcaaagatatcctga

SEQ ID NO: 20491 - DNA, 588 bp, Pectobacterium carotovorum
atggctaagaaagtcttttttagttttcattatcaagatgtaatcgatttcagagctaacgtggtcaggaaccattgggtttctaaacctgaccgtgcggcagcgggatacttcgataaaagcatctgggaagaggctaagaaaaatggtgatatcgcgctaaaaagaatgattaatagtgcactagaaaatacaagcaatacggtagttcttgctggcagcaaaacatatgaacgtccatgggtgcgttatgagattttaaaaagtttcttacgtggaaaccatatattatccgttaatattaacaactataaagataaaaataggatagtgaaacctaaaggaccaaatccactggattatgttgctgcatcattatcttctgacggaaaatcagtgacattgatggaatatcaaaatggtagttgggtcaactacaatgagattgatagtaaatcaacacacccacgcccatcaggcctaccaagcggaagacaaggtacatcagtaaaactgagtcaactatttccagaatatgactggattaaaaatgatgggtacaataatttttcagcctggctaaaatag

SEQ ID NO: 20492 - DNA, 498 bp, Pectobacterium carotovorum
atgactaggaaatgcttttatagttttcactatactccagataactggcgagtatctcaggtaagaaatattggtagtttggaagataacaaacccgctactgataatgaatgggaggaagttgagggcggaggagaaaaagcaattcaagattggatacagggtcaactaaaaggaagaagttgtgctgtcatattagcaggcgagaatactgctggaagaaaatggatcaattacgaaatatctgaagcgtggaataaggggatgggagtactcgtagtatacataaacaatctaaagaacgcagatgaagatcaatccttaaaaggaaacaatcctttagattatgtaactatcccaggaggcgacgcaaagctttccactgtagcaaaagattatgaccctccatatcttactagcaaatatgtttatgattacatcgctaaaaatcttgaagactgggttgaagatgcaatagaaatcaggaaaaattactag

SEQ ID NO: 20493 - DNA, 504 bp, Pectobacterium carotovorum
atggccagaaaagtattttttagctttcattttgacaatgacttttggcgtacccaacaagtacgtaacatcggcgtgatagagggacagaccttatataaacctaacgcatgggaagaagttaagagaaaaggcaatgcagcaattgaaaagtggattgatgagaatctgagtggaaaatcctgtgtggttgttctcgtcggagcagaaacggcgaaccgaccttgggtaatagaagagatagttaaaggatggaactcaggcaagggtgtactgggcatccgtataaatggtctcctcaacagcgagcagaaaacttccactgccggggcgaatcctttcgacagcgttacactaaaaagcgggaccatcaaactatcaacttacgcaagattgaaaacaccaaccggttcggacagcaaagccatctatgcgtcgattcaaaacaacattgaggcatggattgaggaagctattcaaattcgcaaagattacaaaccttaa

SEQ ID NO: 20494 - DNA, 552 bp, Pectobacterium carotovorum
atggcccgtaacgtcaccacttcagaactgcgaagcttttcagcaaacctagctccggcagatttgcaaaaatcattaataacggcatcaataagccagtcagccagtgcttttctttcccactccagcaaagacaaagatttggttatcggagctatgcaagttattcaaaaccatggaggtatagtctatgtcgatgaaatagatccggagatgccaccctataccactgacgaaactgcggcactattgaagcaaagaatcattcagacgaaacgttttgttcttttgacgagtagcaacagcaaggacagccgttgggttccttgggaactcggtattgctgacggtgccaaaggtctcgggaaaatagcaatttttccggcatccgatactgaggggcaagattcctggacatcctgggaatacttgggcttatacagacgaattgtttgggggaaactggaggggcatccaaataacctttggatggtgctggatcacaaagccaatactgccgtcacccttagatcttggttgtctggatactag

SEQ ID NO: 20495 - DNA, 1452 bp, Staphylococcus aureus; identical to SEQ ID NO: 18653

SEQ ID NO: 20496 - DNA, 609 bp, Staphylococcus aureus; identical to SEQ ID NO: 18624

SEQ ID NO: 20497 - DNA, 927 bp, Staphylococcus aureus
gtggaaagacaacaaacttacaaagaaaaagcgcaacacctatataaagttaaaaaaatcaaaaatagatataatacgaaaagtgcagaagaatattttttctcgattcctcaagtaaaatacattctttcagcaggaagaatgaaaaaacataaagagaattataatgcttcagagataaaaataaaaaaagcagctttagaaaagagtaggaagaatgagaattggaaaattgaagaacgtttaataaaagctaagagatatactcaaaaagttgatccagaatacttaaatatttatatgaaagcttatcataagaaagatataactacagaagaaaaactagaaattctaacggaattaaaaaaatttgatacagaaaatatagtgcgtttttttagaaaattaaatgatgctgaacaaaataaaatgattagaaatttagcctttaaatatttacaagattacggtcactatgtgaaactaaggaaaaattttaaaggaaagaagaaagtatatcaaactgagagagcttctttagacactaaaaaacctgaagatttatataatgatttaacaaataagaatattcaatctcaaaaagtctatgatatttttatttctcatagtacaaaagataagaagacagttgaagatattataagagtttttaatgaacaaaataaaacgtgttattgtgattggactatggatcaagattatttaaaaaggaagtatgttggtgaatatacaaagcaagtattgaaggctcgtatggagcaaagtaaaatgctggttttgttgagaacggagaattcagttcaatctgattgggttagttttgaaatagaatactttgaaaatctaaaaaaacctatatatatagtagagtctcttgaagaattattagaggctttttcagattag

SEQ ID NO: 20498 - DNA, 1437 bp, Escherichia coli; identical to SEQ ID NO: 18665

SEQ ID NO: 20499 - DNA, 612 bp, Escherichia coli; identical to SEQ ID NO: 18666

SEQ ID NO: 20500 - DNA, 312 bp, Aeromonas hydrophila
atgatcggcctttcaggcattgcattgtttctattcggcaacaagcttaacgaggacagcaatgtcatcaatgctggaggtgtgcgtaaagaatttgagatcgcccaaggtacaggagtcgctgtacttccaattggtgtaacaggctatatggctaaagagttggctgaggagatgctgagagaaccagggaaaagctttactcggtatccttggctggaaaaggaggtagcccgacttttagatcctgcaactgatagaaccagtattaataaggaaattctggctattttgaagaaattagggggttag

SEQ ID NO: 20501 - DNA, 579 bp, Aeromonas hydrophila
atggcctattttactaaaagtgaggcgcgagcagctgccgcatctgctcgcggctataaagccgctaatacggttctgaaggaaggtatggagaaatacacagtacatgataaatttgatgtatttctttctcactcaatggacgatgccgacctggtgttaggggttatgactctattgcaaaagcaaggtctgcgtgtctatgttgattgggttgttgaccgtcaattaaatcgcgattcggtgaataaggagacggctgcggtacttcgggagcggatgaagtcatcaagttctatgatgtatatcgccaccgacaatgcttccagctcaaaatggatgccttgggaactaggtttctttgatgggtataagcctaatcaggtagcgattctcccacttgtagatttcgaaaatcaaagctttgaaggacaagagtatcttggcctttatcccgttgtaacaaagcaccttcaaaataattcgttaaatcattatgtagaggacagaggtcaaaggtggagtaacctgaataactttgctaggggaactccatcgtggaatcgctattcatcataa

SEQ ID NO: 20502 - DNA, 1455 bp, Serratia marcescens
atgccagaacgtgatatagaactgtttattcgtgattacgttaatgatatcaaagccggcagcgccgcgctgtttgccggcgccgggctgtccatacccgccggttttgtcagctggaaagagcttatcggtgatatcgcttatgaattggggctggatatagaaaaagaaagcgaccttatttctctggctcaatatcatctcaatgaaaaaggcaaccggcataagataaatcaaaaaataattacagaattcgctgagcaagcggaagaaactgaaaatcatcggatcattgccagattgccgatagcgtcactctggacaaccaattacgacgatctgattgaaaaaacctatgcccgttataatcgcgtctgcgacgttaaaaccacgccggaaagtctgaccaacaatattcacaagcgcgatgttgtcttatataaaatgcatggtgattatagaacacccaaccaggcgattatcacccgcgaacaatacgaaacttactcccgtacacaccttccttttatcaacatgctgatggcggagttgaccgccaaaaccttcctgtttatcggtttcagctttgaagaccccaacctgcaatacgtattgagtcgcctttacgcgcagtacggcgaagggaaaagaaaccactactgcatcatgcggcgcgttcagcctggcgacagcggcagcgaggatcaggcgtcttatgattacaacagccgaaaacaaagcctgatgatcaacgatctgcgccgttacggcattcaaacgctgctggtggaggactatcggcaaatcaccgacctgctgtatgccatcgaaacgcaattcaagaaaagcacggtgtttatctccggcagcgccgacaactaccacccctatacccgtgaagagtccatccagttcatacaccgcctggcgcgcctgcttatccgcaaacagtaccgcatcgtcaacggcttcggttggggcgtgggcacggcggtgatcaacggcgcattggaagccatttacgccagcggggggaaaatcagcgaaagccagctggtattgcgccctttcccccaattcgccagcgggagcattacgctgccggcactttggcacgagtaccgccagaacatgatttcgctcagcggcatcgcggtttttttgttcggcaacaagcgtaacgccgaaggcgaatgcgtgctggccgacggtttattgaaagagttccacatcgctgcggaacaaggctgcgtctgcattcctatcggttgtaccggcggcgcatccgccgagatctaccgaaaaatcaaggaggagatgaaagacaccctctatcaccgccatcccgtcgccatgaacctgctggatcaacttaacgagccgggcagcctggcggagaagaaaacatgcctgttggcacttatcgatatcattactaaggataatcctcgatga

SEQ ID NO: 20503 - DNA, 492 bp, Serratia marcescens; identical to SEQ ID NO: 19495

SEQ ID NO: 20504 - DNA, 1443 bp, Pseudoalteromonas flavipulchra NCIMB 2033 = ATCC BAA-314
ttgaaatttgaacatgagattgaaatttttattagggattatgtgaaagatctcaatgagggtactgcttctatttttgctggtgctgggttatcgattccagcaggttttgtgaactggtcggaattaatgcaagaaattgcacatgatctagggcttgttattgatcgcgaaaatgatttggtatctctagctcaatttcatgtcaatgagaatagaacaaggtcaaaaattaataggaagatcattgaagagtttactgaaaattctgaggaaacgttaaatcacaatattattgctcgattgccaatatcatcggtatggacaacaaattatgataatttaattgagcaagcatttactaaagagaataaagttgctgatgttaaacatacaaacaaacaacttcttacaaacagacctaagcgtgacgttgttgtgtataaaatgcatggtgatgccaatcactcatcagatgcaattttgactaaagaagattatgagcaatatcaccaaactcatgagccttttatacatgctttatcgggagaattaacgactaaaactttcttgtttattggttttagttttacagaccctaacttggattatgttttaagccgtttgaattttaggttttcaaaagataaaaaacagcactattgtttaataaaaaaacattgtttaaatgacgcactaaatccagatcaagctacgttagattacaattcaagaaagcagcaacttgttattaatgatctgaagaggtacggaataaagtctttggttctcgatgattacgcacaaataacttccattcttgtagaaattgaaaagaggtttaaaaagaagactatattcatctctggaagtgcggagatatatgatccttatgaaaaaaatgaagctttaggttttattcatttgttatcaaaaaaaatcatcgaaaaaaactttagaatcgttaatggttttggttggggtgttggtagttcggtgattaacggctctttagaggcaataagttctaatccaatgaagttttcagaatcccaacttatactaaaaccatttcctcaatttgaatcaggcaagaaaaagttacctgagctttgggaggaatatagacaaaaaatgatctcgttaagtggtatatcaatttttctatttggcaataagcgtgatggcgatgaaattgtagaagcgaatggtttaatacgtgaatttgaaatctctagggatttaggaaacatatgcattccaattggttgtactggttatgcagctgaatctatactaaaacgaatcttggctaagccctctgattattatgaaaatagtgatgatgtggtgccgttgctagagacacttttagattcagataagccattatccgagaaagttgatgtagtaatagctgttataaatgaagtaatacaataa

SEQ ID NO: 20505 - DNA, 501 bp, Pseudoalteromonas flavipulchra NCIMB 2033 = ATCC BAA-314
atggcgaggaaatgtttttttagctttcattatcaaccagataattggcgagtttctaaaattagaaatattggtgctattgagggaaaccaagcggcaaaagataatgactgggaaacggtaactggcggtggtgacaaaaaaatcaaggagtggatcgataagcaaatggaaggacgtacatgtacggtaattctagctggttctaaaactgctgatagaaaatggataaaccatgagattgttcaatcatggaataaaggaaaaggtgtattggttattcatatacacaacattacagatagttttgataatcaatcgtctaaaggcgctaaccctctatattatgtgacgcatggtactactaacaaacgtctatcaacaattgccaaatcttatgatccaccatatataacgagtaaaggtgtatacaactatatagcaaataatatagattcatggattgaagaatcgatacaaatccgaaaagataatccctag

SEQ ID NO: 20506 - DNA, 1443 bp, Pseudoalteromonas distincta; identical to SEQ ID NO: 20504

SEQ ID NO: 20507 - DNA, 501 bp, Pseudoalteromonas distincta; identical to SEQ ID NO: 20505

SEQ ID NO: 20508 - DNA, 1455 bp, Serratia marcescens
atgccagaacgtgatatagaactgtttattcgtgattacgttaatgatatcaaagccggcagcgccgcgctatttgccggtgccgggctgtccatacccgccggtttcgtcagctggaaagagcttatcggtgatatcgcttatgaattggggctggatatagaaaaagaaagcgaccttatttctctggctcaatatcatctcaatgaaaaaggcaaccggcataagataaatcaaaaaataattacagaattcgctgagcaagcggaagaaactgaaaatcatcggatcattgccagattgccgatagcgtcactctggacaaccaactacgacgatctgattgaaaaaacctatgcccgttataatcgcgtctgcgacgttaaaaccacgccggaaagtctgaccaacaatattcacaagcgcgatgttgtcttatataaaatgcatggtgattatagaacacccaaccaggcgattatcacccgcgaacaatacgaaacttactcccgtacacaccttccttttatcaacatgctgatggcggagttgaccgccaaaaccttcctgtttatcggtttcagctttgaagaccccaacctgcaatacgtattgagtcgcctttacgcgcagtacggcgaagggaaaagaaaccactactgcatcatgcggcgcgttcagcctggcgacagcggcagcgaggatcaggcgtcttatgattacaacagccgaaaacaaagcctgatgatcaacgatctgcgccgttacggcattcaaacgctactggtggaggactatcggcaaatcaccgacctgctatatgccatcgaaacgcaattcaagaaaagcacggtgtttatctccggcagcgccgacaactaccacccctatgcccgtgaagagtccatccagttcatacaccgcctggcgcgcctgcttatccgcaaacagtaccgcatcgtcaacggcttcggttggggcgtgggcacggcggtgatcaacggcgcattggaagccatttacgccagcggggggaaaatcagcgaaagccagctggtgctgcgccctttcccccaattcgccagcgggggcattacgctgccggcactttggcacgagtaccgccagaacatgatttcgctcagcggcatcgcggtctttttgttcggcaacaagcgtaacgccgaaggcgaatgcgtgctggccgacggtttattgaaagagttccacatcgctgcggaacaaggctgcgtctgcattcctatcggttgtaccggcggcgcatccgccgagatctaccgaaaaatcaaggaggagatgaaagacaccctctatcaccgccatcccgtcgccatgaacctgctggatcaacttaacgaaccgggcagcctggcggagaagaaaacatgcctgttggcacttatcgatatcattactaaggataatcctcgatga

SEQ ID NO: 20509 - DNA, 492 bp, Serratia marcescens; identical to SEQ ID NO: 19483

SEQ ID NO: 20510 - DNA, 1482 bp, Mycoplasma capricolum subsp. capricolum
atgaaatttaatctttatagttgtattaaattgcattattctttaagttatttggcatttgtggaggtgttttttatcaaaggcaaaatttcaaaaaaagaacttattaaagaaattggaaaatctataaaaaatgaagagttagctgcatttataggtgctggattatctgttgatgctggttttttaacgtgatctgatttacttagagaaccagcttcagagataagattggacatagagaaagaaattgatctagtaaatgtagcccaattttattcaaatgtaaaattaagaagctctatagacaatttgataaaacaaaatttttctagattatataaaccaacaaaatgtcataagcttcttgctcagttaccaatatcaacttattgaacaacaaactacgataaacttatagaaaaagcacttgaaaataacaataaagtaccatttactaaaacaaaagatgaagatttaagagcaataaacagaaattttgatgctatagtttataaattacatggggatgtagattcacccagtgatgctgtgataacaagaacagactatgaggaatttggctataataaaagaaagttatttagagaagtgcttgaaggtgatttattaacaagaacattcatttttttaggttttagtttttcagaccccaattttaactatgtcattggtaggcttagagtgcttctaggagagtctaaaacaagaaagcattactgtataatgaaaaaaatttctatgtgtgacaaggattatgaatataaaaaaataaaacaagaacttcaaatagaagatcttaatagatatggaatattcacttatcttgttgatgactataatgaaataactaggattttacaaataattgttaataattatagaagaaaaacaatattcatatcaggaagcgctgatgattatggtgattttactaacgagcagggtaaaacattcctccatctactttcaaaaaaattagctgagaaagattaccatattgttaatggatatggtaaaggtattggagatcttttattatcaggtgtttctgaatattgtttagccagaaacaaaaaaattttagattgtcttactattatgccttttccacagtcaatatctaaagagatgtatcaactttacaataaaaatagaattcaaatgatagaaaagtgtggcattgcaatttttgtatttggtaacaaaaaaggaaagggtgctgaaggagtaatggaggaatttaatatttctaaaaaaatgaatttatcgattttgcctatttcttgtactggttcagcagctatgaaaatatcaaatgaaatcttatcagcaagaagtatagataaagataatttaaaagcaatacaaatagctaacagaaatgtaaaaaacaatgtgaagcaattagtagaaaatataataaaagcaatagaatttttaaacaaggaggaagattaa

SEQ ID NO: 20511 - DNA, 471 bp, Mycoplasma capricolum subsp. capricolum
atggcaagaaaagtattttttagttttcattttgaaaatgatgtttgaagagctaatcaagtaagaaattcttgagttactcaaggaacacaagcagcaggatatatagacgctgcagaatttgaagaaatcaagagaagtggtgaccgagcagttaaaaaatgaattgatgaacaactttttggaacaagtgttacagttgtcttaataggtagtgaaacattagatagaccatatgtaaggtatgaaattgaggagagtataaaaagaggtaatgctatcataggaatagccattggtgatttgcttgatcaaaacaaaaaaacatcattttctaaaattagttcgtatgcgataaatggtaaaagttttttagacattgcgaatggattttataattataaaagagatgatggatattcaaatatgggtatttgaatagagaatgctgctagaagtaaaggaaaataa

SEQ ID NO: 20512 - DNA, 1776 bp, Pseudomonas taetrolens
atgactgctgccatcagtgattcaacagcccaaatcgcgttttcaatgtttgaaaacaaaggcgtctacgcagtgcttcttggctcgggggtatcacgctcggcgggaataccgaccggctgggaaatcaccatggagctggtgaaacgatggggcatagcgtctggtgccggcgaacaggaagattggctcgcatggtacgtaggtcaaacaggagagcagcccaattactccacgttgctcgaacgcctggcgacaacccagactgagcggcgagcgatcattcaaggctttctggaacctagcgaaggcgagttagaggatggccttaaactgcctacccccgcacatcgagcgatcgctgcgatggtcaaagcgggttatgtgcgcgtgatcatcacgacgaacttcgaccgactcatggaaaatgcgctgcgcgatgtcggcgttgagccaactgtcgtcagctcagaagacaccctcgcaggagcggagccactcactcatgcgtcctgctacatcctgaagatccatggtgattacaaggatgccaggatcctcaataccgatggggagctgggcaagtacccgccagcgttcaatacgttgcttgaccgcatcatcgatgagtttgggctgatcgtcgcgggctggtcaggtgagtgggatcatgcgctgagggcggcgtttttgagggcgccctcccgtcgctacccgacctactggctttcgcgaggaaaattgagcgagcgtggccaagagctcatcactcagcggcgcgccaacgtcgtgacgggcctggatgccgacaccttcttcgatgggctgaacctcaaactggaaaccatccagcaatcccgcctgcagaaccctgccggcatcgagctgactctcgctatggccaaacgctttatggccagacccgaacacaggattcagctcgatgatttagtgaccagccaggctcatcaagcgatcagccatctggctcctctcttcgcagaacgacctcagggcagcacgtccaaggattttaccgacctggttgagatctacgaagcggccatcgagccactagcacgcctttgtgcagtgctagggcgatggggtgcaggtgttgagcatacgatcgttttggatgcgatcaagggcctgcacgctgcgtctcaggtcgagcagtcagggtgggtagctggacttgcattgaagagttacccgatagcacttgttacctatgcgtatggcatgggacttgtgcgggccaatcgcctgagcgagctaaacgagctgtttaacacgacacttatcaaccggcgcgaaatgcctttccctgtgggacttgatctatcaccgttctacgttgagggagccaatggcctgtttgaattatggaagagcttcgaagaccaaagtagagctcttacccccttgtgcaaccgactccatgaccgtcttacgcctcggtgggcgcctgacttcgcaggtctgcaggatcacgggctgctttacgaacggtttgagtttttcagtttcctgttcttctgcgagcaacgcggagtcagtgaagaatcactcgcggatgcggtgaaaaaccacggtttcaagaaaatcgcattgggccggctttcctggcattcagagaccatcaaccgcttcgctcacgaatatgcgaccgaagagtacagggccccgctgctggcagcagggttcgcacttgggtcgcaaagctacctggagcaaatgcttgaaggactgaagcggctgtccaggtactga

SEQ ID NO: 20513 - DNA, 969 bp, Pseudomonas taetrolens
ttgccgaacgtgttcttttcttattgccatgctgacgaggcgctgcgcgaccagttggaaaagcagctttcgatgctcaagcgccaaggcgtcattgagacttggcacgaccgcagaatcggagcaggccaagagatcgatgctgccattgatgatcacatcaacagcgacgaaattatcctgttgctggtaagcccggatttcatcgcttccgactattgctacaacatcgagatggctcgcgcgatggagcgccatgccgctaaagaagcgactgtcattcctgtgattcttcgcccatgcgattggcatcatgcccccttcggcaagctgcttggtacgccccaagatggtaagccagtgaccctttggcctgatcgggacgaagcattcttgcaggttgcgaaggaggttcggaaggccgccgagcgacgcagccgtggccaacagaacactgctccgcgagccgaacgcaacgatttcaatggaggttcagcgccctcccttatcgccccggatggccctaggtcgagtaaccttcgaatggctaagagcttcacccagctggacaaagaccgcttcttgctcgacagcttcgagtacatcgcccgttattttgagaactcgttgctggagctccaagcgcgcaactcagggtatgaaggggtgttccgtcgaatagacgcaaatcgcttttctgcgaatatctacaaggacggccacgacgttgcaaaagcggcagtgttcaccggcggccagatgggcgccggtatctactacagccatggagactcgtttggcggcggctcgtacaacgaggcgctcaccgtaaatacggacgaccaatccatgtacctgaagaccttcggcatggcgttccagactcggcaagaccagaagctttcccaagaaggcggcgccgagacgctttggggccttctcatcgcaccgctacaacgcaatcggtaa

SEQ ID NO: 20514 - DNA, 1437 bp, Enterococcus faecium EnGen0011; identical to SEQ ID NO: 18577

SEQ ID NO: 20515 - DNA, 486 bp, Enterococcus faecium EnGen0011; identical to SEQ ID NO: 18578

SEQ ID NO: 20516 - DNA, 852 bp, Enterococcus faecium EnGen0011; identical to SEQ ID NO: 18579

SEQ ID NO: 20517 - DNA, 1437 bp, Enterococcus faecium EnGen0051; identical to SEQ ID NO: 18577

SEQ ID NO: 20518 - DNA, 486 bp, Enterococcus faecium EnGen0051; identical to SEQ ID NO: 18578

SEQ ID NO: 20519 - DNA, 852 bp, Enterococcus faecium EnGen0051; identical to SEQ ID NO: 18579

SEQ ID NO: 20520 - DNA, 1437 bp, Enterococcus faecium EnGen0050; identical to SEQ ID NO: 18577

SEQ ID NO: 20521 - DNA, 486 bp, Enterococcus faecium EnGen0050; identical to SEQ ID NO: 18578

SEQ ID NO: 20522 - DNA, 852 bp, Enterococcus faecium EnGen0050; identical to SEQ ID NO: 18579

SEQ ID NO: 20523 - DNA, 1437 bp, Enterococcus faecium EnGen0046; identical to SEQ ID NO: 18577

SEQ ID NO: 20524 - DNA, 486 bp, Enterococcus faecium EnGen0046; identical to SEQ ID NO: 18578

SEQ ID NO: 20525 - DNA, 852 bp, Enterococcus faecium EnGen0046; identical to SEQ ID NO: 18579

SEQ ID NO: 20526 - DNA, 1437 bp, Enterococcus faecium EnGen0049; identical to SEQ ID NO: 18577

SEQ ID NO: 20527 - DNA, 486 bp, Enterococcus faecium EnGen0049; identical to SEQ ID NO: 18578

SEQ ID NO: 20528 - DNA, 852 bp, Enterococcus faecium EnGen0049; identical to SEQ ID NO: 18579

SEQ ID NO: 20529 - DNA, 1437 bp, Enterococcus faecium EnGen0045; identical to SEQ ID NO: 18577

SEQ ID NO: 20530 - DNA, 486 bp, Enterococcus faecium EnGen0045; identical to SEQ ID NO: 18578

SEQ ID NO: 20531 - DNA, 852 bp, Enterococcus faecium EnGen0045; identical to SEQ ID NO: 18579

SEQ ID NO: 20532 - DNA, 1791 bp, Afipia broomeae ATCC 49717
atgagcattttatcaagcgatccgattactcagctcgcattctcgatgttcgagagcaagggtgtctatgctttgcttctcggctctggtctctctcgtgcagccgggattccaactggatgggaaatcactttggacctagttcgacgagtcgcgctcgcgcaaggcgtcaagaatcagtccgattgggcgacgtggtatcgcaaaacgtatggtgcggaacccgattattcagcgattctagcaggactggcggcctcgcctgccgaacggcgatccatcttacattcgtacatcgagcctgacgaagacgatcgtgcagagggtaagaaacttccgacagccgcgcaccatgcaatcgcgggcctggttcgcgacgggtatgtccgagtgatactaacgaccaatttcgatcggctattagaaaatgcactgcgagaagttggcgttgagccaactgtcgtcacctccgtcgacagcttgtcaggagccgagccgctcacacatagcccgtgctacgtgctgaagcttcatggtgactacaaggatgcacgcatcctgaataccgacgaagagttaggcgtgtatccgccgcaatacgatgcgctgctcgaccgcattttggatgagcacggtcttatagtttgcggttggtcaggcgagtgggatgacgcgctacgggcagcattgttgcgcgctcctaacaggcgttaccctactttctggagcatacgggggaaagttgggagcggcgcagagcccatcatcagtcagcgtaaggctgtgaccattccggttgccgacgccgatagcttttttctgaagttggccgagctggtgaaaacactcgccgagactcggaagcagagtccgctgacgattgatatcctcgtcggctctatcaagcggtacgttgcgaggccggaatttcgcattcgactcgatgaagtcatcacacaggaagttaacaagcttttcgaccgcctcgacgcgaaggagctctctccgcagggtgtgtggtccgttgaggaattccgccgacgccttaaactctatgaggccactaccgagccgctcgcgaaagcctttggtgttctcggacgatggggggatgacgccgagcttgcactcattgccgatacgatccgcggcgtcgttgccagggcgaacaaggtgggcagcggcctgaatatatggcttgatctaaggacgtatccggccgttctgctcatgactgcatatgggctcggacttgcgagagcagagcgttggaagaccttgcatgacctgttttctctctcgatgcctagggacgagcgggacccaaaacgtctcgtgaattcgctcttcctgtgggactggagggggtcagacgacaatctctggaataacgttgaaggtttcacgacaggcaacaaccgccgaaaaacaccactcagcgaccatctattcgacgtatccttcgagtggggcacggcgtttttgggcgtccccacagacaatgctctgctgttcgatcgttttgaggcgctgggggcgttggtccaccttgaagagaacagtgaaagggcactgaaggatcaactggagaacggcgacaggaaggctaggatgtctgtcggtcgcatcggctggcgaagcgaggggcgacgctcaatagaacacgagctgaaatcaactcctaccaggcaacaactgcttaaagcagggttcgcattgggcagtgaagcatacctcgatctattcttggaaaacctatcacgggtagcacgatggatggagtggcgctga

SEQ ID NO: 20533 - DNA, 1113 bp, Afipia broomeae ATCC 49717
gtgaaacgggtgctgactgtcgggctgacttacaccggcgacaagatcgatggcgtggagatcgaaaatctcgggctctgccagcccgatgtcgatcgagagcgggcggcctatccgctctacgaatacgacacgatcatcatcaatccggagagctacacgcattttctgttcggtaaggccggagagttttcgaacgaactttacgagctgggcaagctgaaggggcagaatgaccgctacgacctcgactccgccttcgatggcgaggaccgacgcaaggagatggaggccgcgattgcgggtggcgcgacggtcgtttggtgcctgtccgagccgaagcgggtgaacttcttcggctatcgcgaaacccatcttggatatgtggcgccgaaagtggcgagtttcgtaaagcgttcggagcttctcattaagaaggggcgcaggatggggccggtcgatctcgacagccccttcgcgcgctatttcgaggttctgtcgcggaccggcggctggacgctgtgcctatccgatcccggcgaaggctatgggtcgatcgccgcgacgccggagggctacagcctcggcggtcagctgatgctcggcaccccgacgggctggctgctgacgccgccgacgtcgcaggaagcccagaaccagctcgttcgcgacagcctcgcgttggagaaggccgatccggcgcatgagaagtatcacggcatcttcctgagccatactggcgtcgacaaacccttcgtgcgccagcttcgcaaggatctgctcgctcatggcgtagagcatgtgtggctggacgaggccgaaatcgacatcggggactcgctgatcgccaagatcgaagaggggatgaagctcagccgctacatcgccgtcgtcctgtcgaaaaagtcgatcggcgctccttgggtgaagaaggagctcgacgtggcgatgaaccgcgagatcgcgagcggcgaggtggtcgtgctgccgctgctctacgaggaatgtgagctgccagagttcttgaaaggcaagctctacgccgatttctccaagcccgaggagtacgaggcggtcctcggcaagcttttgcggcggctccggatctcctga

SEQ ID NO: 20534 - DNA, 1437 bp, Escherichia coli KTE16; identical to SEQ ID NO: 18665

SEQ ID NO: 20535 - DNA, 612 bp, Escherichia coli KTE16; identical to SEQ ID NO: 18666

SEQ ID NO: 20536 - DNA, 1437 bp, Escherichia coli KTE224; identical to SEQ ID NO: 18665

SEQ ID NO: 20537 - DNA, 612 bp, Escherichia coli KTE224; identical to SEQ ID NO: 18666

SEQ ID NO: 20538 - DNA, 1437 bp, Escherichia coli KTE169; identical to SEQ ID NO: 18665

SEQ ID NO: 20539 - DNA, 612 bp, Escherichia coli KTE169; identical to SEQ ID NO: 18666

SEQ ID NO: 20540 - DNA, 381 bp, Escherichia coli KTE42
atgcggccattccctcaacactcatcaaacgataaagccctgagcgagctatgggacgaatatcggcagcgtatgattggtctttctggaatcgctatattcctttttgggaataaactccatgatggtcgaatcgttaatgctgatggggtccgaagggagtttcaaattgctcaggaaacaggggttgtcgtgcttccacttggcgtcactggttatatggccaaggaactagctgacgagatgctgacggatccaagtaaacattttgtccggtacccttggttggaaaaggaagttgctcagcttgcagatctctctgctaatcgggcaaatatcgaaatgaaagttttagaaattttaaagaaactaggaggttag

SEQ ID NO: 20541 - DNA, 468 bp, Escherichia coli KTE42; identical to SEQ ID NO: 18646

SEQ ID NO: 20542 - DNA, 1437 bp, Escherichia coli KTE194; identical to SEQ ID NO: 18665

SEQ ID NO: 20543 - DNA, 612 bp, Escherichia coli KTE194; identical to SEQ ID NO: 18666

SEQ ID NO: 20544 - DNA, 1437 bp, Escherichia coli KTE43; identical to SEQ ID NO: 18665

SEQ ID NO: 20545 - DNA, 612 bp, Escherichia coli KTE43; identical to SEQ ID NO: 18666

SEQ ID NO: 20546 - DNA, 990 bp, Acinetobacter lwoffii NIPH 715
gtggtttatgtcgcacttcaagttttactctgccctgttttaacaaaaaatgattatgaagattaccatgatagtagagagttattttcaacagtattaagaggtgacctactttcaaaagtttttttattcataggatttagttttgatgaccctaacatagactatattttaagtagaattaggattctcttaaaagataacactcctaaacactattgtttttttaaagagattgataaaaatagtttttcagatgatcaagactacttatatgcaaaaataagacaggatttaaaaattgaagatctcatgagatacggtattcatgctgtcctagtagaagattatccagttattactaaaatacttaaagtaattgaaaatcgtgtgaaacgaaaaaatatttttatttcgggtgcggctgaaaattatgaaccttttggaaaagaaaaggctgaaaaattaatttttaaattgagttataaattagcagaaaaaaattacaaaattatctcaggttatggcttgggtataggaagcttagtgattaacggagctttagactttaaattaaattcagcgtatagaaacctggatgatttacttattttaagaccatttcctcaaatcaatccaactgccgagaaaaatacgaaatatagagaagaaatgatatcccaagctgggatagctctcttcttttttggaaacaaaaaaaacgatgtatccgatacaattgtagattcaaaaggcatgattgaagaatttgatttgtgtgtcaaaaataatgtaattccaataccaattggtataactggttttgtttctaaaaaattatgggaaaaagttaataaggattttagtcaatattatccagaaaattctgattttattgacactttgaaagaaataaataatgccgatgtttctagcgatgatttaatttcaaatattttaaaagcaattagcttacttcaaaaggtttaa

SEQ ID NO: 20547 - DNA, 483 bp, Acinetobacter lwoffii NIPH 715
atgaaaagacaggtcttttatagttttcattatgataatgatgcaatgagagttcaacaagttcgaaatattggagctttagagggtaatacgcccgtttctgctaatgactgggaaaccctaaaacgcaatggtgataccgcaataaaaaattggattgataatcaacttaaatacaaaaactgtttaatcgttctgattggttcacagacagcaaatagaccatgggtaaaatatgaaatacaacgtgcttgggagttaggtaaagccgttttaggtatacatatacataatattaaatgtccaagaaatggaatatcagttaaagggaaaaatccattttctgaatttacacttaataataataattttgctgattacgtggattgttatgatcctaatccttcagatgcttataataacattagattaaatattgaaagttggattgaaagagcaattcaaagaagaaagaccgcctaa

SEQ ID NO: 20548 - DNA, 540 bp, Acinetobacter lwoffii NIPH 715
atgttcacaaaaaatagatttaaaacagtagctcgtaatcaatcaggtatgctggattcagtattcttaaatgaaagcagaaagtttagtaaagctagctctactacaagtatttttctatcacattcccataaggacaaagagtttgtacaaatagcaaaagtattctttgaaaatttaggaatgagcatatatgtggattgggcagatgaaacaatgcctgagcagacaaatggaatcacagcgacaaggatcaagcatcagattatttctttaaatgataaatttattttgttagcaacaaacgaagcattggcatcaagatggtgtaattgggaaataggtatagccgacccgttcaaattaccaaaagataaaattgccctattaccattaactgagagtccatcttcttggaacgggaatgaatatcttcaaatctatccttatatcagagaaagtttatattcttctggtgagtattatatctggtatccaaatggtgagtgtcaaaatttaaaaacatggttaataggttaa

SEQ ID NO: 20549 - DNA, 1431 bp, Acinetobacter sp. NIPH 1867
atgaaatttagcaacgatcaacatcatatgattgagcgtctagtaacggaactagatgaaggaaatttagcaatttttgcaggtgcgggattatctattgctgctggatatgtagattggaaaaatttacttaagcctctgatgcttgaaatagggatagatgtaaataaagaaagtgatttagtgactcttgcacaatattattttaatgaaaatggtagaagcagactaacagatcatattttagataacatttcaggattaagagagccaactaggaatcaccaaattttggcaagtcttccaattagcacatattggacaacaaattatgataatttaatagaaaaatctttagaaaatgaaaataaacttgctgatgtaaaacatagagtgcctcacttagctcaaacaaaaaaaagaagatcagctattgtgtataaaatgcatggtgatatttctgcatcagacgaagcgattatcacaaaagatgaatatgaattatatccatttaaatatgctccatttgtaacagcattgtctggggatttaatatctaaaacttttttattcctaggttttagcttttctgatcccaatttagattatattttgagtagaatacgtatacatttttctgaaaatcaaagacagcactattgtttagttaaagagattgaaaagaatggaattagtgatgaagaatatgattatcaaaaattaaaacttaatttaatgattaaagatttaaaaaggttccatattaaagcagttcttattaaagactggaaagatattacagaaattttagaagaaataaaaactagatataagaaaaaatctgtttttttatcagggagtgcatgcgtatttaatatatggaagcaagaagaaacagaaaaatttttgagtaaattaggtgaaatgttaatacataaaaactataaaattgtttcaggtctaggacttggaataggaaatgccttcgttagtggggggattaaagaggtttattcatcaaagtacggaaaaattgatgatttaatgatcatgaagccttttcctcatcatgtggaggataaaaaaatgcgtgatgatatttggcataaatataggttagaccttttatctaagtcaggtatagctatattttttatgggaaataaaaatgaaagtgggagtgtggtaccggctattggtatgcgtaaagagtttgcaattgctaaagaaatgaaacttaaaattgtacctattggctgtagtgggcatgtggctaaggaaatattcgatgaaatcgtaaataattttgacgaatattatccagatgctagttcacaatttttagaaaaatttaaagagctagatattcatgttgattcacctgaacaacttttatcaaaaattttagatgtaattaatttttttaactag

SEQ ID NO: 20550 - DNA, 438 bp, Acinetobacter sp. NIPH 1867
atggcacgtaaggttttctttagttttaaatatgatgatgttgcaagagctatgattgttcgtaatagttcggtaactaaaaattttgctggatttattgataaagcagagtttgaagaagttgaacgaaaaggtaatgcagctatcaaaaaatggattgatgaacagttagagggtacaacagttacagtagttttagttggtgaaaatacaaataaaagtaagtgggtccaatacgaaattgatcaaagtataaaaaggggtaatggattaattgaaataaacataagccaaataaatgctttagggaaaggaacatctgatttttgtggatggatccttccaaataagtataaaggttatcgatggataatagatgatggttataataatctcccaacttggatagaagctgcagcaatagctgtagggaaatag

SEQ ID NO: 20551 - DNA, 810 bp, Acinetobacter sp. NIPH 1867
atggagaaaaataataatattttgtatgatcttgaaaaatatttacttataaaagataatgttttctgtgctacagagattcaaaagcatttatttcctgaaacttcagctgaaatatttttatcgcatgcacatgttgatgaagataaagttattgcattagctgttcatttagaagatttaggttttaatgtttttgtagactcttgtgtttggggaaatgctttcactttattaagaaaaatagataaaaaatattgtaaatatatagactcagatacaggtaaagaatttcattcttataaaaatagaaacttttcaactgctaatatctatatgatattaaatgctgctttacacaagatgatcgatagatttgagttgtttatatttcttggaacagaaaactctatgacaattgaagaatcaatagaaaaacaacaaaaaataatatctccatggattttttcagagttaacttttgttaatcaagttcgtcgatatgataaacggtatgatatgaggagtaagcaaattacagagtctgcatctgtatctcttgaaaataatatggctatggatagagagtttagttttcattattccaagccttgtttggattttactctttcaaatcagcagtttgaaaattggttattggatgaaatttcatttgatattgtatctgagaacagagactttgatcattgtgaaagacatatccaatctttagaaagattatatgaaataatgcgaaagtatggtgaatctagagaggatcgactgtatcagcagagattatttttataa

SEQ ID NO: 20552 - DNA, 1548 bp, Acinetobacter sp. CIP 102136
atgtatttaaatgagttttttcaacaaataaaaaatcatccaattttatttcttggaactggatttagcctgagatatttaaaaaaatcttatacatgggaaggattattacagcgagttgcagatgatctcttttatgatgaagacaacactagttggcaacgtgaatacttaagattaaagagtcgttgtttcattaatgacaatatttcttttgaactcgtagcccaagagctagaaaaaatttttaatgctactgttattgataatgataaaaaaattttcaatggggttagagaacaatacttcaacagtattgataagaataaaaaatttagtgcatttaaggcttatattgctgaactattgtccaatcatgaaattagagaggacaaaacatctgaaattgaagaactaattaaagctcgtaagaatctgtctgctgttataacgactaattatgatttattgacagagaaaacttttgaattttttacaccattgataggaaataatattcttttaagtaatccctatggttcaatttataaaattcatggttgtgtgactgatagccgaaatatcatcattactgcagaagactatgaaaaatttgacaaaaaatatgagttgataaaggctcagatgctttctttattcatgcataacccagtgatctttattggttatagtattactgatgaaaatattagaagtatcttgaagacgatattttcgtatgtagatacgaattctgagatggctcaaaaaattagaaataattttctgttagtcgaatatgagccagatagtcagtcaatagaagttgcagcacatgatattgatattaaggatattggcattattcggattaataaaataaagactgataatttttcagaacttttcaggaatatttcaaatttagtactccctatctccgcaatggatattagaaaagtccaaaatatttatcatgatattgttaaaggatctgagggtgtcaaagtaacaatcactgttgatcctagtaagttacataataatcaaactgttctagctattggtactgagaaaaatcttcaagttcaattccgaaacttcaatgaaatcatatcagattattttaatattattgctgaatcgaatgaatctttggctaatttgatcaataagcaggaaaatttacaacagagaattatcccaatttttgggttatcaaatgtctcaaataaaattaataatttggaacaattgaaagagatacagattgatagacttaagaaaatttatagttctatccctcaaacagctaagattattagaagttttgatgaaattgaagaatgtgatgcgaaggtttctaacaaatataatcaaatctattggaatatttttaatgaaaaaatttctatagatgaaatagcagtccatcttaaaactggaaaatgcttaggtaaaaatagtgatgatagcctatttaagaatttacttagcctgtatgactacttaaaatatggtggaacgattgatagtttaatatcttag

SEQ ID NO: 20553 - DNA, 2337 bp, Acinetobacter sp. CIP 102136
atggaacattctactaaaatttttattagttattgtcatgcaaatgacattcacttcaatgcattaatgtcccatttaggcgctattgctaaattcaataatatagaaatctttacagatcaacaagttgacataggtcaggatttagatggaactatccaagaacatcttcaatctgcagatatagtcgtgtgtttagttagtacagaatatttaaactcagattactgtattagaaaagagttagaagttgcaattgaaaagcaagtaattgataactctaaaatttttccaattattgctgaggattgcctttggaaaagaacatattttggaaaaataaaatgtgctcctgaagatggtggtcctgtatcaaagtatgagaatataagttctgtctatttaacagtagtagatcaattgatgagtcaaattgagagaaatagaactgtagatattgaaaaaaaaaaagatcatctagcatcagctctgatctttgaccaatctgaaaaatttcataattacattcatgacctaggaataagtataaaacatcctcataaagatcatgtgatcctggatgatgtttttatttatcctgatttggaacatataaatagtaatgatgtaattaactacaaacaaatttcttcagaaagtattctcgaaaaatataattattgttattttatcggatcagataaatctggaaaaactgccttattaaaaaaatattctcacgatttatttaaaaagggttatcaagtcgtcactttaaagtcaacagatattaaacattatagtgcagagcaacttcttaaaatttgttcaaataaatataatattgaatatgataagaatctagaaaattttgttttattaattgacgacttccataatttacaaattagtgaaaaatatgaaaatgattttttaaagtctataactagtttttttaagaaaatttatttttttgtagataaacaatatttttttggagatagatcaaaacatttaaatgtaaattttgaaatttttgaaataaaaaatctaggtcacgttaaaagaaatgagctatatagtaagtggtatgggattggaattgaaactccttatgtacaaaatgatgcagattttttaaggaaaattgatactgttactaatcattttgatctgttacttagaaagaatgtaatggacgctaagccaatgtatattcttactattattcagaccttagataatttaaatgtttctagagacttctctctaacttcttatggacattgttataacacactaattttaagtctattacataagtcaaatgtaaatcatcatgactttgatagtattttaaattttttatcccatctttcatacaacatgtttgaaaatagagccaaaagtatatccaatgaaagattagataatttaattaaagactatcataaagattatgttattaatttagatatcaaaaaaacactaattgaatcaaatattttatatttagatgaaaatttagattatattttttcacaaaaatatatatattacttttcttgctcaaaatatatagctaccaaccaaaatactcttactagtttaattaaagaactatgcgacactattcatacagaagaaagtgctaatattctaatatttttggttcatcactcaaattctactgattttattgacaatattttagattacagttcaaatctattaataaatagcacacctcattacttaacccttgatcaaaatcaagatttaaatttaaaatttaaacaaattttaaatcaggaaattaaacaaattcgtttagaaaataaaaatatatatgatgaaagaagtaaacaactcactttaaaagataacagaccagaatcagaagacgttttagaatccgctattaattcccttgataacaaagaaaataatagtgaaattaaagatagccttgatcaaaatattgaactcaatgaaattaatgaagctcatactatttttagatgtcttgaagtactagggcagatagcgaagaacaaatatggatctttcaaccgcagtagactagagaatttactagattctagttatagcttaggtctcaagtctctatcctttttcttagatgtattgatgaaatccgataatgacttaaaggagttcatgatttctataattcaagaaaaggaaaaatcttcaaatgaagaagcagtagctatggctgaaaaaatgatttttgaaatgtgtaaatctgtttgtcgctatttaattaattttatctctaaagctacagcatcacctcagcttgaagaaatgtaa

SEQ ID NO: 20554 - DNA, 774 bp, Acinetobacter sp. CIP 101966
atgagttttaccaaaccacaagaaaaatttataaatgaatatgttaaagctattcaagatggtaatgcggcaatttttgctggagctggtctatcagcatctttaggatttgttaattggaaagaacttttgagggatctagctgatgatctgaatcttgatattgataaagaaactgacctagtctcaatagctcaatatcattccaataaatttaacagaactcgtattaacgagaaaattattaatgaatttacaactttagaaaaaggtagtgaaaatcatcagattttaagtagattagatatagatacctattggacaacaaattatgatcaacttattgaaaaaactttagaaaataatggaaagaaagttgataaaaaagttactaatgaagatttttcgagatatataaagaaaaaagatgctacagtttataaaatgcatggtgataaagatgcaccacacaatgctgttttaacaaaaaatgattatgaagattaccatgatagtagagagttattttcaacagtattaagaggtgacctactttcaaaagtttttttattcataggatttagttttgatgaccctaacatagactatattttaagtagaattaggattctcttaaaagataacactcctaaacactattgtttttttaaagagattgataaaaatagtttttcagatgatcaagactacttatatgcaaaaataagacaggatttaaaaattgaagatctcatgagatacggggcagagtaa

SEQ ID NO: 20555 - DNA, 483 bp, Acinetobacter sp. CIP 101966; identical to SEQ ID NO: 20547

SEQ ID NO: 20556 - DNA, 540 bp, Acinetobacter sp. CIP 101966; identical to SEQ ID NO: 20548

SEQ ID NO: 20557 - DNA, 1488 bp, Clostridium colicanis 209318
atgaaatttaaaagagaagtttatgcttttattgaagattatatagagcaattaaagcaaggaagtgcagcaatctttgcaggagcaggcttatctgctggtgttggttttgtagattggaaggggctattagaaaagcctgccagaagaataggattagatgtacaaaaagaagatgatttagtaactttagcacaatacatctttaatgaagatggttcaaggcaaccattaacagaggtgattagaaataattttatttcaagtaataagataaatgaaaatcataaaatattaagtttattacctataaaaacatattggacaactaattatgactctttaatagaagattccttaattaaatatggtaagaatccagatgttaagaagacattagcagacttatcaacaataattagtatgagagatgctgttatctataaaatgcatggtgatattaatgatgctaataatgctgtacttattaaagatgactatgaggtttatgaaactaaaaatcacttgtttacattgaacttgaaagcggatctaatatcaaaaacatttttatttataggatttagttttgaagatcctaatttagagtatatcttaagcaaagtaagaattttattagagggaaatgggagaaaacattattgttttctaaagaaggtaaatattaaggattttgaaaaatgccaaaatccagatgaagagtttaaatatgccgaattaaaacaaaggttaaagtgtgcagatttgaaaaggtattgtattcacccagtattggttgatgaatatgaggatataacagaaattttaagatatatagataggatgtatagaagaaataatgtattaatatcaggaagtgctgacgaatttgaaaatttcaatataaaattgaaaggtaaagatgaaatgatacaacctttagattttattcatgatttatgtagagaaattagtaaaagcggatttaaaatagtaactggatatggaaaaggaataggaagtgctgtaataaatggtgttctagaaaatgtatatcaaactaatacaagaaacttagatgatcatatgataatcagaccatttcctttatatgcaacaaagaatattactgatgaagaatttaatttagttagggaatcgtatagaaaaagtctagtagagcaggctggaattactatatttgtattaggtaataagattgttaatggtgaagttgttgtagcagatggagtgttaaaggaatttgaagaatcattattaattggaagtaaggttataccaataggattaactggatatgcaagtaaggaactatgggaaaaggttaatactaactttgagaaatattatagtgaacatagaaatttaaaagcgtattttgaagtattaggagatgaaaattctaataatgaagatattataaattcagtttgtagtattataaaagatttaagagaggtgttttaa

SEQ ID NO: 20558 - DNA, 483 bp, Clostridium colicanis 209318
atgaggaaagtattttttagctttcattttggaagagatgcatggagagcaggacaagtaagaaatagtggaagatttacaggtgatgattcagggtttattgataaggcagaatgggaaaaagtaaaactaaaaggaaaagcacatatctgtaattggattgatgagcaaatgaaaggaacaagtgttacagttgtacttattggagcagagacatcgactagagagtatgtagagtatgaaataaagaagagctttgcaaaaggaaatggtgttataggtatatatatacataatgtcaagaatcaatatggacaaactgactacaaggggaaaaatccttttgaaaatatttattatgaataccaaggtagaagagtatatctatcagaaatatataaaacctatgattgggtttgtgataatggaagagaaaatatgtcaaaatggatagaagaagcagcacaaagagcaagtagatag

SEQ ID NO: 20559 - DNA, 582 bp, Clostridium colicanis 209318
atgttttttaatatacaggatttagagaagagagcgaatagtaaaagccttacagaaagttttgcaagttatgagttaagtagtttaaataaatcttttgatgcctcaaaaacatatgatatatttttatctcatagttatctagatgccaagcatattaaattgattagagatgatttaattagtttaggttattcggtatatgtagattggatagaggataagtctttagacagaacacaagttacatcagaaacagcagagcagttaagaataagaatgaaacagagcaagtgtctattttatgcaacaacagaaaattatcaaaagtctaattggatgccatgggagttagggtattttgatgccttaaaagataaagttgcaatattaccagtaaaaagtaggccggatagttcagagcagtataatggaacggagtatttaggattgtatagttacattactctaacagaggatacaaaacaaaatgaatgtttatgggtaaataataataaagatgaatatgttaaatttgatgagtggttagagggtaaaaaaccttttattagaaataattaa

SEQ ID NO: 20560 - DNA, 1446 bp, Clostridium colicanis 209318
atgaaaatgcaaattaaaagctttataaaaaaattttcaaaagaaattagagaacaaaacgcagctatatttgctggagcaggtttttcaatggaagcaggttatgtaaattggagtaaattactagaacctttagcagaggaaataggaattgatatttctaaagagtcagatttagtatctttagcacaatattataaaaatgaaaaaagcaatagaactgaaatcagtaaaagaattattgaggaattttcaaaagaagcagaaccagatgaaaatcatttaattttatcaagactaccaataaggacttattggacaacaaattatgattctttgattgaagatgcgttgaaaatatcgggaaaaatagtagatgtaaaatatactgtagagcaactaacaaatactaaacctaatagagatgcagttatatataaaatgcatggagataaggagcattcatcaaaagctattattattaaagaagactatgaactgtataatacaaaatatgcaccatttattacggcattaagtggagatttaatttcaaagacatttttatttattggatttagttttactgatcctaatcttgattatattttaagtagggtaagggtaaattatggagaaaatcagaaaactcattattcttttgtaaagaaaataaaaagagaagaatgtgattcagatgctgacttcgaatatttagatcgtaaacaacaattatttataaatgatctaaaaagatataatattgaggctttaataatagatgagtattcacaaataacgaatattttgaaaatgatagaaaaaagtataaatgaagatagtatttttatttcgggtagtgctcatagttataatccatgggatgaaaaagaagcgcaaaaatttataaacaatttaagtaaaaggttaatagcagataataaaaaagtaatatccggttttggactaggtgtaggaagttttattataacaggagctttagaacagatgtatatgaagcaagaaaaaattaataataatcaattgattttacgaccatttccacaaaaagccttacctaatcagaaaattgaagaattgtgggacaaatatagaaatgatatgatttcattagctggaatatcaatatttatttttggaaataagatcaataaagaaggaaatataattgatgctaatggtgtatatttagaatttgaaatagctaaagctaaagacaatataattattccagtaggttcaactggaaatgttgcaaaaaagatttggaaagaagttaaagataaatttgatgaattttatcctaaagctaatagtaaattaaaagaactttttgaagatcttaataatgaaaaagatagtgaaaaattaattgatgttattataaattttgttaatgaaagtaaaaagcttaatttaaattaa

SEQ ID NO: 20561 - DNA, 684 bp, Clostridium colicanis 209318
atgggacataaaatttttgtatcatataaatatgcagatgatagcgtatataatttaaaatataattcaaattctacagtacgagattatgtagatgaatttgaagctaaattagatgaaactgatgatatatataaaggagaatcagatggagaagatttgtcacaattaagtgaagatgtaatttgggaaaagttaaaagatagaatatatgatagttcattaactatagtatttatttcaccaaatatgaaggtttcaggggagacagataaaagacaatggattccatgggaaatatcttattcattaaaagaagttagcagaagaaataaaaagggtgattccataactagtaaaacaaatgcaatgattgcagttgttttacctaatattaataattcatattcatattatttagaagaaaaaagttgttgtacgtcaaaatgtataatgcatcatactaataaactttttgatattcttagaaagaataaatttaattataaaaatcctaatataaatgaatgcgataataaagatacaatatggcatggaaagtgtagttatataaaagcagttaaatggtgtgattttatacaaaatatagataaatatgtagatgaggcatatgagagacaaaaagacattttgaactacaatatatataaagaggtagagtaa

SEQ ID NO: 20562 - DNA, 1185 bp, Clostridium colicanis 209318
atgtcaggatatacaaagcatatgtacgaaatggatatacatcaaataaaagttgaatttagtaaatatataaaaactttgctaagtatattgcctaaagattatgatataaatacaataatatctttattaattgaatactatccttatgaatggcaaattttaaatgaaaagtatgaatattattgtaaaaaggacaagaaattaaaatctgttggacaaaaaattagatattcaatgagagaacctataaaaatcattcaaaatttaaaaataactacaaaaataatgtctgaatcatatagaaatagttataagttacaatatgatgaatatattcaattaaaaaatatagaaatctttcaaaataagagattacctaaaataaaacatattaaggataaaatagataaagcaaaattaaagacacaacaagtggaacctttttatttagatgctttaataggattatatgataaaaagaagacatcacaaaaagatagagtttatattatgttagaattgaagaaatattattgccctaaagttatttctttttttaagaagaaggcaaactcagaatataacatacaattacgagaaatggctttttatcacttacaagaatttaaacattatgtaattttaagaaagcaaaaatatatgagaattccaagcaaaaataaaagaagaagaaaatatttgaaggaagtatatgctaaacaaaagtataacattaaaaaaataccagaagagcttgaatatagaattaaaaattcaaaagaacaaaaattgaaagaatatgatttttttatttcacatagcagtttagatcataaagcaatacaaattttaataaaagaattaaataaaaatagcaaaaatatatattgtgattggattaatgatacagattatcttaaaagaaatttggttggagatgcaacaaaggctattattgaaaaaagattagagcaatcaaaaaatttgttatttgttagatcggaaaattcagagcaatctaattgggtaaaatatgaattaaattattttaattcattgaataaaagaatatacgtaattgataaagcaaatattttgaatggaaattttagttattatctaattcatgaaaaatggtttttagatgaaaactataaaaatatttgtttatttaaaatttaa

SEQ ID NO: 20563 - DNA, 1437 bp, Enterococcus faecium EnGen0265; identical to SEQ ID NO: 18577

SEQ ID NO: 20564 - DNA, 486 bp, Enterococcus faecium EnGen0265; identical to SEQ ID NO: 18578

SEQ ID NO: 20565 - DNA, 852 bp, Enterococcus faecium EnGen0265; identical to SEQ ID NO: 18579

SEQ ID NO: 20566 - DNA, 1437 bp, Enterococcus faecium EnGen0320; identical to SEQ ID NO: 18577

SEQ ID NO: 20567 - DNA, 486 bp, Enterococcus faecium EnGen0320; identical to SEQ ID NO: 18578

SEQ ID NO: 20568 - DNA, 852 bp, Enterococcus faecium EnGen0320; identical to SEQ ID NO: 18579

SEQ ID NO: 20569 - DNA, 1437 bp, Enterococcus faecium EnGen0322; identical to SEQ ID NO: 18577

SEQ ID NO: 20570 - DNA, 486 bp, Enterococcus faecium EnGen0322; identical to SEQ ID NO: 18578

SEQ ID NO: 20571 - DNA, 852 bp, Enterococcus faecium EnGen0322; identical to SEQ ID NO: 18579

SEQ ID NO: 20572 - DNA, 1437 bp, Enterococcus faecium EnGen0168; identical to SEQ ID NO: 18577

SEQ ID NO: 20573 - DNA, 486 bp, Enterococcus faecium EnGen0168; identical to SEQ ID NO: 18578

SEQ ID NO: 20574 - DNA, 852 bp, Enterococcus faecium EnGen0168; identical to SEQ ID NO: 18579

SEQ ID NO: 20575 - DNA, 1437 bp, Enterococcus faecium EnGen0169; identical to SEQ ID NO: 18577

SEQ ID NO: 20576 - DNA, 486 bp, Enterococcus faecium EnGen0169; identical to SEQ ID NO: 18578

SEQ ID NO: 20577 - DNA, 852 bp, Enterococcus faecium EnGen0169; identical to SEQ ID NO: 18579

SEQ ID NO: 20578 - DNA, 1437 bp, Enterococcus faecium EnGen0177; identical to SEQ ID NO: 18577

SEQ ID NO: 20579 - DNA, 486 bp, Enterococcus faecium EnGen0177; identical to SEQ ID NO: 18578

SEQ ID NO: 20580 - DNA, 852 bp, Enterococcus faecium EnGen0177; identical to SEQ ID NO: 18579

SEQ ID NO: 20581 - DNA, 1437 bp, Enterococcus faecium EnGen0179; identical to SEQ ID NO: 18577

SEQ ID NO: 20582 - DNA, 486 bp, Enterococcus faecium EnGen0179; identical to SEQ ID NO: 18578

SEQ ID NO: 20583 - DNA, 852 bp, Enterococcus faecium EnGen0179; identical to SEQ ID NO: 18579

SEQ ID NO: 20584 - DNA, 1437 bp, Enterococcus faecium EnGen0180; identical to SEQ ID NO: 18577

SEQ ID NO: 20585 - DNA, 486 bp, Enterococcus faecium EnGen0180; identical to SEQ ID NO: 18578

SEQ ID NO: 20586 - DNA, 852 bp, Enterococcus faecium EnGen0180; identical to SEQ ID NO: 18579

SEQ ID NO: 20587 - DNA, 1437 bp, Enterococcus faecium EnGen0255; identical to SEQ ID NO: 18577

SEQ ID NO: 20588 - DNA, 486 bp, Enterococcus faecium EnGen0255; identical to SEQ ID NO: 18578

SEQ ID NO: 20589 - DNA, 852 bp, Enterococcus faecium EnGen0255; identical to SEQ ID NO: 18579

SEQ ID NO: 20590 - DNA, 1476 bp, Bacillus cereus VD140
atgttcattattttgaagaaagaagttgataggatgtctcgagaagtagatgaatttttaagaacttatacaaaagcaattgaagaatcgacagctgcggtctttgctggtgcggggctttcaaaaccagcagggttcgtaaattggaaagagttattaagagatattgcggatgaaataggtctcgatgtggataaagaaacggatttaattggagtagcccagtatcatgttaacgaaaatggtggcaatagaggaagaataaatcaggttttaatagaagaatttacaaaagatacttatgtgacagagaatcataaaatactagctaaattgcctattcgaacattctggacaacaaactatgatcaattgatagaagattcattaaagagtgaacataagaggagcgatgctaaaattactccggaaaattttgctacaacaatgccgaattgtgatgctgttatatataaaatgcatggtgatattacacaagcgcatcaggcggttctaactaaggatgattatgaaaattataacttaacaaggcaaatattcacaactgctcttcagggagatttggtttcaaaaacctttttgtttattggattcagctttgatgatcctaatcttgaatatattttaagtagaattagaattttactagggaataatcaacgcccacattattgttttatgaaaaaagttcaaagaagtgaatatgaaaaagagtctgattttttgtacgcagaaattagacaggagcttaagattaaggatttaaaacgttttaacataaaagtactattagtagaaaaatatagtgaaattaatgatgtactgagagtgttggaagttaagtcgaaacagaagaatatttttatttctggaagtgcttctaattatggggcttggggagaaaagcgttccttcgaatttgctagttctttaagtaaacaacttattcgaaatggtaataatattgttactggttttggattaggagtaggtagttgtgtattatcaggtgctttagaagaaatatacaaagtaagaactaaaagagtagaagaaagattgatatcaaagccgtttcctcaagcggctgctgctgaggttgatttaagaaaattatggactatccatcgtaataatattatagataatattggtatttcgatatttatgtttggtaataagataaacgaatccaatggtgaagttcttgatgctgagggggttatagaggaatttaacataagtgttgataagggttcaatgccaattcctattggagttactgggtttacttcaaaaaagctgtgggaaacagtaatgggcgattttaataaatacatccctgaccagaaattagaaaaatattatcgtgttatcggggatgacgaatgtaaagatgaagaggttatccgaaatgtaattcacataataaatcatttgaaaagaagtaaataa

SEQ ID NO: 20591 - DNA, 609 bp, Bacillus cereus VD140
atggcgcgtaagacgtttatttcgtataaatatagtgaggctcgagacttaagagatgatattcttgatgcattaggagaggacgcacagtactataaaggggaaacaagtgactctccagatttaactgatacaacaacagaaaatattaagaagaatctacgtgatatgatatatgaaacttctgtatcgattgtaattatttctcctagtatgattgatagtgaatggattgattgggagattgaatattcattgaaagaaattacgcgagcagatagaaaatctaggactaatggtattgttggtgtgattatgaagcacaatggtggttatggatggattgaaactaatcaaaagaatacggatggttgtacttcaagggtcattagtaatagcaaactctacagtattatatcaaataacagatttaatttaaaaactccagagtatacatgtggaaaatgtaaaactgttaattcgttaacaggatcgtatatatccataataaatgaagacgattttttagcaaatccaagtgagtatattgaaaatgcatttgagaaaagtcagggaattgacaagtttaatatcacgaaatctcgataa

SEQ ID NO: 20592 - DNA, 1422 bp, Enterococcus columbae DSM 7374 = ATCC 51263
gtgctcattattaaaggtgaagtatcaaaaaaagatttgattagagaaattgaaaaagctattaaaagtgatgaattaggagcatttattggagcaggactatcaattcctgccggattttgtagttggaaagaacttctaaaagaacctgcagaagaaattggactagatgttgaaaaagaaaatgatttggttaacttggctcagtattattctaattcaaaaaaaagaacatcgatagatgacttgatcaaaggtcaattttctcaattagtaaaacctactgaaaaccataaattattatcacagttaccgatttacactttttggacaactaattatgataagttaattgaaaaagctttagaagataatatgaaaaagccttatataaaaacaaaggatgaacaattaagaggtacaaatcatgattttgatgcaatagtatataaattgcatggcgatgtagaatctcctgaagacgcagtactaacaagaagtgattatgaagaatttggatataacaaaagaaaattattcagagaagttttagaaggagatttgcttaccaagacatttctatttttaggatttagttttgaagatccaaactttaactatgtaattggaagattaagggtattgctcgatgaaaagaatacgagaaagcattattgtattatgaaaagagtccaaaatactgatgaggattatgaatacaaaaaagcaaaacaggagctacaaattgaagatttaaatagatatggtatttttacatatttagtaaatagatatgatgaaattaccgaattattaagcactcttgtcgatagatttagaaggaaaacaatatttatttcaggcagtgcatacaattatccgggttattctcatgaaaccgctcaaaattttattcataaattatcttttgaactatcgaagaatggttatcgcattgttaatggatatggaaaaggtgtaggagaatttatattaaatggtgttgcagatttttgtttgaatcacaaagcaaaaataaatgattttttgacgtttatgccttttcctcaaaatagttcattagggattgatttagatcagctgtataaagaaaatagagagcagatgattgaaaattgtggtatagctatatttctttttggtaataaggaagcagaagacattgcaagtggggttatggacgaatatgagttatctaaagagcatggattagtatgtttgcctattgaacgtactggtggggcagctaaagaaatatatgacaaaataactcaagaaattttagataaaaatacaataagtgcaattgaccaggcaaataaacaatgcgatggagatattgatatatctgttaaaaatatagtgcaagcagttaaaatattaaataaggaggatttttaa

SEQ ID NO: 20593 - DNA, 498 bp, Enterococcus columbae DSM 7374 = ATCC 51263
atgtcaaaaaggcaagtatttttcagttttcattatgacaatgataattggagagcaggacaggtacgcaatatgggaaaggtggatagcagctctactttttctgataatgattgggaggaagtaaaagaaaaaacagacagtaaaatcaaagaatggattgatgaacaattaaataagcgttcatgtttagtggttttaatcggagaaaagactgcaaatagaaaatggataaattatgaaataaaaaaagcatatgagttaaataaaggaattgtaggaatctatattcataaattagagaattcatcaggtgaacaagatgataaggggaataatccatttgattatttgacattagaaggagagaaactttctaagtatgttaaatgttttgattcgagttatgcatcaagtaaatatgtttacaatgatattaaggataacatagaagatttgatcgaatatggcattgagcacaaaccgtctacttggtaa

SEQ ID NO: 20594 - DNA, 1422 bp, Enterococcus columbae DSM 7374 = ATCC 51263; identical to SEQ ID NO: 20592

SEQ ID NO: 20595 - DNA, 498 bp, Enterococcus columbae DSM 7374 = ATCC 51263; identical to SEQ ID NO: 20593

SEQ ID NO: 20596 - DNA, 1449 bp, Capnocytophaga granulosa ATCC 51502
atgaataatatgaattttacaagtgagcaaaataaattcattaatgattttgttattgaaataagaaatggagatgcagctatttttgcaggagcaggactttctgcctcttcaggatttgttaattggaaagatttattaagggatttagcggatgaattagatttagatattgataaagaacatgatttaataggggttgcacaatattattttaacagacataaacgaagtaaaataaacaacaaaataaaaaatgaattttctactttaactaaagggagtgaaaatcataaattactttcacgtattggtatagaaactttttggactactaattatgaccaacttattgaaaaaactttagaaagtgatggaaaaattgtagataaaaaggttagaaataaagatttttcttgtaatataaagagaaaagatgctattatctataaaatgcatggagataaagactctcctgatgaagccatactcataaaggatgattatgaaacatatcaagataaaaaagagctgttttctaccgctttgagaggtgatttgttatctaaaacctttttatttataggttttagttttgacgatcctaatttggagtatattttaggcagaataaaagtattattaaaagataatacccctactcattattgttttttcaaagaagttaataagaaagattatcaagaagaaaaagattatctatatgcaaagattaaacaagaacttaaaatagaagacttaagaagatatggcattaatgctattatggttaaagaatattctgatattactttaatactttctgaaattgagaggaaattaaaactcaataatatttttatctcaggagctgctcattcttatgagccctttgaaaagaaagaagcaatagaatttattcaccatttaagttatgatttagctaaagagggaaataaaattatttcaggttatggattaggaataggaagtatagtgattaatggagcgttagaatacaaatacaattctgaatataagagtttagatgatttattagttcttagaccttttcctcaaatagagtctggtaataaaagtataaaggaaagatggactgattatagagatgaaataacctctaaagctggaattgctattttcatttttgggaataaatgggatgaaaaagggaataaagtgattgattctgatggaatgaaagaagagtttgacttgtgtattaaaaataaagttattcctattccaataggtattacaggatatatttctaaattactatgggatgaagttactaataatcttgatgaatactatcctgataatgaagaattaagaaaaaccattacagcacttggtgacagtaaagagaaggaaaaaatagtagagaatgtaattaaaatagtaaaaatcttgcaggaaaaataa

SEQ ID NO: 20597 - DNA, 654 bp, Capnocytophaga granulosa ATCC 51502
atgaaaagaaaagtttttgtttcttataaatattctgacaacaaagtattaagaataaaaggttatccaactacagcacgaaattatgtagatgaattgtctgtgattttagaaaaagataatcacatctataagggagaaaatgatggggaaactttagaacatttcaaggatgcaacaattggttcaaaattagctgataaaatcttcgatagtagtgtaactattgtattaatttctaagggaatgaaagacccttccgtaccagaaaaagatcagtggattccttgggaaatctcatattctctgaaagaacagacaagagaatatgggagaagtaaaacaaatggcgttctcgcagttgttcttcctgatgaaaatggaagttatgagtattatatttcagaaaattacaattgtaatagcagacaattgaaaacggatattctttttcaaatacttagagataatatgttcaatgcgaaaaatccctcaataagaatttgtaatggggcaaaaatatatgaaaatagttcttatattcaatctgtaaaatgggaagattttataaaaaatccatcaaaatatattgataagtctattgaattgagggatagaaaaaatgattttaatatagctaaaaatgtaaaataa

SEQ ID NO: 20598 - DNA, 504 bp, Capnocytophaga granulosa ATCC 51502
atggcaagaaaagtattttttagttttcattatgaaaaagacaattggagagtttcccaagttcgcaacataggtaagatagaagaaaatgaaattttgttggataataaatgggaagaagttaagaaaaaaggagatgtggctatccgaaattggatagatacaaatcttaaaaatcggtcttgtacaatagtcttagttggagaagaaactgcaaatagaaaatggataaactacgaaataaaggagtcttggaataatggtaaggcggtgctgggtatttacatacacaagttgaaagaccgttggggaaatcaatcaaaaaaaggaatgaatccttttgatttttttactatgggagagacaaaaactaaattttcctcaatagtaaaatgttataatcctccatttcaaagaagtacagatgtatataattatatcaagaaaaacatagaagaatgggtagaggaagcaattaaaatcaggaatttatacaaactttag

SEQ ID NO: 20599 - DNA, 564 bp, Capnocytophaga granulosa ATCC 51502
atgagttttataacagaatcacaattagcggcttatcgcacacaaacaaaaacttttagtgcggaaagtttggaaagttcttttggtaataaagcaaaagtatttctatctcataaacatgatgagggaaaaatattacaagatgttgttgctttgttaaaaaaagaaggggtagatgtttatcttgattggttagatgacgaaatgccagcattcacaaatgcaaaaacagcacataaattaaaagaaaaaatagaaattgctgataaatttattttattggcaacagaaaaagccattaattctaagtggtgtaattgggaattaggacttggagatgctgcaaaatatatgaaaaataatattgccctatttcctatcactaaaaataatgaaaattttcagggaactgaatatctcacaatatatcctagaatagaatatgaaaatggaaataataaatattcagatggagcatatataccagaaggattctatgtgaaatttcctgatagaactatataccttcttagaatttggttgcaaaaaatatttaggaagtag

SEQ ID NO: 20600 - DNA, 1449 bp, Enterococcus faecium LA4B-2
atgtctgaaattagcaaagatatttttctgaaaagattcagcaaagcggtaaatgaaggttatgcagctatttttgttggagcaggattttctagacctatgggttatgttgattggaaaacgctgttaaaaccttttgcagaagaattagaattagatattgaacaagaaactgatcttgcaaggttagctcaattttatcgtaatgaaaagggctctaagagtagaataaatcaggaaattattgatcaattttctaaaaatgtaaagttaaacgaaaatgtaaaaattattacaagattacctatttatacctattggacaacaaattatgatcacttattggaagaaggattaaaacttaacaatagaaaagcagatgttaaaataacgcaagatcaattatctttacaaaaaagagacagagatgctttagtttataaaatgcatggagatgtcgacttcgctagtgaagcagttttaactaaggaagattacgaagtctataatgaaaaaagatctctatataccactgtacttcaaggagatttgatatctaaaacttttttatttattggtttcagctttgaagaccctaatttggataatatattatcaaggacaagaaatttattaggagaaaatgtcggagaaagctattggttagaaaaaaatgtagcagagccaaatttacaagatatagaatcggaaaaggaaatagaagaagttaaagagaaatacagaattgataaagtaaagctctctttaaagataaacgaattgaaaaggtatggtatcagtacagttttaataaatgattatgatgagataactagtattttattagaagtggaaaagagatacttaagaaccaatgtttttatttcaggaagtataaaaagttatgatgaaatatgggaagaaaataaagtaaataatttttgtagtatactatctgaaaaacttgttaataataattacaaagtgcattcaggttttggactaggagttggttcgagtgttattaatggggctcttaaagaaatttatagtacaaaatacagacatgtagatgaacatcttttattacgtccatttcctcaagtgttcgagaatgatgaagaaaaaaaattaaaatggagacaatatagagaagaattaatttcaaaagtaggggtaagtatatttatttttggtaataaaataagcaaagaaggagaggtagaattatctgagggaatgtttgaagaatttgaaattgctaaaaaattcaataatctaattattcctgtaggatcaactgggggaatggccaaaaaaatatatgacatggtagaacaagatattgaggaatatccttatctaaaaaacgatttagaaactttaaaaagtagccatgatattcaagaattaacagattgtattttagatatattagaaaaaaattga

SEQ ID NO: 20601 - DNA, 654 bp, Enterococcus faecium LA4B-2
ttgaaaaaatggttaataattaaaacaaagaaggtaatagatttggctagaaaaacatttatatcttacaaatattctgaagcaaaagatttgagggataatatcatcaatgcaatgggtgaggacgcaacatactatactggagaaactagcagctctccaaatatgagtgataaaaccactgaatatataaaaaataaattaaaagacatgatatataatacttcagttactatagtaataatttctccaaatatgaaagcaagccaatggattgattgggaaattgaatattctttaaaacaagtaaagcgtggtgacaagtactctggagtaaacggaatagtgggagttgttatggagcataatggtggatattcttggcttagaccaactactactaatttagatggatgtacaagcatatctacaaatgacgaatatttatttgatattattaaaaaaaatagatacaatcaaaatccaaaagaatactcttgcaatcagtgtaagactataaatgctttaactggctcttatatagctttagtaaacgaggaagactttttaaaaaagcctgacttttatatagaaaacgcctacgagaaaagtaagaatattgataattatgatatatgcaaaaaggttgattag

SEQ ID NO: 20602 - DNA, 1437 bp, Escherichia coli HVH 9 (4-6942539)
atgacgtttagtaatgaaattgaagttttcataaaagattttgttaaagatcttgaaaatgattgtgctgctattttttctggcgcaggaatgtctaaaagtcaaggttatgttgattggaaagaattacttagcgatatagcagaagagcttagtttagacattaataaagaagacgatctaatatcgcttgctcaatttcatgttaatgaaaagaaaggggctacaaaactcacaaggaagataatcgaagagttttctgagcaagccgagccatcagaggttcataatataattgctcgtttaccgattaagacattttggacaacaaactatgacactttaattgaagatagtctgcggaaagtttacaaaattgcagatgtaaaaagaaacatagatgatttaaatacaacacgacctaagcgagacgcgatagtatataaaatgcatggtgatatttcgtccccatccaaggctattttatataaagagcagtatgaaaaatactacagaacacacgcttcatttatcaccgcacttagcggagatttaatatcaaaaacctttctattcatagggtttagttttaccgacccaaatctggattacattttgagtcgtttgtatactcattctggggacaagaggacacactattgctttatgaagaatgaggctaataattccctagatgatgaagaaacagtaaattataagatcagaaaacaaaaactgcgaatcgatgatctcaagagatttggtatacaagtattattaatagatgaatattctgacatccctaaaattctagctaagatagagcaatcatttaaaaagaaaacgatatttatttctggtagtgcagaaaaatatggggatcttgaaagacctaaagcattagattttattcacacattagcatatgagattataaagaataattataggatagtgaatggatttggatggggcgtcggaagttctgtgataaatggtgcgttggatgcaatttatagtaggccagataaattatcagaagaacagctcattgttagaccatttccacaaactgtcagtaaggggaaagatattcaagaactttgggaggagtatagacagagaatgattcctcttggtggtattgcattgtttatttttggaaataaacaagaggaaaataatgatatagtaaatgctaggggagtatttagagagtttgagattgctgttcaacatggccttgtaccaattcctttacccaataccgggtatatgtctaaatatatatttgaacaaatatcacaagatcctaagaaatattatggaagtaatgtatggatatataatgatttgtctgagattactgaaaaagatttttcggtaaaaaaaacaatagaagttgtaataaaaatcataaacaaactgaataaataa

SEQ ID NO: 20603 - DNA, 612 bp, Escherichia coli HVH 9 (4-6942539)
atggctcatgaaacattcatatcatataaatatagtgaagcacaggatttaagagacaaaattgtcaaggcattaggtgatgatgctgtttactataaaggggaaacatcggagtctcctgatataagtaatacaacagtagataatataaagaacaatcttaaaaatatgattttcgggacatctgttttaatcgttattatttccccgaatatgattaaaagtaaatggattgactgggaaattgaatatgcattgaaagaatacaagagaggaggaaccacttcccgaactaatggcattgttggtgtgataatgaaggttaataatagctatgactggttagtatcttcttcaatcaagcctgatggatgttcatcaagaactattgacacaactaaactatatgacattattaataataataggtttaatttaacttcagaagataaatattgttgccctgagtgcaaatcatatgatcaattgactggttcttatatttcattgatagaagaagaccgatttttagcagatgtatctttatacattgaaaatgcctatgagaaatctaaaaaattaagttcctacgatttatataaacaaaaatag

SEQ ID NO: 20604 - DNA, 1437 bp, Escherichia coli HVH 38 (4-2774682); identical to SEQ ID NO: 18665

SEQ ID NO: 20605 - DNA, 612 bp, Escherichia coli HVH 38 (4-2774682); identical to SEQ ID NO: 18666

SEQ ID NO: 20606 - DNA, 1449 bp, Escherichia coli HVH 46 (4-2758776)
atgaataaagaaaaagaaatttttataaagcatatatgcaaagaattgcaagatgagaatatagcgatttttgctggggcaggaatgtcagcaggcgcaggctttgtaagttggtcagaattattacgtcctattgcagatgagcttgaacttgatattgataaagaacatgatcttgtagcattagcgcaatatcactgcaatgcaaatggaaataatcgtagccaattaaatcagagattaattgaggagttttctcgagatgctgttgaaacagaaacacacagaattctggcaagattaccaattagcacctactggacaaccaactatgacaaacttatagaaaatagtttaattaaagcgggaaagatacctgatgttaaatataccaaagagcaattagctatcacaaaattaaaacgtgatgcaattgtatataaaatgcatggcgatatagatcatgcaaacgatgcagtattaacaaaagatgattacgaaaaatactacattaaaatggaacaatttttatcagcattaaaaggcgacttaatatcaaaaacttttatttttatcggatttagttttacagaccccaatcttgactatattttaagccgggtccgtgttgcatatgaaggaaatcagcgccgacattattgttttattcgcgctacgcaaaaaggaccaaatgaatcagaagcagattatcaatataattgtagaaaacaagaattatttatttccgatctaagcaggtttaatgtaaaaacaataatcatcaaagattatgatgaaattaaaaaattgctcggcctgatcgagtttaattacaaaaagaaaacattgttcatttctggtgcagctcatgaatatgaaccatggggtgaaagtgcgtctcagaagtttgttgctaaactcagcgcagcactgattaataaaaattataaaattgtttctggttttggcttaggtattggtagttcagttatttgtggagcattagaagaaatatatatgaaacaaaataacagaattgatgatagattgttgctacgcccttttccccaacactcaagtaaacaatcattgtctgcgttatggacacagtatcgtgatgatatgatatctcatgctggcttttccatatttctttttggaaacaagcaatccaatgatgagatcgtattatcaaatggaatgagggaggagtatgagatatcaaaaaataaaaaaaacatcatccttccaattggggcgacaggatacatggctagagagttatgggaagaagaagttaataggctacatagtttaccaaataaagatgatgaattttgtaaattattcactttattaggagatcaagataaatcattagatgaaatcttagataacataataaatatcattgactatagtgttaaaaaaggagatttacatggctag

SEQ ID NO: 20607 - DNA, 501 bp, Escherichia coli HVH 46 (4-2758776)
atggctagaaaatgtttcttcagttttcattacactccagataactggagagtatcgcaagtaagaaatataggtgcaattgaaggaaataaaccagccaaagataatgattgggagacagttgtcggtgggggagacaaaaagataaaagaatggatctcagaacaaatggaaggaagaatttgtacggtaattttagctggtacaaatacagccgatagaaaatggatcaaccatgaaatagttgaatcatggaatagagggatgggtgtagtagccatacatattcatggattgaaaaataaggatggagagcaatctgcgaaaggtaagaacccattatcatatataactcatggtccaacagggaaaaaactatcagatatcgcaaaatgttatgaccctccatattcagttagtacaaatgtttataattacatcgctgaaaatattgactcttggatcgaagaagcaataaaaatacgaaaagaaaacaaataa

SEQ ID NO: 20608 - DNA, 1449 bp, Escherichia coli HVH 153 (3-9344314); identical to SEQ ID NO: 20606

SEQ ID NO: 20609 - DNA, 501 bp, Escherichia coli HVH 153 (3-9344314); identical to SEQ ID NO: 20607

SEQ ID NO: 20610 - DNA, 1449 bp, Escherichia coli UMEA 3160-1; identical to SEQ ID NO: 20606

SEQ ID NO: 20611 - DNA, 501 bp, Escherichia coli UMEA 3160-1; identical to SEQ ID NO: 20607

SEQ ID NO: 20612 - DNA, 1467 bp, Leptotrichia wadei F0279
atgggaaatattttaaagaaaaaagaattaataaaagttattgaacaagcattagagagcggtgaattagcaatttttgctggagcagggctttcaattgatgcggggtattgttcttggcaagatttactatctgaagcagctaaagagattgacttggatatagaaagagaaagtcatgatttaatttcgttagctcagttttattgtaatgttaaaaaaagaaatgcaattgatgagttgttaacaactaaatttccaacaaatgtgaaaccaacggaaaatcataaattattgtcacaacttccaatctcaacttattggacgacaaattacgatactttaattgaagatgctttaaaaaataataataaaaaagtatctgttagaaaaagtgataaggatttacaattgtcatttaagaattatgattctatagtgtataaaatgcatggagatattcatagtcctgctaaagctgtaataacaaaagatgactacgaagaatacggaattaatagcaggaaattatttagggatgttttagaaggtaatttgttaacaaaaacatttttatttttaggatttagttttagtgatccaaattttaattttgtgataagtaaaatgcgagtattattaggagatagtagtagagcacattattgtatattaaaaaaaatttctaagccaaatagagatgactatagtgaacaagaaaaatataaaattgctattagagattacgagtactctttgataaagcaagatttacaaataaatgatttaaatagatatggtataaaagtatatttaattgataattatagtgagataacagatatattaagaacattgttaaataaatataggagaaaaacagtttttatttcaggtagtgcagaaaaatacattccaatggatgaaaaaaaagctcaagatttcattcgaaaattatcatttgaattggtaaaaaatggatataaaattgttaatggatatggtttaggagtaggaacttatgtcataaatggaattactgagtattgttatgatcacagagaaataaatattgaaaatcgtttaaaattaatgccatttccattaagtgcaattgataataaaaatttaaaagatacttgggaaaaatataggaaagaaatgatttctcaatgtggaattgcaatttatatatttggaaataagaaaaaaaatggaaaaattttaaatgcagatggtgtagaaaaagaatacgctattgcggaatcttatgaaatagtgaatatacctttagcatttacaggttatatggctgaagaattatattttaaaaatagtgataagattaatagtgtaataggtaaagaaaaaacgaaatatattactgaattttttgatggagatactaatgttgaggaaataataaaaataataaataaacttaataataaggaggagattaactaa

SEQ ID NO: 20613 - DNA, 504 bp, Leptotrichia wadei F0279
atgtcaaaaagacaagttttttttagttttcattacactaatgataattggagagcaggacaaattcgtaatatgggaaaagtagatagaagttctactttttcagataatgattgggaggaagtaaaagaaaaaacggacaataaaattaaagaatggattgacaaacaactaaatctacgttcttgtttagttgttttaataggacaaaaaaccgcaaacagaaaatggataaattacgaaattaaaagagcttatgaattgaacaaaggaattgttggtatttatattcataaactagaaaactcttcaggtatacaagataaaaaaggaaataatccttttgattatattccattaaataaaaatgatgaaaaactttctaaatacgtcaaatgttttgattcaatttatccttttagtaaagatgtatacaatgatataaaaaataacattgaaaatttaattgaagattgcattaagaataaaccttcaacttggtaa

SEQ ID NO: 20614 - DNA, 1464 bp, Pseudomonas aeruginosa BWHPSA014
atgactaaagcggctttgaaccgattcctcaatgagtaccctgatgcgctgaacgatggtgtgggggcgattttcgttggtgccggcgtctcaatggcggcgggttacccttcctggtcagagctgctcagtgacatcgctgtagagctcgaggttgactcgaagaacgtccacgacctggcggcgctggctcaatggagcatcctggaaaacggtggtgccacacgcgtccgtaatgtcatcaagaacgagataggccctgacaaacctatccccgagacggttgagatcatctcgcggctaccggtcagacatatctggacgaccaactacgaccgcttgatagagcgtgcatttgaatccattagccggccgctcaaccccatatccggctccaaagatctcgcccttagggtgacacctggcgcagcgctgctctacaagatgcatggttctgtggatcgcctcgacgatgtcgtcatctccacggacgactacgagctgtttcgttcaaaacgaggccagtacctaccgctgtttcaagcgcacctgaccagcatgtccatgctgttcatcggcatcagcttcaccgaccccaatgttcggcatgtcctatcgctgattcgggaaagcttcaccgatgcgccgcccgagcacttcgccatcgtgcgtgcgccgcagaaggccgacttcacgaccgaaggggaattcgcagcgcgcaatgctcagcacaagctgtgggcgaaagatctgaaacgctatggcttgttggcggtagaggtcagtgactatgccgaaattccggcgcttctacgtcagattgaaaagcgagtcgctgcgcgcagaatctgggtgagtggcagctggcctcttgagcggggaggttccgagtcagccgacattcatgcactggccgaggacattggccggcagattggtgagacagggcgccacctggtgactggtgcaggcctgttggttggatcggcgtcattgtcggggttcttgggagcgctgcggcaaggcggcggatgggatctcgagcgacggctgatcgccaggccctttcctcaacccctggcgggagcccagcccaacaacgaagaatgggctgcgctgcggctggagcttgcgcgacaagctggtatcgccattttcattggcggtgcgaagctggccggcgacaagttggaggtcgctcaaggcgtggaacaagagtttgaagttgccaaggcggcaggggtatttctgcttccggtaggggcgtctggtggcgctgcgcagaaaatcagtgacctgctgttgggatcagagctctcctcatctggtcaggacgctgtaaggcccacggataaagaactgaaagtactttctgctccaggattcctggatagcaaagttgggcggcgcaagctcgtttccctagtttttgagatcattgaccgaatagctcatgctacgtga

SEQ ID NO: 20615 - DNA, 504 bp, Pseudomonas aeruginosa BWHPSA014
atggcaaggaatgttttcttcagcttccacttcaagaatgatttttggcgcacccagcaagttcggaacatcggtgcattggatggtcagaaactctatacgccgaacgagtgggaagaggtcaagaaaaagggtaatgcagcaattgaaaagtggattgatgacagccttgtagggaagtcatgcgtagtcgtactggtgggctccgagaccgcaagccgaccatgggtggtgaacgaaatcatcaagggttggaacgcgggcaagggcgtcgtgggcattcgcatcaacaagcttctagataccaatggaaactcttcggtggcgggctccaaccctttcgatctggtcacactgaagaacggtactgtgaacctttcgaactatgccaagctgatcacccccgtaggggtcgacagcaaagcggtctacgcatcgatccaggagagcattgagcaatggatcgaggatgccattgccgtccggaagaactacaagccgtga

SEQ ID NO: 20616 - DNA, 915 bp, Pseudomonas aeruginosa BWHPSA014
atgagtgccgatctatttatctcttacgcgtggacatcaacagcccatcgagattgggttcgcttgcttgctagtcaactccatttgctcggctacgtcgtaaaaattgatgaggcagtagattatggatcaagcctgcatggtttcatgcgagaggttacagagtccactcatgttcttttgattgtcgacgagaattatgttgatcgagctaataataagccaaattctggggttggcattgagacggaatgggtaagtagggcttttatgggcaagccagccaattggttgtcagttatattcgtccgaaaccccgagcgtatattgcctaactggctcaatgatcataatcctaagggttttgactttaattccagtcctgaaaataacgagttccccgggtcgattcagatagacgagctctggcgatggattgaagggctgccggctgacaagactcatgccgtcccattgtctttggttcgaaaacgcgcagcacgccttgagcgtgttgatgctcttcgcgacccagctctttacgcgaatcccgcccttaatggacgtgtgacctttcgctatagaaaccatgcacactacacggttggccacggggagttcgaattcaaaatcaacttcagtgggcattccaacaacagtatccaggtgtacatagatagtggcttgaaagcggttggcctgattgttggtccggattttgacccgctcactgtagagtctttcttaacaccgggccgcattgtcaacccagttttggggcagaaagcagtcctattaaactcgtacggagttctgtgtatcatcacaattgatgaggtgcagcgtgaggtcaacgcacaagagtatgttccagagcatgtgacgttcacttatgaaattctggttaggaattag

SEQ ID NO: 20617 - DNA, 1464 bp, Pseudomonas aeruginosa BWHPSA004; identical to SEQ ID NO: 20614

SEQ ID NO: 20618 - DNA, 504 bp, Pseudomonas aeruginosa BWHPSA004; identical to SEQ ID NO: 20615

SEQ ID NO: 20619 - DNA, 915 bp, Pseudomonas aeruginosa BWHPSA004; identical to SEQ ID NO: 20616

SEQ ID NO: 20620 - DNA, 1410 bp, Streptococcus sanguinis CC94A
atggaaaaagagctatttattaaaaaatatactgaagttattcaagaagggaatgctgcagtatttgctggtgcagggacatcagttgatgccggttttgttaattggaaagaattggtaagaccattctcagaagaaataaatttggacattgataaagaaacagatttaattggagtggcgcaatactatatcaattctaaaatgggaaatcgtggtactgtgaatcaaaaaataattaatcagttttctagttcagatgcagaaacggatgttatgaatatattaacacgtcttcccatttctacatattggacaacaaattatgatgaggtcatagaaaatggattggaaaaaaataatcgcaggggggatataaaaagaaaagtagatgatttggctattaatatttatgatagtgatgctatcgtatataaaatgcacggtgatataagatctccccaagatgcagttatttcaaaagatgattatgaaagatatggtgagaaaaattcgttatttgttacagccttgcgtggggacttagtctcaaaaacgttcctatttgtagggttcagttttgaagatccaaacctagagtctattttaggaaaggtgaatgttttattaggagataacaaaagagaacattattgtattcagagaactgtattaagaaaagattataaaacgaaaaaagagtatgactatgcaaaaataaagcaaggtttaaaaataatagacttaaaacgatatggtattgagactgttttggtaaatgattatactgagattccccaattattactagaaattgaaagagaatattttaaaaatacaatcttcatttcaggtagtatatcagattataatgagaattggagtgaagaaaaggtaaatcaatactgctatgatttatctagttttcttatttcaaaagattataaaataatatcagggtttggactggggataggaagcagtgttattaatggtgcgctggatcaaatttataaaactaaatatagacatgtggctgaacaccttggtttgtttccttttccacaaaatgctaatggagagaaatcgttaaaagaatgttggaccgagaatcgtgaacaaatgattagtgagtcaggggtgtgtatatttttatttggtaacaagctagttgatggtaaggtagaacttgcttcaggcatgatggaggaatttcaaatagctaaagaaaaaggaaagataatcattccgattgcctctactggatttgctgcaaaagaaatttatgatgagatgaaacaatcaggagaatatagttatttagataattactgggaaactttggagactgaaaaggatttcactaaagttttttccacgattgataaaattgtcaatgaggtacgataa

SEQ ID NO: 20621 - DNA, 621 bp, Streptococcus sanguinis CC94A; identical to SEQ ID NO: 19942

SEQ ID NO: 20622 - DNA, 1167 bp, Streptococcus sanguinis CC94A
atgggcaaagtaatgagacaatataatgaattttatataaaattgcaaaaagagtttaaactggctcataatatgaccatagaagctatgccagcaaaattttccaacaaagattatgttaaaaaatttatttatatgtttcctgataaaatttctagacttataatagaaagaaattattggtatggtaaacgtattattaaaaaaaatttagttaaaattcagagtaaaaggatgtctttagaaactaatgattttattcttgaaacatctaaatatataagaagacaagtaagaaaaaatattttgagtattgaagaaagaaaaactcaggcagatgaaattcgaaaaaaatctttagcaaaattaaagctgcaaactataaaaagaaaaaaatcattagattatatccaagaaataaatccctcttatctggaacattatcgcaaaagattttttaaaacacatgatttacatgaaagattagaaatcattagagaactttcgaagtatgattcaaaggaagttcataattttttctatgcaataaatggtcatgtaagaaatcaatcgctaaaaaaagaagttcagtcgtactttcaaagtttatctctaccgtttagattgagtagaaaaaagaaaggaaaaacaaattttattgataatgaaatagtaacaaataggaaaggaccagaagagttgaagaagaggttatacattgatgatctagaaaagataaaaaaatttgatatctttctttcacataactctcaagatgaagaaaaaataataaccttttataaaaaactaaacaaaaatggccaagtcgtatatattgactgggttaatgataaatacgatctgaaacgagaatggtgtaatacttcaacagtcgatattatcaaagagcgtataaaacaatcggatgtatttgttttgtacttttcaagtaagacacttaattctcagtggtgtgcttgggaattgggatatgcagatggaattggaaagaaaatatgtatctatttttcagaaaaaatagatagaacaattattcccaaattttattctatttatccagagctacatctttctgaaaacattacaattgaagttgataaacaatcatctattatatttaatgattggaaaaataggagtagttaa

SEQ ID NO: 20623 - DNA, 1437 bp, Enterococcus faecalis EnGen0409; identical to SEQ ID NO: 18606

SEQ ID NO: 20624 - DNA, 486 bp, Enterococcus faecalis EnGen0409; identical to SEQ ID NO: 18578

SEQ ID NO: 20625 - DNA, 852 bp, Enterococcus faecalis EnGen0409; identical to SEQ ID NO: 18579

SEQ ID NO: 20626 - DNA, 1455 bp, Serratia marcescens BIDMC 44
atgccagaacgtgatatagaactgtttattcgtgattacgttaatgatatcaaagccggcagcgccgcgctgtttgccggcgccgggctgtccatacccgccggtttcgtcagctggaaagagcttatcggcgatattgcttatgagttggggctggatatagaaaaagaaagcgaccttatttctctggctcaatatcatctcaatgaaaaaggcaaccggcataagataaatcaaaaaataattacagaattcgctgagcaagcggaagaaactgaaaatcatcggatcattgccagattgccgatagcgtcactctggacaaccaactacgacgatctgattgaaaaaacctatgcccgttataatcgcgtctgcgacgttaaaaccacgccggaaagtttgaccaataatattcacaagcgcgatgttgtcttatataaaatgcatggtgattatagaacccccaaccaggcgattatcacccgcgaacaatacgaaacttactcccgtacacaccttccttttatcaacatgctgatggcggagttgaccgccaaaaccttcctgtttatcggtttcagctttgaagaccccaacctgcaatacgtattgagtcgcctttacgcgcagtacggcgaagggaaaagaaaccactactgcatcatgcggcgcgttcagcctggcgacagcggcagcgaggatcaggcgtcttatgattacaacagccgaaaacaaagcctgatgatcaacgatctgcgccgttacggcattcaaacgctgctggtggaggactatcggcaaatcaccgacctgctgtatgccatcgaaacgcaattcaagaaaagcacggtgtttatctccggcagcgccgacaactaccacccctatgcccgtgaagagtccatccagttcatacaccgcctggcgcgcctgcttatccgcaaacagtaccgcatcgtcaacggcttcggttggggcgtgggcacggcggtgatcaacggcgcattggaagccatttacgccagcggggggaaaatcagcgaaagccagctggtgctgcgccctttcccccaattcgccagcgggggcattacgctgccggcactttggcacgaataccgccagaacatgatttcgctcagcggcatcgcggtctttttgttcggcaacaagcgtaacgccgaaggcgaatgcgtgctggccgacggtttattgaaagagttccacatcgctgcggaacaaggctgcgtctgcattcctatcggttgtaccggcggcgcatccgccgagatctaccgaaaaatcaaggaggagatgaaagacaccctctatcaccgccatcccgtcgccatgaacctgctggatcaacttaacgagccgggcagcctggcggagaagaaaacatgcctgttggcacttatcgatatcattactaaggataatcctcgatga

SEQ ID NO: 20627 - DNA, 492 bp, Serratia marcescens BIDMC 44
atgaccagaaaatgtttttacagtttccattatgagccggacaactggcgcgcttctcagatacgcgaaatgggctcgctggaaggtaaccggccggccacggataacgattgggaggaagtgaaaaaaggtggtgacgacgccatcgccgcttggatcaaaggccagttggacaatcggagctgcgccgtaattctcgcgggtaaagataccgccaatcgcaagtggatcaacttcgaaatctgcgaagcctggaagaaaggcatgggcgtgctggtggtgtatatccataacctgaaagacagcgccggcgaacaagcccgaaaaggcaacaacccgttggatcatatcaagctgggggatagaaagctttccggaatcgccaaagcctatgatccgccttatttgaccagcgccaatgtctataatcacatcaaggaaaatctggcggagtgggtagaagaagcgatccgcattcgcgaaaattactga

SEQ ID NO: 20628 - DNA, 1428 bp, Salmonella enterica subsp. enterica serovar Namur str. 05-2929
ttggataaagaatattttataaaaaattacctgaaagaaattcaggatggtaacgctgcaatcttcgcaggtgcaggtctatccatcggggctggttttgtagattggcggaatttattgaaacctttagcagatgaattacacttagatataacacatgagcaagatttagtctcagtcgcacaatatttttgcaatggctacaatcgtagcagaataacacagactctaattgatgaattaggtgtatctcccacaccaacaaaaaatcataaaatattagcatctttgcctatagacacctattggacgactaactatgaccgattgattgagaatgcactaaatcaggaaaataaaatttacgattctaaatacagaaaagatcagctcgcttataccaagagaggccgagatgtcttattatataaaatgcatggggatatagaggatccctcgaacactatccttaccaaagatgaatatgagaagtattcatttacccatgcaccatttataaccgccttatcaggcgatttagtgtctaaaacatttctcttccttggatttagcttttcagatccaaaccttgattatattctaagcagagtacgggttaattttcaggataaccaaaggaatcattattgtatctttaaacgctgcgccaaaaatgatttcgatgacgaatctgaattcttaaatgcatctgtaaaacaggatttagttgctcaagatctaaaacggtttcatattaacgtagtcttcgttgaagaatacaatgaaattgaacagatgctagaaaaaatctatcgtctttttaagcgtaaaaccatatttatctccggttctgccgatagtttcggcgaatgggataaaaaggatgttgaagattctttatttaaactcggaagtgcaatggttgataaaggattccgtgtagcctctggcattgggcttggtataggaaacgcgttggtatcaggagccatagctaaagcatataagtcacagcaatctcaccttgatgatcatgtcttaatgaggccattcccacaatatatagaggatgtaggtgaaagaagacgtgtctggagacgataccgtgaagagatcatcagtaaatcaggcattgctatatttcttatgggcaataagacagtcgatggagaagtagttgacgcagatggtatgcaacaggagtttgaaattgctgttgagcaaggtgtttttgtattgccgattggttgtactggattcatgtccaagaaactatgggatttagtcataggtaatatcgacaaatactacagcgaacaatcacaagaattttatgaaaaattcaatgaacttggggaaactattgacaacccacgagaagttatttctatgatcattgatatattagatttaattgttaaggaatag

SEQ ID NO: 20629 - DNA, 687 bp, Salmonella enterica subsp. enterica serovar Namur str. 05-2929
atggctagaaaaatatttgtatcttataaatacggagatacgaaagttgaaccacttgaggaaatcttttttgaggcaacaaaggccagagattatgtaacaaaactacaagagctacttagtgataacgaccaaattaacaaaggtgaaaaagatggcgaagacttaagcaatttccaagatagtacaattgagtctaagttacgcgataagatctttgatagtagtataacaattgctatcgtatccaaaggtatgaaagagtatctaacggcagagaaagatcaatggatgccttgggaaatagcctattcattaagaaccatttcaaaaggcgatagaacaagcaaccccaatggggttataatggttgtacttcccgacaataacggtagctatgattattacattaaagataatacatgcccttattgtgattgtagtacgttatatacagattttttgtttggcattctaaaaagaaatacatttaacaataaatctttgacgcaatcagattgcgaacaccataatgtaaaccctgcatatactggggatcattcatatatcatgtcagtaaaatgggatgattttattaaaacacctaatttatacctagatgaatgtgccagattacgcgataatatagacgacttcaatatttctaaaacaatcagcggcgattaa

SEQ ID NO: 20630 - DNA, 1455 bp, Serratia marcescens BIDMC 80; identical to SEQ ID NO: 19484

SEQ ID NO: 20631 - DNA, 492 bp, Serratia marcescens BIDMC 80; identical to SEQ ID NO: 19483

SEQ ID NO: 20632 - DNA, 1452 bp, Staphylococcus aureus 08-01084; identical to SEQ ID NO: 18653

SEQ ID NO: 20633 - DNA, 609 bp, Staphylococcus aureus 08-01084; identical to SEQ ID NO: 18624

SEQ ID NO: 20634 - DNA, 927 bp, Staphylococcus aureus 08-01084; identical to SEQ ID NO: 18619

SEQ ID NO: 20635 - DNA, 1452 bp, Staphylococcus aureus 08-01085; identical to SEQ ID NO: 18653

SEQ ID NO: 20636 - DNA, 609 bp, Staphylococcus aureus 08-01085; identical to SEQ ID NO: 18624

SEQ ID NO: 20637 - DNA, 927 bp, Staphylococcus aureus 08-01085; identical to SEQ ID NO: 18619

SEQ ID NO: 20638 - DNA, 1452 bp, Staphylococcus aureus 08-01728; identical to SEQ ID NO: 18653

SEQ ID NO: 20639 - DNA, 609 bp, Staphylococcus aureus 08-01728; identical to SEQ ID NO: 18624

SEQ ID NO: 20640 - DNA, 927 bp, Staphylococcus aureus 08-01728; identical to SEQ ID NO: 18619

SEQ ID NO: 20641 - DNA, 1452 bp, Staphylococcus aureus 08134-6; identical to SEQ ID NO: 18653

SEQ ID NO: 20642 - DNA, 609 bp, Staphylococcus aureus 08134-6; identical to SEQ ID NO: 18624

SEQ ID NO: 20643 - DNA, 927 bp, Staphylococcus aureus 08134-6; identical to SEQ ID NO: 18619

SEQ ID NO: 20644 - DNA, 1452 bp, Staphylococcus aureus 08139-6; identical to SEQ ID NO: 18653

SEQ ID NO: 20645 - DNA, 609 bp, Staphylococcus aureus 08139-6; identical to SEQ ID NO: 18624

SEQ ID NO: 20646 - DNA, 927 bp, Staphylococcus aureus 08139-6; identical to SEQ ID NO: 18619

SEQ ID NO: 20647 - DNA, 1452 bp, Staphylococcus aureus 08142-8; identical to SEQ ID NO: 18653

SEQ ID NO: 20648 - DNA, 609 bp, Staphylococcus aureus 08142-8; identical to SEQ ID NO: 18624

SEQ ID NO: 20649 - DNA, 927 bp, Staphylococcus aureus 08142-8; identical to SEQ ID NO: 18619

SEQ ID NO: 20650 - DNA, 1452 bp, Staphylococcus aureus 08143-5; identical to SEQ ID NO: 18653

SEQ ID NO: 20651 - DNA, 609 bp, Staphylococcus aureus 08143-5; identical to SEQ ID NO: 18624

SEQ ID NO: 20652 - DNA, 927 bp, Staphylococcus aureus 08143-5; identical to SEQ ID NO: 18619

SEQ ID NO: 20653 - DNA, 1452 bp, Staphylococcus aureus 09S00475; identical to SEQ ID NO: 18695

SEQ ID NO: 20654 - DNA, 609 bp, Staphylococcus aureus 09S00475; identical to SEQ ID NO: 18624

SEQ ID NO: 20655 - DNA, 927 bp, Staphylococcus aureus 09S00475; identical to SEQ ID NO: 18619

SEQ ID NO: 20656 - DNA, 1452 bp, Staphylococcus aureus 10S01493; identical to SEQ ID NO: 18695

SEQ ID NO: 20657 - DNA, 609 bp, Staphylococcus aureus 10S01493; identical to SEQ ID NO: 18624

SEQ ID NO: 20658 - DNA, 927 bp, Staphylococcus aureus 10S01493; identical to SEQ ID NO: 18619

SEQ ID NO: 20659 - DNA, 1452 bp, Staphylococcus aureus 110802495; identical to SEQ ID NO: 18695

SEQ ID NO: 20660 - DNA, 609 bp, Staphylococcus aureus 110802495; identical to SEQ ID NO: 18624

SEQ ID NO: 20661 - DNA, 927 bp, Staphylococcus aureus 110802495; identical to SEQ ID NO: 18619

SEQ ID NO: 20662 - DNA, 1452 bp, Staphylococcus aureus 1110601704; identical to SEQ ID NO: 18653

SEQ ID NO: 20663 - DNA, 609 bp, Staphylococcus aureus 1110601704; identical to SEQ ID NO: 18624

SEQ ID NO: 20664 - DNA, 927 bp, Staphylococcus aureus 1110601704; identical to SEQ ID NO: 18619

SEQ ID NO: 20665 - DNA, 1452 bp, Staphylococcus aureus 1110601896; identical to SEQ ID NO: 18695

SEQ ID NO: 20666 - DNA, 609 bp, Staphylococcus aureus 1110601896; identical to SEQ ID NO: 18624

SEQ ID NO: 20667 - DNA, 927 bp, Staphylococcus aureus 1110601896; identical to SEQ ID NO: 18619

SEQ ID NO: 20668 - DNA, 1452 bp, Staphylococcus aureus 1110700562; identical to SEQ ID NO: 18695

SEQ ID NO: 20669 - DNA, 609 bp, Staphylococcus aureus 1110700562; identical to SEQ ID NO: 18624

SEQ ID NO: 20670 - DNA, 927 bp, Staphylococcus aureus 1110700562; identical to SEQ ID NO: 18619

SEQ ID NO: 20671 - DNA, 1452 bp, Staphylococcus aureus 1110700610; identical to SEQ ID NO: 18653

SEQ ID NO: 20672 - DNA, 609 bp, Staphylococcus aureus 1110700610; identical to SEQ ID NO: 18624

SEQ ID NO: 20673 - DNA, 927 bp, Staphylococcus aureus 1110700610; identical to SEQ ID NO: 18619

SEQ ID NO: 20674 - DNA, 1452 bp, Staphylococcus aureus 1110701127; identical to SEQ ID NO: 18695

SEQ ID NO: 20675 - DNA, 609 bp, Staphylococcus aureus 1110701127; identical to SEQ ID NO: 18624

SEQ ID NO: 20676 - DNA, 927 bp, Staphylococcus aureus 1110701127; identical to SEQ ID NO: 18619

SEQ ID NO: 20677 - DNA, 1452 bp, Staphylococcus aureus 1110802883; identical to SEQ ID NO: 18653

SEQ ID NO: 20678 - DNA, 609 bp, Staphylococcus aureus 1110802883; identical to SEQ ID NO: 18624

SEQ ID NO: 20679 - DNA, 927 bp, Staphylococcus aureus 1110802883; identical to SEQ ID NO: 18619

SEQ ID NO: 20680 - DNA, 1452 bp, Staphylococcus aureus 1110807699; identical to SEQ ID NO: 18695

SEQ ID NO: 20681 - DNA, 609 bp, Staphylococcus aureus 1110807699; identical to SEQ ID NO: 18624

SEQ ID NO: 20682 - DNA, 927 bp, Staphylococcus aureus 1110807699; identical to SEQ ID NO: 18619

SEQ ID NO: 20683 - DNA, 1452 bp, Staphylococcus aureus 1110904178; identical to SEQ ID NO: 18653

SEQ ID NO: 20684 - DNA, 609 bp, Staphylococcus aureus 1110904178; identical to SEQ ID NO: 18624

SEQ ID NO: 20685 - DNA, 927 bp, Staphylococcus aureus 1110904178; identical to SEQ ID NO: 18619

SEQ ID NO: 20686 - DNA, 1452 bp, Staphylococcus aureus 1111101949; identical to SEQ ID NO: 18695

SEQ ID NO: 20687 - DNA, 609 bp, Staphylococcus aureus 1111101949; identical to SEQ ID NO: 18624

SEQ ID NO: 20688 - DNA, 927 bp, Staphylococcus aureus 1111101949; identical to SEQ ID NO: 18619

SEQ ID NO: 20689 - DNA, 1452 bp, Staphylococcus aureus 1111102620; identical to SEQ ID NO: 18695

SEQ ID NO: 20690 - DNA, 609 bp, Staphylococcus aureus 1111102620; identical to SEQ ID NO: 18624

SEQ ID NO: 20691 - DNA, 927 bp, Staphylococcus aureus 1111102620; identical to SEQ ID NO: 18619

SEQ ID NO: 20692 - DNA, 1452 bp, Staphylococcus aureus 1111200013; identical to SEQ ID NO: 18653

SEQ ID NO: 20693 - DNA, 609 bp, Staphylococcus aureus 1111200013; identical to SEQ ID NO: 18624

SEQ ID NO: 20694 - DNA, 927 bp, Staphylococcus aureus 1111200013; identical to SEQ ID NO: 18619

SEQ ID NO: 20695 - DNA, 1452 bp, Staphylococcus aureus 1111203374; identical to SEQ ID NO: 18695

SEQ ID NO: 20696 - DNA, 609 bp, Staphylococcus aureus 1111203374; identical to SEQ ID NO: 18624

SEQ ID NO: 20697 - DNA, 927 bp, Staphylococcus aureus 1111203374; identical to SEQ ID NO: 18619

SEQ ID NO: 20698 - DNA, 1452 bp, Staphylococcus aureus 1111205429; identical to SEQ ID NO: 18653

SEQ ID NO: 20699 - DNA, 609 bp, Staphylococcus aureus 1111205429; identical to SEQ ID NO: 18624

SEQ ID NO: 20700 - DNA, 927 bp, Staphylococcus aureus 1111205429; identical to SEQ ID NO: 18619

SEQ ID NO: 20701 - DNA, 1452 bp, Staphylococcus aureus 1111206270; identical to SEQ ID NO: 18695

SEQ ID NO: 20702 - DNA, 609 bp, Staphylococcus aureus 1111206270; identical to SEQ ID NO: 18624

SEQ ID NO: 20703 - DNA, 927 bp, Staphylococcus aureus 1111206270; identical to SEQ ID NO: 18619

SEQ ID NO: 20704 - DNA, 1452 bp, Staphylococcus aureus 11P4; identical to SEQ ID NO: 18653

SEQ ID NO: 20705 - DNA, 609 bp, Staphylococcus aureus 11P4; identical to SEQ ID NO: 18624

SEQ ID NO: 20706 - DNA, 927 bp, Staphylococcus aureus 11P4; identical to SEQ ID NO: 18619

SEQ ID NO: 20707 - DNA, 1452 bp, Staphylococcus aureus 11P8; identical to SEQ ID NO: 18653

SEQ ID NO: 20708 - DNA, 609 bp, Staphylococcus aureus 11P8; identical to SEQ ID NO: 18624

SEQ ID NO: 20709 - DNA, 927 bp, Staphylococcus aureus 11P8; identical to SEQ ID NO: 18619

SEQ ID NO: 20710 - DNA, 1452 bp, Staphylococcus aureus 11S00627; identical to SEQ ID NO: 18695

SEQ ID NO: 20711 - DNA, 609 bp, Staphylococcus aureus 11S00627; identical to SEQ ID NO: 18624

SEQ ID NO: 20712 - DNA, 927 bp, Staphylococcus aureus 11S00627; identical to SEQ ID NO: 18619

SEQ ID NO: 20713 - DNA, 1452 bp, Staphylococcus aureus 11S01586; identical to SEQ ID NO: 18695

SEQ ID NO: 20714 - DNA, 609 bp, Staphylococcus aureus 11S01586; identical to SEQ ID NO: 18624

SEQ ID NO: 20715 - DNA, 927 bp, Staphylococcus aureus 11S01586; identical to SEQ ID NO: 18619

SEQ ID NO: 20716 - DNA, 1128 bp, Staphylococcus aureus 122; identical to SEQ ID NO: 18617

SEQ ID NO: 20717 - DNA, 609 bp, Staphylococcus aureus 122; identical to SEQ ID NO: 18618

SEQ ID NO: 20718 - DNA, 927 bp, Staphylococcus aureus 122; identical to SEQ ID NO: 18619

SEQ ID NO: 20719 - DNA, 1452 bp, Staphylococcus aureus 12464; identical to SEQ ID NO: 18653

SEQ ID NO: 20720 - DNA, 609 bp, Staphylococcus aureus 12464; identical to SEQ ID NO: 18624

SEQ ID NO: 20721 - DNA, 927 bp, Staphylococcus aureus 12464; identical to SEQ ID NO: 18619

SEQ ID NO: 20722 - DNA, 1452 bp, Staphylococcus aureus 12S00579; identical to SEQ ID NO: 18653

SEQ ID NO: 20723 - DNA, 609 bp, Staphylococcus aureus 12S00579; identical to SEQ ID NO: 18624

SEQ ID NO: 20724 - DNA, 927 bp, Staphylococcus aureus 12S00579; identical to SEQ ID NO: 18619

SEQ ID NO: 20725 - DNA, 1452 bp, Staphylococcus aureus 12S00881; identical to SEQ ID NO: 18695

SEQ ID NO: 20726 - DNA, 609 bp, Staphylococcus aureus 12S00881; identical to SEQ ID NO: 18624

SEQ ID NO: 20727 - DNA, 927 bp, Staphylococcus aureus 12S00881; identical to SEQ ID NO: 18619

SEQ ID NO: 20728 - DNA, 1452 bp, Staphylococcus aureus 12S01153; identical to SEQ ID NO: 18695

SEQ ID NO: 20729 - DNA, 609 bp, Staphylococcus aureus 12S01153; identical to SEQ ID NO: 18624

SEQ ID NO: 20730 - DNA, 927 bp, Staphylococcus aureus 12S01153; identical to SEQ ID NO: 18619

SEQ ID NO: 20731 - DNA, 1452 bp, Staphylococcus aureus 12S01399; identical to SEQ ID NO: 18695

SEQ ID NO: 20732 - DNA, 609 bp, Staphylococcus aureus 12S01399; identical to SEQ ID NO: 18624

SEQ ID NO: 20733 - DNA, 927 bp, Staphylococcus aureus 12S01399
gtggaaagacaacaaacttacaaagaaaaaacgcaacacctatataaagttaaaaaaatcaaaaatagatataatacgaaaagtgcagaagaatattttttctcgattcctcaagtaaaatacattctttcagcaggaagaatgaaaaaacataaagagaattataatgcttcagagataaaaataaaaaaagcagctttagaaaagagtaggaagaataagaattggaaaattgaagaacgtttaataaaagctaagagatatactcaaaaagttgatccagaatacttaaatatttatatgaaagcttatcataagaaagatataactacagaagaaaaactagaaattctaacggaattaaaaaaatttgatacagaaaatatagtgcgtttttttagaaaattaaatgatgctgaacaaaataaaatgattagaaatttagcctttaaatatttacaagattacggtcactatgtgaaactaaggaaaaattttaaaggaaagaagaaagtatatcaaactgagagagcttctttagacactaaaaaacctgaagatttatataatgatttaacaaataagaatattcaatctcaaaaagtctatgatatttttatttctcatagtacaaaagataagaagacagttgaagatattataagagtttttaatgaacaaaataaaacgtgttattgtgattggactatggatcaagattatttaaaaaggaagtatgttggtgaatatacaaagcaagtattgaaggctcgtatggagcaaagtaaaatgctggttttgttgagaacggagaattcagttcaatctgattgggttagttttgaaatagaatactttgaaaatctaaaaaaacctatatatatagtagagtctcttgaagaattattagaggctttttcagattag

SEQ ID NO: 20734 - DNA, 1452 bp, Staphylococcus aureus 12-ST01988; identical to SEQ ID NO: 18695

SEQ ID NO: 20735 - DNA, 609 bp, Staphylococcus aureus 12-ST01988; identical to SEQ ID NO: 18624

SEQ ID NO: 20736 - DNA, 927 bp, Staphylococcus aureus 12-ST01988; identical to SEQ ID NO: 18619

SEQ ID NO: 20737 - DNA, 1452 bp, Staphylococcus aureus 14(11MN_17-08-66-05); identical to SEQ ID NO: 18653

SEQ ID NO: 20738 - DNA, 609 bp, Staphylococcus aureus 14(11MN_17-08-66-05); identical to SEQ ID NO: 18624

SEQ ID NO: 20739 - DNA, 927 bp, Staphylococcus aureus 14(11MN_17-08-66-05); identical to SEQ ID NO: 18619

SEQ ID NO: 20740 - DNA, 1452 bp, Staphylococcus aureus 150211/pool 1; identical to SEQ ID NO: 18695

SEQ ID NO: 20741 - DNA, 609 bp, Staphylococcus aureus 150211/pool 1; identical to SEQ ID NO: 18624

SEQ ID NO: 20742 - DNA, 927 bp, Staphylococcus aureus 150211/pool 1; identical to SEQ ID NO: 18619

SEQ ID NO: 20743 - DNA, 1452 bp, Staphylococcus aureus 16(11S1S4-09); identical to SEQ ID NO: 18653

SEQ ID NO: 20744 - DNA, 609 bp, Staphylococcus aureus 16(11S1S4-09); identical to SEQ ID NO: 18624

SEQ ID NO: 20745 - DNA, 927 bp, Staphylococcus aureus 16(11S1S4-09); identical to SEQ ID NO: 18619

SEQ ID NO: 20746 - DNA, 1452 bp, Staphylococcus aureus 18439-17; identical to SEQ ID NO: 18653

SEQ ID NO: 20747 - DNA, 609 bp, Staphylococcus aureus 18439-17; identical to SEQ ID NO: 18624

SEQ ID NO: 20748 - DNA, 927 bp, Staphylococcus aureus 18439-17; identical to SEQ ID NO: 18619

SEQ ID NO: 20749 - DNA, 1452 bp, Staphylococcus aureus 18439-62; identical to SEQ ID NO: 18653

SEQ ID NO: 20750 - DNA, 609 bp, Staphylococcus aureus 18439-62; identical to SEQ ID NO: 18624

SEQ ID NO: 20751 - DNA, 927 bp, Staphylococcus aureus 18439-62; identical to SEQ ID NO: 18619

SEQ ID NO: 20752 - DNA, 1452 bp, Staphylococcus aureus 19571; identical to SEQ ID NO: 18695

SEQ ID NO: 20753 - DNA, 609 bp, Staphylococcus aureus 19571; identical to SEQ ID NO: 18624

SEQ ID NO: 20754 - DNA, 927 bp, Staphylococcus aureus 19571; identical to SEQ ID NO: 18619

SEQ ID NO: 20755 - DNA, 1452 bp, Staphylococcus aureus 2(04HN_17-03-52-05); identical to SEQ ID NO: 18653

SEQ ID NO: 20756 - DNA, 609 bp, Staphylococcus aureus 2(04HN_17-03-52-05); identical to SEQ ID NO: 18624

SEQ ID NO: 20757 - DNA, 927 bp, Staphylococcus aureus 2(04HN_17-03-52-05); identical to SEQ ID NO: 18619

SEQ ID NO: 20758 - DNA, 1452 bp, Staphylococcus aureus 2009-60-561-1; identical to SEQ ID NO: 18653

SEQ ID NO: 20759 - DNA, 609 bp, Staphylococcus aureus 2009-60-561-1; identical to SEQ ID NO: 18624

SEQ ID NO: 20760 - DNA, 927 bp, Staphylococcus aureus 2009-60-561-1; identical to SEQ ID NO: 18619

SEQ ID NO: 20761 - DNA, 1452 bp, Staphylococcus aureus 2010-60-1240-1; identical to SEQ ID NO: 18653

SEQ ID NO: 20762 - DNA, 609 bp, Staphylococcus aureus 2010-60-1240-1; identical to SEQ ID NO: 18624

SEQ ID NO: 20763 - DNA, 927 bp, Staphylococcus aureus 2010-60-1240-1; identical to SEQ ID NO: 18619

SEQ ID NO: 20764 - DNA, 1452 bp, Staphylococcus aureus 2010-60-6063-29; identical to SEQ ID NO: 18695

SEQ ID NO: 20765 - DNA, 609 bp, Staphylococcus aureus 2010-60-6063-29; identical to SEQ ID NO: 18624

SEQ ID NO: 20766 - DNA, 927 bp, Staphylococcus aureus 2010-60-6063-29; identical to SEQ ID NO: 18619

SEQ ID NO: 20767 - DNA, 1452 bp, Staphylococcus aureus 2010-60-6063-39; identical to SEQ ID NO: 18653

SEQ ID NO: 20768 - DNA, 609 bp, Staphylococcus aureus 2010-60-6063-39; identical to SEQ ID NO: 18624

SEQ ID NO: 20769 - DNA, 927 bp, Staphylococcus aureus 2010-60-6063-39; identical to SEQ ID NO: 18619

SEQ ID NO: 20770 - DNA, 1128 bp, Staphylococcus aureus 2010-60-6511-39; identical to SEQ ID NO: 18617

SEQ ID NO: 20771 - DNA, 609 bp, Staphylococcus aureus 2010-60-6511-39; identical to SEQ ID NO: 18624

SEQ ID NO: 20772 - DNA, 927 bp, Staphylococcus aureus 2010-60-6511-39; identical to SEQ ID NO: 18619

SEQ ID NO: 20773 - DNA, 1452 bp, Staphylococcus aureus 2010-60-7626-19; identical to SEQ ID NO: 18695

SEQ ID NO: 20774 - DNA, 609 bp, Staphylococcus aureus 2010-60-7626-19; identical to SEQ ID NO: 18624

SEQ ID NO: 20775 - DNA, 927 bp, Staphylococcus aureus 2010-60-7626-19; identical to SEQ ID NO: 18619

SEQ ID NO: 20776 - DNA, 1452 bp, Staphylococcus aureus 2011-60-1490-31; identical to SEQ ID NO: 18653

SEQ ID NO: 20777 - DNA, 609 bp, Staphylococcus aureus 2011-60-1490-31; identical to SEQ ID NO: 18624

SEQ ID NO: 20778 - DNA, 927 bp, Staphylococcus aureus 2011-60-1490-31; identical to SEQ ID NO: 18619

SEQ ID NO: 20779 - DNA, 1452 bp, Staphylococcus aureus 2011-60-2078-5; identical to SEQ ID NO: 18653

SEQ ID NO: 20780 - DNA, 609 bp, Staphylococcus aureus 2011-60-2078-5; identical to SEQ ID NO: 18624

SEQ ID NO: 20781 - DNA, 927 bp, Staphylococcus aureus 2011-60-2078-5; identical to SEQ ID NO: 18619

SEQ ID NO: 20782 - DNA, 1452 bp, Staphylococcus aureus 2011-60-2256-5; identical to SEQ ID NO: 18695

SEQ ID NO: 20783 - DNA, 609 bp, Staphylococcus aureus 2011-60-2256-5; identical to SEQ ID NO: 18624

SEQ ID NO: 20784 - DNA, 927 bp, Staphylococcus aureus 2011-60-2256-5; identical to SEQ ID NO: 18619

SEQ ID NO: 20785 - DNA, 1452 bp, Staphylococcus aureus 2011-60-2275-1; identical to SEQ ID NO: 18653

SEQ ID NO: 20786 - DNA, 609 bp, Staphylococcus aureus 2011-60-2275-1; identical to SEQ ID NO: 18624

SEQ ID NO: 20787 - DNA, 927 bp, Staphylococcus aureus 2011-60-2275-1; identical to SEQ ID NO: 18619

SEQ ID NO: 20788 - DNA, 1452 bp, Staphylococcus aureus 22825; identical to SEQ ID NO: 18695

SEQ ID NO: 20789 - DNA, 609 bp, Staphylococcus aureus 22825; identical to SEQ ID NO: 18624

SEQ ID NO: 20790 - DNA, 927 bp, Staphylococcus aureus 22825; identical to SEQ ID NO: 18619

SEQ ID NO: 20791 - DNA, 1452 bp, Staphylococcus aureus 22835; identical to SEQ ID NO: 18695

SEQ ID NO: 20792 - DNA, 609 bp, Staphylococcus aureus 22835; identical to SEQ ID NO: 18624

SEQ ID NO: 20793 - DNA, 927 bp, Staphylococcus aureus 22835; identical to SEQ ID NO: 18619

SEQ ID NO: 20794 - DNA, 1452 bp, Staphylococcus aureus 22837; identical to SEQ ID NO: 18695

SEQ ID NO: 20795 - DNA, 609 bp, Staphylococcus aureus 22837; identical to SEQ ID NO: 18624

SEQ ID NO: 20796 - DNA, 927 bp, Staphylococcus aureus 22837; identical to SEQ ID NO: 18619

SEQ ID NO: 20797 - DNA, 1452 bp, Staphylococcus aureus 22838; identical to SEQ ID NO: 18695

SEQ ID NO: 20798 - DNA, 609 bp, Staphylococcus aureus 22838; identical to SEQ ID NO: 18624

SEQ ID NO: 20799 - DNA, 927 bp, Staphylococcus aureus 22838; identical to SEQ ID NO: 18619

SEQ ID NO: 20800 - DNA, 1452 bp, Staphylococcus aureus 22841; identical to SEQ ID NO: 18695

SEQ ID NO: 20801 - DNA, 609 bp, Staphylococcus aureus 22841; identical to SEQ ID NO: 18624

SEQ ID NO: 20802 - DNA, 927 bp, Staphylococcus aureus 22841; identical to SEQ ID NO: 18619

SEQ ID NO: 20803 - DNA, 1452 bp, Staphylococcus aureus 22843; identical to SEQ ID NO: 18695

SEQ ID NO: 20804 - DNA, 609 bp, Staphylococcus aureus 22843; identical to SEQ ID NO: 18624

SEQ ID NO: 20805 - DNA, 927 bp, Staphylococcus aureus 22843; identical to SEQ ID NO: 18619

SEQ ID NO: 20806 - DNA, 1452 bp, Staphylococcus aureus 22846; identical to SEQ ID NO: 18695

SEQ ID NO: 20807 - DNA, 609 bp, Staphylococcus aureus 22846; identical to SEQ ID NO: 18624

SEQ ID NO: 20808 - DNA, 927 bp, Staphylococcus aureus 22846; identical to SEQ ID NO: 18619

SEQ ID NO: 20809 - DNA, 1452 bp, Staphylococcus aureus 22P79; identical to SEQ ID NO: 18653

SEQ ID NO: 20810 - DNA, 609 bp, Staphylococcus aureus 22P79; identical to SEQ ID NO: 18624

SEQ ID NO: 20811 - DNA, 927 bp, Staphylococcus aureus 22P79; identical to SEQ ID NO: 18619

SEQ ID NO: 20812 - DNA, 1452 bp, Staphylococcus aureus 23237; identical to SEQ ID NO: 18695

SEQ ID NO: 20813 - DNA, 609 bp, Staphylococcus aureus 23237; identical to SEQ ID NO: 18624

SEQ ID NO: 20814 - DNA, 927 bp, Staphylococcus aureus 23237; identical to SEQ ID NO: 18619

SEQ ID NO: 20815 - DNA, 1452 bp, Staphylococcus aureus 2393-15; identical to SEQ ID NO: 18653

SEQ ID NO: 20816 - DNA, 609 bp, Staphylococcus aureus 2393-15; identical to SEQ ID NO: 18624

SEQ ID NO: 20817 - DNA, 927 bp, Staphylococcus aureus 2393-15; identical to SEQ ID NO: 18619

SEQ ID NO: 20818 - DNA, 1452 bp, Staphylococcus aureus 2393-19; identical to SEQ ID NO: 18653

SEQ ID NO: 20819 - DNA, 609 bp, Staphylococcus aureus 2393-19; identical to SEQ ID NO: 18624

SEQ ID NO: 20820 - DNA, 927 bp, Staphylococcus aureus 2393-19; identical to SEQ ID NO: 18619

SEQ ID NO: 20821 - DNA, 1452 bp, Staphylococcus aureus 25(2889); identical to SEQ ID NO: 18653

SEQ ID NO: 20822 - DNA, 609 bp, Staphylococcus aureus 25(2889); identical to SEQ ID NO: 18624

SEQ ID NO: 20823 - DNA, 927 bp, Staphylococcus aureus 25(2889); identical to SEQ ID NO: 18619

SEQ ID NO: 20824 - DNA, 1452 bp, Staphylococcus aureus 27999-3; identical to SEQ ID NO: 18653

SEQ ID NO: 20825 - DNA, 609 bp, Staphylococcus aureus 27999-3; identical to SEQ ID NO: 18624

SEQ ID NO: 20826 - DNA, 927 bp, Staphylococcus aureus 27999-3; identical to SEQ ID NO: 18619

SEQ ID NO: 20827 - DNA, 1452 bp, Staphylococcus aureus 36P1
atgactatagataagaaaaaattcattgaaaaatatgtaaaagctttagaaagtaatacagcggctatttttgctggagcaggattatcttgtggagcaggttatgttaattggaagacattgcttaatgaagcagcagaagaattagaattaaatatagataaagaagaacatgatcttgtaggattagcacaacattatattaataagaaaagaagtcgtggaaatctaaatacagtaataatggagcaattttcaacaagagcagaattaacagaaaatcataagcttttagcaaaacttcccattgatacatattggacaactaattatgattgtatgattgaaaaagctcttgattctgagggcagaattgtagatgtgaaaagaaatcaaaatcaattaactgtttcagtagccgataaggatgctacagtttataaaatgcatggggatatagacagtatagacaagattattttaactagagatgattatgaaaaatataatctaactcatccaaagtttcgtgaaatattggaaggagatttactttcaaaaacttttctattcataggttttagctttacagatctaaatattagttatatcttatcgagaataagattagtgttagaagacaatactagaccacattattgtattttaaaagaagtagaagaaaaggaatatgataatacagaagaatttatgtatgcaaagataaaacaacaacttcatatagaagatttaagccgattttcaatagaaactttattagttaaagattatattgaaatcacagaaatattagaaagtatttataaaagatatagaagaaaaacaatttttatatcaggaagtgctacagaatatttaccttttaattcagaaacagggaaatattttttacatcaactaagtaaaaaattagttgaaaatgattttaaattagttacaggttttggattaggagtaggatcatatgttattaatggagtagctgattatattaatagtaataagaagtctaaactacagaatcatttaaatatattgccattttctcaagattcaagtggcgatttagacttaaaagaagtatggaaaaaaaatcgcttggaaatgatttctgagtgtggaatggcattatttttatttggaaataaagaaaaggatggaaaaattgttttagctgatggattagaagaagaatataaaatagcagaaagacaagaattggttagactccctataaatgtgacaggttataaaacaaagaatctttcagaacaatataacgaagagataaatatacaatttaaagagaaaatattaaaaatgtataacgaaataaatgaatacaaatgtgatttttcaaataaacaaagtattgatgaattagttcaaaaaatagtaaatttagtaattgaaataaaaaaaacaaaataa

SEQ ID NO: 20828 - DNA, 609 bp, Staphylococcus aureus 36P1; identical to SEQ ID NO: 18624

SEQ ID NO: 20829 - DNA, 927 bp, Staphylococcus aureus 36P1; identical to SEQ ID NO: 18619

SEQ ID NO: 20830 - DNA, 1452 bp, Staphylococcus aureus 36P5; identical to SEQ ID NO: 20827

SEQ ID NO: 20831 - DNA, 609 bp, Staphylococcus aureus 36P5; identical to SEQ ID NO: 18624

SEQ ID NO: 20832 - DNA, 927 bp, Staphylococcus aureus 36P5; identical to SEQ ID NO: 18619

SEQ ID NO: 20833 - DNA, 1452 bp, Staphylococcus aureus 37(18S2S5-05); identical to SEQ ID NO: 18653

SEQ ID NO: 20834 - DNA, 609 bp, Staphylococcus aureus 37(18S2S5-05); identical to SEQ ID NO: 18624

SEQ ID NO: 20835 - DNA, 927 bp, Staphylococcus aureus 37(18S2S5-05); identical to SEQ ID NO: 18619

SEQ ID NO: 20836 - DNA, 1452 bp, Staphylococcus aureus 40P10; identical to SEQ ID NO: 18653

SEQ ID NO: 20837 - DNA, 609 bp, Staphylococcus aureus 40P10; identical to SEQ ID NO: 18624

SEQ ID NO: 20838 - DNA, 927 bp, Staphylococcus aureus 40P10; identical to SEQ ID NO: 18619

SEQ ID NO: 20839 - DNA, 1452 bp, Staphylococcus aureus 40P5 1_1; identical to SEQ ID NO: 18653

SEQ ID NO: 20840 - DNA, 609 bp, Staphylococcus aureus 40P5 1_1; identical to SEQ ID NO: 18624

SEQ ID NO: 20841 - DNA, 927 bp, Staphylococcus aureus 40P5 1_1; identical to SEQ ID NO: 18619

SEQ ID NO: 20842 - DNA, 1452 bp, Staphylococcus aureus 43P3; identical to SEQ ID NO: 18653

SEQ ID NO: 20843 - DNA, 609 bp, Staphylococcus aureus 43P3; identical to SEQ ID NO: 18624

SEQ ID NO: 20844 - DNA, 927 bp, Staphylococcus aureus 43P3; identical to SEQ ID NO: 18619

SEQ ID NO: 20845 - DNA, 1452 bp, Staphylococcus aureus 43P8; identical to SEQ ID NO: 18653

SEQ ID NO: 20846 - DNA, 609 bp, Staphylococcus aureus 43P8; identical to SEQ ID NO: 18624

SEQ ID NO: 20847 - DNA, 927 bp, Staphylococcus aureus 43P8; identical to SEQ ID NO: 18619

SEQ ID NO: 20848 - DNA, 1452 bp, Staphylococcus aureus 44(2608); identical to SEQ ID NO: 18653

SEQ ID NO: 20849 - DNA, 609 bp, Staphylococcus aureus 44(2608); identical to SEQ ID NO: 18624

SEQ ID NO: 20850 - DNA, 927 bp, Staphylococcus aureus 44(2608); identical to SEQ ID NO: 18619

SEQ ID NO: 20851 - DNA, 1452 bp, Staphylococcus aureus 47P5; identical to SEQ ID NO: 18653

SEQ ID NO: 20852 - DNA, 609 bp, Staphylococcus aureus 47P5; identical to SEQ ID NO: 18624

SEQ ID NO: 20853 - DNA, 927 bp, Staphylococcus aureus 47P5; identical to SEQ ID NO: 18619

SEQ ID NO: 20854 - DNA, 1452 bp, Staphylococcus aureus 47P9; identical to SEQ ID NO: 18653

SEQ ID NO: 20855 - DNA, 609 bp, Staphylococcus aureus 47P9; identical to SEQ ID NO: 18624

SEQ ID NO: 20856 - DNA, 927 bp, Staphylococcus aureus 47P9; identical to SEQ ID NO: 18619

SEQ ID NO: 20857 - DNA, 1452 bp, Staphylococcus aureus 5670-1; identical to SEQ ID NO: 18653

SEQ ID NO: 20858 - DNA, 609 bp, Staphylococcus aureus 5670-1; identical to SEQ ID NO: 18624

SEQ ID NO: 20859 - DNA, 927 bp, Staphylococcus aureus 5670-1; identical to SEQ ID NO: 18619

SEQ ID NO: 20860 - DNA, 1452 bp, Staphylococcus aureus 56824-10; identical to SEQ ID NO: 18695

SEQ ID NO: 20861 - DNA, 609 bp, Staphylococcus aureus 56824-10
ttggcgcgtaaaacatttatttcatataaatactctgaagcaaaagatttaagagataaaatagtggaatctctaggagaagatgctaaatattatcaaggagagacaagtgattctcctgatatgtccgatagaataacagagtatattaaaaaagaattaaaaaataagatatattcaacttcagtaacaattgtagttatttcacctaatatgaaagaaagtaattggattgattgggaaatagaatactcagttaaacaaatgaaaagaggagatcgaacatctagtactaatggtgttgtaggggttgttatgaagcataatggtgattattcatggttaagaaattctgttattaattcagatggtcataccgcaattcatactgacaatagttatttatatgacataatagtgaagaatagatttaatcaggaacctatagaatatacgtgtgatgaatgtaaaaatatagatgcattaacaggatcttttatttctttagtagaagaagatgaatttttgggtaatccaactaaatatatagaaaatgcatatgaaaaaagtaaaaaagcaacgaattataatatctgtagaagaaaataa

SEQ ID NO: 20862 - DNA, 927 bp, Staphylococcus aureus 56824-10; identical to SEQ ID NO: 18619

SEQ ID NO: 20863 - DNA, 1452 bp, Staphylococcus aureus 56824-15; identical to SEQ ID NO: 18653

SEQ ID NO: 20864 - DNA, 609 bp, Staphylococcus aureus 56824-15; identical to SEQ ID NO: 18624

SEQ ID NO: 20865 - DNA, 927 bp, Staphylococcus aureus 56824-15; identical to SEQ ID NO: 18619

SEQ ID NO: 20866 - DNA, 1452 bp, Staphylococcus aureus 56824-2; identical to SEQ ID NO: 18653

SEQ ID NO: 20867 - DNA, 609 bp, Staphylococcus aureus 56824-2; identical to SEQ ID NO: 18624

SEQ ID NO: 20868 - DNA, 927 bp, Staphylococcus aureus 56824-2; identical to SEQ ID NO: 18619

SEQ ID NO: 20869 - DNA, 1452 bp, Staphylococcus aureus 56824-21; identical to SEQ ID NO: 18653

SEQ ID NO: 20870 - DNA, 609 bp, Staphylococcus aureus 56824-21; identical to SEQ ID NO: 18624

SEQ ID NO: 20871 - DNA, 927 bp, Staphylococcus aureus 56824-21; identical to SEQ ID NO: 18619

SEQ ID NO: 20872 - DNA, 1452 bp, Staphylococcus aureus 56824-5; identical to SEQ ID NO: 18653

SEQ ID NO: 20873 - DNA, 609 bp, Staphylococcus aureus 56824-5; identical to SEQ ID NO: 18624

SEQ ID NO: 20874 - DNA, 927 bp, Staphylococcus aureus 56824-5; identical to SEQ ID NO: 18619

SEQ ID NO: 20875 - DNA, 1452 bp, Staphylococcus aureus 56824-7; identical to SEQ ID NO: 18695

SEQ ID NO: 20876 - DNA, 609 bp, Staphylococcus aureus 56824-7; identical to SEQ ID NO: 18624

SEQ ID NO: 20877 - DNA, 927 bp, Staphylococcus aureus 56824-7; identical to SEQ ID NO: 18619

SEQ ID NO: 20878 - DNA, 1482 bp, Staphylococcus aureus 6665-5
atgactatagataagaaaaaattcattgaaaaatatgtaaaagctttagaaagtaatacagcggctatttttgctggagcaggattatcttgtggagcaggttatgttaattggaagacattgcttaatgaagcagcagaagaattagaattaaatatagataaagaagaacatgatcttgtaggattagcacaacattatattaataagaaaagaagtcgtggaaatctaaatacagtaataatggagcaattttcaacaagagcagaattaacagaaaatcataagcttttagcaaaacttcccattgatacatattggacaactaattatgattgtatgattgaaaaagctcttgattctgagggcagaattgtagatgtgaaaagaaatcaaaatcaattaactgtttcagtagccgataaggatgctacagtttataaaatgcatggggatatagacagtatagacaagattattttaactagagatgattatgaaaaatataatctaactcatccaaagtttcgtgaaatattggaaggagatttactttcaaaaacttttctattcataggttttagctttacagatccaaatattagttatatcttatcgagaataagattagtgttagaagacaatactagaccacattattgtattttaaaagaagtagaagaaaaggaatatgataatacagaagaatttatgtatgcaaagataaaacaacaacttcatatagaagatttaagccgattttcaatagaaactttattagttaaagattatattgaaatcacagaaatattagaaagtatttataaaagatatagaagaaaaacaatttttatatcaggaagtgctacagaatatttaccttttaattcagaaacagggaaatattttttacatcaactaagtaaaaaattagttgaaaatgattttaaattagttacaggttttggattaggagtaggatcatatgttattaatggagtagctgattatattaatagtaataagaagtctaaactacagaatcatttaaatatattgccattttctcaagattcaagtggcgatttagacttaaaagaagtatggaaaaaaaatcgcttggaaatgatttctgagtgtggaatggcattatttttatttggaaataaagaaaaggatggaaaaattgttttagctgatggattagaagaagaatataaaatagcagaaagacaagaattggttagactccctataaatgtgacaggttataaaacaaagaatctttcagaacaatataacgaagagataaatatacaatttaaagagaaaatattaaaaatgtataacgaaataaatgaatacaaatgtgatttttcaaataaacaaagtattgatgaattagttcaaaaaatagtaaatttagtaattgaaataaaaaaacaaaataattcatggggttttaatgctttagaaagatag

SEQ ID NO: 20879 - DNA, 609 bp, Staphylococcus aureus 6665-5; identical to SEQ ID NO: 18624

SEQ ID NO: 20880 - DNA, 927 bp, Staphylococcus aureus 6665-5; identical to SEQ ID NO: 18619

SEQ ID NO: 20881 - DNA, 1452 bp, Staphylococcus aureus 75495-3; identical to SEQ ID NO: 18653

SEQ ID NO: 20882 - DNA, 609 bp, Staphylococcus aureus 75495-3; identical to SEQ ID NO: 18624

SEQ ID NO: 20883 - DNA, 927 bp, Staphylococcus aureus 75495-3; identical to SEQ ID NO: 18619

SEQ ID NO: 20884 - DNA, 1452 bp, Staphylococcus aureus 76669-6; identical to SEQ ID NO: 18653

SEQ ID NO: 20885 - DNA, 609 bp, Staphylococcus aureus 76669-6; identical to SEQ ID NO: 18624

SEQ ID NO: 20886 - DNA, 927 bp, Staphylococcus aureus 76669-6; identical to SEQ ID NO: 18619

SEQ ID NO: 20887 - DNA, 1452 bp, Staphylococcus aureus 81070; identical to SEQ ID NO: 18695

SEQ ID NO: 20888 - DNA, 609 bp, Staphylococcus aureus 81070; identical to SEQ ID NO: 18624

SEQ ID NO: 20889 - DNA, 927 bp, Staphylococcus aureus 81070; identical to SEQ ID NO: 18619

SEQ ID NO: 20890 - DNA, 1452 bp, Staphylococcus aureus 84069-2; identical to SEQ ID NO: 18653

SEQ ID NO: 20891 - DNA, 609 bp, Staphylococcus aureus 84069-2; identical to SEQ ID NO: 18624

SEQ ID NO: 20892 - DNA, 927 bp, Staphylococcus aureus 84069-2; identical to SEQ ID NO: 18619

SEQ ID NO: 20893 - DNA, 1452 bp, Staphylococcus aureus 86770-7; identical to SEQ ID NO: 18653

SEQ ID NO: 20894 - DNA, 609 bp, Staphylococcus aureus 86770-7; identical to SEQ ID NO: 18624

SEQ ID NO: 20895 - DNA, 927 bp, Staphylococcus aureus 86770-7; identical to SEQ ID NO: 18619

SEQ ID NO: 20896 - DNA, 1452 bp, Staphylococcus aureus 87807-1; identical to SEQ ID NO: 18653

SEQ ID NO: 20897 - DNA, 609 bp, Staphylococcus aureus 87807-1; identical to SEQ ID NO: 18624

SEQ ID NO: 20898 - DNA, 927 bp, Staphylococcus aureus 87807-1; identical to SEQ ID NO: 18619

SEQ ID NO: 20899 - DNA, 1452 bp, Staphylococcus aureus 87807-11; identical to SEQ ID NO: 18653

SEQ ID NO: 20900 - DNA, 609 bp, Staphylococcus aureus 87807-11; identical to SEQ ID NO: 18624

SEQ ID NO: 20901 - DNA, 927 bp, Staphylococcus aureus 87807-11; identical to SEQ ID NO: 18619

SEQ ID NO: 20902 - DNA, 1452 bp, Staphylococcus aureus 87807-12; identical to SEQ ID NO: 18653

SEQ ID NO: 20903 - DNA, 609 bp, Staphylococcus aureus 87807-12; identical to SEQ ID NO: 18624

SEQ ID NO: 20904 - DNA, 927 bp, Staphylococcus aureus 87807-12; identical to SEQ ID NO: 18619

SEQ ID NO: 20905 - DNA, 1452 bp, Staphylococcus aureus 87807-16; identical to SEQ ID NO: 18653

SEQ ID NO: 20906 - DNA, 609 bp, Staphylococcus aureus 87807-16; identical to SEQ ID NO: 18624

SEQ ID NO: 20907 - DNA, 927 bp, Staphylococcus aureus 87807-16; identical to SEQ ID NO: 18619

SEQ ID NO: 20908 - DNA, 1452 bp, Staphylococcus aureus 87807-9
atgactatagataagaaaaaattcattgaaaaatatgtaaaagctttagaaagtaatacagcggctatttttgctggagcaggattatcttgtggagcaggttatgttaattggaagacattgcttaatgaagcagcagaagaattagaattaaatatagataaagaagaacatgatcttgtaggattagcacaacattatattaataagaaaagaagtcgtggaaatctaaatacagtaataatggagcaattttcaacaagagcagaattaacagaaaatcataagcttttagcaaaacttcccattgatacatattggacaactaattatgattgtatgattgaaaaagctcttgattctgagggcagaattgtagatgtgaaaagaaatcaaaatcaattaactgtttcagtagccgataaggatgctacagtttataaaatgcatggggatatagacagtatagacaagattattttaactagagatgattatgaaaaatataatctaactcatccaaagtttcgtgaaatattggaaggagatttactttcaaaaacttttctattcatagcttttagctttacagatccaaatattagttatatcttatcgagaataagattagtgttagaagacaatactagaccacattattgtattttaaaagaagtagaagaaaaggaatatgataatacagaagaatttatgtatgcaaagataaaacaacaacttcatatagaagatttaagccgattttcaatagaaactttattagttaaagattatattgaaatcacagaaatattagaaagtatttataaaagatatagaagaaaaacaatttttatatcaggaagtgctacagaatatttaccttttaattcagaaacagggaaatattttttacatcaactaagtaaaaaattagttgaaaatgattttaaattagttacaggttttggattaggagtaggatcatatgttattaatggagtagctgattatattaatagtaataagaagtctaaactacagaatcatttaaatatattgccattttctcaagattcaagtggcgatttagacttaaaagaagtatggaaaaaaaatcgcttggaaatgatttctgagtgtggaatggcattatttttatttggaaataaagaaaaggatggaaaaattgttttagctgatggattagaagaagaatataaaatagcagaaagacaagaattggttagactccctataaatgtgacaggttataaaacaaagaatctttcagaacaatataacgaagagataaatatacaatttaaagagaaaatattaaaaatgtataacgaaataaatgaatacaaatgtgatttttcaaataaacaaagtattgatgaattagttcaaaaaatagtaaatttagtaattgaaataaaaaaaacaaaataa

SEQ ID NO: 20909 - DNA, 609 bp, Staphylococcus aureus 87807-9; identical to SEQ ID NO: 18624

SEQ ID NO: 20910 - DNA, 927 bp, Staphylococcus aureus 87807-9; identical to SEQ ID NO: 18619

SEQ ID NO: 20911 - DNA, 1452 bp, Staphylococcus aureus 88088-1; identical to SEQ ID NO: 18653

SEQ ID NO: 20912 - DNA, 609 bp, Staphylococcus aureus 88088-1; identical to SEQ ID NO: 18624

SEQ ID NO: 20913 - DNA, 927 bp, Staphylococcus aureus 88088-1; identical to SEQ ID NO: 18619

SEQ ID NO: 20914 - DNA, 1452 bp, Staphylococcus aureus 88088-2; identical to SEQ ID NO: 18653

SEQ ID NO: 20915 - DNA, 609 bp, Staphylococcus aureus 88088-2; identical to SEQ ID NO: 18624

SEQ ID NO: 20916 - DNA, 927 bp, Staphylococcus aureus 88088-2; identical to SEQ ID NO: 18619

SEQ ID NO: 20917 - DNA, 1452 bp, Staphylococcus aureus 9P9; identical to SEQ ID NO: 18653

SEQ ID NO: 20918 - DNA, 609 bp, Staphylococcus aureus 9P9; identical to SEQ ID NO: 18624

SEQ ID NO: 20919 - DNA, 927 bp, Staphylococcus aureus 9P9; identical to SEQ ID NO: 18619

SEQ ID NO: 20920 - DNA, 1452 bp, Staphylococcus aureus BG407; identical to SEQ ID NO: 18653

SEQ ID NO: 20921 - DNA, 609 bp, Staphylococcus aureus BG407; identical to SEQ ID NO: 18624

SEQ ID NO: 20922 - DNA, 927 bp, Staphylococcus aureus BG407; identical to SEQ ID NO: 18619

SEQ ID NO: 20923 - DNA, 1452 bp, Staphylococcus aureus C0637; identical to SEQ ID NO: 18653

SEQ ID NO: 20924 - DNA, 609 bp, Staphylococcus aureus C0637; identical to SEQ ID NO: 18624

SEQ ID NO: 20925 - DNA, 927 bp, Staphylococcus aureus C0637; identical to SEQ ID NO: 20335

SEQ ID NO: 20926 - DNA, 1452 bp, Staphylococcus aureus C1655; identical to SEQ ID NO: 18653

SEQ ID NO: 20927 - DNA, 609 bp, Staphylococcus aureus C1655; identical to SEQ ID NO: 18624

SEQ ID NO: 20928 - DNA, 927 bp, Staphylococcus aureus C1655; identical to SEQ ID NO: 18619

SEQ ID NO: 20929 - DNA, 1452 bp, Staphylococcus aureus C1673; identical to SEQ ID NO: 18653

SEQ ID NO: 20930 - DNA, 609 bp, Staphylococcus aureus C1673; identical to SEQ ID NO: 18624

SEQ ID NO: 20931 - DNA, 927 bp, Staphylococcus aureus C1673; identical to SEQ ID NO: 18619

SEQ ID NO: 20932 - DNA, 1452 bp, Staphylococcus aureus C1842; identical to SEQ ID NO: 18653

SEQ ID NO: 20933 - DNA, 609 bp, Staphylococcus aureus C1842; identical to SEQ ID NO: 18624

SEQ ID NO: 20934 - DNA, 927 bp, Staphylococcus aureus C1842; identical to SEQ ID NO: 18619

SEQ ID NO: 20935 - DNA, 1452 bp, Staphylococcus aureus C1891; identical to SEQ ID NO: 18653

SEQ ID NO: 20936 - DNA, 609 bp, Staphylococcus aureus C1891; identical to SEQ ID NO: 18624

SEQ ID NO: 20937 - DNA, 927 bp, Staphylococcus aureus C1891; identical to SEQ ID NO: 18619

SEQ ID NO: 20938 - DNA, 1452 bp, Staphylococcus aureus C1894; identical to SEQ ID NO: 18653

SEQ ID NO: 20939 - DNA, 609 bp, Staphylococcus aureus C1894; identical to SEQ ID NO: 18624

SEQ ID NO: 20940 - DNA, 927 bp, Staphylococcus aureus C1894; identical to SEQ ID NO: 18619

SEQ ID NO: 20941 - DNA, 1128 bp, Staphylococcus aureus C2549; identical to SEQ ID NO: 18617

SEQ ID NO: 20942 - DNA, 609 bp, Staphylococcus aureus C2549; identical to SEQ ID NO: 18618

SEQ ID NO: 20943 - DNA, 927 bp, Staphylococcus aureus C2549; identical to SEQ ID NO: 18619

SEQ ID NO: 20944 - DNA, 1128 bp, Staphylococcus aureus C2679; identical to SEQ ID NO: 18617

SEQ ID NO: 20945 - DNA, 609 bp, Staphylococcus aureus C2679; identical to SEQ ID NO: 18618

SEQ ID NO: 20946 - DNA, 927 bp, Staphylococcus aureus C2679; identical to SEQ ID NO: 18619

SEQ ID NO: 20947 - DNA, 1128 bp, Staphylococcus aureus C2706; identical to SEQ ID NO: 18617

SEQ ID NO: 20948 - DNA, 609 bp, Staphylococcus aureus C2706; identical to SEQ ID NO: 18624

SEQ ID NO: 20949 - DNA, 927 bp, Staphylococcus aureus C2706; identical to SEQ ID NO: 18619

SEQ ID NO: 20950 - DNA, 1452 bp, Staphylococcus aureus C2928; identical to SEQ ID NO: 18653

SEQ ID NO: 20951 - DNA, 609 bp, Staphylococcus aureus C2928; identical to SEQ ID NO: 18624

SEQ ID NO: 20952 - DNA, 927 bp, Staphylococcus aureus C2928; identical to SEQ ID NO: 18619

SEQ ID NO: 20953 - DNA, 1482 bp, Staphylococcus aureus C2930; identical to SEQ ID NO: 20878

SEQ ID NO: 20954 - DNA, 609 bp, Staphylococcus aureus C2930; identical to SEQ ID NO: 18624

SEQ ID NO: 20955 - DNA, 927 bp, Staphylococcus aureus C2930; identical to SEQ ID NO: 18619

SEQ ID NO: 20956 - DNA, 1482 bp, Staphylococcus aureus C2942; identical to SEQ ID NO: 20878

SEQ ID NO: 20957 - DNA, 609 bp, Staphylococcus aureus C2942
ttggcgcgtaaaacatttatttcatataaatactctgaagcaaaagatttaagagataaaatagtggaatctctaggagaagatgctaaatattatcaaggagagacaagtgattctcctgatatgtccgatagaataacagagtatattaaaaaagaattaaaaaataagatatattcaacttcagtaacaattgtagttatttcacctaatatgaaagaaagtaattggattgattgggaaatagaatactcagttaaacaaatgaaaagaggagatagaacatctagtactaatggtattgtaggggttgttatgaagcataatggtgattattcatggttaagaaattctgttattaattcagatggtcataccgcaattcatactgacaatagttatttatatgacataatagtgaagaatagatttaatcaggaacctatagaatatacgtgtgatgaatgtaaaaatatagatgcattaacaggatcttttatttctttagtagaagaagatgaatttttgggtaatccaactaaatatatagaaaatgcatatgaaaaaagtaaaaaagcaacgaattataatatctgtagaagaaaataa

SEQ ID NO: 20958 - DNA, 927 bp, Staphylococcus aureus C2942; identical to SEQ ID NO: 18619

SEQ ID NO: 20959 - DNA, 1452 bp, Staphylococcus aureus C3489; identical to SEQ ID NO: 18653

SEQ ID NO: 20960 - DNA, 609 bp, Staphylococcus aureus C3489; identical to SEQ ID NO: 18624

SEQ ID NO: 20961 - DNA, 219 bp, Staphylococcus aureus C3489; identical to SEQ ID NO: 20077

SEQ ID NO: 20962 - DNA, 1452 bp, Staphylococcus aureus C3672; identical to SEQ ID NO: 18653

SEQ ID NO: 20963 - DNA, 609 bp, Staphylococcus aureus C3672; identical to SEQ ID NO: 18624

SEQ ID NO: 20964 - DNA, 927 bp, Staphylococcus aureus C3672; identical to SEQ ID NO: 18619

SEQ ID NO: 20965 - DNA, 1452 bp, Staphylococcus aureus C3865; identical to SEQ ID NO: 18653

SEQ ID NO: 20966 - DNA, 609 bp, Staphylococcus aureus C3865; identical to SEQ ID NO: 18624

SEQ ID NO: 20967 - DNA, 927 bp, Staphylococcus aureus C3865; identical to SEQ ID NO: 18619

SEQ ID NO: 20968 - DNA, 1128 bp, Staphylococcus aureus C3965; identical to SEQ ID NO: 18617

SEQ ID NO: 20969 - DNA, 609 bp, Staphylococcus aureus C3965; identical to SEQ ID NO: 18618

SEQ ID NO: 20970 - DNA, 927 bp, Staphylococcus aureus C3965; identical to SEQ ID NO: 18619

SEQ ID NO: 20971 - DNA, 1452 bp, Staphylococcus aureus C4151; identical to SEQ ID NO: 18653

SEQ ID NO: 20972 - DNA, 609 bp, Staphylococcus aureus C4151; identical to SEQ ID NO: 18624

SEQ ID NO: 20973 - DNA, 927 bp, Staphylococcus aureus C4151; identical to SEQ ID NO: 18619

SEQ ID NO: 20974 - DNA, 1452 bp, Staphylococcus aureus C4155; identical to SEQ ID NO: 18695

SEQ ID NO: 20975 - DNA, 609 bp, Staphylococcus aureus C4155; identical to SEQ ID NO: 18624

SEQ ID NO: 20976 - DNA, 927 bp, Staphylococcus aureus C4155; identical to SEQ ID NO: 18619

SEQ ID NO: 20977 - DNA, 1452 bp, Staphylococcus aureus C4668; identical to SEQ ID NO: 18653

SEQ ID NO: 20978 - DNA, 609 bp, Staphylococcus aureus C4668; identical to SEQ ID NO: 18624

SEQ ID NO: 20979 - DNA, 927 bp, Staphylococcus aureus C4668; identical to SEQ ID NO: 18619

SEQ ID NO: 20980 - DNA, 1128 bp, Staphylococcus aureus C5086; identical to SEQ ID NO: 18617

SEQ ID NO: 20981 - DNA, 609 bp, Staphylococcus aureus C5086; identical to SEQ ID NO: 18618

SEQ ID NO: 20982 - DNA, 927 bp, Staphylococcus aureus C5086; identical to SEQ ID NO: 18619

SEQ ID NO: 20983 - DNA, 1452 bp, Staphylococcus aureus C5453; identical to SEQ ID NO: 18653

SEQ ID NO: 20984 - DNA, 609 bp, Staphylococcus aureus C5453; identical to SEQ ID NO: 18624

SEQ ID NO: 20985 - DNA, 927 bp, Staphylococcus aureus C5453; identical to SEQ ID NO: 18619

SEQ ID NO: 20986 - DNA, 1452 bp, Staphylococcus aureus Chi-10; identical to SEQ ID NO: 18653

SEQ ID NO: 20987 - DNA, 609 bp, Staphylococcus aureus Chi-10; identical to SEQ ID NO: 18624

SEQ ID NO: 20988 - DNA, 927 bp, Staphylococcus aureus Chi-10; identical to SEQ ID NO: 18619

SEQ ID NO: 20989 - DNA, 1452 bp, Staphylococcus aureus Chi-4; identical to SEQ ID NO: 18653

SEQ ID NO: 20990 - DNA, 609 bp, Staphylococcus aureus Chi-4; identical to SEQ ID NO: 18624

SEQ ID NO: 20991 - DNA, 927 bp, Staphylococcus aureus Chi-4; identical to SEQ ID NO: 18619

SEQ ID NO: 20992 - DNA, 1452 bp, Staphylococcus aureus Chi-8; identical to SEQ ID NO: 18653

SEQ ID NO: 20993 - DNA, 609 bp, Staphylococcus aureus Chi-8; identical to SEQ ID NO: 18624

SEQ ID NO: 20994 - DNA, 927 bp, Staphylococcus aureus Chi-8; identical to SEQ ID NO: 18619

SEQ ID NO: 20995 - DNA, 1452 bp, Staphylococcus aureus DICM09/00997-9HST2; identical to SEQ ID NO: 18653

SEQ ID NO: 20996 - DNA, 609 bp, Staphylococcus aureus DICM09/00997-9HST2; identical to SEQ ID NO: 18624

SEQ ID NO: 20997 - DNA, 927 bp, Staphylococcus aureus DICM09/00997-9HST2; identical to SEQ ID NO: 18619

SEQ ID NO: 20998 - DNA, 1452 bp, Staphylococcus aureus DICM09/01587-13HST; identical to SEQ ID NO: 18653

SEQ ID NO: 20999 - DNA, 609 bp, Staphylococcus aureus DICM09/01587-13HST; identical to SEQ ID NO: 18624

SEQ ID NO: 21000 - DNA, 927 bp, Staphylococcus aureus DICM09/01587-13HST; identical to SEQ ID NO: 18619

SEQ ID NO: 21001 - DNA, 1452 bp, Staphylococcus aureus FP_N239; identical to SEQ ID NO: 18695

SEQ ID NO: 21002 - DNA, 609 bp, Staphylococcus aureus FP_N239; identical to SEQ ID NO: 18624

SEQ ID NO: 21003 - DNA, 927 bp, Staphylococcus aureus FP_N239; identical to SEQ ID NO: 18619

SEQ ID NO: 21004 - DNA, 1452 bp, Staphylococcus aureus FP_N5203 OX; identical to SEQ ID NO: 18653

SEQ ID NO: 21005 - DNA, 609 bp, Staphylococcus aureus FP_N5203 OX; identical to SEQ ID NO: 18624

SEQ ID NO: 21006 - DNA, 927 bp, Staphylococcus aureus FP_N5203 OX; identical to SEQ ID NO: 18619

SEQ ID NO: 21007 - DNA, 1452 bp, Staphylococcus aureus FP_N5208 OX; identical to SEQ ID NO: 18653

SEQ ID NO: 21008 - DNA, 609 bp, Staphylococcus aureus FP_N5208 OX; identical to SEQ ID NO: 18624

SEQ ID NO: 21009 - DNA, 927 bp, Staphylococcus aureus FP_N5208 OX; identical to SEQ ID NO: 18619

SEQ ID NO: 21010 - DNA, 1452 bp, Staphylococcus aureus GD2010-052; identical to SEQ ID NO: 18653

SEQ ID NO: 21011 - DNA, 609 bp, Staphylococcus aureus GD2010-052; identical to SEQ ID NO: 18624

SEQ ID NO: 21012 - DNA, 927 bp, Staphylococcus aureus GD2010-052; identical to SEQ ID NO: 18619

SEQ ID NO: 21013 - DNA, 1452 bp, Staphylococcus aureus GD2010-061; identical to SEQ ID NO: 18653

SEQ ID NO: 21014 - DNA, 609 bp, Staphylococcus aureus GD2010-061; identical to SEQ ID NO: 18624

SEQ ID NO: 21015 - DNA, 927 bp, Staphylococcus aureus GD2010-061; identical to SEQ ID NO: 18619

SEQ ID NO: 21016 - DNA, 1452 bp, Staphylococcus aureus GD2010-090; identical to SEQ ID NO: 18653

SEQ ID NO: 21017 - DNA, 609 bp, Staphylococcus aureus GD2010-090; identical to SEQ ID NO: 18624

SEQ ID NO: 21018 - DNA, 927 bp, Staphylococcus aureus GD2010-090; identical to SEQ ID NO: 18619

SEQ ID NO: 21019 - DNA, 309 bp, Staphylococcus aureus GD2010-102
atggcattatttttatttggaaataaagaaaaggatggaaaaattgttttagctgatggattagaagaagaatataaaatagcagaaagacaagaattggttagactccctataaatgtgacaggttataaaacaaagaatctttcagaacaatataacgaagagataaatatacaatttaaagagaaaatattaaaaatgtataacgaaataaatgaatacaaatgtgatttttcaaataaacaaagtattgatgaattagttcaaaaaatagtaaatttagtaattgaaataaaaaaaacaaaataa

SEQ ID NO: 21020 - DNA, 609 bp, Staphylococcus aureus GD2010-102; identical to SEQ ID NO: 18624

SEQ ID NO: 21021 - DNA, 927 bp, Staphylococcus aureus GD2010-102; identical to SEQ ID NO: 18619

SEQ ID NO: 21022 - DNA, 1452 bp, Staphylococcus aureus GD2010-107; identical to SEQ ID NO: 18653

SEQ ID NO: 21023 - DNA, 609 bp, Staphylococcus aureus GD2010-107; identical to SEQ ID NO: 18624

SEQ ID NO: 21024 - DNA, 927 bp, Staphylococcus aureus GD2010-107; identical to SEQ ID NO: 18619

SEQ ID NO: 21025 - DNA, 1452 bp, Staphylococcus aureus GD2010-110; identical to SEQ ID NO: 18653

SEQ ID NO: 21026 - DNA, 609 bp, Staphylococcus aureus GD2010-110; identical to SEQ ID NO: 18624

SEQ ID NO: 21027 - DNA, 927 bp, Staphylococcus aureus GD2010-110; identical to SEQ ID NO: 18619

SEQ ID NO: 21028 - DNA, 1452 bp, Staphylococcus aureus GD2010-112; identical to SEQ ID NO: 18653

SEQ ID NO: 21029 - DNA, 609 bp, Staphylococcus aureus GD2010-112; identical to SEQ ID NO: 18624

SEQ ID NO: 21030 - DNA, 927 bp, Staphylococcus aureus GD2010-112; identical to SEQ ID NO: 18619

SEQ ID NO: 21031 - DNA, 1452 bp, Staphylococcus aureus GD2010-115; identical to SEQ ID NO: 18653

SEQ ID NO: 21032 - DNA, 609 bp, Staphylococcus aureus GD2010-115; identical to SEQ ID NO: 18624

SEQ ID NO: 21033 - DNA, 927 bp, Staphylococcus aureus GD2010-115; identical to SEQ ID NO: 18619

SEQ ID NO: 21034 - DNA, 1452 bp, Staphylococcus aureus GD2010-131; identical to SEQ ID NO: 18653

SEQ ID NO: 21035 - DNA, 609 bp, Staphylococcus aureus GD2010-131; identical to SEQ ID NO: 18624

SEQ ID NO: 21036 - DNA, 927 bp, Staphylococcus aureus GD2010-131; identical to SEQ ID NO: 18619

SEQ ID NO: 21037 - DNA, 1452 bp, Staphylococcus aureus GD2010-147; identical to SEQ ID NO: 18653

SEQ ID NO: 21038 - DNA, 609 bp, Staphylococcus aureus GD2010-147; identical to SEQ ID NO: 18624

SEQ ID NO: 21039 - DNA, 888 bp, Staphylococcus aureus GD2010-147
gtggaaagacaacaaacttacaaagaaaaagcgcaacacctatataaagttaaaaaaatcaaaaatagatataatacgaaaagtgcagaagaatattttttctcgattcctcaagtaaaatacattctttcagcaggaagaatgaaaaaacataaagagaattataatgcttcagagataaaaataaaaaaagcagctttagaaaagagtaggaagaataagaattggaaaattgaagaacgtttaataaaagctaagagatatactcaaaaagttgatccagaatacttaaatatttatatgaaagcttatcataagaaagatataactacagaagaaaaactagaaattctaacggaattaaaaaaatttgatacagaaaatatagtgcgtttttttagaaaattaaatgatgctgaacaaaataaaatgattagaaatttagcctttaaatatttacaagattacggtcactatgtgaaactaaggaaaaattttaaaggaaagaagaaagtatatcaaactgagagagcttctttagacactaaaaaacctgaagatttatataatgatttaacaaataagaatattcaatctcaaaaagtctatgatatttttatttctcatagtacaaaagataagaagacagttgaagatattataagagtttttaatgaacaaaataaaacgtgttattgtgattggactatggatcaagattatttaaaaaggaagtatgttggtgaatatacaaagcaagtattgaaggctcgtatggagcaaagtaaaatgctggttttgttgagaacggagaattcagttcaatctgattgggttagttttgaaatagaatactttgaaaatctaaaaaaacctatatatatatag

SEQ ID NO: 21040 - DNA, 1452 bp, Staphylococcus aureus GD2010-155; identical to SEQ ID NO: 18653

SEQ ID NO: 21041 - DNA, 609 bp, Staphylococcus aureus GD2010-155; identical to SEQ ID NO: 18624

SEQ ID NO: 21042 - DNA, 927 bp, Staphylococcus aureus GD2010-155; identical to SEQ ID NO: 18619

SEQ ID NO: 21043 - DNA, 1452 bp, Staphylococcus aureus GD2010-158; identical to SEQ ID NO: 18653

SEQ ID NO: 21044 - DNA, 609 bp, Staphylococcus aureus GD2010-158; identical to SEQ ID NO: 18624

SEQ ID NO: 21045 - DNA, 927 bp, Staphylococcus aureus GD2010-158; identical to SEQ ID NO: 18619

SEQ ID NO: 21046 - DNA, 1452 bp, Staphylococcus aureus GD2010-168; identical to SEQ ID NO: 18653

SEQ ID NO: 21047 - DNA, 609 bp, Staphylococcus aureus GD2010-168; identical to SEQ ID NO: 18624

SEQ ID NO: 21048 - DNA, 927 bp, Staphylococcus aureus GD2010-168; identical to SEQ ID NO: 18619

SEQ ID NO: 21049 - DNA, 396 bp, Staphylococcus aureus GD2010-177; identical to SEQ ID NO: 20102

SEQ ID NO: 21050 - DNA, 609 bp, Staphylococcus aureus GD2010-177; identical to SEQ ID NO: 18624

SEQ ID NO: 21051 - DNA, 927 bp, Staphylococcus aureus GD2010-177; identical to SEQ ID NO: 18619

SEQ ID NO: 21052 - DNA, 1452 bp, Staphylococcus aureus M118-B; identical to SEQ ID NO: 18695

SEQ ID NO: 21053 - DNA, 609 bp, Staphylococcus aureus M118-B; identical to SEQ ID NO: 18624

SEQ ID NO: 21054 - DNA, 927 bp, Staphylococcus aureus M118-B; identical to SEQ ID NO: 18619

SEQ ID NO: 21055 - DNA, 1452 bp, Staphylococcus aureus M267-1; identical to SEQ ID NO: 18695

SEQ ID NO: 21056 - DNA, 609 bp, Staphylococcus aureus M267-1; identical to SEQ ID NO: 18624

SEQ ID NO: 21057 - DNA, 927 bp, Staphylococcus aureus M267-1; identical to SEQ ID NO: 18619

SEQ ID NO: 21058 - DNA, 1452 bp, Staphylococcus aureus M357; identical to SEQ ID NO: 18695

SEQ ID NO: 21059 - DNA, 609 bp, Staphylococcus aureus M357; identical to SEQ ID NO: 18624

SEQ ID NO: 21060 - DNA, 927 bp, Staphylococcus aureus M357; identical to SEQ ID NO: 18619

SEQ ID NO: 21061 - DNA, 1452 bp, Staphylococcus aureus M457-1; identical to SEQ ID NO: 18695

SEQ ID NO: 21062 - DNA, 609 bp, Staphylococcus aureus M457-1; identical to SEQ ID NO: 18624

SEQ ID NO: 21063 - DNA, 927 bp, Staphylococcus aureus M457-1; identical to SEQ ID NO: 18619

SEQ ID NO: 21064 - DNA, 1452 bp, Staphylococcus aureus M520-1; identical to SEQ ID NO: 18653

SEQ ID NO: 21065 - DNA, 609 bp, Staphylococcus aureus M520-1; identical to SEQ ID NO: 18624

SEQ ID NO: 21066 - DNA, 927 bp, Staphylococcus aureus M520-1; identical to SEQ ID NO: 18619

SEQ ID NO: 21067 - DNA, 1452 bp, Staphylococcus aureus MRSA-118; identical to SEQ ID NO: 18653

SEQ ID NO: 21068 - DNA, 609 bp, Staphylococcus aureus MRSA-118; identical to SEQ ID NO: 18624

SEQ ID NO: 21069 - DNA, 927 bp, Staphylococcus aureus MRSA-118; identical to SEQ ID NO: 18619

SEQ ID NO: 21070 - DNA, 1452 bp, Staphylococcus aureus MRSA-136
atgactatagataagaaaaaattcattgaaaaatatgtaaaagctttagaaagtaatacagcggctatttttgctggagcaggattatcttgtggagcaggttatgttaattggaagacattgcttaatgaagcagcagaagaattagaattaaatatagataaagaagaacatgatcttgtaggattagcacaacattatattaataagaaaagaagtcgtggaaatctaaatacagtaataatggagcaattttcaacaagagcagaattaacagaaaatcataagcttttagcaaaacttcccattgatacatattggacaactaattatgattgtatgattgaaaaagctcttgattctgagggcagaattgtagatgtgaaaagaaatcaaaatcaattaactgtttcagtagccgataaggatgctacagtttataaaatgcatggggatatagacagtatagacaagattattttaactagagatgattatgaaaaatataatctaactcatccaaagtttcgtgaaatattggaaggagatttactttcaaaaacttttctattcataggttttagctttacagatccaaatattagttatatcttatcgagaataagattagtgttagaagacaatactagaccacattattgtattttaaaagaagtagaagaaaaggaatatgataatacagaagaatttatgtatgcaaagataaaacaacaacttcatatagaagatttaagccgattttcaatagaaactttattagttaaagattatattgaaatcacagaaatattagaaagtatttataaaagatatagaagaaaaacaatttttatatcaggaagtgctacagaatatttaccttttaattcagaaacagggaaatattttttacatcaactaagtaaaaaattagttgaaaatgattttaaattagttacaggttttggattaggagtaggatcatgtgttattaatggagtagctgattatattaatagtaataagaagtctaaactacagaatcatttaaatatattgccattttctcaagattcaagtggcgatttagacttaaaagaagtatggaaaaaaaatcgcttggaaatgatttctgagtgtggaatggcattatttttatttggaaataaagaaaaggatggaaaaattgttttagctgatggattagaagaagaatataaaatagcagaaagacaagaattggttagactccctataaatgtgacaggttataaaacaaagaatctttcagaacaatataacgaagagataaatatacaatttaaagagaaaatattaaaaatgtataacgaaataaatgaatacaaatgtgatttttcaaataaacaaagtattgatgaattagttcaaaaaatagtaaatttagtaattgaaataaaaaaaacaaaataa

SEQ ID NO: 21071 - DNA, 609 bp, Staphylococcus aureus MRSA-136; identical to SEQ ID NO: 18624

SEQ ID NO: 21072 - DNA, 927 bp, Staphylococcus aureus MRSA-136; identical to SEQ ID NO: 18619

SEQ ID NO: 21073 - DNA, 1128 bp, Staphylococcus aureus MSSA-93; identical to SEQ ID NO: 18617

SEQ ID NO: 21074 - DNA, 609 bp, Staphylococcus aureus MSSA-93
ttggcgcgtaaaacatttatttcatataaatactctgaagcaaaagatttaagagataaaatagtggaatctctaggagaagatgctaaatattatcaaggagagacaagtgattctcctgatatgtccgatagaataacagagtatattaaaaaagaattaaaaaataagatatattcaacttcagtaacaattgtagttatttcacctaatatgaaagaaagtaattggattgattgggaaatagaatactcagttaaacaaatgaaaagaggagatagaacatctagtactaatggtgttgtaggggttattatgaagcataatggtgattattcatggttaagaaattctgttattaattcagatggtcataccgcaattcatactgacaatagttatttatatgacataatagtgaagaatagatttaatcaggaacctatagaatatacgtgtgatgaatgtaaaaatatagatgcattaacaggatcttttatttctttagtagaagaagatgaatttttgggtaatccaactaaatatatagaaaatgcatatgaaaaaagtaaaaaagcaacgaattataatatctgtagaagaaaataa

SEQ ID NO: 21075 - DNA, 927 bp, Staphylococcus aureus MSSA-93; identical to SEQ ID NO: 18619

SEQ ID NO: 21076 - DNA, 1452 bp, Staphylococcus aureus N0426; identical to SEQ ID NO: 18653

SEQ ID NO: 21077 - DNA, 609 bp, Staphylococcus aureus N0426; identical to SEQ ID NO: 18624

SEQ ID NO: 21078 - DNA, 927 bp, Staphylococcus aureus N0426; identical to SEQ ID NO: 18619

SEQ ID NO: 21079 - DNA, 1452 bp, Staphylococcus aureus N1343; identical to SEQ ID NO: 18653

SEQ ID NO: 21080 - DNA, 609 bp, Staphylococcus aureus N1343; identical to SEQ ID NO: 18624

SEQ ID NO: 21081 - DNA, 927 bp, Staphylococcus aureus N1343; identical to SEQ ID NO: 18619

SEQ ID NO: 21082 - DNA, 1128 bp, Staphylococcus aureus P0218
atgactatagataagaaaaaattcattgaaaaatatgtaaaagctttagaaagtaatacagcggctatttttgctggagcaggattatcttgtggagcaggttatgttaattggaagacattgcttaatgaagcagcagaagaattagaattaaatatagataaagaagaacatgatcttgtaggattagcacaacattatattaataagaaaagaagtcgtggaaatctaaatacagtaataatggagcaattttcaacaagagcagaattaacagaaaatcataagcttttagcaaaacttcccattgatacatattggacaactaattatgattgtatgattgaaaaagctcttgattctgagggcagaattgtagatgtgaaaagaaatcaaaatcaattaactgtttcagtagccgataaggatgctacagtttataaaatgcatggggatatagacagtatagacaagattattttaactagagatgattatgaaaaatataatctaactcatccaaagtttcgtgaaatattggaaggagatttactttcaaaaacttttctattcataggttttagctttacagatccaaatattagttatatcttatcgagaataagattagtgttagaatacaatactagaccacattattgtattttaaaagaagtagaagaaaaggaatatgataatacagaagaatttatgtatgcaaagataaaacaacaacttcatatagaagatttaagccgattttcaatagaaactttattagttaaagattatattgaaatcacagaaatattagaaagtatttataaaagatatagaagaaaaacaatttttatatcaggaagtgctacagaatatttaccttttaattcagaaacagggaaatattttttacatcaactaagtaaaaaattagttgaaaatgattttaaattagttacaggttttggattaggagtaggatcatatgttattaatggagtagctgattatattaatagtaataagaagtctaaactacagaatcatttaaatatattgccattttctcaagattcaagtggcgatttagacttaaaagaagtatggaaaaaaatcgcttggaaatga

SEQ ID NO: 21083 - DNA, 609 bp, Staphylococcus aureus P0218; identical to SEQ ID NO: 18624

SEQ ID NO: 21084 - DNA, 927 bp, Staphylococcus aureus P0218; identical to SEQ ID NO: 20335

SEQ ID NO: 21085 - DNA, 1128 bp, Staphylococcus aureus PA11; identical to SEQ ID NO: 18617

SEQ ID NO: 21086 - DNA, 609 bp, Staphylococcus aureus PA11; identical to SEQ ID NO: 18618

SEQ ID NO: 21087 - DNA, 927 bp, Staphylococcus aureus PA11; identical to SEQ ID NO: 18619

SEQ ID NO: 21088 - DNA, 1128 bp, Staphylococcus aureus PA57; identical to SEQ ID NO: 18617

SEQ ID NO: 21089 - DNA, 609 bp, Staphylococcus aureus PA57; identical to SEQ ID NO: 18618

SEQ ID NO: 21090 - DNA, 927 bp, Staphylococcus aureus PA57; identical to SEQ ID NO: 18619

SEQ ID NO: 21091 - DNA, 1452 bp, Staphylococcus aureus R0353; identical to SEQ ID NO: 18653

SEQ ID NO: 21092 - DNA, 609 bp, Staphylococcus aureus R0353; identical to SEQ ID NO: 18624

SEQ ID NO: 21093 - DNA, 927 bp, Staphylococcus aureus R0353; identical to SEQ ID NO: 18619

SEQ ID NO: 21094 - DNA, 1452 bp, Staphylococcus aureus R0357; identical to SEQ ID NO: 18653

SEQ ID NO: 21095 - DNA, 609 bp, Staphylococcus aureus R0357; identical to SEQ ID NO: 18624

SEQ ID NO: 21096 - DNA, 927 bp, Staphylococcus aureus R0357; identical to SEQ ID NO: 18619

SEQ ID NO: 21097 - DNA, 1452 bp, Staphylococcus aureus R0487; identical to SEQ ID NO: 18653

SEQ ID NO: 21098 - DNA, 609 bp, Staphylococcus aureus R0487; identical to SEQ ID NO: 18624

SEQ ID NO: 21099 - DNA, 927 bp, Staphylococcus aureus R0487; identical to SEQ ID NO: 18619

SEQ ID NO: 21100 - DNA, 1452 bp, Staphylococcus aureus R0545; identical to SEQ ID NO: 18653

SEQ ID NO: 21101 - DNA, 609 bp, Staphylococcus aureus R0545; identical to SEQ ID NO: 18624

SEQ ID NO: 21102 - DNA, 927 bp, Staphylococcus aureus R0545; identical to SEQ ID NO: 18619

SEQ ID NO: 21103 - DNA, 1452 bp, Staphylococcus aureus R0611; identical to SEQ ID NO: 18653

SEQ ID NO: 21104 - DNA, 609 bp, Staphylococcus aureus R0611; identical to SEQ ID NO: 18624

SEQ ID NO: 21105 - DNA, 927 bp, Staphylococcus aureus R0611; identical to SEQ ID NO: 18619

SEQ ID NO: 21106 - DNA, 1452 bp, Staphylococcus aureus R0615; identical to SEQ ID NO: 18653

SEQ ID NO: 21107 - DNA, 609 bp, Staphylococcus aureus R0615; identical to SEQ ID NO: 18624

SEQ ID NO: 21108 - DNA, 927 bp, Staphylococcus aureus R0615; identical to SEQ ID NO: 18619

SEQ ID NO: 21109 - DNA, 1452 bp, Staphylococcus aureus Rd.3; identical to SEQ ID NO: 18653

SEQ ID NO: 21110 - DNA, 609 bp, Staphylococcus aureus Rd.3; identical to SEQ ID NO: 18624

SEQ ID NO: 21111 - DNA, 927 bp, Staphylococcus aureus Rd.3; identical to SEQ ID NO: 18619

SEQ ID NO: 21112 - DNA, 1452 bp, Staphylococcus aureus Rd.40; identical to SEQ ID NO: 18653

SEQ ID NO: 21113 - DNA, 609 bp, Staphylococcus aureus Rd.40; identical to SEQ ID NO: 18624

SEQ ID NO: 21114 - DNA, 927 bp, Staphylococcus aureus Rd.40; identical to SEQ ID NO: 18619

SEQ ID NO: 21115 - DNA, 1452 bp, Staphylococcus aureus Rd.51; identical to SEQ ID NO: 18653

SEQ ID NO: 21116 - DNA, 609 bp, Staphylococcus aureus Rd.51; identical to SEQ ID NO: 18624

SEQ ID NO: 21117 - DNA, 927 bp, Staphylococcus aureus Rd.51; identical to SEQ ID NO: 18619

SEQ ID NO: 21118 - DNA, 1452 bp, Staphylococcus aureus Rd.545; identical to SEQ ID NO: 18653

SEQ ID NO: 21119 - DNA, 609 bp, Staphylococcus aureus Rd.545; identical to SEQ ID NO: 18624

SEQ ID NO: 21120 - DNA, 927 bp, Staphylococcus aureus Rd.545; identical to SEQ ID NO: 18619

SEQ ID NO: 21121 - DNA, 1452 bp, Staphylococcus aureus Rd.60; identical to SEQ ID NO: 18653

SEQ ID NO: 21122 - DNA, 609 bp, Staphylococcus aureus Rd.60; identical to SEQ ID NO: 18624

SEQ ID NO: 21123 - DNA, 927 bp, Staphylococcus aureus Rd.60; identical to SEQ ID NO: 18619

SEQ ID NO: 21124 - DNA, 1452 bp, Staphylococcus aureus Rd.614; identical to SEQ ID NO: 18653

SEQ ID NO: 21125 - DNA, 609 bp, Staphylococcus aureus Rd.614; identical to SEQ ID NO: 18624

SEQ ID NO: 21126 - DNA, 927 bp, Staphylococcus aureus Rd.614; identical to SEQ ID NO: 18619

SEQ ID NO: 21127 - DNA, 1452 bp, Staphylococcus aureus Rd.9; identical to SEQ ID NO: 18653

SEQ ID NO: 21128 - DNA, 609 bp, Staphylococcus aureus Rd.9; identical to SEQ ID NO: 18624

SEQ ID NO: 21129 - DNA, 927 bp, Staphylococcus aureus Rd.9; identical to SEQ ID NO: 18619

SEQ ID NO: 21130 - DNA, 700 bp, Staphylococcus aureus S56_POEL
cctcctgggtatgtttttgtcgttaaaaacattgtaccgtaaaaggactgttatatggcctttttacttttacacaattatacggactttatcaatttttatatcaggaagtgctacagaatatttaccttttaattcagaaacagggaaatattttttacatcaactaagtaaaaaattagttgaaaatgattttaaattagttacaggttttggattaggagtaggatcatatgttattaatggagtagctgattatattaatagtaataagaagtctaaactacagaatcatttaaatatattgccattttctcaagattcaagtggcgatttagacttaaaagaagtatggaaaaaaaatcgcttggaaatgatttctgagtgtggaatggcattatttttatttggaaataaagaaaaggatggaaaaattgttttagctgatggattagaagaagaatataaaatagcagaaagacaagaattggttagactccctataaatgtgacaggttataaaacaaagaatctttcagaacaatataacgaagagataaatatacaatttaaagagaaaatattaaaaatgtataacgaaataaatgaatacaaatgtgatttttcaaataaacaaagtattgatgaattagttcaaaaaatagtaaatttagtaattgaaataaaaaaaacaaaataa

SEQ ID NO: 21131 - DNA, 609 bp, Staphylococcus aureus S56_POEL; identical to SEQ ID NO: 18624

SEQ ID NO: 21132 - DNA, 927 bp, Staphylococcus aureus S56_POEL; identical to SEQ ID NO: 18619

SEQ ID NO: 21133 - DNA, 1452 bp, Staphylococcus aureus S62_POEL; identical to SEQ ID NO: 18653

SEQ ID NO: 21134 - DNA, 609 bp, Staphylococcus aureus S62_POEL; identical to SEQ ID NO: 18624

SEQ ID NO: 21135 - DNA, 927 bp, Staphylococcus aureus S62_POEL; identical to SEQ ID NO: 18619

SEQ ID NO: 21136 - DNA, 700 bp, Staphylococcus aureus S69_POEL; identical to SEQ ID NO: 21130

SEQ ID NO: 21137 - DNA, 609 bp, Staphylococcus aureus S69_POEL; identical to SEQ ID NO: 18624

SEQ ID NO: 21138 - DNA, 927 bp, Staphylococcus aureus S69_POEL; identical to SEQ ID NO: 18619

SEQ ID NO: 21139 - DNA, 1452 bp, Staphylococcus aureus SARM C4155; identical to SEQ ID NO: 18695

SEQ ID NO: 21140 - DNA, 609 bp, Staphylococcus aureus SARM C4155; identical to SEQ ID NO: 18624

SEQ ID NO: 21141 - DNA, 927 bp, Staphylococcus aureus SARM C4155; identical to SEQ ID NO: 18619

SEQ ID NO: 21142 - DNA, 1128 bp, Staphylococcus aureus SARM C5621; identical to SEQ ID NO: 18617

SEQ ID NO: 21143 - DNA, 609 bp, Staphylococcus aureus SARM C5621; identical to SEQ ID NO: 18624

SEQ ID NO: 21144 - DNA, 927 bp, Staphylococcus aureus SARM C5621; identical to SEQ ID NO: 18619

SEQ ID NO: 21145 - DNA, 1452 bp, Staphylococcus aureus Sau 194; identical to SEQ ID NO: 18653

SEQ ID NO: 21146 - DNA, 609 bp, Staphylococcus aureus Sau 194; identical to SEQ ID NO: 18624

SEQ ID NO: 21147 - DNA, 927 bp, Staphylococcus aureus Sau 194; identical to SEQ ID NO: 18619

SEQ ID NO: 21148 - DNA, 1452 bp, Staphylococcus aureus Sau 44; identical to SEQ ID NO: 18653

SEQ ID NO: 21149 - DNA, 609 bp, Staphylococcus aureus Sau 44; identical to SEQ ID NO: 18624

SEQ ID NO: 21150 - DNA, 498 bp, Staphylococcus aureus Sau 44
atgattagaaatttagcctttaaatatttacaagattacggtcactatgtgaaactaaggaaaaattttaaaggaaagaagaaagtatatcaaactgagagagcttctttagacactaaaaaacctgaagatttatataatgatttaacaaataagaatattcaatctcaaaaagtctatgatatttttatttctcatagtacaaaagataagaagacagttgaagatattataagagtttttaatgaacaaaataaaacgtgttattgtgattggactatggatcaagattatttaaaaaggaagtatgttggtgaatatacaaagcaagtattgaaggctcgtatggagcaaagtaaaatgctggttttgttgagaacggagaattcagttcaatctgattgggttagttttgaaatagaatactttgaaaatctaaaaaaacctatatatatagtagagtctcttgaagaattattagaggctttttcagattag

SEQ ID NO: 21151 - DNA, 1452 bp, Staphylococcus aureus Sau 46; identical to SEQ ID NO: 18653

SEQ ID NO: 21152 - DNA, 609 bp, Staphylococcus aureus Sau 46; identical to SEQ ID NO: 18624

SEQ ID NO: 21153 - DNA, 927 bp, Staphylococcus aureus Sau 46; identical to SEQ ID NO: 18619

SEQ ID NO: 21154 - DNA, 1452 bp, Staphylococcus aureus Sau 47; identical to SEQ ID NO: 18653

SEQ ID NO: 21155 - DNA, 609 bp, Staphylococcus aureus Sau 47; identical to SEQ ID NO: 18624

SEQ ID NO: 21156 - DNA, 786 bp, Staphylococcus aureus Sau 47
atgaaaaaacataaagagaattataatgcttcagagataaaaataaaaaaagcagctttagaaaagagtaggaagaataagaattggaaaattgaagaacgtttaataaaagctaagagatatactcaaaaagttgatccagaatacttaaatatttatatgaaagcttatcataagaaagatataactacagaagaaaaactagaaattctaacggaattaaaaaaatttgatacagaaaatatagtgcgtttttttagaaaattaaatgatgctgaacaaaataaaatgattagaaatttagcctttaaatatttacaagattacggtcactatgtgaaactaaggaaaaattttaaaggaaagaagaaagtatatcaaactgagagagcttctttagacactaaaaaacctgaagatttatataatgatttaacaaataagaatattcaatctcaaaaagtctatgatatttttatttctcatagtacaaaagataagaagacagttgaagatattataagagtttttaatgaacaaaataaaacgtgttattgtgattggactatggatcaagattatttaaaaaggaagtatgttggtgaatatacaaagcaagtattgaaggctcgtatggagcaaagtaaaatgctggttttgttgagaacggagaattcagttcaatctgattgggttagttttgaaatagaatactttgaaaatctaaaaaaacctatatatatagtagagtctcttgaagaattattagaggctttttcagattag

SEQ ID NO: 21157 - DNA, 1452 bp, Staphylococcus aureus Sau 74; identical to SEQ ID NO: 18653

SEQ ID NO: 21158 - DNA, 609 bp, Staphylococcus aureus Sau 74; identical to SEQ ID NO: 18624

SEQ ID NO: 21159 - DNA, 927 bp, Staphylococcus aureus Sau 74; identical to SEQ ID NO: 18619

SEQ ID NO: 21160 - DNA, 1452 bp, Staphylococcus aureus Sau 93; identical to SEQ ID NO: 18653

SEQ ID NO: 21161 - DNA, 609 bp, Staphylococcus aureus Sau 93; identical to SEQ ID NO: 18624

SEQ ID NO: 21162 - DNA, 927 bp, Staphylococcus aureus Sau 93; identical to SEQ ID NO: 18619

SEQ ID NO: 21163 - DNA, 1452 bp, Staphylococcus aureus Sau 95; identical to SEQ ID NO: 18653

SEQ ID NO: 21164 - DNA, 609 bp, Staphylococcus aureus Sau 95; identical to SEQ ID NO: 18624

SEQ ID NO: 21165 - DNA, 927 bp, Staphylococcus aureus Sau 95; identical to SEQ ID NO: 18619

SEQ ID NO: 21166 - DNA, 1452 bp, Staphylococcus aureus Sau 98; identical to SEQ ID NO: 18653

SEQ ID NO: 21167 - DNA, 609 bp, Staphylococcus aureus Sau 98; identical to SEQ ID NO: 18624

SEQ ID NO: 21168 - DNA, 927 bp, Staphylococcus aureus Sau 98; identical to SEQ ID NO: 18619

SEQ ID NO: 21169 - DNA, 1452 bp, Staphylococcus aureus Tur-12; identical to SEQ ID NO: 18653

SEQ ID NO: 21170 - DNA, 609 bp, Staphylococcus aureus Tur-12; identical to SEQ ID NO: 18624

SEQ ID NO: 21171 - DNA, 927 bp, Staphylococcus aureus Tur-12; identical to SEQ ID NO: 18619

SEQ ID NO: 21172 - DNA, 1452 bp, Staphylococcus aureus Tur-15; identical to SEQ ID NO: 18653

SEQ ID NO: 21173 - DNA, 609 bp, Staphylococcus aureus Tur-15; identical to SEQ ID NO: 18624

SEQ ID NO: 21174 - DNA, 927 bp, Staphylococcus aureus Tur-15; identical to SEQ ID NO: 18619

SEQ ID NO: 21175 - DNA, 1452 bp, Staphylococcus aureus Tur-16; identical to SEQ ID NO: 18695

SEQ ID NO: 21176 - DNA, 609 bp, Staphylococcus aureus Tur-16; identical to SEQ ID NO: 18624

SEQ ID NO: 21177 - DNA, 927 bp, Staphylococcus aureus Tur-16; identical to SEQ ID NO: 18619

SEQ ID NO: 21178 - DNA, 1452 bp, Staphylococcus aureus Tur-20; identical to SEQ ID NO: 18653

SEQ ID NO: 21179 - DNA, 609 bp, Staphylococcus aureus Tur-20; identical to SEQ ID NO: 18624

SEQ ID NO: 21180 - DNA, 927 bp, Staphylococcus aureus Tur-20; identical to SEQ ID NO: 18619

SEQ ID NO: 21181 - DNA, 1452 bp, Staphylococcus aureus Tur-22; identical to SEQ ID NO: 18653

SEQ ID NO: 21182 - DNA, 609 bp, Staphylococcus aureus Tur-22; identical to SEQ ID NO: 18624

SEQ ID NO: 21183 - DNA, 927 bp, Staphylococcus aureus Tur-22; identical to SEQ ID NO: 18619

SEQ ID NO: 21184 - DNA, 1452 bp, Staphylococcus aureus Tur-6; identical to SEQ ID NO: 18653

SEQ ID NO: 21185 - DNA, 609 bp, Staphylococcus aureus Tur-6; identical to SEQ ID NO: 18624

SEQ ID NO: 21186 - DNA, 927 bp, Staphylococcus aureus Tur-6; identical to SEQ ID NO: 18619

SEQ ID NO: 21187 - DNA, 1452 bp, Staphylococcus aureus UB 08-116; identical to SEQ ID NO: 18695

SEQ ID NO: 21188 - DNA, 609 bp, Staphylococcus aureus UB 08-116; identical to SEQ ID NO: 18624

SEQ ID NO: 21189 - DNA, 927 bp, Staphylococcus aureus UB 08-116; identical to SEQ ID NO: 18619

SEQ ID NO: 21190 - DNA, 1452 bp, Staphylococcus aureus UB 08-172; identical to SEQ ID NO: 18695

SEQ ID NO: 21191 - DNA, 609 bp, Staphylococcus aureus UB 08-172; identical to SEQ ID NO: 18624

SEQ ID NO: 21192 - DNA, 927 bp, Staphylococcus aureus UB 08-172; identical to SEQ ID NO: 18619

SEQ ID NO: 21193 - DNA, 1452 bp, Staphylococcus aureus USA_1; identical to SEQ ID NO: 18653

SEQ ID NO: 21194 - DNA, 609 bp, Staphylococcus aureus USA_1; identical to SEQ ID NO: 18624

SEQ ID NO: 21195 - DNA, 927 bp, Staphylococcus aureus USA_1; identical to SEQ ID NO: 18619

SEQ ID NO: 21196 - DNA, 1452 bp, Staphylococcus aureus USA_11; identical to SEQ ID NO: 18653

SEQ ID NO: 21197 - DNA, 609 bp, Staphylococcus aureus USA_11; identical to SEQ ID NO: 18624

SEQ ID NO: 21198 - DNA, 927 bp, Staphylococcus aureus USA_11; identical to SEQ ID NO: 18619

SEQ ID NO: 21199 - DNA, 1452 bp, Staphylococcus aureus USA_12; identical to SEQ ID NO: 18653

SEQ ID NO: 21200 - DNA, 609 bp, Staphylococcus aureus USA_12; identical to SEQ ID NO: 18624

SEQ ID NO: 21201 - DNA, 927 bp, Staphylococcus aureus USA_12; identical to SEQ ID NO: 18619

SEQ ID NO: 21202 - DNA, 1452 bp, Staphylococcus aureus USA_15; identical to SEQ ID NO: 18653

SEQ ID NO: 21203 - DNA, 609 bp, Staphylococcus aureus USA_15; identical to SEQ ID NO: 18624

SEQ ID NO: 21204 - DNA, 927 bp, Staphylococcus aureus USA_15; identical to SEQ ID NO: 18619

SEQ ID NO: 21205 - DNA, 1128 bp, Staphylococcus aureus USA_8; identical to SEQ ID NO: 18617

SEQ ID NO: 21206 - DNA, 609 bp, Staphylococcus aureus USA_8; identical to SEQ ID NO: 18624

SEQ ID NO: 21207 - DNA, 927 bp, Staphylococcus aureus USA_8; identical to SEQ ID NO: 18619

SEQ ID NO: 21208 - DNA, 1452 bp, Staphylococcus aureus USA_9; identical to SEQ ID NO: 18653

SEQ ID NO: 21209 - DNA, 609 bp, Staphylococcus aureus USA_9; identical to SEQ ID NO: 18624

SEQ ID NO: 21210 - DNA, 927 bp, Staphylococcus aureus USA_9; identical to SEQ ID NO: 18619

SEQ ID NO: 21211 - DNA, 1452 bp, Staphylococcus aureus USA7; identical to SEQ ID NO: 18653

SEQ ID NO: 21212 - DNA, 609 bp, Staphylococcus aureus USA7; identical to SEQ ID NO: 18624

SEQ ID NO: 21213 - DNA, 927 bp, Staphylococcus aureus USA7; identical to SEQ ID NO: 18619

SEQ ID NO: 21214 - DNA, 1452 bp, Staphylococcus aureus VE07/03048STA; identical to SEQ ID NO: 18653

SEQ ID NO: 21215 - DNA, 609 bp, Staphylococcus aureus VE07/03048STA; identical to SEQ ID NO: 18624

SEQ ID NO: 21216 - DNA, 927 bp, Staphylococcus aureus VE07/03048STA; identical to SEQ ID NO: 18619

SEQ ID NO: 21217 - DNA, 1452 bp, Staphylococcus aureus VE08/02126ST1; identical to SEQ ID NO: 18653

SEQ ID NO: 21218 - DNA, 609 bp, Staphylococcus aureus VE08/02126ST1; identical to SEQ ID NO: 18624

SEQ ID NO: 21219 - DNA, 927 bp, Staphylococcus aureus VE08/02126ST1; identical to SEQ ID NO: 18619

SEQ ID NO: 21220 - DNA, 1452 bp, Staphylococcus aureus VE08/02244ST1; identical to SEQ ID NO: 18653

SEQ ID NO: 21221 - DNA, 609 bp, Staphylococcus aureus VE08/02244ST1; identical to SEQ ID NO: 18624

SEQ ID NO: 21222 - DNA, 927 bp, Staphylococcus aureus VE08/02244ST1; identical to SEQ ID NO: 18619

SEQ ID NO: 21223 - DNA, 1452 bp, Staphylococcus aureus VET0051R; identical to SEQ ID NO: 18653

SEQ ID NO: 21224 - DNA, 609 bp, Staphylococcus aureus VET0051R; identical to SEQ ID NO: 18624

SEQ ID NO: 21225 - DNA, 927 bp, Staphylococcus aureus VET0051R; identical to SEQ ID NO: 18619

SEQ ID NO: 21226 - DNA, 1452 bp, Staphylococcus aureus VET0052R; identical to SEQ ID NO: 18653

SEQ ID NO: 21227 - DNA, 609 bp, Staphylococcus aureus VET0052R; identical to SEQ ID NO: 18624

SEQ ID NO: 21228 - DNA, 927 bp, Staphylococcus aureus VET0052R; identical to SEQ ID NO: 18619

SEQ ID NO: 21229 - DNA, 1452 bp, Staphylococcus aureus VET0053R; identical to SEQ ID NO: 18653

SEQ ID NO: 21230 - DNA, 609 bp, Staphylococcus aureus VET0053R; identical to SEQ ID NO: 18624

SEQ ID NO: 21231 - DNA, 927 bp, Staphylococcus aureus VET0053R; identical to SEQ ID NO: 18619

SEQ ID NO: 21232 - DNA, 1452 bp, Staphylococcus aureus VET0054R; identical to SEQ ID NO: 18653

SEQ ID NO: 21233 - DNA, 609 bp, Staphylococcus aureus VET0054R; identical to SEQ ID NO: 18624

SEQ ID NO: 21234 - DNA, 927 bp, Staphylococcus aureus VET0054R; identical to SEQ ID NO: 18619

SEQ ID NO: 21235 - DNA, 1452 bp, Staphylococcus aureus VET0055R; identical to SEQ ID NO: 18653

SEQ ID NO: 21236 - DNA, 609 bp, Staphylococcus aureus VET0055R; identical to SEQ ID NO: 18624

SEQ ID NO: 21237 - DNA, 927 bp, Staphylococcus aureus VET0055R; identical to SEQ ID NO: 18619

SEQ ID NO: 21238 - DNA, 1452 bp, Staphylococcus aureus VET0057R; identical to SEQ ID NO: 18653

SEQ ID NO: 21239 - DNA, 609 bp, Staphylococcus aureus VET0057R; identical to SEQ ID NO: 18624

SEQ ID NO: 21240 - DNA, 927 bp, Staphylococcus aureus VET0057R; identical to SEQ ID NO: 18619

SEQ ID NO: 21241 - DNA, 1452 bp, Staphylococcus aureus VET0059R; identical to SEQ ID NO: 18653

SEQ ID NO: 21242 - DNA, 609 bp, Staphylococcus aureus VET0059R; identical to SEQ ID NO: 18624

SEQ ID NO: 21243 - DNA, 927 bp, Staphylococcus aureus VET0059R; identical to SEQ ID NO: 18619

SEQ ID NO: 21244 - DNA, 1452 bp, Staphylococcus aureus VET0060R; identical to SEQ ID NO: 18653

SEQ ID NO: 21245 - DNA, 609 bp, Staphylococcus aureus VET0060R; identical to SEQ ID NO: 18624

SEQ ID NO: 21246 - DNA, 927 bp, Staphylococcus aureus VET0060R; identical to SEQ ID NO: 18619

SEQ ID NO: 21247 - DNA, 1452 bp, Staphylococcus aureus VET0061R; identical to SEQ ID NO: 18653

SEQ ID NO: 21248 - DNA, 609 bp, Staphylococcus aureus VET0061R; identical to SEQ ID NO: 18624

SEQ ID NO: 21249 - DNA, 927 bp, Staphylococcus aureus VET0061R; identical to SEQ ID NO: 18619

SEQ ID NO: 21250 - DNA, 1452 bp, Staphylococcus aureus VET0062R; identical to SEQ ID NO: 18653

SEQ ID NO: 21251 - DNA, 609 bp, Staphylococcus aureus VET0062R; identical to SEQ ID NO: 18624

SEQ ID NO: 21252 - DNA, 927 bp, Staphylococcus aureus VET0062R; identical to SEQ ID NO: 18619

SEQ ID NO: 21253 - DNA, 1452 bp, Staphylococcus aureus VET0063R; identical to SEQ ID NO: 18653

SEQ ID NO: 21254 - DNA, 609 bp, Staphylococcus aureus VET0063R; identical to SEQ ID NO: 18624

SEQ ID NO: 21255 - DNA, 927 bp, Staphylococcus aureus VET0063R; identical to SEQ ID NO: 18619

SEQ ID NO: 21256 - DNA, 1452 bp, Staphylococcus aureus VET0065R; identical to SEQ ID NO: 18653

SEQ ID NO: 21257 - DNA, 609 bp, Staphylococcus aureus VET0065R; identical to SEQ ID NO: 18624

SEQ ID NO: 21258 - DNA, 927 bp, Staphylococcus aureus VET0065R; identical to SEQ ID NO: 18619

SEQ ID NO: 21259 - DNA, 1452 bp, Staphylococcus aureus VET0066R; identical to SEQ ID NO: 18653

SEQ ID NO: 21260 - DNA, 609 bp, Staphylococcus aureus VET0066R; identical to SEQ ID NO: 18624

SEQ ID NO: 21261 - DNA, 927 bp, Staphylococcus aureus VET0066R; identical to SEQ ID NO: 18619

SEQ ID NO: 21262 - DNA, 1452 bp, Staphylococcus aureus VET0067R; identical to SEQ ID NO: 18653

SEQ ID NO: 21263 - DNA, 609 bp, Staphylococcus aureus VET0067R; identical to SEQ ID NO: 18624

SEQ ID NO: 21264 - DNA, 927 bp, Staphylococcus aureus VET0067R; identical to SEQ ID NO: 18619

SEQ ID NO: 21265 - DNA, 1452 bp, Staphylococcus aureus VET0069R; identical to SEQ ID NO: 18653

SEQ ID NO: 21266 - DNA, 609 bp, Staphylococcus aureus VET0069R; identical to SEQ ID NO: 18624

SEQ ID NO: 21267 - DNA, 927 bp, Staphylococcus aureus VET0069R; identical to SEQ ID NO: 18619

SEQ ID NO: 21268 - DNA, 1452 bp, Staphylococcus aureus VET0070R; identical to SEQ ID NO: 18653

SEQ ID NO: 21269 - DNA, 609 bp, Staphylococcus aureus VET0070R; identical to SEQ ID NO: 18624

SEQ ID NO: 21270 - DNA, 927 bp, Staphylococcus aureus VET0070R; identical to SEQ ID NO: 18619

SEQ ID NO: 21271 - DNA, 1452 bp, Staphylococcus aureus VET0072R; identical to SEQ ID NO: 18653

SEQ ID NO: 21272 - DNA, 609 bp, Staphylococcus aureus VET0072R; identical to SEQ ID NO: 18624

SEQ ID NO: 21273 - DNA, 927 bp, Staphylococcus aureus VET0072R; identical to SEQ ID NO: 18619

SEQ ID NO: 21274 - DNA, 1452 bp, Staphylococcus aureus VET0073R; identical to SEQ ID NO: 18653

SEQ ID NO: 21275 - DNA, 609 bp, Staphylococcus aureus VET0073R; identical to SEQ ID NO: 18624

SEQ ID NO: 21276 - DNA, 927 bp, Staphylococcus aureus VET0073R; identical to SEQ ID NO: 18619

SEQ ID NO: 21277 - DNA, 1452 bp, Staphylococcus aureus VET0075R; identical to SEQ ID NO: 18653

SEQ ID NO: 21278 - DNA, 609 bp, Staphylococcus aureus VET0075R; identical to SEQ ID NO: 18624

SEQ ID NO: 21279 - DNA, 927 bp, Staphylococcus aureus VET0075R; identical to SEQ ID NO: 18619

SEQ ID NO: 21280 - DNA, 1452 bp, Staphylococcus aureus VET0076R; identical to SEQ ID NO: 18653

SEQ ID NO: 21281 - DNA, 609 bp, Staphylococcus aureus VET0076R; identical to SEQ ID NO: 18624

SEQ ID NO: 21282 - DNA, 927 bp, Staphylococcus aureus VET0076R; identical to SEQ ID NO: 18619

SEQ ID NO: 21283 - DNA, 1452 bp, Staphylococcus aureus VET0077R; identical to SEQ ID NO: 18653

SEQ ID NO: 21284 - DNA, 609 bp, Staphylococcus aureus VET0077R; identical to SEQ ID NO: 18624

SEQ ID NO: 21285 - DNA, 927 bp, Staphylococcus aureus VET0077R; identical to SEQ ID NO: 18619

SEQ ID NO: 21286 - DNA, 1452 bp, Staphylococcus aureus VET0080R; identical to SEQ ID NO: 18653

SEQ ID NO: 21287 - DNA, 609 bp, Staphylococcus aureus VET0080R; identical to SEQ ID NO: 18624

SEQ ID NO: 21288 - DNA, 927 bp, Staphylococcus aureus VET0080R; identical to SEQ ID NO: 18619

SEQ ID NO: 21289 - DNA, 1452 bp, Staphylococcus aureus VET0083R; identical to SEQ ID NO: 18653

SEQ ID NO: 21290 - DNA, 609 bp, Staphylococcus aureus VET0083R; identical to SEQ ID NO: 18624

SEQ ID NO: 21291 - DNA, 927 bp, Staphylococcus aureus VET0083R; identical to SEQ ID NO: 18619

SEQ ID NO: 21292 - DNA, 1452 bp, Staphylococcus aureus VET0084R; identical to SEQ ID NO: 18653

SEQ ID NO: 21293 - DNA, 609 bp, Staphylococcus aureus VET0084R; identical to SEQ ID NO: 18624

SEQ ID NO: 21294 - DNA, 927 bp, Staphylococcus aureus VET0084R; identical to SEQ ID NO: 18619

SEQ ID NO: 21295 - DNA, 1452 bp, Staphylococcus aureus VET0085R; identical to SEQ ID NO: 18653

SEQ ID NO: 21296 - DNA, 609 bp, Staphylococcus aureus VET0085R; identical to SEQ ID NO: 18624

SEQ ID NO: 21297 - DNA, 927 bp, Staphylococcus aureus VET0085R; identical to SEQ ID NO: 18619

SEQ ID NO: 21298 - DNA, 1452 bp, Staphylococcus aureus VET0086R; identical to SEQ ID NO: 18653

SEQ ID NO: 21299 - DNA, 609 bp, Staphylococcus aureus VET0086R; identical to SEQ ID NO: 18624

SEQ ID NO: 21300 - DNA, 927 bp, Staphylococcus aureus VET0086R; identical to SEQ ID NO: 18619

SEQ ID NO: 21301 - DNA, 1452 bp, Staphylococcus aureus VET0087R; identical to SEQ ID NO: 18653

SEQ ID NO: 21302 - DNA, 609 bp, Staphylococcus aureus VET0087R; identical to SEQ ID NO: 18624

SEQ ID NO: 21303 - DNA, 927 bp, Staphylococcus aureus VET0087R; identical to SEQ ID NO: 20230

SEQ ID NO: 21304 - DNA, 1452 bp, Staphylococcus aureus VET0088R; identical to SEQ ID NO: 18653

SEQ ID NO: 21305 - DNA, 609 bp, Staphylococcus aureus VET0088R; identical to SEQ ID NO: 18624

SEQ ID NO: 21306 - DNA, 927 bp, Staphylococcus aureus VET0088R; identical to SEQ ID NO: 18619

SEQ ID NO: 21307 - DNA, 1452 bp, Staphylococcus aureus VET0089R; identical to SEQ ID NO: 18653

SEQ ID NO: 21308 - DNA, 609 bp, Staphylococcus aureus VET0089R; identical to SEQ ID NO: 18624

SEQ ID NO: 21309 - DNA, 927 bp, Staphylococcus aureus VET0089R; identical to SEQ ID NO: 18619

SEQ ID NO: 21310 - DNA, 1452 bp, Staphylococcus aureus VET0090R; identical to SEQ ID NO: 18653

SEQ ID NO: 21311 - DNA, 609 bp, Staphylococcus aureus VET0090R; identical to SEQ ID NO: 18624

SEQ ID NO: 21312 - DNA, 927 bp, Staphylococcus aureus VET0090R; identical to SEQ ID NO: 18619

SEQ ID NO: 21313 - DNA, 1452 bp, Staphylococcus aureus VET0091R; identical to SEQ ID NO: 18653

SEQ ID NO: 21314 - DNA, 609 bp, Staphylococcus aureus VET0091R; identical to SEQ ID NO: 18624

SEQ ID NO: 21315 - DNA, 927 bp, Staphylococcus aureus VET0091R; identical to SEQ ID NO: 18619

SEQ ID NO: 21316 - DNA, 1452 bp, Staphylococcus aureus VET0092R; identical to SEQ ID NO: 18653

SEQ ID NO: 21317 - DNA, 609 bp, Staphylococcus aureus VET0092R; identical to SEQ ID NO: 18624

SEQ ID NO: 21318 - DNA, 927 bp, Staphylococcus aureus VET0092R; identical to SEQ ID NO: 18619

SEQ ID NO: 21319 - DNA, 1452 bp, Staphylococcus aureus VET0093R; identical to SEQ ID NO: 18653

SEQ ID NO: 21320 - DNA, 609 bp, Staphylococcus aureus VET0093R; identical to SEQ ID NO: 18624

SEQ ID NO: 21321 - DNA, 927 bp, Staphylococcus aureus VET0093R; identical to SEQ ID NO: 18619

SEQ ID NO: 21322 - DNA, 1452 bp, Staphylococcus aureus VET0094R; identical to SEQ ID NO: 18653

SEQ ID NO: 21323 - DNA, 609 bp, Staphylococcus aureus VET0094R; identical to SEQ ID NO: 18624

SEQ ID NO: 21324 - DNA, 927 bp, Staphylococcus aureus VET0094R; identical to SEQ ID NO: 18619

SEQ ID NO: 21325 - DNA, 1452 bp, Staphylococcus aureus VET0095R; identical to SEQ ID NO: 18653

SEQ ID NO: 21326 - DNA, 609 bp, Staphylococcus aureus VET0095R; identical to SEQ ID NO: 18624

SEQ ID NO: 21327 - DNA, 927 bp, Staphylococcus aureus VET0095R; identical to SEQ ID NO: 18619

SEQ ID NO: 21328 - DNA, 1452 bp, Staphylococcus aureus VET0097R; identical to SEQ ID NO: 18653

SEQ ID NO: 21329 - DNA, 609 bp, Staphylococcus aureus VET0097R; identical to SEQ ID NO: 18624

SEQ ID NO: 21330 - DNA, 927 bp, Staphylococcus aureus VET0097R; identical to SEQ ID NO: 18619

SEQ ID NO: 21331 - DNA, 1452 bp, Staphylococcus aureus VET0098R; identical to SEQ ID NO: 18653

SEQ ID NO: 21332 - DNA, 609 bp, Staphylococcus aureus VET0098R; identical to SEQ ID NO: 18624

SEQ ID NO: 21333 - DNA, 927 bp, Staphylococcus aureus VET0098R; identical to SEQ ID NO: 18619

SEQ ID NO: 21334 - DNA, 1452 bp, Staphylococcus aureus VET0099R; identical to SEQ ID NO: 18653

SEQ ID NO: 21335 - DNA, 609 bp, Staphylococcus aureus VET0099R; identical to SEQ ID NO: 18624

SEQ ID NO: 21336 - DNA, 927 bp, Staphylococcus aureus VET0099R; identical to SEQ ID NO: 18619

SEQ ID NO: 21337 - DNA, 1452 bp, Staphylococcus aureus VET0101R; identical to SEQ ID NO: 18653

SEQ ID NO: 21338 - DNA, 609 bp, Staphylococcus aureus VET0101R; identical to SEQ ID NO: 18624

SEQ ID NO: 21339 - DNA, 927 bp, Staphylococcus aureus VET0101R; identical to SEQ ID NO: 18619

SEQ ID NO: 21340 - DNA, 1452 bp, Staphylococcus aureus VET0103R; identical to SEQ ID NO: 18653

SEQ ID NO: 21341 - DNA, 609 bp, Staphylococcus aureus VET0103R; identical to SEQ ID NO: 18624

SEQ ID NO: 21342 - DNA, 927 bp, Staphylococcus aureus VET0103R; identical to SEQ ID NO: 18619

SEQ ID NO: 21343 - DNA, 1452 bp, Staphylococcus aureus VET0104R; identical to SEQ ID NO: 18653

SEQ ID NO: 21344 - DNA, 609 bp, Staphylococcus aureus VET0104R; identical to SEQ ID NO: 18624

SEQ ID NO: 21345 - DNA, 927 bp, Staphylococcus aureus VET0104R; identical to SEQ ID NO: 18619

SEQ ID NO: 21346 - DNA, 1452 bp, Staphylococcus aureus VET0105R; identical to SEQ ID NO: 18653

SEQ ID NO: 21347 - DNA, 609 bp, Staphylococcus aureus VET0105R; identical to SEQ ID NO: 18624

SEQ ID NO: 21348 - DNA, 927 bp, Staphylococcus aureus VET0105R; identical to SEQ ID NO: 18619

SEQ ID NO: 21349 - DNA, 1452 bp, Staphylococcus aureus VET0107R; identical to SEQ ID NO: 18653

SEQ ID NO: 21350 - DNA, 609 bp, Staphylococcus aureus VET0107R; identical to SEQ ID NO: 18624

SEQ ID NO: 21351 - DNA, 927 bp, Staphylococcus aureus VET0107R; identical to SEQ ID NO: 18619

SEQ ID NO: 21352 - DNA, 1452 bp, Staphylococcus aureus VET0110R; identical to SEQ ID NO: 18653

SEQ ID NO: 21353 - DNA, 609 bp, Staphylococcus aureus VET0110R; identical to SEQ ID NO: 18624

SEQ ID NO: 21354 - DNA, 927 bp, Staphylococcus aureus VET0110R; identical to SEQ ID NO: 18619

SEQ ID NO: 21355 - DNA, 1452 bp, Staphylococcus aureus VET0112R; identical to SEQ ID NO: 18653

SEQ ID NO: 21356 - DNA, 609 bp, Staphylococcus aureus VET0112R; identical to SEQ ID NO: 18624

SEQ ID NO: 21357 - DNA, 927 bp, Staphylococcus aureus VET0112R; identical to SEQ ID NO: 18619

SEQ ID NO: 21358 - DNA, 1452 bp, Staphylococcus aureus VET0114R; identical to SEQ ID NO: 18653

SEQ ID NO: 21359 - DNA, 609 bp, Staphylococcus aureus VET0114R; identical to SEQ ID NO: 18624

SEQ ID NO: 21360 - DNA, 927 bp, Staphylococcus aureus VET0114R; identical to SEQ ID NO: 18619

SEQ ID NO: 21361 - DNA, 1452 bp, Staphylococcus aureus VET0115R; identical to SEQ ID NO: 18653

SEQ ID NO: 21362 - DNA, 609 bp, Staphylococcus aureus VET0115R; identical to SEQ ID NO: 18624

SEQ ID NO: 21363 - DNA, 927 bp, Staphylococcus aureus VET0115R; identical to SEQ ID NO: 18619

SEQ ID NO: 21364 - DNA, 1452 bp, Staphylococcus aureus VET0116R; identical to SEQ ID NO: 18653

SEQ ID NO: 21365 - DNA, 609 bp, Staphylococcus aureus VET0116R; identical to SEQ ID NO: 18624

SEQ ID NO: 21366 - DNA, 927 bp, Staphylococcus aureus VET0116R; identical to SEQ ID NO: 18619

SEQ ID NO: 21367 - DNA, 1452 bp, Staphylococcus aureus VET0117R; identical to SEQ ID NO: 18653

SEQ ID NO: 21368 - DNA, 609 bp, Staphylococcus aureus VET0117R; identical to SEQ ID NO: 18624

SEQ ID NO: 21369 - DNA, 927 bp, Staphylococcus aureus VET0117R; identical to SEQ ID NO: 18619

SEQ ID NO: 21370 - DNA, 1452 bp, Staphylococcus aureus VET0119R; identical to SEQ ID NO: 18653

SEQ ID NO: 21371 - DNA, 609 bp, Staphylococcus aureus VET0119R; identical to SEQ ID NO: 18624

SEQ ID NO: 21372 - DNA, 927 bp, Staphylococcus aureus VET0119R; identical to SEQ ID NO: 18619

SEQ ID NO: 21373 - DNA, 1452 bp, Staphylococcus aureus VET0123R; identical to SEQ ID NO: 18653

SEQ ID NO: 21374 - DNA, 609 bp, Staphylococcus aureus VET0123R; identical to SEQ ID NO: 18624

SEQ ID NO: 21375 - DNA, 927 bp, Staphylococcus aureus VET0123R; identical to SEQ ID NO: 18619

SEQ ID NO: 21376 - DNA, 1452 bp, Staphylococcus aureus VET0124R; identical to SEQ ID NO: 18653

SEQ ID NO: 21377 - DNA, 609 bp, Staphylococcus aureus VET0124R; identical to SEQ ID NO: 18624

SEQ ID NO: 21378 - DNA, 927 bp, Staphylococcus aureus VET0124R; identical to SEQ ID NO: 18619

SEQ ID NO: 21379 - DNA, 1452 bp, Staphylococcus aureus VET0126R; identical to SEQ ID NO: 18653

SEQ ID NO: 21380 - DNA, 609 bp, Staphylococcus aureus VET0126R; identical to SEQ ID NO: 18624

SEQ ID NO: 21381 - DNA, 927 bp, Staphylococcus aureus VET0126R; identical to SEQ ID NO: 18619

SEQ ID NO: 21382 - DNA, 1452 bp, Staphylococcus aureus VET0127R; identical to SEQ ID NO: 18653

SEQ ID NO: 21383 - DNA, 609 bp, Staphylococcus aureus VET0127R; identical to SEQ ID NO: 18624

SEQ ID NO: 21384 - DNA, 927 bp, Staphylococcus aureus VET0127R; identical to SEQ ID NO: 18619

SEQ ID NO: 21385 - DNA, 1452 bp, Staphylococcus aureus VET0128R; identical to SEQ ID NO: 18653

SEQ ID NO: 21386 - DNA, 609 bp, Staphylococcus aureus VET0128R; identical to SEQ ID NO: 18624

SEQ ID NO: 21387 - DNA, 927 bp, Staphylococcus aureus VET0128R; identical to SEQ ID NO: 18619

SEQ ID NO: 21388 - DNA, 1452 bp, Staphylococcus aureus VET0129R; identical to SEQ ID NO: 18653

SEQ ID NO: 21389 - DNA, 609 bp, Staphylococcus aureus VET0129R; identical to SEQ ID NO: 18624

SEQ ID NO: 21390 - DNA, 927 bp, Staphylococcus aureus VET0129R; identical to SEQ ID NO: 18619

SEQ ID NO: 21391 - DNA, 1452 bp, Staphylococcus aureus VET0130R; identical to SEQ ID NO: 18653

SEQ ID NO: 21392 - DNA, 609 bp, Staphylococcus aureus VET0130R; identical to SEQ ID NO: 18624

SEQ ID NO: 21393 - DNA, 927 bp, Staphylococcus aureus VET0130R; identical to SEQ ID NO: 18619

SEQ ID NO: 21394 - DNA, 1452 bp, Staphylococcus aureus VET0132R; identical to SEQ ID NO: 18653

SEQ ID NO: 21395 - DNA, 609 bp, Staphylococcus aureus VET0132R; identical to SEQ ID NO: 18624

SEQ ID NO: 21396 - DNA, 927 bp, Staphylococcus aureus VET0132R; identical to SEQ ID NO: 18619

SEQ ID NO: 21397 - DNA, 1452 bp, Staphylococcus aureus VET0133R; identical to SEQ ID NO: 18653

SEQ ID NO: 21398 - DNA, 609 bp, Staphylococcus aureus VET0133R; identical to SEQ ID NO: 18624

SEQ ID NO: 21399 - DNA, 927 bp, Staphylococcus aureus VET0133R; identical to SEQ ID NO: 18619

SEQ ID NO: 21400 - DNA, 1452 bp, Staphylococcus aureus VET0134R; identical to SEQ ID NO: 18653

SEQ ID NO: 21401 - DNA, 609 bp, Staphylococcus aureus VET0134R; identical to SEQ ID NO: 18624

SEQ ID NO: 21402 - DNA, 927 bp, Staphylococcus aureus VET0134R; identical to SEQ ID NO: 18619

SEQ ID NO: 21403 - DNA, 1452 bp, Staphylococcus aureus VET0140R; identical to SEQ ID NO: 18653

SEQ ID NO: 21404 - DNA, 609 bp, Staphylococcus aureus VET0140R; identical to SEQ ID NO: 18624

SEQ ID NO: 21405 - DNA, 927 bp, Staphylococcus aureus VET0140R; identical to SEQ ID NO: 18619

SEQ ID NO: 21406 - DNA, 1452 bp, Staphylococcus aureus VET0148R; identical to SEQ ID NO: 18653

SEQ ID NO: 21407 - DNA, 609 bp, Staphylococcus aureus VET0148R; identical to SEQ ID NO: 18624

SEQ ID NO: 21408 - DNA, 927 bp, Staphylococcus aureus VET0148R; identical to SEQ ID NO: 18619

SEQ ID NO: 21409 - DNA, 1452 bp, Staphylococcus aureus VET0151R; identical to SEQ ID NO: 18653

SEQ ID NO: 21410 - DNA, 609 bp, Staphylococcus aureus VET0151R; identical to SEQ ID NO: 18624

SEQ ID NO: 21411 - DNA, 927 bp, Staphylococcus aureus VET0151R; identical to SEQ ID NO: 18619

SEQ ID NO: 21412 - DNA, 1452 bp, Staphylococcus aureus VET0152R; identical to SEQ ID NO: 18653

SEQ ID NO: 21413 - DNA, 609 bp, Staphylococcus aureus VET0152R; identical to SEQ ID NO: 18624

SEQ ID NO: 21414 - DNA, 927 bp, Staphylococcus aureus VET0152R; identical to SEQ ID NO: 18619

SEQ ID NO: 21415 - DNA, 1452 bp, Staphylococcus aureus VET0155R; identical to SEQ ID NO: 18653

SEQ ID NO: 21416 - DNA, 609 bp, Staphylococcus aureus VET0155R; identical to SEQ ID NO: 18624

SEQ ID NO: 21417 - DNA, 927 bp, Staphylococcus aureus VET0155R; identical to SEQ ID NO: 18619

SEQ ID NO: 21418 - DNA, 1452 bp, Staphylococcus aureus VET0156R; identical to SEQ ID NO: 18653

SEQ ID NO: 21419 - DNA, 609 bp, Staphylococcus aureus VET0156R; identical to SEQ ID NO: 18624

SEQ ID NO: 21420 - DNA, 927 bp, Staphylococcus aureus VET0156R; identical to SEQ ID NO: 18619

SEQ ID NO: 21421 - DNA, 1452 bp, Staphylococcus aureus VET0161R; identical to SEQ ID NO: 18653

SEQ ID NO: 21422 - DNA, 609 bp, Staphylococcus aureus VET0161R; identical to SEQ ID NO: 18624

SEQ ID NO: 21423 - DNA, 927 bp, Staphylococcus aureus VET0161R; identical to SEQ ID NO: 18619

SEQ ID NO: 21424 - DNA, 1452 bp, Staphylococcus aureus VET0162R; identical to SEQ ID NO: 18653

SEQ ID NO: 21425 - DNA, 609 bp, Staphylococcus aureus VET0162R; identical to SEQ ID NO: 18624

SEQ ID NO: 21426 - DNA, 927 bp, Staphylococcus aureus VET0162R; identical to SEQ ID NO: 18619

SEQ ID NO: 21427 - DNA, 396 bp, Staphylococcus aureus VET0164R; identical to SEQ ID NO: 20102

SEQ ID NO: 21428 - DNA, 609 bp, Staphylococcus aureus VET0164R; identical to SEQ ID NO: 18624

SEQ ID NO: 21429 - DNA, 927 bp, Staphylococcus aureus VET0164R; identical to SEQ ID NO: 18619

SEQ ID NO: 21430 - DNA, 1452 bp, Staphylococcus aureus VET0165R; identical to SEQ ID NO: 18653

SEQ ID NO: 21431 - DNA, 609 bp, Staphylococcus aureus VET0165R; identical to SEQ ID NO: 18624

SEQ ID NO: 21432 - DNA, 927 bp, Staphylococcus aureus VET0165R; identical to SEQ ID NO: 18619

SEQ ID NO: 21433 - DNA, 396 bp, Staphylococcus aureus VET0166R; identical to SEQ ID NO: 20102

SEQ ID NO: 21434 - DNA, 609 bp, Staphylococcus aureus VET0166R; identical to SEQ ID NO: 18624

SEQ ID NO: 21435 - DNA, 927 bp, Staphylococcus aureus VET0166R; identical to SEQ ID NO: 18619

SEQ ID NO: 21436 - DNA, 1452 bp, Staphylococcus aureus VET0167R; identical to SEQ ID NO: 18653

SEQ ID NO: 21437 - DNA, 609 bp, Staphylococcus aureus VET0167R; identical to SEQ ID NO: 18624

SEQ ID NO: 21438 - DNA, 927 bp, Staphylococcus aureus VET0167R; identical to SEQ ID NO: 18619

SEQ ID NO: 21439 - DNA, 1452 bp, Staphylococcus aureus VET0171R; identical to SEQ ID NO: 18653

SEQ ID NO: 21440 - DNA, 609 bp, Staphylococcus aureus VET0171R; identical to SEQ ID NO: 18624

SEQ ID NO: 21441 - DNA, 927 bp, Staphylococcus aureus VET0171R; identical to SEQ ID NO: 18619

SEQ ID NO: 21442 - DNA, 1452 bp, Staphylococcus aureus VET0176R; identical to SEQ ID NO: 18653

SEQ ID NO: 21443 - DNA, 609 bp, Staphylococcus aureus VET0176R; identical to SEQ ID NO: 18624

SEQ ID NO: 21444 - DNA, 927 bp, Staphylococcus aureus VET0176R; identical to SEQ ID NO: 18619

SEQ ID NO: 21445 - DNA, 1452 bp, Staphylococcus aureus VET0177R; identical to SEQ ID NO: 18653

SEQ ID NO: 21446 - DNA, 609 bp, Staphylococcus aureus VET0177R; identical to SEQ ID NO: 18624

SEQ ID NO: 21447 - DNA, 927 bp, Staphylococcus aureus VET0177R; identical to SEQ ID NO: 18619

SEQ ID NO: 21448 - DNA, 1452 bp, Staphylococcus aureus VET0178R; identical to SEQ ID NO: 18653

SEQ ID NO: 21449 - DNA, 609 bp, Staphylococcus aureus VET0178R; identical to SEQ ID NO: 18624

SEQ ID NO: 21450 - DNA, 927 bp, Staphylococcus aureus VET0178R; identical to SEQ ID NO: 18619

SEQ ID NO: 21451 - DNA, 1452 bp, Staphylococcus aureus VET0179R; identical to SEQ ID NO: 18653

SEQ ID NO: 21452 - DNA, 609 bp, Staphylococcus aureus VET0179R; identical to SEQ ID NO: 18624

SEQ ID NO: 21453 - DNA, 927 bp, Staphylococcus aureus VET0179R; identical to SEQ ID NO: 18619

SEQ ID NO: 21454 - DNA, 1452 bp, Staphylococcus aureus VET0180R; identical to SEQ ID NO: 18653

SEQ ID NO: 21455 - DNA, 609 bp, Staphylococcus aureus VET0180R; identical to SEQ ID NO: 18624

SEQ ID NO: 21456 - DNA, 927 bp, Staphylococcus aureus VET0180R; identical to SEQ ID NO: 18619

SEQ ID NO: 21457 - DNA, 1452 bp, Staphylococcus aureus VET0188R; identical to SEQ ID NO: 18653

SEQ ID NO: 21458 - DNA, 609 bp, Staphylococcus aureus VET0188R; identical to SEQ ID NO: 18624

SEQ ID NO: 21459 - DNA, 927 bp, Staphylococcus aureus VET0188R; identical to SEQ ID NO: 18619

SEQ ID NO: 21460 - DNA, 1452 bp, Staphylococcus aureus VET0189R; identical to SEQ ID NO: 18653

SEQ ID NO: 21461 - DNA, 609 bp, Staphylococcus aureus VET0189R; identical to SEQ ID NO: 18624

SEQ ID NO: 21462 - DNA, 927 bp, Staphylococcus aureus VET0189R; identical to SEQ ID NO: 18619

SEQ ID NO: 21463 - DNA, 1452 bp, Staphylococcus aureus VET0190R; identical to SEQ ID NO: 18653

SEQ ID NO: 21464 - DNA, 609 bp, Staphylococcus aureus VET0190R; identical to SEQ ID NO: 18624

SEQ ID NO: 21465 - DNA, 927 bp, Staphylococcus aureus VET0190R; identical to SEQ ID NO: 18619

SEQ ID NO: 21466 - DNA, 1452 bp, Staphylococcus aureus VET0192R; identical to SEQ ID NO: 18653

SEQ ID NO: 21467 - DNA, 609 bp, Staphylococcus aureus VET0192R; identical to SEQ ID NO: 18624

SEQ ID NO: 21468 - DNA, 927 bp, Staphylococcus aureus VET0192R; identical to SEQ ID NO: 18619

SEQ ID NO: 21469 - DNA, 1452 bp, Staphylococcus aureus VET0193R; identical to SEQ ID NO: 18653

SEQ ID NO: 21470 - DNA, 609 bp, Staphylococcus aureus VET0193R; identical to SEQ ID NO: 18624

SEQ ID NO: 21471 - DNA, 927 bp, Staphylococcus aureus VET0193R; identical to SEQ ID NO: 18619

SEQ ID NO: 21472 - DNA, 1452 bp, Staphylococcus aureus VET0194R; identical to SEQ ID NO: 18653

SEQ ID NO: 21473 - DNA, 609 bp, Staphylococcus aureus VET0194R; identical to SEQ ID NO: 18624

SEQ ID NO: 21474 - DNA, 927 bp, Staphylococcus aureus VET0194R; identical to SEQ ID NO: 18619

SEQ ID NO: 21475 - DNA, 1452 bp, Staphylococcus aureus VET0195R; identical to SEQ ID NO: 18653

SEQ ID NO: 21476 - DNA, 609 bp, Staphylococcus aureus VET0195R; identical to SEQ ID NO: 18624

SEQ ID NO: 21477 - DNA, 927 bp, Staphylococcus aureus VET0195R; identical to SEQ ID NO: 18619

SEQ ID NO: 21478 - DNA, 1452 bp, Staphylococcus aureus VET0198R; identical to SEQ ID NO: 18653

SEQ ID NO: 21479 - DNA, 609 bp, Staphylococcus aureus VET0198R; identical to SEQ ID NO: 18624

SEQ ID NO: 21480 - DNA, 927 bp, Staphylococcus aureus VET0198R; identical to SEQ ID NO: 18619

SEQ ID NO: 21481 - DNA, 1452 bp, Staphylococcus aureus VET0200R; identical to SEQ ID NO: 18653

SEQ ID NO: 21482 - DNA, 609 bp, Staphylococcus aureus VET0200R; identical to SEQ ID NO: 18624

SEQ ID NO: 21483 - DNA, 927 bp, Staphylococcus aureus VET0200R
gtggaaagacaacaaacttacaaagaaaaagcgcaacacctatataaagttaaaaaaatcaaaaatagatataatacgaaaagtgcagaagaatattttttctcgattcctcaagtaaaatacattctttcagcaggaagaatgaaaaaacataaagagaattataatgcttcagagataaaaataaaaaaagcagctttagaaaagagtaggaagaataagaattggaaaattgaagaacgtttaataaaagctaagagatatactcaaaaagttgatccagaatacttaaatatttatatgaaagcttatcataagaaagatataactacagaagaaaaactagaaattctaacggaattaaaaaaatttgatacagaaaatatagtgcgtttttttagaaaattaaatgatgctgaacaaaataaaatgattagaaatttagcctttaaatatttacaagattacggtcactatgtgaaactaaggaaaaattttaaaggaaagaagaaagtatgtcaaactgagagagcttctttagacactaaaaaacctgaagatttatataatgatttaacaaataagaatattcaatctcaaaaagtctatgatatttttatttctcatagtacaaaagataagaagacagttgaagatattataagagtttttaatgaacaaaataaaacgtgttattgtgattggactatggatcaagattatttaaaaaggaagtatgttggtgaatatacaaagcaagtattgaaggctcgtatggagcaaagtaaaatgctggttttgttgagaacggagaattcagttcaatctgattgggttagttttgaaatagaatactttgaaaatctaaaaaaacctatatatatagtagagtctcttgaagaattattagaggctttttcagattag

SEQ ID NO: 21484 - DNA, 1452 bp, Staphylococcus aureus VET0212R; identical to SEQ ID NO: 18653

SEQ ID NO: 21485 - DNA, 609 bp, Staphylococcus aureus VET0212R; identical to SEQ ID NO: 18624

SEQ ID NO: 21486 - DNA, 927 bp, Staphylococcus aureus VET0212R; identical to SEQ ID NO: 18619

SEQ ID NO: 21487 - DNA, 1452 bp, Staphylococcus aureus VET0213R; identical to SEQ ID NO: 18653

SEQ ID NO: 21488 - DNA, 609 bp, Staphylococcus aureus VET0213R; identical to SEQ ID NO: 18624

SEQ ID NO: 21489 - DNA, 927 bp, Staphylococcus aureus VET0213R; identical to SEQ ID NO: 18619

SEQ ID NO: 21490 - DNA, 1452 bp, Staphylococcus aureus VET0214R; identical to SEQ ID NO: 18653

SEQ ID NO: 21491 - DNA, 609 bp, Staphylococcus aureus VET0214R; identical to SEQ ID NO: 18624

SEQ ID NO: 21492 - DNA, 927 bp, Staphylococcus aureus VET0214R; identical to SEQ ID NO: 18619

SEQ ID NO: 21493 - DNA, 396 bp, Staphylococcus aureus VET0215R; identical to SEQ ID NO: 20102

SEQ ID NO: 21494 - DNA, 609 bp, Staphylococcus aureus VET0215R; identical to SEQ ID NO: 18624

SEQ ID NO: 21495 - DNA, 927 bp, Staphylococcus aureus VET0215R; identical to SEQ ID NO: 18619

SEQ ID NO: 21496 - DNA, 1452 bp, Staphylococcus aureus VET0216R; identical to SEQ ID NO: 18653

SEQ ID NO: 21497 - DNA, 609 bp, Staphylococcus aureus VET0216R; identical to SEQ ID NO: 18624

SEQ ID NO: 21498 - DNA, 927 bp, Staphylococcus aureus VET0216R; identical to SEQ ID NO: 18619

SEQ ID NO: 21499 - DNA, 1452 bp, Staphylococcus aureus VET0217R; identical to SEQ ID NO: 18653

SEQ ID NO: 21500 - DNA, 609 bp, Staphylococcus aureus VET0217R; identical to SEQ ID NO: 18624

SEQ ID NO: 21501 - DNA, 927 bp, Staphylococcus aureus VET0217R; identical to SEQ ID NO: 18619

SEQ ID NO: 21502 - DNA, 1452 bp, Staphylococcus aureus VET0218R; identical to SEQ ID NO: 18653

SEQ ID NO: 21503 - DNA, 609 bp, Staphylococcus aureus VET0218R; identical to SEQ ID NO: 18624

SEQ ID NO: 21504 - DNA, 927 bp, Staphylococcus aureus VET0218R; identical to SEQ ID NO: 18619

SEQ ID NO: 21505 - DNA, 1452 bp, Staphylococcus aureus VET0221R; identical to SEQ ID NO: 18653

SEQ ID NO: 21506 - DNA, 609 bp, Staphylococcus aureus VET0221R; identical to SEQ ID NO: 18624

SEQ ID NO: 21507 - DNA, 927 bp, Staphylococcus aureus VET0221R; identical to SEQ ID NO: 18619

SEQ ID NO: 21508 - DNA, 1452 bp, Staphylococcus aureus VET0222R; identical to SEQ ID NO: 18653

SEQ ID NO: 21509 - DNA, 609 bp, Staphylococcus aureus VET0222R; identical to SEQ ID NO: 18624

SEQ ID NO: 21510 - DNA, 927 bp, Staphylococcus aureus VET0222R; identical to SEQ ID NO: 18619

SEQ ID NO: 21511 - DNA, 396 bp, Staphylococcus aureus VET0224R; identical to SEQ ID NO: 20102

SEQ ID NO: 21512 - DNA, 609 bp, Staphylococcus aureus VET0224R; identical to SEQ ID NO: 18624

SEQ ID NO: 21513 - DNA, 927 bp, Staphylococcus aureus VET0224R; identical to SEQ ID NO: 18619

SEQ ID NO: 21514 - DNA, 1452 bp, Staphylococcus aureus VET0227R; identical to SEQ ID NO: 18653

SEQ ID NO: 21515 - DNA, 609 bp, Staphylococcus aureus VET0227R; identical to SEQ ID NO: 18624

SEQ ID NO: 21516 - DNA, 927 bp, Staphylococcus aureus VET0227R; identical to SEQ ID NO: 18619

SEQ ID NO: 21517 - DNA, 396 bp, Staphylococcus aureus VET0228R; identical to SEQ ID NO: 20102

SEQ ID NO: 21518 - DNA, 609 bp, Staphylococcus aureus VET0228R; identical to SEQ ID NO: 18624

SEQ ID NO: 21519 - DNA, 927 bp, Staphylococcus aureus VET0228R; identical to SEQ ID NO: 18619

SEQ ID NO: 21520 - DNA, 1452 bp, Staphylococcus aureus VET0230R; identical to SEQ ID NO: 18653

SEQ ID NO: 21521 - DNA, 609 bp, Staphylococcus aureus VET0230R; identical to SEQ ID NO: 18624

SEQ ID NO: 21522 - DNA, 927 bp, Staphylococcus aureus VET0230R; identical to SEQ ID NO: 18619

SEQ ID NO: 21523 - DNA, 1452 bp, Staphylococcus aureus VET0236R; identical to SEQ ID NO: 18653

SEQ ID NO: 21524 - DNA, 609 bp, Staphylococcus aureus VET0236R; identical to SEQ ID NO: 18624

SEQ ID NO: 21525 - DNA, 927 bp, Staphylococcus aureus VET0236R; identical to SEQ ID NO: 18619

SEQ ID NO: 21526 - DNA, 1452 bp, Staphylococcus aureus VET0237R; identical to SEQ ID NO: 18653

SEQ ID NO: 21527 - DNA, 609 bp, Staphylococcus aureus VET0237R; identical to SEQ ID NO: 18624

SEQ ID NO: 21528 - DNA, 927 bp, Staphylococcus aureus VET0237R; identical to SEQ ID NO: 18619

SEQ ID NO: 21529 - DNA, 1452 bp, Staphylococcus aureus VET0241R; identical to SEQ ID NO: 18653

SEQ ID NO: 21530 - DNA, 609 bp, Staphylococcus aureus VET0241R; identical to SEQ ID NO: 18624

SEQ ID NO: 21531 - DNA, 927 bp, Staphylococcus aureus VET0241R; identical to SEQ ID NO: 18619

SEQ ID NO: 21532 - DNA, 1452 bp, Staphylococcus aureus VET0243R; identical to SEQ ID NO: 18653

SEQ ID NO: 21533 - DNA, 609 bp, Staphylococcus aureus VET0243R; identical to SEQ ID NO: 18624

SEQ ID NO: 21534 - DNA, 927 bp, Staphylococcus aureus VET0243R; identical to SEQ ID NO: 18619

SEQ ID NO: 21535 - DNA, 1452 bp, Staphylococcus aureus VET0247R; identical to SEQ ID NO: 18653

SEQ ID NO: 21536 - DNA, 609 bp, Staphylococcus aureus VET0247R; identical to SEQ ID NO: 18624

SEQ ID NO: 21537 - DNA, 927 bp, Staphylococcus aureus VET0247R; identical to SEQ ID NO: 18619

SEQ ID NO: 21538 - DNA, 1452 bp, Staphylococcus aureus VET0249R; identical to SEQ ID NO: 18653

SEQ ID NO: 21539 - DNA, 609 bp, Staphylococcus aureus VET0249R; identical to SEQ ID NO: 18624

SEQ ID NO: 21540 - DNA, 927 bp, Staphylococcus aureus VET0249R; identical to SEQ ID NO: 18619

SEQ ID NO: 21541 - DNA, 1452 bp, Staphylococcus aureus VET0252R; identical to SEQ ID NO: 18653

SEQ ID NO: 21542 - DNA, 609 bp, Staphylococcus aureus VET0252R; identical to SEQ ID NO: 18624

SEQ ID NO: 21543 - DNA, 927 bp, Staphylococcus aureus VET0252R; identical to SEQ ID NO: 18619

SEQ ID NO: 21544 - DNA, 1452 bp, Staphylococcus aureus VET0253R; identical to SEQ ID NO: 18653

SEQ ID NO: 21545 - DNA, 609 bp, Staphylococcus aureus VET0253R; identical to SEQ ID NO: 18624

SEQ ID NO: 21546 - DNA, 927 bp, Staphylococcus aureus VET0253R; identical to SEQ ID NO: 18619

SEQ ID NO: 21547 - DNA, 1452 bp, Staphylococcus aureus VET0254R; identical to SEQ ID NO: 18653

SEQ ID NO: 21548 - DNA, 609 bp, Staphylococcus aureus VET0254R; identical to SEQ ID NO: 18624

SEQ ID NO: 21549 - DNA, 927 bp, Staphylococcus aureus VET0254R; identical to SEQ ID NO: 18619

SEQ ID NO: 21550 - DNA, 1452 bp, Staphylococcus aureus VET0256R; identical to SEQ ID NO: 18653

SEQ ID NO: 21551 - DNA, 609 bp, Staphylococcus aureus VET0256R; identical to SEQ ID NO: 18624

SEQ ID NO: 21552 - DNA, 927 bp, Staphylococcus aureus VET0256R; identical to SEQ ID NO: 18619

SEQ ID NO: 21553 - DNA, 1452 bp, Staphylococcus aureus VET0259R; identical to SEQ ID NO: 18653

SEQ ID NO: 21554 - DNA, 609 bp, Staphylococcus aureus VET0259R; identical to SEQ ID NO: 18624

SEQ ID NO: 21555 - DNA, 927 bp, Staphylococcus aureus VET0259R; identical to SEQ ID NO: 18619

SEQ ID NO: 21556 - DNA, 396 bp, Staphylococcus aureus VET0260R; identical to SEQ ID NO: 20102

SEQ ID NO: 21557 - DNA, 609 bp, Staphylococcus aureus VET0260R; identical to SEQ ID NO: 18624

SEQ ID NO: 21558 - DNA, 927 bp, Staphylococcus aureus VET0260R; identical to SEQ ID NO: 18619

SEQ ID NO: 21559 - DNA, 396 bp, Staphylococcus aureus VET0261R; identical to SEQ ID NO: 20102

SEQ ID NO: 21560 - DNA, 609 bp, Staphylococcus aureus VET0261R; identical to SEQ ID NO: 18624

SEQ ID NO: 21561 - DNA, 927 bp, Staphylococcus aureus VET0261R; identical to SEQ ID NO: 18619

SEQ ID NO: 21562 - DNA, 1452 bp, Staphylococcus aureus VET0263R; identical to SEQ ID NO: 18653

SEQ ID NO: 21563 - DNA, 609 bp, Staphylococcus aureus VET0263R; identical to SEQ ID NO: 18624

SEQ ID NO: 21564 - DNA, 927 bp, Staphylococcus aureus VET0263R; identical to SEQ ID NO: 18619

SEQ ID NO: 21565 - DNA, 1452 bp, Staphylococcus aureus VET0267R; identical to SEQ ID NO: 18653

SEQ ID NO: 21566 - DNA, 609 bp, Staphylococcus aureus VET0267R; identical to SEQ ID NO: 18624

SEQ ID NO: 21567 - DNA, 927 bp, Staphylococcus aureus VET0267R; identical to SEQ ID NO: 18619

SEQ ID NO: 21568 - DNA, 1452 bp, Staphylococcus aureus VET0268R; identical to SEQ ID NO: 18653

SEQ ID NO: 21569 - DNA, 609 bp, Staphylococcus aureus VET0268R; identical to SEQ ID NO: 18624

SEQ ID NO: 21570 - DNA, 927 bp, Staphylococcus aureus VET0268R; identical to SEQ ID NO: 18619

SEQ ID NO: 21571 - DNA, 1452 bp, Staphylococcus aureus VET0269R; identical to SEQ ID NO: 18653

SEQ ID NO: 21572 - DNA, 609 bp, Staphylococcus aureus VET0269R; identical to SEQ ID NO: 18624

SEQ ID NO: 21573 - DNA, 927 bp, Staphylococcus aureus VET0269R; identical to SEQ ID NO: 18619

SEQ ID NO: 21574 - DNA, 1452 bp, Staphylococcus aureus VET0270R; identical to SEQ ID NO: 18653

SEQ ID NO: 21575 - DNA, 609 bp, Staphylococcus aureus VET0270R; identical to SEQ ID NO: 18624

SEQ ID NO: 21576 - DNA, 927 bp, Staphylococcus aureus VET0270R; identical to SEQ ID NO: 18619

SEQ ID NO: 21577 - DNA, 1452 bp, Staphylococcus aureus VET0271R; identical to SEQ ID NO: 18653

SEQ ID NO: 21578 - DNA, 609 bp, Staphylococcus aureus VET0271R; identical to SEQ ID NO: 18624

SEQ ID NO: 21579 - DNA, 927 bp, Staphylococcus aureus VET0271R; identical to SEQ ID NO: 18619

SEQ ID NO: 21580 - DNA, 1452 bp, Staphylococcus aureus VET0275R; identical to SEQ ID NO: 18653

SEQ ID NO: 21581 - DNA, 609 bp, Staphylococcus aureus VET0275R; identical to SEQ ID NO: 18624

SEQ ID NO: 21582 - DNA, 927 bp, Staphylococcus aureus VET0275R; identical to SEQ ID NO: 18619

SEQ ID NO: 21583 - DNA, 1452 bp, Staphylococcus aureus VET0278R; identical to SEQ ID NO: 18653

SEQ ID NO: 21584 - DNA, 609 bp, Staphylococcus aureus VET0278R; identical to SEQ ID NO: 18624

SEQ ID NO: 21585 - DNA, 927 bp, Staphylococcus aureus VET0278R; identical to SEQ ID NO: 18619

SEQ ID NO: 21586 - DNA, 1452 bp, Staphylococcus aureus VET0279R; identical to SEQ ID NO: 18653

SEQ ID NO: 21587 - DNA, 609 bp, Staphylococcus aureus VET0279R; identical to SEQ ID NO: 18624

SEQ ID NO: 21588 - DNA, 927 bp, Staphylococcus aureus VET0279R; identical to SEQ ID NO: 18619

SEQ ID NO: 21589 - DNA, 1452 bp, Staphylococcus aureus VET0280R; identical to SEQ ID NO: 18653

SEQ ID NO: 21590 - DNA, 609 bp, Staphylococcus aureus VET0280R; identical to SEQ ID NO: 18624

SEQ ID NO: 21591 - DNA, 927 bp, Staphylococcus aureus VET0280R; identical to SEQ ID NO: 18619

SEQ ID NO: 21592 - DNA, 1452 bp, Staphylococcus aureus VET0282R; identical to SEQ ID NO: 18653

SEQ ID NO: 21593 - DNA, 609 bp, Staphylococcus aureus VET0282R; identical to SEQ ID NO: 18624

SEQ ID NO: 21594 - DNA, 927 bp, Staphylococcus aureus VET0282R; identical to SEQ ID NO: 18619

SEQ ID NO: 21595 - DNA, 1452 bp, Staphylococcus aureus VET0283R; identical to SEQ ID NO: 18653

SEQ ID NO: 21596 - DNA, 609 bp, Staphylococcus aureus VET0283R; identical to SEQ ID NO: 18624

SEQ ID NO: 21597 - DNA, 927 bp, Staphylococcus aureus VET0283R; identical to SEQ ID NO: 18619

SEQ ID NO: 21598 - DNA, 1452 bp, Staphylococcus aureus VET0284R; identical to SEQ ID NO: 18653

SEQ ID NO: 21599 - DNA, 609 bp, Staphylococcus aureus VET0284R; identical to SEQ ID NO: 18624

SEQ ID NO: 21600 - DNA, 927 bp, Staphylococcus aureus VET0284R; identical to SEQ ID NO: 18619

SEQ ID NO: 21601 - DNA, 1452 bp, Staphylococcus aureus VET0286R; identical to SEQ ID NO: 18653

SEQ ID NO: 21602 - DNA, 609 bp, Staphylococcus aureus VET0286R; identical to SEQ ID NO: 18624

SEQ ID NO: 21603 - DNA, 927 bp, Staphylococcus aureus VET0286R; identical to SEQ ID NO: 18619

SEQ ID NO: 21604 - DNA, 1452 bp, Staphylococcus aureus VET0287R; identical to SEQ ID NO: 18653

SEQ ID NO: 21605 - DNA, 609 bp, Staphylococcus aureus VET0287R; identical to SEQ ID NO: 18624

SEQ ID NO: 21606 - DNA, 927 bp, Staphylococcus aureus VET0287R; identical to SEQ ID NO: 18619

SEQ ID NO: 21607 - DNA, 1452 bp, Staphylococcus aureus VET0288R; identical to SEQ ID NO: 18653

SEQ ID NO: 21608 - DNA, 609 bp, Staphylococcus aureus VET0288R; identical to SEQ ID NO: 18624

SEQ ID NO: 21609 - DNA, 927 bp, Staphylococcus aureus VET0288R; identical to SEQ ID NO: 18619

SEQ ID NO: 21610 - DNA, 1452 bp, Staphylococcus aureus VET0289R; identical to SEQ ID NO: 18653

SEQ ID NO: 21611 - DNA, 609 bp, Staphylococcus aureus VET0289R; identical to SEQ ID NO: 18624

SEQ ID NO: 21612 - DNA, 927 bp, Staphylococcus aureus VET0289R; identical to SEQ ID NO: 18619

SEQ ID NO: 21613 - DNA, 1452 bp, Staphylococcus aureus VET0290R; identical to SEQ ID NO: 18653

SEQ ID NO: 21614 - DNA, 609 bp, Staphylococcus aureus VET0290R; identical to SEQ ID NO: 18624

SEQ ID NO: 21615 - DNA, 927 bp, Staphylococcus aureus VET0290R; identical to SEQ ID NO: 18619

SEQ ID NO: 21616 - DNA, 1452 bp, Staphylococcus aureus VET0291R; identical to SEQ ID NO: 18653

SEQ ID NO: 21617 - DNA, 609 bp, Staphylococcus aureus VET0291R; identical to SEQ ID NO: 18624

SEQ ID NO: 21618 - DNA, 927 bp, Staphylococcus aureus VET0291R; identical to SEQ ID NO: 18619

SEQ ID NO: 21619 - DNA, 1452 bp, Staphylococcus aureus VET0292R; identical to SEQ ID NO: 18653

SEQ ID NO: 21620 - DNA, 609 bp, Staphylococcus aureus VET0292R; identical to SEQ ID NO: 18624

SEQ ID NO: 21621 - DNA, 927 bp, Staphylococcus aureus VET0292R; identical to SEQ ID NO: 18619

SEQ ID NO: 21622 - DNA, 1452 bp, Staphylococcus aureus VET0294R; identical to SEQ ID NO: 18653

SEQ ID NO: 21623 - DNA, 609 bp, Staphylococcus aureus VET0294R; identical to SEQ ID NO: 18624

SEQ ID NO: 21624 - DNA, 927 bp, Staphylococcus aureus VET0294R; identical to SEQ ID NO: 18619

SEQ ID NO: 21625 - DNA, 1452 bp, Staphylococcus aureus VET0295R; identical to SEQ ID NO: 18653

SEQ ID NO: 21626 - DNA, 609 bp, Staphylococcus aureus VET0295R; identical to SEQ ID NO: 18624

SEQ ID NO: 21627 - DNA, 927 bp, Staphylococcus aureus VET0295R; identical to SEQ ID NO: 20230

SEQ ID NO: 21628 - DNA, 1452 bp, Staphylococcus aureus VET0296R; identical to SEQ ID NO: 18653

SEQ ID NO: 21629 - DNA, 609 bp, Staphylococcus aureus VET0296R; identical to SEQ ID NO: 18624

SEQ ID NO: 21630 - DNA, 927 bp, Staphylococcus aureus VET0296R; identical to SEQ ID NO: 18619

SEQ ID NO: 21631 - DNA, 1452 bp, Staphylococcus aureus VET0297R; identical to SEQ ID NO: 18653

SEQ ID NO: 21632 - DNA, 609 bp, Staphylococcus aureus VET0297R; identical to SEQ ID NO: 18624

SEQ ID NO: 21633 - DNA, 927 bp, Staphylococcus aureus VET0297R; identical to SEQ ID NO: 18619

SEQ ID NO: 21634 - DNA, 1452 bp, Staphylococcus aureus VET0299R; identical to SEQ ID NO: 18653

SEQ ID NO: 21635 - DNA, 609 bp, Staphylococcus aureus VET0299R; identical to SEQ ID NO: 18624

SEQ ID NO: 21636 - DNA, 927 bp, Staphylococcus aureus VET0299R; identical to SEQ ID NO: 20230

SEQ ID NO: 21637 - DNA, 1452 bp, Staphylococcus aureus VET0300R; identical to SEQ ID NO: 18653

SEQ ID NO: 21638 - DNA, 609 bp, Staphylococcus aureus VET0300R; identical to SEQ ID NO: 18624

SEQ ID NO: 21639 - DNA, 927 bp, Staphylococcus aureus VET0300R; identical to SEQ ID NO: 18619

SEQ ID NO: 21640 - DNA, 1452 bp, Staphylococcus aureus VET0302R; identical to SEQ ID NO: 18653

SEQ ID NO: 21641 - DNA, 609 bp, Staphylococcus aureus VET0302R; identical to SEQ ID NO: 18624

SEQ ID NO: 21642 - DNA, 927 bp, Staphylococcus aureus VET0302R; identical to SEQ ID NO: 18619

SEQ ID NO: 21643 - DNA, 1452 bp, Staphylococcus aureus VET0303R; identical to SEQ ID NO: 18653

SEQ ID NO: 21644 - DNA, 609 bp, Staphylococcus aureus VET0303R; identical to SEQ ID NO: 18624

SEQ ID NO: 21645 - DNA, 927 bp, Staphylococcus aureus VET0303R; identical to SEQ ID NO: 18619

SEQ ID NO: 21646 - DNA, 1452 bp, Staphylococcus aureus VET0304R; identical to SEQ ID NO: 18653

SEQ ID NO: 21647 - DNA, 609 bp, Staphylococcus aureus VET0304R; identical to SEQ ID NO: 18624

SEQ ID NO: 21648 - DNA, 927 bp, Staphylococcus aureus VET0304R; identical to SEQ ID NO: 18619

SEQ ID NO: 21649 - DNA, 1452 bp, Staphylococcus aureus VET0305R; identical to SEQ ID NO: 18653

SEQ ID NO: 21650 - DNA, 609 bp, Staphylococcus aureus VET0305R; identical to SEQ ID NO: 18624

SEQ ID NO: 21651 - DNA, 927 bp, Staphylococcus aureus VET0305R; identical to SEQ ID NO: 18619

SEQ ID NO: 21652 - DNA, 1452 bp, Staphylococcus aureus VET0307R; identical to SEQ ID NO: 18653

SEQ ID NO: 21653 - DNA, 609 bp, Staphylococcus aureus VET0307R; identical to SEQ ID NO: 18624

SEQ ID NO: 21654 - DNA, 927 bp, Staphylococcus aureus VET0307R; identical to SEQ ID NO: 18619

SEQ ID NO: 21655 - DNA, 1452 bp, Staphylococcus aureus VET0308R; identical to SEQ ID NO: 18653

SEQ ID NO: 21656 - DNA, 609 bp, Staphylococcus aureus VET0308R; identical to SEQ ID NO: 18624

SEQ ID NO: 21657 - DNA, 927 bp, Staphylococcus aureus VET0308R; identical to SEQ ID NO: 18619

SEQ ID NO: 21658 - DNA, 1452 bp, Staphylococcus aureus VET0309R; identical to SEQ ID NO: 18653

SEQ ID NO: 21659 - DNA, 609 bp, Staphylococcus aureus VET0309R; identical to SEQ ID NO: 18624

SEQ ID NO: 21660 - DNA, 927 bp, Staphylococcus aureus VET0309R; identical to SEQ ID NO: 18619

SEQ ID NO: 21661 - DNA, 1452 bp, Staphylococcus aureus VET0312R; identical to SEQ ID NO: 18653

SEQ ID NO: 21662 - DNA, 609 bp, Staphylococcus aureus VET0312R; identical to SEQ ID NO: 18624

SEQ ID NO: 21663 - DNA, 927 bp, Staphylococcus aureus VET0312R; identical to SEQ ID NO: 18619

SEQ ID NO: 21664 - DNA, 1452 bp, Staphylococcus aureus VET0313R; identical to SEQ ID NO: 18653

SEQ ID NO: 21665 - DNA, 609 bp, Staphylococcus aureus VET0313R; identical to SEQ ID NO: 18624

SEQ ID NO: 21666 - DNA, 927 bp, Staphylococcus aureus VET0313R; identical to SEQ ID NO: 18619

SEQ ID NO: 21667 - DNA, 1452 bp, Staphylococcus aureus VET0314R; identical to SEQ ID NO: 18653

SEQ ID NO: 21668 - DNA, 609 bp, Staphylococcus aureus VET0314R; identical to SEQ ID NO: 18624

SEQ ID NO: 21669 - DNA, 927 bp, Staphylococcus aureus VET0314R; identical to SEQ ID NO: 18619

SEQ ID NO: 21670 - DNA, 1452 bp, Staphylococcus aureus VET0315R; identical to SEQ ID NO: 18653

SEQ ID NO: 21671 - DNA, 609 bp, Staphylococcus aureus VET0315R; identical to SEQ ID NO: 18624

SEQ ID NO: 21672 - DNA, 927 bp, Staphylococcus aureus VET0315R; identical to SEQ ID NO: 18619

SEQ ID NO: 21673 - DNA, 1452 bp, Staphylococcus aureus VET0316R; identical to SEQ ID NO: 18653

SEQ ID NO: 21674 - DNA, 609 bp, Staphylococcus aureus VET0316R; identical to SEQ ID NO: 18624

SEQ ID NO: 21675 - DNA, 927 bp, Staphylococcus aureus VET0316R; identical to SEQ ID NO: 18619

SEQ ID NO: 21676 - DNA, 1452 bp, Staphylococcus aureus VET0317R; identical to SEQ ID NO: 18653

SEQ ID NO: 21677 - DNA, 609 bp, Staphylococcus aureus VET0317R; identical to SEQ ID NO: 18624

SEQ ID NO: 21678 - DNA, 927 bp, Staphylococcus aureus VET0317R; identical to SEQ ID NO: 18619

SEQ ID NO: 21679 - DNA, 1452 bp, Staphylococcus aureus VET0318R; identical to SEQ ID NO: 18653

SEQ ID NO: 21680 - DNA, 609 bp, Staphylococcus aureus VET0318R; identical to SEQ ID NO: 18624

SEQ ID NO: 21681 - DNA, 927 bp, Staphylococcus aureus VET0318R; identical to SEQ ID NO: 18619

SEQ ID NO: 21682 - DNA, 1452 bp, Staphylococcus aureus VET0320R; identical to SEQ ID NO: 18653

SEQ ID NO: 21683 - DNA, 609 bp, Staphylococcus aureus VET0320R; identical to SEQ ID NO: 18624

SEQ ID NO: 21684 - DNA, 927 bp, Staphylococcus aureus VET0320R; identical to SEQ ID NO: 18619

SEQ ID NO: 21685 - DNA, 1452 bp, Staphylococcus aureus VET0322R; identical to SEQ ID NO: 18653

SEQ ID NO: 21686 - DNA, 609 bp, Staphylococcus aureus VET0322R; identical to SEQ ID NO: 18624

SEQ ID NO: 21687 - DNA, 927 bp, Staphylococcus aureus VET0322R; identical to SEQ ID NO: 18619

SEQ ID NO: 21688 - DNA, 1452 bp, Staphylococcus aureus VET0323R; identical to SEQ ID NO: 18653

SEQ ID NO: 21689 - DNA, 609 bp, Staphylococcus aureus VET0323R; identical to SEQ ID NO: 18624

SEQ ID NO: 21690 - DNA, 927 bp, Staphylococcus aureus VET0323R; identical to SEQ ID NO: 18619

SEQ ID NO: 21691 - DNA, 1452 bp, Staphylococcus aureus VET0325R; identical to SEQ ID NO: 18653

SEQ ID NO: 21692 - DNA, 609 bp, Staphylococcus aureus VET0325R; identical to SEQ ID NO: 18624

SEQ ID NO: 21693 - DNA, 927 bp, Staphylococcus aureus VET0325R; identical to SEQ ID NO: 18619

SEQ ID NO: 21694 - DNA, 1452 bp, Staphylococcus aureus VET0326R; identical to SEQ ID NO: 18653

SEQ ID NO: 21695 - DNA, 609 bp, Staphylococcus aureus VET0326R; identical to SEQ ID NO: 18624

SEQ ID NO: 21696 - DNA, 927 bp, Staphylococcus aureus VET0326R; identical to SEQ ID NO: 18619

SEQ ID NO: 21697 - DNA, 1452 bp, Staphylococcus aureus VET0329R; identical to SEQ ID NO: 18653

SEQ ID NO: 21698 - DNA, 609 bp, Staphylococcus aureus VET0329R; identical to SEQ ID NO: 18624

SEQ ID NO: 21699 - DNA, 927 bp, Staphylococcus aureus VET0329R; identical to SEQ ID NO: 21483

SEQ ID NO: 21700 - DNA, 1452 bp, Staphylococcus aureus VET0331R; identical to SEQ ID NO: 18653

SEQ ID NO: 21701 - DNA, 609 bp, Staphylococcus aureus VET0331R; identical to SEQ ID NO: 18624

SEQ ID NO: 21702 - DNA, 927 bp, Staphylococcus aureus VET0331R; identical to SEQ ID NO: 18619

SEQ ID NO: 21703 - DNA, 396 bp, Staphylococcus aureus VET0333R; identical to SEQ ID NO: 20102

SEQ ID NO: 21704 - DNA, 609 bp, Staphylococcus aureus VET0333R; identical to SEQ ID NO: 18624

SEQ ID NO: 21705 - DNA, 927 bp, Staphylococcus aureus VET0333R; identical to SEQ ID NO: 18619

SEQ ID NO: 21706 - DNA, 396 bp, Staphylococcus aureus VET0335R; identical to SEQ ID NO: 20102

SEQ ID NO: 21707 - DNA, 609 bp, Staphylococcus aureus VET0335R; identical to SEQ ID NO: 18624

SEQ ID NO: 21708 - DNA, 927 bp, Staphylococcus aureus VET0335R; identical to SEQ ID NO: 18619

SEQ ID NO: 21709 - DNA, 1452 bp, Staphylococcus aureus VET0336R; identical to SEQ ID NO: 18653

SEQ ID NO: 21710 - DNA, 609 bp, Staphylococcus aureus VET0336R; identical to SEQ ID NO: 18624

SEQ ID NO: 21711 - DNA, 927 bp, Staphylococcus aureus VET0336R; identical to SEQ ID NO: 18619

SEQ ID NO: 21712 - DNA, 1452 bp, Staphylococcus aureus VET0337R; identical to SEQ ID NO: 18653

SEQ ID NO: 21713 - DNA, 609 bp, Staphylococcus aureus VET0337R; identical to SEQ ID NO: 18624

SEQ ID NO: 21714 - DNA, 927 bp, Staphylococcus aureus VET0337R; identical to SEQ ID NO: 18619

SEQ ID NO: 21715 - DNA, 1452 bp, Staphylococcus aureus VET0338R; identical to SEQ ID NO: 18653

SEQ ID NO: 21716 - DNA, 609 bp, Staphylococcus aureus VET0338R; identical to SEQ ID NO: 18624

SEQ ID NO: 21717 - DNA, 927 bp, Staphylococcus aureus VET0338R; identical to SEQ ID NO: 18619

SEQ ID NO: 21718 - DNA, 1452 bp, Staphylococcus aureus VET0339R; identical to SEQ ID NO: 18653

SEQ ID NO: 21719 - DNA, 609 bp, Staphylococcus aureus VET0339R; identical to SEQ ID NO: 18624

SEQ ID NO: 21720 - DNA, 927 bp, Staphylococcus aureus VET0339R; identical to SEQ ID NO: 18619

SEQ ID NO: 21721 - DNA, 1452 bp, Staphylococcus aureus VET0340R; identical to SEQ ID NO: 18653

SEQ ID NO: 21722 - DNA, 609 bp, Staphylococcus aureus VET0340R; identical to SEQ ID NO: 18624

SEQ ID NO: 21723 - DNA, 927 bp, Staphylococcus aureus VET0340R; identical to SEQ ID NO: 18619

SEQ ID NO: 21724 - DNA, 1452 bp, Staphylococcus aureus VET0341R; identical to SEQ ID NO: 18653

SEQ ID NO: 21725 - DNA, 609 bp, Staphylococcus aureus VET0341R; identical to SEQ ID NO: 18624

SEQ ID NO: 21726 - DNA, 927 bp, Staphylococcus aureus VET0341R; identical to SEQ ID NO: 18619

SEQ ID NO: 21727 - DNA, 1452 bp, Staphylococcus aureus VET0352R; identical to SEQ ID NO: 18653

SEQ ID NO: 21728 - DNA, 609 bp, Staphylococcus aureus VET0352R; identical to SEQ ID NO: 18624

SEQ ID NO: 21729 - DNA, 927 bp, Staphylococcus aureus VET0352R; identical to SEQ ID NO: 18619

SEQ ID NO: 21730 - DNA, 1452 bp, Staphylococcus aureus VET0354R; identical to SEQ ID NO: 18653

SEQ ID NO: 21731 - DNA, 609 bp, Staphylococcus aureus VET0354R; identical to SEQ ID NO: 18624

SEQ ID NO: 21732 - DNA, 927 bp, Staphylococcus aureus VET0354R; identical to SEQ ID NO: 18619

SEQ ID NO: 21733 - DNA, 1452 bp, Staphylococcus aureus VET0357R; identical to SEQ ID NO: 18653

SEQ ID NO: 21734 - DNA, 609 bp, Staphylococcus aureus VET0357R; identical to SEQ ID NO: 18624

SEQ ID NO: 21735 - DNA, 927 bp, Staphylococcus aureus VET0357R; identical to SEQ ID NO: 18619

SEQ ID NO: 21736 - DNA, 1452 bp, Staphylococcus aureus VET0359R; identical to SEQ ID NO: 18653

SEQ ID NO: 21737 - DNA, 609 bp, Staphylococcus aureus VET0359R; identical to SEQ ID NO: 18624

SEQ ID NO: 21738 - DNA, 927 bp, Staphylococcus aureus VET0359R; identical to SEQ ID NO: 18619

SEQ ID NO: 21739 - DNA, 1452 bp, Staphylococcus aureus VET0360R; identical to SEQ ID NO: 18653

SEQ ID NO: 21740 - DNA, 609 bp, Staphylococcus aureus VET0360R; identical to SEQ ID NO: 18624

SEQ ID NO: 21741 - DNA, 927 bp, Staphylococcus aureus VET0360R; identical to SEQ ID NO: 18619

SEQ ID NO: 21742 - DNA, 1452 bp, Staphylococcus aureus VET0363R; identical to SEQ ID NO: 18653

SEQ ID NO: 21743 - DNA, 609 bp, Staphylococcus aureus VET0363R; identical to SEQ ID NO: 18624

SEQ ID NO: 21744 - DNA, 927 bp, Staphylococcus aureus VET0363R; identical to SEQ ID NO: 18619

SEQ ID NO: 21745 - DNA, 1452 bp, Staphylococcus aureus VET0366R; identical to SEQ ID NO: 18653

SEQ ID NO: 21746 - DNA, 609 bp, Staphylococcus aureus VET0366R; identical to SEQ ID NO: 18624

SEQ ID NO: 21747 - DNA, 927 bp, Staphylococcus aureus VET0366R; identical to SEQ ID NO: 18619

SEQ ID NO: 21748 - DNA, 1452 bp, Staphylococcus aureus VET0367R; identical to SEQ ID NO: 18653

SEQ ID NO: 21749 - DNA, 609 bp, Staphylococcus aureus VET0367R; identical to SEQ ID NO: 18624

SEQ ID NO: 21750 - DNA, 927 bp, Staphylococcus aureus VET0367R; identical to SEQ ID NO: 18619

SEQ ID NO: 21751 - DNA, 1452 bp, Staphylococcus aureus VET0369R; identical to SEQ ID NO: 18653

SEQ ID NO: 21752 - DNA, 609 bp, Staphylococcus aureus VET0369R; identical to SEQ ID NO: 18624

SEQ ID NO: 21753 - DNA, 927 bp, Staphylococcus aureus VET0369R; identical to SEQ ID NO: 18619

SEQ ID NO: 21754 - DNA, 396 bp, Staphylococcus aureus VET0373R; identical to SEQ ID NO: 20102

SEQ ID NO: 21755 - DNA, 609 bp, Staphylococcus aureus VET0373R; identical to SEQ ID NO: 18624

SEQ ID NO: 21756 - DNA, 927 bp, Staphylococcus aureus VET0373R; identical to SEQ ID NO: 18619

SEQ ID NO: 21757 - DNA, 396 bp, Staphylococcus aureus VET0376R; identical to SEQ ID NO: 20102

SEQ ID NO: 21758 - DNA, 609 bp, Staphylococcus aureus VET0376R; identical to SEQ ID NO: 18624

SEQ ID NO: 21759 - DNA, 927 bp, Staphylococcus aureus VET0376R; identical to SEQ ID NO: 18619

SEQ ID NO: 21760 - DNA, 1452 bp, Staphylococcus aureus VET0382R; identical to SEQ ID NO: 18653

SEQ ID NO: 21761 - DNA, 609 bp, Staphylococcus aureus VET0382R; identical to SEQ ID NO: 18624

SEQ ID NO: 21762 - DNA, 927 bp, Staphylococcus aureus VET0382R; identical to SEQ ID NO: 18619

SEQ ID NO: 21763 - DNA, 1452 bp, Staphylococcus aureus VET0383R; identical to SEQ ID NO: 18653

SEQ ID NO: 21764 - DNA, 609 bp, Staphylococcus aureus VET0383R; identical to SEQ ID NO: 18624

SEQ ID NO: 21765 - DNA, 927 bp, Staphylococcus aureus VET0383R; identical to SEQ ID NO: 18619

SEQ ID NO: 21766 - DNA, 1452 bp, Staphylococcus aureus VET0384R; identical to SEQ ID NO: 18653

SEQ ID NO: 21767 - DNA, 609 bp, Staphylococcus aureus VET0384R; identical to SEQ ID NO: 18624

SEQ ID NO: 21768 - DNA, 927 bp, Staphylococcus aureus VET0384R; identical to SEQ ID NO: 18619

SEQ ID NO: 21769 - DNA, 1452 bp, Staphylococcus aureus VET0387R; identical to SEQ ID NO: 18653

SEQ ID NO: 21770 - DNA, 609 bp, Staphylococcus aureus VET0387R; identical to SEQ ID NO: 18624

SEQ ID NO: 21771 - DNA, 927 bp, Staphylococcus aureus VET0387R; identical to SEQ ID NO: 18619

SEQ ID NO: 21772 - DNA, 1452 bp, Staphylococcus aureus VET0388R; identical to SEQ ID NO: 18653

SEQ ID NO: 21773 - DNA, 609 bp, Staphylococcus aureus VET0388R; identical to SEQ ID NO: 18624

SEQ ID NO: 21774 - DNA, 927 bp, Staphylococcus aureus VET0388R; identical to SEQ ID NO: 18619

SEQ ID NO: 21775 - DNA, 1452 bp, Staphylococcus aureus VET0389R; identical to SEQ ID NO: 18653

SEQ ID NO: 21776 - DNA, 609 bp, Staphylococcus aureus VET0389R; identical to SEQ ID NO: 18624

SEQ ID NO: 21777 - DNA, 927 bp, Staphylococcus aureus VET0389R; identical to SEQ ID NO: 18619

SEQ ID NO: 21778 - DNA, 1452 bp, Staphylococcus aureus VET0390R; identical to SEQ ID NO: 18653

SEQ ID NO: 21779 - DNA, 609 bp, Staphylococcus aureus VET0390R; identical to SEQ ID NO: 18624

SEQ ID NO: 21780 - DNA, 927 bp, Staphylococcus aureus VET0390R; identical to SEQ ID NO: 18619

SEQ ID NO: 21781 - DNA, 1452 bp, Staphylococcus aureus VET0393R; identical to SEQ ID NO: 18653

SEQ ID NO: 21782 - DNA, 609 bp, Staphylococcus aureus VET0393R; identical to SEQ ID NO: 18624

SEQ ID NO: 21783 - DNA, 927 bp, Staphylococcus aureus VET0393R; identical to SEQ ID NO: 18619

SEQ ID NO: 21784 - DNA, 1452 bp, Staphylococcus aureus VET0394R; identical to SEQ ID NO: 18653

SEQ ID NO: 21785 - DNA, 609 bp, Staphylococcus aureus VET0394R; identical to SEQ ID NO: 18624

SEQ ID NO: 21786 - DNA, 927 bp, Staphylococcus aureus VET0394R; identical to SEQ ID NO: 18619

SEQ ID NO: 21787 - DNA, 1452 bp, Staphylococcus aureus VET0395R; identical to SEQ ID NO: 18653

SEQ ID NO: 21788 - DNA, 609 bp, Staphylococcus aureus VET0395R; identical to SEQ ID NO: 18624

SEQ ID NO: 21789 - DNA, 927 bp, Staphylococcus aureus VET0395R; identical to SEQ ID NO: 18619

SEQ ID NO: 21790 - DNA, 1452 bp, Staphylococcus aureus VET0396R; identical to SEQ ID NO: 18653

SEQ ID NO: 21791 - DNA, 609 bp, Staphylococcus aureus VET0396R; identical to SEQ ID NO: 18624

SEQ ID NO: 21792 - DNA, 927 bp, Staphylococcus aureus VET0396R; identical to SEQ ID NO: 18619

SEQ ID NO: 21793 - DNA, 1452 bp, Staphylococcus aureus VET0399R; identical to SEQ ID NO: 18653

SEQ ID NO: 21794 - DNA, 609 bp, Staphylococcus aureus VET0399R; identical to SEQ ID NO: 18624

SEQ ID NO: 21795 - DNA, 927 bp, Staphylococcus aureus VET0399R; identical to SEQ ID NO: 18619

SEQ ID NO: 21796 - DNA, 1452 bp, Staphylococcus aureus VET0401R; identical to SEQ ID NO: 18653

SEQ ID NO: 21797 - DNA, 609 bp, Staphylococcus aureus VET0401R; identical to SEQ ID NO: 18624

SEQ ID NO: 21798 - DNA, 927 bp, Staphylococcus aureus VET0401R; identical to SEQ ID NO: 18619

SEQ ID NO: 21799 - DNA, 1452 bp, Staphylococcus aureus VET0402R; identical to SEQ ID NO: 18653

SEQ ID NO: 21800 - DNA, 609 bp, Staphylococcus aureus VET0402R; identical to SEQ ID NO: 18624

SEQ ID NO: 21801 - DNA, 927 bp, Staphylococcus aureus VET0402R; identical to SEQ ID NO: 18619

SEQ ID NO: 21802 - DNA, 1452 bp, Staphylococcus aureus VET0403R; identical to SEQ ID NO: 18653

SEQ ID NO: 21803 - DNA, 609 bp, Staphylococcus aureus VET0403R; identical to SEQ ID NO: 18624

SEQ ID NO: 21804 - DNA, 927 bp, Staphylococcus aureus VET0403R; identical to SEQ ID NO: 18619

SEQ ID NO: 21805 - DNA, 1452 bp, Staphylococcus aureus VET0406R; identical to SEQ ID NO: 18653

SEQ ID NO: 21806 - DNA, 609 bp, Staphylococcus aureus VET0406R; identical to SEQ ID NO: 18624

SEQ ID NO: 21807 - DNA, 927 bp, Staphylococcus aureus VET0406R; identical to SEQ ID NO: 18619

SEQ ID NO: 21808 - DNA, 1452 bp, Staphylococcus aureus VET0407R; identical to SEQ ID NO: 18653

SEQ ID NO: 21809 - DNA, 609 bp, Staphylococcus aureus VET0407R; identical to SEQ ID NO: 18624

SEQ ID NO: 21810 - DNA, 927 bp, Staphylococcus aureus VET0407R; identical to SEQ ID NO: 18619

SEQ ID NO: 21811 - DNA, 1452 bp, Staphylococcus aureus VET0410R; identical to SEQ ID NO: 18653

SEQ ID NO: 21812 - DNA, 609 bp, Staphylococcus aureus VET0410R; identical to SEQ ID NO: 18624

SEQ ID NO: 21813 - DNA, 927 bp, Staphylococcus aureus VET0410R; identical to SEQ ID NO: 18619

SEQ ID NO: 21814 - DNA, 1452 bp, Staphylococcus aureus VET0411R; identical to SEQ ID NO: 18653

SEQ ID NO: 21815 - DNA, 609 bp, Staphylococcus aureus VET0411R; identical to SEQ ID NO: 18624

SEQ ID NO: 21816 - DNA, 927 bp, Staphylococcus aureus VET0411R; identical to SEQ ID NO: 18619

SEQ ID NO: 21817 - DNA, 1452 bp, Staphylococcus aureus VET0412R; identical to SEQ ID NO: 18653

SEQ ID NO: 21818 - DNA, 609 bp, Staphylococcus aureus VET0412R; identical to SEQ ID NO: 18624

SEQ ID NO: 21819 - DNA, 927 bp, Staphylococcus aureus VET0412R; identical to SEQ ID NO: 18619

SEQ ID NO: 21820 - DNA, 1452 bp, Staphylococcus aureus VET0413R; identical to SEQ ID NO: 18653

SEQ ID NO: 21821 - DNA, 609 bp, Staphylococcus aureus VET0413R; identical to SEQ ID NO: 18624

SEQ ID NO: 21822 - DNA, 927 bp, Staphylococcus aureus VET0413R; identical to SEQ ID NO: 18619

SEQ ID NO: 21823 - DNA, 1452 bp, Staphylococcus aureus VET0415R; identical to SEQ ID NO: 18653

SEQ ID NO: 21824 - DNA, 609 bp, Staphylococcus aureus VET0415R; identical to SEQ ID NO: 18624

SEQ ID NO: 21825 - DNA, 927 bp, Staphylococcus aureus VET0415R; identical to SEQ ID NO: 18619

SEQ ID NO: 21826 - DNA, 1452 bp, Staphylococcus aureus VET0417R; identical to SEQ ID NO: 18653

SEQ ID NO: 21827 - DNA, 609 bp, Staphylococcus aureus VET0417R; identical to SEQ ID NO: 18624

SEQ ID NO: 21828 - DNA, 927 bp, Staphylococcus aureus VET0417R; identical to SEQ ID NO: 18619

SEQ ID NO: 21829 - DNA, 1452 bp, Staphylococcus aureus VET0418R; identical to SEQ ID NO: 18653

SEQ ID NO: 21830 - DNA, 609 bp, Staphylococcus aureus VET0418R; identical to SEQ ID NO: 18624

SEQ ID NO: 21831 - DNA, 927 bp, Staphylococcus aureus VET0418R; identical to SEQ ID NO: 18619

SEQ ID NO: 21832 - DNA, 1128 bp, Staphylococcus aureus VET0421R; identical to SEQ ID NO: 18617

SEQ ID NO: 21833 - DNA, 609 bp, Staphylococcus aureus VET0421R; identical to SEQ ID NO: 18624

SEQ ID NO: 21834 - DNA, 927 bp, Staphylococcus aureus VET0421R; identical to SEQ ID NO: 18619

SEQ ID NO: 21835 - DNA, 1452 bp, Staphylococcus aureus VET0423R; identical to SEQ ID NO: 18653

SEQ ID NO: 21836 - DNA, 609 bp, Staphylococcus aureus VET0423R; identical to SEQ ID NO: 18624

SEQ ID NO: 21837 - DNA, 927 bp, Staphylococcus aureus VET0423R; identical to SEQ ID NO: 18619

SEQ ID NO: 21838 - DNA, 1452 bp, Staphylococcus aureus VET0425R; identical to SEQ ID NO: 18653

SEQ ID NO: 21839 - DNA, 609 bp, Staphylococcus aureus VET0425R; identical to SEQ ID NO: 18624

SEQ ID NO: 21840 - DNA, 927 bp, Staphylococcus aureus VET0425R; identical to SEQ ID NO: 21483

SEQ ID NO: 21841 - DNA, 1452 bp, Staphylococcus aureus VET0427R; identical to SEQ ID NO: 18653

SEQ ID NO: 21842 - DNA, 609 bp, Staphylococcus aureus VET0427R; identical to SEQ ID NO: 18624

SEQ ID NO: 21843 - DNA, 927 bp, Staphylococcus aureus VET0427R; identical to SEQ ID NO: 18619

SEQ ID NO: 21844 - DNA, 1452 bp, Staphylococcus aureus VET0428R; identical to SEQ ID NO: 18653

SEQ ID NO: 21845 - DNA, 609 bp, Staphylococcus aureus VET0428R; identical to SEQ ID NO: 18624

SEQ ID NO: 21846 - DNA, 927 bp, Staphylococcus aureus VET0428R; identical to SEQ ID NO: 18619

SEQ ID NO: 21847 - DNA, 1452 bp, Staphylococcus aureus VET0431R; identical to SEQ ID NO: 18653

SEQ ID NO: 21848 - DNA, 609 bp, Staphylococcus aureus VET0431R; identical to SEQ ID NO: 18624

SEQ ID NO: 21849 - DNA, 927 bp, Staphylococcus aureus VET0431R; identical to SEQ ID NO: 18619

SEQ ID NO: 21850 - DNA, 1452 bp, Staphylococcus aureus VET0432R; identical to SEQ ID NO: 18653

SEQ ID NO: 21851 - DNA, 609 bp, Staphylococcus aureus VET0432R; identical to SEQ ID NO: 18624

SEQ ID NO: 21852 - DNA, 927 bp, Staphylococcus aureus VET0432R; identical to SEQ ID NO: 18619

SEQ ID NO: 21853 - DNA, 1452 bp, Staphylococcus aureus VET0433R; identical to SEQ ID NO: 18653

SEQ ID NO: 21854 - DNA, 609 bp, Staphylococcus aureus VET0433R; identical to SEQ ID NO: 18624

SEQ ID NO: 21855 - DNA, 927 bp, Staphylococcus aureus VET0433R; identical to SEQ ID NO: 18619

SEQ ID NO: 21856 - DNA, 1452 bp, Staphylococcus aureus VET0434R; identical to SEQ ID NO: 18653

SEQ ID NO: 21857 - DNA, 609 bp, Staphylococcus aureus VET0434R; identical to SEQ ID NO: 18624

SEQ ID NO: 21858 - DNA, 927 bp, Staphylococcus aureus VET0434R; identical to SEQ ID NO: 18619

SEQ ID NO: 21859 - DNA, 1452 bp, Staphylococcus aureus VET0435R; identical to SEQ ID NO: 18653

SEQ ID NO: 21860 - DNA, 609 bp, Staphylococcus aureus VET0435R; identical to SEQ ID NO: 18624

SEQ ID NO: 21861 - DNA, 927 bp, Staphylococcus aureus VET0435R; identical to SEQ ID NO: 18619

SEQ ID NO: 21862 - DNA, 1452 bp, Staphylococcus aureus VET0438R; identical to SEQ ID NO: 18653

SEQ ID NO: 21863 - DNA, 609 bp, Staphylococcus aureus VET0438R; identical to SEQ ID NO: 18624

SEQ ID NO: 21864 - DNA, 927 bp, Staphylococcus aureus VET0438R; identical to SEQ ID NO: 18619

SEQ ID NO: 21865 - DNA, 1452 bp, Staphylococcus aureus VET0439R; identical to SEQ ID NO: 18653

SEQ ID NO: 21866 - DNA, 609 bp, Staphylococcus aureus VET0439R; identical to SEQ ID NO: 18624

SEQ ID NO: 21867 - DNA, 927 bp, Staphylococcus aureus VET0439R; identical to SEQ ID NO: 18619

SEQ ID NO: 21868 - DNA, 1452 bp, Staphylococcus aureus VET0440R; identical to SEQ ID NO: 18653

SEQ ID NO: 21869 - DNA, 609 bp, Staphylococcus aureus VET0440R; identical to SEQ ID NO: 18624

SEQ ID NO: 21870 - DNA, 927 bp, Staphylococcus aureus VET0440R; identical to SEQ ID NO: 18619

SEQ ID NO: 21871 - DNA, 1452 bp, Staphylococcus aureus VET0442R; identical to SEQ ID NO: 18653

SEQ ID NO: 21872 - DNA, 609 bp, Staphylococcus aureus VET0442R; identical to SEQ ID NO: 18624

SEQ ID NO: 21873 - DNA, 927 bp, Staphylococcus aureus VET0442R; identical to SEQ ID NO: 18619

SEQ ID NO: 21874 - DNA, 396 bp, Staphylococcus aureus VET0443R; identical to SEQ ID NO: 20102

SEQ ID NO: 21875 - DNA, 609 bp, Staphylococcus aureus VET0443R; identical to SEQ ID NO: 18624

SEQ ID NO: 21876 - DNA, 927 bp, Staphylococcus aureus VET0443R; identical to SEQ ID NO: 18619

SEQ ID NO: 21877 - DNA, 1452 bp, Staphylococcus aureus VET0444R; identical to SEQ ID NO: 18653

SEQ ID NO: 21878 - DNA, 609 bp, Staphylococcus aureus VET0444R; identical to SEQ ID NO: 18624

SEQ ID NO: 21879 - DNA, 927 bp, Staphylococcus aureus VET0444R; identical to SEQ ID NO: 18619

SEQ ID NO: 21880 - DNA, 1452 bp, Staphylococcus aureus VET0446R; identical to SEQ ID NO: 18653

SEQ ID NO: 21881 - DNA, 609 bp, Staphylococcus aureus VET0446R; identical to SEQ ID NO: 18624

SEQ ID NO: 21882 - DNA, 927 bp, Staphylococcus aureus VET0446R; identical to SEQ ID NO: 18619

SEQ ID NO: 21883 - DNA, 1452 bp, Staphylococcus aureus VET0451R; identical to SEQ ID NO: 18653

SEQ ID NO: 21884 - DNA, 609 bp, Staphylococcus aureus VET0451R; identical to SEQ ID NO: 18624

SEQ ID NO: 21885 - DNA, 927 bp, Staphylococcus aureus VET0451R; identical to SEQ ID NO: 18619

SEQ ID NO: 21886 - DNA, 1452 bp, Staphylococcus aureus VET0452R; identical to SEQ ID NO: 18653

SEQ ID NO: 21887 - DNA, 609 bp, Staphylococcus aureus VET0452R; identical to SEQ ID NO: 18624

SEQ ID NO: 21888 - DNA, 927 bp, Staphylococcus aureus VET0452R; identical to SEQ ID NO: 18619

SEQ ID NO: 21889 - DNA, 1452 bp, Staphylococcus aureus VET0454R; identical to SEQ ID NO: 18653

SEQ ID NO: 21890 - DNA, 609 bp, Staphylococcus aureus VET0454R; identical to SEQ ID NO: 18624

SEQ ID NO: 21891 - DNA, 927 bp, Staphylococcus aureus VET0454R; identical to SEQ ID NO: 18619

SEQ ID NO: 21892 - DNA, 1452 bp, Staphylococcus aureus VET0455R; identical to SEQ ID NO: 18653

SEQ ID NO: 21893 - DNA, 609 bp, Staphylococcus aureus VET0455R; identical to SEQ ID NO: 18624

SEQ ID NO: 21894 - DNA, 927 bp, Staphylococcus aureus VET0455R; identical to SEQ ID NO: 18619

SEQ ID NO: 21895 - DNA, 1452 bp, Staphylococcus aureus VET0456R; identical to SEQ ID NO: 18653

SEQ ID NO: 21896 - DNA, 609 bp, Staphylococcus aureus VET0456R; identical to SEQ ID NO: 18624

SEQ ID NO: 21897 - DNA, 927 bp, Staphylococcus aureus VET0456R; identical to SEQ ID NO: 18619

SEQ ID NO: 21898 - DNA, 1452 bp, Staphylococcus aureus VET0459R; identical to SEQ ID NO: 18653

SEQ ID NO: 21899 - DNA, 609 bp, Staphylococcus aureus VET0459R; identical to SEQ ID NO: 18624

SEQ ID NO: 21900 - DNA, 927 bp, Staphylococcus aureus VET0459R; identical to SEQ ID NO: 18619

SEQ ID NO: 21901 - DNA, 1452 bp, Staphylococcus aureus VET0460R; identical to SEQ ID NO: 18653

SEQ ID NO: 21902 - DNA, 609 bp, Staphylococcus aureus VET0460R; identical to SEQ ID NO: 18624

SEQ ID NO: 21903 - DNA, 927 bp, Staphylococcus aureus VET0460R; identical to SEQ ID NO: 18619

SEQ ID NO: 21904 - DNA, 1452 bp, Staphylococcus aureus VET0462R; identical to SEQ ID NO: 18653

SEQ ID NO: 21905 - DNA, 609 bp, Staphylococcus aureus VET0462R; identical to SEQ ID NO: 18624

SEQ ID NO: 21906 - DNA, 927 bp, Staphylococcus aureus VET0462R; identical to SEQ ID NO: 18619

SEQ ID NO: 21907 - DNA, 1452 bp, Staphylococcus aureus VET0463R; identical to SEQ ID NO: 18653

SEQ ID NO: 21908 - DNA, 609 bp, Staphylococcus aureus VET0463R; identical to SEQ ID NO: 18624

SEQ ID NO: 21909 - DNA, 927 bp, Staphylococcus aureus VET0463R; identical to SEQ ID NO: 18619

SEQ ID NO: 21910 - DNA, 1452 bp, Staphylococcus aureus VET0464R; identical to SEQ ID NO: 18653

SEQ ID NO: 21911 - DNA, 609 bp, Staphylococcus aureus VET0464R; identical to SEQ ID NO: 18624

SEQ ID NO: 21912 - DNA, 927 bp, Staphylococcus aureus VET0464R; identical to SEQ ID NO: 18619

SEQ ID NO: 21913 - DNA, 1452 bp, Staphylococcus aureus VET0468R; identical to SEQ ID NO: 18653

SEQ ID NO: 21914 - DNA, 609 bp, Staphylococcus aureus VET0468R; identical to SEQ ID NO: 18624

SEQ ID NO: 21915 - DNA, 927 bp, Staphylococcus aureus VET0468R; identical to SEQ ID NO: 18619

SEQ ID NO: 21916 - DNA, 1452 bp, Staphylococcus aureus VET0470R; identical to SEQ ID NO: 18653

SEQ ID NO: 21917 - DNA, 609 bp, Staphylococcus aureus VET0470R; identical to SEQ ID NO: 18624

SEQ ID NO: 21918 - DNA, 927 bp, Staphylococcus aureus VET0470R; identical to SEQ ID NO: 18619

SEQ ID NO: 21919 - DNA, 1452 bp, Staphylococcus aureus VET0478R; identical to SEQ ID NO: 18653

SEQ ID NO: 21920 - DNA, 609 bp, Staphylococcus aureus VET0478R; identical to SEQ ID NO: 18624

SEQ ID NO: 21921 - DNA, 927 bp, Staphylococcus aureus VET0478R; identical to SEQ ID NO: 18619

SEQ ID NO: 21922 - DNA, 1452 bp, Staphylococcus aureus VET0481R; identical to SEQ ID NO: 18653

SEQ ID NO: 21923 - DNA, 609 bp, Staphylococcus aureus VET0481R; identical to SEQ ID NO: 18624

SEQ ID NO: 21924 - DNA, 927 bp, Staphylococcus aureus VET0481R; identical to SEQ ID NO: 18619

SEQ ID NO: 21925 - DNA, 396 bp, Staphylococcus aureus VET0485R; identical to SEQ ID NO: 20102

SEQ ID NO: 21926 - DNA, 609 bp, Staphylococcus aureus VET0485R; identical to SEQ ID NO: 18624

SEQ ID NO: 21927 - DNA, 927 bp, Staphylococcus aureus VET0485R; identical to SEQ ID NO: 18619

SEQ ID NO: 21928 - DNA, 396 bp, Staphylococcus aureus VET0486R; identical to SEQ ID NO: 20102

SEQ ID NO: 21929 - DNA, 609 bp, Staphylococcus aureus VET0486R; identical to SEQ ID NO: 18624

SEQ ID NO: 21930 - DNA, 927 bp, Staphylococcus aureus VET0486R; identical to SEQ ID NO: 18619

SEQ ID NO: 21931 - DNA, 1452 bp, Staphylococcus aureus VET0488R; identical to SEQ ID NO: 18653

SEQ ID NO: 21932 - DNA, 609 bp, Staphylococcus aureus VET0488R; identical to SEQ ID NO: 18624

SEQ ID NO: 21933 - DNA, 927 bp, Staphylococcus aureus VET0488R; identical to SEQ ID NO: 18619

SEQ ID NO: 21934 - DNA, 1452 bp, Staphylococcus aureus VET0519S; identical to SEQ ID NO: 18653

SEQ ID NO: 21935 - DNA, 609 bp, Staphylococcus aureus VET0519S; identical to SEQ ID NO: 18624

SEQ ID NO: 21936 - DNA, 927 bp, Staphylococcus aureus VET0519S; identical to SEQ ID NO: 18619

SEQ ID NO: 21937 - DNA, 1452 bp, Staphylococcus aureus VET0596R; identical to SEQ ID NO: 18653

SEQ ID NO: 21938 - DNA, 609 bp, Staphylococcus aureus VET0596R; identical to SEQ ID NO: 18624

SEQ ID NO: 21939 - DNA, 927 bp, Staphylococcus aureus VET0596R; identical to SEQ ID NO: 18619

SEQ ID NO: 21940 - DNA, 1452 bp, Staphylococcus aureus VET0645S; identical to SEQ ID NO: 18653

SEQ ID NO: 21941 - DNA, 609 bp, Staphylococcus aureus VET0645S; identical to SEQ ID NO: 18624

SEQ ID NO: 21942 - DNA, 927 bp, Staphylococcus aureus VET0645S; identical to SEQ ID NO: 18619

SEQ ID NO: 21943 - DNA, 1452 bp, Staphylococcus aureus VET0657S; identical to SEQ ID NO: 18653

SEQ ID NO: 21944 - DNA, 609 bp, Staphylococcus aureus VET0657S; identical to SEQ ID NO: 18624

SEQ ID NO: 21945 - DNA, 927 bp, Staphylococcus aureus VET0657S; identical to SEQ ID NO: 18619

SEQ ID NO: 21946 - DNA, 1452 bp, Staphylococcus aureus VET0779S; identical to SEQ ID NO: 18653

SEQ ID NO: 21947 - DNA, 609 bp, Staphylococcus aureus VET0779S; identical to SEQ ID NO: 18624

SEQ ID NO: 21948 - DNA, 927 bp, Staphylococcus aureus VET0779S; identical to SEQ ID NO: 18619

SEQ ID NO: 21949 - DNA, 1452 bp, Staphylococcus aureus VET0809S; identical to SEQ ID NO: 18653

SEQ ID NO: 21950 - DNA, 609 bp, Staphylococcus aureus VET0809S; identical to SEQ ID NO: 18624

SEQ ID NO: 21951 - DNA, 927 bp, Staphylococcus aureus VET0809S; identical to SEQ ID NO: 18619

SEQ ID NO: 21952 - DNA, 1452 bp, Staphylococcus aureus VET0810S; identical to SEQ ID NO: 18653

SEQ ID NO: 21953 - DNA, 609 bp, Staphylococcus aureus VET0810S; identical to SEQ ID NO: 18624

SEQ ID NO: 21954 - DNA, 927 bp, Staphylococcus aureus VET0810S; identical to SEQ ID NO: 18619

SEQ ID NO: 21955 - DNA, 1452 bp, Staphylococcus aureus VET0919S; identical to SEQ ID NO: 18653

SEQ ID NO: 21956 - DNA, 609 bp, Staphylococcus aureus VET0919S; identical to SEQ ID NO: 18624

SEQ ID NO: 21957 - DNA, 927 bp, Staphylococcus aureus VET0919S; identical to SEQ ID NO: 18619

SEQ ID NO: 21958 - DNA, 1452 bp, Staphylococcus aureus VET0920S; identical to SEQ ID NO: 18653

SEQ ID NO: 21959 - DNA, 609 bp, Staphylococcus aureus VET0920S; identical to SEQ ID NO: 18624

SEQ ID NO: 21960 - DNA, 927 bp, Staphylococcus aureus VET0920S; identical to SEQ ID NO: 18619

SEQ ID NO: 21961 - DNA, 1452 bp, Staphylococcus aureus VET1035S; identical to SEQ ID NO: 18653

SEQ ID NO: 21962 - DNA, 609 bp, Staphylococcus aureus VET1035S; identical to SEQ ID NO: 18624

SEQ ID NO: 21963 - DNA, 927 bp, Staphylococcus aureus VET1035S; identical to SEQ ID NO: 18619

SEQ ID NO: 21964 - DNA, 1452 bp, Staphylococcus aureus VET1048S; identical to SEQ ID NO: 18653

SEQ ID NO: 21965 - DNA, 609 bp, Staphylococcus aureus VET1048S; identical to SEQ ID NO: 18624

SEQ ID NO: 21966 - DNA, 927 bp, Staphylococcus aureus VET1048S; identical to SEQ ID NO: 18619

SEQ ID NO: 21967 - DNA, 1452 bp, Staphylococcus aureus VET1052S; identical to SEQ ID NO: 18653

SEQ ID NO: 21968 - DNA, 609 bp, Staphylococcus aureus VET1052S; identical to SEQ ID NO: 18624

SEQ ID NO: 21969 - DNA, 927 bp, Staphylococcus aureus VET1052S; identical to SEQ ID NO: 18619

SEQ ID NO: 21970 - DNA, 1452 bp, Staphylococcus aureus VET1054S; identical to SEQ ID NO: 18653

SEQ ID NO: 21971 - DNA, 609 bp, Staphylococcus aureus VET1054S; identical to SEQ ID NO: 18624

SEQ ID NO: 21972 - DNA, 927 bp, Staphylococcus aureus VET1054S; identical to SEQ ID NO: 18619

SEQ ID NO: 21973 - DNA, 1452 bp, Staphylococcus aureus VET1068S; identical to SEQ ID NO: 18653

SEQ ID NO: 21974 - DNA, 609 bp, Staphylococcus aureus VET1068S; identical to SEQ ID NO: 18624

SEQ ID NO: 21975 - DNA, 927 bp, Staphylococcus aureus VET1068S; identical to SEQ ID NO: 18619

SEQ ID NO: 21976 - DNA, 1452 bp, Staphylococcus aureus VET1088S; identical to SEQ ID NO: 18653

SEQ ID NO: 21977 - DNA, 609 bp, Staphylococcus aureus VET1088S; identical to SEQ ID NO: 18624

SEQ ID NO: 21978 - DNA, 927 bp, Staphylococcus aureus VET1088S; identical to SEQ ID NO: 18619

SEQ ID NO: 21979 - DNA, 1452 bp, Staphylococcus aureus VET1104S; identical to SEQ ID NO: 18653

SEQ ID NO: 21980 - DNA, 609 bp, Staphylococcus aureus VET1104S; identical to SEQ ID NO: 18624

SEQ ID NO: 21981 - DNA, 927 bp, Staphylococcus aureus VET1104S; identical to SEQ ID NO: 18619

SEQ ID NO: 21982 - DNA, 1452 bp, Staphylococcus aureus VET1168S; identical to SEQ ID NO: 18653

SEQ ID NO: 21983 - DNA, 609 bp, Staphylococcus aureus VET1168S; identical to SEQ ID NO: 18624

SEQ ID NO: 21984 - DNA, 927 bp, Staphylococcus aureus VET1168S; identical to SEQ ID NO: 18619

SEQ ID NO: 21985 - DNA, 1452 bp, Staphylococcus aureus VET1181S; identical to SEQ ID NO: 18653

SEQ ID NO: 21986 - DNA, 609 bp, Staphylococcus aureus VET1181S; identical to SEQ ID NO: 18624

SEQ ID NO: 21987 - DNA, 927 bp, Staphylococcus aureus VET1181S; identical to SEQ ID NO: 18619

SEQ ID NO: 21988 - DNA, 1452 bp, Staphylococcus aureus VET1245S
atgactatagataagaaaaaattcattgaaaaatatgtaaaagctttagaaagtaatacagcggctatttttgctggagcaggattatcttgtggagcaggttatgttaattggaagacattgcttaatgaagcagcagaagaattagaattaaatatagataaagaagaacatgatcttgtaggattagcacaacattatattaataagaaaagaagtcgtggaaatctaaatacagtaataatggagcaattttcaacaagagcagaattaacagaaaatcatgagcttttagcaaaacttcccattgatacatattggacaactaattatgattgtatgattgaaaaagctcttgattctgagggcagaattgtagatgtgaaaagaaatcaaaatcaattaactgtttcagtagccgataaggatgctacagtttataaaatgcatggggatatagacagtatagacaagattattttaactagagatgattatgaaaaatataatctaactcatccaaagtttcgtgaaatattggaaggagatttactttcaaaaacttttctattcataggttttagctttacagatccaaatattagttatatcttatcgagaataagattagtgttagaagacaatactagaccacattattgtattttaaaagaagtagaagaaaaggaatatgataatacagaagaatttatgtatgcaaagataaaacaacaacttcatatagaagatttaagccgattttcaatagaaactttattagttaaagattatattgaaatcacagaaatattagaaagtatttataaaagatatagaagaaaaacaatttttatatcaggaagtgctacagaatatttaccttttaattcagaaacagggaaatattttttacatcaactaagtaaaaaattagttgaaaatgattttaaattagttacaggttttggattaggagtaggatcatatgttattaatggagtagctgattatattaatagtaataagaagtctaaactacagaatcatttaaatatattgccattttctcaagattcaagtggcgatttagacttaaaagaagtatggaaaaaaaatcgcttggaaatgatttctgagtgtggaatggcattatttttatttggaaataaagaaaaggatggaaaaattgttttagctgatggattagaagaagaatataaaatagcagaaagacaagaattggttagactccctataaatgtgacaggttataaaacaaagaatctttcagaacaatataacgaagagataaatatacaatttaaagagaaaatattaaaaatgtataacgaaataaatgaatacaaatgtgatttttcaaataaacaaagtattgatgaattagttcaaaaaatagtaaatttagtaattgaaataaaaaaaacaaaataa

SEQ ID NO: 21989 - DNA, 609 bp, Staphylococcus aureus VET1245S; identical to SEQ ID NO: 18624

SEQ ID NO: 21990 - DNA, 927 bp, Staphylococcus aureus VET1245S; identical to SEQ ID NO: 18619

SEQ ID NO: 21991 - DNA, 1452 bp, Staphylococcus aureus VET1411S; identical to SEQ ID NO: 18653

SEQ ID NO: 21992 - DNA, 609 bp, Staphylococcus aureus VET1411S; identical to SEQ ID NO: 18624

SEQ ID NO: 21993 - DNA, 927 bp, Staphylococcus aureus VET1411S; identical to SEQ ID NO: 18619

SEQ ID NO: 21994 - DNA, 1452 bp, Staphylococcus aureus VET1434S; identical to SEQ ID NO: 18653

SEQ ID NO: 21995 - DNA, 609 bp, Staphylococcus aureus VET1434S; identical to SEQ ID NO: 18624

SEQ ID NO: 21996 - DNA, 927 bp, Staphylococcus aureus VET1434S; identical to SEQ ID NO: 18619

SEQ ID NO: 21997 - DNA, 1452 bp, Staphylococcus aureus VET1468S; identical to SEQ ID NO: 18653

SEQ ID NO: 21998 - DNA, 609 bp, Staphylococcus aureus VET1468S; identical to SEQ ID NO: 18624

SEQ ID NO: 21999 - DNA, 927 bp, Staphylococcus aureus VET1468S; identical to SEQ ID NO: 18619

SEQ ID NO: 22000 - DNA, 1452 bp, Staphylococcus aureus VET1495S; identical to SEQ ID NO: 18653

SEQ ID NO: 22001 - DNA, 609 bp, Staphylococcus aureus VET1495S; identical to SEQ ID NO: 18624

SEQ ID NO: 22002 - DNA, 927 bp, Staphylococcus aureus VET1495S; identical to SEQ ID NO: 18619

SEQ ID NO: 22003 - DNA, 1452 bp, Staphylococcus aureus VET1499S; identical to SEQ ID NO: 21988

SEQ ID NO: 22004 - DNA, 609 bp, Staphylococcus aureus VET1499S; identical to SEQ ID NO: 18624

SEQ ID NO: 22005 - DNA, 927 bp, Staphylococcus aureus VET1499S; identical to SEQ ID NO: 18619

SEQ ID NO: 22006 - DNA, 1452 bp, Staphylococcus aureus VET1519S; identical to SEQ ID NO: 18653

SEQ ID NO: 22007 - DNA, 609 bp, Staphylococcus aureus VET1519S; identical to SEQ ID NO: 18624

SEQ ID NO: 22008 - DNA, 927 bp, Staphylococcus aureus VET1519S; identical to SEQ ID NO: 18619

SEQ ID NO: 22009 - DNA, 1452 bp, Staphylococcus aureus VET1526S; identical to SEQ ID NO: 18653

SEQ ID NO: 22010 - DNA, 609 bp, Staphylococcus aureus VET1526S; identical to SEQ ID NO: 18624

SEQ ID NO: 22011 - DNA, 927 bp, Staphylococcus aureus VET1526S; identical to SEQ ID NO: 18619

SEQ ID NO: 22012 - DNA, 1452 bp, Staphylococcus aureus VET1727S; identical to SEQ ID NO: 18653

SEQ ID NO: 22013 - DNA, 609 bp, Staphylococcus aureus VET1727S; identical to SEQ ID NO: 18624

SEQ ID NO: 22014 - DNA, 927 bp, Staphylococcus aureus VET1727S; identical to SEQ ID NO: 18619

SEQ ID NO: 22015 - DNA, 1452 bp, Staphylococcus aureus VET1738S; identical to SEQ ID NO: 18653

SEQ ID NO: 22016 - DNA, 609 bp, Staphylococcus aureus VET1738S; identical to SEQ ID NO: 18624

SEQ ID NO: 22017 - DNA, 927 bp, Staphylococcus aureus VET1738S; identical to SEQ ID NO: 18619

SEQ ID NO: 22018 - DNA, 1452 bp, Staphylococcus aureus VET1816S; identical to SEQ ID NO: 18653

SEQ ID NO: 22019 - DNA, 609 bp, Staphylococcus aureus VET1816S; identical to SEQ ID NO: 18624

SEQ ID NO: 22020 - DNA, 927 bp, Staphylococcus aureus VET1816S; identical to SEQ ID NO: 18619

SEQ ID NO: 22021 - DNA, 1452 bp, Staphylococcus aureus VET1817S; identical to SEQ ID NO: 18653

SEQ ID NO: 22022 - DNA, 609 bp, Staphylococcus aureus VET1817S; identical to SEQ ID NO: 18624

SEQ ID NO: 22023 - DNA, 927 bp, Staphylococcus aureus VET1817S; identical to SEQ ID NO: 18619

SEQ ID NO: 22024 - DNA, 1452 bp, Staphylococcus aureus VET1822S; identical to SEQ ID NO: 18653

SEQ ID NO: 22025 - DNA, 609 bp, Staphylococcus aureus VET1822S; identical to SEQ ID NO: 18624

SEQ ID NO: 22026 - DNA, 927 bp, Staphylococcus aureus VET1822S; identical to SEQ ID NO: 18619

SEQ ID NO: 22027 - DNA, 1452 bp, Staphylococcus aureus VET1832R; identical to SEQ ID NO: 18653

SEQ ID NO: 22028 - DNA, 609 bp, Staphylococcus aureus VET1832R; identical to SEQ ID NO: 18624

SEQ ID NO: 22029 - DNA, 927 bp, Staphylococcus aureus VET1832R; identical to SEQ ID NO: 18619

SEQ ID NO: 22030 - DNA, 1452 bp, Staphylococcus aureus VET1834R; identical to SEQ ID NO: 18653

SEQ ID NO: 22031 - DNA, 609 bp, Staphylococcus aureus VET1834R; identical to SEQ ID NO: 18624

SEQ ID NO: 22032 - DNA, 927 bp, Staphylococcus aureus VET1834R; identical to SEQ ID NO: 18619

SEQ ID NO: 22033 - DNA, 1452 bp, Staphylococcus aureus VET1835R; identical to SEQ ID NO: 18653

SEQ ID NO: 22034 - DNA, 609 bp, Staphylococcus aureus VET1835R; identical to SEQ ID NO: 18624

SEQ ID NO: 22035 - DNA, 927 bp, Staphylococcus aureus VET1835R; identical to SEQ ID NO: 18619

SEQ ID NO: 22036 - DNA, 1452 bp, Staphylococcus aureus VET1838R; identical to SEQ ID NO: 18653

SEQ ID NO: 22037 - DNA, 609 bp, Staphylococcus aureus VET1838R; identical to SEQ ID NO: 18624

SEQ ID NO: 22038 - DNA, 927 bp, Staphylococcus aureus VET1838R; identical to SEQ ID NO: 18619

SEQ ID NO: 22039 - DNA, 1452 bp, Staphylococcus aureus VET1839R; identical to SEQ ID NO: 18653

SEQ ID NO: 22040 - DNA, 609 bp, Staphylococcus aureus VET1839R; identical to SEQ ID NO: 18624

SEQ ID NO: 22041 - DNA, 927 bp, Staphylococcus aureus VET1839R; identical to SEQ ID NO: 18619

SEQ ID NO: 22042 - DNA, 1452 bp, Staphylococcus aureus VET1843R; identical to SEQ ID NO: 18653

SEQ ID NO: 22043 - DNA, 609 bp, Staphylococcus aureus VET1843R; identical to SEQ ID NO: 18624

SEQ ID NO: 22044 - DNA, 927 bp, Staphylococcus aureus VET1843R; identical to SEQ ID NO: 18619

SEQ ID NO: 22045 - DNA, 1452 bp, Staphylococcus aureus VET1844R; identical to SEQ ID NO: 18653

SEQ ID NO: 22046 - DNA, 609 bp, Staphylococcus aureus VET1844R; identical to SEQ ID NO: 18624

SEQ ID NO: 22047 - DNA, 927 bp, Staphylococcus aureus VET1844R; identical to SEQ ID NO: 18619

SEQ ID NO: 22048 - DNA, 1452 bp, Staphylococcus aureus VET1845R; identical to SEQ ID NO: 18653

SEQ ID NO: 22049 - DNA, 609 bp, Staphylococcus aureus VET1845R; identical to SEQ ID NO: 18624

SEQ ID NO: 22050 - DNA, 927 bp, Staphylococcus aureus VET1845R; identical to SEQ ID NO: 18619

SEQ ID NO: 22051 - DNA, 1452 bp, Staphylococcus aureus VET1846R; identical to SEQ ID NO: 18653

SEQ ID NO: 22052 - DNA, 609 bp, Staphylococcus aureus VET1846R; identical to SEQ ID NO: 18624

SEQ ID NO: 22053 - DNA, 927 bp, Staphylococcus aureus VET1846R; identical to SEQ ID NO: 18619

SEQ ID NO: 22054 - DNA, 1452 bp, Staphylococcus aureus VET1848R; identical to SEQ ID NO: 18653

SEQ ID NO: 22055 - DNA, 609 bp, Staphylococcus aureus VET1848R; identical to SEQ ID NO: 18624

SEQ ID NO: 22056 - DNA, 927 bp, Staphylococcus aureus VET1848R; identical to SEQ ID NO: 18619

SEQ ID NO: 22057 - DNA, 1452 bp, Staphylococcus aureus VET1849R; identical to SEQ ID NO: 18653

SEQ ID NO: 22058 - DNA, 609 bp, Staphylococcus aureus VET1849R; identical to SEQ ID NO: 18624

SEQ ID NO: 22059 - DNA, 927 bp, Staphylococcus aureus VET1849R; identical to SEQ ID NO: 18619

SEQ ID NO: 22060 - DNA, 1452 bp, Staphylococcus aureus VET1850R; identical to SEQ ID NO: 18653

SEQ ID NO: 22061 - DNA, 609 bp, Staphylococcus aureus VET1850R; identical to SEQ ID NO: 18624

SEQ ID NO: 22062 - DNA, 927 bp, Staphylococcus aureus VET1850R; identical to SEQ ID NO: 18619

SEQ ID NO: 22063 - DNA, 1452 bp, Staphylococcus aureus VET1851R; identical to SEQ ID NO: 18653

SEQ ID NO: 22064 - DNA, 609 bp, Staphylococcus aureus VET1851R; identical to SEQ ID NO: 18624

SEQ ID NO: 22065 - DNA, 927 bp, Staphylococcus aureus VET1851R; identical to SEQ ID NO: 18619

SEQ ID NO: 22066 - DNA, 1452 bp, Staphylococcus aureus VET1852R; identical to SEQ ID NO: 18653

SEQ ID NO: 22067 - DNA, 609 bp, Staphylococcus aureus VET1852R; identical to SEQ ID NO: 18624

SEQ ID NO: 22068 - DNA, 927 bp, Staphylococcus aureus VET1852R; identical to SEQ ID NO: 18619

SEQ ID NO: 22069 - DNA, 1452 bp, Staphylococcus aureus VET1853R; identical to SEQ ID NO: 18653

SEQ ID NO: 22070 - DNA, 609 bp, Staphylococcus aureus VET1853R; identical to SEQ ID NO: 18624

SEQ ID NO: 22071 - DNA, 927 bp, Staphylococcus aureus VET1853R; identical to SEQ ID NO: 18619

SEQ ID NO: 22072 - DNA, 1452 bp, Staphylococcus aureus VET1854R; identical to SEQ ID NO: 18653

SEQ ID NO: 22073 - DNA, 609 bp, Staphylococcus aureus VET1854R; identical to SEQ ID NO: 18624

SEQ ID NO: 22074 - DNA, 927 bp, Staphylococcus aureus VET1854R; identical to SEQ ID NO: 18619

SEQ ID NO: 22075 - DNA, 1452 bp, Staphylococcus aureus VET1855R; identical to SEQ ID NO: 18653

SEQ ID NO: 22076 - DNA, 609 bp, Staphylococcus aureus VET1855R; identical to SEQ ID NO: 18624

SEQ ID NO: 22077 - DNA, 927 bp, Staphylococcus aureus VET1855R; identical to SEQ ID NO: 18619

SEQ ID NO: 22078 - DNA, 1452 bp, Staphylococcus aureus VET1856R; identical to SEQ ID NO: 18653

SEQ ID NO: 22079 - DNA, 609 bp, Staphylococcus aureus VET1856R; identical to SEQ ID NO: 18624

SEQ ID NO: 22080 - DNA, 927 bp, Staphylococcus aureus VET1856R; identical to SEQ ID NO: 18619

SEQ ID NO: 22081 - DNA, 1452 bp, Staphylococcus aureus VET1859R; identical to SEQ ID NO: 18653

SEQ ID NO: 22082 - DNA, 609 bp, Staphylococcus aureus VET1859R; identical to SEQ ID NO: 18624

SEQ ID NO: 22083 - DNA, 927 bp, Staphylococcus aureus VET1859R; identical to SEQ ID NO: 18619

SEQ ID NO: 22084 - DNA, 1452 bp, Staphylococcus aureus VET1860R; identical to SEQ ID NO: 18653

SEQ ID NO: 22085 - DNA, 609 bp, Staphylococcus aureus VET1860R; identical to SEQ ID NO: 18624

SEQ ID NO: 22086 - DNA, 927 bp, Staphylococcus aureus VET1860R; identical to SEQ ID NO: 18619

SEQ ID NO: 22087 - DNA, 1452 bp, Staphylococcus aureus VET1861R; identical to SEQ ID NO: 18653

SEQ ID NO: 22088 - DNA, 609 bp, Staphylococcus aureus VET1861R; identical to SEQ ID NO: 18624

SEQ ID NO: 22089 - DNA, 927 bp, Staphylococcus aureus VET1861R; identical to SEQ ID NO: 18619

SEQ ID NO: 22090 - DNA, 1452 bp, Staphylococcus aureus VET1865R; identical to SEQ ID NO: 18653

SEQ ID NO: 22091 - DNA, 609 bp, Staphylococcus aureus VET1865R; identical to SEQ ID NO: 18624

SEQ ID NO: 22092 - DNA, 927 bp, Staphylococcus aureus VET1865R; identical to SEQ ID NO: 18619

SEQ ID NO: 22093 - DNA, 1452 bp, Staphylococcus aureus VET1866R; identical to SEQ ID NO: 18653

SEQ ID NO: 22094 - DNA, 609 bp, Staphylococcus aureus VET1866R; identical to SEQ ID NO: 18624

SEQ ID NO: 22095 - DNA, 927 bp, Staphylococcus aureus VET1866R; identical to SEQ ID NO: 18619

SEQ ID NO: 22096 - DNA, 1452 bp, Staphylococcus aureus VET1867R; identical to SEQ ID NO: 18653

SEQ ID NO: 22097 - DNA, 609 bp, Staphylococcus aureus VET1867R; identical to SEQ ID NO: 18624

SEQ ID NO: 22098 - DNA, 927 bp, Staphylococcus aureus VET1867R; identical to SEQ ID NO: 18619

SEQ ID NO: 22099 - DNA, 396 bp, Staphylococcus aureus VET1868R; identical to SEQ ID NO: 20102

SEQ ID NO: 22100 - DNA, 609 bp, Staphylococcus aureus VET1868R; identical to SEQ ID NO: 18624

SEQ ID NO: 22101 - DNA, 927 bp, Staphylococcus aureus VET1868R; identical to SEQ ID NO: 18619

SEQ ID NO: 22102 - DNA, 1452 bp, Staphylococcus aureus VET1871R; identical to SEQ ID NO: 18653

SEQ ID NO: 22103 - DNA, 609 bp, Staphylococcus aureus VET1871R; identical to SEQ ID NO: 18624

SEQ ID NO: 22104 - DNA, 927 bp, Staphylococcus aureus VET1871R; identical to SEQ ID NO: 18619

SEQ ID NO: 22105 - DNA, 1452 bp, Staphylococcus aureus VET1872R; identical to SEQ ID NO: 18653

SEQ ID NO: 22106 - DNA, 609 bp, Staphylococcus aureus VET1872R; identical to SEQ ID NO: 18624

SEQ ID NO: 22107 - DNA, 927 bp, Staphylococcus aureus VET1872R; identical to SEQ ID NO: 18619

SEQ ID NO: 22108 - DNA, 1452 bp, Staphylococcus aureus VET1873R; identical to SEQ ID NO: 18653

SEQ ID NO: 22109 - DNA, 609 bp, Staphylococcus aureus VET1873R; identical to SEQ ID NO: 18624

SEQ ID NO: 22110 - DNA, 927 bp, Staphylococcus aureus VET1873R; identical to SEQ ID NO: 18619

SEQ ID NO: 22111 - DNA, 1452 bp, Staphylococcus aureus VET1875R; identical to SEQ ID NO: 18653

SEQ ID NO: 22112 - DNA, 609 bp, Staphylococcus aureus VET1875R; identical to SEQ ID NO: 18624

SEQ ID NO: 22113 - DNA, 927 bp, Staphylococcus aureus VET1875R; identical to SEQ ID NO: 18619

SEQ ID NO: 22114 - DNA, 1452 bp, Staphylococcus aureus VET1877R; identical to SEQ ID NO: 18653

SEQ ID NO: 22115 - DNA, 609 bp, Staphylococcus aureus VET1877R; identical to SEQ ID NO: 18624

SEQ ID NO: 22116 - DNA, 927 bp, Staphylococcus aureus VET1877R; identical to SEQ ID NO: 18619

SEQ ID NO: 22117 - DNA, 1452 bp, Staphylococcus aureus VET1880R; identical to SEQ ID NO: 18653

SEQ ID NO: 22118 - DNA, 609 bp, Staphylococcus aureus VET1880R; identical to SEQ ID NO: 18624

SEQ ID NO: 22119 - DNA, 927 bp, Staphylococcus aureus VET1880R; identical to SEQ ID NO: 18619

SEQ ID NO: 22120 - DNA, 1452 bp, Staphylococcus aureus VET1884R; identical to SEQ ID NO: 18653

SEQ ID NO: 22121 - DNA, 609 bp, Staphylococcus aureus VET1884R; identical to SEQ ID NO: 18624

SEQ ID NO: 22122 - DNA, 927 bp, Staphylococcus aureus VET1884R; identical to SEQ ID NO: 18619

SEQ ID NO: 22123 - DNA, 1452 bp, Staphylococcus aureus VET1886R; identical to SEQ ID NO: 18653

SEQ ID NO: 22124 - DNA, 609 bp, Staphylococcus aureus VET1886R; identical to SEQ ID NO: 18624

SEQ ID NO: 22125 - DNA, 927 bp, Staphylococcus aureus VET1886R; identical to SEQ ID NO: 18619

SEQ ID NO: 22126 - DNA, 1452 bp, Staphylococcus aureus VET1890R; identical to SEQ ID NO: 18653

SEQ ID NO: 22127 - DNA, 609 bp, Staphylococcus aureus VET1890R; identical to SEQ ID NO: 18624

SEQ ID NO: 22128 - DNA, 927 bp, Staphylococcus aureus VET1890R; identical to SEQ ID NO: 18619

SEQ ID NO: 22129 - DNA, 1452 bp, Staphylococcus aureus VET1892R; identical to SEQ ID NO: 18653

SEQ ID NO: 22130 - DNA, 609 bp, Staphylococcus aureus VET1892R; identical to SEQ ID NO: 18624

SEQ ID NO: 22131 - DNA, 927 bp, Staphylococcus aureus VET1892R; identical to SEQ ID NO: 18619

SEQ ID NO: 22132 - DNA, 1452 bp, Staphylococcus aureus VET1893R; identical to SEQ ID NO: 18653

SEQ ID NO: 22133 - DNA, 609 bp, Staphylococcus aureus VET1893R; identical to SEQ ID NO: 18624

SEQ ID NO: 22134 - DNA, 927 bp, Staphylococcus aureus VET1893R; identical to SEQ ID NO: 18619

SEQ ID NO: 22135 - DNA, 1452 bp, Staphylococcus aureus VET1895R; identical to SEQ ID NO: 18653

SEQ ID NO: 22136 - DNA, 609 bp, Staphylococcus aureus VET1895R; identical to SEQ ID NO: 18624

SEQ ID NO: 22137 - DNA, 927 bp, Staphylococcus aureus VET1895R; identical to SEQ ID NO: 18619

SEQ ID NO: 22138 - DNA, 1128 bp, Staphylococcus aureus VET1897R; identical to SEQ ID NO: 18617

SEQ ID NO: 22139 - DNA, 609 bp, Staphylococcus aureus VET1897R; identical to SEQ ID NO: 18624

SEQ ID NO: 22140 - DNA, 927 bp, Staphylococcus aureus VET1897R; identical to SEQ ID NO: 18619

SEQ ID NO: 22141 - DNA, 1452 bp, Staphylococcus aureus VET1899R; identical to SEQ ID NO: 18653

SEQ ID NO: 22142 - DNA, 609 bp, Staphylococcus aureus VET1899R; identical to SEQ ID NO: 18624

SEQ ID NO: 22143 - DNA, 927 bp, Staphylococcus aureus VET1899R; identical to SEQ ID NO: 18619

SEQ ID NO: 22144 - DNA, 1452 bp, Staphylococcus aureus VET1901R; identical to SEQ ID NO: 18653

SEQ ID NO: 22145 - DNA, 609 bp, Staphylococcus aureus VET1901R; identical to SEQ ID NO: 18624

SEQ ID NO: 22146 - DNA, 927 bp, Staphylococcus aureus VET1901R; identical to SEQ ID NO: 18619

SEQ ID NO: 22147 - DNA, 1128 bp, Staphylococcus aureus VET1904R; identical to SEQ ID NO: 18617

SEQ ID NO: 22148 - DNA, 609 bp, Staphylococcus aureus VET1904R; identical to SEQ ID NO: 18624

SEQ ID NO: 22149 - DNA, 927 bp, Staphylococcus aureus VET1904R; identical to SEQ ID NO: 18619

SEQ ID NO: 22150 - DNA, 1128 bp, Staphylococcus aureus VET1905R; identical to SEQ ID NO: 18617

SEQ ID NO: 22151 - DNA, 609 bp, Staphylococcus aureus VET1905R; identical to SEQ ID NO: 18624

SEQ ID NO: 22152 - DNA, 927 bp, Staphylococcus aureus VET1905R; identical to SEQ ID NO: 18619

SEQ ID NO: 22153 - DNA, 1452 bp, Staphylococcus aureus VET1906R; identical to SEQ ID NO: 18653

SEQ ID NO: 22154 - DNA, 609 bp, Staphylococcus aureus VET1906R; identical to SEQ ID NO: 18624

SEQ ID NO: 22155 - DNA, 927 bp, Staphylococcus aureus VET1906R; identical to SEQ ID NO: 18619

SEQ ID NO: 22156 - DNA, 1452 bp, Staphylococcus aureus VET1908R; identical to SEQ ID NO: 18653

SEQ ID NO: 22157 - DNA, 609 bp, Staphylococcus aureus VET1908R; identical to SEQ ID NO: 18624

SEQ ID NO: 22158 - DNA, 927 bp, Staphylococcus aureus VET1908R; identical to SEQ ID NO: 18619

SEQ ID NO: 22159 - DNA, 1452 bp, Staphylococcus aureus VET1909R; identical to SEQ ID NO: 18653

SEQ ID NO: 22160 - DNA, 609 bp, Staphylococcus aureus VET1909R; identical to SEQ ID NO: 18624

SEQ ID NO: 22161 - DNA, 927 bp, Staphylococcus aureus VET1909R; identical to SEQ ID NO: 18619

SEQ ID NO: 22162 - DNA, 1452 bp, Staphylococcus aureus VET1911R; identical to SEQ ID NO: 18653

SEQ ID NO: 22163 - DNA, 609 bp, Staphylococcus aureus VET1911R; identical to SEQ ID NO: 18624

SEQ ID NO: 22164 - DNA, 927 bp, Staphylococcus aureus VET1911R; identical to SEQ ID NO: 18619

SEQ ID NO: 22165 - DNA, 1452 bp, Staphylococcus aureus VET1912R; identical to SEQ ID NO: 18653

SEQ ID NO: 22166 - DNA, 609 bp, Staphylococcus aureus VET1912R; identical to SEQ ID NO: 18624

SEQ ID NO: 22167 - DNA, 927 bp, Staphylococcus aureus VET1912R; identical to SEQ ID NO: 18619

SEQ ID NO: 22168 - DNA, 1452 bp, Staphylococcus aureus VET1913R; identical to SEQ ID NO: 18653

SEQ ID NO: 22169 - DNA, 609 bp, Staphylococcus aureus VET1913R; identical to SEQ ID NO: 18624

SEQ ID NO: 22170 - DNA, 927 bp, Staphylococcus aureus VET1913R; identical to SEQ ID NO: 18619

SEQ ID NO: 22171 - DNA, 1452 bp, Staphylococcus aureus VET1914R; identical to SEQ ID NO: 18653

SEQ ID NO: 22172 - DNA, 609 bp, Staphylococcus aureus VET1914R; identical to SEQ ID NO: 18624

SEQ ID NO: 22173 - DNA, 927 bp, Staphylococcus aureus VET1914R; identical to SEQ ID NO: 18619

SEQ ID NO: 22174 - DNA, 1452 bp, Staphylococcus aureus VET1917S; identical to SEQ ID NO: 18653

SEQ ID NO: 22175 - DNA, 609 bp, Staphylococcus aureus VET1917S; identical to SEQ ID NO: 18624

SEQ ID NO: 22176 - DNA, 927 bp, Staphylococcus aureus VET1917S; identical to SEQ ID NO: 18619

SEQ ID NO: 22177 - DNA, 1452 bp, Staphylococcus aureus VET1923S; identical to SEQ ID NO: 18653

SEQ ID NO: 22178 - DNA, 609 bp, Staphylococcus aureus VET1923S; identical to SEQ ID NO: 18624

SEQ ID NO: 22179 - DNA, 927 bp, Staphylococcus aureus VET1923S; identical to SEQ ID NO: 18619

SEQ ID NO: 22180 - DNA, 1452 bp, Staphylococcus aureus VET1949S; identical to SEQ ID NO: 18653

SEQ ID NO: 22181 - DNA, 609 bp, Staphylococcus aureus VET1949S; identical to SEQ ID NO: 18624

SEQ ID NO: 22182 - DNA, 927 bp, Staphylococcus aureus VET1949S; identical to SEQ ID NO: 18619

SEQ ID NO: 22183 - DNA, 1452 bp, Staphylococcus aureus VET1950S; identical to SEQ ID NO: 18653

SEQ ID NO: 22184 - DNA, 609 bp, Staphylococcus aureus VET1950S; identical to SEQ ID NO: 18624

SEQ ID NO: 22185 - DNA, 927 bp, Staphylococcus aureus VET1950S; identical to SEQ ID NO: 18619

SEQ ID NO: 22186 - DNA, 1452 bp, Staphylococcus aureus VET1956S; identical to SEQ ID NO: 18653

SEQ ID NO: 22187 - DNA, 609 bp, Staphylococcus aureus VET1956S; identical to SEQ ID NO: 18624

SEQ ID NO: 22188 - DNA, 927 bp, Staphylococcus aureus VET1956S; identical to SEQ ID NO: 18619

SEQ ID NO: 22189 - DNA, 1128 bp, Staphylococcus aureus VET1959S; identical to SEQ ID NO: 18617

SEQ ID NO: 22190 - DNA, 609 bp, Staphylococcus aureus VET1959S; identical to SEQ ID NO: 18624

SEQ ID NO: 22191 - DNA, 927 bp, Staphylococcus aureus VET1959S; identical to SEQ ID NO: 18619

SEQ ID NO: 22192 - DNA, 1452 bp, Staphylococcus aureus ZTA09/03576-8HST; identical to SEQ ID NO: 18653

SEQ ID NO: 22193 - DNA, 609 bp, Staphylococcus aureus ZTA09/03576-8HST; identical to SEQ ID NO: 18624

SEQ ID NO: 22194 - DNA, 927 bp, Staphylococcus aureus ZTA09/03576-8HST; identical to SEQ ID NO: 18619

SEQ ID NO: 22195 - DNA, 1452 bp, Staphylococcus aureus ZTA09/03734-9HSA; identical to SEQ ID NO: 18653

SEQ ID NO: 22196 - DNA, 609 bp, Staphylococcus aureus ZTA09/03734-9HSA; identical to SEQ ID NO: 18624

SEQ ID NO: 22197 - DNA, 219 bp, Staphylococcus aureus ZTA09/03734-9HSA; identical to SEQ ID NO: 20077

SEQ ID NO: 22198 - DNA, 1452 bp, Staphylococcus aureus ZTA09/03745-9HSA; identical to SEQ ID NO: 18653

SEQ ID NO: 22199 - DNA, 609 bp, Staphylococcus aureus ZTA09/03745-9HSA; identical to SEQ ID NO: 18624

SEQ ID NO: 22200 - DNA, 219 bp, Staphylococcus aureus ZTA09/03745-9HSA; identical to SEQ ID NO: 20077

SEQ ID NO: 22201 - DNA, 1452 bp, Staphylococcus aureus ZTA10/00045-9HST; identical to SEQ ID NO: 18653

SEQ ID NO: 22202 - DNA, 609 bp, Staphylococcus aureus ZTA10/00045-9HST; identical to SEQ ID NO: 18624

SEQ ID NO: 22203 - DNA, 927 bp, Staphylococcus aureus ZTA10/00045-9HST; identical to SEQ ID NO: 18619

SEQ ID NO: 22204 - DNA, 1452 bp, Staphylococcus aureus ZTA10/00047-8HST; identical to SEQ ID NO: 18653

SEQ ID NO: 22205 - DNA, 609 bp, Staphylococcus aureus ZTA10/00047-8HST; identical to SEQ ID NO: 18624

SEQ ID NO: 22206 - DNA, 927 bp, Staphylococcus aureus ZTA10/00047-8HST; identical to SEQ ID NO: 18619

SEQ ID NO: 22207 - DNA, 1452 bp, Staphylococcus aureus ZTA10/00058-8HST; identical to SEQ ID NO: 18653

SEQ ID NO: 22208 - DNA, 609 bp, Staphylococcus aureus ZTA10/00058-8HST; identical to SEQ ID NO: 18624

SEQ ID NO: 22209 - DNA, 927 bp, Staphylococcus aureus ZTA10/00058-8HST; identical to SEQ ID NO: 18619

SEQ ID NO: 22210 - DNA, 1452 bp, Staphylococcus aureus ZTA10/02412-8HSA; identical to SEQ ID NO: 18653

SEQ ID NO: 22211 - DNA, 609 bp, Staphylococcus aureus ZTA10/02412-8HSA; identical to SEQ ID NO: 18624

SEQ ID NO: 22212 - DNA, 927 bp, Staphylococcus aureus ZTA10/02412-8HSA; identical to SEQ ID NO: 18619

SEQ ID NO: 22213 - DNA, 1452 bp, Staphylococcus aureus ZTA11/00189-8HSA; identical to SEQ ID NO: 18653

SEQ ID NO: 22214 - DNA, 609 bp, Staphylococcus aureus ZTA11/00189-8HSA; identical to SEQ ID NO: 18624

SEQ ID NO: 22215 - DNA, 927 bp, Staphylococcus aureus ZTA11/00189-8HSA; identical to SEQ ID NO: 18619

SEQ ID NO: 22216 - DNA, 1452 bp, Staphylococcus aureus VET0465R; identical to SEQ ID NO: 18653

SEQ ID NO: 22217 - DNA, 609 bp, Staphylococcus aureus VET0465R; identical to SEQ ID NO: 18624

SEQ ID NO: 22218 - DNA, 927 bp, Staphylococcus aureus VET0465R; identical to SEQ ID NO: 18619

SEQ ID NO: 22219 - DNA, 1464 bp, Pseudomonas sp. AAC
atgactaaagcggctttgaaccgattcctcaatgagtaccctgatgcgctgaacgatggcgtgggggcgattttcgttggtgccggcgtctcgatggcggcgggttacccttcctgggcagagctgctcagtgacatcgctgtagagcttgaggttgactcgaagaacgtccacgacctggcggcgctggctcaatggagcatcctggaaaacggtggtgccacacgtgtccgcaatgtcatcaagaacgagataggccctgacaaacctatccccgagacagttgagatcatctcgcggctaccggtcagacatatctggacgaccaactatgaccgcttgatagagcgtgcgtttgaatccattagtcgcccgctcaatccgatatccagccctaaagatcttgcccttagggtgacgcctggcgcagtgctgctctacaagatgcatggctctgtagatcgcctcgacgacgtcgtcatctccacggacgactacgaactgtttcgctcaaaacgaggccagtatctgccgctgtttcaagcgcacctgaccagtatgtccatgctgttcatcggcatcagcttcaccgaccctaatgttcggcatgtcctatcgctgatccgagaaagcttcaccgatgcgccgcctgagcactttgccatcgtgcgtgcaccgcagaagtccgacttcaagactgaaggggaattcgcagcgcgcaatgcccagcacaagctgtgggcgaaagatttgaagcgctatggcttgttggcggtagaggtcaacgactatgccgagatcccggcgcttctgcgtcagattggaaagcgagtcgcttcgcgcagaatctgggtgagtggcagctggcctcttgagcggggaggttccgagtcagccgacatccatgcgctggctgaagacattggccggcgtattggtgagacaggtcgccacctggtgactggtgcaggccggctggttggatcggcgtcactgtcggggttcttgggagcccttcggcaaggtggcggatgggatctggagcgacggctaatcgccagaccatttcctcaacccctggcgggagcccagcccaacaacgaagaatgggctgcgctgcggcaggagcttgctcgacaagctggtatcgccattttcattggcggtgcgaagctggccggcgacaagttggaggtcgctcaaggagtggagcaagagtttgaagttgccaaggcggcaggagtatttctgctcccggtaggggcgtctggtggcgctgcgaagaaaatcagtgacctgctgctgggatcagagctctcctcatctggtcaggacgctgtaaggcccacggataaagaactgaaagtactttctgctccagggctcctggatagcaaagaagggcggcgcaagctcgtttcccaggtgtttgagatcattgatcgaatagctcgtgctacctga

SEQ ID NO: 22220 - DNA, 504 bp, Pseudomonas sp. AAC
atggcaaggaatgttttcttcagtttccacttcaagaatgatttttggcgcacccagcaagttcgaaacatcggtgccttggatggtcagaaactctatacgccgaacgattgggaaggggtcaaaaaaaagggtaatgcagcaattgaaaagtggattgatgacagcctggtagggaagacctgtgtagtcgtactggtgggctccgagaccgcaagccgaccgtgggtggttaacgaaatcatcaagggttggaacgcgggcaaaggcgtcgtgggcattcgcatcaacaagcttctagatgcaaatggaaactcttcagtagcaggctccaaccctttcgatctggtcacactaaagaacggtacggtgagcctttcgaactatgccagactgatcacccccgtaggggccgacagcaaagcggtctacgcatcgatccaggagaacattgagcaatggattgaggatgccattgcagtccggaaaaactacaagccgtga

SEQ ID NO: 22221 - DNA, 552 bp, Pseudomonas sp. AAC
atggcaaggaacgttaccaaagctgaacttcgagcttttacagcaaacagatcgcagagtgaccgcgagaagcttctgaaatccaatgcatcaagcagtggcacaagcacattcctatcgcactccagcaaagatcacgagctgttggagggagcgatggaagtgcttcacaaccacggcgcacgggtctatatcgatgaaattgaccctgaaatgccgccctacacctcagcagaaactgctgccttacttaagcagcgcattagtcaaacaaggcgctttgttctgctgacgaccgagaacagcaaagacagtcggtgggtcccctgggagttgggcattgcggatggcgaaaagagcttgttgaacattgcgctctttccagcatccgacagcacctacgatgacaattggacgagctgggagtatctcggcttgtaccatcgaatcgtctggggaaagctttcagggtacgaaaatgagctgtggatggtgcttgatgccaaagcaaatacagccgtaacgttgagaaaatggcttacgggatgctga

SEQ ID NO: 22222 - DNA, 1464 bp, Parabacteroides sp. HGS0025
atggaattttcaacaaaacaaaaagcatttataaatgcatttgctacagaaataattaatggtgatgctgccatttttgcaggtgcaggcttgtcagccccattaggctttgttaattggaaaaatcttttaaaagatttggcagaggagataaatctggatattaataaagagtctgatttggtttcagttgctcaataccattttaataaattcaagagggggaaaataaataataaaattgtaaacgaatttactactttaaaaaagggaagcgttaatcacgaaatattggcaagaataggaatagacactttttggactactaactacgatcagttaatagagaaaacattagaagctgaaggtaaaacagttgagataaaaataagaaatgaagatttctcaagaaatataaaaaagaagaatgcgattgtttataagatgcatggtgataagaattcgcctgacgatgcagtattaatcaaagatgactatgaaacctacaatgacaaaagagaatttttttctacttcattgagaggtgacttgctttctaaaacatttctatttataggatttagctttgatgaccctaatttagaatatattttaagtaggataaaggttttactaaaagataatactccaactcattactgtttctttaaagaagtcttagctgaggattttaatgatccaaacctaacaaaagagaaaaataatgaaaactacttgtatgcaaagattaaacaagaactgaaaatagatgatcttcttaggtatgggatacatgcggtaatgataaggcaatataatgaaataacttctatactgttagagatagaaaaaaagataaaaagaagaaatattttcgtttcaggagctgctcacatttatgatccttatactcccgatgaagctaaggaattaattcatcaattgagttataaacttgcggaaaatgaatataaaatagtctcagggtatgggcttgggattggaagtgtagttatcaatggagcgttggagttcaaattaagttctaattatcgtaatttagatgatttactaatattaagaccattcccacaaatacaatctggttcaaaaactatacctgaaatttggacagattatagaaaagacatgatttctaaagctggcattgccatttttatgtttgggaataaagttaatgctaatggtgaagtcgttcattcaaatggaatggaagaagaatttaatatctgtttggaatacggtgttttcccaattccaattggagttactggttttatatcaaaagctttatgggatgatgtaatgattaatatagataaatattatccaaataattttgaactaaaaaatgcaattaagaaaatcggtgattcgactacctcgatagaaatgattattacaaacgttataaaagcaattaatatcttacaaaaaatataa

SEQ ID NO: 22223 - DNA, 483 bp, Parabacteroides sp. HGS0025
atggcaaaaagacaatttttttacagttttcattatgataatgatgttttccgtgtacagcaaattcgtaatattggtgctctggaagaaaacaaacctgtttctgcaaatgaatgggaaacagtaaaaaaaggaggagatgcagctataaaacgttggattgatgataatatgaaatataaaagttgcttagttgtccttattggttctgaaacggctagcagaccttgggttgactatgaaataagaaaagcatggaatgatggaaaaggtgttttaggtatttatattcataatttaaaatgtcctcgcaatggaaaatgtagacaaggtgcaaatccttttgataacatttattttactgatggaaaaacaaaactgtcaagtgtggtaaagacttataatcctaactcttttgatgcatataatgatatagctaacaatcttgaaaattggattgaggccgctattagtgccagataa

SEQ ID NO: 22224 - DNA, 561 bp, Parabacteroides sp. HGS0025
atggcaatatttacaaaacaagaatttgaatcaatagcgagaataaaagctggatataaaggtttaagttccgtattaaatgaaagtaggttttattcaaaggcttctgctttgacaagtctttttctttcgcattctcattatgacaaagcaattgtggaacaggcaaaaatcttttttgaaaatttgggtattagtatttatgtcgattgggctgatgaaacaatgcctgagaaaacgaatggtattacagctacaagaattaaatcaaaaattatcaccaatgataaatttgtgttgttagcaaccaattcagccgttatatcaagatggtgtaattgggaggttggtataggagatacttataagttgaatagcgacaaaatttgtatattgcctttgtctgacaataagaacgactggaatgggaatgaatacttgcaaatttatcctcgtatagagcctgtctataaagatagttattctttttatgacaatatatttaaagttatatatccagatgggcatagtacttggctggatgattggttaaaaaaatga

SEQ ID NO: 22225 - DNA, 1446 bp, Parabacteroides sp. HGS0025
atgaaagctgaatttgaacctttcgttagagatttcgttaatcatctacgggataataatgttgcaatatttgcaggtgcaggactttcgaaggctgcaggttatgttaattggaaagaattattagaagaaatagcagaagatgttgggttaaaaatagagctggaagaagatttgatatctttggctcaataccatgtaaatcaaaataatagacataaaataaatcagaaaatattagatgaatttgttgaagggagtaaccctactgaaaatcatgtaatattaagtagattaccaattgcaacatattggactacaaattacgataagttattagaagacagtttagccaaaaatcacaaaagatatgatgttaaaataagagaaacagattttcatcattcaatacacagaagggatgctgtcatttataaaatgcatggcgatgtaagcaacccctcagaggccgtaattactaaagaggattatgagagatactatttatatcataattcgtttttaacagcattaaatggagacttgactactaaaacctttctatttctcggctttagctttacagaccctaacataacatatataattagccgtcttaataatgttattgataagaagtcaagtaggcaacattatttatttctaaaaagacctgttataggggatagtaacataacaaatgaggctgaattagactatgcgaaaacaaaacaaagacttctgattgatgatttaaaaataagatataatataaaggctttgttgattgatgagttctctgaaattactgatgtcttaaaagagatagagagaagatataaaaagcaaacaattttcatatctggcagttcatgtggagagtatgggagatttggagaaaaacgagctactgatttcatacataatctaaccaagcagattatacaaaaatcttatacaatcgtaaatggtttcggtgttggcgttggaagtgcagtcattaatggagctcttgatgcaattgattctgaacctcaaaaattcagcgactcacaattagtcatgaaaccttttccacaatttgtacctgaaggaaaaaatattcaagagctatgggaagcttatcgtaaaaggattattccaatagcaggcattgctatttttgtttttgggaataaaaaagatactactggaaatgtcgtacttgctgacggtgtcaaaaaggaatttaatattgctatagaaaatggagtgattccaatacctattgcagcaactggttacatgagtaaagagatatttgatcttatttcagaagactcatctaagtatctcgctccttataactggctgtggaaagaattatgtcaaatgaactcagatgtaatatcagagaatgagataatagacaaagttattaatataattttaaaattaaacaaataa

SEQ ID NO: 22226 - DNA, 492 bp, Parabacteroides sp. HGS0025
atgggaagaagagtatttactagttttcattatattccagataactggcgagctagtcagatcaggaatatgggtaaaattgaaggaaacggtattgtttctgcaaataaatgggaagaggttaccaaaggaggtaataaagctatcgaaaaatggatagatgataacatgagtggtaaatcttgtgttattgttttagttggtgaaaataccgcaaatagaaaatggatagattatgagataaaaaaagcatgggaagaagaacgtggtatttttggaatatatattcataatctaaaagatcgagatggtaatcaagccaataaaggtgataatccatttgatggttttactatcaatggaaaatcaatgtcatctattgtaaaatgctacaatccaccatataaaactagtacaaatgtttatgagtacatagaaaataatattgaagattggattgaagaagcgatagagattcgtgataaatattaa

SEQ ID NO: 22227 - DNA, 546 bp, Parabacteroides sp. HGS0025
atggctattattaccaaaaacagactctctgaaatatcaaataataaatcagggggatacacacaaaaatcaattattctaaatgaatcaagaagctatagtagaggtttctataaaacatctatatttttatcacacagccatcttgatagagattatataactgatactgtcgtttttctcagaaaaatgggagtaaacgtctatatagattggatggatgataatatgccgaaagaaactagcggtaaaactgcagatattttgaaacaaaaaataaaagagaatgataaatttatatttctagcaacgaataattctatatcctcaaaatggtgtaattgggaaataggctttggtgatgcacataaatatatagataggattgcactacttcctttagctgacaactatacagagtggaaagggaatgagtatctccaaatctaccctcatattgttgaatcagattatacaaatgattattacaaggttattttccctgatggaaaggaaatgagtctttatgaatggttaaaccgttaa

SEQ ID NO: 22228 - DNA, 1437 bp, Klebsiella pneumoniae
atgacgtttagtaatgaaattgaagttttcataaaagattttgttaaagatcttgaaaatgattgtgctgctattttttctggcgcaggaatgtctaaaaaccaaggttatgtcgattggaaagaattacttagcgatatagcagaagagcttagtttagacattaataaagaagacgatctaatatcgcttgctcaatttcatgttaatgaaaaaaaaggtgctacaaaactcacgaggaagataatcgaagagttttctgagcaagccgaaccatcagaagttcataatataattgctcgtttaccaattaagacattttggacaacaaactatgacactttaattgaagatagtctacggaaagtttacaagattgcagatataaaaagaaatatagatgatttaaatacaacccgacctaagcgagatgcgatagtatataaaatgcatggtgatatttcgtctccgtccaaggctattttatataaagagcagtatgaaaaatactacagaacacacgcctcatttattaccgcacttagcggggatttaatatcaaaaacttttctatttatagggtttagttttaccgatccaaatctagattatattttgagtcgtttgtatactcattctggggataagagaacacattattgttttatgaagaatgaggctaataattcgctagatgatgaagaaacagttgcgtacaagatcagaaaacaaaagctgcgaattgatgacctcaagagatttggcatacaagtattattaatagatgaatattctgacatccctataattctagctaagatagaacagtcatttaaaaagaaaacgatatttatttcaggtagtgcagaaaagtatggggggcttgaaaggccgaaagcattagactttattcatacattatcatatgagattataaagaataattataggatagtgaatggatttggatggggcgtcggaagttctgtgataaatggtgcgttggatgccatttatagtaggccagataaattatcagaagaacagcttatagttagaccatttcctcaaactgtcagtaaggggaaagatattcaagaactttgggaggagtatagacagagaatgattcctcttggtggtattgcattgtttatttttggaaataaacaagaggaaaataatgatatagtaaatgctaggggagtatttagagagtttgagattgctgttcaacatggtcttgtaccaattcctttacccaataccgggtatatgtctgaatatatatttaaacaaatatcacaagatcctaagaaatattatggaagtaatgaatggatatataatgatttgtctgagcttactgaaaaagatttttcggtaaaaaaaacaatagaagctgtaataaaaatcataaacaaactgaataaataa

SEQ ID NO: 22229 - DNA, 612 bp, Klebsiella pneumoniae
atggctcatgaaacatttatatcatataaatatagtgaagcacaggatttaagagacaaaattgtcaaggcattaggtgatgacgctgtttactataaaggggagacatcggagtctcctgatataagtaatacaacagtagataatataaagaacaatcttaaaaatatgatattcgggacatctgttttaattgtaattatttccccgaatatgattaaaagtaaatggattgactgggaaattgaatattcattgaaagaatacaagagaggtggaactacctcccgaactaatggcattgttggtgtgataatgaaggttaataatagttatgactggttagtatcttcttcaatcaatcctgatggatgttcatcaagaactattgatacaactaaactatatgacattattaataataatagatttaatctgacgtcagaagataaatattgttgcccagagtgcaaatcatatgatcaattgacaggctcatatatttcattgatagaagaagaccggtttttagcagatctatcttcatacattgaaaatgcttatgataaatctaaaaaattaagttcctacaatttatctaaacaaaaatag

SEQ ID NO: 22230 - DNA, 1455 bp, Serratia marcescens
atgccagaacgtgatatagaactgtttattcgtgattacgttaatgatatcaaagccggcagcgccgcgctatttgccggtgccgggctgtccatacccgccggtttcgtcagctggaaagagcttatcggtgatatcgcttatgaattggggctggatatagaaaaagaaagcgaccttatttctctggctcaatatcatctcaatgaaaaaggcaaccggcataagataaatcaaaaaataattacagaattcgctgtgcaagcggaagaaactgaaaatcatcggatcattgccagattgccgatagcgtcactctggacaaccaactacgacgatctgattgaaaaaacctatgcccgttataatcgcgtctgcgacgttaaaaccacgccggaaagtctgaccaacaatattcacaagcgcgatgttgtcttatataaaatgcatggtgattatagaacacccaaccaggcgattatcacccgcgaacaatacgaaacttactcccgtacacaccttccttttatcaacatgctgatggcggagttgaccgccaaaaccttcctgtttatcggtttcagctttgaagaccccaacctgcaatacgtattgagtcgcctttacgcgcagtacggcgaagggaaaagaaaccactactgcatcatgcggcgcgttcagcctggcgacagcggcagcgaggatcaggcgtcttatgattacaacagccgaaaacaaagcctgatgatcaacgatctgcgccgttacggcattcaaacgctactggtggaggactatcggcaaatcaccgacctgctatatgccatcgaaacgcaattcaagaaaagcacggtgtttatctccggcagcgccgacaactaccacccctatgcccgtgaagagtccatccagttcatacaccgcctggcgcgcctgcttatccgcaaacagtaccgcatcgtcaacggcttcggttggggcgtgggcacggcggtgatcaacggcgcattggaagccatttacgccagcggggggaaaatcagcgaaagccagctggtgctgcgccctttcccccaattcgccagcgggggcattacgctgccggcactttggcacgagtaccgccagaacatgatttcgctcagcggcatcgcggtctttttgttcggcaacaagcgtaacgccgaaggcgaatgcgtgctggccgacggtttattgaaagagttccacatcgctgcggaacaaggctgcgtctgcattcctatcggttgtaccggcggcgcatccgccgagatctaccgaaaaatcaaggaggagatgaaagacaccctctatcaccgccatcccgtcgccatgaacctgctggatcaacttaacgagccgggcagcctggcggagaagaaaacatgcctgttggcacttatcgatatcattactaaggataatcctcgatga

SEQ ID NO: 22231 - DNA, 492 bp, Serratia marcescens; identical to SEQ ID NO: 19483

SEQ ID NO: 22232 - DNA, 1443 bp, Bacillus sp. SGD-V-76
ttgaagtatgatgcaagcattaaggaatttttaagaacctatgtaaaagaaatccaagactcaaatgccgcaatatttgcgggtgcgggtctttcacgtccagctggccatgtagactggaaagacttattacgggacgtggctgaagatttacaattggatattgatcaggaagcagatttaatagccgtagcacaatatcatgtcaacgagtttaatgggagaaacaaaataaatcaagtattgattgatgaatttactaaaagtgtatccataacagaaaatcataagattttatcccagttacctattgatacatattggacaacaaattatgatcaattaattgaatccactttagaggcaacaggtaaaaaagtagataaaaagataacatctgaaaacttaacttattcagtaccaggaagtgatgcaaaggtttataaaatgcatggagatagtagtttgcctcatgatgcagttttaaccaaagatgattatgaggggtatgatcaaaagagggagatattcagtacggccctgcgcggggatttagtatctaagacatttttatttatcggctttagttttgatgaccctaatttatctcaaattttaagtaaaattaggattttattaaatacgaatacgagaacccattattgctttatgaaaaagatagatataaatgagtataaaaatgaggaagaattcttatatgcagaaattaaacaagacttaaaaattaaagacttaaaaaggtacggtatcaaggttctgttagttgacaattattctgatgtaacagatattctgcatcatgtctcttcacttgtaaagagaaaaaatatttttgtatcgggtagtgcaagcgattacggcagatggagcgaaacacaggcatttgagtttagtacattattgagtagatcccttatcaaaagtaataataatgttgtttctggttttggtttaggaataggaagttgcattatttcaggtgcattagaagaactttattcaagtcaaaataacaaggtagaagaaagacttaagtgcagaccatttccacaagtcacaactggacaaatttctaagtctgaattatggactaaatatcgcaaagaaatgctttctaatgtcggtattgctatctttatattcggaaacaagatcgatatgaaaacgaaaaaggtaattggtgctagtggaatgaacgaagaatttaagatttctatagaaaatggggcgattcctatcccaataggcgcaactggttttacatctaacgaattgtggcaagaggttatgaaagattttgataagtacgttggaattgaaaaattaaagcccttgtataacgatttgggtgatgatacaaaaaccccagaggaactaattgaaactgtaataaaaattattagccaattagcaaagcattaa

SEQ ID NO: 22233 - DNA, 609 bp, Bacillus sp. SGD-V-76
ttggcacgtaaaaccttcatatcttataaatattccgaaagtaaggatttaagagataaaattttggaatctttaggagaagatgctgaatattatcaaggggaaactagcgaatcacccgatatgtccgatagaacaactgattatatcaaagataaattaaaagacatgatttattctacctcagttactattgttataatctctccaaatatgaaactaagcaagtggattgattgggagattgaatattcactcaaacaaataaaacgaaatgatcgcacctctggtaccaatggtgtcttaggcattgttatgaaacataatggtggatattcttggttaaggtcttctgtaacaaatcatgatggacatagttccatacatacaaataatgaatacctctacgacattatacacaagaataggttcaaccaagaacctcctgaatatacttgtgatgtatgtaaaattgtaaattctttaacaggttcatatatttctttggttaatgaagaggatttccttaaagatccaaatcaatatattgataatgcatatgataaaagtaaaaatacaggtaattataatttaactagaaaaagataa

SEQ ID NO: 22234 - DNA, 1455 bp, Novosphingobium sp. Fuku2-ISO-50
atggcagttgcagcgacgaccaaacggtttctgaaggattatcctgaggccctgatcggaggtggcgccgccgtgttcgtcggtgccggtgtctccatgggcgcaggctatccatcatgggcgtcccttctgacggaggtcggcgaggagctgggcgtgaagtctggcgaacttcacgacctggctgcgctggctcaatggagcatccaagagaatggatccgcgacgcgggtccgaaacgtcatcaaggagcagatcggcgtagagcatgccgttcccgcggccctggaaatcatcgcccgactgccggttaagttcatctggaccaccaattacgataggctggtcgagcgtgcattcggccacgtcaaccgaccgatcgatactgtctctggcgccgctgacctaacccttcgcgcgacaccaggtgcgacacgcctcttcaagatgcatgggtcgatcgaacggctggacgatgtcgtcatctcgaccgacgactacgaactataccggtccaagcgcggggccttccttccactgttgcaggcccacctctccagtatgtcgatgctgttccttggcatcagcttcacggatccgaacatccgccatgtcttgtcgctcattcgcgagagcttcacgtccgcgccacctgagcacttcgccatagtccgacccccgcagcgggacgactacaagacggacgccgagttcgaggcgcgcagcactcagcataagctgtggagccgtgatctgaagcgttatggcctcgtcgtggtcgagattgacaactatggcgaagtgcccgagcttctctggcagatcgaaagacgcgtggcggcgcgacgagtgtgggtgagcggcagctggccgccggaagccgggcatgaaatcgcgagggtctacaacgtggcgcaggctgtcggccggctcgtgggcgatcgtaaccgcgacctcgtcagcggagctggtctcgtcgtgggatcggcctccatcgctggcttcctcgacgcgctgcgatcgagcggaggctgggatctcgagcgacgcctcattgcccgccccttccctcaaccgattcttggcaaagcgccggacggcgctcaatgggcggcccttcgcgctgaattggcgaggatcgctggcgtcgtcatcttcatcggcggaatgaagatcgaaccatccaccggctctacagtgatcgcggccggcgtcctggacgagttcgaagcggccaagaccgccgactgcttcttgatccccatcggctcaaccggtggagcggcggctcagatttccgacagcctaatcgggtccgccatagaagcgtcggggcacaccgcattgcgtcctatggacgacgagctgaaggagctcgcccgcgtcgacatcacggtcgaggaaatcgtgaagctggtggccgagatacttaagcgcatcgacaggcaggtctga

SEQ ID NO: 22235 - DNA, 498 bp, Novosphingobium sp. Fuku2-ISO-50
gtggctcgtcgtgtcttcttcagctttcacttcgataacgattactggcggacgcaacaggtcaggaacatgggggcgctcgaaggtcaaccagtgtgcacgccgaatgtctgggaggaagtgaagcggaaaggcagggcatccatcgagaaatggatcgccgacaatatgcacggcaaaagctgcgtcgtcgtactggtcggctctgaaaccgcgagccgcccttgggtcatacatgagatcatcaaggcatgggacgaccggagaggggtcctcggcatccgggtcgacaggctgctcgatcgccacagccagacctccatcgcaggcgccaacccgttcgataagatcaccatcggtgggacgaacagcaagctttcgtctgtcgcgccgctaatcaccccgtccggaagtgacagcaagtctgtctacgcctcgatctccaacggcatcgagaagtggatagaggacgcgatcatgatccgcggccgcaactga

SEQ ID NO: 22236 - DNA, 555 bp, Novosphingobium sp. Fuku2-ISO-50
atggcagaatacatcacgcgcgaagagcttcgtagctacgcggccgaaatgggaacggtcgaaatagcaagggtccggaaggccgctgcctcaaggtcgctcgcaggctccacattcctctcccactcaagtaaggacgatgatctggtcgccggggcgatccgggttctcgaaagccatggtgccgaggtttacgtcgatgagatcgatccggagatgcctccgtacacgagcgaaaagactgctgcgcttttgaaaacccgaattcgcgacacaagccgcttcgtgcttctcgccagcaaaaacagtaaggagagcaaatgggtgccatgggagctgggcatcgccgatggcatgaaaggcactccaaagatcgcactctttccagcttcggactccagctatgacaaagcatgggcgtcatgggagtacctcggtctctacgaccggatcgtctggggaaagctcgaaggctatcagaatgaggtatggatggtgatcgacgaaaataataataccggaaccgaactgagaaagtggcttaccggctactaa

SEQ ID NO: 22237 - DNA, 780 bp, Novosphingobium sp. Fuku2-ISO-50
atgtttcgtggtttcgaactctctgtgaaggaagattttttaagtgtatacaagtcaataggcgcatcgcagcatgaatataacaagcggcgggtcgacgaatgcctaaatcggttccgcgatggatcaggcgacctgctcgctgcaaagatgactgctgaatggtttcccgagatcgacgcgcaggtctttatctcgcatgcccacaaggacagcgcattggcgcttggcctagcaggccatcttcataaaggattcgggctcaagtcgttcgttgattctgccgtatggggctattcggacgatcttctgcgcattctcgatgacgccttctgctacaatgagacctcggggacctatagctacgcgaaacggaaccgttcaacgtcgcacgtacacatgatgctctcggtcgcgctgtcccggatgatcgaccgatgcgagtgcatcatcttcatcaacacgccgcagtcgataacctcgcgcgactatatcaagggtgataagacggactcgccttggatctattctgaaatcgcgatgactcgcctgatcaagaagcggtcacgcgaggaccataggggcaccgaatcgctccttgcaactgagagtttgggcaccgacacgcgcctgagggtgcgctacgatgttgatctggaccatctgagcaagttggacggggcaacctacggtatgtggaccatccggtcgcatggcagagcgggtgccaccgccctcgatacgctatacgatctggtgccaccgtcaccgatagaatga

SEQ ID NO: 22238 - DNA, 1431 bp, Streptococcus oralis
atggacaaggaattatttataagagagttttcaaaagctattcatgaagggaatgcagctattttcgcaggtgcaggaacatctgtgagtgctggctttgttaattggaaagaactagtacgcccgttttcagtagaaattaaactagatattgagaaagaaacggacttaataggagtgactcaatattatatcaatactaaacgaaacagagcaaaggttaatcagaggatattcaacacatttttaagtcgagaagcagaaacagatgttatgaatttattaacacgtcttcctatttcaacttattggacaactaattatgatacagtaattgaaaaaggtttggaaaacaaccaccgtaagggtgatataaagaggaaggagacgaatttaacatacagtgttcctgatagagatgcggtggtttataaaatgcatggagatgtaatgttacctgaagaagctgtcatttcaaaagatgattatgcgagatatagtgatgatcactcattatttataactgccttgcatggtgatttggtttctaaaacctttttatttgttggatttagctttgaagatcctaatttagattctattttagggaaattacatgttttactaaaagaagatacaagagaacatttttgtattcaaaagaaagtttcaaagtctgatttttatgatccagaagaagctgaagaagttactaatgataagtttgcttatgctttaatcaaacaagatttaaaaatcgaagacttgcgacgttatggtatagagacagttttagttgatgagtactctgaaatacctgaactaatattaaggattgagaaggagtacctaaaaaatacaatatttatttccggtagtatttcaagctatgatacaacttggagcgaagaaagtgtaaataagtattgttatgatttgtctaagtatcttgtttcccaaaattataagattatatcagggtttggtcttggggtagggagtagcattattaatggagctcttgatgaaatttataaaagcaaatatagacatgtaaatgagcatcttggtttattcccttttccacaatatgagaatggggaaaaatctttacaagagcgttggacggagaatcgtaaagaaatgataagctcagcaggagtatgcatttttatatttggcaacaaaatagatgctaatggagaaatagtagatgcaactggtatgttggaagaattttatttagctagtgaaactggtaaaataataattccaataggatctacaggatttactgcaaaaaaaatttttgacaggatgaaagcatcggataaatttaggtatctagataaatattgggacatattagagtctggagatgattcaaaaaaagttttttctgcaattgatagtattattaaaggaacatga

SEQ ID NO: 22239 - DNA, 624 bp, Streptococcus oralis
atggcaacaaaagtatttatttcttttcgttatagtgatgggaaaaatattaaagatgaattagttgatttatttgatgaatctactgagataattaatagatcagaagatgttgatagaaaccaaatgagtgaggagactattcagaaatatctatatgagaagttaaaagatacatcagttactatcctattattaacaccagaagctgtttcttataaaaaggattggtatggggaatatgatgattggctttacgatgaactaagatattctttagaagatagaactaataatagaacaaatggtgtggttgctgtatatacagatggtgctagagataaattatttatagaggataaccattattgctcgtgttgtcagcagaatcaaccttgtaagatattaaaagattttgataatttagctcgtaagaatatgctaaatattaaacctaactttaagaaagaactatgtaataatctttatagtgatgaatatgattcttatatttctttggttagtttagaggtatttaaaaaagattataaaaaatacattgataatgcaaaagagaaaagggacagactagaagagtttgaaataaagaagagaatggattaa

SEQ ID NO: 22240 - DNA, 1434 bp, Enterobacter asburiae; identical to SEQ ID NO: 18989

SEQ ID NO: 22241 - DNA, 441 bp, Enterobacter asburiae; identical to SEQ ID NO: 18990

SEQ ID NO: 22242 - DNA, 486 bp, Enterobacter asburiae
atgccgattcgtcagtcagaccttcttaacgcaggccaacgagggcaattttccaagcgatttgggcagcccacagcctttctgagccacagccataaagacgcgcaattagcactaggtttacaggcattgctgaatgatcaagggtggggcgtctatatcgactggcaagatcagactatgcccgacaagccggacaccgagacggccctcaatattaaatcagccattgtgcgcgccgactggtttctctttctcgcgacacaacattcgacgacatcacgctggtgtccttgggaaatcggttttgctgatggtaaaaaagtctatgaccgcatcgctattatccccacgcaggacaacctgggccatttctatggtaacgaatatctaaatctctataacaaaatcgacgtatcttctggccatactggccttgcatttttcgacactcgcggcaatggcaaatgggtacgcaatctttaa

SEQ ID NO: 22243 - DNA, 1461 bp, Listeria monocytogenes; identical to SEQ ID NO: 19470

SEQ ID NO: 22244 - DNA, 609 bp, Listeria monocytogenes; identical to SEQ ID NO: 19471

SEQ ID NO: 22245 - DNA, 1443 bp, Bacillus cereus
ttgaagtatgatccaagtattcaggaatttttaagaacctatgtaaaagctattcaagactcaaatgcatcaatatttgctggggcaggcctttcacgtccagctggttatgtagactggaaagaattgttacgagaagttgccgaagatttacaactagatatagaccaggaagtagatttaatagccctagctcaatatcatgttaacgagtttaatggaagaagtaaaataaaccaaattttaattgatgaatttactaggtgcgtaacaacaactgataatcataaaattctatctcaacttccgataagtacatattggacaacaaattacgatcagttaattgagtctaatttagttgctgtaggtaagaaagtagataaaaaaataacgcctgaaaatttaagctattctgtaccaggaagtgatgcgattgtttataaaatgcatggtgacagtactttgcctcatgatgcagttctaaccaaagatgactatgaggggtatgatcaaaaaaggaagttatttggtaccgcactacgaggggacttggtatctaaaacatttttgtttattggttttagttttgatgaccctaatttatctcaaatcctaagtaagattagaatactattaaatgaaaatgctagaacgcattattgctttatgaagaaagtaaatatagatgattatgatacggaagaagaattccgttatgcaacaattaaacaaggattaaaaattaaagatctaaaaaggtacagtattaaggttcttttagttaatgattaccctgaagtaacaggaatattaaaacatatagcttcactggtaattagaaaaaacatatttgtatccggaagtgcgagtgactatggtgaatggggagaaaaggtatcttttgagtttagtacatcattaagcaaggccctcattaaaaataataataatattgtttctggatttggtttgggattaggaagttgtatcgtttcgggcgcattagaagaactctattcaggtcaaaataacaaggtagaagaaaggctcaagtgcagaccattcccacaggttacaaccggacaactatctagaactcagttatggactaaatatcgtaaggaaatgctttctaatgtcggtattgctgtttttatattcggaaataaaatagatactaatacccaagaaataatcgatgctaacggcatggtggaagaatttgaaatttccgttggaaatggagcaatcccaatccccgtaggagcaactggctttacttctaaggtcttatggaaaaaggttatggatgattttgataattatgtcggaattgaagaattaaaaacattgtatattgatttgggagatacgaataagacccctaaagaactaattgaaactgtaataaaaattattaaccaattagctaaacattaa

SEQ ID NO: 22246 - DNA, 609 bp, Bacillus cereus
ttggcatataaaacttttatatcttataaatattctgaagctaagggcttaagggataccattgtaaatgcattaggagatgggggtaaatattaccaaggggaaacaagtgaatcaccggatctgtctgataaaacaactgattatattaaagatagattaaaggatatgatttattcaacttctgttactatcgttataatttctccgaatatgaacctaagtaaatggattgattgggaaatcgaatattcacttaaagaaataaaacgaaatgatcgtaaatcgggaacgaatggtattctaggagttgtcatgaaatacaatggtgggtatagttggttaagaccttcagtcacaaattctgatgggcatacctctatacaaacaaataatcaatacctctatgatattatacataagaatagattcaatcagaatcctcctgaatatacttgtgatgaatgtgaaattgtaaactctttaacaggttcatatatttctttgattaatgaagaggattttcttaaagatccaaataaatatattgataatgcatacgataaaagtaaaaatacaagcaattataatctaactaaaaagaaataa

SEQ ID NO: 22247 - DNA, 1443 bp, Bacillus cereus; identical to SEQ ID NO: 22245

SEQ ID NO: 22248 - DNA, 609 bp, Bacillus cereus; identical to SEQ ID NO: 22246

SEQ ID NO: 22249 - DNA, 1443 bp, Bacillus cereus; identical to SEQ ID NO: 22245

SEQ ID NO: 22250 - DNA, 609 bp, Bacillus cereus; identical to SEQ ID NO: 22246

SEQ ID NO: 22251 - DNA, 1434 bp, Bacillus cereus; identical to SEQ ID NO: 18659

SEQ ID NO: 22252 - DNA, 681 bp, Bacillus cereus; identical to SEQ ID NO: 18660

SEQ ID NO: 22253 - DNA, 1467 bp, Candidatus Magnetobacterium bavaricum
atgagcatagataaaaagatttttataagagaatttgtaaaggcgatagaagagaaaaatgcggctatttttgccggagctggactgtcaaaagacggaggttttgtagattggaaggggttactacgcttaattgcagatgagattggccttgatgtagataaagagtgtgatctggttgcagtcgctcagtattgtattaataataggggtggaaacagaggttttatcaatcaaatactaattgaggaatttacaaaaaaagtgtctatttctaagaatcataagatactttcaaaactcccaattgatacctactggactactaattatgataagctaattgaaaaagtccttgaagaaaatggaaagacagttgatgttaaaatcactcaaactaatttagcaaccaataaaccaaagcgtgatgctattatatacaagatgcacggagatgttgatcaaattgcagatgctgttatctgtaaggatgattatgaaacatataacctgcgaaggcaattatttactacggcacttcaaggcgacttagtgtcaaagacttttttgtttataggtattagctttgatgaccctaatattgattatatactgagtagaataaaaacattattgggacataacaaaagagaacattattgtattttcagaaaagtgaacgaaaacgataacgtttatgcaaaagatagagacaagttcatttacgatcagaccaaacaagatttaagaataaaggatttacagagatactcaataaatgtagttttagttgatgactacactgaaataaccggtattttagagcaagttgagaaactatacaggaaaaagatagtctttatctctggaagtgcgaatagctatggttattgggaaacagaaaaagctctaaaattcgtaaaagatttgagtcataaattagtctcagatggaaacaaacttgtttcaggttacggattaggtattggttctacggttatcaccggcgcattagaatatattttttccaccagatatagacatttagacgaacatattatgttgtatcctttcccccaaatatcaactacaacatcacctaaacaactggaagaactatttagcaagtataggcatgagatgatttcaaatgcaggtgtggctatttttatttttggtaataagattaaaggcggtatagaagttatagctgatggtgtgttaaaagagtttgatattgctttcgagcatggactaaatgtgatacctatcggagcaacgggttttgctgccgaggagttatggaacaaagttaacggtgactttgttaaatactatggtgataatgataaaataaaacctctgtttcaaaaactcggtgataagggtgctaccagtgaagagttaatcgacagtgtaataaaaatgttacatattctgcaacaatcaaacgttaaaggagtataa

SEQ ID NO: 22254 - DNA, 489 bp, Candidatus Magnetobacterium bavaricum
atgagatacgtattttttagttttgattacgacagagatatttggagggtaagcgttgttcgtaatcattgggtaacgaaaggaaattctgaaattgctggttatgtggataaggcagagtgggaggcagtaaagaaaaatacctccgatgtaataaaaaaatggattgacaaacaactggaagatacctccgttactgttgtattaattggtgctaagacttcttacagccagtatgtacaatacgagatagagaaaagtatggaaagaggaaatggattccttggaatctacattaacaacataaagaattcagacggagaaacagatagcaaaggtagtaatcctcttgataacttcaaagagaatagaggaggaaagcaaactcttctttcaaaaatctacccgccatatgattgggtaaacgataatggatatgacaatttccccaaatgggttgaagccgcagctaaaaaagtggggcgataa

SEQ ID NO: 22255 - DNA, 1428 bp, Clostridiaceae bacterium BRH_c20a
ttggccgtcagtttaacggagttcaagagagaatacacaaaagctgtgtctgaaggatatgcggctatatttgccggtgcagggttgtccagaagttcaggttatgcaaattggaaggagctattaaggactattgctaaagacatcgggttagatattgataaggaaacagatttggtcgcagtagcccaatattataaaaatgaaaaaggctcaaggcgtgatggaataaatcagaaaataattaacgagttcactaaaaatgctcagcaaaacgtaaacattgaaattctaacacgcttaccgatatcggtatattggacaactaattatgatgaattgattgaagataacctgaagctaaataatcgaaaacctgacattaaaacaaatcaagatagtttagcaaacaacttttatgatcgggatgctgttgtatataagatgcatggtgatgtaagaaatccttcagaagcggttataacaaaggatgattatgaaacctataatcaaaaaagggcattatttaccactgctcttcaaggggatttaatatcaaaaacttttctattcatcggatttagttttgaagaccctaacctggaatacatcttgagcaggattaaagtccttcttggagaaaacacacggactcattattgttttctaaagaaaatagttatcgatgattatgagaatgatgatgaattcaaatatgcaatgataagacaagatttaaaagtaaaggatttgagcaggtatgggatcgaagcagttttattagatgattactgccaaataaccgatattttgatggaaatagagaataattgcaggttaagtaatgtttttatatcaggtagtgctgcagtatatggggataattggagtgaaaaagcagccataagttttatgcacaatctttcaaaacggttagtgggagaaaactatcgcgtaatttctgggtttgggcttggtgtaggaagcgtagtaatcaatggtgctttggaagaaattatgttaagcaagtataaacatgttgatgaacatttgtgcttaagaccctttccgcagattcaatcaggtactaagtctttaaaggaactatgggaagagtatagacaggaaatgatagaacattctggaatagctgttttcatttttggtaacaaagaaacccaagatggcgttgttttagccaatggtatgattagagagtttgaaatagctaaagagaaacagaagtatataattcctattggttcaactggatatgctgccaaacaaatacttgatgaggttgaagcagctataggggattatccttatttgctaaactacttggaagttttaaaaactgaaactgacgagaataaattgatttcggctgtattagacattatctctgatatacggggggatttataa

SEQ ID NO: 22256 - DNA, 483 bp, Clostridiaceae bacterium BRH_c20a
atggcaagaaaagtgttttttagttttcattttgaaagagattcttggagagctggacaggtaagaaatagcggggttacaaaagaaaactctggattcattgatgcagccgcttgggaagaagttaagaaaaagggtgataaagcaattaaggattggattgatgaccaattaaaagggacgtctgttacggtaatcctcattggcaaagaaacggctgacagaaaatatgtaaagtatgaaattcaaaaaagtgaagagaagggcaatggatttgttgggatatatattcatgatttggaaaacaaggataaagaaaaagaagcaaaagggacgaatcctttgacgatgttttactatgaaaaggatggcaagaaaatctatttgtcggatatttataaatcttattattggaagaaagatgacggttacaagaattttgggaaatgggtagaaaatgctgcaaaactggctggaagataa

SEQ ID NO: 22257 - DNA, 687 bp, Clostridiaceae bacterium BRH_c20a
atgggtcgtaaaatttttatatcatataaatattctgataataacgtctataatataaccggaagcatatggggaagcactgtaagaaattatgtagataaaatcgaagaaatcatagatgattcagaccatatctataaggctgaatctgagggagaagatttatcatatttaagtgaagagcaaatctgggagaagttaaaggataggatttatgatagcactttaaccatcgttcttatttctccaaatatgaaagaatggtttaaagaagagaaggatcaatggattccaagagaagtgtcatattcgcttaaagcaatttcacgtaaaaataaaaacggtgatgcagttacgagttcagaaaatgctatcttagctgtagtagtacctgatcgcaataattcatattcttattacttaaattataagagctgttgttcaggtggctgcagaatgctacaaaatagcacaatatttaaaatattagctaataacatgttcaacattaagaaccccgataagaaagagtgcgatgatagctctgtaatctattacggggatagtagctatatttctgtcgttaaatgggatgactttattagtaaaatggattcttacattaataaagcttatgaaattaaggagaatattgacaattacaacatctgtaaagagattagttga

SEQ ID NO: 22258 - DNA, 1437 bp, Escherichia coli; identical to SEQ ID NO: 18665

SEQ ID NO: 22259 - DNA, 612 bp, Escherichia coli; identical to SEQ ID NO: 18666

SEQ ID NO: 22260 - DNA, 1446 bp, Vibrio parahaemolyticus; identical to SEQ ID NO: 18719

SEQ ID NO: 22261 - DNA, 603 bp, Vibrio parahaemolyticus; identical to SEQ ID NO: 20412

SEQ ID NO: 22262 - DNA, 576 bp, Vibrio parahaemolyticus; identical to SEQ ID NO: 18721

SEQ ID NO: 22263 - DNA, 1440 bp, Lactobacillus plantarum; identical to SEQ ID NO: 18882

SEQ ID NO: 22264 - DNA, 630 bp, Lactobacillus plantarum
atggcacataaaacctttatttcttacaaatattcagaagcaagagatttacgtgataaaatcatttcgcatttaggtgaagatgctcaatattataaaggggaaacggcagattctcctgatttaactgacgaaaagacagattcgattcggaagtatttaaaagatatgatttatgacacaagtgtaatgatagttattatttctcctaatatgaaatatagtaattggatagattgggaaatagaatatgctcttaaaaatataaaacatggcgatcagacatctcatagtaacggtattttagggattatcatgaataatccaaatgaaaattggtttagatatgaagaaaaaaaacctgacggagacaattgttatgcatataatacggattacgtttatgaaattataaacgataaccggtttaatcagaatccaaaagagtatagttgtgaagtttgcaagacagtagactcattaacagggtcatatatatcttttattacagaagatgatttcttttctgaccctaataaatatatagataatgcatttgataaaagtcagaaaattgataattacgatattaaaaagtatgtgaatgaagaccacatagcaacactatag

SEQ ID NO: 22265 - DNA, 1437 bp, Enterococcus faecium MRSN 3418; identical to SEQ ID NO: 18577

SEQ ID NO: 22266 - DNA, 486 bp, Enterococcus faecium MRSN 3418; identical to SEQ ID NO: 18578

SEQ ID NO: 22267 - DNA, 852 bp, Enterococcus faecium MRSN 3418; identical to SEQ ID NO: 18579

SEQ ID NO: 22268 - DNA, 1443 bp, Candidatus Uhrbacteria bacterium GW2011_GWF2_41_16
atggaacaacatttaatccgctttgttgatacatacacaaaggcaataaaagaaaataatgctgctatttttgcaggtgcagggctttccattccagcagggtttgtgaattggaaagatttattgagagacattgcagccgacctaaatcttgatattgacaaagaaaatgacctcatagcagttgctcaatatcacttcaacgaaaagggaaacaaccgacacaaactaaatcaactactaattgatgagtttacacaaggaacatcagtaacacaaaaccataaaatattagccgcacttccaatacaaacttattggacaaccaactatgataagctaattgaaaaagctattgaagaagaaggcaaaacaccagatataaaaatcacaccagaaaatttatcgaataacatccacaaaagagatgcagttgtttataaaatgcacggagatgtttccctcccagataaagccatcttgaccaaggatgattatgaaggatacaatgagaacagacttctttacactactgcattgcaaggtgacttagttgcaaaaacatttctgtttataggtttcagttttgacgacccgaaccttgaatacattcttagccgaataagaattttacttggacaaaaccaaagaaaccattattgttttttcaaaaagataaatcgtaaagactttaagaaaaaggcggattttaaatatgccgaagttcagcacaaacttaaaataaatgacctaaagcgatattcaattaatgcacttttaattgatgactacgccgatattacagaagtgctttcagcaatcaagaaaaaggttttacgttcaaacatttttatttcaggcgccgctaagatttatgacccaagaacagaaaaagacgcattgtcgtttgttcacaaactcagttatagaatatcatccgaaggatataaaattgtttcaggtgtcggttatggaattggtagtgcagtgattaatggtgcaacggaatatgttttttctaccaaatacagacaccttgataacgcacttgtattaagaccttttccacagatagtaacaggacgaagaaaaaaagaagaaagaaatttagagtatagaaacgaaatgatgagacatgcgggcattgcgctcttcatttttggaaataatgacaatgggaaaggaggttgggagcactcaaagggaatggttgaagaatttaaagtagcagtacaacaaggtgctataccgatacctgttggagcgacgggatatgcttcggaaaaactttggaataaagtaatggcttcacctacagattattatccgaataattcagacttacttgattccataaaacagattggcgataaatcattacctgatgatgagttgataaatcaaattcttaaagctataagcattttacaaaatcatttttaa

SEQ ID NO: 22269 - DNA, 507 bp, Candidatus Uhrbacteria bacterium GW2011_GWF2_41_16
atgggaactaaaagacaaattttttacagctttcattatgataacgatgttttccgtgttcaacaaatcagaaatattggtgcattggaagacaacaaacctgtctcagctaatgactgggaaactgtaaaaaaaggtggcgataaagccattgaaaaatggattgacgacaccatgaaaggtcggagttgtctagttgttttagtaggaagcgatacttcaaagcgtaaatgggtggattatgaaattagaaaagcatgggatgatggcaaaggcgttttaggcatttacatagacgatttagtggatccacgctattcaaaaacacctcctttctttggcaaaagtttaagaggaactaaccccttcaataatatctctctaaaaagtggtaaagtactatctagtatagttaagtgttatgctcctcctcccatagatacatataaaaatattgccgcaaatcttgaaacttggattgaagaagccattaaaatgagacaatag

SEQ ID NO: 22270 - DNA, 1182 bp, Candidatus Uhrbacteria bacterium GW2011_GWF2_41_16
atgggtggaacaaaaagacaatttgttaatatgtatgtgaaatttacacagagatttaaaaaaccatttgatagtatagctaagttaatgcctataaatttcagtgataatgaatttctaaaatgcttcaaaacattatatgaatacttctggattgatattgaaagggaatactcctactgggaaaagaaaaatgatgatctaatacattatggtaagaaaagcagatatgattttccaaagccagaagaatttgttcttaaaaattctgtccatgttcgtactaaatatcgcaataaccataaaacaggagtaatactgcctaaagaagagcaggagatgttgtatattcgattatctaatcataatcaaatcaaacttaattcaaaaaaaaataaagaatttgaaaaattagaactagtgcaagaaattgaacctaaatttgttcaagaatatataaacaagtatttctgtttaaggaatatttctcaagacattattgatgaaaaatttaaaattattagggaaattgcgaaatataaagccgataaaactgttaaatttcttcaaaaagtcaatgcaaaagaaactaattatagtttaaaacaggaagctttcaagtctctacaacaattgaatgaaaaagtaattctcagaaggaaaaaaatgggtaaaaaaaaggaatcagttgaagcaatttataatactactgattcgcctgacaatttaattgaaaagttaaatgataatacacttgaaaaaattaagagttttgatgtttttttatcacatagttcaagcgatagaaaaaaagttattcttttatataagaatttaaatagtaaaaagttacatgtatatattgattgggtgaacgatagtgatgctctcaaaagaaatctttcaaatagaaatactgcaaatgttattattgaaaggttgaagaaatcaaaaatgttaatttattgccatacggaagctagtatgaaatcgcaatgggcatcttgggaaattggttatttccatggaatagggcgacaaatttttgttttcaaccctgataattttgagttacctgatttcttaaaagtctatccgaaactaattgaaaaagattcagaatattacattgaaaataaaagcgagaaaataacgcttaataattggatatttaataaataa

SEQ ID NO: 22271 - DNA, 1455 bp, Serratia marcescens
atgtttaaccgtgatatagaactgtttattcgtgattacgttaatgatattaaagctggcagcgccgcactgttcgccggcgccgggctgtctatccccgccggtttcgttagctggaaagagcttatcggcgatatcgcttatgaactggggctggatatcgaaaaagagagcgatcttatttccctggcgcagtatcacctcaatgaaaaaggcaacagacataagataaatcaaaaaataattacagaattcgctgggcaagcagaagaaacagaaaaccaccgaattatcgccagattaccgatagcgtcactttggaccactaactacgacgacctgattgaaaaaacctatgcccgttataatcgcgtatgcgacgttaaaaccacaccagaaagcctgaccaataacattcacaaacgtgatgttgttttatataaaatgcatggtgactatagaaatcccaaccaggcgattatcacccgcgaacaatacgagacttactcccgcacacaccttccctttatcaacatgctgatggcggaactgaccgctaaaacgtttctgtttatcggtttcagcttcgaagatcccaatctgcagtatgtgttgagccgcctctatgcacagtatgccgaagggaaaagaaatcactattgcattatgcggcgcgttcagctcggcgacagcggcagtgaagatcaggcatcctgtgactacaacagccgtaaacaaagcttgatgatcaacgatctgcgccgttacggcattcaaacgctgctggtggatgactatcggcaaatcaccgacctgctgtatgccatcgaaacgcagtttaagaaaagcacggtgtttatctccggcagcgccgacaactaccatccttatgcccgtgaagaatccatccagttcatacatcgtctggcgcgcctgcttatccgcaaacagtaccgcatcgtcaacggcttcggctggggcgtaggcacggcggtgatcaacggcgccttggaagccatttacgacagccagggaaaaatcagcgaaagccagctggtgctgcgtcctttcccccaattcgccagcggcggcattaccctaccggcactttggcacgaataccgtcagaacatgatttcgctcagcggcatcgcaatctttttgttcggcaacaaacgcaacgccgaaggcgaatacgtgctggccaacggtttattgaaagagttccagatcgccacggaacaaggctgcgtctgcatacctatcggttgtaccggcagcgcatccgccgagatctaccgaaaaatcaaggaggaaatgaaagaaaccctctaccaccgccaccccaccgccatgaatctgctggatcagcttaacgaaccgggcagcctggcggagaagaaaaaatgcctgttggcacttatcgatatcattactaaggataacccccgatga

SEQ ID NO: 22272 - DNA, 492 bp, Serratia marcescens
atgaccagaaaatgtttttacagtttccattatgagccggacaactggcgcgcttctcagatacgtgaaatgggcacgctggaaggtaaccggccggccacggataatgattgggaggaggtgaaaaaaggcggcgataaagccattgccgattggatcaaaagccagttggacaatcgcagctgcgccgtgattctcgccggtaaagataccgctaatcgcaaatggattaatttcgaaatatgcgaggcctggaaaaaaggcatgggcgtgctggtggtgtatatccataacctgaaagacagcgccggcgaccaaaccgagaaaggtaaaaacccgttggatcacatcaagctgggtgacacaaaactctccgctatcgccaaagcctatgatccgccttacctgaccagcaccaatgtctataaccacatcaaagaaaatctggctgagtgggtagaagaagcgatccgcatccgcgcaaattactga

SEQ ID NO: 22273 - DNA, 1761 bp, Bacillus cereus
atggataaccaattaatgtcattatccttttcaatggaagcaaataaaggtgtgtatgctttgttactgggttctggaatatcatattcagctgacattcctactggatgggggatacttaaagaattgtgtagacgaataatggagttaaataaggagacacatgaagatccgattcaatggtatcaaaattactatagtcaaactccagcatacgatgaagtaattgaaatgttagcaaaaacttcaacagaaagagtgggcttattagccgaattctttgaaccacaagaaggcgatgaagcttatgtgaaaaggccaacaaaagcacataaagaaattgcaaagctagtgaaggaagggtttatcaaagtaatagtaactacaaattttgatcgattgatggagcaagctttagatgaattagatattcaataccaaaccctatatcacgaatctgatatagatgggatgaaacctttgacgcatgctaattgtacggtattaaaaattcatggtgactatagagacacgagatttaaaaatgtcagtaatgaattgaaggagtatcccccagtcttatcaaatttgttaaaacaaatatttgatgaatatggaattattacgtctggttggtctgcagaatgggatactgcattaagggatactataaaatcagtaaaagggcgccgttattcttggtattggcatgcctataatgaaacactatgtgagcaagcagaatcattattaaaatggagagatggaattaagatagtaaatggaaatggggctgatagcttttttagtttactttctgaaaatgtagaaagcatctctaaattaaagaaatctagtccggaaaacgtacagatgaaaattaataaattaaagaaatttattacaaatgatttagaaattgaattatatgagatgatgacagaagaaacacaaatgttagttcaattcattaaatcattagatttcaatgtatccgcaacttccgagactaagggagaatatatcgaaaaaatcaaagagaaatcacgaacgttagctataatgttaacaatactaacctattattcgagaaataaaaagcatgaatcaattattactgaaactttagaaagattaacgactgcaatggcaagagaaggtgtaactacatttatttgtttctcaaaattgccagcaataatagggctttatagtgctgggattgctgcggtcatgaaaaaaaactataaactattaaataaattatttatggaaataagggtaagaacaaacttatatcgcccagaaactttcttagaattcaccgcatcaagtggtgatatatatattgcttttagagacttatattcagagaaaagatggcatctgccattcgaaaaaatgtttatgcaaccttatatgtctgatatctatgctaatagtaaacttacatttgatgaacaagaactaaataaccactatgatacttttgaattgctacttgctttaaaacatcgtcatttaaacacacatagatttttcagtggtatttttggttataaagatgacaagttatatatttcacatttcttaagattgggagctgaagagaaagagaattggcaggtactagaattatttgataatagtatagaaaattttaaaaagtcgttagaaatattaactggagacttaaacagagaaatgtattttgatggatatccattattaagttcttatcaaactgctatggaatcataa

SEQ ID NO: 22274 - DNA, 978 bp, Bacillus cereus
atgcatagtagtcctgaaaaagtttttgttagttatagttgggattcggaagaacacaaacaatggatattagagttagtgagaaaacttcgttcggaaggttatgatgcaaattttgatcgtggtattacctctacttcaacagtcaatttgaatcaaatgatggtagaacatatgcgagatgatgattacattataatggtattaactgaaaaatatacagttaaggctgatggatttgtaggaggagtggggtttgaaacacttctttcattacctataattcaacaaaatcttgataaattaattattttaactcgacaacctgctgttcttcaaaaagttattccattccatttgcaaggaataaattatatcgatttttcaaatccagctgaatttgatactaagtttgaagaattggtttatcgattacaaaaagttccgatgttcgatttaggtcctattggtgaaaaaaaactaagaaagcctaaagtacatggtaattctgctgcaactgttttaaatgatgtgaaggttcctagattaagtccaccaacagatttagaaagaaattcttttatcgaagaaaactttaatcttattattaatggcttagatgaaatattaaatattttacaaagtcaaaatccaaactttatttatcaaaagcaaaatataacaagtgataaggttatgtattcattttatttgaatggtcaaagttccggtaacttaaaaatatggttaggaaacttatttagttcagccaaacaaatccagttttcagttggccggtacgtggatataagtaatgataatagtatgaatggctccataaatgtagagatagatcaggagtacaacctttctttatcaatgcctatgaacgtgttttctcctaacactaaaaatatgggatatgctgaggttgtaaaggcactatacgaacaaaatatactgccatatttaagataa

SEQ ID NO: 22275 - DNA, 1434 bp, Bacillus cereus; identical to SEQ ID NO: 18659

SEQ ID NO: 22276 - DNA, 681 bp, Bacillus cereus; identical to SEQ ID NO: 18660

SEQ ID NO: 22277 - DNA, 1446 bp, Enterobacter cloacae
atgagtgttcagttttcagctgaagtcgaagctttcataagaacttatgtgaaggatctcgaagaaggggccgccgccgtttttgccggtgcaggcctatctaggactagcggcttcgttaattggagcgaactgctacgtgaaattgcagaagaactgggtctttctgttgagctagagcacgacttaatttcggttgcgcaataccacgtcaacaagaagaacagctcaaccggtttagccaggaaaatcttggaggaattttcggagcaggcggaaccttccgaagctcataaaattctcgcacggcttcccattagaacatattggacaaccaactatgacactttgattgaggatagtcttaaagagaactaccgcgtcgcagatatcaagcgcaagacagatgaccttattaccactcgtcctaaacgggacgctgtcgtttacaaaatgcatggtgacgtggattcgccaggcgcagccatactctacaaagcgcagtatgagcagtactacaagacccacgaaggttttgtaaccgcactgagtggagacctaatttccaaaacattcttatttattggcttcagtttcactgatcccaatcttgattacatactgagccgcttgcatgtgccggagaagcatcgacgtacacactactgcttccttcgcaaggaaccctctgtgccgcaaggaaatgaagacgaagccagcgcaatgtatagacagcgtcgtcaagagcatcatattcgcgatttgctccgctttggtatacaggcagtactagttaacgagtacgaggacattccggttatattgaaagagatcgagagccgcttcctcaagaagaccatatttatctccggaagcgcagaagagtatggaacttgggacaagcaggaagcgctgaactttgtacattctctctcggcatccttggtgaaggctggttatcgagttgtcaatggatttggatggggtattggcagtgcagtcatcaacggagctctcgatgccatctattccaagcctgacaagtactccgaagatcaacttatcatgcggccattcccgcagcatccatcaaacggtaaagcgctgagcgagctgtgggatgagtatcgacaccgtatgatcggtctttctggagtcgctatatttcttttcgggaataagctccatgatggtcaaattgtcaatgccggtggggtgcgaaaggagtttcaaattgctcagaatactggggttgccgtgcttccgcttggcatcactgggtatatggccaaggaactggcagacgagatgttggcagatccaagtaaacattttgtccagtacccttggttggaaactgaagtggctcagcttgcggatctctctgctgaccgggcaaagatcgaaaagaaggttctaacaattttaaagaaactaggaggttag

SEQ ID NO: 22278 - DNA, 468 bp, Enterobacter cloacae
atgaaacgtaaggtcttttacagctttcactttgataacgatgttatgcgggtacagcagattcgcaacatgggggtactggagggtgacgaaccagccagccctaatacttgggaacaaattaagcgaaccgagcagggagtgaagaattggattaaccagagtctaaatggcaaatcctgcctagtagtactgatcgggagtcaaacagcgaatcgtccatggatcaagtacgagatccaaagagcctggcaagagggtaaggccgtggtaggcattcatatccatcgactgaaatgtcctcgtaacggctacgggacaaagggggcgaatcctttcgaccaattcaccttcaagcgaggcgaccaagtcattaagccgctcgtatatgaacctagctttaacgacgcttataacgatatcaagaacaacttggcgacttggatagaaaacgccatcaaacaataa

SEQ ID NO: 22279 - DNA, 1455 bp, Serratia sp. TEL
atgtttaaccgtaatatagaactgtttattcgggattacgttaatgatatcaaagccggcagcgctgcgctgtttgccggcgccggactgtccatccccgccggtttcgtcagctggaaagagcttatcggcgatatcgcttatgaactggagctggatatcgaaaaagagagcgatcttatttctctggcgcaatatcacctcaatgaaaaaggcaacagacataagataaatcaaaaaataattacagagttcgctgaacaagcagaagaaacagaaaaccaccgaattatcgccagattaccgatagcgtcactttggaccactaactacgacgacctgattgaaaaaacctatgcccgttataatcgcgtctgcgacgttaaaactacaccggaaagcctgaccaacaacattcacaaacgtgatgttgtcttatataaaatgcatggtgactatagaaatcccaaccaggcgattatcactcgcgaacaatacgaaacttactcccgtacacatcttccttttatcaacatgctgatggcggagctgactgccaaaaccttcctgtttatcggtttcagctttgaagaccccaacctgcaatatgtattgagccgcctttacgcgcagtacggcgaagggcagagaaaccactactgcatcatgcggcgcgtccagctcggcgacaacggcagcgaggatcaggcgtcttgcgattacaacagccgcaaacaaggcttgatgattaacgatctgcgccgttacggcattcaaacgctgttggtggatgactatcggcaaatcaccgacctgctgtatgccatcgaaacgcagttcaagaaaagcacggtgtttatctccggcagcgccgacaactaccagccctatgcccgtgaagagtccatccagttcatacatcgtctggcgcgcctgcttatccgcaaacagtatcgcatcgtcaacggtttcggctggggcgtaggcacggcggtgatcaacggcgccttggaagccatttacgacagccagggaaaaatcagcgaaagccagctggtgctgcgtcctttcccccaattcgccagcggcggcattaccctaccggcactttggcacgaataccgtcagaacatgatttcgctcagcggcatcgcaatctttttgttcggcaacaaacgcaacgccgaaggcgaatacgtgcaggccgacggtttattgaaagagttccagatcgccacggaacaaggctgcgtctgcattcctatcggttgtaccggcagcgcatccgccgagatctaccgaaaaatcaaggaggaaatgaaagaaaccctctaccaccgcaaccccgccgccatgaatctgctggatcagcttaacgaaccgggcagcctggcggagaagaaaaaaagcctgttggcgcttatcgatatcattactaaggataacccccgatga

SEQ ID NO: 22280 - DNA, 492 bp, Serratia sp. TEL
atgaccagaaaatgtttttacagtttccattatgagccggacaactggcgcgcttctcaggtacgcgaaatgggctcgctggaaggtaaccggccagccacggataacgattgggaggaagtgaaaaaaggtggtgacgccgccatcgccgcttggatcaagggccagttggacaatcgcagctgcgccgtgattctcgccggtaaagataccgctgatcgcaaatggattaatttcgagatctgcgaggcttggaaaaaaggcatgggcgtgctggtggtgtatatacacaatttgaaagacagcgccggcgaccaaaccacgaaaggtaaaaaccctttggattacatcaagctgggtgacgcaaagctttccacaatcgccaaagcctatgatccgccttacctgaccagcaccaatgtctataaccacatcaaagaaaatctggctgagtgggtagaagaagcgatccgcattcgcaaaaactactga

SEQ ID NO: 22281 - DNA, 1446 bp, Bacillus cereus
atgtctcgagaaatagatgaatttttaagaacttatacaaaagcaattgaagaatcgacagctgcggtctttgctggtgcggggctttcaaaaacagcagggtttgtaaattggaaagagttattaagagatattgcggatgaaataggtctcgatgtggataaagaaacggatttaattggagtagctcagtatcatgttaacgaaaatggtggcaatagaggaagaataaatcaggttttaatagaggaatttacaaaagatacttatgtgacagagaatcataaaatactagctaaattgccaattcgaacattttggacaacaaattatgatcaattgatagaagattcattaaagagtgaacataagagaagtgatgctaaaattactccggaaaattttgctacaacaatgccaaattgcgatgctgttatatataaaatgcatggtgacattacacaagcgcacaaggcggttctaactaaggatgattatgaaaattataatttaacaaggcaaatattcacaactgctcttcagggagatttggtttcaaaaacctttttgtttattggattcagttttgatgatcctaaccttgaatatattttaagtagaattagaattttattagggaataatcaacgcccgcattattgttttatgaaaaaggttcgacgaagtgagtatgaagaagaatctgattttgtatatgcagaaattagacaggaacttaaaattaaggatttaaaacgctttaacataaaagtgctactagtagaagaatatagtgagattactaatgtactgaaaatgttggaagttaagtcgaaacagaagaatatttttatttcaggcagtgcttctaattatggagattggggagaaaagcgttcctttgaatttgctagttctttaagtaaacaacttattcaaaatggtaataatattgttacgggttttggattaggagtgggcagttgtgtattatcgggagctttagaagaaatatacaaagtaagaactaaaagagtagaagaaagattgatatcaaggccattccctcaagctattgctgatgatgagattgatttaagaaaattatggactatccatcgtaataatattatagataatattggtatttcaatatttatatttggtaataagatagaccaatcaaatggtgatgttcttgatgcggatgggatgatagaagaatttaacataagtatggataaaggttcaatcccaattcctattggagttactggatttacttcaaaaaaactgtgggaaacagtaatgggggactttaacaaatatatccctgatcaaaagttagagaagtattaccatattatcggtgatcaaaaatgtaaagatgaagagattatccaaaatgtaattcacataataaatcatttaaaaagaagaaaataa

SEQ ID NO: 22282 - DNA, 609 bp, Bacillus cereus
atggcacgtaagacgtttatttcgtataaatatagtgaagctcgagatctaagagatgatattcttgatgcattagggaaggatgcgcagtactataaaggggaaactagtgattctccagatttaactgatacaacaacagaaaatattaagaagaatctacgtgatatgatatatgaaacttctgtatcaattgtaattatttctcctagtatgattgatagtgaatggattgattgggagattgaatattcattgaaagaaattacgcgagcagatagaaaatctaggactaatggtattgttggagttattatgaagcacaatggtgattatggatggattgaaactattcaaaacaatgcggatggttgtacttcaagggtcattagtaatagcaaactctacaatattatatcgaataacagatttaatttaaaaaatccagagtatacatgtgatagttgtaaaactattaattcattaacagggtcgtatatatccataataaatgaagaagattttttagcaaatccaagtgagtatattgaaaatgcatttgagaaaagtcagggaattgacaagtttaatatcacaaaatctcgataa

SEQ ID NO: 22283 - DNA, 1446 bp, Chromobacterium sp. LK11
atgagcgcaaagttttcgcgagaaatagaagctttcattagagtgtatgtaaaggatcttgaagaaggtactgctgctatatttgctggtgcaggcctctccaaaagctgcggcttcgttaattggagcgaactgttaagtgaaattgcagaagaactcgggttgtcggttaaattagagcatgacctgatttctgttgcgcagtaccatgtcaatcagaagaatagtgcaaccggtctggcacgaaaaatccttgaggaattctcagagcaggcggaaccttctgcagctcaccagatcctcgcacggcttccaataggaacatattggacgacaaactatgacactataatcgaagatagtctcaaagataactatcgcgtcgcagatgtcaagcgtaagactgatgaccttattactactcgtcctaaacgagacgctgttgtttacaaaatgcacggcgacgtaggttcatcaactgctgccgttctctacaaagctcagtatgagcaatactacaagacccatgaggcctttgtaacgacgctgagcggggatctgatttccaagacattcctcttcattggcttcagcttcactgatcccaacctcgactacgtactgagccggttgcatgtaccagccgcccatcgacgaacccactactgcatccttcgtaaggagccttccatacagcaagagggtgaggacgccgactttgcgatgtacaggcaacgtcgacaagaacaccatacacgagacttactccggtttggtatccaggcagtgctagtcgacgaatatgaagatattccagtcatcctgagagaaatcgagaaccgttttctcaaaaaaactatcttcatctcaggtagtgcagaagagtatggtacttgggataagcaggaagcattgaactttgtacactctctctccgcttccttagtgaaagcgggttaccgcatcgtgaacggattcggatggggtattggcagtgctgtcataaacggtgctctcgatgctatctatagcaagcctgacaagtactccgaggatcagctcataatgcggccgtttccgcagttgccatcaagtggtaaggacctgccagcattgtgggatgaatatcggcaccgcatgattggtctttccggtattgccctgttcctcttcggcaacaagttcgatggtggcagcataaaaaatgctgatggcatgagagaagagtttcaaatcgcccaggaaactgaggttgccgtgctcccgctgggcattactggctacatggcgaaggagttggcagacgaaatgctggcggatccagacaagcactttgcccagtatccctggctccaacaagaagtggcccagcttgcggatcccgcagcagaccgagccaagatcgagacgcaggttctgtccatcatcaagaaacttggaggctag

SEQ ID NO: 22284 - DNA, 468 bp, Chromobacterium sp. LK11
atgaagcgtaaggtcttttacagctttcacttcgataacgatgtgatgcgggtgcatcaaattcgcaacatgggaattctggatggtgacgagcccgccaaccccaacacctgggaacagatcaagcgctccgaacaaggcgtgaagaactggatcgacaagaatctgcacgggaaatcctgcctcgtggtactgatcggtagccaaacggccaaccgtccgtgggtcaaatatgagatccaacgagcgtgggagctaggcaaggcggtggtgggtgttcacatccatagactgaattgtcctcagaacggattcggaacgaaaggtgccaatcctttcgaccaattcaccttccagcgcaacaatcaaattatcaagccgctcatttatgagcctagctacagcaacgcctatggcgatatcaaggataacttggcgatctggatcgaaaacgccatcaaacactaa

SEQ ID NO: 22285 - DNA, 468 bp, Chromobacterium sp. LK11
gtggcagagaaaagaaatgtgtttataagtcatgttcacaaggacgatcatgggctccagaaactcaaggatttgctgaaccctaagggaatggagattcgtgatgcctccatccataagggaaagttcaacaaagcgactgatgaacactacataaaaacacagatactagcacctgctatcaattgggctggcgtgttcatatgctatgtctccccgcaaaccaagaacagcgattgggttaactgggaaatcgagtatgccgccaaacagggcaagcgcattgttggtgtctgggagcatggagagaagggatgcgaccttccagaggcactaaaagagtatgccgatgccttggttggttggaacggtgatgcaatcattgaggcgatcaacgggaaggactcgtgggaaaatcctgatggcagcgcctgctccccggttccacttaagcggcacccctgctga

SEQ ID NO: 22286 - DNA, 573 bp, Chromobacterium sp. LK11
atggcattcttcaccaaaagcgaggcacgtgctgctgcaactagcgctcgtggatatcgtaccgctaaagctgttttgaccgcgacaatggagagttacaaagagcacgaaaaatttgatatcttcctatcccactccagcgtcgattccgatcttgttttgggtgtgatgatcctgctacagaagcagaacctaaatgtctacgtagactgggttgtcgacaggcaactgaaccgtaattccgtggacaaagctacggccgctactctgaggcagcgcatgaagcactcccattctatgatatatatcgcgactgatagtgcatcgaactcgaaatggatgccatgggagctaggcttcttcgatggtcacaagcctggacaggtagccattctcccattgcaggataccgaaaaccaaagcttccaaggacaagagtacctgggtctttatccagtcgttaccaagcacctgcagaacaacaccatgaaccattacatcgaagatcgaggcaacaagtggagcactctctcgaattttgcccgcggggtgccatcgtggaaaggctattga

SEQ ID NO: 22287 - DNA, 1434 bp, Enterobacter asburiae; identical to SEQ ID NO: 18989

SEQ ID NO: 22288 - DNA, 441 bp, Enterobacter asburiae; identical to SEQ ID NO: 18990

SEQ ID NO: 22289 - DNA, 486 bp, Enterobacter asburiae; identical to SEQ ID NO: 22242

SEQ ID NO: 22290 - DNA, 1440 bp, Haemophilus sp. C1
atggaattcaccaagaaacagaaaaaatttatcactgattttgttgtagagattaaaaatggtgatgctgcaatttttgctggggcaggcttatcagctccagcaggctttgttaattggaaaggtttgctgaaagatcttgcagaagaactaggtcttgatattgaaaaagaacatgatctaattggagtagctcaatatcatttcaatcggcataaaagaggaaaaataaacaataagataatcaatgagtttactacattaagacaaggcggagataaccataagttactttctaaaattggtattagtacattttggacaactaactatgagcaattaattgaaaaaactttagaggctgatggaaaaacagtagagaaaaaaatcagaaatgaagatttttcaagaaatatcaaaaagaaagatgccattgtttataaaatgcatggtgataaagatttacctgatgaagcagtattaattaaagatgattatgaaacctatcaggacaagaaagaattatttgctaccgcattaagaggagatttgctttcaaaaacatttttgttcataggcttcagttttgatgatccaaatttggaatatattttgggcagaattaaagtcttattaaaagataatacgccaactcattattgttttttcaaagaagtatcgagagatgattttcatgatgatgaaagctacatgtatgctaaagttaagcaagaactaaaaatagaagatctcaagaggtatggcattcattcaataatgattaaagaatattctgatattactgccattttaaaagaaattgaaagacgcttaaaacgtagcaatatctttatttctggtgctgctcatagttattctcctttttctgaagagcaagctaaagaacttatacataatcttagttataagctggcagagaaagaatataagattatttccggttatggtttaggtattggaagtatcgttattaatggagcgttagaatataaatatcagtcaaactatcgcaatttagacgatttattaattttaagaccatttccgcaaatacaatcaggagataaatctatttctgaaagatggactgactacagaaatgaaatcatttctcaagctggcatcgctatttttatgtttggaaacaaattgaataaaaatggagaaatcgttctttccaatggcatgaaagaagaatttgagatttgcttacaacataatgtgattccaatcccaattggctgtactggctcaatatctaaagagctttgggatgatgttgtaaaaaatcataccgaactatactttaatgatcagtcattgatagatgaaataagaacgctagaccaatctggtatttctaatgatgaaattatttctacggtgctttctattatcgataagttacaaaatatgtag

SEQ ID NO: 22291 - DNA, 618 bp, Haemophilus sp. C1
atgggacgtaaaatttttatttcatacaaatatagtgattcatctgtagaacgcttatcaccttatcaggaagcaacagctcgagattatgttgatattctacaagcaaaattagaagaagatggcatccatataaacaaaggagagaaagacaatgaaagtctagctcaatttaaagatgagactattcaaacaaaattatcagataagatttttgatagttcagtaacaatagtcttgctttcaccgaacatgaaggaatggtggaactctgaaagtgaacaatggattccttgggaaatcgcatactctattaaaaataataaaagatcattgtcttcaagtaagagaaatgcaattttgctggttgtattacctgatctatcaggctgttattcttatgttaataaagaaggtttttattttaatattattaaaagtaacagaaataaccttcaacactcttattcagccaaaaagctaaagaatggttgttcaaattcctatatgctcaagtgtaattgggataattttatttcaaatgtcaatggttggattaatgccgccgttgaaattaaagaaaatgctgataagtatgctatcaacactaaagtttag

SEQ ID NO: 22292 - DNA, 498 bp, Haemophilus sp. C1
atggcttattttaccaaacaggaagctcgcaactatgcaagaagtgttacagcatcatttgagagttattcaagtaaactggaaagtatcgttgaaagtcaaaaatatcaatatcgctttgatgtttttctatcacattctgttaaggatgctgagctagttcttggtgttgtacgtattttagaagatatggggcaaaaagtttacgtagattgggtagttgatccacaactttccagggattctgtaacaaaagaaactgctgaaacattgcgggataggatgaagcaatcttctaaattgctgtatttagctacggataatgcttcatcttctaaatggatgccttgggaattaggatactttgatggattgaagtctggaaacgtagctattttacctttggttgattctgtatacagctcattccaaggacaagaatatttagggctttatcctgccttaggtaaagatgatttgagaagatttttaggttaa

SEQ ID NO: 22293 - DNA, 1464 bp, Stenotrophomonas sp. DDT-1
atgaacagagtggcgttgagccgtttcctcagtgagtatcccgatgcattgaacgatggcgtgggagcgatcttcgttggtgccggcgtctcgatggcggccggctatccatcttggtcagagttactccgtgacatcgccttggaactggaggtggacacaaagaatgtccacgacttggcggcgctcgctcaatggagcatcttggagaatggtggctccactcgggtacgtacggtcatcaagaacgagatagggcctgacaaaccgattcccgagacggtccagatcatctcacgcctgccggtccgacatatctggacgaccaactacgatcgattagtcgagcgtgcgtttgcatccatcagccgaccgctcgacgccatctcaggcccaaaggatctggcactaagggcaacgcctggcgccgcgctgctctacaaaatgcatggatccgtgaatcggctcgacgatgtcgtcatatctaccgacgactatgagctgttccgctccaagcgtggccagtatctgccactcttccaagctcatctgaccagcatgtccatgctgttcattggcatcagcttcaccgatccaaacattcgccatgtcctatccctgatccgggaaagcttcaccgatgcgcctccagaacacttcgccatcgtgcgtgcgccccaaaggaccgacttcactagcgaaggcgagtttgctgcacgcaatgctcagcacaggctatggacgaaggatctgaagcgatatgggctgcttgcggtggaggtcagtgactacgctgagattcccgcactactgcgtcaaattgagagacgagtttctgcgcgcagaatctgggtgagtggcagttggccccttgagagagggggctctgagtccgctgccatccacgcgctggccgaggacatcggccggcgaatcggtgaatccgggaggcatctggtaagcggagccggtctattggtcgggtcagcgtcattgtcgggattcttggcggcactgcgcttgagtggcgggtgggaccttgaaagacggctgatcgcgagaccttttcctcagccattgacgggcacccagcccaaccaagaagagtgggacgcgctgcggatagaactcgcaagacaatcaggcatcgccattttcataggcggcgccaagatggttgacggcgcgctggaagttgctcagggagtagaacgtgaatctgaagtcgctatgcatgcaggcgtattcctacttcccgtgggagccacaggtggcgccgctcagaaaatcagcagtcaactgcttggatcagagctcgcctcatctggtcaggatgctcagagacctacagatgaagagctagtagcgctctcttctccggcactacttgatagtcaagaaggacgtcgcgatctagtctccatgctgttcaagatcattgaccggatagcgctcgctcgctga

SEQ ID NO: 22294 - DNA, 504 bp, Stenotrophomonas sp. DDT-1
atggcaaggaatgttttcttcagctttcacttcaacaatgatttctggcgcacgcagcaggtccgaaacatgggctcgttggaaggccagaagctctacactgccaacgaatgggaagatgtaaagaaaaacggaagcgatgagatcgaaaaatggatcgataggagcctgattggaaagacctgcgtagtcgtactcgttggcgccgagaccgcaaaccggccttgggttataacggaaatcgtcaagggctggaactccggcaagggcgtcgttggcattcgcatcgacaagctcctcgatgacgattcacgtccctctactgccggattgaaccccttcgataaggtccatctcaagagtggtacggtgcccctttcagaccatgtcaagttggtcacgccggtcggcgctgacagcaaggcggtctatgcacacatccaggccaacattgagcaatggattgaggaggccattgaaatccggagcaactataagccttga

SEQ ID NO: 22295 - DNA, 552 bp, Stenotrophomonas sp. DDT-1
atggcacggaacgtaaccaaggctgagcttcgagacatctcggccgcgaaatcacatagtgatcgtcagcgacttttggattcggttgcatcatccaggggcacgagcacgttcctgtcgcattccagcaaagataaggagctgcttgaaggagccatggaaatactctacaaccatggtgctagggtctacatcgatgaagtagaccctctgatgccgccttacacgactgcagcgactgcagcactactcaaacagcgaataagtcagaaccagcgctttgtcctacttgcctctgagaacagcaaagaaagtcgctgggtaccctgggagctgggagttgcagacggcgaaaagggcttggcgaacatcgccctatttccagcctcggaaagaacgcacgaggacaactgggcaagctgggagtatctgggcttataccatcgaatcgtatgggggaagctcacaggatatgagaatgagctttggatggtgcttgatgccagacgtaacaccgccattaagctgagcaagtggctcgcagggtactga

SEQ ID NO: 22296 - DNA, 1455 bp, Serratia marcescens subsp. marcescens; identical to SEQ ID NO: 19764

SEQ ID NO: 22297 - DNA, 492 bp, Serratia marcescens subsp. marcescens; identical to SEQ ID NO: 19765

SEQ ID NO: 22298 - DNA, 810 bp, Candidatus Burkholderia humilis
atggcgttcagcaaagagattgaagcgttcatccgcgagtatgtaaaagacatcgcgaaagacaatgcagccattttcgctgatgccggcatgtctaagagcgccggcttcgtcgattgggccgagttcctacgcgacattgcggatgaaattgggcacgacctgattgcacttgctcagtttcacgtaaatgaacacaagggctacgcaaaactctcgcgaaagatcatcgaagaattctccgaacaggcggagccgtcggaaagtcactcgatccttgcgcgtctgcccatccgcacctattggacgaccaattacgatacccttattgaagacacgcttcggcaagcatacaaggttccggacgtcaaacacagcgtcgagcaactgaacacaacacgcccaaagcgcgacgttgtcgtctataagatgcacggggacgtgagttatccgaatagcgccgtactttataaggagcagtacgagcggtacttccgtacccatgaacctttcgtcagggccctcagcggagatttggtatccaaaactttcctcttcatcggctttagtttcaccgatccgaacctcgactacgttttgagccgtcttcactccgtaacaaagaggcatcactattgcttcatgcggcgtgagcaggtgcttcccggtgacgacgatgacgtaaagaaatacaaacaggtccttcgtgtcaatgaccttaagcgattcggcatccagacgctgctcatcgacgactacgcagaggttccgcgaattttagcggcgattgaggcacgttttctgaagtga

SEQ ID NO: 22299 - DNA, 312 bp, Candidatus Burkholderia humilis
atgcatggaaagtcttgcgtcgttgttctcatcagctccgaaacagctaaacgtccgtgggtcaagtatgagattgagaaagcatggaaagacgggaaagggttgctgggaatccatatccacaatctaagctgccctaacaacggcaagtaccttcagggcgccgacccgctagcgcagtacatattcaagatcggcgagcgcttcgtaaaaccgaaaacgtacaacccgaacagttcagacgcatacggggacattgctgccaacctggatgattgggtggaggaagcaatcaagattcgtacgagttga

SEQ ID NO: 22300 - DNA, 525 bp, Candidatus Burkholderia humilis
atggatagcggtcgtattctgcaagaagccaaacgatcggcaacgagtgcaagtcgcttcgatgtgttcctgtcacacgcgtccaaagatgccaagttgattcttggcgtcaaggcattgttggaagagcgaggattcgtcgtctatgtcgactgggttgacgacgcacacgccgatcgctcgcaagtcgaccgtgaaacggcagacttgctacgtcagcgtatgcgacagtcggcatctctcatttgggttgcaactgacgcgaccagcaattcgaagtggatgccttgggaactaggttacttcgacggctttgcacccgggcaagtcgccaccattccgctcgtcgacaatcctggcgagtcattcaaaggacaagaatacttgtctctctatccactgatcggccaagaccactatatcggtggccgcaaggacgtctttgttgaagaccgcagcaggagatgggcgacgcttgattcgttcgccaagggcacgacccgatggagccgctatagcaactga

SEQ ID NO: 22301 - DNA, 1434 bp, Aeromonas caviae
atgaaaaaggaacatctacggctcatagacaatctgtccaaagagctggccgaaggaaatctggcaatttttgcaggtgcggggttttcccgagctgcaggctatgtggattggaggtcgctgctgaagccgatcgccgacgatctggatctcgatgtcgagaaagaatgggatctggtgacattggcacaatatcatgcaaatgctaatgcgaccaaccgctcgaagctgaatcagatgctggtcaccgaattctcatccggcgtagcgccgactgtaaatcacgaaatcgtagccaggctaccgatccagacatattggactaccaattacgacaagcttatcgagagttcgcttgagcgcaatgggaaggttccggacgtcaagtacaccaacaagcagctcgcaactacccgtcccaaacgagatgcagtggtttacaaaatgcatggagacgtcgatcacgcgtctgaggccgtactgatccgtgatgactacgaacgctaccacgttaagatgcaaccgttcataactgcactgagcggtgacctgatcgccaagaccttcctgtttctgggtttcagcttcaccgatcctaaccttgagtacatcctgagtcgagtccgcattcagttcgcacaagatcaacgccagcactactgcatccttcgcaaggcaagcagaatggaaggagaagagcaagccgaattcgagtatcgccagcgcaaagaagacctcttcaaacacgagctgctacgggttgggatcaaggccgtctacgtcgatgagttctcagagatcaccgacattctgcgagagattgagcaccgtcataaacgcaaaaccatctttatctctggcgcggctcatgactacagcccctggaccgagtccgaggcagagcagttcgtttacaaactgagtaaggctatcagcaaggcgcagtaccgggttatttccgggttcggcttgggggttggtagtgccgttattaccggcgtgcttgaacaaactatcatgaacggtggtcgcctcgacaacgatcaactagtcctacgtcccttcccccagagccagtctggcgagcgtccattgccagagctctggacggagtaccgccgcaacatgctcgctcatgccggtgttgcactctttcttttcggcaacaagctggacaagacaggagctgtggtgccgtccaacggtatgcgcgaagagtttgagattgcagttgccaatggcctattcgtcattccggttggcattaccggctcgatctcagctgatctttggaatgaggtgattcaggcatacgatgaatcgaatcacgaacatggcaagaagatcaccccactgttacaagaactgggtgccccacacactgatctagcgcgcgctcacgacatcatcctctccctactgcccctcctttaa

SEQ ID NO: 22302 - DNA, 468 bp, Aeromonas caviae
gtgacagagaaaaggaacatgtttattagccatgtccataaggacgatctcggactccagaagctaaaggatctgttggctccgaaagggatggaaatcagggattcctccatccatacaggaaagttcaataatgcgaccgatgagcactacataaagacccagatacttgctcccgctatcaactgggctggtgtgttcgtatgctacgtttctcctcagaccaagaatagcgattgggtgaactgggaaatcgagtatgcggccaaacagggaaagcgcattattggtatttgggaacacggtgagaaggaatgcgacctcccagaagccctgaaagaatatgcagacgctctggttgggtggaacggcgattcaatcattgacgcgatcaacgggaaggactcatgggaaaaacctgacggtggcgactgtgacccggttcccctcaaacggcatccttgctga

SEQ ID NO: 22303 - DNA, 444 bp, Aeromonas caviae
atggcaagaaaggtatttttcagcttccagtacgaagacgtgcaccgtgcaatgaacgtacggaatagcaacgtcatcgcttctgacaccaaggtggggtttatcgataaggctgatttcgaagaagtcgagcgcaagggcgatacagccatcaagaaatggattgacgatcagttgcacggcacgagtgtcacggtagttctggttggcgcaacaactgacaagagcaaatgggtgaagtacgagatcgagaaaagcattgagcgcggcaatggtatcctgaccatcgacattagcaaaatcgcagacctcaacggaaaaaccacgaactgctgctctcttcgtgtccctaacaccacccactatttgtggaacaatcaaaaaggccgtgaaaacttggggaagtgggttgaggctgcggcgaaggctgcaggccggtcataa

SEQ ID NO: 22304 - DNA, 498 bp, Aeromonas caviae
atgccagttcgccaatcagacctccttaacgcaggtcaacgccgccccatgcaggggcaatttgccaagcgatttgggcaacctacagcctttctaagccacagccataaggactcactgctcgctctgggcttacaggagttgctgaagaatcaagggtgggatgtctacatcgactggcaggatcaaactatgcccgacaagcctgacgctaagactgccttcaatatcaaaaccgccattgtacgggccgactggttcctctttcttgcgacgcagaattcgatggcatcgcgctggtgtccttgggaaatcggttttgcggacggaaaaaagtcccatgaacacatcgcgattgtccccacacaggacagccagggccatttttatggtaacgaatacctgaacctctataacaaaatcgatgtgcctgctagcggtgctggtcttgctttctttgacactaaaggcaatggcaagtgggtgcgaactctttaa

SEQ ID NO: 22305 - DNA, 1446 bp, Vibrio parahaemolyticus
atgaaacgtaagtttccaaatgaaacggaagcatttattcgcacttttgttaaagatcttgaagaaggtgctgcggcaatcttcgcgggtgcggggctatccaaaaattgtgggtttgttgattggagtgaactgttaagcgatattgctgaagagctagggttatctgtggagctggagcatgacctcatatcggtagcacaataccatgttaataaacaaaatagtgctaatgggttagcacgaaagatattagaggagttttctgaacaggctgaaatatctgagtctcacaaaattctagctcgtcttccaattaaaacatattggactaccaactacgatactcttatcgaagacagtttgaaagagaactaccgcgtcgcggatgttaaacgaaaaactgatgatttagttaatactaaacctaaacgtgatgctgtagtgtataaaatgcatggagatgtcgggtcacccagtgaagctgttttatacaaatctcaatatgaacaatattataaaacccatgaggcatttattactgccctaagtggtgatttgatttcaaaaacattcttatttattggttttagtttttccgatccaaatctggattatattttgagtcgtttgcatgtccctaattcttatagacggaaccattactgctttctccgtaaggaaccaagcgagttaatgtgtggggaagatgaacatggggctgaatataggcagcgtaagcaagaacatcatattagagatcttaagaggtttgggattcaagctattcttgttgataaatatgatgatattcctctgatactaaaagaaatagagaataggtttctaagaaaaacaatttttatttctggaagtgcagaagaatatggtcattgggataagcaacttgcattagatttaatacactcactgtcatcctccctagtcaaagcaggttatcgagttgtgaacggatttgggtggggagttggaagcgcagttattaatggtgctttggaggctatatactcaaacccagaaaaatactcagaagaacaattggttatgcgtccatttcctcagcatccatctaacggaaaagacttggctcagttgtggagagagtatagacaacgcatgattagtcagtcaggtgttgctgtttttctttttggtaacaaacttcaagagagcaaagtagttaatgctgatggagtaagaaaagagtttgaaatatcaatcgagaatggccttagcgttattccaattggatgtactggttatatggcaaaagagttatcagaaaccattttgtcagataaagaaaaatactttccaaatagctcttggctagagaaagaaatactagaactgaatgacatatctaataatagtgaagacattgtccgtaaagtgctatcaattattagaaaggttgggaagtga

SEQ ID NO: 22306 - DNA, 603 bp, Vibrio parahaemolyticus; identical to SEQ ID NO: 20412

SEQ ID NO: 22307 - DNA, 576 bp, Vibrio parahaemolyticus; identical to SEQ ID NO: 18721

SEQ ID NO: 22308 - DNA, 1479 bp, Oceanobacillus caeni
ttggactttggtagagaaattaataattttatagaagaatatgttagtgctctaaaggaaggaaatgctgcaatatttgcaggcgcaggattgtctatcccttctggagtcgttaattggaaggatctattaaggagacctgcgtttaggctgggattggacatagataaagaaagtgacttagtatcgttggcacaatatatctataatgattccaaaactaaaacacctttaacggaattgataaataatcactttagccaaactggtagaataaatcgcaatcacgaaatcatcgcagaactgcctattcgaactttttggacaactaattacgacaaactaattgaacaagccttagtacaggcagggaagaaacctgatgttaaaaagcgagtcaatgatttgtctgtaattaagagtaaaagagatgctattgtttataaaatgcatggtgatgtcgaagtggcagatgaggctgttctaattaaaaatgactatgagttatatgagaaaaataatcaaatgttcaccattgccctaaaaggtgaccttgtttctaagacatttttatttattggttttagtttcgaagatcccaacttagaacatattttaagcagaattaaaattttattagatgaccatacccgtacccattattattttataaaggaggttgctgaagaggattatccagataatgctgcaggcaaagagcaatttcagtacgataaaatcaaacaagaattaaaatgtgctgatttagaacgttattctataaagccgctaattgttaaaaagtatgaggatataacagcaatcttggaaactattactgaaagatataatagaaataatgttcttatatctggaagtgcagatgaatttaatgactataaagtatctggtataaaagcagaagacttcattcataaactaagtaaaacattgaatcaaaaagaatacaaagttgcaactggctttggtgtaggagtaggaagtggagtaattaatggtgttttggaaggaatggaggaaacaggtacaaggaatataaatgaacatttaattatgaggccattccctcaatatgctacaaacgggaaggaaattggccaattatgggaggaataccgtcaacaactcattagtgaatgtggaatagttatttttatgtttggaaataaactcgacaagaaagaaggaacagacgaggaaacagttgtagaagcaaatggagttatcagagagtttgatattgcggtagataaaaatgcaaaagtaatccctattggtgtaactggatatgcaagccgtaagttatgggaacgggtaataaatgattttgaaaaatattactcggattatcctcatttaaaagataagtttattaaacttggtgaagacggaattgattttaatcaactaattaatatagtcatagatatagttacagaaataagaggaggagaataa

SEQ ID NO: 22309 - DNA, 486 bp, Oceanobacillus caeni
atggctagaaaaactttttttagttttcattttgaaagggattcttggagagcaggccaagtaagaaatagcggtcaatttaagggagataaagcaggctttattgataaggctgaatgggaagaggtcaaaagaaaaggagatcaggcaattaaaagatggattgataagcaattagagggtactagtacaaccgtcgtactaatagggagtgaaacatctgaaagaaagtatgttggttatgagattgaacaaagtgcaaaaagaggaaatggactactaggtgtttatatacatcaagtcaaagatataaatggaaggacggatactaagggtaaaaatcctttcgataattggtattatgaacggaacggaaagaatgtttatttctcagaaatatatcctacctatgattgggttaatgataacggccgagataatctaggtaaatggattgaagcagccgctaagaacgcaggaaggtaa

SEQ ID NO: 22310 - DNA, 528 bp, Oceanobacillus caeni
attaataaggcaaattcagtagttcaaaagagttataatactaaaactgcatcgaagatcttaaatgagagttacaatgcatacaatcaatttaaaacttatgatatctttctctcccatagttaccaagatgcagaggtaatattggggttgaaaaatacgttagaagaaatgggatatgaagtttacgtagactggattgaagatagacaaatgagcagggagaatgttaacgcacaaacagcaaatcagttgagaaagagaatgaaaaattgtagaagtttgttctttgctacttctgataactctacagattcaaaatggatgccatgggaattaggttactatgatggttacaggggcaaagtagcaatccttccgataaataattcttcatatcaaaaggattcatttgaaggccaagagtatctaggactctataattatgtgattgaaaactatggggtgctctatattaaatatttagatggatcatctaaaagatatagtgaatgggtctctgaataa

SEQ ID NO: 22311 - DNA, 1464 bp, Pseudomonas sp. RIT-PI-q
atgaccaaagtggccatgaatcgttttctcaccgagtatcctgacgctttgaatgatgggctcggagctgtatttataggcgctggtgtctccatggctgcaggctacccttcgtggtcgggcctactgagtgacatcgccgatgagctggaaatcaattcaagaaatgtacacgacctcgccgctcttgctcagtggagcatccaggaaagcggtggtgctactcgtgttcgcaatgtcatcagaaaagagattggcccagacaagcctattcctgaaactttggatatcctcgcccgactgcctgtcaggcatatttggacgactaactatgatcggctcgtggagcgcgcctttgcggccattagccgcccgctcaactctatttccgccccaaaagatcttgctctaagaaccacccctggcgcggcattgctctacaaaatgcacggttcggtggatcgtctcgacgatattgtgatatccacagatgactacgagcttttccgatcccggcgtggccaatacctcccgctattccaagcacatctgaccagcatgtcgatgctgttcatcggcatcagtttcactgacccaaatgttagacatgtgctttcgttgatcagagaaagtttcactgagtcgcccccagaacactttgccatcgtcagagcgccgaaaagatcagatttcaaaactaaggatgagttctcagcaaggctcgctcagcataatctttggactaaagacctgaagcgctatggtctgcttgcagtagagattgataactatgacgaggtgcccgctctccttcggcagatcgaaaggcgggtagccgcgcgcaggatttgggtaagcggtagctggccacttgaacacgggggcactgaaccggcgaatatttatgccttggccgaagaagttggccgcaaggtaggtgagaccaatagatatctggtcacgggtgctggcttattggtcggctctgcttctctgtctggctttcttgctgctttgcgcaacggtggaggttgggatttagatcgccgactgatcgctagaccgtttcctcagccacttaagggaggagttcccaaggataaggagtgggctgcccttcgtcaggagttagcccgccaggcgggtattgcgattttcattggtggtgcaaagttagttaatggcctccccatacctgcagagggagttgaacgagagttcgagtttgcaaaggccgctggcgttttcgttctgcctattggtgctacaggcggggctgccgaaaaaatatgtaaccagcttcaaggttcagcactttcctacaaggggagctcaccgatgcgacctaccgataaggagctaaaagctctggcagatactaatgctttagctaccgcagaaggccggacatccttggtgaatctagtatttcagatcattgatagggtcgcccgtgttggttga

SEQ ID NO: 22312 - DNA, 504 bp, Pseudomonas sp. RIT-PI-q
atggctcgaaatgtgttcttcagtttccacttcgctaacgacttctggcgtactcagcaggtacgcaatatcggcgctttggaagggcaaaagctctataccgccaatgaatgggaggaggtcaaaaaaaagggtgacgcggcgattaggaaatggatcgacgatagcctggtcggaaaatcatgtgtagttgtcctcgtgggctcagaaaccgctacccggccttgggtattggaggaggtcatcaaggggtggaacgcaggaaaaggcgttgtcgccattcggatcaaccgtcttttagataaccatcagaatacctccgtcgctggctctaaccccttcgatgccgtcacgctaaaaaatggcacggtgaggctatccggctatgcgaagctgatgactccagcggggaacgatagcaaagaggtttatgcttccatccaggccaatatcgaaagctggatcgaggacgccattactattcgtaaaaattacaaaccttaa

SEQ ID NO: 22313 - DNA, 552 bp, Pseudomonas sp. RIT-PI-q
atggctcgtaatgtcacaacggaggagctaagaaatatctccgctaacagctctcaagctactcgcgatcacgtattcaaatctttagcagccacggcatcgatgagtacgtttctatcgcactccagtaaagataaggaagttctacctggcgcgattcaggtacttcagaatcatggggcttctgtgtacatcgatgaaatcgaccacgaaatgccaccttacacatccgaggaaacagcagctttactcaaacaacgtattgcgcagacgaaaagattcgtgctccttactactaaaaacagcaaggagagccggtgggtgccttgggagttaggcatcgctgatggagcgaaggggctctcaaaaattgcaatatttccagcctcggattctgcatacgatgatagctgggtcagctgggagtacctgggcctgtatcaaagagtcgtgtggggcttattgcaaggacatccgcaagagctttggatggtgctcgatacaaaagcaaatacggctgtcccgttgaaagactggctagcggggtactga

SEQ ID NO: 22314 - DNA, 1461 bp, Elizabethkingia miricola
atgacatttacagaacaacaaaagaaatttataaatgattttgctatagaaataaatagtggagatgctgctatttttgcaggtgcgggtttttccgcaacattaggctttgtaaattggaaagaactgttgagagacttagctgttgaattaaaattagatgttgataaagaacacgacttgatttcagtggcacaatatcatttcaataaatttaagagaggtaaaatcaacaataaaattatcaatgaatttaccacactcaccacaggtagcgaaaaccataaaattttgtctcgtattggtattgacaccttttggacaacaaattacgatcagcttatagaaaagaccttggaagcgaatggtaaaacagttgaaacaaaaattaggaatgtagacttttcaagaaacatcaagaagaaagatgccattgtctacaaaatgcatggggataaaaactctcctgatgaagctgttctaacaaaggatgattacgaaacttacaatgataagaaagaattattttctactgccttgagaggagatttattatcaaagacttttttatttataggcttcagcttcgatgacccaaatctggagtacattttaggaagaataaaaattctgctaaaagataacacgcctacgcactactgttttttcaaggaagtgcaagaaaccgattttaatgataccacaaaaacacctgaacaaaataaggaagattatttgtacgcaaaaattaagcaggagttaaaaattgaagatttagttaggtatggtattcatgccataatggttaaagaatattctgaaataacagcaattttgcacgagatagagaagagaataaaaagaaaaaatatttttatctcaggagcggctcacgattattcaccttataccgcagaagatgcgaatgacctaattcattccctaagttacaaattggctgaaaaagagtataaaattatttcgggatttggattaggaattggtagcgttgttattaatggtgcattagattttaaattaaattctaattacagaaatttggatgacttattaattttaagaccttttccccaaattcagtctggagctaaaagtatccctgaaatatggacagattatagaaacgagatgatttcaaaagcgggcgtagcagtttttgttttcggtaacaaaaaagttggcgatgatatagtcaattcaaatggtatggaagaagaatttgaaatttgtttgcaacataatgttattcctattcctataggagcaactggatatgtttccaaatcattatgggataaagttactggagaactacaagtttattatcctgataatgcagaattatacaatgctataagagaactcggaaaagataatccaacaaaagaagaaataataaacaacacaataaaagcaatcaatattttacaaaaactataa

SEQ ID NO: 22315 - DNA, 492 bp, Elizabethkingia miricola
atgacaagaaaagtgtttacaagtttccattatgtacccgataattggagggcttctcaaataagaaatatgggaaaaattgaaggaaatggtgtggttacttccaacaaatgggaagaagtaacgaatggtggtgacaaagaaatagaaaaatggattgataataatatgagtggaaaatcttgtgttattgtatttgttggagaaaaaacagcaggaagaaaatggattgaccatgaaataaaaaaggcttgggaagagggacgaggaatttttggaatttatgtacataatctaaaagacagtggtggtaatcaatctaatcaaggaaataatccatttgatggctttagtgtggatggaaaatccctttcttcaattgtaaaatgttacaatccgccatacaatacaagtacctatgtgtatgaccatattaaagaaaatcttgaagactggattgaagaagcaataaaaatcagaaacaattactag

SEQ ID NO: 22316 - DNA, 708 bp, Elizabethkingia miricola
atgggtaagagtatattcgtttcatataaatatgcagacgcccaagtgcaagatttaggagtgtatgaagttattgatttctttggtacaaaaagaagaattgcaacaacagcaagacattatgttgatgaaattgcgaaaattttggaagaagatgaccatatttataaaggagaaaatgatggggaaagtatggttgcgcttgaggatactacaattgcctcaaagttaggagataaaatattttatagttcaattacaattgttcttgtttctaaagggatgaaagagaatttctctagtgaaaaagaccaatggattccttgggaaatttcatattctttgaaagaacaatcaagacagggaggaaggagcaaaacaaatgcagtcttagcagttgtattacccgaccaatggggaagctataattattttattgaagaaaactcttgtttatattgtaattgcagaacattgaaaactgattctttgtttcaaatccttagagataatatgttcaatgtaaaaaatcctgtctatacagattgtgctaatcatattggtagtagaccatataaaggttattcatcttttattcattctgttaaatggagtgattttattgttaatccaggtaaatatattgatattgcactgaccataagagctaatatcaatgaatatgacattgtaaaaacaataaaataa

SEQ ID NO: 22317 - DNA, 537 bp, Elizabethkingia miricola
atttttactaaacaagaatttcagacgattgcctataataaggctagaaataaaggatatacaaccttgaatgaaagccgaactttctctgaatattcatcaaagacaagtatctttttatcgcattctcataaagataaagcgttgattgctcaggcaaagacattttttgaaaatttaggtatttctatttatgtagattgggctgatgaaacaatgccacaacgcacaagcggaataacagcacaaaatattaaaggacaaattagaaaaaatgacaagtttgtactattagcgacaaatgatgccattgcttctaaatggtgcaattgggaagttggaattggagatacctataaattggcaagtgataaaatttgcattttacctttagcagacaatagacttacctggcaagggaatgagtatcttcaaatttatcctagaattgaggaaagtgaatacacaaaagattattacaaaataatttatcccaacaaaacagaaatatcattaaacgagtggttaaataaataa

SEQ ID NO: 22318 - DNA, 1434 bp, Serratia marcescens subsp. marcescens
atgaaaagaaaacttctgcgcctcattgacaacctatctaaagaactagacgaaggcaatcttgcagtttttgcaggtgctggtttatcccgaacagcaggctttgtagattggaagtcactgttgaaaccaatcgctgacgacttagatcttgatgttgaaagagaatgggatctggtgactcttgctcagtaccatgctaatgccaacgcggcaaatcgctcgaaattgaatcagatgcttgtctctgaattttcatctggcttagcaccaacagataatcatgaaattctagccagactaccaatccagacctattggactacaaactacgacaagctcatagagagttcgctcgaacgaaatggtaaaactcctgacgtcaagtacaccaataagcaattagcaactacccgtcccaaacgagatgccatcgtttataagatgcatggagatgttgatcacgcatcggaggcagtgctgatccgggatgattatgaacgctatcacataaagatgcagccgttcattactgcactcagcggtgacctgatagctaaaactttcctttttttaggcttcagcttcactgatcccaatcttgagtacattttgagtcgagttagaattcaattcgcacaggaccagcgtcagcactattgcatccttcgtaaggctagcagagaggaaggcgaagagctggccgatttcgaatatcgtgaacgcaaagaagacctcttcaagcatgaattgctacgggttggtatcaaggttgtatacgttgatgagttttctgagatcaccgatatcctgcgagagattgaacgtcgccacaaacgtaaaaccatttttatatctggtgcggctcatgactacactccttggagcgtatcagaggcggaacagtttgtttataggctaagtaaaactatcagcaagcagcagtaccgtgttatctcaggattcggtttggggatcggtagtgctgttattactggggtacttgaagagaccatcatgaatggtggtcgtctcgacaatgatcaattagtcctacgtccttttccccaaaaccagtcaggggagcgtgctttgcctgaactctggacagaataccgccgtaacatgctcgctcatgcaggcgttgcgatctttcttttcggcaacaagttggacaagactgggactgttataccatcccacggtatgcgtgaagagtttgatattgcagtggctaacggacttttcgttattccggttgggattaccggttcgatctccgccgaactatggcaagaggtgattagtgcttatgatgaatcaaagcacgagaatggtaagaaaatcaccccgttgcttcacaagctgggctcccaaggtactgatttggctcatgcccatgacatcatactgtctctcctctccctcatttaa

SEQ ID NO: 22319 - DNA, 603 bp, Serratia marcescens subsp. marcescens
atgccacgcagaacattcttttcctttcactatgggcctgatgtctggcgcgcttggaatgtccgtaacagttgggttgtgagggaagccaataaggaagacaggggcttctttgatagcagcgtgcttgaggcatcgaaaaaagagagtgacaatacactaaaaaattttctccgtaagggattagacaacacttctgttacctgtgtccttgctggaacccaaacatgggaacgtcggtgggtacgctatgaaattgcccgtagcgtaatcaaaggaaatggattacttaccgtttacattcacggggtccaaaacaaagacaaagagacatctacaaaaggggctaatccattagcgcagatgggcctttatagaacagagcatggcatctatctcgccgaatggaagggcggaaagtgggtagcttatgcagattacactcttgcaatttctgagggggacctatggttcactgcaccaaaaacgaacaacgtagtccaactgtcaactcactacctgagctacgatttcattggccaagatggcagaaaaaatattggcgggtggattgaaactgctgcggaaatggctggtcgatga

SEQ ID NO: 22320 - DNA, 441 bp, Serratia marcescens subsp. marcescens
atgacaagaaaagtattttttagtttccagtatgaagacgtgcaacgtgcgatgaacgtacgaaacagcaacgtgatcgcttctgataccaaggtgggtttcatcgataaagccgattttgaagaagttgagcgcaagggagatgctgccattaagaaatggataaacgatcagctttacggtacgagtgtcactgtagttcttatcggagccacaaccaacaagagcaaatgggttaagtacgagattgagcaaagcattgaccgtggcaatggtatcttgactatcgacatcagtaaaatcgcagatctcaaagggaacactaccgactgctgttctcttcgcgttcctgatgcccctcactatttatggaataaaggaaatggtcgagaaaacttagggaagtggattgaggctgctgctgaggcagctggtaagtaa

SEQ ID NO: 22321 - DNA, 1188 bp, Serratia marcescens subsp. marcescens
atgagcgatacttcaaatataagatctccgtaccagcttattatgcttggtgcatccaatgggcatgataatggcctacgtcataatattgattcggcgcttcataaacttgggatcccgacttgcgcgatcaaatacttctgcgaattcaacgccgctgaccgcagcttaaagttgccgacgatggcaatatttttcggctctccagaaaatactgtcgatacagcccttgtcacagaattgattgacgattcgatcgtgatcgctccgattgtctcagatttgtctcaagtacatgaagaaattccgtcgcagctaagacacataaacgctattgtgttgggctcaaatgatgaaggaattgaccgtctagtcacgttagtcctcgagactttccggttgttacgacgtgagcgacgtttgtttatcagctacaagcgagctggctctcagcccctagccgatcgattgtacgatgctctagatgctcgcggttttgacgtttttattgacgtgaggtcggtacctccagccgcagatttccaatctcaactctggcacaggatgtcggattccgatgtcgtggttctgattgacactcctggattcagagaaggccgctggacttccgaagagctggctcgcgctaatgcgaccaatgttcaaatcttgcatcttctatggccggggcaaaaggaagatccagcatcatctttcagtcacttcatgaagcttaagcgtagcgattttgttggataccttcctatgcggggtcgttgggcaacaaagggactggtgaagagaatatgcgtcgaggtcgagcgactgcgcgcaccggcaattgctgcccgccaccggtatttggttgataacttttgtgacgcagcccgtgatgaggggtttaatccaagtgttcagattgaaggctggatttctcttgaacccaagtcagaaaggggactcgctatagtgccagcagtgggtatacctacctctgatcgtatcaatgaagttttcgaagccatcacccataatgttgttgaaacgaaggagatatggatgatttatgacaacagaggcgtactgaaaacttggctctcgcacctagattggcttgattcctatttaccgatcagggctgtacagatgtcgaaggttccccaacttctgaaggagttcattgcgtga

SEQ ID NO: 22322 - DNA, 1434 bp, Serratia marcescens subsp. marcescens; identical to SEQ ID NO: 22318

SEQ ID NO: 22323 - DNA, 441 bp, Serratia marcescens subsp. marcescens; identical to SEQ ID NO: 22320

SEQ ID NO: 22324 - DNA, 603 bp, Serratia marcescens subsp. marcescens; identical to SEQ ID NO: 22319

SEQ ID NO: 22325 - DNA, 1188 bp, Serratia marcescens subsp. marcescens; identical to SEQ ID NO: 22321

SEQ ID NO: 22326 - DNA, 1464 bp, beta proteobacterium AAP99
atgaactggtttgcaactgccggtcagaagcgcttcattcgaaactacggcgatgccctacgcagtcgagacggcgctctgttcgtcggagcaggggtgtctcgcgctgcgggctttgttgattggaaggccctgcttcgggatctcgctgccgacctggatctcgacgtcgatcgcgagacagaccttgtcgctctggctcaatttcacttgaattcccgcggaacgcgcgctggaatcaatcaggcgctgattgatgggctcacagatggtgcggtgccaacaaagctccacgacgtactcgcccggctaccagtcgatacggtctggacaacgtactacgaccagctgctcgagcaggcatttgccgcagcgggcaaagctgtcgacgtcaagctgacaatccaaaaccttgcgcagctgcgccgcggcaaggacgtgaccctgtacaagatgcatgggtgtgtgacgcagcctcaagatgcggttcttactaaggatgactatgagcgctatgcagacaagcgggctctgttttctgacagtctcaaaggagatctgatcgaaaagacgctgctgtttttgggctttagcttcaccgaccccaacattgaacagattctttcccgcgtgcgtgggcaccttggcacgaatcagcgagatcactattgcgtgatgcgtcgtcggccgcgatcgcctgaccttgctggagctgcactcgccgagtttgaatacgaagcccgcaaggccgagtatcaagttgctgatctgaagcgctttggaatccaaacggtcagcatcgaagagtatgagcacttgacccctctgctgcaggcggtcgctgcatatacgaaccgagatagcgtatttgtctctggcgccgctgcggacgccgcacctcttggaccggatcgtttgcatgcgatcgcacgacgcatcggccagcgactgattaccgacaacttcaggcttgtatccgggttcggcacaggcatcggtgagcaagtagcccttggggcattgcgtgcactttttggtcggccggatccgcgtgatcctgaccgtgtcgtgatccgaccgtttccggctccatctagctcggagcaccaagcggcgacctatacgcggcatcgcgaagatcttttgtcacgagccggcgccgtcgttgtaatcgccggcaataaagcgagcaacatgggtggcatccagcctgccagcggcgtcgtcgaggaagtgaggatcgctcaggcaatgggcaaaatcatcattccgattggcgtgacgggacacgtagcggccgacgtgtggacgcaggcgatgaacaatcctgaattgttccttccgggcctcgatgtccagcaggtcttgtctgtgttgggtgatgagactgcctcggatgactcactcatcgatgctgtctttgagatcctggacgcgggcaggcagcgagccgcagcgccatag

SEQ ID NO: 22327 - DNA, 498 bp, beta proteobacterium AAP99
atggcacgaaaagcgttttacagttttcactacaagccggacaactggcgtgcatctcaggtcagaaacatgggcgttgtcgaaggcaataagccggcggcagataatgactgggaagccgttaagaagggtggtgacgctgcgatccaggcgtggatcgatgggcaactccacggtcgctctgtcgctgtggtcttgatcggtgcggagacagcaggtcgcaaatggatcaactacgaaatcgcgaaggcttggaacgacggcaaaggtgtgctgggcatttatgtgcacaatctcaaggattcggcaggcgagcagaccacaaaaggcgcgaatccgtttgaggagttcacactaaatgagtcgaagaagagactgtcgtcaatcgtcaaggcctacgacccaccgtattcgacgagtaccaacgtctacaagcatatcaacgacaatctcgcgacgtggatcgaagaggccatcgctattcgagctgcgtactga

SEQ ID NO: 22328 - DNA, 1434 bp, Pediococcus pentosaceus
atgattactagtagaaaaagttttatagagcaatatagtaaagccataaatgaaggatatgctgcagtttttgctggagcagggttatctgtagcatctggatatgttgattggaaaacgctagtaactccccttgcagaagagctaaatttaaatattgaggaagaaaatgatttaactaaagttgcacaatactacagaaatgaatttaaaagtagaggagatataaatcaaacgattatggaagccttttcgaaagaaaaggaaccaaatgaaaatattgatatcttaactcgtctaccaatttatacatattggacaactaattacgataagttattagaagaaggatttaaaaataataatagaaaagttgatgtaaaatgtagagaaactcgattatcaacgcaaaaatatgatagagatgccatcttgtataagatgcatggcgatgtagatgatccagctgaggctgttttaactaaacaagattatgaaatttataatcaaagaaacccactattcaccagtatacttcaaggagatttaatctcaaaaacatttcttttcattggtttcagctttgaagatcctaatttgactaatgttttagcagctacaagaaatatattggatgagaatattagtaataactactggttagagaaaagagtaacgaaaccttctgatatagaagaatcaacagaagctaaagtacgttatgaagtcgacagaacgaaacaagaattaaaaattcatgaattacaacgttatgggattcaaacagtctatattgattcttatgaagagattactgaaattttaaaagaattagaatttctgaatttaaaaagaaaaatatttatttcaggtagcgttacattttatgacaaaatttggacaaaagaaaaagtgaatgctttatgttactctctagcgaaagaattggtgaaaaataactatcaaatttgctcgggatttggatatggagtgggctctagcgtaataaatggagcgcttgaggtaatttattctgaaaagtacaaacatgtagatgattatcttaatttacggccatttcctcaaaataattcttctgtaaaccagggtaatgatgtgaggcaaaaaatgtatcgtagtgaaatggtaaatggtgtaggtgttgttatttttatgtttggaaatagagaaggaaaagataaaaaggaagaattatctgaaggtctaatcgaggagtttagaattgcaaaagaacaagggaaaaaaattatacctattggatctactggaggggcaaccaaaaaaatattcgaagaagtagaaaataatattatagattacccttatttaaaaaaacatttatcaattttaaagaataatacagatataaacgaattaatttgtgaaataaaggatatcttaaatgaattatag

SEQ ID NO: 22329 - DNA, 609 bp, Pediococcus pentosaceus
atggcgagaaaaacgtttatttcgtataagtattcagaagctagagaattacgtgattccataatcgaatctatgggaaaagatgctacctactatactggtgaaacaagtgattcacctgatatgacagataggacaacagattatataagagaaaagttaaaagatatgatttattcaacatctgtgactattgtagtcatttcaccaaatatgataaaaagtcaatggatagattgggagattgaatattcgttaaaacaagttaagcggggcgatttttcatcaggtacaaatgggattgttggagttgtgaaaaaatataacggggattatacatggctgagaccaagaaatgataaatttgatgggtgttcaaccttgggtacaaatgaaaaatatatgtatgacattcttaataagaatagatttaatcaggagccgaaggtatatgcatgtgaaaattgcaaatgtgtagatatgctagtaggatcttatatttcattgataaacgaagaagattttttaaatgatccaaacttttacattgaaaacgcctatgaaaaaagtaagcattctgagggatatatcttaagtaagaagagatag

SEQ ID NO: 22330 - DNA, 1425 bp, Bacillus sp. FJAT-25509
atgtctagagatattgaattgtttataaaagactattccaaagaaattgaggaagacaatgcagctgtatttgctggagctggtttatcagtaccggtaggttatgttagttggagtgagcttttagaacctatcgctgacgaaatcggcttagatattcataaggaaacagaccttgtgtctttagcacaatattattgtaatgaaaatttaggaaatagaagtagaattaaccaaataattatgaatgagttttcaaagaaaactactttaacagaaaatcataaaatattatcaagactaccaataaggacttattggactacaaattatgatagattactagaaaatgctttagaaaatgagggtaaagtccccgatgttaaatatacagttaaccaattggcaataacaagacctaatagagatgcagtaatttataaaatgcacggtgacataaatcatccaaatgatgcagttataataaaagatgactatgaatcgtactttttaaaaatgtcgtcttatataacggctctaagtggtgatttagtttcgaaaacgttcttatttttaggttttagtttcacggatcctaatttggattatgtattaagtagaattcgtagtacgtatacaaataaccaaagaagacactattgtattatgaaaaaaattgaaataagaaataacgaattagttgaagattttcaatacagacaaagaaaacaagaattatttataaatgatttgaagagatttaatattaaaacattgattatcgatagttatgatgaaattacatatatcttaaaaaaaatagaaaataaaattaaaaggaaaactatttttctgtctggaagtgcaaccatttataatcaatgggaaaaagaagagtctgaatcatttatacacaaattaagtaaggaaataataaagaataaatttaatattgtatcgggttttggcttaggtgtaggaagttttgttattactggggctctagaggaaatatacataaatcaaggtaaaatagatgataataggctaatattaaggccatttccacagagtgagcatggacaaactcagtggaaaaaatacagagaagacatgatatcacgggcaggagtaagtatttttatatatggaaataaatatgaagaaaatagaattgtttcagctggaggagttatttctgaatttgaaatttcacatcaacaacagaattttttaattccagttggagcgacagggtttgctgctaaagatttatggaatagggtaaataatgactttgaaaagtattacccaaatacgacaactgatattagaaaagcatttgatagcttaaatgacgaaaaactatcaaaagatgaacttattgaaaaaatattaatatttttaaatttaatattaaaataa

SEQ ID NO: 22331 - DNA, 669 bp, Bacillus sp. FJAT-25509
ttgggaagaaaaatttttatatcatataaatataatgatagtagtgtttatccactaaataatatattggaaactaaagctagagattacgttgatgaaattcaacaaaagttatatgaggaagatcatgtgaataaaggtgaagcagatggtgaagatctaagtgattttaaagatgaaactatttggactaaacttaaagataaaatatatgatagtagtattactattgtattaatatcgaaaaatatgaaagataattctcaagaggtagagcaatggatcccttgggaaatttcttattcattaaaagagctttctagaaatggaagaactagttattctaatgctatcttagcagtagtgattccagatgaaaataatagttatgagtattatattaaagaaaattcatgtgaatattgtaaatgtagaacattaaaaactcatacattatttaagattttaagtaataacatgtttaatattaaatctccaaattataatgactgtaataatcatggcgcggaaaaagtttttaccggagaagcatcttatatacgctctgttaaatgggaaaattttataaaagatatagatttttatattaataaatcattagaaattaaaaataaaattgacgaatataacatatttaaaaatgtttaa

SEQ ID NO: 22332 - DNA, 1434 bp, Pseudomonas syringae pv. tagetis
atgaaaaaggaacatttacgcctcatagacaccctgtctacggagctggaggaaggaaacctcgcgatctttgcaggcgcaggcttctcccagggtgccggcttcgtgaactggaaaacgctactgcggccagtcgcggaagagcttgaccttgatatcgacaaggaaacggatttagtggcgttggcgcaatatcacgctaattccaacgctaccaaccgatctaagctagaccaaatgctagtgactgaattctcggccaaggttaagcctaccgacaatcataaaatccttgcgaggttgccgatccagacgtactggacgacgaactacgacaagctcatcgaaaccgcgctggaagacaacgagaaggttcctgacgtcaagtacaccgttaagcagctagccacaacgaagcgaaagcgtgacgctgtggtttacaagatgcacggagacgtcgagcatgcatcagaagcgattttgattcgggatgactacgaacactaccacgtcaaaatgcagccattcataactgcgctcagtggtgacttgatcgccaagacattcttgttcctaggatttagcttcaccgatcccaatcttgactacatcttgagcagagtacgtatccagtacgcgaaacatcagcgtcagcactattgcattcttcgtaaggtcagccaggaagagaatgaggatcaggctgactttgagtatcgcgagagaaaggagcaactattcaagcaggaattgcttcgcttcggaataaaagcaatctatgtagacgatttttcgcagatcaccgtaatcctgcacgagattgagcgccggcataagcgcaagaccatcttcatctctggagctgcccatgactacagcccgtggacacaggtggagtctgagcagttcgtctacaaactcagcaaagcgatcagcgagctacaataccgcgtgatctctgggttcggcctaggcatcggcagcgctgtgattacaggcgtattagaacagacgattatgaacgggcatcgtctggacagtgaccaactgatcctgagaccgtttccgcagagtcaatccggtgagcgccagctacctgaactctggactgaataccgccagaacatgttggcccatgcgggcattgcactcttcttgtttggcaataagcttgacaaagagggccaactggttctgtcaaacggtatgcgcgaagagttcgagatcgctgtagccaaaggcatttttgtgatcccggtcggcgttaccggctccatctccgctgagctttggaacgaggtcatccagacatttgatgaatcgaagtacgagcatggcaaaaatgttacccccctgctacacgaactgggcgcttcaagcaccactttaggacgcgctcacgaaattatcctatccctgctaccactcatttaa

SEQ ID NO: 22333 - DNA, 444 bp, Pseudomonas syringae pv. tagetis
atggcaagaaaggttttcttcagctttcagtacgaggacgttcagcgtgcaatgaacgtgcgtaatagcaatgtaatcgcatccgacgacaaggtaggcttcatcgacaaagctgactttgaagaagtggagcgtcaaggtgatgcagctatcaagaaatggatcaacgatcagctttatggcacaagcgtgacggtggtgcttatcggtgcaactactgacaagagcaagtgggtgaaatacgagattgagcagagcgtcgcccgtggaaatggaatattcacagtcgatgtcagccagattgcagatctcaaaggccagacgactacctgttgctcattacgcgtgcctggagccccgcattaccagtggaataatggcaaaggtcgtgaaaacctcggtgcatggattgagaccgcagccaaggcggccggaaaaccatag

SEQ ID NO: 22334 - DNA, 504 bp, Pseudomonas syringae pv. tagetis
atgccgattcgtcagtccgatctgtataccgccggctacagccgctacctccaaggccaattttctaaacgcagcggtcagcccacagctttcctcagccacagccatacagacgccgtacttgccttgggcctccaggagcttttgaagaaagcgggctgggatgtctacattgactggcaagaccgtacgatgccagaaactcccgatgccgaaaccgcattcaacatcaaagtggccatcgttcaagctgactggtttctcttactcgctactcaacactctaccgcctcacgctggtgcccatgggaaatcggttttgcggacggcaggaaagctcatgaccgcattgcgattgttcctactcaagacaaccagggcaatttctacggcaacgaatacctaaacctttacaacaaaattgacgtgcctcggattactggtacccccggcctcgcgctttttgatacgcgtggcaacggcacttgggtacgcggcctctaa

SEQ ID NO: 22335 - DNA, 831 bp, Pseudomonas syringae pv. tagetis
atgtatttaggttttgaaatccagcaatttgaatcgcttaacggctacgttggtaatcgtatagacctgtacgaagcacaggccaaaggccgggtgggtaatttagcgcagtacatcatcggcacttacgcgggtcgccagatactagatgccgaggcattgtccaaccagatctttcctgaagctaaatatgacgtcttcgtgtcccattcccatgcagaccagcgcaaagctattgatctagcgattgcactagagagtcgcggcctgaaggttttcgttgactcaacggtatggggcttttaccccgagttggtaaacacgattgcttcggccgtgcatccatctacaggtgagacggcggatcgacttaaacttcgcattagcgcggacgtccacatgatgttgaccagtgctctgcaccgtacgatagcgaaggccgaaactttcatctttgttcgcactgagaagtctgtacctttaacctatagcgcaactgaaagaactctgtcgccgtggctgttctctgagctccagtttagcttccaggtaaggcatgctgcgccgcagaggattctgaagcgtttgcaaggcaccctcctcgacagcgtcaaggggtttaacaccatgagcttggagagcatgcaatacctgatggctttcgaggccttcaatgatcatctgcccactgtttacggtcatgggttacgtgaatggtttgcccaattgccgagcaatgcgcgtggcgcagaagttctggattcgttgtacacccagttcagcttagagagtgactactatcgacgccgtagagagctgcacgctctataa

SEQ ID NO: 22336 - DNA, 1449 bp, Vibrio sp. J2-4
atggatagagagaagcaagcatttattacacatatctgtaaagaattagaagatgaaaacattgctatctttgctggtgctgggatgtcagccggaacggggtttgtcaattggtctgaattacttagaccaattgcagacgagttaggcttggatgtagatcgcgaacatgatttagtggctttagctcaataccattgcaatgacaacggcaataataggagtcaattgaatcaacgtttaattgaggagttttcaagagatgcgaatgaaacagaagttcaccgaatactttcaagactacccatccgtaccttttggacaaccaattacgataaattaattgaaagtagtctcgtcaaaacggggaaaaccccagatgtaaaacatacaaaacaacaacttgccttcacaaagccgaaaagagattctgttgtatacaaaatgcatggcgatgtcgatcacccaagtgatgccgtcttaacaaaagacgactatgaaaaataccatgtcaaaatggaacagttcctatcctcactcaaaggagacctgatatcaaaaacatttatatttattggttttagctttactgacccaaaccttgattacatcctcagtcgagtaagagttgcatatgacggtaaccaacgacgacattattgttttataaggtcagttcaaaaaaatgacggagaatccgatgctgactatgaatatagacaaagaaaacaatcacttttcattggtgacttaaaccgcttcaacattaaaactatcatcatagatgacttcgatgagattgaaacactactaaaactagttgagattaatcataagaagaaaagcttttttatctctggcgcagcccatgattatgggagttggggtgaaacaaaatctctttcttttgtaagttcgctcagtagtaagcttgtacgcaaagggtggaatgtcgtatcaggctttgggttgggtattggtagctcagtaatttgtggggctttagaagaaatatacgtcaatcaaaagcgatctatagcagatcaacttttattaaggccatttcctcaatcagcgtcgactcaatctttgccaacactatggactatgtatcgagaagacatgatctctcatgcaggcttcacgatcttggtctttggcaacaaactaaatgatggagaggtagtcttatcaaatggaatgttggaagaatatgaaatctcgaaaaagaaaaacaacataattcttccaatcggtgccactggatatatggctaagaaaatatgggagaaagagtaccaaagcctaagcgctgctgaaaatacagatgacaacttcttaactcttttctttgagctaggtgatgatacgaaatcgccagagcaaattctcgttgtaatacaaaacattattgaatattccataaaaaaaggagagcttcatggctag

SEQ ID NO: 22337 - DNA, 501 bp, Vibrio sp. J2-4
atggctagaaagtgtttttttagttttcagtataaacctgacaattggcgtgtatcacaagtacgcaatatcggtgcgatagaaggaaaccaaccagcaaaagataatgactgggaaactgttgttgggggcggtgacaagaaaatagaaaaatggatttcggaccagatgaagggacgtacttgtactgttattcttgctggttcaaacactgccaatagaaaatggattaaccacgagattatagagtcttggaataaagggatgggagtccttgttgttcatatccacaatctaaaaaactcatcaggtcaacagtcttcaaaaggggctaatccgctctattacatcacgcatggaccaacaggaaaaagactctctacgattgcacagtcttatgatccaccttactcaactagtacaaatgtatacgactacatcgcaaacaatatcgatgattggattgaagaagcaataaaaatacgaaaagaaaacgactaa

SEQ ID NO: 22338 - DNA, 687 bp, Vibrio sp. J2-4
ttggctagatgcacagcaccatcaagaggacatcgttcagcggccgccgcagctaattgcccggcatgtggtggacgctatagtcgttatggaagtggaggttacagttcatactcaacctcatcttactctccatctcgcattagtagtagcgaaacaagtagcagtaaaaagccaagttggtctaaatcaggctcttctgtatcttatacatccgctcaaattcagtctcttacaccgatacgcgaaactgtcgagactcgtgcagcacaacaaccagatcttcgagatgtattcttgtgccatgcatggggcgaccgtaaagacgcagctaaagaattgcatgatttacttgaagcagcaggtgttaaagtttggtttagcgaaaaggatcttggacttggtgtgccgatgatgcgcgctatcgataagggattggccaactctcgaataggacttgtattggtgactccagcgatgttggagcggcttccaaaagagagtgtcgccgacaaagaactttcaacactattagctggcaaccaacttattccaattgtacataacacatcttatgaagccctacgaaatgtcagccccatgctagcatccagaacaggtttggatacttctgaggattcaatggaagttgtagcagagaaaattgccgagttggtagatatctaa

SEQ ID NO: 22339 - DNA, 1449 bp, Vibrio sp. J2-26; identical to SEQ ID NO: 22336

SEQ ID NO: 22340 - DNA, 501 bp, Vibrio sp. J2-26; identical to SEQ ID NO: 22337

SEQ ID NO: 22341 - DNA, 687 bp, Vibrio sp. J2-26
ttggctagatgcacagcaccatcaagaggacatcgttcagcggccgccgcagctaattgcccggcatgtggtggacgctatagtcgttatggaagtggaggttacagttcatactcaacctcatcttactctccatctcgcattagtagtagtgaaacaagtagcagtaaaaagccaagttggtctaaatcaggctcttctgtatcttatacatccgctcaaattcagtctcttacaccgatacgcgaaactgtcgagactcgtgcagcacaacaaccagatcttcgagatgtattcttgtgccatgcatggggcgaccgtaaagacgcagctaaagaattgcatgatttacttgaagcagcaggtgttaaagtttggtttagcgaaaaggatcttggacttggtgtgccgatgatgcgcgctatcgataagggattggccaactctcgaataggacttgtattggtgactccagcgatgttggagcggcttccaaaagagagtgtcgccgacaaagaactttcaacactattagctggcaaccaacttattccaattgtacataacacatcttatgaagccctacgaaatgtcagccccatgctagcatccagaacaggtttggatacttctgaggattcaatggaagttgtagcagagaaaattgccgagttggtagatatctaa

SEQ ID NO: 22342 - DNA, 1428 bp, Pseudomonas syringae ICMP 19498
atggccttctctggcgaaatcaattcgtttatcaaagaatttgtcaaagatttaagtgaggataatgctgcggtctttgctggcgcgggcatgtcaaagggtgccggttttgttgattggaaagagttactgagagacatcgcggacgagctggatctgaagatcgagcaagaggacgacctgatttctctagcgcaatttcacgtgaacaaactcaaaggcccagcgaagctttctcgaaaaatcctggaagagttttccgaacaggctgaaccatcgacgacccatgagatcctggcccgcttgccaattcgcacgtactggacaacgaattacgacactcttgtcgaagatgcgttgaaacgcacctttaaggttccggacgtcaagcacagcgttgcgcaactcaacacgacccggccgaagcgagatgcggtggtgtacaagatgcacggtgacgcccatcacccgaacgacgccgttctctacaaagaacagtacgagcgttactaccgcacgcatgaggcctttgttacggcgttgagtggtgaccttgtctccaagactttcctgtttatcggcttcagctttactgatccgaatctggactacgtgcttagccgcctccacaccactaccaaacgcaaccactactgctttgtccgccgggaaccgatcgcccccaaagacgatgatgaagtcaaggcctacaagcgccgcaaacaggatctgcgtatcgacgacctgaagcgttacggtattcagtcattgcttatcgacaattatgaggacgtgcctgtcattttgcaggaaatcgaaagccgcttcctgaagaagacggtgttcatatctggcagtgccgaagatttcggcgaatggggtcagcaggaagctcaggaattcatccataccctctccgcctctctggtcaagaataacctacgcgttgtaaatggtttcggctggggcgtgggtagcgcagtaatcaacggtgcgctggaagcgatctacgccaatcctgagaaattctctgaagaccagttgatcatgcggccttttccgcaggtggcgacgaaggctgcagacttgcaacagctctgggagcaataccgccaacgcatgatcgggctgaccggcattgccatttttgtgtttggcaacaagcgaagcgcagaaggcaagatcattgaagcaggcggcgtaatcagggaggcgcagatcgccatagacaaggggtgcgtcatcattccggttggcgccacaggattcgcggctcaatcagtctggcaaatgatttccgcaagagatgagctcttccaaggtgttgagtggatgcgcccactgatcgaagagatctgcgacccacagatcaaacgcaaagaaattattatcaaaatcgtcgcaattcttaaccgcctagggaaataa

SEQ ID NO: 22343 - DNA, 483 bp, Pseudomonas syringae ICMP 19498
atggcaaaacgtaaggtgttctacagcttccatttcgacaacgatgtcatgcgtgtccagcagatccgcaacatgggggtcattgaaggcaacgcagcggttaccgccaacacttgggaggaagttaagaagaagggtgacgccgcgatcaaggcttggatcgaagaaaacatgagcgggaagtcctgtgtcgtagtgctcataggtagcgatacgtccaagcgtccttgggttcagtacgagatcaaaaaagcttgggaagaaggtaaagctttgcttggcgtctatattcacaacctctcgtgccccaataaaggaacgtccagccaaggtgcgaaccctttcgacctatacactttcaagacaggtgacaaggtagtgaaacctctggttttcaaccctaaatcttctgatgcttacaatgacatctcggcgaatctcgcgaactggattgagtccgccatcacgcaacgtaacggttga

SEQ ID NO: 22344 - DNA, 1428 bp, Pseudomonas sp. ICMP 3272; identical to SEQ ID NO: 22342

SEQ ID NO: 22345 - DNA, 483 bp, Pseudomonas sp. ICMP 3272; identical to SEQ ID NO: 22343

SEQ ID NO: 22346 - DNA, 1485 bp, Pseudomonas syringae ICMP 11293
atggatttttttgctttggaagagcgtgtggcgtcttacggctctgggggatacctgtttctggaggcgttccttaccaagcttcttcaaattgaagcggctcattacggtcaggaggtcaatagtctcgacactcacacatcactgttcgaagctgtcgcacctcaaggcattggggatctatctactcccattgttattgaatatatttttactgcaactaaagataaagtaaaattgttgttggacgcttttcgaatgcatggcgagccgggattcgggctgttaattattgcgccaaagatgcccgagtcaacactgatttacatgctccacgaacctgatgctcatggccgtgcccccgtggttatctggggggagaaaaaaatcaatgatctcatgcgcaaacataaagaggaggtgggcaagctcactgatagtttgttttcattacgtttaaaaatggccgtgactcgtccaacgaaaccgtggttggaagagcgagatcaacttattaagctagtcgcagagcagtatcggtctgggagtttttcgttagttttaggtgcgggggtatcgagtagcgcaggtttgccagactggaacactcttctaaattctctttttgtctctatgttggctcaagaaaatattggaggggataaaagcgatactgctcaagtctctcagattgtttctaggctaatggaggttgatgggccctccgctctgatgctggccaggtatatcaggaagggactttctgttgggtcgcagactgaacaacaaagcttcattgaagcactcactcatcagctatattctctacgtaacgaagttttccagatagagtcagagcttattacggccattgctcgtctctgcacgcctaccaggacaggtgccaaggtaaaatcaattctcacttataactttgatgatttcattgagcgcgctctgtcagggcgaggccttgtccataaaagtatttttgaggagtttgaaactcctagtgctgaggaactgccgatttaccatgttcacggttttttgcctgaagtcagagaaaaatattctaatttagatcgatgcactttggttttttcagaagaaggctatcatctgatttatcgcgattcttatcattggtcaaacttggtgcagttaaatggcttcaaggaaacatcgtgtcttatgattggtctttctctcactgatccgaatttgcgacgtttgttagaaatcgcgtccaaatccattgagaagccaaagcattttgcatttatgcgtcgtttgacctcaaaaaaattcaagagtggcgatcgtggacatcagttgaaaatcccaagctcggtgattgaccgtttcttggacaggcaccacagcacaaacgaagaactcatgcgggagctcggcgtaacggtgatctggtatgaggagtatagcgatattcctaaaattcttaatcgtatccgcgagggctaa

SEQ ID NO: 22347 - DNA, 939 bp, Pseudomonas syringae ICMP 11293
atgtcgcccaaagtattcgtaagtcatgcgagtgaagacaaagatcgttttgtattggatttcgcaaagcagttaagggctaacggagttgatgcgtggcttgacaaatgggaaatgctgccaggcgacagcctcataacaaagatttttgaagaagggatcaaggacgcccaagcagtaatagttgtattgtcgaaaaatagcgttgaaaagccttgggtcaagcatgagcttgatgccgcgtgtgtgaagcgaatcaatactgggagcaagttaatccccattgttatcgacgattgcaaagttcctgaagttttgaaagcgactctttgggagagcattagcgatacagcctcatatcagtccagccttgaacgtatcgttgcttcaatttttggtgcttcggacaagccggctctgggcaaaccaccggcatatgtgagcagatttggcgcaggtgtcgctggccacaataatgtggacagcctagtatgcaaactggcatgcgagtttgtgctggaaacaggctcaagacacgtaagcatctcagctttttgcaaagacggtgaatttattatcccagagcatcaactaagagaatcagttgaggtgctcggtgagcacgggacattcgatcttcagcatagtttgggagaaggatttccatctgtctcagtaactgattctggatttgagctttatgcccgcgaccatgtagggaactacgatgaggtgtttcgctcagtcgtctccgccattgtaaataatggatttacgactctttcgcaaatgagaagagaacttaatctcaggccattcttggttgaacatgttctgagaattcttgcgagtggaaacaaaatttctgtttcttggtatctcggtggggactgctcaattaacagcatctccccatctttgcgtcgatcactatcgtga

SEQ ID NO: 22348 - DNA, 1167 bp, Pseudomonas syringae ICMP 11292
atggatatcaagaagctccgtgaaaacaatatcgtggacagggtcgaggaggtcttgcaggcggcttattcgtcgaatcaggcgttcaatgcggtactcgatgaagccgagccgctggcatttaaaagcctgcgcgacccggaacacgagtacctgattaaggtaagcgatgccctgtactgggttgaacgcgacgcctatctggatgagctggatcactgggaggggcagtgtcaggtcaatcagcatgaagcggcggcgacctttatcaaagactcagatcagcaagccgtcttccttgacctggtggatgccattcgtttcgggcgaatcgcgccctttgtcggtgctgggctctccaaaccttgcggctacccgatgtggggtgaggcgctgcgcaaaatcgcacaaaagctcgatggtctggatgtgcaggatatcgagccgttgatggagcggtatgactatctgcaagctgcgcaagtgctgcacgaaacggacgctgaaattgtgcggcatttcatcaaaacagagtttcgtcagcgtggggcaatcaccgggccggtcacgctactgcctgatctcgccaacggctgcatcgttaccaccaatttcgatacggtcatcgaagacctgtttcgagaaataaagcagccgctggatggctatatgcacggtatgcagccgggtaacaacttcgttcagcggctgttgcgcggcgagcggtgcattctgaagctgcacggggacgccgggcaggccatcacccatgtattcacccagacccaataccaggtagcctacggtggggctgcgggtgagccctttgcattccaaaaccagttgcctcgagcgctgcggcagatctttgtcagccactcgttgctgttcttgggctgtagcctagagcaggacaaaacgcttgatctgttcaaatcagtggtcgatgaagcggcatttgaaatcccggatcactttgccctactcaatgagcctgtcacaccgcaagagcgggcccgcaaggaagcccggctgttgcagctgaaaattcggccactgtggtatccgacgccccacgatgttgagggcaagccggatcacagcctgctggaacaaattctcagactagctatcgctgtagcgcgtagacaggtggtatttggatga

SEQ ID NO: 22349 - DNA, 696 bp, Pseudomonas syringae ICMP 11292
atggcaagatgtacagcaccatcaagaggccatcgcacggcaagtgcggcagcggactgtccagcatgtagcagtcgcaattacagttatagatcaacttcatattcgccaccaccctactcatcttcgggaagcggtggcgggagctctgtcagaaatgccgggggtggcagcagtacaaggccacgctggtcgaaaccgggctcgtccttgccgtacacctccattcaagtgcagtcactatcaccaatccgcgaagccttagaggcaagtgcggcaaaacagcctgatcttcgtgatgtattcctgtgccatgcttgggacgaccggctgggcgctgccaaagagctacacgcgttgcttgtggcggaaggtgtcaaagtttggtttagcgagaaagacctcgccctcggcgtccctatgatgcgggcaatcgacaagggcttagcgaattcgcgaattggcctcgttcttgtgacccctgcactgctggcgcgccttcccagagaaagtgttgcagataaagagctttcggcactgctggcgggtaatcagctagttcccatcgtccacaacacgacgtatgaagctctgcgcaatgtcagcccgttactcgcgtcgagaaccggtctggacactgaggaagattccatggcgatagttgcgaaaaagatcgccgagctggtctctctctag

SEQ ID NO: 22350 - DNA, 1425 bp, Pectobacterium carotovorum subsp. brasiliense
atgattgatcgtatagttaaagaattagaagaacataattttgcaatttttgctggggctggtttatctgctcctgctgggtacttaaattggaaagaacttttgcgcccactatcagttgaattaaaattgaacattgacaaagaaactgatttagtttctttagcccaatattatgttaatgaaaatcatagccggagccggctaacagaacgattaattgatgagattggcatatcccaaaaagtaacaatcaaccatcagattttagcaaagttacctatatctacttattggaccacaaattatgatgatttaattgaaagatcattagaagatgagggtaaacttcccgataaaaaatttacaaaaaaccacttatctcaaacaaaaaaaggtcgctcagcaatcgtttataagatgcacggtgatgctagcttaccggaacaagcaattataactaaagatcaatatgaatcttactctttgcatttcgcaccgtttgtaacagcattatctggcgatttggtttcgaagacattcctattcctaggatttagcttcaccgaccctaacttagattatattttaagcagaattagaatccattttgagacaaaccaaagacagcatttttgcatttttagagaagtgaacagagatgattatcataatgatgatgaattttcatacaaccaactaaaacaacaatttgttattaaagatctcgctcgatttagtataaaagtaatattaataagtgcatggacagatttaacatctatactgaaagaaataacgaagagatttaggtgtaaaaatgtatttttatctgggagcgcacatgaatttggtaattgggaacaaaatgcaacagagatttttttatcaaaactcggcgaaattctaatacaggagggatttaaaataacatcaggtttgggtttaggtatcggtaatgcttttattagtggtgctattaaagaaatctatgataaaaaacatgctaaaattgacgactacttaaccatgaaggtctttcctcaatttgttgaggataaaaacacgagaaaaagaatttggagtttatggcgaaaggatttattaattcaagctggaattgcaatatttttcatgggaaataaatcaacaaaagatattaattctgaaaaatcaaacattactctagcagatggaatggaagaggaatttcaaatagctaagaactttggattaaaaataattccaattggtgctagcggttataaagcaaaagaattatttgaccgagtcatggccgacttcaatacttattatccaaatgcgacacctgaatttcatgatgcatttactaaattagatgaatctgttgacgagccaataaaattactatctaaaattcacaatatcattaaattaatttaa

SEQ ID NO: 22351 - DNA, 603 bp, Pectobacterium carotovorum subsp. brasiliense; identical to SEQ ID NO: 20458

SEQ ID NO: 22352 - DNA, 1425 bp, Pseudomonas aeruginosa
atgaaattcagtggcgagataaatagtttcattcgtgacttcgttaaagatttgagcgaaaacaatgctgcagtttttgccggggccggactgtctagatcctctggctacgtaaactggaaagaacttctcacagatatagcagaagagcttgaattaaaaatcgatcttgaaagcgaccttatttctctggcccaatttcatgtaaataagaccaagggccctgcaaaacttacccgaaaaattgttgaggagttctctcatcaagcagagccctccgaaaatcacaaaatcttagcgcgccttcctataagaacttactggacaaccaactacgacagcttaattgaagattctctaaaacagtcctacaaggttgccgacgttaaacacaagctaagccaattgaatatcacccgcccgaagcgtgatgcggtaatctacaagatgcacggctgcgcgtcagacgccggcaatgccattctttataaacagcagtatgaaacttattaccgcgaccatgagccatttgtgaccgccctcagcggcgatttagtttcaaaaaccttcctatttattggcttcagcttctccgacccaaacttggactatgtgctcagccgactgcacacatcaacgatcaaagcacactactgcttcattaagcgtgaagacgagggggtaggtgacgatgaggagatgacgcaatacaaacgacgcaagcaagacttccgaatcgaagatttgcgccggtacggcatccaaccaattctggttgaaaattactccgacatcaccgaaatcctgttggaaattgaacggcggttcttaaagaaaaccaccttcatctccggcagtgcagagcagtatggcgaatggggaaaagagcagtctttaaaatttattcatactttatcttctgagcttattctgaaagagcgtcggattgttaacggatttggctggggagtcggaagcgctgttataaacggcgccctagatgcgatatataaaaaccctgagaagtactcagaggaccagttagtaatgcgccccttcccacagtttgcaagctcgggagaggatttaaggctgctatgggaagagtaccgacaacgtatgatcgggttggcgggcgtatgtatatttatatttggcaataaggtcgatgacggcaaactcgtgatcgcgaacggagtaatccgtgaagcggaaatcgcaatagagcaaggtcggattgttatccctatagccgcgacggggttcgccgcggcagagatctacaaactggtcaaggttaagccggagttatacgacgctcataaatggctaattgcagtcattgatgagctcgcagatcctgcccttgcatggacagacattgtgaaaaaagtctctgacgcgattataaaattggacaagtaa

SEQ ID NO: 22353 - DNA, 492 bp, Pseudomonas aeruginosa
atggctcgcaaatgtttcttcagtttccactacgcccctgacaactggcgggcaagcaccattcgtgggatcggggcaattgaggggaaccagccagcgctggataacgattgggaaaaggtgactaaaggtggtgatgctcagatccagaaatggattgactctcagatggagggacgcacctgcgctgttatcctaattggcgagaacactgccaaacgaaaatggatagattatgaaataaaaaaagcatgggccaataaaatcggcgtgctcggcatatatatccatggcatcaaggattcatcaggaaacatttccaaaaaaggcctcaacccttttgcccactttgaattaggcggcaaaaatttctcgtcgatcgtacagacatacgacccaataggcgccgatagcaaagcaagatataactacattgcagacaatattgattcttggatcgagaaggccatcggaattcgcaaaaacaactaa

SEQ ID NO: 22354 - DNA, 1449 bp, Pseudomonas aeruginosa; identical to SEQ ID NO: 18731

SEQ ID NO: 22355 - DNA, 477 bp, Pseudomonas aeruginosa; identical to SEQ ID NO: 18732

SEQ ID NO: 22356 - DNA, 540 bp, Pseudomonas aeruginosa; identical to SEQ ID NO: 18733

SEQ ID NO: 22357 - DNA, 552 bp, Pseudomonas aeruginosa; identical to SEQ ID NO: 18734

SEQ ID NO: 22358 - DNA, 855 bp, Pseudomonas aeruginosa; identical to SEQ ID NO: 18819

SEQ ID NO: 22359 - DNA, 1449 bp, Pseudomonas aeruginosa; identical to SEQ ID NO: 18731

SEQ ID NO: 22360 - DNA, 477 bp, Pseudomonas aeruginosa; identical to SEQ ID NO: 18732

SEQ ID NO: 22361 - DNA, 552 bp, Pseudomonas aeruginosa; identical to SEQ ID NO: 18734

SEQ ID NO: 22362 - DNA, 540 bp, Pseudomonas aeruginosa; identical to SEQ ID NO: 18733

SEQ ID NO: 22363 - DNA, 855 bp, Pseudomonas aeruginosa; identical to SEQ ID NO: 18819

SEQ ID NO: 22364 - DNA, 1449 bp, Pseudomonas aeruginosa; identical to SEQ ID NO: 18731

SEQ ID NO: 22365 - DNA, 477 bp, Pseudomonas aeruginosa; identical to SEQ ID NO: 18732

SEQ ID NO: 22366 - DNA, 552 bp, Pseudomonas aeruginosa; identical to SEQ ID NO: 18734

SEQ ID NO: 22367 - DNA, 540 bp, Pseudomonas aeruginosa; identical to SEQ ID NO: 18733

SEQ ID NO: 22368 - DNA, 855 bp, Pseudomonas aeruginosa; identical to SEQ ID NO: 18819

SEQ ID NO: 22369 - DNA, 1464 bp, Pseudomonas aeruginosa; identical to SEQ ID NO: 18736

SEQ ID NO: 22370 - DNA, 504 bp, Pseudomonas aeruginosa; identical to SEQ ID NO: 18737

SEQ ID NO: 22371 - DNA, 552 bp, Pseudomonas aeruginosa; identical to SEQ ID NO: 18738

SEQ ID NO: 22372 - DNA, 1506 bp, Pelomonas sp. Root1217
gtgggggggcagcgcgtggcaagtagcaagggtccgaagaagttcacgccggatatcgaggcgttcatcgtcagtttcgccgcggacatccgcgatggcgcggccgcaatctttgccggggcggggctatcggtcgaaagcggcttcgtgaactggtcagcgttgctgcgcgacattgcccacgagcttgggctcgacgtcgatcgcgaaaccaacctggtcgcggtggcgcagtaccacctcaatgagcgtcgcaaccgcagccggatcaaccagaagatcgtcgacgagttcagcgccggccactccatcaatgaaagccacgagatcctggcgaggctgccgatcgcgacgtactggaccaccaactacgacgcgatgcttgagaccgcgctcgcggcaaccggcaagattgtcgacgtcaaacattccgtgccgcagctgaagaccgtcaagcgcgggcgttcggtcatcctctacaagatgcacggtgacgcgtcggacccggacaacgcggtgctgacgaaggacgactatgaagggtactttcgcgaccgggaaccgttcgtggcggcgctgtcgggcgacctcgtcgcaaaaacgatgctgttcctcggcttcagcttcaccgatccgaacatcgactatgtgctgagccgcgtgcgagtcgtgctgcgcagcgccccgaagcagcattactgcatcctgaggcgtgagcagcgccgcacgggcgagaaggttgagaactttcactatcgtcagcgccagcaggactatttcgtgaaggacctggcgcgtgtgggcattcacgcgctgatggtcgatgagtatggcgatgtgaagcgcatcctgcgggctgtcgaggagcgctaccgcaaccgcagcgtcttcatcgcgggcagcgccgccgaatttgatccgtgggacacggacacggcgaatcgctttctcgaatcgcttgccaaggcgctcatcggcaagggcatggacatagtcaccggcttcggcctcggcgtcggtcctccgatcatcgcaggcgcctacggcgagatcctgcttcaccccggcgcgcgcagcttgtcgcagctgcaggcgcatccgtttccggcggacaccggcaccgcccctgcccggctcgcgctctaccagcagcaccgcgagcggatgatcggcgcggcgggcgtcatcgtccttgtcttcggcaacaagcgggacggatcgggtgcgctggtgccggccgacggcatgcgcgccgagctggagatcgcgcgggcgatggggctgcacgtgatcgctgctggcgctacaggctgggtggcgaaggagatcgcggcggcgctgtcgccgccgcccggcgccaccgagagctacaggaaggccttcctggccgccaacgacccgaagagcaagcccgaccagatcgtgcgggctatcgtgtcgatgattgaggagttcgcgaaatcaactactgcgggcggccgtccgcctgctaagcgagggaagtga

SEQ ID NO: 22373 - DNA, 477 bp, Pelomonas sp. Root1217
atggcacggagagtcttctttagtttccattacgagcgtgatgtgcgccgcatcgtgcaggtccgtaattcttgggtggtcaggcccggagacgatgcgcagcccttctacgacaaggcggagtttgaggaggcgaagaaacgcgccggcggcattgagcagtggatcgaggagcagttgaaaggctgctccgtcacggtggtgctcttcggggccgagacctacgagcgcgactgggtcaagcacgagatcctgcgcagctatcaactcggcaagggaatgcttgccatcgacctccagggcgtcaaggacccgcagaagggagtcgacgtacagggtcgcaatccgcttctgcactggcaggccaacaatgttccgttcacgcagctctacaagacctatagctgggttcgcgacgacggttatcacaacatgccggcttggattgaggctgctgccaagaccgcaggacggtag

SEQ ID NO: 22374 - DNA, 1791 bp, Afipia sp. Root123D2; identical to SEQ ID NO: 20532

SEQ ID NO: 22375 - DNA, 1113 bp, Afipia sp. Root123D2; identical to SEQ ID NO: 20533

SEQ ID NO: 22376 - DNA, 1443 bp, Sphingomonas sp. Leaf230
gtgcgcaaagacatcacggggttcatcgacgattacatcaaggagatggaggccgggcaggctgccgttttcgctggcgccgggctgtccgttcccgccgggttcgttgactggcgtcatcttctcgcgcccctggcggtcgagctggatctagacatcgcgcaggagacggatttcatcgcgctggcccagtttcacgtcaacgcgaactcgaacaaccggtctcaactcaacaaggcgatcattgaggcattctccaccggcgcaaagccgactgaaagtcatcgattgctcgccggcctgccgatcgcgacttggtggacgaccaactacgacaatctgatcgagcgcgcgctctcgggcgcgggtaagatcccggacgtcaagcacaccgttgcgcaacttgcgaatacaaagccacgccgtgatgcgatcgttttcaagatgcatggggatgttgatcatcctgatcaagccgtcgcgacgcgggatgactacgaaagatatgccggcagccgtggtgcgtacataaacgcgttgtccggtgacttcgtcaacaagaccttcctgtttctcggtttcagtttcaccgatcccaatctcgaggcggtgctttcaaggatacgccaaaccttcgaaggcaaccagcgtcgccattacgcgatcttcaagaaccggacgcagaatgcagacgaggacgatgccgtcttcatcaacgcgaagacgcggcagagcttggtgctacgcgacctcgaacgtttcaacatcaagccgctgatgatagatgactaccccgaggtgccggtcatccttggagagttggtgaagcgctatcgccgacgaaccatcttcgtttcggccagcgcgtcggacttcggggtttggggagaggcccaggtcacgggtttcatgcgccggcttggcgcgaccgtcatggacagcgaagttcgactggtgaccggtttgggtcttggcgtcggcaacgcgttgttcaccggcgccgtggagcaggtcgtccgcaagggccaggggcacatggaagaccggataatagtaaggccgtttccgcaggcactgccagatcctgatcgggaagacctttgggagacgtatcgccagacgatcgtcgcggaggcaggcgtcgccctcttcatgttcggcaacaaggaggtcggcggggcaatccagaatgcgcgaggcgtcgagcgggagttcgagattgcgcgcgagcatggccttgtggtgctgccgatcggcgcgacgggttcgatggcttccgtactcgcgtcgcgagcgctcgccgacccggacgtgtacctttcggaactggatggcactcaacgtgcgcaactagccgagttggcaaagccggtggctgatctcgcgacgttgatcgagccgatcatggccctcgtgcgaggactgaagggtgttcgcaaatga

SEQ ID NO: 22377 - DNA, 477 bp, Sphingomonas sp. Leaf230
atggccaagcagtgttttctcagctttcattacaagcccgatgtgtggcgcgtctcgcaggtgcgggagattggcacgatcgaagagcagcccctgttggcatccaacaagtgggaggagatcaaggagaagggcagcgacgccatcaaggcgtggatcgacacgaacatgaagggcaaaaaatgtctggttgtccttgtcggtacgaagacggctggtcgggcgtgggtgaactacgaaatcaagaaggcttggaaggacggtctcggcgtgctggccattcacatccacaacctgaaggattcttcgggcaatcagtcgaccaaggggtctaacccgttctccggcctcttcgtcgatggcgagtccgtaaccgggaaggtctacgatccgccgttcgtgacgagcacgaacgtctacaagcacatccaggacaacattgcatcgtgggtggatacggccgtcgcggcacgctga

SEQ ID NO: 22378 - DNA, 1431 bp, Rhizobium sp. Leaf386
atgcgggatgacataaagggatttgttgccggttttcttgcggaaatcgaggcaggtaacgcagcgatctttgccggggccggactgtcggctcctgcaggatttgtggattgggccaacctggtccgaccgctagccgaagaacttcatctcgatgttgacaaagagtccgatcttgtcgcggtggcacaatttcatgtgaacgcgaaccaccagaatcggcacgctcttcacactgctatcgtcaatgctttctcggcggacaatccgcccaccgccaatcaccggctgctagcacggcttcccatcacgacctactggacgacaaattacgacaaactgatcgagactgcgttgagagacggaggcaagattgtcgatgtcaaatgggctgtgccgcagctagcaaacacgcagccccgccgcgatgccatcgtttacaagatgcacggtgatgttgaccggccggatgaagccgttgcgacgcgcgatgattacgaacgttacgtgaatgaacgcggcgcgttcgtcaatgcattggccggcgatcttgtgtcgaaaacattcctgttccttgggttcagttttacagacccgaatcttgagcaggtgttggcacgagtgcgggtcacgttcaaaaccaaccagcgtcgtcactatgcaatctttcgcaaccgcagccgccgcgcgggtgagagcgaggccgagtttgaatatggaaaaattcgccaagcgctcgtgctcgaggatctgaagcgattcaacattcgccccttgctggtcgacgagtatagcgagattactgacatcctcgccgagattgaacggcagtaccgtggccggacgattttcatttcgtcgagcgcaagtgacttcgcaccatggggcgagccggcggtcgcgggctttatgcgaaccctgggttcggcgttgatctcggccaagtttcgcatcgcaaccggcatgggccttggcgtcggtaacgccctatttaccggcgcacttgaggccgtctacgcggaccgccaagggcatctcgaagatcgaatactgatgcggccctttccgcaatacatcgccgacgaggcgaagcggaaagaggtttgggaaatctatcgacaggacataatttcgtcggcaggcatcgcggtgttcttgttcggcaacaagaatgctggcgaaaacaccgtcatcgccgacggcatgatccgcgagttcgaaattgcccgacaacacggtctgacgtgtattcccgtgggcgccacgggctacgccgccgccgaactagccaaccgcctgattggtgacggcgctgacggagacgcaaccctgctcgacgcgctgaaggaaatgcgcgacccgcgccagaatctcaatgaactgatcgaccccatcctcaagcttgccgccgcggcccggaagataaggtaa

SEQ ID NO: 22379 - DNA, 618 bp, Rhizobium sp. Leaf386
atgcatgaagttttcatcagctaccatcatgccaacgaccaatgggccaaaaaccaattgcaacagtgggccaaccaatatggcctgttcactgacgtatccgtcgatacgaacgatgttagtgacacgcttccgactgaaagcatccgccggatcatccgggatgattatctgatggattcaagcgtcaccatcgttctggtcggcacggaaaccaaaggaagaaagcacgtcgattgggaaatctactccagcatgtttgatggagcggtcaacaagaagtccggcatcctcgttgttcagcttccgtcgaccaatcctacatattacactgcggcacatgaagtcgagaagagcacggtctatcctgattgcacctcgtggagcaccattaccgaccgggcggaatatgaacggcgttacccatgccttcctgcccgcatcatcgataacctactggctccaaaagcgaaggtttccgtgaccacgtgggatcgcatcgcaggaaatttgaacaatctcgtgaccatgattgatgccgcccatgacgagagagcgctttgcgaatatgacctttcgcggccgatgcgctcgaacaatgccccggcattcatttaa

SEQ ID NO: 22380 - DNA, 525 bp, Rhizobium sp. Leaf386
ttgagaacggctaaaaccgttctcaaggaggaagtcgccacagcaaaaaccaagaacagcttcgacatttttctcagtcattcgacttctgacgctgagatcattctgggcgtcaaaggcgtactcgaggactatggcaaaacggtctacgtcgactggctagaagatccgcaattgaacagaaccaatgtcaccgctgcaaccgcggaggttattcggctgcggatgcggcagtgtaagtccctcgtgtacgtgcacactgcaaattccggctcctccaaatggatgccttgggaactgggctattttgacggattcaacggtgccgtagcgatattacccgtaacgcaaagtcagcaggctagctatgaaggccaagaataccttggtatctatccatatttagacgaggctccagctaaggggaacacaaccaacgaaatgtggattaacaagagcagttcagcgtctcagccgtggaccacttggatcagcgcccccagcgcattccgcaagacgatctga

SEQ ID NO: 22381 - DNA, 1005 bp, Arthrobacter sp. Soil762
atgggcgacgtcgacagcaacatactgaccgacatgatcgtcgcggcggaaaaggtcactgccgccctccaagaacaacccggactatttgaaaagtggttagaggaaagcgtcggttccttgaaatgcaaggatcccgccttgcccaacgagttggcgcggctcgcccgcgacggcgcattgcttgtcactacaaactatgacgacatccttgctgacgctggggccctcaaaatcgttaccgagtccgacggaggagcggagctcagaaaagctgcgaaaagactttcagcggccatcgttcatttgcacggacactggaaatttcctaactcggttgtctttggaaccagttcgtatacgcggattgcttcgagtgaatccgctaaagctttcatgacaaccctcctctacgcagaaactattgtcttcgtgggcgtaggagaaggcctgtgcgatcccaactttgaaggactacgcaagtggtgtgcagcaattttgggtaatacaggcgatccgcattaccgcctagctagggaaggcgaactggcggccatagccgctcagcacgaagctggtgagaacatcaaggtagtttcctacggggcggactacaaggatttgcagccgttcctggcatctgtctcgccatcagtcccgacgcgatcagcgggtgtcgcaggaggccaggctctgcagtcacgtgcggcacctacacccacacctctatccttcgcgacacgtgccaaagagaccgaggacagggtgcggctgcgggctcatatcgaggctcttgcgcccgtgcttacttcgttgaacgctgcgtcgtcagacgatcaagaacgattttcagatgccgctgtctttgaggacgtattgcgtcaaccactggaagaaatcacccgcgctgatccgagtgagctcgctggcacggatttgtccagtgcagtggcctttgctcagcgacttcgcaacctcgtcagcttggtagacatcgggacctga

SEQ ID NO: 22382 - DNA, 957 bp, Arthrobacter sp. Soil762
gtgacgaataccgatcagacgcaagcaccttgggtcttcgtctcttactcttgggacagtgccgctcactcggattgggtgctcgccttggccactcgcctccgaagtgacggagtcaacgtgatccttgaccgctgggacacccgccttgggagcgacctgagcctcttcatggaaagagcagccgacagcgaataccgcatcctcgctgtggtgacgtcggcctacgtgaggaaggccgacgccgcggaaggtggagttggttacgaacgaaagatgattacacccagtctcatgaaggatcttcatggacaccgagtggtccccgtgattcgggacaacccggaaggggaactcccgcgtttcctcggtgcggccaagtacgtcgatttgcgtgacgatgaactgcacgaggacggatactacgcgctactccaagaactccatggtctccagccgacgccaaagcctccactcgggaagaacccatttcgactgctcgccgaggacgaagtgcccgtcgcgttgcggcacgaccctagccgctacgtagcgcccgctttcgaagggaaagtctcgttcgactacagcaacaacgacggacgcttcgtgatcgggaccggggaacgatcatttaccatcgcgttttccaccgcaggacacggtgccatttatgtgtacaccgacccgtcagatattttgacagttgccctggctccgggggtcaagagcccgggagaggtaaacgacgcatctgcatacgacgggtcctcccgcatccgcacgattcaagtcggggacgcggcgatcctacgcaaccaaaacaactattgggccgccgtttttgtggatgaggttctcacgagagaaagcagtcccacgggtaagcccaagatcgcgtttcgttacatcatccccgcggttcctgcgccggcgttcgtgacaccggcctcataa

SEQ ID NO: 22383 - DNA, 723 bp, Mycoplasma capricolum subsp. capripneumoniae
atgaaacgagtaagtaagcaagaaaacgaaacaaacgaggattttgggtataggcttgtaaaacaaaacttacaaattcaagatctaagacgttatggaatatttacttgtcttgttgatgagtatgataaaataacagaaattttacaaactcttgtagacatgtacaaaagaaaaacaatttttatttctggtagtgctgataaatattatggttttagaaatgaaaatgatgccaaattatttcttcatacattagcatacaagttagcagaaaataattatcacatagttaatggatatggtaaaggaattggagatttcttgctttctggaataacagagttttgtttgaaaaataataagaaaatctcagatcatttaactgttgctccatttccacaaaataaaatttcaaaagcaaatatagaagaactttatataaaaaatagagaacaaatgatagaaaaatgtggtattgctatttttgtttttggaaataaagataacaataacgcagaaggaataataaaagaatatcaattaacaaatcaaaaaaagttaattccaattcctataaaaattacaggtggtagtgcaaagcaaatttttgatttagaatattcaaatgatattgatgaaattaaaaatgctattgagaaagcaaatagtgaaactacagataacataaacaaaattgtagaaaatattctaaagtcataa

SEQ ID NO: 22384 - DNA, 471 bp, Mycoplasma capricolum subsp. capripneumoniae; identical to SEQ ID NO: 18898

SEQ ID NO: 22385 - DNA, 723 bp, Mycoplasma capricolum subsp. capripneumoniae; identical to SEQ ID NO: 18897

SEQ ID NO: 22386 - DNA, 471 bp, Mycoplasma capricolum subsp. capripneumoniae
atggcgagaaaaagttttttcagctttcactatgataatgatgtttgaagggtaaatgtagttagaaatagctgagttattagaggtaagaaaaaagcggggtttatagataaggctgaatttgaaaaaaccaaacttgaaaatgagttaacaattaaaaaatgaattgataaacagttaatgggaactagtgttacagttgctctcattggtagtgaaacattaaatagaaaatttgtacaatatgaaatacaagaaagtataaagagaaaaaatggtattattggaattagcattggtagaataaaaaaccaaaatagacttacaagtatttctcaaagtccatatacaatagtgaatgaatataggtttattgatatctgtgacggtttttatgattatgttctagatgatggctattcaaatatggggaaatgaatagaacaagcagcaaaaaagaaaggaaaataa

SEQ ID NO: 22387 - DNA, 924 bp, Actinobacillus pleuropneumoniae serovar 8; identical to SEQ ID NO: 20475

SEQ ID NO: 22388 - DNA, 498 bp, Actinobacillus pleuropneumoniae serovar 8; identical to SEQ ID NO: 18801

SEQ ID NO: 22389 - DNA, 645 bp, Actinobacillus pleuropneumoniae serovar 8; identical to SEQ ID NO: 18802

SEQ ID NO: 22390 - DNA, 1449 bp, Escherichia coli; identical to SEQ ID NO: 20606

SEQ ID NO: 22391 - DNA, 501 bp, Escherichia coli; identical to SEQ ID NO: 20607

SEQ ID NO: 22392 - DNA, 1437 bp, Enterococcus faecium; identical to SEQ ID NO: 18577

SEQ ID NO: 22393 - DNA, 486 bp, Enterococcus faecium; identical to SEQ ID NO: 18578

SEQ ID NO: 22394 - DNA, 852 bp, Enterococcus faecium
ttgtataaggcatatgaattggattttacaaatgctgacttaaatgcattctcctcaagctcgcaatcatatacacatgtagtaaatcaaatagatcacaaccaaaaatctattaacaagagaatagaaaatctatttgaaagtgaaaatgatttagttgattattattctaaggacagcaaaattctagatgcagacgaaattattaaagattggtttccaactataaaagcagatatttttatatctcactctcatgctgatgaaaaattagctatacgttttgcatcatggctatttgaaaattttggtcttactgcatttattgattcttcggtttggggatacagttctgatttattaaaaaaaatagaccaaaaatattgctataaggaacaaacaaaaacatatgattatgataaaagaaatgtaacaactagtcatgttcatatgatgctttctacagctttaaataatatgattgatagtacagaatgtctgttttttcttaatacacctaattcaattagtttgagcaatgaaatcactaatgaacagaaatttacgtattcgccatggctatatagcgaactgacgacagcttcaatagtggaaaaaaagaatccacgattggaaagtaatcctcaaatgagcaccgagratgttagaagcattatarakcactattcttcgcaagaaaatctgcaaataaaatattctttaaatttaagtgaattaacktatttacgaaaagctgatttgaaaaaatgggctttagatgctgtggaatgcactaaaggaagtaatacattagatattttawawaaaaacaccattttcactaatctctaa

SEQ ID NO: 22395 - DNA, 1437 bp, Enterococcus faecium; identical to SEQ ID NO: 18577

SEQ ID NO: 22396 - DNA, 486 bp, Enterococcus faecium; identical to SEQ ID NO: 18578

SEQ ID NO: 22397 - DNA, 852 bp, Enterococcus faecium; identical to SEQ ID NO: 18579

SEQ ID NO: 22398 - DNA, 1437 bp, Enterococcus faecium; identical to SEQ ID NO: 18577

SEQ ID NO: 22399 - DNA, 486 bp, Enterococcus faecium; identical to SEQ ID NO: 18578

SEQ ID NO: 22400 - DNA, 852 bp, Enterococcus faecium; identical to SEQ ID NO: 18579

SEQ ID NO: 22401 - DNA, 990 bp, Enterococcus faecium
gatatagatgatgtcagttcgacagtaataacaagagatgattatgaaaaatatgatgatgattcgtacgcgttatttaaagaaactttaaaaggagatttgttaacaaaaacttttctctttttaggatttagttttacagaccctaatttagaaagaattttatcagatataagatgggttttgagagaaaaccaaagacctcattattgtataatgagaaaaatattaaaggaaaattttgtcgattctgaggatttttttgatcaagagagatataattatgaactgacaaaaagaagactacaaatcaatgatttgtccagattttcgataaacgttgttgaagtagatgattattctgagattactgatattttgaaaagtattagaaaaaagtatttgagaaaaactatttttatttcgggaagtgctgttgattatactccatttacatctgaatcgaaaggattaaaatttgtcgagaaattagcatataggctttctgaatccggttatagaatagtatcaggttacggacttggaattggtaatagtattgtttcaggagttctaaagcagagaagaaatttaagaaaaaataacatacaagacgtactttctttaagaccacttccccttgatatgcctcatgagtggagaagatatcgagaaaacattattgcagagtctgggattagtatttttgtttttggaaacaaacttgaatcaggtgaaatagttacagcagatggaatgattgaagaatttgaattatctgttcaaaatgaaaatatagtagttccgattggatttaccaaaggtgcaagtaaggttttgtttgataagattcaagagaatttcagtgattattttgatgattccttaaaaagtaaatttcaagcgctagaaaaattagatactgaaggagaagtagataaaaaagttgaacaaattgtcagtttaataratagtattcaggaggattaa

SEQ ID NO: 22402 - DNA, 486 bp, Enterococcus faecium; identical to SEQ ID NO: 18578

SEQ ID NO: 22403 - DNA, 945 bp, Enterococcus faecium
gaaaaatatgatgatgattcgtacgcgttatttaaagaaactttaaaaggagatttgttaacaaaaacttttctctttttaggatttagttttacagaccctaatttagaaagaattttatcagatataagatgggttttgagagaaaaccaaagacctcattattgtataatgagaaaaatattaaaggaaaattttgtcgattctgaggatttttttgatcaagagagatataattatgaactgacaaaaagaagactacaaatcaatgatttgtccagattttcgataaacgttgttgaagtagatgattattctgagattactgatattttgaaaagtattagaaaaaagtatttgagaaaaactatttttatttcgggaagtgctgttgattatactccatttacatctgaatcgaaaggattaaaatttgtcgagaaattagcatataggctttctgaatccggttatagaatagtatcaggttacggacttggaattggtaatagtattgtttcaggagttctaaagcagagaagaaatttaagaaaaaataacatacaagacgtactttctttaagaccacttccccttgatatgcctcatgagtggagaagatatcgagaaaacattattgcagagtctgggattagtatttttgtttttggaaacaaacttgaatcaggtgaaatagttacagcagatggaatgattgaagaatttgaattatctgttcaaaatgaaaatatagtagttccgattggatttaccaaaggtgcaagtaaggttttgtttgataagattcaagagaatttcagtgattattttgatgattccttaaaaagtaaatttcaagcgctagaaaaattagatactgaaggagaagtagataaaaaagttgaacaaattgtcagtttaataaatagtattcaggaggattaa

SEQ ID NO: 22404 - DNA, 486 bp, Enterococcus faecium; identical to SEQ ID NO: 18578

SEQ ID NO: 22405 - DNA, 1437 bp, Enterococcus faecium; identical to SEQ ID NO: 18577

SEQ ID NO: 22406 - DNA, 486 bp, Enterococcus faecium; identical to SEQ ID NO: 18578

SEQ ID NO: 22407 - DNA, 1437 bp, Enterococcus faecium; identical to SEQ ID NO: 18577

SEQ ID NO: 22408 - DNA, 486 bp, Enterococcus faecium; identical to SEQ ID NO: 18578

SEQ ID NO: 22409 - DNA, 852 bp, Enterococcus faecium; identical to SEQ ID NO: 18579

SEQ ID NO: 22410 - DNA, 1437 bp, Enterococcus faecium; identical to SEQ ID NO: 18577

SEQ ID NO: 22411 - DNA, 341 bp, Enterococcus faecium
atggtgagaagggttttttttagtttccattatgcagatgtaacaagagcaatggtagttagaaacagctggactttgcgaggaacaaaggaagctggttttgtagataaggctgaatttgagaaagttaaacgtaatggagatattgctataaaaaactggatagataatcaattaattggaacatcagtgactgtggtgctgataggtaaagaaactcttgatcgagaatatgttaaatatgaaatccaggagagttataagcgaggaaatgctattttggccgttaatataggtaaaataaaagattttaaccagatgacaactactagtcaatcagt

SEQ ID NO: 22412 - DNA, 1437 bp, Enterococcus faecium; identical to SEQ ID NO: 18577

SEQ ID NO: 22413 - DNA, 486 bp, Enterococcus faecium; identical to SEQ ID NO: 18578

SEQ ID NO: 22414 - DNA, 852 bp, Enterococcus faecium; identical to SEQ ID NO: 18579

SEQ ID NO: 22415 - DNA, 1437 bp, Enterococcus faecium; identical to SEQ ID NO: 18577

SEQ ID NO: 22416 - DNA, 486 bp, Enterococcus faecium; identical to SEQ ID NO: 18578

SEQ ID NO: 22417 - DNA, 852 bp, Enterococcus faecium; identical to SEQ ID NO: 18579

SEQ ID NO: 22418 - DNA, 1437 bp, Enterococcus faecium; identical to SEQ ID NO: 18577

SEQ ID NO: 22419 - DNA, 486 bp, Enterococcus faecium; identical to SEQ ID NO: 18578

SEQ ID NO: 22420 - DNA, 852 bp, Enterococcus faecium; identical to SEQ ID NO: 18579

SEQ ID NO: 22421 - DNA, 1437 bp, Enterococcus faecium; identical to SEQ ID NO: 18577

SEQ ID NO: 22422 - DNA, 486 bp, Enterococcus faecium; identical to SEQ ID NO: 18578

SEQ ID NO: 22423 - DNA, 852 bp, Enterococcus faecium; identical to SEQ ID NO: 18579

SEQ ID NO: 22424 - DNA, 1470 bp, Staphylococcus aureus; identical to SEQ ID NO: 18961

SEQ ID NO: 22425 - DNA, 609 bp, Staphylococcus aureus; identical to SEQ ID NO: 18624

SEQ ID NO: 22426 - DNA, 1035 bp, Staphylococcus aureus; identical to SEQ ID NO: 18625

SEQ ID NO: 22427 - DNA, 1434 bp, Legionella quateirensis
atgaatcgagacattaagcagttcataaagcaataccttaaggaaattgaagcagacaatgctgcaatatttgcaggtgccggattgtcagcgcccgcaggatttgttaactggaaagagttgctgagacccttagtagatgagctcggattagatattgataaagaacaagatttagtcagccttgcacaatttcataataacgaacatggtcgccaccggatcaatcaacaactgattaatgaactctcctctaacaaagaaccctctgatagccaccgtatcttagccaaactaccaataagcacttattggacaaccaactacgatcgtttgattgaagatgccttaaaagaaaatggaaagattgtagacgctaaatatacaaacaatcacttagccacaacaaagccaagacgagatgttgtagtctacaaaatgcatggtgacatagaacatccagatcaaacagtactaacgaaagatgactacgaaaaatacaccattgattatgagcctttcgtgaatgcactttcaggcgacttggtatccaaaacatttttgtttctaggtttcagttttactgatccaaacttagactacatcctcagtcggattaggatttactttaaaaaaaatcaacgccagcactattgtatttttaaatcctgcaatgcaaaagaatacgattctgatgccgaattccagcatgctaatactaaacagcagttagttattagtgacttacgtcgtttcaatataaaggctttgcttgtagaagaatactcagaaatacctaagatactcaacgccattgagcgtgcatttagccgaaaaaccgtattcatttctggtagtgcaagtgactttggtcagtggtcgcaagtggatacagaattagctctcagcacattgagtattacaatgattgatcaaggctataaaattgcaactggagtcggtcttggcatcggcaatgccattatttcaggagcaatttctgaaatatatcgtaatggcattggacacgttgaagactttcttatcatgcgaccctttcctcagttcattgctgatgaagatgaacgcgaagcaacttggaagcaatatcgcaaagacctcattggacatgcaggtatagcattgttcatcatgggaaacaagattattaacgggaaagtagccaatgctgatggcgtaagaaaagaatttgaaatagcaaaagatttaggtttgttgcttgtacctgttggcggcagtgaattcatgtcacgagaactctgggaagagataaatactagtttcggcgactattttcctaattcatcagatgacattaagaaagcattcgaagctttaggtaagcccatagaaaaaccaaacgaactgatatctatcgtaatagattttcttaatttattaagcaaggagtaa

SEQ ID NO: 22428 - DNA, 492 bp, Legionella quateirensis
atggcaaggaaagtattttttagcttccactatgaaaatgatattcggcgagttgcccaagtccgaaattcttggcgcattagaaatggaaacgacacccagcctttcatggataaggccgattgggaaactctaaaaaaaagcagcgacaaagcaatcgaaaactggattgaaaagcaactcaaagggacgtcggtcactgtagtgcttattggttcggatacatttaatcgaccttgggtaaggcatgaaataaacagaagccacatgcttggaaaaggaatgatcggtatttatattcataacgtcaaagaccctcagaagggcacgagttcaaagggtatcaatccttttaattactggtacatagaggaaaacggcagtaagaagtacttttctgaaatatacccaacttatgactgggtcattgatgatggttttaacaacattgagggctggatagaaactgcggtaaaaaatgctggtcgctaa

SEQ ID NO: 22429 - DNA, 1440 bp, Sphingomonadales bacterium BRH_c3
atgaaacctgcgatgaggcggttcctcgaggacttcccaagagcgctcaacgacggtgtcggtgcggtctttgtgggggctggcacgtcgatggcagccggctacccatcgtgggctaatcttctccatgacattggtgaggaattgggtgtcagctctcgggacatccatgatttagccgctttagctcaatggagtattcaagagagtggaagtgagacgcgcgttcgcaacgtcatcaaggaaaagatcggtgtggcctatgcaacaccatcgatccttgaagttatagctcgcctcccaatcgcacatatttggaccactaattacgatcgactcattgagggtgcattcgcggaaattgatcggccattggattcaatctccggagctaacgatctcgcgctcaagcctacccccggggcggtacggctttacaagatgcacgggtccgtagatcgccttgacgacattgtgatctcgaccgacgactacgaattgtaccgcaagaagcggggtgcttttcttcctctattacaggcgcacctaacgagcatgtcgatgctttttgtgggcctcagcttgaccgacccaaatatccgtcacgttctctcacttattcgtgaggcctttacggacgcgccgccagagcattttgcaatcgtccgccctccacaggaaggcgactatgactcggaggcggagtttaaggcccgtcttgcgcagcataacctttgggcaaaggatttgcgtcggtacggattaatcgcggttgagattgatgactatgaacaagtacctgacttgcttcgtcagattgaacggagagtcgcagcgcgacggatatgggtgagcggtagctggccgatcgaagatggtgatattgtcgcatcggacatctataggctttctgaggatgttgggcgatggatagggcgttcggagcgtgatcttgtgagtggagccggattgctcgttggctctgcagtcatatcaggctttcttgaagttttgcgacatgggggaggctgggatctgaaccggcgtctaatagcaaggccttttccgcagcctctggctggtgccgagcccgatgccgccaagtggacggagcttcgcaaagagctcgcgcggcaggccggaggagtcatattcatagggggcgtgaaaagagaaggggacaaacttgttaccgcagggggcgttcttgaagaatatgaaaaggcgcgagcagtgggtgcatttttgttaccaatcggcaaaaccggaggagcggcacaagagattgcagagatgctgatcgggtcgaacgtggaggccacagggccaaacgcgatgcgaccgacggatgatgaactcaaattcctattggatcctgcaaatgagcggcatgatgtgctggcatgtattgatgcagtgatgacacggcttaccaagtga

SEQ ID NO: 22430 - DNA, 468 bp, Sphingomonadales bacterium BRH_c3
atgtcggaaacgaagaatgtctttatcagccatgtccataaggacgatcatgggctgcagaagcttaaggatctgctcgcccctaagggcatggacattagggattcatcgatccacacgggcaaattcaataacgcgacggaccccgcttacattaaatcccaaattcttgcgccagccatcaattgggctggcgttttcatttgctatgtcacccccgacaccaaaaatagcgattgggtgaactgggaaattgagtacgcggctaaacagggcaaacgcattgtcggcatttgggagcacggagagaaagagtgcgaccttcccgaagcacttgaagaatatgccgacgcgatggtgggatggaatggtgaggccatcattgacgcgataaatggcgcggacacgtgggagaagccggatggcggcccgtgtgccccggtgccgctgaagcggcatccctgctaa

SEQ ID NO: 22431 - DNA, 1503 bp, Bacillus cereus
atgacagttgatgaaagagataaaaagaactttataaattcatatgtaagggccttgaataacggtagagctgcaatatttgctggtgcaggagtttcgattccatctggtggaatcagctggagtgatttacttagagaggaagcggagtctatagggttagacataacgaaagaaaatgatttgatatcagtagctcaatatatctataatgagtcaggtactaagcaaactataactaaccttttaaagaataagatcgctcgcgaaggaaaaataaataaaaaccatgaaataataagatcattgcccatacgaaaaatttggacgacaaactatgacgatttcttagaaaaggcatacttagatgtaaataaggtgatcgatgtaaaaaaatccatcgaagatatggctactgaaatagatttctccgaaactactatttacaaaatgcatggtgatataggaataccgagtagtacggtattacttaaagatgattatgaaatttatgataagaagaatgaactttttaccaagactcttcagacagacttacttagtaatacatttttgtttattggatttagttttgatgatccaaacttagaaagtattttatctaaagttcgaattatgttagaaggtaatccccgtcgacactactgtttgttgaaaaagattagtgagagtgatcctgaatttgatcagtttgatgaccaaaaagaaaaagctcgggaactagaatatagaattaataaacaacgattaagagtagcggatttattgagatatggaattaaagcaatattggttgattcctatgatgagatgactcaattattagactcaattaaaagaaagtacttatcaactaaagtatttgtatctggggcatacgaaggagttgataatttcctgggggaaaccggtgatgatgctttaaaacaagccaaccgtttttgtgaaaaattaggagaagtattatttactgaaggctttgaaatatcatctggttttggtttgggggttggcaggaatgtcgtaactggtgttttaattcaagaatctcttttaaatcatacacgagcaggttctcagctggtaattagacctttcccaacacaacaaacagtacctgaaaaaagtgcataccgtgagaaaatattgtctgaatgtggtgtgacaatatgtgttttcggaaataaaaaagctagtgggagcaatgaattaataaattctcctggtgttgaagaagaggcaagaattgctggagagttaggacaacttgttttatctataggttcaactggatacgttgcaaaaaaaatatgggaagatcagctaggaaagataacaaccactttttctgagaacccgaaaattatagaaagctataataatcttaacaatcctaatcaaagtattgaccagcttattgatgatattttgattatcttaaaagaatataaaacaaacccagagaagtttaaaagtgtttaa

SEQ ID NO: 22432 - DNA, 621 bp, Bacillus cereus
atggggacaaacgtatttatttcatttcgttttagtgatggtaacgatttaaaggaagaactagaagaattatttgactcatcaactgaagtctttaatagatctgaaaatgaggaccgaagtactatgagcgaagacacgattcagaaatatctatacgaaaaacttaaacaaacctctgttacaattgtactattaactcctaaagcggtttcctataagaaaggtatttttggattgtatgatgattggttgtatgatgagttaagatattctttggaggatcgaaatgagaatcgtacaaacggtgtagttgctgtttacacaaatgaaagtaaagacttaatattaagtacaagctcacatacttgtagtgtttgtaatcaagaatcaaattgtgaggtaatactggattttgataatcttgtgagaaaaaatgtcctaaatgtcaaagctgcctataaatctaacctttgtaacaatttatttgatgaggataaagactcttatatttcactggtccatatagatgattttaagaaggattatgtgaaatatattgaagcggcaaaagaaaaacgtgatagaaaagatgaatttgaactagtaaaaaaaatgtga

SEQ ID NO: 22433 - DNA, 381 bp, Escherichia coli; identical to SEQ ID NO: 20540

SEQ ID NO: 22434 - DNA, 468 bp, Escherichia coli; identical to SEQ ID NO: 18646

SEQ ID NO: 22435 - DNA, 381 bp, Escherichia coli; identical to SEQ ID NO: 20540

SEQ ID NO: 22436 - DNA, 468 bp, Escherichia coli; identical to SEQ ID NO: 18646

SEQ ID NO: 22437 - DNA, 1431 bp, Burkholderia ubonensis
atggcttttggccgagaaatcgaggcgttcatcaaggagtatgttaaggacctggctgaggacaacgccgcggtattcgccggagctgggatgtccaaagccgccggcttcgtcgactggttagagttactacgagatattgcggatgagatcggtctcaaggttgaaattgagcatgacctgatcgcgctggctcagtttcacgtgaatgaatcgaagggcacgacaaaactatccagaaaaattatagaggagttttccgaacaggcggagccatcggagactcacacaatcctcgcaagattgccgatccgtacatactggacgaccaactatgacactctgattgaagacgcacttcggcgcgcgtacaaagtgccggacgtcaaacacaatgttgagcagctcaataccactcggccaaagcgcgatgcggtcatctacaagatgcatggtgacgtgtcactaccgcaacagacggtactctacaaagaacagtacgagcgctatttcaagacgcacgaaccttttgtgacagcgctaagcggtgatctcgtctctaagacgttccttttcatcggtttcagtttcaccgatccgaatcttgattacgtgctgagcaggttgcacaccgcgacaaagcgaaatcactattgcttcatgcgtcgcgaagccatccttcctggcgacgacgaagaggtccagcgctataagcgtagaaaacaggagctacgtgtagacgatttgaaacgcttcgggatccaaacgctgctgatcgatgactacaaagacgtgccattgatcctgaccgccattgaaacgcagttcctgaagaaagcggtttttgtggcgggcagcgcagatgacttcggaacgtggaggagaaacgaagcacaggatttcatccattctctgtccggaagcctgataagacacaactatcgtgttgtcaatggctttggatggggtgtcggaagcgctgtcatcaacggcgcccttgaagcgatctacttgaatcctggccggtattcggaagaccagctggtcatgcgtccttttcctcaatttcagagcaaggagcaagaccttaacacattgtgggaggagtaccgccaacggatgattgccctcgctggtgtttccctcttcttgttcggtaacaagcgcgacgacactggacagatcgtgttagccaaagggatgatgcgcgagttcgaaatcaccgttgaagccggccggatccccattcccatcggtgttacgggatatgtggcttatgcgatctgggaggagatagccccccgtgcagctgacatctatcgtggtatcgagtggattattcctatgattgccgaaatatgtgatacgaatgtggatcgcaccctcatcaccgaaaaaatcatcgcaattctcaaccgcctcgggaaatag

SEQ ID NO: 22438 - DNA, 483 bp, Burkholderia ubonensis
atgccaaaacgaaacgtcttcttcagttttcacttcgacaacgatgtcatgcgcgtacaacaggtacggaatatgggtgtaattgaaggcaacacccccgtatctcccaacacctgggaggaggtcaaacgcaaaggcgatgcctcaatcgagaaatggatcgacgataacatgaaaggcaagtcctgtgtcgtggttctgatcggctccgagacatcgaagcgtccgtgggtcaagtatgaaatccagaaagcctggaaagacggaaaaggtgtggtgggcattcacattcacaatttaaaatgtccgaataccggaacctgcacaataggcgcggacccccttgccatgttcacgttcaaaatcggcgacaagatcgtcacgcctaagacctacaatcccaagtcctccgacgcgtacaacgatattacggacaacctcgataaatgggtggaagaagccattaagattcgggcaggctga

SEQ ID NO: 22439 - DNA, 468 bp, Burkholderia ubonensis
atggcagaacagaggaacgtatttatcagccatgtccatgaggacgatcacgggcttcaaaaactcaaagacctgctggctccgaagggagttgacgtcaaggactcctcgatccatacgggaaagttcaataacgccaaagatgagcattacatcaagacgcaaatcctcgcaccagccatcaattgggcgggcatctttatctgctatgtctctccccagaccaagaatagcgaatgggtaaactgggagattgaatacgcagccaaacagggcaagcgtatcattggcatctgggaacatggcgagaaagaatgtgatcttccctcggcgttagagcagtacgccgacgccatggtgggctggaacggtgatgccatcatcgatgccataaacggcaaggatacttgggaaaagccggatggcggcccctgcgatccggtgcctcttaagcggcatccgtgctga

SEQ ID NO: 22440 - DNA, 594 bp, Burkholderia ubonensis
atgcccaccttttacaccaaggcggaggcacgcgcattcgcctcacgtaagcttcaaaaatcgttcacgacggacagcaaacgtgtactgagagaagcagctcgttccgccgcgagccatgatctttttgacatatttctatctcacgcgtccaaggatgctgagcttattctcggcgtcaaggaattgctcgaggaccagggattcaaggtatacgtcgattgggtggaggatgctcagacagaccggacaaaggtggaccgcgagaacgcggacctacttcgccgccgcatgcgtcaatcaaactccctaatctgggttgccaccagcgcggcgagcgaatcgaaatggatgccgtgggagctcggttactttgacggcttcaaaccaaatcaggtcgcggtaatgccgctcgtggacaatccgggagcaacatttaaaggacaggaatatctagctctctatccagtgattggcaaggacaggtatatcgacggacgacaggacgtttttgtagaggatttaggcagacaatggtccacactgcgcaatttcggaaagggcacgagtacctggtcccgatatactaggtga

SEQ ID NO: 22441 - DNA, 1431 bp, Burkholderia ubonensis; identical to SEQ ID NO: 22437

SEQ ID NO: 22442 - DNA, 468 bp, Burkholderia ubonensis; identical to SEQ ID NO: 22439

SEQ ID NO: 22443 - DNA, 483 bp, Burkholderia ubonensis; identical to SEQ ID NO: 22438

SEQ ID NO: 22444 - DNA, 594 bp, Burkholderia ubonensis; identical to SEQ ID NO: 22440

SEQ ID NO: 22445 - DNA, 1431 bp, Burkholderia ubonensis; identical to SEQ ID NO: 22437

SEQ ID NO: 22446 - DNA, 483 bp, Burkholderia ubonensis; identical to SEQ ID NO: 22438

SEQ ID NO: 22447 - DNA, 468 bp, Burkholderia ubonensis; identical to SEQ ID NO: 22439

SEQ ID NO: 22448 - DNA, 594 bp, Burkholderia ubonensis; identical to SEQ ID NO: 22440

SEQ ID NO: 22449 - DNA, 1431 bp, Burkholderia ubonensis
atgcatagagaccaaataaagctcgtagaggctctttccaaagagctcgaggaaggaaacctagcaatattcgctggtgcgggattttcgcgcggggcaggatatgtcgattggaaaactttgctaaagccgattgcagacgatctcgatcttgatgtggaaaaagaatgggatcttgtcacattggcgcagtaccacacgaacgtcaatcacgcaaatcgagcgaagctcaaccagcttctggtgacggaattctctacagatctcgcacccacggagaatcaccgcattcttgctaggctgccgatttatacgttctggacaacaaattacgacaagctgatcgaatcgtctcttgagttaaacggaaaaattcctgacgtcaagtacacggtcaagcaactggcgacgacgcgtcgccaccgagacgccattgtgtacaaaatgcatggcgattcagatcacgcatcggaagctgtgctgattcgcgatgactacgagcgctaccacattgcaatgcaacagttcattactgcactgagtggcgacctggtgtcaaagaccttcctgttcttggggttcagtttcactgacccgaatcttgaatacatcctcagccgtgtccgtattcagtatggaaaggaccaacggcagcatcattgcattctgcggcatgtaagccaagatgcgggcgaaagtaaggccgacttcgagtataggcagcggaaagagaagctgttcgaaggggagctgttgcgcgttggtatcaagacgacctacgttgacgagtacgctgagataacaactatcctgaaaactgttgaggacaagcacaagcggcgaacgatttttatctcgggagctgcgcacgattactcgccgtggacccggatcgaggctgaaaagtttgtgtacaacttaagtcgcgaaatcagcaaggcagatttccgggtcatctcagggtttggtctcggtgtcggtagcgcggtcatcacaggcgtccttgagcagaccatcatgaacggaaggcgcctcgatagcgagcagttggttctgcgaccgtttccccagactcagtccggaactcggccgctcccagaactgtggcgagagtatcgccatacgatgattgaccatgcgggcatcgctatcttcctattcgggaacaagctgcagggcgatacagttgtcgaatcgaacggaatgcgcgaggaattcgacattgctcgcgagaagggtgtcttcgtcatccctgtcggcattaccggctcgataacccgaaagatttgggaggaggtgctggcagggtttgatccaaccaagcaccagaacggtgctcaaatactaccgctcctgcaggctcttggcgacgacaaaaccgatttcgacgctgccacgggaattgtgttgaaacttctgaaaactatctaa

SEQ ID NO: 22450 - DNA, 441 bp, Burkholderia ubonensis
atggcaagaaaagttttcttcagcttcaagtacgacgatgtccagcgtgctatgaatgtgcgcaatagcaatgtcatcacgggcgcaatcaagtcggggtttatcgataaggcggacttcgaagaggtcgagcgcaagggcgacaatgctatcaaagcatggattgacaagcagcttgaaggcacgacagtcacggtcgtgctggttggcgcgaatacaaacaagagccgatgggtcaagtacgagattgaccagagtatcgctcgaggaaatggcatcttgaccatcgatatcagcaaaatcaaggatatgggcgggaacactactaactgctgcggcttgcgggtcaaggggtacaaccattacctgtggaacaacgggaacggtagggataacctcggtaagtgggtggaggatgccgctatagccgccggcaaatag

SEQ ID NO: 22451 - DNA, 1611 bp, Burkholderia ubonensis
atgagcgggctagaatctctcattacgaacgactccaaccttcgcaccatgaccatctccgatgttctctccaggcagttgcaagctcacagttcgggtccattccttttcgcgggatcaggtctttctcgccggtaccttggtctagatgactgggctggcctgctacgtcgcttctgtcaacacattaagccgtacgagtactacttatcgtcggcaaatggcgatctgccgtctgtcgcggcagcaatggcggaggacttccatgaggtgtggtggacgcgcgatgagtacgcagccagccgcgagaagcattcgaagaagatcggcgagcgaacggctccgctccgcgtagtgatttgtgactacctcaagagcgttggaaagccggatctcagccagagtgatttcgcagatgaacttgcggcgctgagccagctgaacgtagacggtattatcaccaccaactgggacaccttccttcaatcgctctttcctgactacagggtgtacgtggggcaggacgagctgctgttctccaacccgcagtccattggcgaaatttacaagattcacggttgtgtgaatacaccgagaagtctggtgctcacgagcgcagactacaaggatttcaacgaacgcaacgcttacctcgccgctaagctcatcacgatattcgtcgagcatcccgttatattcatgggctactcattgcatgatgacaacatcatctcgctgctcaaggcaatctgtgcttgcatcggctccgataagcttcagcaactgaacaataacctgatttttgttcaacgaacgcgcgaacttgaggatgactcgatctcgcaaaccgtcattgctctcgagaagacccaaatccctatcacgctaatcaaggcgaaatccttcgttggcgtctatcaggctatcgagtcaacgaagcgaaaaattccggcacgggtactgcgctattgtaaggagcagctctacgagttggtcaagacgacggagccccacggcaagctcgttgtcgtggacgttgaccaagtcaatggacgcgaggacatcgagtttgttgtcggcgttggagtggcggctgagagagaggaggaggagcggcggcgtctcggagacgtgggttaccgcggtatcaagtcgatcgacctttttgaggacctgatttctaggaacaagggatacgaagcgcgacgcgtactgcttgaggcgatgccgcaagtgtcgaagggcctcaaatatctgccagttttctttctgctgcgagccgctggggtgaacagcagagatgagtacgcgctgtccgaatacgacgtagacaagtacctcgaattaatgccggcagattttagagcaaagaatttgagaaagggatacatgcggaactaccgtgagctcagtgtttctgaaatgattcagaagtgcactccggaaatcgttgcccagtatctcccgttcgctgagtggcagcgagaggactatgctggcattcagcagttccttgcggcgaacatcgatcgattccagacctcgaactattccaccgcgtttcggaagctggcctgcctgtacgatcgcgcagtgtacgggtgggagtaa

SEQ ID NO: 22452 - DNA, 948 bp, Burkholderia ubonensis
atggcaaccatattcttctcgtattgccacaaggacgaggttctccgcaacgaactcgaagctcatctcgccttacttaagcacgaagggctggtcgatgcgtggcacgaccgacggatcgtcgccggggaggagattgacgacgccattttcagcaagctggagaaggcggacatcatcttgctgctcgtgagttcggacttcatcaactcggcctactgctattcgcgcgagatggcgcgggcgatggagcgccatagtgccggagaggcgcgggtcattccggtcatcttgcgtcattgcgactggaccagggcgccttttggcaagctactcgcagctcctcgtgacggcaagcctgtcgcctcctggcccgacagggatgaggctctcgctgacgtggcgcggcaagttcgtcaggcagtcgacgcgagtggcgccgttgcgaaagccgggacgccgaaacaggccgcggtggggcgctccgcggatgcgtccagcttgccccgttcgagcaacctgcggcttaagcaggaattcaccgaaaaggatgcagacgactttgttcgctcgacattcgagttcacctgccgatttttcgaaggctcggttcaagctgtaggtgagcgaaatcgcgatgtgaccggcgcctttgagcgtatcgactcgcgtcgaatgacggcggtcctctatcgcagcggcaggaagatcgcagaatgttccattcggaccgattcgctggggcgaaccaatggaattgcgttttcgtacgattcgtcggcatcgtcgggttcctacaacgagatgctgaccccggaggcgggcgagcaatcgttgcacttcaagccgatgggaatggcatggaatggcgagcgcgacaaacggttgtctgaggagggggtggccgagttcctctgggcgatgttcatcgagcgggcgcagtcctga

SEQ ID NO: 22453 - DNA, 1455 bp, Burkholderia vietnamiensis
ttgacaacctctcctacgcagttcagccccgacattcaggcgttcatcaacgcgtttgccaacgacattgccgatggtactgcggcaatctttgctggggcgggtttgtcggtcggcagtggctacgtcaactggccggaattgatgcgcgagatcgcagaagagttgggcctcgatgttgaccgcgagaccaacttggttgccgtcgcccagtaccacctgaacgagcgtcgcaaccggactcgcatcaatcagaaaattatcgacgagttcagtgtgggacacgcgctcaacgagaaccataaaatccttgcgcgccttcccatcgccacgtactggaccaccaactacgaccggatgattgaaacggcgctcgaagcctccggcaaggtggtcgatgtcaagtacacaatcgaacacctgaagaagacccagcgcggtcgccaggccgttgtctacaagatgcacggcgacgttggtgaacccgataaggccgtgctcactaaagacgactacgagggttatttccgcgaccgcgagccgttcgtcacggcgctgaccggcgatctcgtgtcgaaaacgatgctgttcgtggggttcagctttaccgacccgaacattgactatgtgatgagccggatccgggtagtattgaggagccagccgaagcagcactactgcatcctgcgacgggaggcgcgccggtcaggcgaaaaacacgccagtttcgaataccgccgtcgtcagcaagactatttcgtgaaagacctagcgcgcatcggtatccatgcgctgatggtccacgagtacgcggatgtcacccgtctcctgcaggcgatcgaggcacgctaccgcacccgcaccgtgtttatctcgggtagtgcacacgagttcgacccgtggctgcccgatgacgctggccgcctcatcgaatcgctaagcgctgggctcatcagtaagggattcactgttgtcaccggctttggccttggggttgggccatccgtgatcgccggcgcgcttcatgagattctggcgcatccgaaacgccattcgcaaaaccagttgcaggcttttccgtttcctgtggccactggctcaaccattgcgaggcgagcgctgtaccgcccgcatcgtgaagccatgatcggcaaggccgggattgcgatcttcctgttcggaaacaagcgtgatggccacggaaacatcgtgcccgccgacggtatgcgtgatgagcttgccatcgcgcgcgcgctaggcttgcatatcgtggcggcgggatcaacgggctgggtagcacaggaaatcgccaatgacctggctggatcgctggccgggcggactaaatcattcaggaaagccttcgccattgcaaataaccccgatcccggcatcgacatcgcatcaacggtcggggcgatcctgacgatggtaaacgaatacagagagctttga

SEQ ID NO: 22454 - DNA, 570 bp, Burkholderia vietnamiensis
atggcgaagcgttgtttctttagctttcactatcaggatgtgatcgacttccgggcgaatgtcgtccggaaccacaacgtcaccaaagccgataacggcggattcttcgacgcgtccatctgggaaaacgccaggaagcagggtgaccttgctctgaagcgactgattcacggcgggctggataacacctcggtcacggtggtgctgatcggttcgcaaacctatgcgcggcgctgggtgcagtacgaaatcatgaaaagcatcgaacgcggtaatgcggttctcggcgtccatatcaacaacattcgcgaccggcacgggttaataaaagcgcaggggccgagccccttcgattacctaggacttgaaatcagtgcggacggccgctcgggtacacctaccatgtgggacggtaggcagtgggtgtactacggggacctcggccagtttcaaatcaatgagcaatcgcaggacaaacgtggaaaaaacctccagttgaaaacgtggcttcggacttacgactgggttgctgacaaaggctttgataattttggcaagtgggtggcctaa

SEQ ID NO: 22455 - DNA, 390 bp, Burkholderia vietnamiensis
atgggatacaaagtgtacgtggactggatccatgaccgtcacctgagccgcgacgatgtcacaaaagagacggcacacgtgctgcgcctgcggatgcagaccagcaagagcctgttctatgcgaccacggctaacagcagtggatccagatggatgccctgggaactcggcttcaaggatgggcacaaccgtaaggcagcaattctgcccgtgtcacaatccggcggcaatagttatgcgggtcaggagtacctgggaatctatccgtatgtctccagggatcccatgcaaggcagcagtaaagacagactttggatcaacgcgtcaagcacctgctatgttcttttcgagaaatggcttgaaggcgaagaaccttacgaacgcggatga

SEQ ID NO: 22456 - DNA, 1434 bp, Burkholderia vietnamiensis
atgaaattcgacccagatatagaggccttcattaaagatttcgtaaaagacctccgagaaaataatgttgccgtatttgcaggcgcaggaatgtcaaaaggatcaggatttgttgactggccgaccctattatcagacattgccgaagagctcggactgagcatcaataaagaatacgaccttatttcactcgcccaatatcacgtaaaccatcgcggcaacaggtccggcatcaagagaaaaatcctcgaagaattctccgagcaagcggaaccctcaaaaacccacaccattttatcccgcctccccatacaaacatactggaccacaaattacgacacactaatagaagacaccttaagaaaatcacaaaaaatccctgacatcaaattttccgtcaagcaactcgcaaatacccgaccaaaacgagatgccgttatatataaaatgcacggcgacgtccacagccccgacgacgccataattaccaaagagcaatatgaggcctaccacaggacacacgcaccattcatcacggcattaagcggagatttaatttcaaaaacatttctatttattggatttagctttgccgatccaaatttggactacgtgctcagtcgcctcaaccaagagtcagttgagcgacagcattactgcttcatgaagaaggaaactcgcgccaccgaagatgacgatgaaaccttcaactataagcaacgcaaacaaaatctgcgagtcgctgatttaaagcgatacaaaatcaaagcgcttttggttgatgactaccccgacatctttagcatcctcgaagaagtcgagcgcaggcacaaaaagaatactgttttcatctctggcagcgcggatgaatacggaggatgggacagaattcatgcacaaaaattcattcacaagttgagcaaagaaattatcaactgcggcgcgaccattgtgaatggatttggctggggcgttggcagcgcagtcatcaacggcgccctcgaagcgatatacgaaaattacgagagatcatcggaagatcaactaatagtgaggccattccctcagttcgagacaggaaacaaaaagctcccggatttatgggaagattatcgccaaagaatgatctcactggcaggcatagcagtttttatctttggcaataaatttgatgataacagaaatattattcaagccgacggagtaatccgcgaattcgaaatatcagtcaaccatggattaatcccaatcccaatagcaagcacctcgtatgccgcgaaagaaatattcgatcgaatagaaaaggatccacgaaaattctacggcgacattgattggatattccctgaaataaaagatttatccgacccagcactaacaattgacaccctcacgaaaaaagtggccaccataataaagaagctcaacaaataa

SEQ ID NO: 22457 - DNA, 612 bp, Burkholderia vietnamiensis
atggcacggaagaccttcatatcatacaaattcagcgaagcaattagccttcgagataaaattatcgatgctctaggagacgatgcaacatactatcaaggcgaaaccgccgaatccccggaccttaccgacacgaccgcagagaatataaagaagaacttgaaggacatgatgttcgacacatcggtcacaatcgtgatcgcgtcaccgaatatcattcaaagcaaatggatcgattgggaaatcgagtattccctgaaagagattacgagagaaaataaaacatcccgaacaaatggaatcgtcggcgtcatcatgaagcataacggatcctacgattggcttataaaaaattacactaacgaagacggatgctccgtaagaaaatataccgaatcgaaactttacaacataattaataaaaatagatacaactataccgacgacgggaaatactcctgcagccactgcaaaacattcagtcaactggatgggtcatacatatctctgattgacgaagataaatttttgatcgatccggataaatacatcgaaaacgcttacaacaaatccaaagacatctcaaacttcaatatttcaaaactccgataa

SEQ ID NO: 22458 - DNA, 1455 bp, Burkholderia ubonensis
ttgacaacctcttctacgcagttcagccccgacattcaggcgttcatcaacgcgtttgccaacgacattgccgatggtaccgcggcaatctttgctggggcgggcttgtcggtcggcagtggctacgtcaactggtcggaactgatgcgcgagatcgcagatgagttgggcctcgatgttgaccgcgagaccaacctggtcgccgtcgcccaataccacctgaacgagcgtcgcaaccgaactcgcatcaatcagaaaatcatcgacgagttcagtgtgggacacgcgctcaacgagaaccataaaatccttgcgcgccttccgatcgccacgtactggaccaccaactacgaccggatgattgaaacagcgctcgaagccaccggcaaggtagtcgatgtcaagtacaccgtcgaacacctgaagaagacccagcgcggtcgccaggccgtcgtctacaagatgcacggcgacgttggtgaacccgataaggccgtactcactaaagacgactacgaaggttatttccgcgatcgcgagccgttcgtcacggcgctgaccggcgatctcgtttcgaaaacgatgctgttcgtggggttcagctttaccgatccgaacattgactatgtgatgagccggatccgggtagtattgaggagccagccgaagcagcactactgcattctgcgacgggaggcgcgccggtcaggcgaaaaacgcgccagtttcgaataccgccgccgtcagcaagactattttgtgaaagacctcgcgcgcatcggcatccatgcgctgatggtcaacgagtacgcggatgtcacccgtctcctgcaggcgatcgaggcacgctaccgcacccgcaccgtttttatctcaggtagtgcacacgcgttcgatccgtggctgcccgatgacgctggccgcctcatcgaatcgctaagcgctgggctcatcagcaagggattcactgtcatcaccggctttggcctcggggttgggccatccgtgatcgccggcgcgcttcatgagattctggcgcatccgaagcgccattcgcaaaaccagttgcaggcttttccgtttcccgtggccagtggctcagccgtttcgaggcgagcgctgtaccgcccgcatcgtgaagctatgattggcaaggccgggattgcgatcttcctgttcggaaacaaacgtgatgaccacggagacatcgtgcccgccgacggcatgcgtgatgagcttgccatcgcgcgcgcgctaggcttgcatatcgtggcggcgggatcaacgggctgggtagcacaggaaatcgccaatgacctggctggatcgctggccgggcggaccaaagcattcaggaaagccttcgccattgccaatgatcccgatcccggcatcgacatcgcatcaacggtcggcgcaatcctgacgatggtaaacgaatacagagagctttga

SEQ ID NO: 22459 - DNA, 570 bp, Burkholderia ubonensis
atggcgaagcgttgtttctttagctttcactatcaggatgtgatcgactttcgggcgaatgtcgtccggaaccacaacgtcaccaaagacgataacggcggattctttgacgcgtccatctgggaaaacgccaagaagcagggtgacctcgctctgaagcgactgattcacggcggcctggacaacacctcggtcacggtggtgctaatcggttctcagacctatgcgcggcgctgggtgcagtacgaaatcatgaaaagcatcgaacgcggtaatgcggtgctcggcgtccatatcaataacattcgcgaccggcacgggttcataaaagcgcaagggctgagccccttcgattatctgggacttgaaatcagcgcggacggccgctcgggtacacctaccatgtgggacggcaggcagtgggtgtactacggggacctcggccggtttcaaatcaaagagcaatcgcaggacaaacgtggaaagaacctccagttgaaaacgtggcttcggacctacgactgggttactgacaaaggcttcgacaattttggcaagtgggtggcctaa

SEQ ID NO: 22460 - DNA, 390 bp, Burkholderia ubonensis
atggggtacaaagtgtacgtggactggatccatgaccgtcacctgagccgcgacgatgtcaccaaagagacggcacacgtgctgcgcctgcggatgcagaccagcaagagcctgttctatgcgaccacggccaacagcagtggatctagatggatgccctgggaactcggcttcaaggatgggcacaaccgtaaggcagcaattctgcccgtgtcacaatctggcggcaatagttacgcaggtcaggagtacctgggaatctatccgtatgtgtccaaggatcccatgcaaggtagcagtaaagaccgactttggatcaacgcgtcgagcacctgctatgtccttttcgagaagtggcttgaaggcgtagaaccttacgaacgcggatga

SEQ ID NO: 22461 - DNA, 1431 bp, Burkholderia ubonensis; identical to SEQ ID NO: 22437

SEQ ID NO: 22462 - DNA, 483 bp, Burkholderia ubonensis; identical to SEQ ID NO: 22438

SEQ ID NO: 22463 - DNA, 1482 bp, Burkholderia ubonensis
ttgaaaggtcgggcacagagcgctatcttgacaacctcttctacgcagttcagccccgacattcaggcgttcatcaacgcgtttgccaacgacattgccgatggtaccgcggcaatctttgctggggcgggcttgtcggtcggcagtggctacgtcaactggtcggaactgatgcgcgagatcgcagatgagttgggcctcgatgttgaccgcgagaccaacctggtcgccgtcgcccagtaccacctgaacgagcgtcgcaaccgaactcgcatcaatcagaaaatcatcgacgagttcagtgtgggacacgcgctcaacgagaaccataaaatccttgcgcgccttccgatcgccacgtactggaccaccaactacgaccggatgattgaaacggcgctcgaagccaccggcaaggtagtcgatgtcaagtacaccgtcgaacacctgaagaagacccagcgcggtcgccaggccgtcgtctacaagatgcacggcgacgttggtgaacccgataaggccgtactcactaaagacgactacgaaggttatttccgcgatcgcgagccgttcgtcacggcgctgaccggcgatctcgtttcgaaaacgatgctgttcgtggggttcagctttaccgatccgaacattgactatgtgatgagccggatccgggtagtattgaggagccagccgaagcagcactactgcattctgcgacgggaggcgcgccggtcaggcgaaaaacgcgccagtttcgaataccgccgccgtcagcaagactatttcgtgaaagacctcgcgcgcatcggcatccatgcgctgatggtcaacgagtacgcggatgtcacccgtctcctgcaggcgatcgaggcacgctaccgcacccgcaccgtttttatctcaggtagtgcacacgcgttcgatccgtggctgcccgatgacgctggccgcctcatcgaatcgctaagcgctgggctcatcagcaagggattcactgtcatcaccggctttggcctcggggttgggccatccgtgatcgccggcgcgcttcatgagattctggcgcatccgaagcgccattcgcaaaaccagttgcaggcttttccgtttcctgtggccagtggctcagccgtttcgaggcgagcgctgtaccgcccgcatcgtgaagctatgattggcaaggccgggattgcgatcttcctgttcggaaacaaacgtgatgaccacggagacatcgtgcccgccgacggcatgcgtgatgagcttgccatcgcgcgcgcgctaggcttgcatatcgtggcggcgggatcaacgggctgggtagcacaggaaatcgccaatgacctggctggatcgctggccgggcggaccaaagcattcaggaaagcctttgccattgccaatgatcccgatcccggcatcgacatcgcatcaacggtcggcgcaatcctgacgatggtaaacgaatacagagagctttga

SEQ ID NO: 22464 - DNA, 570 bp, Burkholderia ubonensis
atggcgaagcgttgtttctttagctttcactatcaggatgtgatcgactttcgggcgaatgtcgtccggaaccacaacgtcaccaaagacgataacggcggattctttgacgcgtccatctgggaaaacgccaagaagcagggcgacctcgctctgaagcgactgattcacggcggtctggacaacacctcggtcacggtggtgctaatcggttctcagacctatgcgcggcgctgggtgcagtacgaaatcatgaaaagcatcgaacgcggtaatgcggtgctcggcgtccatatcaataacattcgcgaccggcacgggttcataaaagcgcaggggccgagccccttcgattatctgggacttgaaatcagcgcggacggccgctcgggtacacctaccatgtgggacggcaggcagtgggtgtactacggggacctcggccggtttcaaatcaatgagcaatcgcaggacaaacgtggaaagaacctccagttgaaaacgtggcttcggacctacgactgggttactgacaaaggcttcgacaattttggcaagtgggtggcctaa

SEQ ID NO: 22465 - DNA, 390 bp, Burkholderia ubonensis
atgggatacaaagtgtacgtggactggatccatgaccgtcacctgagccgcgacgatgtcaccaaagagacggcacacgtgctgcgcctgcggatgcagaccagcaagagcctgttctatgcgaccacggctaacagcagtggatctagatggatgccctgggaactcggcttcaaggatgggcacaaccgtaaggcagcaattctgcccgtgtcacaatctggcggcaatagttacgcgggtcaggagtacctgggaatctatccgtatgtgtccagggatcccatgcaaggcagcagtaaagaccgactttggatcaacgcgtcaagcacctgctatgttgttttcgagaagtggcttgaaggcgtagaaccttacgaacgcggatga

SEQ ID NO: 22466 - DNA, 1482 bp, Burkholderia ubonensis; identical to SEQ ID NO: 22463

SEQ ID NO: 22467 - DNA, 570 bp, Burkholderia ubonensis; identical to SEQ ID NO: 22464

SEQ ID NO: 22468 - DNA, 390 bp, Burkholderia ubonensis; identical to SEQ ID NO: 22465

SEQ ID NO: 22469 - DNA, 1611 bp, Burkholderia ubonensis; identical to SEQ ID NO: 22451

SEQ ID NO: 22470 - DNA, 948 bp, Burkholderia ubonensis; identical to SEQ ID NO: 22452

SEQ ID NO: 22471 - DNA, 1446 bp, Enterobacter hormaechei subsp. oharae
atgagtgttcagttttcaacaggagttgaagctttcatcaaaacttatgtgaaggatcttgaagaagggactgctgccgtttttgctggtgcgggactttccaggacttgcggctatgttaattggagtgatctcctaagagagattgcagatgagttaggcctctctatagagttagagcacgacttaatttcagttgcacaatatcatgtcaacctgaagaatagttcaatcggtcttgccaggaaaatcttagaggagttttcggagcaggctgaaccctctgaagcacaccaaatattagcacgtcttcccatcacaacatattggacaactaattacgatactctaattgaggacagtctcaaaaagaattaccgtgtagcagatgtgaagcgcaaaactgatgatcttattaccacccggcctaaacgggacgcggtcgtttataaaatgcatggtgacgtggactcgccagcagcagccgtgctttacaaatcccagtacgagcaatactacaagactcatgaaggttttgtaactgctctgagtggagaccttatttctaagacattcttattcattggctttagcttcactgatcctaatttggattacatcttgagccgtttgcatgtgcctgctacgcatcgtcgtcctcactactgcttccttcgcaaagagccaattgcgccgcagggtaaagaagatcccgactgcgcaaagtataggcagcgtcggcaagaacatcatattcgcgatttgctccggtttggaatacaggcggtactggtagatgaatatgatgatattcccatcattctgagggagattgagagccgcttccttaaaaagaccatttttatttcaggaagtgcagaagactacggggattggaataaacaggaagctctaaactttgtacactcgctctcggcctctttagtaaaagctggttatcgtgtagtaaatggatttgggtggggtataggtagtgcagttatcaatggcgctcttgaggcaatctatgataagcctgacaggtactcagaagatcaacttatcatgcgaccattcccgcaacatccatcaaatggcaaagacttacctgcactatgggatgagtatcggcaccgcatgatcggtctttctggtgtcgctttgttcatttttggaaacaagctcctggatggtcatattgtgaatgctgatggggtgcgtaaggagttcaaaattgcagttgataagggggttgctgtgattccgctaggtgtcactggttttatggctaaagaactatcagacgagatgttggcagactccgctaaatactttacccctttcccttggctggaaactgaagtggctcaactttcggatcttaatactgaccggacaaagatcgaaaagagagtcctagatattttaaagaaactgggaggttag

SEQ ID NO: 22472 - DNA, 468 bp, Enterobacter hormaechei subsp. oharae
atgaaacgtaaagtcttttacagctttcactttgataatgatgttatgcgtgttcagcagattcgaaacatggggttgttagagggggatgaaccagttaatcctaatacttgggaaaaaattaaacgaaccgagcaaggagtgaaaaattggatcaacgagaatctagccggtaaatcttgtctcgtggtactaattggtagtcaaaccgccagtcgcccatgggtcaaatacgagatacagaaagcctgggaagaaggtaaggcagttgtaggtgtttacatccatcgacttaaatgccctcgtaacggcttcggaacaaagggggcgaatcctttcgaccaattcaccttcaaaagaggcgatcaagtcatcaagccgcacgtatatgagcctagttttgacgatgcttataacgatattaagaacaacttggctacttggatagaaaatgctattaaacaataa

SEQ ID NO: 22473 - DNA, 843 bp, Enterobacter hormaechei subsp. oharae
atgtttgtagatatagcaattactaattttgatacttcatctttacaattttcaccgtccgaaatttccgattatcggaaaaagagcaatgcagcgttcaacagggataaactccagaattttcttttgggtgtcgacaatgtacttgatgccgaagctataactaagtcatgttttcctgatgtccatgcagatgtttttctttcccatgctcaccgcgatgaggatgatgtaatcaaactggcgttgagccttgagaaagtggggctcagtgtattcgttgattcatgtgtctggggatgggttgatgaaattttgagagtcgtagacgaagagttttgctataataaaactagcagaacatttgactatcatatgcgcaatagaacaacctcaaatatttacatgatcttgaactcagcacttcaaaatatgatttcaagatgcgaactgctcttattccttcagaccaataactcgattaagatcggtgagtacgtaaaagataaaactcatctttcatcaccatggatcttttctgaattaatgtttgcgaaaatagggcagcgaacaaatcgccgccaagtcaggagacatgcttttgaaagcatggcagcagacagtgcagaaatagaactgagaaaaagttttgaaacggcttatttacatcctggcaatcgctatcagctcacgagtaatcaacttatacagtggattcatgaaggctatcagaaaaaaagccatgatgagatcgaagctttgactcatcttgatacgctttatgaacgtgcaggtgttttaccggctgcactggctagttcaaggctcttacttccttcataa

SEQ ID NO: 22474 - DNA, 1590 bp, Enterobacter hormaechei subsp. oharae
atgaattttaagaaaaaactcgaagagcattttaagcagttcgaagcatccccagtgttatttgttggctccggagtgtctcgtcgttaccttggtgtgtcatgttggcaagaccttttgaagcatttcgctgaggcgattggggaaaatcatataaaattaaaaacaaaatcaaatggtgatctacccgaatatgcacaattattggtgtcggcatacgctgataaatggtgggatactgaagaaggacaattagcattatgtgaaaaagaacaggagaaaactttcattaacgaacagtctcctttgaagttgtcaatatctaaatatattgagagtgcacatgaaaatattatagataatgatgagttaaaacatgaaatttctctttttgcgaaagcaaatattgatgggattattaccacaaactgggatgtttttctggaaagccttttccctaaatttacaacatttataggccaggatggattgattactggcaggagccacggtattgccgaaatatataaaatacatggttgctgtactgagcctaactcattgattttaacatcaagtgactatgataaatatagaaagaaaaacccctacctatcatctaagttactaactatgtttatagagaggcctgttatcttcttaggctactctttaacagatgaacatatagctgaaatcctggaagatatagttagttgttttcctgatgccagtttggattttttacagaataaattattgtttgttgaatggaaacctgaacttgaagaggctgacattagtgattctgtgattcataaaaaaatcccggtgaaatatgttcaggcaccatcttataaagaaatatttgaagtgctaagtgaaactaaaaaaaggattccggcacatttattcagaatgataaaagatgaactttatgaattagtcttaaccgatgatcccaaaggaaaattatatgtgagggactcagagaagattgaagagggggtcagtacaacagagtttgttgtagggtatggtgctatttcgatggtaaaaaaatcagagtcgatggcggcaaaaggattggttgggctggagcgtgtagacctcatccgtgaagttgtattcgaaaatggacattatgattgggaatgtgttgttaatgatgttctgccaaatatatgcaaaggcaatgcgcgcatacctgtttttcacttcttaaatcacgctcatttaattaattccgatggtagtataattaatgaaacggggctctcagggggagtattatcacgattaaatatcactccagtaagttttcaatcacaaggatgggataaacgacgttctgaaaacgttcctgaagttagagtcggtgtaaatgaattatatcttgcttatgatttcggattttttttaagaatgatgccatatatggaaccgggtttaattaagcgtgatatggatgagctactaaaaatactgaaaaaacatattgatgaagcgatgagtattcaagtgttatcaagtaatttctgtaaattagtatgtctctatgactttataaaaaacagcaatagattttaa

SEQ ID NO: 22475 - DNA, 972 bp, Enterobacter hormaechei subsp. oharae
atgactactctcgttttttcctactctcatgcggatgaagcacaacgcaatgagctagagaaacatctgtccccgctgaagcgaatggggaaaatcaccacatggcacgatcgccgaatcgttcctgggcaagagtttgaacatcagatcgaccactatttttcgcaagcagatattatcctgttgctaattagcagtgatttcatcgcttctgactattgttatcagatagagatgaccaacgcactggagcggcataaaaaaggtgaggcggtggtcattccggtgattttaagagagtgtgcctggcatcagttgccattcggcagcatcatggcggcgacaatcgacggtaaagccataagcaggtttgccagtcacgatgagggttacgttcaggtcgccgatgctgtctcccgagccattgccaatttggaagcgaaaaagccgcagcagattgtgcacgccccagcttcggctgatccgatgcttcaggcaacggataccgtctttacaccgcgttcgagcaatctttctctgccaaagagttttactgaccttgataaagatcgtgcccgtcgcgagggttttgagtatgtcgctcgttactttgctaactcgctggacgaactcaaaaagcgccatgcagggctagacgttgatttccaccgacctgataacgattccttcacatgtgccgtgtatatcaacggtagcaaggttggtcagtgcggagtctggtgtggcagccgtaatatgggattcggggatatctgctacagtcaaagcggtgtgactcgcaatagttgcaatgaaagtcttagtgttgcggataatgggcagacgcttgggttccgcaccttgatgggactgggttacagtaattcaagggattcgttgctgactaacgaaggcatggcagaacatctatgggatatgttctttagcccgattcaacagcgtaatcgataa

SEQ ID NO: 22476 - DNA, 1446 bp, Escherichia coli
atgagtgttcagttttcggctgaagttgaagcttttatcaggacttatgtgaaggatctcgaagaaggggttgccgccgtttttgctggtgcgggcctatctagaaccagcggcttcgttaattggagtgaactgctgcgtgaaattgctgaagaattaggcctttctgttgagctagagcacgacttaatttcggttgcacaataccatgtcaacaagaacaacagctcaactggtttagctagaaaaatcctagaggaattctcggagcaagcggaaccttccgaagcccataaaatccttgctagactacccattagaacttattggacaaccaactatgacactttgattgaagatagtctcaaagaaaactaccgtgtcgcagatattaaacgcagaaccgatgatcttatttccactcgtcctaaacgagatgctgttgtttacaaaatgcatggtgatgttagctcgccaggtgacgccatactttataaagctcagtatgagcagtactacaagactcatgaggggtttgttacagcattgagtggagatttgatttctaagacattcttatttattggcttcagttttactgatcctaatcttgattacatattgagccgattgcatgttccggagaagcatcgtcgtagacactactgctttcttcgtaaggaaccctctctgccgcaaggaaatgaagatgaagctggcgctatgtataggcagcgtaggcaagaacatcatattcgcgatttgctccgttttggcattcaggctgtattagtaaacgagtacgatgatattccacttatattgaaagagattgagagtcgcttcctcaagaagaccatatttatatctggtagtgcagaagagtatggcgcttgggacaaacaggaagcactaaactttgtacacatactttcgtcatctttggtgaagaatggctatcgagttgtcaatgggtttggatggggtattggtagtgcggtcatcaacggagctcttgaagccatttattctaagcctgataagtactcagaagagcaacttatcatgcggccattccctcaacactcatcaaacgataaagccctgagcgagctatgggacgaatatcggcagcgtatgattggtctttctggaatcgctatattcctttttgggaataaactccatgatggtcgaatcgttaatgctgatggggtccgaagggagtttcaaattgctcaggaaacaggggttgtcgtgcttccacttggcgtcactggttatatggccaaggaactagctgacgagatgctgacggatccaagtaaacattttgtccggtacccttggttggaaaaggaagttgctcagcttgcagatctctctgctaatcgggcaaatatcgaaatgaaagttttagaaattttaaagaaactaggaggttag

SEQ ID NO: 22477 - DNA, 468 bp, Escherichia coli; identical to SEQ ID NO: 19457

SEQ ID NO: 22478 - DNA, 1446 bp, Escherichia coli; identical to SEQ ID NO: 22476

SEQ ID NO: 22479 - DNA, 468 bp, Escherichia coli; identical to SEQ ID NO: 19457

SEQ ID NO: 22480 - DNA, 1446 bp, Escherichia coli; identical to SEQ ID NO: 22476

SEQ ID NO: 22481 - DNA, 468 bp, Escherichia coli; identical to SEQ ID NO: 19457

SEQ ID NO: 22482 - DNA, 1437 bp, Enterococcus faecium; identical to SEQ ID NO: 18577

SEQ ID NO: 22483 - DNA, 486 bp, Enterococcus faecium; identical to SEQ ID NO: 18578

SEQ ID NO: 22484 - DNA, 852 bp, Enterococcus faecium; identical to SEQ ID NO: 18579

SEQ ID NO: 22485 - DNA, 1449 bp, Escherichia coli; identical to SEQ ID NO: 20606

SEQ ID NO: 22486 - DNA, 501 bp, Escherichia coli; identical to SEQ ID NO: 20607

SEQ ID NO: 22487 - DNA, 1449 bp, Escherichia coli; identical to SEQ ID NO: 20606

SEQ ID NO: 22488 - DNA, 501 bp, Escherichia coli; identical to SEQ ID NO: 20607

SEQ ID NO: 22489 - DNA, 1446 bp, Escherichia coli
atgagtgttcagttttcggctgaagttgaagcttttatcaggacttatgtgaaggatctcgaagaaggggttgccgccgtttttgctggtgcgggcctatctagaaccagcggcttcgttaattggagtgaactgctgcgtgaaattgctgaagaattaggcctttctgttgagctagagcacgacttaatttcggttgcacaataccatgtcaacaagaacaacagctcaactggtttagctagaaaaatcctagaggaattctcggagcaagcggaaccttccgaagcccataaaatccttgctagactacccattagaacttattggacaaccaactatgacactttgattgaagatagtctcaaagaaaactaccgtgtcgcagatattaaacgcagaaccgatgatcttatttccactcgtcctaaacgagatgctgttgtttacaaaatgcatggtgatgttagctcgccaggtgacgccatactttataaagcccagtatgagcagtactacaagacccatgaggggtttgttacagcattgagtggagatttgatttctaagacattcttatttattggcttcagttttactgatcctaatcttgattacatattgagccgattgcatgttccggagaagcatcgtcgtagacactactgctttcttcgtaaggaaccctctctgccgcaaggaaatgaagatgaagctggcgctatgtataggcagcgtaggcaagaacatcatattcgcgatttgctccgttttggcattcaggctgtattagtaaacgagtacgatgatattccacttatattgaaagagattgagagtcgcttcctcaagaagaccatatttatatctggtagtgcagaagagtatggcgcttgggacaaacaggaagcactaaactttgtacacatactttcgtcatctttggtgaagaatggctatcgagttgtcaatgggtttggatggggtattggtagtgcggtcatcaacggagctcttgaagccatttattctaagcctgataagtactcagaagagcaacttatcatgcggccattccctcaacactcatcaaacgataaagccctgagcgagctatgggacgaatatcggcagcgtatgattggtctttctggaatcgctatattcctttttgggaataaactccatgatggtcgaatcgttaatgctgatggggtccgaagggagtttcaaattgctcaggaaacagggggtgtcgtgcttccacttggcgtcactggttatatggccaaggaactagctgacgagatgctgacggatccaagtaaacattttgtccggtacccttggttggaaaaggaagttgctcagcttgcagatctctctgctaatcgggcaaatatcgaaatgaaagttttagaaattttaaagaaactaggaggttag

SEQ ID NO: 22490 - DNA, 468 bp, Escherichia coli
atgaaacgtaaggtattttacagctttcactttgataacgatgttatgcgggtacagcagattcgtaacatgggagtgctggagggggatgaaccggtcagcccaaatacttgggaacaaattaaacgaactgagcagggcgtgaagaattggattaatcagagcttaaatggcaaatcctgcttagtagtactgatcgggagtcaaacggctaatcgcccatgggtcaagtatgagatcgaaagagcctggaaagagggtaaggctgtggtgggtatttatattcatcgactgaaatgccctcgtaacggctatgggacaaaaggaccgaatcctttcgaccaatttacatttaagcgaggcgatcgagtaattaaaccactcgtatatgaacctaactttaacgacgcttatagcgatatcaagaacaatttggcgacatggatagaaaacgccattaaacaataa

SEQ ID NO: 22491 - DNA, 1449 bp, Escherichia coli; identical to SEQ ID NO: 20606

SEQ ID NO: 22492 - DNA, 501 bp, Escherichia coli; identical to SEQ ID NO: 20607

SEQ ID NO: 22493 - DNA, 1449 bp, Escherichia coli; identical to SEQ ID NO: 20606

SEQ ID NO: 22494 - DNA, 501 bp, Escherichia coli; identical to SEQ ID NO: 20607

SEQ ID NO: 22495 - DNA, 1446 bp, Escherichia coli; identical to SEQ ID NO: 22489

SEQ ID NO: 22496 - DNA, 468 bp, Escherichia coli; identical to SEQ ID NO: 22490

SEQ ID NO: 22497 - DNA, 1446 bp, Escherichia coli; identical to SEQ ID NO: 22489

SEQ ID NO: 22498 - DNA, 468 bp, Escherichia coli; identical to SEQ ID NO: 22490

SEQ ID NO: 22499 - DNA, 1449 bp, Escherichia coli; identical to SEQ ID NO: 20606

SEQ ID NO: 22500 - DNA, 501 bp, Escherichia coli; identical to SEQ ID NO: 20607

SEQ ID NO: 22501 - DNA, 1446 bp, Enterobacter cloacae; identical to SEQ ID NO: 22277

SEQ ID NO: 22502 - DNA, 468 bp, Enterobacter cloacae; identical to SEQ ID NO: 22278

SEQ ID NO: 22503 - DNA, 1446 bp, Enterobacter cloacae; identical to SEQ ID NO: 22277

SEQ ID NO: 22504 - DNA, 468 bp, Enterobacter cloacae; identical to SEQ ID NO: 22278

SEQ ID NO: 22505 - DNA, 1434 bp, Shewanella frigidimarina
atgacaagagaacaagaattatttatccagcgttttttaaatgaacttgaagaagacaatgttgcaatatttgcaggtgcaggattgtcatcctctgcagggtacgtaaattggaaggagttattacgccccttagctgatgaattaagtttggatatagacgaagaacaagacttagtaggagttgctcaatattacttaaatgaaaatgggcgtaaccgcataagtcagcaattaatggatgaaattgcgactgcaaagcaaccaactacaaatcatcaaatattgtcacgtcttccaataaaaacatattggacaacaaactatgacaagttagtagaaaagtcattggaaggtgcaggtaaaatcgttgatgtaaaatacactaacaatcatttagctgttactaagaaaaaaagagacgcgattgtttataaaatgcatggtgatatagatcatcctgacactgccattttaactaaagacgattatgaaaaatacccattaaaaatgaagccttatataacggctctttctggagatttagtttctaagacatttttgtttataggctttagttttactgaccctaatttagattacataatgagtcgtgttaaagcatattttgaagaacaccaaagacaacattattgcatttttaagcaatgtaatgaacatgagtttgacaaccccgaaagctatgaaaatgcaaaaataaaacaagcattgctcataaaagatttagctaggtttcaaattaaaacaattttagtagagaactattctgatatcacggaaattttacacaggatcgatagagcttatagaagaaaaactgttttcctatccggaagtgcacatgaattttctccattcaagcaatcagacgtcgaatcgtttctctgcttattaggtaaagttttaattgagaggaactgtaaaatatcatctggcattggcttggggatcggaaatgcttttataacaggagctattgaaggtgtttatactcaccacaatgggtatgtaaacgaccatttaagcatgagaccatttccgcaatatatagaagataaaaaggcacgagacgatacttggaaaaagtatagatatgaagttattggggatgcaggtatcgcaatattcttcatgggcaataaaattgttgacggaaataccgtgctagccgatggcgttaggaaagagtttgagatagcccatgaattaggtttggcactgatacctgttgggtgtagtggttctatggcgaaagaactatggcaagaggttatgggtaatgtagcaaagttctatgatgaatctaatgaagagttgattcaagcaattaatgagcttggtgaagaagtagaaaaaccagaacaattaatttcaaaaatcattaacgtaattgacttaatgtcaaaggagtaa

SEQ ID NO: 22506 - DNA, 444 bp, Shewanella frigidimarina
atggcaagacgcgtatttttcagttttcactaccagcatgtatggaaagtcaatcaaattaggagcatgcctaatattactggtactgccgccgcaggatttcaagatgcttcactatgggaagaatctaagaaaaagagtgacaaggcgatcaaagcactaattgatgaagggttaaagaacacatctgtaactgttgtttgtgttacatatggtacagctaatcgtgattatattaattacgaaatcgaccaatctttagctaaaggtaatggacttgtagcagtgcaaattcatcacttgaaagattcgaatggtcaaacaggctcagctggtgcaataccatcaaaaattgcatctaatggctttaaagcatacaagtatactaataaagaagacttggcaaagtggattgaagaagctgcggctttagcaggtaaatag

SEQ ID NO: 22507 - DNA, 1446 bp, Enterobacter cloacae; identical to SEQ ID NO: 22277

SEQ ID NO: 22508 - DNA, 468 bp, Enterobacter cloacae; identical to SEQ ID NO: 22278

SEQ ID NO: 22509 - DNA, 312 bp, Aeromonas hydrophila; identical to SEQ ID NO: 18880

SEQ ID NO: 22510 - DNA, 468 bp, Aeromonas hydrophila; identical to SEQ ID NO: 18881

SEQ ID NO: 22511 - DNA, 579 bp, Aeromonas hydrophila; identical to SEQ ID NO: 18957

SEQ ID NO: 22512 - DNA, 312 bp, Aeromonas hydrophila; identical to SEQ ID NO: 18880

SEQ ID NO: 22513 - DNA, 468 bp, Aeromonas hydrophila; identical to SEQ ID NO: 18881

SEQ ID NO: 22514 - DNA, 579 bp, Aeromonas hydrophila; identical to SEQ ID NO: 18957

SEQ ID NO: 22515 - DNA, 312 bp, Aeromonas hydrophila; identical to SEQ ID NO: 18880

SEQ ID NO: 22516 - DNA, 468 bp, Aeromonas hydrophila; identical to SEQ ID NO: 18881

SEQ ID NO: 22517 - DNA, 579 bp, Aeromonas hydrophila; identical to SEQ ID NO: 18957

SEQ ID NO: 22518 - DNA, 312 bp, Aeromonas hydrophila; identical to SEQ ID NO: 18880

SEQ ID NO: 22519 - DNA, 468 bp, Aeromonas hydrophila; identical to SEQ ID NO: 18881

SEQ ID NO: 22520 - DNA, 579 bp, Aeromonas hydrophila; identical to SEQ ID NO: 18957

SEQ ID NO: 22521 - DNA, 1464 bp, Bordetella hinzii LMG 13501
atggcggatctgctggctcggcacaagctcgtgccatttttcggcgcaggcatttcgcgccagcatctcgggctcgcggcggctgaactcgcccgtgacatggccgcaaagatcggtagtccaccggaaacgcccctggccgatctctctgatgcgtatgttgaggcgcgaggactggatgccttcgtggcgtttctgagcagcaagcttgtcgtggcggagttggacgagcgcaaggtgccgtcgcatcgtctgctggtaagtctgatgcaaaacgtgctttacacgaccaaccaggacaacctttttgaattggtcgccgccaagtatggccgcccctatcgccgcgttgtcacggttgacgatttgagcgagtcaattccaggcgaaccgctgcttatcaaattccacggcgatatggccgtcccggcatcgctggtattcggtacgaagtcctaccaagcgcgcatgagcgaggaggatcacccgctggatatccgactcaaatctgatcttctcggtaagcgccttatgttcctgggatacagcctgagcgatgaaaacatcgccaaaattttcgccacagtagcgcgtatcttcaaaggtacgcttcccccgtcctatctcgtagcgtttgacgatgacccagtactgatcgcaaccgcccagcagtatcaagtcaaggtcgtcattccgcctaggattttcccggacgcggcaaataacgccgaagccttcgagcggttcttgcaggtactgtgcaacgagacgcgtactcgccaagtcaagaacggcacggacgatcttttttcaatggggctgatcaacccgcatatcgtcacggattttgaggttcggtccgttgccactgtcgtccggcgtgagccatttgaaaccgctgttaatgccttccgcgcgaccttcgactctgcccatgcgccggaatatctggaacaggagatcacagacctgttcgtggaactggtgggacgggtagaccccaaagcctcagaccagatggccgagcttgccgccgccctgttcaattttcatatttccccgggcgctgcatttaccgctacggcgcatctcatggccgcgtgcaacaaacggccgaaagtatccggattcgaccactaccaactgatctctccggccctgccgaaagggtgtatgccggtagcggccgccgcagccgttgcattattgaacgaacggggcgagcccatcacggacagctttcgacgatccgcggattggtggttccgtcagcacgacaaggtttcagaaaacctcaaggatcaagtcacggctgcaatccaggccgtatggtcaggaccgcacgcggcgcgttccccactgcgtcacccacttcctctttttggcggagacgtggactttcatgacatccgagacgatatgctggcaaggttacccaagcggccattccggcccaaggaatag

SEQ ID NO: 22522 - DNA, 720 bp, Bordetella hinzii LMG 13501
atggccaggtgcacagccccagttgaaggtcatcgttcatcgagcgccgcagcggcctgcccagcgtgccgcggtcgctatggtcgcggtggttacggcggctacagcggctacagcggctacgggtcgtactccccccggtcctactcttcgccgggtggcgggggtaccagcagtggagggtccagcggcagtgcaaggccgcgctggtcacgagcaggttcgtccgtctcgtacacctttgcccaggtggcatccttaacgccggtccgtgcggctgttgaaagagaagcggcggcgaagccagacctcagggattgcttcctttgccatgcttgggatgataggcagggagccgccaaagaactgcacgatttgctccaggcagcaggagtcaaagtttggttcagcgaaaaggaccttggacttggcgtgccgatgatgcgcgccatcgacaagggtttggcggcctcgaaaattgggctcgtccttgtgaccccggcattgctagaccgtcttcccaaagagggagtcgccgacaaagagctttcgacccttctgcaaggtaatcggctcgtgcccatcgtgcatggaacgacatacacagcgctccgcgaagtgagccccatgcttgcttcgcgaagcggtctggacacgtcggaagacacaatggaggtggtagcggccaaaatttccgaactggtcgccatctggagctga

SEQ ID NO: 22523 - DNA, 3594 bp, Sinorhizobium fredii NGR234
atgagacttcatcacctcggtcctgatttcccggaagcgctcgtcgacgaactgctcgaagggaatgtcgtatttctctgcggtgcaggggtcagcgcgccgcaactgccaaattttcgcgacctcgtgctcaacgtctataatcgattgggggaagagcgcacgcctgccgaagaccatgctttccaggcgtctcgctatgaagaagttttgggtgccctgtcacggcgccttgtacgatcagaggatgttatagacgctgcggccgcagaactgcaggttcccgcaaatcctgataccgcgcatcacgacgtcatcctgcggctatcacgtgatcaggttggaaggccgattatcgtcaccacgaactttgacacgctgttcgagcgctcactcatggtttcgcattcggcagctttcgcgacgcaggagagcgcggcaggacaggatatacccgctccagggagcgcgaggttcacgggagttgtccacacccacggccggctgaccgacgatgagctcaatctttcccaaacagaactggtactgaccagcgctcagtatggggaggcatatctgcgagccggctgggccgctcgcttccttttcgacctcatgcgttgtcgcaccttggttttggtgggctatactgcgaacgatgctccggtgcgctacatcctgaacgttctggaaggtgacagggagcgttttaccgatctcaggcgcgtatatgcgctcagctcatcaaatggcgacccccaagccgcggccgccccgtggcaggctctggcggtggagccgctcctattcgatccagaaggcggcaatccatacgggccactatggtcaagtcttgaaggcctggccaacctcgtggagaatccagatgttcgtcgtcgcgagatgatcgccgccatcgtctcgggcccggtatccgaaactacagaccacgatattcgcaccctcaaatgggcgctgggcgcgagggccgaccttttcgagcacttcattacgcgatgcgaagatgctgcatggttcgacacacttgccgtggtgatccgagctttcggcgaacgcgcgcgagcctggatgcttgcccgatggttcgcaagaggatgggatgacaaggtcagatacctaaccgccattaaacatctggggaggggatcacaggagttctccgatgccgtgtttcgcgaactcgatcagaaccgtccgcaggatgcgatatgggagaaagcctggcgcttgctcgccgaagcggccgcggcggcatcacacgacagtttgcgagactatcagctgcgtcaccggctgaaccgagggccggtcgtggagtccgacctcggacacttggtcaatgccatcggaccgcgcctgacaatcgaggcgccgtttcgcgatgaggatccttctgagcacccaaaccagctctcggatattgctcgtttttcgatggagagcgagcatcaggagttcttgcgggatgttttggcgtcccccgccggcaacgcggaaaacatcctgcggctgctcgagcggggttcgcagcgactttcttgccagctccggactgcgcgcgatgctgaactgatcgggcaggtacgcgatgttacagatttcggtgtaccgtccgttgttaatcatcagcaaaatcagcatcgccgcgggtttgttccgctcaccgtatttatcacatccgcgttgcccatggccgctcaagccaatttggaggggacgaaaagggtggtcggcggatggcgggcggagccgttcaacctgaccacccggctttggatgcacgcacttacacatcaagctcttttcaccgccgacgaggctattgaggcgctggcaaccagcaacgaggcggccttctggtccttcgcgctggagttcgtcgccattgttcgcgctcgcattgctcaggcaagcggagaggcggtcgaacgtctagttcggcgcctccttgtcgagggtccacaaagatatgccgaccgggaacagaacgctgacggtatcgactggcaggaccgtgcacgtgaccgcgatatttgggttcgattgaccgcgatcagtgagcacgtagttctcccgcaggaggccgaaaccctgctacacgaaattcgtgagcggcgcacatacctgtcgcgtgaaatcgatgagcgggatcttttccgcacttggagctccggagtcagggccgtccgcgggcgcaccgcgcaaattgtgtcggctcaaccaagcgaacgcctcacgatcgccgatcggctcgaggaaagcagcgacatcgaagatcgagagggctgggtggaatattgtcgagaggatccggtcggagcctatgctgcgctgcgttctcatccccttgaaatcggcgtagttgcacgttgggcgacgtggctagagatcattcccagtcgtgcgaatatgacaagcccagagtggctgcgtgtcattcaagaagcggtcgagcttctcggagaggcagatgacgagatcgtcatcgctcttgtcggtcccctggctcgcatagcagaacactcacggcagcttcaactcgctcttcccgcgaactggtgggatcggctgtggcaagctgctgagggcgagcccgacgttgattggggggatgatgtcgagacctatgaccgggtcatcaactcgactggtggatcacttgcggaagcactgcttcaagctatcagctctcaaagggaaaatggagacgacgtgaacgccgcggactttcaacgattgcagcggatgatcgtgtccatgacctattccggcgaaatggcacgtgcagcgtgcgtccggtacctgtcattcgttttcagcgtttcgaacgaaattgctctcgaccacttgagacccttcatcgctgcggacaatgatgaggggaggcgactacgcggggtcttggtcgaatacaacagcttcgttgcggatactgaaatcagctttgccgatctcattctacagggagttcgggagagccggcaaaaagatgtctcggccgccaatgcagcctcgcatctcgtccgagcggtggttgcgtcttttgacgaaccgaatgtggtcaggggtatctcgccgcagcaggcgcggcagacgcttcgggaggctgccgcggacatacgcgtcggtgccttgaaaattatgacaaactggcttgaggaaaatccggacgacgagcgagcggccgcctggactgacctatatggcccaacattccaggcgatctggccgcgcgaccgcagctatctttcaaatgacgtgagcaaggaagtattttcgttagcaacggcggccggcactgcgtttgaagctgcggtcgaagcccttctaccatatgtctcgacattcgaggatgactggctcagccttcacgatctcgaacgtaacaatgccgagctcgccacgcgcttcccggtcgccgccctcaggctggtgtgggccgcatgcgggccgccgtgcaagggccgcacatcggatatcgccgccattttggatgctgtcgctgcggctaacccggctctggccgttgatcgcaggatgcataagctgcggcttttagcagtcagtcattga

SEQ ID NO: 22524 - DNA, 1923 bp, Sinorhizobium fredii NGR234
atgaagtatgatttctcaacactttctccggatgacttcgagaacctgagtcgcgatcttgtgggcgccgaaaccggagttcgattcgaagcgttcaccgttggcgcagatgacggtatggatggacgccacgccaaagccgatggttcgatcatcctccaggccaagcactatctccgatctggcttctcgaaactcaagtcgaagatgcgagaagaacgtgtttcaatcgacgaactggccccgcaacgatacattctgacgacgtccgtaccgcttaccccggcaaacaaggcaacgctgacggaaatcattggaccaagcctagtcggacccggcgacatatttggcgcggacgacctcaacggcttgctcagatcctatcctgagattgtgaaggctcatgaagggctctgggcacacagcaccccagtgctcgaagaggtcgtcaccaacgcggtgcgcaaggcaatggcgccggcggaggttcccaaaacgctcgctcgcctgatgccgccacccggggcagccgatgctccgatcgagcccgtaaagcgcgatacgatcttcataatcaaggcttcacccatcgacgacgagttcacgctatggcttgctccaaagcttgaggccgagggctaccaggtctttgccgacgtgctcaccctcatgcctggcgaacgttggcgaagggagataaccagtgcgctgcgccatcgcgcggtcaaggtcctgcttctctgccgtgattccagtcttgaggatagcagcatccaggacgacctcgacattgctctagaaacgggaaaggaactcggtgatcagcggtttgtcattccgctgcgcatggagacgtttcggaagatcaaaggtctcggtgacactgtcgcggtcgatttcgttcgaaattggggagaaggcctgctcaagctcatcgataccctgcaacggcaaaaagtccagcgcagcatcgacacgatgataaaccccaactgggagatctatcgccggcgcggcgccgtgccgatcatcgaagttcctgagcgactgacctcaaactggcttcgggtcgccgaggcgccagatttcatccgatacttcgaatgctctggatcgatcaacaaagggcgcctccagggagcgatcgacagctatggacatccttgcgcattggtcgggggatcaggttttctggcattcggtggtgtgccggaaatcgaaatggcattcgaagccgtcggccgcttcaagctgaaacatgaaattccgctcgtggaattcacggagggcggctttcagcgactgcgaattgaccgccagattgcctccaacctcgttgtagcgatgctcaagaaggcctggttcaactactgcaaacgcaacgggttcatcgaacacggatattcgaatggcatcggcttccacgcgtcaccagaacaggcgccgacgggcaagcgaattccgtgggggaaccaggccgagaagaagcggtcatcgatgctgcgcaattccgctaagggccatatctggcaattcggtgtgactgccatgccagctttctggccgttctggcacttcaagctgaagtcgagggtcctgtttgcgcaagataacgacaccccagccggccttgttgtcgacgatcccaagaagctacaccgcttgaggcgatcggtctgtaagggctggcgcaacaagcagtggtacgggcggcttctggcgtttctagaattgctttccggagaatcggcttttgttcgcctccctctttccgagacggaaaccttcgttatcgaggcatcgccgatgctgttttcatcgccggtcagtaccgttcttccaaacgacctagatgacgaggacgaggagctggatgacagcactctcgggcggcctgacagtgatgaggagggcggcgaatga

SEQ ID NO: 22525 - DNA, 837 bp, Pseudoalteromonas atlantica T6c
ttggcaaaggtaagttttctggataagagaattttcaggcaatttcttgaagttgtctctgtaataagtgtcgtggcatcgcttgcatttatatttgttgagatacccaaagattgtaagctcgtggtcgggggcatatttttaatactgctttttggcgtttatgtggctttgtgggtcagatctaacaacttgcagcagattcacactaatatcgagggaagtgaagtcacgataaaaaaaggggatatatttaagcagcctgattttaaagtcatagcgtttaatgaatatttagatacgaaagtggataacaagattatatctagtaactcactgaacggtatatttattaatagccatcttgacacttcagttgttgaccttgatcgttatatcgaaaactatcctttcgaagatgatgatgttgttggcgaaaatccggagaggaagagcgggaaaaagaaacgtttcgaaattggcgccatttgtgtatatggagagtatttgttaacagctttttcgaaatttgacgataaaaaccgagctcggttaacgatgccggaatatctcagttttcttattaacttctgggacagggtgaatagaatctatgcacaaaaaagtgtttcggtcccaatttttgggtcagggataacgcggattaaagagcacaaaaatatcagtgatgaagacttgcttaagatcatgctttggacattcaggattagtgagatgcgattcaagtatccagcaaagctaactattattattcatccagagaaaatggatgctattaacttactcgatattaaatcgtccaacaatgggctttaa

SEQ ID NO: 22526 - DNA, 570 bp, Pseudoalteromonas atlantica T6c
atggcatatcgcaacggaaattattcagcgttttacgtcagtgagccattcactgaaggtggtctaggcgctcatgcaactaaagattttgtaagctacagcatgcttagagcatggaaaggaaaggattcagactttccatttaatgattcccacaataaaaactacaatgtaagggacggcagtgattgggacaaaactttaaaaccgagaattagagagcgactcagtaaatctaagaatataatattattcttaagctctgtgacaaaaagttccaaagcgattcgtgaagaaattgactacggaataaatacattgggcttgccggttattgttgtatatccagagtacacggaaaaatctgatattattaactgccaatcaaaaacgttcaaaaagcagataaaggatctttgggataaattgccaaagtttcgagactcaatggattcagtgcccactctacatatcccaaacaaaaaagcactgatcgaaaagtcgcttaaggatactgactttatggtgaatacaaaaaaggatgcagccaagtctttttatccgtgttaa

SEQ ID NO: 22527 - DNA, 849 bp, Acidovorax ebreus TPSY
atgatccacgtcatggcgaaggtcaacttttttgacaaacgggtcatcaagaaattccttgaaatcaccgctgtcgtcagcggtacgctgtcattcgtagttatttttgttgacatccctgccgagtggaagctgaaggctggcttggctttcctggcagtacaggcactcacctacttggtgatatggctctggtcgaacaacctgaacagtatcgacatcaatgtcgagggcagcgatgtagcgatcaagactggcgacattttccggcagcctggattgaaggccatcgccttcaatgagtatttcgacacgcaggtggacaacaagataattggcgagacttccctcaacggcgttttcatccagaagcatctcggcgtcccgctctccgaactggaccgccacatcgaggaatacgcttttgataacagcgaagtcctggatgagaacgaaaccagaaaacaggggaagaagaaaagatatcagataggcacgatctgcctgtacaaagactacctcctgaccgcattctccaaattcgacgagaacaacaaggcgctgctgacgatgccagagtaccttgagtttctcatcaatttctgggacaaggtaaacaacgtctacgctcagcaaagcgtatcgaccacgatcttcggttcgggaatcacgcggatcaaaggacacaagaacatttccgacgaggatctcctgaagataatgctgtggacgttcaggatcagcgaaatgcgattcaagtatcccgcgaagctgaccatcgtgatccacaaagacaagattgaccaaatcaatcttctcgacattagatccgctaggaacggcgtgtaa

SEQ ID NO: 22528 - DNA, 564 bp, Acidovorax ebreus TPSY
atgacatatcgaaatggaaactacaccgccttctacgttgcggagccattccatcccagctcgctgggtgccaatgcgacaaaagattttcaatactacaacaccctgcggatgtggaaaggcgctgatgcgacgtttcccttcgtcgattcgcacgacaaaacttacagcgtccgcgacggcagcgattgggaatccaccctgaagccgagactcagggagcgccttcggaactcgaagaacatcatcctcatcttgagttcgatcacgacgaattcccgcgcccttcgagaagaaatcgactacgggatcaacgaccaggggctgcccatcatcgtcgtctaccccgaatatgccactaaggaaagcctgctggtcggtggatcattgaagcaggcggtcaagaacctgtgggaaaatcttcccgtgttccgggattcgatgagcaaagtccctacgcttcatgtcccaatgaataaggaactcatcaagaaatccttgcaggacggcgagttcatggttgggagcgtgaaggcccctggcatctacagatacaacccgtaa

SEQ ID NO: 22529 - DNA, 891 bp, Eubacterium eligens ATCC 27750
atgaaagtattattttgtacgatgagatataactggcattacatatttattacaagcaacaaaattactgcatccctcttttctgtttggggattcgttacattagttacaccaacagacattatgttaaattgtattgataatgtagttatgcgaatgattgtagctgtgtttattttgatggtaatctattttgccatagtgataggtgtcacaatatatactaagcaaagaaaacaagtgaaaatttttgatcttcactcaaatcattcgctgtttgtagaatatggggatttatttaataatggaaatccaaatgaaaagaagaacattgtttttgctgggaatagatgctttgacacgatagtagatgatgacttagtaggatcaaaaaaaattcatggtttggcattagaacgaatatataagcaaaacaacagagattctgatacagtctcaaatgaaatacaaaacaatttgttattgcatggatataagtatacgaatattaaacaaaaagaaaagcgaagtggaaacttgcgtcgatatgatatcggatcggttgctgaaataaagggcctcaacaatgaacagtattttatcttaggactgacatattttgacaatgaattaagagcccatgtcgaaaaagaagactatataaaagcgatagcttctttagtaaaatatatttcagaacgttctcaaggctttcctacatatatgcctgtaattggaacgggaggggctgatgtgggcagtgcaaatgacttagctgtctatattgttaaaacaattgaactttttaaggataaaatagattgtgatatacatattgttgtaagggataaagaagaaaaaataggtttgatgaacctaaaaatgttatag

SEQ ID NO: 22530 - DNA, 555 bp, Eubacterium eligens ATCC 27750
atgaacagaacaggtacatatgttgcttttgatgggcaaggaactacagatcctacagaaagcgatattcattattttaacttgctgaaggcatggaatagattaggaagtatagatttcaagtttactaattcacatgaaaaaacttatcaagtgcgggatagctcatcaaaggcaacgctttttaacagattggaaactagattatcagcaagtaagaattttcttttgattataacggataagacaaattatgatagaggaattcttaattgggaaattgaaaaagccgttgattattatgagttaccaatcataatagcgtatccagggtattctaagattggggcaccttcagaattgaataccatgtggccaaaatccttagcggaacgaatacaaaatggaaatgcccattgtatacatataccttttaaaaaggaaccgatttttgacgcgattaatcagttttctgttgttaattcaaagtatcctaaggggggtgctttggggtgttactcagacgaagcgtataaaagttgggggattgtttag

SEQ ID NO: 22531 - DNA, 894 bp, Eubacterium rectale ATCC 33656
atgaacaaagtgaatgtgataaaacaaaatttggagttcataggtaaaacgtggatgaagtgtattggcacatttgcaagtatattatcgcttttctttttgttttggacttgggatgatatacgcattacgtcaacgcaatataaatgtgtgataataatattattatgtgtgcttgcactcatacttgcaatcctatggacgtgtatttttaagagaacaaagacaatttgggaaagtccatctgggaaaataaaagtatgttattctgatattatgaaagatgggtttgacaaaaggaacaaggaagaaaagttatttgtaattccggttaattcatgttttgacactattgtagatgaagatatatcaacatgttcaaagccattggtatcacctaatttgttacatggaagatggataaaaacaatggttaataagggatttactatagaagaaatagacaacaagatacataattgcttggaaatgcaaaatttactgcccaaaagtattattgctgacgaagataaggaacgtgggaaaagagaagtatatgagttaggtacagtggcgatgattaggggaaataacaatagtacctttttgttacttgcaatttcggaatacgataaagataatatcgctcatacttctgtcgatgatttagaaatgtgcataaagtcacttcttaatttttacgatcaacatgaccaagggcatagattggtaattccattgatgggaacaaacctttcgagagcaggattgtcacataatgattcactgagagtaataacatcgttatttcaattgtatggagataaaatacatggagaagttgatgttgttatatataaaggagataaagataaagtaacattagacatatag

SEQ ID NO: 22532 - DNA, 567 bp, Eubacterium rectale ATCC 33656
atgtcatatcaaaatgcaaattatagtgcgttttatgtttcggaaccatttagcgaaagtaatttaggggcaaattcaacacatgattttgtttactacaatatgttaagaatgtggaaaggagaggataatagttttccctttaatgatgcacatgataagacatataatgtgcgagatggtagtgattgggaaaagactcttaagcctagacttcatacaagacttgacaattctaagaacattattttatttttaagttccattactgccaatagtcgtgcattgagggaggaaatgaattacggaataggtacaaaaggtttaccggtaattgtaatttatccagattacgacaagaagtcagatatagttgatagtaatggaaatttcaagaagcagattaaagatttgtgggataagttgccggcttttcgtgataatatgtcttcggtagctacattgcatattccatgtactaagagcgttattatatcagcattgaataatgaagattttatggtaaatacaatggcagatgctgaaaaatattattataaaccataa

SEQ ID NO: 22533 - DNA, 852 bp, Bacillus thuringiensis serovar finitimus YBT-020
atgtggaaattaaaagaaattcttcaagataaaaatttttggattaacacttgggtactccctggtgcattatttggaatcgctacaacattgcttacttttattgaattcgaaagtaaaactataaaacaatttattttaggtgtgctattatttttgactcttttaattattctatatcaaattattagggttctatgtttaaaatcactaaaactagatattgatggttcagaaatccaaattaaaaagggagatattttttcattccccaggaatgtatacaaagttatcgctttcaatgaatttttcgacacaaaagtagatgaccacataatatctagaacatccttaaacggaaaatatttaaacaaatattattcagacacatctgatttagataacagaattatcgaagatccacgaatgaagcttagaatcactgaaaaagacgtaaatcgccctttaggcggaaaacaaactcgttatcgtttaggctctgtttataaggatatggatttctttcttgtagcattttctaaatttgacgatcaaaatgaagctaatttaaaactacacgaatatgcaaattgcttaataaatttttggaatgaggtaaatagcctttacgcccaacaagaaattgtagttccattgttaggttctggtataacaagacataaagactttgatgccgagccacatcaattgttagaagtgatgctttggacttttaaaattagtaaggttaagtttagagaaccttctaaagttactatcctccttcatggagaacatcataaaaaaataaacttttataaattgaaggagtttgaaaataatggcatataa

SEQ ID NO: 22534 - DNA, 570 bp, Bacillus thuringiensis serovar finitimus YBT-020
atggcatataaaaatggtaattatacagccttttacgttagcgaaccttttagtgagagtaatttaggtgcagctgccacaagagatttttcatcttatagcatgttaagagcatggaagggtttagatagtacattcccgtttaatgactcgcacaacaaaaattataatgtaagggacggaagcgactgggaaaaaactttaaaacctcgcctacgtgatagaatcaacaattctaaaaacataattttatttttaagttcagtcacaaaaaacagcaaagcattgcgtgaagagatagaatatggagttggcacgaaaagtctaccgataatcatcatttatcctgaatacaaaaacaaaagtgacattatagactgcaaaacagaaactattaaagacgaaattaaaaaattatgggataaaatacctatccttagaaattctatgcagaatgtccctacaatccatttaccatataaaaaggagttaattcgaaaagcattaaatgatacagattttatggtgaattcaaaatgtggcgcagggaaatttttttacacatgctaa

SEQ ID NO: 22535 - DNA, 894 bp, Bacillus amyloliquefaciens Y2
atgaatataataggtagtgatcgcaatactaacattggaggttttatgtggaagtttaaagaattaataagagataagacatttagaaggtgggctctgagtataattctgactattccaactagtgtgagtacattcatttcatttctagacttggatgctcgttgtagattaattattttacttatattagtagggttgtcgctagtcataataattgttcaattcattagactactttttatgaataatatcactcttaatctcaatggttccgaagttgaaattaaaaaaggtgatatttttgaagtgccaagaaataattataaagtcattgcatttaatgagtattttgacactcaagtagatgacgtaataatcgcccgcgaaacattaaatggtcaatatataaagcgttattattcacatcaagatatcactgagttggatcagaaaattaaagatgacgtaaaacttaaaattgaagaaaaaaatgttgaaagaccttttggaggaaaaacaacacgttacagcttgggatcagtctttaaagatatggatttttttctagttgctttttcgaagtttgatagggaaaatcgtgcccaattaaaactaaatgaatatgcaagctgcatgcttaatgtatggaatgaaatcaatacattacatgcaagcaaagaagtgtttatccccttattaggttctggaataacaagacatgtggattctgatgttggagtcaatgaactattacatataatgttgtggacatttcagatcagtaaagtaaagtttagagaaccagccaaagttacaattcttttgtacaaaaatgatcacaagaagatcaatttttataagttaaaggagtttgagaagaatgggttatag

SEQ ID NO: 22536 - DNA, 471 bp, Bacillus amyloliquefaciens Y2
atgttaagagcatggaaaggaaaagataataactacccatttaatgactcccacgataaaacatacaatgtacgggacggtagtgattgggagaaaacattaaagccaagattaagaaaaagattagatcaatcaaaaaatataatcttttttttaagtaagcatactgaaaacagcaaagctttgcgagaagaaattgattacggtattaatgtgaaggggctaccagttatcgttgtataccctgaactttccgaaaagagtgacatcatcgactgcactacaaaggttttcagatcagaagtggtgaatttatggagtcgagtccctgtttttaaagactctatgctaaaggtaccaactattcatattccttataaaaaagaccaaattaaaaaagctttagagaacaaagattttatgattaattcaaagatttctgcaggttcggtttatttttatccatgttaa

SEQ ID NO: 22537 - DNA, 837 bp, Pseudomonas monteilii SB3078
atggcgaaggtcaacttttttgacaagcgggtcatcaagaaattccttgagatcaccgctgtcgtcagcggtacgctgtcattcatagttatttttgttgacgttcctgccgagtggaagctgaaggctggcttggctttcttggcaatactggcactcacctacgtggtgatatggctctggtcgaacaacctgaacagtatcgacatcaatgttgagggcagcgatgtcgcgatcaagaccggcgacattttccaccagccgggattgaaggcaattgccttcaatgagtatttcgacactcaggtggacaacaagataattggcgagacttctctcaacggagttttcatccagaagcatctcggcgttccgatttccgaattagaccgctacatcgaggaatacgcttttgatgaaagtgaagtcctggaggagaacgaggcaaggaaacacggtaagaagaaaaggtatcagataggcacgatttgcctgtacgaagactatctcctgaccgcgttctccaagttcgatgagaacaacaaggcgctactaacgatgccggagtaccttgagttcctcattaatttctgggacaaggtaaacaacgtgtacgcccagcaaagcgtatcgacaacaatctttggatcaggaatcacgcgaatcaaaggacacaagaatatttccgacgaggatctactgaaaatcatgctgtggacattcagaatcagtgagatgcgattcaaatatcccgcgaagctgaccatcgtgatccacaaagacaagatcgaccagatcaatcttctcgatatcaaatccgccaggaacggcgtgtag

SEQ ID NO: 22538 - DNA, 564 bp, Pseudomonas monteilii SB3078
atggcatatcgaaatggaaactacaccgccttttacgttgcagagccattccatcccagctcgctaggtgccaatgcgacgaaggattttcagtattacaacaccctacggatgtggaaaggtgctgatgcgacgttccccttcgttgattcgcacgacaaaacttacagtgtccgcgatggcagcgattgggaatacacactgaaacccaggctcagggagcgccttcggagctcgaagaacattatcctcatcttgagttcgatcacgacgaattcccgcgcccttcgagaagaaatcgactacgggatcaacgatcaagggcttcctgttattgtcatctatcccgaatatgccaccaaggaaagtctgcttgtcggcggatcattgaagcaggcggtcaagaacctgtggggaaatcttcccgtgttccgggattcgatgaacaaagtcccgacgcttcatgtcccgatgaataaagagctcatcaaaaaatccttgcaggacggcgagtttatggttgggagcatgaaggccccaggcatctacagatacaacccataa

SEQ ID NO: 22539 - DNA, 837 bp, Pseudomonas monteilii SB3101; identical to SEQ ID NO: 22537

SEQ ID NO: 22540 - DNA, 564 bp, Pseudomonas monteilii SB3101; identical to SEQ ID NO: 22538

SEQ ID NO: 22541 - DNA, 858 bp, Sulfurospirillum multivorans DSM 12446
atgagtttaaaaaaagttggcttttttgataaagctattagagataaattttcaaaagttatagcatggatgtcgtctatagtcacacttgtatttgttttttctccagcattaccgagcaattggaaactagactttggaatgggtttcattgctattttgtttgtaatttatatttatctttgggttaaagcaaacttattatctagtgtaaagataaatatcgaaggaagtgaagtcaatataaaagctggagatatttttgcacaagatggtttaaaagtaatagctttcaatgaatactttgatacaaaagtagatgataatataatctcaagtaaatctcttaatgggatttttataaataaatattttaaagattctgcgggtgtgcttgatcaacatatagagaactatgattttgaagagaataagattgaagttaattcaactagaaatgatggaaaaaaacaaaagtttaaaattggaactatttgtttatataaatttcaaaataatgaggagtttatcttaacagcatttacaaaatttgatattcaaaataaagctactcttactatgccagaatatttagagtttttaatcaagttttgggatgagataaatagggtatatgcacaaaaaagtgtatctgtaccaatatttggctcaggaattacaaggataaaagagcataaaaatatcagcgatgaagagttgctcaaaataatgttgtggacttttagaattagtgagatgagatttaaatatcctgcaaaattaactatcgtagtacacaaagataaaataaatcaaataaatcttttggatatagagatggcgaagaatggattgtaa

SEQ ID NO: 22542 - DNA, 564 bp, Sulfurospirillum multivorans DSM 12446
atggcttatcgaaatggaaactattgtgccttttatgtaatgaatgaaggtactgatagtaatttgcaagcccacgcaacaaaagactttgtatattacaatacattaagaatgtggaaaggtggggatagtacttttccatttgttgattctcatgataaaaactacaatgtaagagatggcagtgattgggaaaagactttaaagccaaggcttagaaatagacttgcaaattctaaaaatatcatactttttttaagtgaaaaaacaaaaagctctcaagcacttagagaagagattgattatgggataaataatcagggtctacctgtaattattatatatcctgactatgatagtaaagccagtttattaaaagatggttcattgaaaaaagagataaaggatctatgggataagctaccgatatttagagattctatgaaaagtgtttcaactttacatataccgatgaaaaaagaacttataaaaagtgctttagaaaatgaagattttatggttaattcaaaagtagcttctggttgctttttctataaagtgtga

SEQ ID NO: 22543 - DNA, 837 bp, Pseudomonas alkylphenolia
ttgcgcaaggttagtttttttgacagtcagttaatgaaaaactttaaggaacggatttccaccaccagcaccgtattgtccctcgcattgatttttgtggaaatccctgcgcagatgaaggcgttggctggcgctatttttatcggacttctaattgtagtttacgtctggttgtggcatagagcaaatcagctaaaaagcgttgatttagacattgatggcagcaaagtcacggtgaaggcaggcgacttatttttggagccaggattaaaagtcattgcattcaacgagtacttcgacacggtcgtcgacgatcgaatcatatctgcgcactcattaaatggggtatttattaatttacacttgcccagcacgcttaccaaactcgatcaccacctagaaacatatccctttgaccctgacgaactgggtgaattaaacactgccagacgtgcaggaaaactgcaaaaatataaaatcggcacactatgtgtctacgatgattttatacttacagcattctcaaagtttgacaatcaaaatcgggcaatgctgaccatgcccgagtacctggagttcttgatcaacttttgggataaaatcaataaagtgtacgctcaacaaagcgtatccacaccaattttcggctcaggcattacgcgaatcaaggaacacaaaaacatcagtgatgaagacctgctcaagattatgttgtggacatttcggatcagcgaaatgcgatttaagtaccccgccaaactgacgattgtgatccaccaagacaaaatcaagaccatcaaccttctggacataaaatcggcgaaaaacggtttataa

SEQ ID NO: 22544 - DNA, 564 bp, Pseudomonas alkylphenolia
atggcataccgaaatggtaactattgcgcgttctatgtggctgaaccctttcacgaaagttcactagctgcccatgctaccaaggacttcgtttactacaacatgctgcgagcttggaaggccaaagacccatcctttcctttcattgactcccacgcgaaaacttatagcgtgagggacggcagtgattgggaaagtacgttaaaaccaagattgcgcgaacgcctgcagtcctcaaagaatattgtattgtttttaagcagcgtcactattagttcagttgccctgaatgaggaaattgaatacgggatcgaaaaccaaggacttcccgtcattgttatttacccagaattcaaaacaaaaggatccttattgctgaatggcgccttgtctgaggatgttaaaaaattgtggagcaggcttccgacttttaaaagactgatgtccaaggtgccgaccttgcatataccgctcaaccaagaaaccatagtaaccgcactaatcaactcagatttttcacttacgtcaaagaccaaaccggatgtctaccgctattccgcataa

SEQ ID NO: 22545 - DNA, 837 bp, Pantoea sp. PSNIH1
atgtctaaggttagtctctgtgacaagcaggttttcaatgagtttaagggatatgcatcattattgttcggttttatcggtgcagttgttatttttgtcgacattcctgcaaatcaaaaaattgcggcaggtttagcttgcattgcagtgcttattatcgcctatctttggttatggtacagagcaaatagcttgagggagattaatctaaccattgaggaaagtactgttatcattaaaacaggagatatcttcaaacaggagggtttgaaagcgatcgctttcaatgaatattttgatactcaggttgatgagcgaattattgccggaagtagtctcaatggtaaatttatcaacgaacatttatcttgtactgtaagtgagttggatgattacattagtaactataggttcgatgccgaagagataaaagatagaaatgaggaaaggattgaaggtaaaaagcaaaaatttgaaattggcactatttgtgtttatggtgattacatactcactgcgctatctaagtttgacgagcacaatgtagctcatctcacaatgcctgagtatttaggttttctaataagtttttgggataaggttaatcgagtctatgctcaaaaaagtgtttctgtcccaatctttgggtctggacttacaagaataaaaggccacaaaattatcgatgagcaagatctattaaagataatgctttggacttttaggataagcgaaatgcgatttaaacatccagcgaaattaacaataatgatccatgaagggaagatagataaagtcaatcttttagaattaaagacagcaagaaatggcttgtga

SEQ ID NO: 22546 - DNA, 555 bp, Pantoea sp. PSNIH1
atgagtgggaattactgtgcattttatgttgctgagccttttcatgagggcgctctgggagctcatgctacgaaagacttcgtttattacaacacactgagaatgtggaaaggagcggactccggtttcccttttaccaattcacacgatacaacttataacgttcgtgatggcagtaactgggagcaaactttaatgcctcgcctcagacagcgtctgcggaattctaagaatattattctattcctgagtgatcgaactataaattctcgcgctctacgagaagaaattgattacggtattaattccttggggcttcctgtaattgtaatataccctgactatgacacaaaagaaagtttgctagttaacaacattttaaagcagcaaatacaaaatttatggtctaagattcccgcattcagagattcaatgcatttagttcccacgttgcatatcccaatgaataaagctcttatcagacaatcactggcagatagtaagtttatggtgaaaaccaaaactgttccagatgtatatagatatagcgcataa

SEQ ID NO: 22547 - DNA, 837 bp, Pantoea sp. PSNIH2; identical to SEQ ID NO: 22545

SEQ ID NO: 22548 - DNA, 555 bp, Pantoea sp. PSNIH2; identical to SEQ ID NO: 22546

SEQ ID NO: 22549 - DNA, 828 bp, Bacillus sp. BH072
ataagagataagacatttagaaggtgggctctgagtataattctgactattccaactagtgtgagtacattcatttcatttctagacttggatgctcgttgtagattaattattttacttatattagtagggttgtcgctagtcataataattgttcaattcattagactactttttatgaataatatcactcttaatctcaatggttccgaagttgaaattaaaaaaggtgatatttttgaagtgccaagaaataattataaagtcattgcatttaatgagtattttgacactcaagtagatgacgtaataatcgcccgcgaaacattaaatggtcaatatataaagcgttattattcacatcaagatatcactgagttggatcagaaaattaaagatgacgtaaaacttaaaattgaagaaaaaaatgttgaaagaccttttggaggaaaaacaacacgttacagcttgggatcagtctttaaagatatggatttttttctagttgctttttcgaagtttgatagggaaaatcgtgcccaattaaaactaaatgaatatgcaagctgcatgcttaatgtatggaatgaaatcaatacattacatgcaagcaaagaagtgtttatccccttattaggttctggaataacaagacatgtggattctgatgttggagtcaatgaactattacatataatgttgtggacatttcagatcagtaaagtaaagtttagagaaccagccaaagttacaattcttttgtacaaaaatgatcacaagaagatcaatttttataagttaaaggagtttgagaagaatgggttatag

SEQ ID NO: 22550 - DNA, 573 bp, Bacillus sp. BH072
atgggttataggaatggaaattatgctgctttctatgtcagtgaaccgtttagtgaaagtagtttaggggctaatgcaaccaaggattttgtgtcgtataacatgttaagagcatggaaaggaaaagataataactacccatttaatgactcccacgataaaacatacaatgtacgggacggtagtgattgggagaaaacattaaagccaagattaagaaaaagattagatcaatcaaaaaatataatcttttttttaagtaagcatactgaaaacagcaaagctttgcgagaagaaattgattacggtattaatgtgaaggggctaccagttatcgttgtataccctgaactttccgaaaagagtgacatcatcgactgcactacaaaggttttcagatcagaagtggtgaatttatggagtcgagtccctgtttttaaagactctatgctaaaggtaccaactattcatattccttataaaaaagaccaaattaaaaaagctttagagaacaaagattttatgattaattcaaagatttctgcaggttcggtttatttttatccatgttaa

SEQ ID NO: 22551 - DNA, 837 bp, Klebsiella oxytoca; identical to SEQ ID NO: 22545

SEQ ID NO: 22552 - DNA, 555 bp, Klebsiella oxytoca; identical to SEQ ID NO: 22546

SEQ ID NO: 22553 - DNA, 279 bp, Nostoc sp. PCC 7120
atgccagattatctcggttttttaattagattttgggataaggttaatagggtgtacgcacaaaagagcgtctcagttcctatatttggttcaggaataacacgcatcaaagaacacaaaaacatcagtgatgaagacttgttgaagataatgctttggacgtttagaattagtgagatgcggtttaaatatccagcaaaattgcacattattatacatgaaagcaagatagacagaattaacctgttggatattaaatcggctaagaatggtttgtaa

SEQ ID NO: 22554 - DNA, 561 bp, Nostoc sp. PCC 7120
atgtcatacaaaaacggaaattactgtgctttctacgttgctgaaccatttaatgaaagtgctttaggcgcatacgcaaccaaggactttgtttactacaatttgctgagaacttggaaaggaagtgactcatcctttcccttcaacgactctcatagtaaaacttacagcgttcgagatggcagtgactgggagttaaccttgaagccaaggctccgagaacgtcttagaaactcaaagaacgtgatcctattcctcagcgaaaggacagtaaattctcgcgccctaaaagaggaaatagattacggaataaattcacttggacttccggtaattgtgatctaccccgactacgataccaaggaaagcctcttgcataacggctctttaaaagacgagattaagaatttatggaataagctaccgatactaagggaatcaatgaataaagttccaactttacatgtcccgatgaataaatatcttattactgagtcgctgaaaaataatgacttcatgacaaacacgaaaacaacaccagatgtgtatctttatcgataa

SEQ ID NO: 22555 - DNA, 849 bp, Ralstonia solanacearum GMI1000
atgattcacgtcatggcgaaggtcaacttttttgacaagcgggtcatcaagaaattccttgagatcaccgctgtcgtcagcggtacgctgtcattcatagttatttttgttgacgttcctgccgagtggaagctgaaggctggcttggctttcttggcaatactggcactcacctacgtggtgatatggctctggtcgaacaacctgaacagtatcgacatcaatgttgagggcagcgatgtcgcgatcaagaccggcgacattttccaacagccgggattgaaggcaattgccttcaatgagtatttcgacactcaggtggacaacaagataattggcgagacttctctcaacggagttttcatccagaagcatctcggcgttccgatttccgaattagaccgctacatcgaggaatacgcttttgatgaaagtgaagtcctggaggagaacgaggcaaggaaatacggtaagaagaaaaggtatcagataggcacgatttgcctgtacaaagactatctcctgaccgcgttctccaagttcgatgagaacaacaaggcgctactaacgatgccggagtaccttgagttcctgattaatttctgggacaaggtaaacaacgtgtacgcccagcaaagcgtatcgacaacaatctttggatcaggaatcacgcgaatcaaaggacacaagaatatttccgacgaggatttactgaaaatcatgctgtggacattcagaatcagtgagatgcgattcaaatatcccgcgaagctgaccatcgtgatccacaaagacaagatcgaccagatcaatcttctcgatatcaaatccgccaggaacggcgtgtag

SEQ ID NO: 22556 - DNA, 564 bp, Ralstonia solanacearum GMI1000
atggcatatcgaaatggaaactacaccgccttttacgttgcagagccattccatcccagctcgctaggtgccaatgcgacgaaggattttcagtattacaacaccctacggatgtggaaaggtgctgatgcgacgttccccttcgttgattcgcacgacaaaacttacagtgtccgcgatggcagcgattgggaatacacactgaaacccaggctcagggagcgccttcggagctcgaagaacattatcctcatcttgagttcgatcacgacgaattcccgcgcccttcgagaagaaatcgactacgggatcaacgatcaagggcttcctgtcattgtcatctatcccgaatatgccaccaaggaaagtctgcttgtcgacggatcattgaagcaggcggttaagaacctgtggggaaatcttcccgtgttccgggattcgatgagcaaaatcccgacgcttcatgtcccgatgaataaagagctcatcaaaaaatccttgcaggacggcgagtttatggttgggagcatgaaggccccagacatctacagatacaacccataa

SEQ ID NO: 22557 - DNA, 858 bp, Nitrospira defluvii
atgacaaaggtggccttctttgaccgacggctattagctaccttctacaagtacgctactgccgtaagtgtcttcctttcctttgtttttccatttgtcgacataccaaaagactgcttgcccgcgccgagctatggcctttggtataaggctgctgcttttgtggcagcattcctcgtcgtctatattgctgtgtgggtttggtctaatcgactcaggaatgtatcaatcaacatcgaagggagtgaggttaatgttgttgctggggatatatttcagcagccggggcttaaggtgattgccttcaacgaatactttgacaccttggtcgatgaaagagtcatctccagtagatctgtcaatggcatgtttgtaaagcaaatcctaaagacgcctgtcgctgatttggacaattacattgagaattatcaatttcaggacgatgagataatcggcgaaaatcaaaacaggcgagccggaaagaaaaagcggtataaaatcggaacaatatgtgtttacgaggaattcttgcttgccgcatttagtaagtttgatgaggacaacaaggccgtgcttactatgccggaatatttggagttcttaattaatttctgggatagagttaactcgatctatggccagaggagcgtgtcaactacaatattcggttctggcattacccgcatcaaggggcataagctcatcagtgacgaggatttactgaagattatgctttggacgtttaggatcagtgaaatgcgctttaagtatccggccaagctgaccatcgtgattcacgaggagaagatcaataagataaatctttttgacatacagacggtcaagaatggcgtttaa

SEQ ID NO: 22558 - DNA, 570 bp, Nitrospira defluvii
atggcatatagaaacggcaactactcggctttctatgttaccgagcccttcaatccaagcgcactcggtgctcacgctacgcgcgattttttttactataaccagctacgcatgtggaaggggcaggattcggtttttcccttcaatgactctcatgacaaaacatacaacgtacgtgacgggagtgattgggaaacgactctgaagcctagactgagggagcgcctccgaaactccaagaatatcgttctgttcttgagttctactactgccaactcacgagcattgagagaggaaatcgactacggaattaatgaccagggtcttccggtcatcgtagtctatcccgagtatgcatctgagtcagacctactgaccgctgacaatcaggccctcaagcaagcagtaaagaatctctgggacaaacttccaatatttcgtgactcaatgagttccgtgccgactctccatgtgccgaataagaaatccgtgatagagaaggcgcttaacaatgcaaagttcatggtgggaaccaaaggagattccggggtcttcttctacaaaccctga

SEQ ID NO: 22559 - DNA, 894 bp, Bacillus methylotrophicus YAU B9601-Y2; identical to SEQ ID NO: 22535

SEQ ID NO: 22560 - DNA, 573 bp, Bacillus methylotrophicus YAU B9601-Y2; identical to SEQ ID NO: 22550

SEQ ID NO: 22561 - DNA, 471 bp, Clostridium sp. CAG:813
ttgaacggtaaatttattttaaattatgttaaaaacatagaagaattcaattctttcattcaaaatgaaaatgaagcgacggatttaaaaagaaaaattttaaaagacaaatcagtgtatccattgggaagaattatcaaatataatgattttttacttttagcatttactcattttgataaaaacaatattgcacacatttcaaaaattgaatatgaaaaatgtcttttaaatatgtggaaagaacttagaaggacatatgctggagagaaaatatttttaccacttattggtagcggaattacaaaatttgatgatgtacctgaaaaatcaaatctcgatttattaaaatgtgttttatgcacattaaaagcaagcggagagcaatttaccgaaacgataacaattttggttacaaatgaaatctgggaagacttaaatctttttgataattcagaatctgttaaataa

SEQ ID NO: 22562 - DNA, 561 bp, Clostridium sp. CAG:813
atgacatacaggaatggaaattatacagctttttatgtagaggaaccttttgatgattctaatttgaaattatatgccaccaaagatttttgttactataatatgattagaacatggaagaaaggtgattctttattcccgtttaatgactcccatgataaaacctacaatgtaagagatggaagtgattgggaaaaaacattaaaaccaaggttacatgaaaggttagacaattcaaaaaacattcttcttatccttagttcatgtactaaaaatagtcgagccttaagagaagaaatcgattatggtataaatacttgtgaattacctattatagttgtatatcctgaatatagtgaaaaatcggacattgcaaaagatcgtaaaataacacaaaaaattaaaaatttatgggataaacttcctatttttagagatagtaaaaaaaatgttcctgttattcatattccatataaaaaagagttaataaaaaaagctttagctgatgaggattttatggtgaactcaaaatgcaaagttaatgactatttttttaaataa

SEQ ID NO: 22563 - DNA, 924 bp, Xenorhabdus bovienii str. feltiae France
ttgaaatccaatggaacggaagtatatatcaagcagaaaaataattctattgggtttcaacctacaataattaaagtccagggaacatttatgaaagttggtttcttcgataaaatagtttggaaagaaattattaaccacgcttccattataagcgtggtttttactataacccttgcttttgtagatataccgaagaatattaaaatattttctggagtggtatttctagttatttttttagttttatatatctttcttctgtataaggctaatcaggcaaagcttgttgagattaaaattgatggttcaaatgtaatagtaaagtttggtgatattttcaaggaggaaggatataaggctattgcttttaatgagtattttgatactgaaattaatgatcgtattatttcccacagtagtttaaatggtcagtacataaataatcatcttgaatgttctatagatgaaattaatggttatataaaaaactataaatttaacataagtgatttttctggggttaataatgataggaaggttggtaaaaaacaaaagtataaaataggtacaatatgtgttcatggcgaatatcttttaacagcattttctaagtttaatgaaaataatgaagctaggcttactatgccagaatatcttggttttttaatttgtttttgggatcaagtaaaccgggtttacgcacaaaaaagtgtttctgttccagtatttggttcaggaataaccagaataaaagagcataaaaatatcagtgatgaagaactgcttaaaataatgctatggacttatcgtattagtgaaatgcgttttaaatatccagcaaagttatctataataatacatgagagtaaacgtgatttaataaatctttatgagttgaaatcagtaaaaaatggaatatag

SEQ ID NO: 22564 - DNA, 564 bp, Xenorhabdus bovienii str. feltiae France
atgagttataaaaatggtaattatgcagcgttttatgttgatgagccagtgtgtgaaacaaatctgaagccgcattctgctaaggattttgtttattacaatatgattagggcctggaaaggaaaggacagtaaatttcctttcgtggattctcatgataaaaattataatgtacgtgatgatagtgactgggaaaaaacactaaaacccagacttcgtgataggcttaataacagtaaaaatattgttctttttctcagtgaaaggactgttaattctcgagcactacgtgaagaaattgattatggaataaatactctagggttaccagttattgttatctaccctgattatgatagtaaagaaagcttacttgatagtaagggattgaaagatgacattaaaaaattatggaataacttaccaatttttagagattctaaaaataacgttcctactctccatataccttttaaaaaagatttaataataaaagcactatctaatgatgatttaatgattaattccaaaggtaaaatttcaacttattattatcgcgcataa

SEQ ID NO: 22565 - DNA, 834 bp, Xenorhabdus bovienii str. feltiae Florida
atgaaagttggtttcttcgataaaatagtttggaaagaaattattaaccacgcttccattataagcgtggtttttactataacccttgcttttgtagatataccgaagaatattaaaatattttctggagtggtatttctagttatttttttagttttatatatctttcttctgtataaggctaatcaggcaaagcttgttgagattaaaattgatggttcaaatgtaatagtaaagtttggtgatattttcaaggaggaaggatataaggctattgcttttaatgagtattttgatactgaaattaatgatcgtattatttcccacagtagtttaaatggtcagtacataaataatcatcttgaatgttctatagatgaaattaatggttatataaaaaactataaatttaacataagtgatttttctggggttaataatgataggaaggttggtaaaaaacaaaagtataaaataggtacaatatgtgttcatggcgaatatcttttaacagcattttctaagtttaatgaaaataatgaagctaggcttactatgccagaatatcttggttttttaatttgtttttgggatcaagtaaaccgggtttacgcacaaaaaagtgtttctgttccagtatttggttcaggaataaccagaataaaagagcataaaaatatcagtgatgaagaactgcttaaaataatgctatggacttatcgtattagtgaaatgcgttttaaatatccagcaaagttatctataataatacatgagagtaaacgtgatttaataaatctttatgagttgaaatcagtaaaaaatggaatatag

SEQ ID NO: 22566 - DNA, 564 bp, Xenorhabdus bovienii str. feltiae Florida; identical to SEQ ID NO: 22564

SEQ ID NO: 22567 - DNA, 837 bp, Legionella massiliensis
atgacaaaggttaaaatcactgatacacgtgtattaagaaaatttttagaaaagatatctgttatatctatggtcattacaacaattgttatttttgttgatatacctaccgaatgccgcattaaatatggtatagcatttttgatattgttacctatcctttacattgctatttggtatcgagccaacagccttcaagatataaacttaaacatcgaagggagtgccgtaaatatcaaagttggagatatttttcatcaacaaggattcaaagtaattgcgttcaatgaatattttgatacgttggttgatgataaagtgattgcgcaaaagtcacttaatggcatttttatcaacaaacatctgaacagcagccccatagaactcgatgaatatattcaaacttatgaatttgacgaaaacgagattttagcaaccaatgtacccagaaaatctggaaaaaccactcagtatcatattggaacaatatgtgtatatgaagattaccttctaacagcattctcaaaatttgatagtaacaacaaagcaaacctaactatgcctgagtatttagaatttctgattaccttctgggacaaagttaatagagtttatgcccaacaaaatgtatcaactacaatttttggctcgggcataacccgaatcaaagggcacaagaatattagtgatgaagatcttttaaaaatcatgctctggacatttcgaatcagcgagatgagatttaaatatccagcaaaactaaccattatcattcataaggataagattaatcagatcaatctctttgacattaaatcagctagaaatggaatgtaa

SEQ ID NO: 22568 - DNA, 564 bp, Legionella massiliensis
atgtcagttaggaatggaaactattgtgccttctatgtcgctgagccttttagtaccagctcattaggagcgcatgcaacaaaagacttctattactacaatctcataagattatggaagggctcagacgctactttccctttcattgactcacatgacaagacatacaatgtccgcgacggtagtagttgggaactaacattgaagccacggttaagagaacggcttcgagtatcaaagaacattattttatttctcagttcaacaacgaccaactctaatgcacttagagaagaaatcgactatgggataaacgatcaaaaactaccggtgattgttgtttatcctgattacaattccaaagcaagcctattgactaatggttatcttaaacaagacgtaaaaaatttatgggacaaattacctatatttaagaactcaataaaaaatgttcccacactccatattcccatggacaaagaagtaattcgccaagctctaacaaatcagggcttcatgttttctacccaaaaagaagcggacatctacatctataaaacttaa

SEQ ID NO: 22569 - DNA, 837 bp, Legionella massiliensis; identical to SEQ ID NO: 22567

SEQ ID NO: 22570 - DNA, 564 bp, Legionella massiliensis; identical to SEQ ID NO: 22568

SEQ ID NO: 22571 - DNA, 849 bp, Achromobacter sp. 2789STDY5608606
atgattcacgtcatggcgaaggtcaacttttttgacaagcgggtcatcaagaaattccttgagatcaccgctgtcgtcagcggtacgctgtcattcatagttatttttgttgacgttcctgccgagtggaagctgaaggctggcttggctttcttggcaatactggcactcacctacgtggtgatatggctctggtcgaacaacctgaacagtatcgacatcaatgttgagggcagcgatgtcgcgatcaagaccggcgacattttccaacagccgggattgaaggcaattgccttcaatgagtatttcgacactcaggtggacaacaagataattggcgagacttctctcaacggagttttcatccagaagcatctcggcgttccgatttccgaattagaccgctacatcgaggaatacgcttttgatgaaagtgaagtcctggaggagaacgaggcaaggaaatacggtaagaagaaaaggtatcagataggcacgatttgcctttacaaagactatctcctgaccgcgttctccaagttcgatgagaacaacaaggcgctactaacgatgccggagtaccttgagttcctcattaatttctgggacaaggtaaacaacgtgtacgcccagcaaagcgtatcgacaacaatctttggatcaggaatcacgcgaatcaaaggacacaagaatatttccgacgaggatctactgaaaatcatgctgtggacattcagaatcagtgagatgcgattcaaatatcccgcgaagctgaccatcgtgatccacaaagacaagatcgaccagatcaatcttctcgatatcaaatccgccaggaacggcgtgtag

SEQ ID NO: 22572 - DNA, 564 bp, Achromobacter sp. 2789STDY5608606
atggcatatcgaaatggaaactacaccgccttttacgttgcagagccattccatcccagctcgctaggtgccaatgcgacgaaggattttcagtattacaacaccctacggatgtggaaaggtgctgatgcgacgttccccttcgttgattcgcacgacaaaacttacagtgtccgcgatggcagcgattgggaatacacactgaaacccaggctcagggagcgccttcggagctcgaagaacattatcctcatcttgagttcgatcacgacgaattcccgcgcccttcgagaagaaatcgactacgggatcaacgatcaagggcttcctgtcattgtcatctatcccgaatatgccaccaaggaaagtctgcttgtcgacggatcattgaagcaggcggttaagaacctgtggggaaatcttcccgtgttccgggattcgatgagcaaagtcccgacgcttcatgtcccgatgaataaagagctcatcaaaaaatccttgcaggacggcgagtttatggttgggagcatgaaggccccaggcatctacagatacaacccataa

SEQ ID NO: 22573 - DNA, 837 bp, Serratia marcescens
atgagtaaagtaggtttctttgatcgacgcattttagaaaaatttatgaaactggcttcagctgtcaccgcttttatctctgccactgtaattttcgtagatatcccaacagatctaaaaatcactttcggaatatctcttattgtaacattgattattttctatattattctatggtcgcatgccaatagattaaaaagtatatctttgtctgtagagggtagtgaggtaaacataataacaggagatatatttaaacaagatggattcaaagccattgcatttaatgattactttgacacaatggttgacgaaaaaataatatcaagtaaaagcctcaatggggtatttttaaaacagcacttatcaggcagcattgcagcgctagatgctcatattgaacactatcaatttgatgatggtgatttcctagaaaatgatacggaacgtaaaaccggcaaaaccaagaaattcaacattggcacattgtgcgtttatgatgactatctcataactgcattttcaaaattcgacaagaataaccaagctcggcttaccatgcctgagtatcttgaattcttgataaagttctgggataaagtaaataaagtttacgcccaaaaaagcgtttccgtcccgatctttggttcaggaataacacgtataaaagagcataaaaacataacggatgaagaactgcttaagatcatgctctggacatttcgtatcagtgaaatgcgttttaagcacccggcaaagctgactatagtcattcatgaagataaaatagatcagattagccttctcgatttgaaactggctagaaatggattgtag

SEQ ID NO: 22574 - DNA, 564 bp, Serratia marcescens
atgtcgtataagaatggaaactattgtgccttttatgtacagcctccttttaatgaaacctcattaggggcgcacgccacaaaggattttgtttattacagtatgttgaaagcatggaaaggttctgactccacatttccttttaataactcacatgacaaaacatacaacgtccgtgatggaagtaactgggagtcaacactaaaacccagattacgtgaaagactaagtaattcaaaaaatatcattctgttcctaagcgttcgcacagttagttcattggcattgaatgaagaaatagattatgggattaacactctggggttacctgtaattgttatctacccggactataaaaccaaaactgacctgttagatggacaaagcttaaagcaagcaatacggaacctatgggataagctacctactttcagaaattcaatgagtaaagtgccaaccttgcatgtccccatggataaggaactcattaaaaccgcattaaacgataaagacttcatggttaacagtaaaaaggaagctaatatctatcgctataacccatga

SEQ ID NO: 22575 - DNA, 837 bp, Serratia marcescens
atggcaaaggtaagtctctgggataaacaagttttcaatgaatttaaggactgcacattactaatattttcattaattggtggtcctttatattttgtagatatacctacagaacaaaagatcgtgtatggaattatatgtcttgtagttctaatccttgtatatctctatctctggcacagagcgaatagcttgagagaaataaaacttactattgaagggagtactgtcataattaaaaccggtgacattttctcccaagatgggttaaaagccattgcattcaatgaatactttgatacccaagtagatgatagactcatcgccgcaagcagcctcaatggtaaattcattacagatcatttaccttgctctatacctgaactagatgagcacataaaaaactataaatttgatactgatgaaattaaagacatagatgaggatagaaaagagggtaagaagcaaaaatatgaaattggtactatctgtgttctgggtgattttctgcttacagcactttcaaaattcgatagtaggaacgaagctcatctgacaatgcctgagtatctggaatttttgataagtttttgggataaagttaatcgtgtctatgcacagaaaagtgtctccgtacctatattcggttctgggttgactcgaatcaaaggtcacaaaacaattgacgaacaagacttgcttaagattatgttgtggacatttcgtgttagtgagatgcgttttaagcatccggccaagttgactatcatgatccatgaagggaaaatcgacaaggtaaatctattggaattaaaagcagcaaggaatggcttgtga

SEQ ID NO: 22576 - DNA, 558 bp, Serratia marcescens
atgaatggaaattattgtgcgttttatgttgcagagccctttaatgaaagttttctaggggctcatgcaacgaaggatttcgtttactacaacacgttaagaatgtggaaaggtgccgatgccagcttccctttccataactcccatgacactacgtataacgttagggatggcagtaattgggaattaacattgagacccagactaagagaacgcctgcgtaattccaaaaacattattttatttttaagtgacagaactataaactcaagagcattaagagaagagatagattacggaattaatactttaggattgccagtaattgtaatttatccagactacagcacaaaagaaagtttgttagaccgtaacaacattctaataccacaaatacaaaatctttggggtaaaatccctacatttagagactcaatgtctcttgtccctacgctgcatattccaatgaataaagcactcatctcacactctctcattgatagtaaatttatggtaaaaacaaaagcagtgcctgatgtttatagatatacagtatag

SEQ ID NO: 22577 - DNA, 837 bp, Legionella pneumophila
atggcgaaagttaaaatctatgacaaacatgtatttagaagctttaaagaaaaatcatctgcaatatttgcgataattacagcccttcttatatttattgatatccctaatgattatagaatcctaacaggattagtagtggcagttatattagtaattgtttatatcgcaatttggcttcactcaaacaatctccaagatataacccttaacatcgaaggtagcactgtaaacatcaaggttggagatatatttacgcaacagggattcaaagtcattgcatttaatgagtactttgacactgcagtggataataaattaatagcagaaaagtctcttaatggcacctttattaaagagcatcttgatatccctccttcagaactagataaatatattactgcttacgattttgaaagtgatgaaattattgatacggatgttaaaaggatatccggaaaagacactaagtacagcctcggaacaatctgtgtgtataaagattattttctgacagctttttcaaaatttgattcaaataataaggcaaacctaactatgcctgagtatattgagtttcttatttccttttgggacaaaattaatagaatctatgctcagcaaagtgtatccacaacaatttttggttcaggtataacccgaattaaaggccacaaaaatattagtgatgaagaccttattaaaatcatgctctggacatttagaataagcgaaatgagatttaaatatccggcaaagctgacaatcgtcatccatgaggataagattaatcaaattaatctacttgacattagatcagctagaaacggaatgtaa

SEQ ID NO: 22578 - DNA, 564 bp, Legionella pneumophila
atgtctattcgacaaggaaattacagcgctttttatgtcgctgaaccattcagcactagctcattaggagcgcatgcgacaaaagacttttgttactacaatcttctacgctcatggaaaggagcagatgctacatttccttttattgactcacatgctactacatacaatgttcgtgatggtagtagttgggaactaaccctaaaaccaaggctaagggaacgccttcgtgcttcaaagaatatcattttgtttcttagctcatttacagccaactctaatgctcttagagaagagattgattatggaataaatgatcaagaacttcctgtgattgttatatatccagattacaacacgaaagaaagtatcttatctaattcatctcttaaacaaaacatagtcaatctctggaacagattacctgtattcagggattcgatgaaaaatgtaccaacccttcatgtaccgatggcaaaggatgttattcgacaagcccttaataacacgaacttcatgctcagtaccaaaagagagccaggtaatttttttttgaaagcatag

SEQ ID NO: 22579 - DNA, 837 bp, Legionella pneumophila; identical to SEQ ID NO: 22577

SEQ ID NO: 22580 - DNA, 564 bp, Legionella pneumophila; identical to SEQ ID NO: 22578

SEQ ID NO: 22581 - DNA, 849 bp, Pseudomonas aeruginosa 2192; identical to SEQ ID NO: 22571

SEQ ID NO: 22582 - DNA, 564 bp, Pseudomonas aeruginosa 2192; identical to SEQ ID NO: 22572

SEQ ID NO: 22583 - DNA, 861 bp, Bifidobacterium pseudocatenulatum
  DSM 20438 = JCM 1200 = LMG 10505
atgttttttcttatgcacggaaagtttgtttctcgattacctcggctcaaagagactgcatcaatatggggtagcgtctcttttggtgttgcaacaactcttcttacctttttcccaaaaatcagtatcatagggaaagacattaataacagcattattctgtttgcgacttgtgtcatctttgggataggtgcattgtgccagacaatgttcggaaagaagaatacaatatgggaaaaaggtaataataaaatcactgctatatatggtgatattcttgacgagtcttctaagcatgaagaaattagggttatacctgtaaatacagcttttgatacgattgttgatgatccttgctcaactgataaaccgcttgtttctccaaattcgcttcatgggcaatggcttagaaagcaggaatgtgaacaagagattctgaataatgaagttttaggaaacatgagtggaaaaccgtatcgtaaaatagatcctttacagaagaagcgtggcaattgcatggagtataagattggaacgtattcttttgcccggcgtaagaatataacatatctactagtcgcgctaactgcttttgacaccaacaatgttgcgcatagtactcaaactgatcttgagacagtgcttcaatctgctgtgtcatatcataatcaatgtggtcagggggccaaattgatgattcctcttatggggacggcaaattcaagaatgaaattagatcatcaagaatcttttgatataatcaaaaattatcttttacttcggaaaaaagatataaatgggtgcatagaaattgttgtatatcaaaaagatgcaaataaggtctctatatggaatagttaa

SEQ ID NO: 22584 - DNA, 567 bp, Bifidobacterium pseudocatenulatum
  DSM 20438 = JCM 1200 = LMG 10505
atgaattatcgtaatggtaattatagcgctttctatgtctctgagccatttgatgagtactctttgggggcaagacaagctcatgatttctgctattactcacttcttggcgcatggaagaaaaaggattcgaactttcctttcattgattcgcataataaaacttactctgtaagagacggcagtgattgggaaggtacattaaagcctcgtctgcataagcgtcttatgaattctaaaaacattattctgtttcttagcagtattacaaaagaaagtcgtgctctgagggaggaacttcagtatggaattggagtccttcgccttcctgttattgttgtttatcctgaactcgaaaatactaatatagttgattcatcgaggagagatttttcttcttctgtcaaaagactatgggataacttacctatttttaaaaaaatgatgaatgcagttccaacaattcatgttccttttaagaaggatctaattgcacgcgctctttcggatgaagaatttactgtacagagtgagagtcgacctggcgcatatttttattccatctaa

SEQ ID NO: 22585 - DNA, 894 bp, Roseburia intestinalis L1-82
atgaacaaagtgaatgtgataaaacaaaatttggagttcataggtaaaacgtggatgaagtgtattggcacatttgcaagtatattatcgcttttctttttgttttggacttgggatgatatacgcattacgtcaacgcaatataaatgtgtgataataatattattatgtgtgcttgcactcatacttgcaatcctatggacgtgtatttttaggagaacaaagacaatttgggaaagttcatctgggaaaataaaagtatgttattctgatattatgaaagatgggtttgacaaaaggaacaaggaagaaaagttatttgtaattccagttaattcatgttttgacactattgtagatgaagatatatcaacatgttcaaagccattggtatcacctaattcgttacatggaagatggataaaaacaatggttaataagggatttactatagaagaaatagacaacaagatacataattgcttgaaaatgcaaaatttagtgcccaaaagtattattgctgacgaagataaggaacgtgggaaaagagaagtatatgagttaggtacagtggcgatgattaggggaaataacaatagtacctttttgttacttgcaatttcggaatacgataaagataatatcgctcatacttctgtcgatgatttagaaatgtgcataaagtcacttcttaatttttacgatcaacatggtcaagggcatagattggtaattccattgatgggaacaaacctttcgagagcaggattgtcacataatgattcactgagagtaataacatcgttatttcaattgtatggagataaaatacatggagaagttgatgttgttatatataaaggagataaagataaagtaacattagacatatag

SEQ ID NO: 22586 - DNA, 567 bp, Roseburia intestinalis L1-82
atgtcatatcaaaatgcaaattatagtgcgttttatgtttcggaaccatttagcgaaagtaatttaggggcaaattcaacacatgattttgtttactacaatatgctaagaatgtggaaaggggaggataatagttttccctttaatgatgcacatgataagacatataatgtgcgagatggtagtgattgggaaaagactcttaagcctagacttcatacaagacttgacaattctaagaacattattttatttttaagttccattactgccaatagtcatgcattgagggaggaaatgaattatggaataggtacaaaaggtttaccggtaattgtaatttatccagattacgacaagaagtcagatatagttgatagtaatggaaattttaagaagcaaattaaagatttgtgggataagttgccggcttttcgtgataatatgtcctcggtagctacattgcatattccatgcactaagagcgttattatatcagcattgaataatgaagattttatggtaaatacaatggcagatgcaaaaaaatattactataaaccataa

SEQ ID NO: 22587 - DNA, 837 bp, Legionella drancourtii LLAP12
atgacaaaggttaaaatcactgatacacaagtatttagaaaatttttagaaaagatatctgttatatctatggtcattacaacaattgttatttttgttgatatacctgccgaatgccgcatcaaatatggtatagcatttttgatattgttacctatcctttacattgcaatttggtatcgcgccaacagccttcaagatataaacttaaacatcgaagggagtgctgtaaatatcaaagttggagatatttttaatcaacaagggttcaaagtaattgctttcaatgaatattttgatacgttggttgatgataaagtgattgcgcaaaagtcaattaatggcatttttatcaacaagcatctgaacatcagccccatagaactcgatgaatacattcaaacttatgaatttgacgaaaatgagattttagcaacgaatgtacccagaaaatctggaaaaaccactcagtatcatattggaacaatatgtgtatatgaagattaccttctaacagcattctcaaaatttgatagcaacaacaaagcaaacctaactatgcctgagtatttagaatttctgattaccttctgggacaaagttaatagagtttacgcccaacaaaatgtatcaactacaatttttggttcgggcataacccgaatcaaaggtcacaagaatattagtgatgaagatcttttaaaaatcatgctctggacatttcggatcagcgagatgagatttaaatatccagcaaaactaaccattgtcatccataaggataagattaatcaaatcaatctctttgacattaaatcagctagaaatggaatgtaa

SEQ ID NO: 22588 - DNA, 564 bp, Legionella drancourtii LLAP12
atgtcagttaggaatggaaactattgtgccttctatgtcgctgagccttttagtaccagctcattaggagcgcatgcaacaaaagacttctattactacaatctcataaaattatggaagggagcagacgctactttccctttcattgactcacatgacaagacatacaatgtccgcgacggcagtagttgggaactaacattgaagccacggctaagagaacgacttcgagtatcaaagaacattattttatttctcagttcaacaacgaccaactctaatgcacttagagaagaaatcgactatggaatcaacgatcaaaagctaccggtgattgttgtttatcctgattacaattccaaagcaagtctattgactaatggttatcttaaacaagacgtaaaaaatttatgggacaaattacctatatttaagaattcaataaaaaatgtccccacactccatattcccatggacaaagaagtaattcgccaagctctaacaaatcagggtttcatgttttctacccaaaaagaagcggacatctacatctataaaacttaa

SEQ ID NO: 22589 - DNA, 837 bp, Raoultella ornithinolytica 10-5246; identical to SEQ ID NO: 22545

SEQ ID NO: 22590 - DNA, 555 bp, Raoultella ornithinolytica 10-5246
atgagtgggaattactgtgcattttatgttgctgagccttttcatgagggcgctctgggagctcatgctacgaaagacttcgtttattacaacacactgagaatgtggaaaggagcggactccggtttcccttttaccaattcacacgatacaacttataacgttcgtgatggcagtaactgggagcaaactttaatgcctcgcctcagacagcgtctgcggaattctaagaatattattctattcctgagtgatcgaactataaattctcgcgctctacgagaagaaattgattacggtattaattccttggggcttcctgtaattgtaatataccctgactatgacacaaaagaaagtttgctagttaacaacattttaaagcagcaaatacaaaatttatggtctaagattcccgcattcagagattcaatgcatttagttcccacgttgcatatcccaatgaataaagctcttatcagacaatcactggcagatagtaagtttatggtgaaaaccaaaaccgttccagatgtatatagatatagcgcataa

SEQ ID NO: 22591 - DNA, 560 bp, Achromobacter piechaudii HLE
atggcgatctttcaagatttgaagacgtggcgtttcgggcgccgctttctgacgatgtcttttgcctgcataggtgggctatcgacagttctgcaaacgattgttttgatcttcccgaaggtcaccgttttccaaggtgtgccaattttgctcttagctgttgctatttcacttatcggcggtctcatatggtcatggccgaggcccatagaacaggactatagcgcaccgaataccaaaatcacaattgtcaagggtgacatgcttgcggagatgacgcaccttgtgatcggaacgaacgataccttcgacactgaaacgccaattattattgctaggcaaagccttcaggggcaagctttggaaaggctatacggcggcgacctaagagaattagatgcgcaattggctctcgccctctcggacaaaccaacggtaggtgtcattgagaaggcgggaaagcagatacagtatggcgtgggcactattgccaccgttaaacatgccgcgaggctgatattctttttagcttattgcgaaatggacattcacaataccgc

SEQ ID NO: 22592 - DNA, 302 bp, Achromobacter piechaudii HLE
tggggagcaatgacgggaagcgcaagggcagcgacggcatgtcgttcttggctcacgaaatcgaagtgatcatagaatttaatctgccggttgtggtggccaacttagatcaagatcggaccgtagacagaaactatattcccgatccattattgaattctagctactacaccgtgtcggtttcataccagccgaagatcatcatgcatgcactagacaagtatgcggtcaccttcgctgcgagcgacaaaaaggggcctcatcagtatccggcgaatgtttacagcgaccttgggttgtaa

SEQ ID NO: 22593 - DNA, 837 bp, Thauera phenylacetica B4P
atggtgaaggtcaacttttttgacaagcgggtcatcaagaaattccttgaggtcaccgctgtcgtcagcggtacgctgtcattcgtggttatttttgttgacgtccctgccgagtggaaactgaaggctggattggctttcttggcaatactggcactcacctacttggcgatatggctctggtcgaacaacctaaacagtatcgacatcaatgtcgagggcagcgatgtcgcgatcaagactggcgatattttccagcagcctggattgaaggcaatcgccttcaatgaatatttcgatacgcaggtggacaacaagataattggggagacttccctcaacggcgttttcatccagaagcatctcggcgtcccgctctccgagctagaccgtcacatcgaggaatacgcttttgataacagcgaagtcctggatgaaaacgaggccaggaaacaggggaagaagaaaaggtatcagattggcacaatctgcctatacaaagactacctcctgaccgcgttctccaagttcgacgagaacaacaaggcgctgctgacaatgccggagtaccttgagtttctcatcaatttctgggacaaggtaaacaacatctacgcccagcaaagcgtatctaccacgatcttcggttcgggaataacgcggatcaagggacacaaaaacatctccgacgaggatctcctgaagataatgctgtggacgttcagaatcagcgaaatgcgattcaagtaccccgcgaagctgaccatcgtgattcacgaagacaagattgaccagatcaatcttctcgatattaaatccgccaggaacggcgtgtaa

SEQ ID NO: 22594 - DNA, 564 bp, Thauera phenylacetica B4P
atggcatatagaaatggaaactacaccgccttttatgttgcagagccattcaatcccagctcgctgggcgccaatgcgacaaaagattttcagtattataatgtcctgcggatgtggaaaggcgctgatgcgacgttccccttcgtcgattcgcacgataaaacatacagtgtccgtgatggcagcgattgggaatacaccctgaaaccgagacttagggaacgccttcggaactcgaagaacatcatcctcatattgagttcgatcacgaccaactcccgtgccctccgagaagaaatcgactacgggatcaacgaccaggggctacccgtcatcgtcgtctaccctgaatattccaccaaggaaagcctgcttatcggtggatcattgaagcaggctgtcaagaacctgtgggaaaatcttccggtgctccgggattcgatgagcaaagttcctacgcttcatgttccgatggacaaggcgctcattaagagtgccttgcaggatggtggattcatggttgggagtaagaagaccccagatatctataggtacaacccataa

SEQ ID NO: 22595 - DNA, 849 bp, Delftia acidovorans CCUG 274B
atgatccacgtcatggcgaaggtcaacttttttgataggcgggtcatcaagaaattccttgagatcaccgctgtcatcagcggtacgctgtcattcgtagttatttttgttgacgtccctaccgagtggaagctgaaggctggcttggccttcttagtaatactggcgctcacctacttggtgatatggctctggtcgaacaacctgaatagtatcgacatcaatgtcgagggcagcgatgtcgcgatcaagactggagacattttccagcagcctggattgaaggcaatcgccttcaatgagtatttcgacacgcaggttgataacaagataattggcgagacttccctcaacggcgttttcatccagaagcatctcggcgtcccactctccgaactggaccgccacatcgaggaatacgcttttgatatcagcgaagtgctggatgagaacgaggccaggaaacaggggaagaagaaaagatatcagataggcacgatctgcctgtacaaggactacctcctgaccgcgttctccaagttcgacgagaacaacaaggcgctgctaacgatgccggagtaccttgagtttctcatcaatttctgggacaaggtaaacaacgtctacgcccagcaaagcgtatcgaccacaatcttcggttcgggaatcacgcgaatcaaaggacacaagaacatttccgacgaggatctcctgaagataatgctgtggacgttcaggatcagcgaaatgcgattcaagtatcccgcgaagctgaccatcgtgatccacaaagataagattgaccagatcaatcttcttgacattaaatccgctaggaacggcgtgtaa

SEQ ID NO: 22596 - DNA, 564 bp, Delftia acidovorans CCUG 274B
atggcatatcgaaatggaaactacaccgccttctacgttgcggagccattccatcccagctcgctgggtgccaatgcgacaaaagattttcaatactacaacaccctgcggatgtggaaaggcgctgatgcgacgttcccctttgtcgattcgcacgacaaaacttacagcgtccgcgacggcagcgattgggaatacaccctgaagccgagactcagggagcgccttcggaactcgaagaacatcatcctcatcttgagttcgatcacgacgaattcccgtgcccttcgagaagaaatcgactacgggatcaacgaccaggggctacccgtcatcgtcgtctaccctgaatatgccaccaaggaaagcctgctggtcggtggatcattgaagcaggcggtcaagaacctgtggggaaatcttcccgtattccgggattcgatgagcaaaatccctacgcttcatgtcccaatgaacaaggaactcataaaaaaatccttgcaggacggcgagttcatggttgggagcatgaaggccccaggcatctacaggtacaacccataa

SEQ ID NO: 22597 - DNA, 852 bp, Aneurinibacillus aneurinilyticus ATCC 12856
atgtggaaattaaaagaaattgttaaagataaggatttttggattagttcttgggctattcctggtgctttattcggaattgctacaacgttacttacttttattgagttcgataataatttcaacaaattctatattttaattggattagtgatattaagttttatacttattctgtttaaattaattaaaagtctttgtttaaagaaaataaaattaaatatcgatggttccgaaattgaaataaaaaagggcgatattttcacatttcctcgaaatatctataaggtaatcgcctttaatgaatttttcgatactgaagtagatgaccaaataatatctagaacatctttaaatggacagtatttaaacagattttattcagatacatcagatttagataaaagaattattcaagatccacgaatgcaacttagaattgttgaaaaagacgtaaaccgtcctttaggagggaaaaaaactcgttatcgtttaggttctgtatataaagatatagatttctttctcgtagcattttctaaatttgataatgagaataaagctaatttaaagctacatgaatatgcaaattgcttaataaatttttggaatgaagtaaatggtctctatgctcaacaagaagtcgttgttccattgctaggttctggtataacgagacataaggattttaatgccaattctcatcaattactagaagtgatgctttggacttttaaaattagtaaggttaaatttagagagccttctaaagttactattcttcttcatgaaaaacatcataaagaaataaatttttataaattaaaggagtttgaaaaaaatggcatatag

SEQ ID NO: 22598 - DNA, 570 bp, Aneurinibacillus aneurinilyticus ATCC 12856
atggcatatagaaatggtaattatacagcattttatgttagtgaaccttttagtgagagtaatctgggggcatctgccacaaaggatttttcatcttataacttgttaagagcatggaaagctgcagatagtagttttccctttaatgactcacataataaaaactataacgtgagagacggaagtgattgggaaaaaactttgaaaccccgtttacatgatagactaagcaattcaaaaaatataattttgtttttaagttcagtgacaaaaaatagtaaagcattgcgtgaagaaataaactatggaataggtatgaagggattgccagtaattgttgtttatcctgaatatcagaataagagtgatattataaattgtaaaacaaataccattaaggatgagatccaaagcttatgggataaactacctacttttagagattctatggcagaggttcctacaattcacttaccttataaaaaagatctgattaaaagtgcattaaatgatacgagctttatgataaattcaaaatgtagtgctggtgtatacttttataagtgctaa

SEQ ID NO: 22599 - DNA, 849 bp, Pseudomonas aeruginosa BWHPSA028; identical to SEQ ID NO: 22571

SEQ ID NO: 22600 - DNA, 564 bp, Pseudomonas aeruginosa BWHPSA028; identical to SEQ ID NO: 22572

SEQ ID NO: 22601 - DNA, 837 bp, Salmonella enterica; identical to SEQ ID NO: 22545
  subsp. enterica serovar Senftenberg str. ATCC 43845

SEQ ID NO: 22602 - DNA, 555 bp, Salmonella enterica; identical to SEQ ID NO: 22546
  subsp. enterica serovar Senftenberg str. ATCC 43845

SEQ ID NO: 22603 - DNA, 837 bp, Enterobacter cloacae BWH 29
atgaagaaagtaaaatttttcgatagcagagtgagagataagttctctaagcatatatcagcaataagtacactcgcctctgttttattaattttttttaatataccggagaacaaaaaaatcattttattcgctgttttttcggcgtgtctttttttactttactgcaaaatatggtggcactttaataaccttcaagagattgagttggatgttgaaggtagtaaagtttcaattaagactggagacttatttttacagcccggtttgaaatgtatagcatttaacgagtattttgataccaaggttgacgaaaaaatcatatcatcaacatctttaaacggccaatatattaataagttcttccctaactcggttaatgagttagacaaaataataactgagtatgaatttgaagaagaagaaaaaataggtattaataatgagagaagagtagggaaaaaagtaaagtactctttaggaacaacttgcgttattgatgattatttacttactgccttcagccattttgataaaaacaataaagcatatctttctatgccagattatttatcttttttaataaccttctgggataaagtaaataaagtatatgctcaaaggaatgtatctgttcctatctttggttcaggaatcacacgaataaaagagcataagaacattagtgatgaagaacttttgaagatcatgctttggacattcagaataagtgaaatgagatttaaatatccagctaaactttctattattataaattatgacaagataaaaaccatcaatttattagatatcaaatctgcacgaaatggaatttaa

SEQ ID NO: 22604 - DNA, 561 bp, Enterobacter cloacae BWH 29
atgtctcagcaaaaagggaattattgtgctttttatgtttctgagccttttaatcagagttcattaggggcacatgcaactaaagattttgtatattataatttactaagatcatggaaaggtgctgacgcctcatttccatttattgattctcatagctcaacttacagtgttcgggatggaagtgattgggaaaaaactcttaaaccgagattacatcaaagacttaaaaattcaaaaaacataattctatttttaagctcttccaccatcaactcaagagcgataagagaagaagttgattatgctataaatgttttatcattgcctgtaatagtaatatatccagaatttgaaaataaagaagatatacatgatgctaatggcttcacgaagaaaataactaatctttgggatctgcttccaattttccgtgattctaaacacaaagttccagtaatgcacattcctctaaaaaaggaactcgtacaatcagcattaaaagataaggacttctttttaggtagcgccgctaaaaatattggatattactataactaa

SEQ ID NO: 22605 - DNA, 837 bp, Enterobacter cloacae UCI 36; identical to SEQ ID NO: 22603

SEQ ID NO: 22606 - DNA, 561 bp, Enterobacter cloacae UCI 36; identical to SEQ ID NO: 22604

SEQ ID NO: 22607 - DNA, 837 bp, Enterobacter cloacae UCI 35; identical to SEQ ID NO: 22603

SEQ ID NO: 22608 - DNA, 561 bp, Enterobacter cloacae UCI 35; identical to SEQ ID NO: 22604

SEQ ID NO: 22609 - DNA, 837 bp, Pseudomonas stutzeri KOS6
atggcgaaggtcaacttttttgacaggcgggtcatcaagaaattccttgagatcaccgctgtcatcagcggtacgctgtcattcgtagttatttttgttgacgtccctaccgagtggaagctgaaggctggcttggccttcttagtaatactggcgctcacctacttggtgatatggctctggtcgaacaacctgaatagtatcgacatcaatgtcgagggcagcgatgtcgcgatcaagactggagacattttccagcagcctggattgaaggcaatcgccttcaatgagtatttcgacacgcaggttgataacaagataattggcgagacttccctcaacggcgttttcatccagaagcatctcggcgtcccactctccgaactggaccgccacatcgaggaatacgcttttgatatcagcgaagtgctggatgagaacgaggccaggaaacaggggaagaagaaaagatatcagataggcacgatctgcctgtacaaggactacctcctgaccgcgttctccaagttcgacgagaacaacaaggcgctgctaacgatgccggagtaccttgagtttctcatcaatttctgggacaaggtaaacaacgtctacgcccagcaaagcgtatcgaccacaatcttcggttcgggaatcacgcgaatcaaaggacacaagaacatttccgacgaggatctcctgaagataatgctgtggacgttcaggatcagcgaaatgcgattcaagtatcccgcgaagctgaccatcgtgatccacaaagataagattgaccagatcaatcttcttgacattaaatccgctaggaacggcgtgtaa

SEQ ID NO: 22610 - DNA, 259 bp, Pseudomonas stutzeri KOS6
cgggatcaacgaccaggggctacccgtcatcgtcgtctaccctgaatatgccaccaaggaaagcctgctggtcggtggatcattgaagcaggcggtcaagaacctgtggggaaatcttcccgtattccgggattcgatgagcaaaatccctacgcttcatgtcccaatgaacaaggaactcataaaaaaatccttgcaggacggcgagttcatggttgggagcatgaaggccccaggcatctacaggtacaacccataa

SEQ ID NO: 22611 - DNA, 837 bp, Sphingobium sp. Ant17
atggcgaaggtcaacttttttgacaagcgggtcatcaagaaattccttgagatcaccgctgtcgtcagcggtacgctgtcattcatagttatttttgttgacgttcctgccgagtggaagctgaaggctggcttggctttcttggcaatactggcactcacctacgtggtgatatggctctggtcgaacaacctgaacagtatcgacatcaatgttgagggcagcgatgtcgcgatcaagaccggcgacattttccaacagccgggattgaaggcaattgccttcaatgagtatttcgacactcaggtggacaacaagataattggcgagacttctctcaacggagttttcatccagaagcatctcggcgttccgatttccgaattagaccgctacatcgaggaatacgcttttgatgaaagtgaagtcctggaggagaacgaggcaaggaaatacggtaagaagaaaaggtatcagataggcacgatttgcctttacaaagactatctcctgaccgcgttctccaagttcgatgagaacaacaaggcgctactaacgatgccggagtaccttgagttcctcattaatttctgggacaaggtaaacaacgtgtacgcccagcaaagcgtatcgacaacaatctttggatcaggaatcacgcgaatcaaaggacacaagaatatttccgacgaggatctactgaaaatcatgctgtggacattcagaatcagtgagatgcgattcaaatatcccgcgaagctgaccatcgtgatccacaaagacaagatcgaccagatcaatcttctcgatatcaaatccgccaggaacggcgtgtag

SEQ ID NO: 22612 - DNA, 564 bp, Sphingobium sp. Ant17; identical to SEQ ID NO: 22572

SEQ ID NO: 22613 - DNA, 852 bp, Bacillus sp. DW5-4
atgtggaaatttaaagaattaataacagataaacaatttttaacttgggctataggcatccttcttataactataccaagttgtgtgggtacgatcatttcatttctagactttgatgctcgtagtagattgattattttgcttatggtagtagcattatcactagtcataataatttttcgtttcattagattactttttctgagtaacatcactcttaacctcaatggttccgaagttgaaattaaaaaaggtaatatttttgaagtgccacgaaataattataaagttatagcatttaatgagttttttgacactcaggtagatgatgtaataattgcccgcgaaacattaaatggtcagtatataaatcgatattattcagatcaagatatctcaaagttagatcaggaaattaaagatgacgtgaaacttaaaattgaagaaaagaatgttgaaagacctcttgggggaaaaacaacacgttacacattgggatcagtctttaaagatatggatttttttcttgtcgctttttcgaagttcgatagggagaatcgtgcccatttaaagcttaatgaatatgcgagttgcatgctaaatgtatggaatgaagtcaatactttacatgcaagcaaagaagtgtttattcccttattaggttctgggataacaagacatgtggattctgatgttggagtcaatgaactattacatataatgttgtggacatttcaaatcagtaaattaaagtttagagaaccagccaaagttacaattcttttatacaaagatgatcacaagaagattaatttttataagttaaaggagtttgagaagaatgggttatag

SEQ ID NO: 22614 - DNA, 573 bp, Bacillus sp. DW5-4
atgggttatagaaatggaaattatgcagcattctatgtcagtgaaccgtttaatgaaagtagtttaggggctaatgcgacaaaggattttgtgtcatataacatgttaagagcatggaaaggcaaagatagtaactacccatttaatgactcccatgataagacgtacaatgtacgggacggaagtgactgggataaaacattaaagccaagattaagaaaaagattagatcaatcaaaaaatataatctacttcttaagtaagcatactgaaaacagcaaagctttgcgagaagaaattgattacggaattaatgtgaaggggctaccagttatcgttgtataccctgaactttccgaaaagagtgacatcatcgactgcactacaaagactatcagatccgaagtggtaaacttatggagtagagtccctatttttaatgactctatgttaaaggtaccaactattcatattccatacaaaaaacacctaattaaacaggctttagaggacaaagattttatggttaattcaaaaatcgctgcaggttcgtatcatttttatcgatgttaa

SEQ ID NO: 22615 - DNA, 843 bp, Epilithonimonas lactis
atgaaagttaaattattagataaaaatgttagaaataaattttggttttatttttcagtaatttccggtattttatcatttgtattactttttaatattgttccagatgaatacaaagattgtctaagatactttggctatataactttcggtgtacttattgtaatttatttagttatttggtaccgagcaaacaatcttgcaagtattaatattgacatagatggaagtgaagtacacattaaatctggcaatttatttaatgaacaaggttttaaagtaattccttttaatgaatattttgacactgtagtagatgataaaataatatcaaatagttcgctcaacggaatttatgtaaaaaagtatttccttgacaacgtagataagcttgataattttatagtagctaattcagacgaattagacataattgataatcaaacttatagaagacttggaggaaaactggtaaagttcaaattaagtaccattttcgtctatgaagattttattttgacagcatttactaagtttgatgaacataacaaggcaattcttactatgcctgaatacattgaatttttaattaacttttgggatagagtaaatcgcgtttatgctcaaaaaacggtatcagttccaattttcggttctggaataactagaattaaggaacataagaatatcagcgatgaagacttattaaaaattatgctttggacgtttaaattaagtgaaatgaaatttaaacatcctgcaaagttaacgattgttgtacatgaggataaaattgggcaaataaatctgtttaatatcaaatcaattgaattaggtttatag

SEQ ID NO: 22616 - DNA, 564 bp, Epilithonimonas lactis
atgagtaaaatttacaattataccgcattttatgtcagcgaaccatttaacgaatcttcacttggagcaaatgcgactaaagatttttgctattacaatatattaaaagcatggaaaggttcggacagttcatttccttttaacaatgctcatgacacaacttacaatgttcgtgacagtagtgattgggaatcgacacttaaaccaagacttcgagaaagactaaaaaattccaaaaatatcgttctatttttaagtaatgacacaatgaattcaaaagcattaaaagaagaactagattacggcattaatactctcggacttcctataattgtaatatatcctgatttaaaaactaaagatgatttactcactaatggtaaaacaagtttgaatagtaccgtaacaactttatggaataagttacctatttttagagattcaaaatcaaaagttcccgtactacatataccaatgagtaaagatactattcgaacagcgttaaacaatacgaacttcagagtagattctgggaaagaagctaatgactatttttacaactaa

SEQ ID NO: 22617 - DNA, 828 bp, Bacillus subtilis; identical to SEQ ID NO: 22549

SEQ ID NO: 22618 - DNA, 573 bp, Bacillus subtilis; identical to SEQ ID NO: 22550

SEQ ID NO: 22619 - DNA, 849 bp, Bifidobacterium pseudocatenulatum
  DSM 20438 = JCM 1200 = LMG 10505
atgcacggaaagtttgtttctcgattacctcggctcaaagagactgcatcaatatggggtagcgtctcttttggtgttgcaacaactcttcttacctttttcccaaaaatcagtatcatagggaaagacattaataacagcattattctgtttgcgacttgtgtcatctttgggataggtgcattgtgccagacaatgttcggaaagaagaatacaatatgggaaaaaggtaataataaaatcactgctatatatggtgatattcttgacgagtcttctaagcatgaagaaattagggttatacctgtaaatacagcttttgatacgattgttgatgatccttgctcaactgataaaccgcttgtttctccaaattcgcttcatgggcaatggcttagaaagcaggaatgtgaacaagagattctgaataatgaagttttaggaaacatgagtggaaaaccgtatcgtaaaatagatcctttacagaagaagcgtggcaattgcatggagtataagattggaacgtattcttttgcccggcgtaagaatataacatatctactagtcgcgctaactgcttttgacaccaacaatgttgcgcatagtactcaaactgatcttgagacagtgcttcaatctgctgtgtcatatcataatcaatgtggtcagggggccaaattgatgattcctcttatggggacggcaaattcaagaatgaaattagatcatcaagaatcttttgatataatcaaaaattatcttttacttcggaaaaaagatataaatgggtgcatagaaattgttgtatatcaaaaagatgcaaataaggtctctatatggaatagttaa

SEQ ID NO: 22620 - DNA, 591 bp, Bifidobacterium pseudocatenulatum
  DSM 20438 = JCM 1200 = LMG 10505
atgaattatcgtaatggtaattatagcgctttctatgtctctgagccatttgatgagtactctttgggggcaagacaagctcatgatttctgctattactcacttcttggcgcatggaagaaaaaggattcgaactttcctttcattgattcgcataataaaacttactctgtaagagacggcagtgattgggaaggtacattaaagcctcgtctgcataagcgtcttatgaattctaaaaacattattctgtttcttagcagtattacaaaagaaagtcgtgctctgagggaggaacttcagtatggaattggagtccttcgccttcctgttattgttgtttatcctgaactcgaaaatactaatatagttgattcatcgaggagagatttttcttcttctgtcaaaagactatgggataacttacctatttttaaaaaaatgatgaatgcagttccaacaattcatgttccttttaagaaggatctaattgcacgcgctctttcggatgaagaatttactgtacagagtgagagtcgacctggcgcatattttttattccatctaatgactttttttagatggtattaa

SEQ ID NO: 22621 - DNA, 837 bp, Escherichia coli; identical to SEQ ID NO: 22545

SEQ ID NO: 22622 - DNA, 555 bp, Escherichia coli; identical to SEQ ID NO: 22590

SEQ ID NO: 22623 - DNA, 837 bp, Raoultella ornithinolytica; identical to SEQ ID NO: 22545

SEQ ID NO: 22624 - DNA, 555 bp, Raoultella ornithinolytica; identical to SEQ ID NO: 22590

SEQ ID NO: 22625 - DNA, 837 bp, Citrobacter freundii; identical to SEQ ID NO: 22545

SEQ ID NO: 22626 - DNA, 555 bp, Citrobacter freundii; identical to SEQ ID NO: 22546

SEQ ID NO: 22627 - DNA, 837 bp, Enterobacter sp. 35666; identical to SEQ ID NO: 22545

SEQ ID NO: 22628 - DNA, 555 bp, Enterobacter sp. 35666; identical to SEQ ID NO: 22546

SEQ ID NO: 22629 - DNA, 834 bp, Acinetobacter indicus
atgaaagttaaaatatttaataaaaagttgagagattccttttttttaaaaatatctctattcagtgcctttgcaacattattacttgcttttgttcccataccatcaaagatacaaggcttattaggtggagtattcttagtatttttagtgattatttatatctatgattggagaaaagcaaataaattaaattcagttgaaattgatattgaaggtactacagtttgtattaaggaaggcgatatttttgaagaagatggattgaaggtaattgcttttaatgaatattttgacactttagttgataataaaattattaatgaagtttctctaaatggaatttttttacaaaaaaaattagatatagaaataagtgctcttgatcaagagattgataactatccttttgaggataatgaaatattagaggaaaacgtagatcgtttagttggaaagaaaaagaagtttaaaataggaactatatttgttcataatgactatattttgactgctttttctaaatttgactcctctaatagagctaatttaaccatgcctgagtatctaggatttctaataacattctgggacaaagtaaatatagtttatgggcagcgcagtgtttctgtccctatatttggttcaggtattacaaggattaaagagcataggggaattagtgatgaggacttactaaaaattatgatttggacattcagaattagcgaaatgagatttaaacatcctgctaaattaactattgttattcactctgaaaaaatgaataaaataaatttattggatattcaggaaacaaagaatggaatttga

SEQ ID NO: 22630 - DNA, 558 bp, Acinetobacter indicus
gtgagtagaattaatagttacagcgcattttatgtaagtgaaccttttgacccatcttcattaggagcatatgctacacatgacttttgtcattatcagatgctaaaagcatggaaaggaaaagatggtagttttccattttataacgctcatgaaacgacttataacgttcgagataatagtaattgggagcaaaccttaaaacctagattaagagaaagattaagaaattcaaaaaatattattctttttttaagttcaaagactaaaaactcaagagcattaagagaagaaattgattatggcgtgaatgtacttaaactaccaattattgttgtttatccagaatttacgacatacagtgaacttttatcagtaaatggacaatttaaaaatgaagtgactcaattgtgggataatttaccaattttcagggactctaaaaaaaatattcctgttttacatgttcccttaaataagtccttacttcataacgcactattaaacaaaggatttacagtacagtcacctctagaatctaaagactataaattataa

SEQ ID NO: 22631 - DNA, 831 bp, Bacillus stratosphericus
ataacagataaacaatttttaacttgggctataggcatccttcttataactataccaagttgtgtgggtacgatcatttcatttctagacttggatgctcgtagtagattgattattttgcttatggtagtagcattatcactagtcataataatttttcgtttcattagactactttttctgagtaacatcactcttaatctcaatggttccgaagttgaaattaaaaaaggtaatatttttgaagtgccacgaaataattataaagttatagcatttaatgagttttttgacactcaggtagatgacgtaataattgctcgcgaaacattaaatggtcagtatataaatcgatattattcagatcaagatatctcaaagttagatcaggaaattaaagatgacgtgaaacttaaaattgaagaaaagaatgttgaaagacctcttgggggaaaaacaacacgttacacattgggatcagtctttaaagatatggatttttttcttgtcgctttttcgaagttcgatagggagaatcgtgcccatttaaagctaaatgaatatgcgagttgcatgctaaatgtatggaatgaagtcaatactttacatgcaagcaaagaagtgtttattccattattaggttctgggataacaagacatgtggattctgatgttggagtcaatgaactattacatataatgttgtggacatttcaaatcagtaaagtaaagtttagagaaccagccaaagttacaattcttttatacaaagatgatcacaagaagattaatttttataagttaaaggagtttgagaagaatgggttatag

SEQ ID NO: 22632 - DNA, 573 bp, Bacillus stratosphericus
atgggttatagaaatggaaattatgcagcattctatgtcagtgaaccgtttaatgaaagtagtttaggggctaatgcgacaaaggattttgtgtcatataacatgttaagagcatggaaaggcaaagatagtaactacccatttaatgactcccatgataagacgtacaatgtacgggacggaagtgactgggataaaacattaaagccaagattaagaaaaagattagatcaatcaaaaaatataatcttcttcttaagtaagcatactgaaaacagcaaagctttgcgagaagaaattgattacggaattaatgtgaaggggctaccagttatcgttgtataccctgaattttccgaaaagagtgacatcatcgactgcactacaaagactatcagatccgaagtggtaaacttatggagtagagtccctatttttaatgactctatgttaaaggtaccaactattcatattccatacaaaaaacacctaattaaacaggctttagaggacaaagattttatggttaattcaaaaatcgctgcaggttcgtatcatttttatcgatgttaa

SEQ ID NO: 22633 - DNA, 831 bp, Bacillus stratosphericus; identical to SEQ ID NO: 22631

SEQ ID NO: 22634 - DNA, 573 bp, Bacillus stratosphericus; identical to SEQ ID NO: 22632

SEQ ID NO: 22635 - DNA, 831 bp, Bacillus stratosphericus; identical to SEQ ID NO: 22631

SEQ ID NO: 22636 - DNA, 573 bp, Bacillus stratosphericus; identical to SEQ ID NO: 22632

SEQ ID NO: 22637 - DNA, 831 bp, Bacillus sp. LK10; identical to SEQ ID NO: 22631

SEQ ID NO: 22638 - DNA, 573 bp, Bacillus sp. LK10; identical to SEQ ID NO: 22632

SEQ ID NO: 22639 - DNA, 849 bp, Bacillus amyloliquefaciens
atgtggaagtttaaagaattaataagagataagacatttagaaggtgggctctgagtataattctgactattccaactagtgtgagtacattcatttcatttctagacttggatgctcgttgtagattaattattttacttatattagtagggttgtcgctagtcataataattgttcaattcattagactactttttatgaataatatcactcttaatctcaatggttccgaagttgaaattaaaaaaggtgatatttttgaagtgccaagaaataattataaagtcattgcatttaatgagtattttgacactcaagtagatgacgtaataatcgcccgcgaaacattaaatggtcaatatataaagcgttattattcacatcaagatatcactgagttggatcagaaaattaaagatgacgtaaaacttaaaattgaagaaaaaaatgttgaaagaccttttggaggaaaaacaacacgttacagcttgggatcagtctttaaagatatggatttttttctagttgctttttcgaagtttgatagggaaaatcgtgcccaattaaaactaaatgaatatgcaagctgcatgcttaatgtatggaatgaaatcaatacattacatgcaagcaaagaagtgtttatccccttattaggttctggaataacaagacatgtggattctgatgttggagtcaatgaactattacatataatgttgtggacatttcagatcagtaaagtaaagtttagagaaccagccaaagttacaattcttttgtacaaaaatgatcacaagaagatcaatttttataagttaaaggagtttgagaagaatgggttatag

SEQ ID NO: 22640 - DNA, 573 bp, Bacillus amyloliquefaciens; identical to SEQ ID NO: 22550

SEQ ID NO: 22641 - DNA, 837 bp, Vibrio parahaemolyticus
atgataaaagtaagcttcttggacaaacgggtttttgaaaactttctcaaggttacttcatatataagtgtaaccttatctcttgttgtccttttcatcgacattccgaaagactgtaaaactttatatggtttgggtttcctaggattattgttggtaatttatatttcaatttggatttgggccaatactttacaaaagatcgacataaaagttgaaggaagcgatgtaacaattaaagttggtgatattttccagcaaaaaggcttgaaagcaattgcatttaacgagtattttgacactcaagtagacaataagttaattgccaagaagtcgctaaacggtatttttattaatgatcatatcggtgtctctgtttctgaactggataactatattagaaattattcttttgaaagtgatgaatttattgggcgtaatctaaacagggcgcagggcaaggttgaacgttaccaaattggtaccatttgtatacatggcgattatctattaactgcattctctaagtttgatgagaacaacaaagccttgctcactatgcccgagtacttggagtttctaataaatttttgggacaaagtaaataatgtatatgcccagcaaaatgtgtctgtgccaatatttggttcaggaattactagaataaaaggtcataaatctataagcgatgaggaccttttgaaaatcatgctttggactttccgaattagtgaaatgcgtttcaaatatccagcaaggctttctatcataattcataaagacaagataaatcagataaaccttctcgacatcaaatcagctaggaatggggtgtga

SEQ ID NO: 22642 - DNA, 564 bp, Vibrio parahaemolyticus
atggcatatcgaaatggaaactacgcagctttttatgttgcaacaccatttaatgcgagtgcattaggggcacatgcgacaaaagacttctgttattacaacatgctacgagcatggaaaggtaaggactcttcgttccctttcaatgactctcatggcaaaacatacaacgtccgtgataacagtcactgggagttaacattaaagccaaggctaagagaacgtcttagaagctcaaaaaacatcgtccttttccttagttcaaatacagcaagttcgagggctttaagggaagaaattgattatgggattaataaccaggggctaccagtcattgtgatatatcccgagtatgcatccaaagagagtctgctgactaacggaaacctcaaagcgagcgttaaaaatctatgggataaactcccgatattcagagattcaatgggcacagttccaacacttcatgtgcctttacagcaaagcctcataaagagtgctctgaatgacaaagatttcatgttagcaaccaaggttgatccagacatttttcggtataccccttaa

SEQ ID NO: 22643 - DNA, 876 bp, Rhizobium sp. Leaf306
atgaagtatttctttagatcactttggacttggtccttttggcgacatgcacttttatcgaaagaagctgtcgcgaaggtcttcgctatcgtaggtgccatgtaccttctattggacatggcagattttttcagcgtctacacaaaagaccgatacagcgtttatgccatccccatcatggccacgcttgcaattctttgggtcttagcgacacgccgtccgatcactaggttttcatataagatcccaggaaaagacttccgtgttgaagtgcggattggggatttgttcgacggaaacaatgacgttatcgtcagcaccaacaccacattcgacaccaacatggccagtggattgattgacactgccagcatccaaggccaggtcgcgacgaaattcttcaacgccaacacgtcggaaatcgatcgtcagcttgacctcgatcttgcagcggcttccggcagttcaaggccaaacgctcccggcaagaagatcgaatatccgataggtacagttgcgagggtcacaagccatagccggactttctattttgtcgcgatgtcccgccttaatgatcaaggaaacgcaagttcctccccgcgcgaaatagaagacgctcttgaagcgacatggaaattcgtaaggacgaatggaaacctcagagacctgtctattccccttatgggcacaggccgagggcgagttagtataccgcgcaagaagatggccgaacgtattgcgcagtcattttgcgacgaagcgaagaaccaagtcttttcgaatcggcttttgatctcgatacgccctgaagatgccgaggattacgccgtcaacctctaccagatccgagactatctcgttcagagcttgcattag

SEQ ID NO: 22644 - DNA, 558 bp, Rhizobium sp. Leaf306
atgtcgcgaaatgccaactactgcgccttttacgtagctgagcccttcaatccgggagcattaggcgcacacgcgacaaaagatttctgttactacaacctgctgcggtcatggaaaggtagcgatgctaatttcccgttcaacgacgcacatgcaactacctacagcgtcagagacggaagcgactgggaatataccctcaagccccggctgcgagaacgaatgcgatcctcgaagaacattgtgctcttcctcagcattagcacggtgaattcgcgagcagtaagggaggaatttgactatggcatcaacgaccagggcttgccaataatcgtggtctacccagaatacgacacgaaagaaagcttgctgatcaatggctctctcaaaccgaaggtgagggagctatggaacaacctccccattttcagagacacgatgcacaaggtcccaacgcttcatctaccaatgaagaaagagctgattaagtcggcgctcgccgatgcagactttatgctatcgacaaaagcaactgcccaaatctatcgattcatctaa

SEQ ID NO: 22645 - DNA, 849 bp, Stenotrophomonas maltophilia
atgatccacgtcatggcgaaggtcaacttttttgacaggcgggtcatcaagaaattccttgagatcaccgctgtcatcagcggtacgctgtcattcgtagttatttttgttgacgtccctaccgagtggaagctgaaggctggcttggccttcttagtaatactggcgctcacctacttggtgatatggctctggtcgaacaacctgaatagtatcgacatcaatgtcgagggcagcgatgtcgcgatcaagactggagacattttccagcagcctggattgaaggcaatcgccttcaatgagtatttcgacacgcaggttgataacaagataattggcgagacttccctcaacggcgttttcatccagaagcatctcggcgtcccactctccgaactggaccgccacatcgaggaatacgcttttgatatcagcgaagtgctggatgagaacgaggccaggaaacaggggaagaagaaaagatatcagataggcacgatctgcctgtacaaggactacctcctgaccgcgttctccaagttcgacgagaacaacaaggcgctgctaacgatgccggagtaccttgagtttctcatcaatttctgggacaaggtaaacaacgtctacgcccagcaaagcgtatcgaccacaatcttcggttcgggaatcacgcgaatcaaaggacacaagaacatttccgacgaggatctcctgaagataatgctgtggacgttcaggatcagcgaaatgcgattcaagtatcccgcgaagctgaccatcgtgatccacaaagataagattgaccagatcaatcttcttgacattaaatccgctaggaacggcgtgtaa

SEQ ID NO: 22646 - DNA, 564 bp, Stenotrophomonas maltophilia; identical to SEQ ID NO: 22596

SEQ ID NO: 22647 - DNA, 849 bp, Stenotrophomonas nitritireducens
atggtccacgtcatggcgaaggtcaacttttttgacaagcgggtcatcaagaaattccttgagatcaccgctgtcgtcagcggtacgctgtcattcgtggttatttttgttgacgtccctgtcgagtggaagctgaaggccggcttggctttcctggcaatactggtacttacctacctggtgatatggctctggtcgaacaacctgaacagtatcgacatcaatgtcgagggcagcgatgtagcgatcaagactggcgacattttccagcagcctggattgaaggccatcgccttcaatgagtatttcgacacgcaggtggacaacaagataattggcgagacttccctcaacggcgttttcatccagaagcatctcggcgtcccgctctccgaactggacagccacatcgaggaatacgcttttgatgacagcgaagtcctggaggagaacgaggccagaaaacaggggaagaagaaaaggtatcagataggtacgatctgcctgtacaaagactacctcctgaccgcgttctccaagttcgacgagaacaacaaggcgctgctgatgatgccggagtaccttgagttcctcatcaatttttgggacaaggtaaacaacgtctacgcccagcaaagcgtatcgaccacgatcttcggctcgggaatcacgcggatcaaaggacacaagaacatttccgacgaggatctcctgaagataatgctgtggacgttcaggatcagcgagatgcgattcaagtatcccgcgaagctgactatcgtgatccacaaagacaagattgaccagatcaatcttctcgacattaaatccgctagaaacggcgtgtaa

SEQ ID NO: 22648 - DNA, 564 bp, Stenotrophomonas nitritireducens
atggcatatcgaaatggaaactacaccgccttttacgttgcagagccattccatcccagctcgctgggtgccaatgcgacgaaagattttcagtactacaacaccctgcggatgtggaaaggcgctgatgcgacgttccccttcgtcgattcacacggcaaaacttacagcgtccgcgacggcagcgattgggaatacaccctgaagccgaggctcagggagcgccttcggaactcgaagaacatcatcctcatcttgagttcgatcacgacgaattccctcgccgttcgagaagaaatcgactacgggatcaacgaccaggggctgcccgtgatcgtcgtctaccccgaatatgccaccaaggaaagtctgttggtcgatggatcattgaagcaggcgatcaagaacctgtggggaaatcttcccgtgttccgggattcgatgagcaaagtccctacgcttcatgtcccgatgaacaaggaactcatcaaaaagtccttgctggacagcgagttcatggttgggagcatgaaggccccaggcatctacaggtacagcccataa

SEQ ID NO: 22649 - DNA, 837 bp, Pseudomonas aeruginosa
atggcgaaagtcagcttcattgacaggcgggttgtcaaaaaattccttgaaaccacctccgtcgtcagtggcgcgctgtcattcgcggttattttctatgacatacctgtagaatggaagctgaaggtcggcttggcttttttggcactattggtactcatctacctagtgatatggttccggtcgaacaacttgaatagcattgacatcaatgtcgagggcagcgatgttgcgatcaagaccggcgatattttccagcagccgggattgaaggctatcgccttcaatgaatatttcgacacacaggtggacaataagataattggtgagacctccctcaacggggtttttattcagaaacatctcagtgacccgctctccgaattagatcgccatatcgaggaatacgcttttgatgacagcgaagtcctagagaaaaacgaagcaaggaaacacggaaagaagaaaaggtatcagataggcacgatttgcctgtacaaagactacctcctgaccgcgttctccaagttcgatgagaacaacaaggcgctactaacgatgccggagtaccttgaattcctcattaacttctgggacaaggtaaacaacgtgtacgcccagcaaagcgtatcgaccacaatctttggctcgggaatcacgcgaatcaaagggcacaagaatatttccgacgaggatctactgaagatcatgctgtggacattcagaatcagcgaaatgcgattcaagtaccccgcgaagctgaccatcgtgatccacaaagacaagatcgaccagatcaatcttctcgacatcaaatccgtcaggaacggcgtgtag

SEQ ID NO: 22650 - DNA, 564 bp, Pseudomonas aeruginosa
atggcatatcgaaatggaaactacaccgccttttacgttgcggagccattccatcccagctcgctgggagccaatgcgacgaaggattttcagtattacaacaccctgcggatgtggaaaggtgctgatgcgacgttccccttcgtcgattcgcacgacaaaacttacagtgtccgcgatggcagcgattgggaatacacactgaaacccaggctcagggagcgcctgcggaactcgaagaacatcatcctgatcttgagttcgatcacgacgaattcccgcgcccttcgagaagaaattgactacgggatcaacgaccaggggctgcccgtcatcgtcatctatcccgaatacgccaccaaggaaagcctgctggtcggtggatcattgaagcaggcggtcaagaacttgtggggaaatcttcctgtgttccgggattcgatgggtaaagtacccacgcttcacgtgccgatgaataaagacctcataaaacaggcgttacagaacgctgatttcatggtggggaacaaaggaaatcctgatttttactggtacacaccataa

SEQ ID NO: 22651 - DNA, 849 bp, Pseudomonas aeruginosa
atgattcacgtcatggcgaaggtcaacttttttgacaagcgggtcatcaagaaattccttgagatcaccgctgtcgtcagcggtacgctgtcattcatagttatttttgttgacgttcctgccgagtggaagctgaaggctggcttggctttcttggcaatactggcactcacctacgtggtgatatggctctggtcgaacaacctgaacagtatcgacatcaatgttgagggcagcgatgtcgcgatcaagaccggcgacattttccaccagccgggattgaaggcaattgccttcaatgagtatttcgacactcaggtggacaacaagataattggcgagacttctctcaacggagttttcatccagaagcatctcggcgttccgatttccgaattagaccgctacatcgaggaatacgcttttgatgaaagtgaagtcctggaggagaacgaggcaaggaaacacggtaagaagaaaaggtatcagataggcacgatttgcctgtacgaagactatctcctgaccgcgttctccaagttcgatgagaacaacaaggcgctactaacgatgccggagtaccttgagttcctcattaatttctgggacaaggtaaacaacgtgtacgcccagcaaagcgtatcgacaacaatctttggatcaggaatcacgcgaatcaaaggacacaagaatatttccgacgaggatctactgaaaatcatgctgtggacattcagaatcagtgagatgcgattcaaatatcccgcgaagctgaccatcgtgatccacaaagacaagatcgaccagatcaatcttctcgatatcaaatccgccaggaacggcgtgtag

SEQ ID NO: 22652 - DNA, 564 bp, Pseudomonas aeruginosa; identical to SEQ ID NO: 22538

SEQ ID NO: 22653 - DNA, 894 bp, Bacillus sp. NRRL B-4257; identical to SEQ ID NO: 22535

SEQ ID NO: 22654 - DNA, 573 bp, Bacillus sp. NRRL B-4257; identical to SEQ ID NO: 22550

SEQ ID NO: 22655 - DNA, 894 bp, Bacillus sp. NRRL B-41580; identical to SEQ ID NO: 22535

SEQ ID NO: 22656 - DNA, 573 bp, Bacillus sp. NRRL B-41580; identical to SEQ ID NO: 22550

SEQ ID NO: 22657 - DNA, 894 bp, Bacillus amyloliquefaciens
atgaatataataggtagtgatcgcaatactaacattggaggttttatgtggaagtttaaagaattaataagagataagacatttagaaggtgggctctgagtataattctgactattccaactagtgtgagtacattcatttcatttctagacttggatgctcgttgtagattaattattttacttatattagtagggttgtcgctagtcataataattgttcaattcattagactactttttatgaataatatcactcttaatctcaatggttccgaagttgaaattaaaaaaggtgatatttttgaagtgccaagaaataattataaagtcattgcatttaatgagtattttgacactcaagtagatgacgtaataatcgcccgcgaaacattaaatggtcaatatataaagcgttattattcacatcaagatatcactgagttggatcagaaaattaaagatgacgtaaaacttaaaattgaagaaaaaaatgttgaaagaccttttggaggaaaaacaacacgttacagcttgggatcagtctttaaagatatggatttttttctagtggctttttcgaagtttgatagagaaaatcgtgcccaattaaaactaaatgaatatgcaagctgcatgcttaatgtatggaatgaaatcaatacattacatgcaagcaaagaagtgtttatccccttattaggttctggaataacaagacatgtggattctgatgttggagtcaatgaactattacatataatgttgtggacatttcagatcagtaaagtaaagtttagagaaccagccaaaattacaattcttttgtacaaaaatgatcacaagaagatcaatttttataagttaaaggagtttgagaagaatgggttatag

SEQ ID NO: 22658 - DNA, 573 bp, Bacillus amyloliquefaciens
atgggttataggaatggaaattatgctgctttctatgtcagtgaaccgtttagtgaaagtagtttaggggctaatgcaaccaaggattttgtgtcgtataacatgttaagagcatggaaaggaaaagataataactacccatttaatgactcccacgataaaacatacaatgtacgggacggtagtgattgggagaaaacattaaagccaagattaagaaaaagattagatcaatcaaaaaatataatcttttttttaagtaagcatactgaaaacagcaaagctttgcgagaagaaattgattacggtattaatgtgaaggggctaccagttatcgttgtataccctgaactttccgaaaagagtgacatcatcgactgcactacaaaggttttcagatcagaagtggtgaatttatggagtagagtccctgtttttaaagactctatgctaaaggtaccaactattcatattccttataaaaaagaccaaattaaaaaagctttagagaacaaagattttatgattaattcaaagatttctgcaggttcggtttatttttatccatgttaa

SEQ ID NO: 22659 - DNA, 843 bp, Flavobacteriaceae bacterium CRH
atgaaagttaattttttagacaaaggtgttaggaacaaattctggatttatttttcagcaatatctggtgttatatcattcatattactttttaatattgtacctgaagagtataaagaatggttgaaatattttggttatctatctttttttattttgataattatatatttaattctttggtatacagctaataagcttacgaatattgatgttgatatagatggaagtaatgtaaatataaaatgtggagatttattttctgaggacggacttaaaactattccatttaacgagtattttgatagtgtagttgatgacaaaataatatctgctaaatctcttaatggtatttttattaataaatattttagcggaaaagtagaggtgcttgatgattttatagtagataattcagatgaattagatgtaactgacactttagtgaatagaaggctgggtggtaaaatggtaaaatttaaattaagtacaatttttgtttatgatgaattcatcctaactgcattttctaaatttgatgagaataataaagcaactttgacaatgccagaatacatagagtttttgattaatttttgggatagagttaatcgcgtttacgctcaaaaatctgtttctgttccaatttttggttctggaatcacaagaataaaagagcataaaaatattagtgatgaagatttattaaaaataatgttatggacgtttaaattaagtgaaatgaaatttaaatatcctgctaaattgaagatagtcgtacataaagataaaattggtcaaattaacctattcaatgttaaatccatcgaattaggattgtaa

SEQ ID NO: 22660 - DNA, 567 bp, Flavobacteriaceae bacterium CRH
atgagtcaaatttacaattattgtgcgttttacgtaagtgaaccattcagtgaatcatcccttggtgctcacgccactaaagatttttgttattataatatactcaaagcgtggaaaggtttagatagttctttcccatttaaaaatgcacacgatacaacttataatgttcgtgataatagtgattgggagtcaactcttaaaccacgacttagagaaagacttagaaattctaaaaacattatattatttttaagtgagaatacttcgaattcaagagcactgcgagaagaaatggaatatggtattaatactttaagtttgcctgtgattgtaatatatccagatttgaaaacaaatgaagatttacatacttatgacaaaaagaatctaaacaatactgtaaaaaacttatgggataaattaccagctttcagagattctaaatcaaaagtacctgtattgcacattccaatggacaaatatgttatagggacttccttaaataattctgattttatagttaattctggaaaaaaacctgatgattattcatataaaaactaa

SEQ ID NO: 22661 - DNA, 879 bp, Novosphingobium fuchskuhlense
gtgaggtattttttcaaatcggtagcgacattctcattttggaagtacgctctcttttctggagaggcaattgcaaagatttttgcaattgttggtatgcagtacgctttgatggatatggctgattttttcagtatttatacaaaagataagtacagcaaatttgctgtcatagtgatgcttgttattgcggtcatctgggtggcagtgcgcagacgaccaatcacccgcttttcctacaaagttcctgggaaagatgtttcaatcgaggtgaagatcggtgatctgcttgacggcaacaacgacgttgtggtgagtacgaatacaactttcgataccgacatggcaggcggtctgattgatactgacagcgttcaggggcaggttgccacccgctttttcaatgcaaacaccgtggaaattgatcgtcagctcgcgttggatctggcatccgcccaaagcacgcatcgcgccgacgctccgggaaagcagaccgagtatcccattggcacagtcgctagggtcaagagtcacaatcgcaccttttattatgtggcaatggcgcggctcaacgctcagggcacagctagctccacgccgcgagaaatcgaggacgcgcttgaggccacgtggtcgttcgttcagagccatggtagcgtgagggatctttcgatcccgctcttgggcaccggacgtggccggacagggatccagaggaagaagatggtggagcggatagcacagtccttcgtggacggatcgacaggtcagatcttctccaaccgcctgtgcattttcatccgaccgcaggacgccgagagtttcgcagtcaacctgtatcagattcgcgactacctcatccagagtctccatacctga

SEQ ID NO: 22662 - DNA, 561 bp, Novosphingobium fuchskuhlense
ttggcacgtaacggaaactattgcgccttctatgtcgcggaaccattcaattctggggccttgggggctcatgcgaccaaggacttttgctactataacctatttcgttcctggaaaggtgcggattcgaccttcccgttcagcgattcgcacgcgctgacatataacgtccgtgatgggagcaattgggaactgaccctgaaacccagacttagggaacggctacgctcttcgcagaatgtagtcttgtttcttagttctgatacagccaactcccgggcgttgcgtgaggagatcgactacgccatcaacgatcagggccttccgctgatcgtcgtctatccggaattcaaaacgaaggagagcctcctcaccaacggatcgctcaagcaatcagttaagaatctctggtcgaaggttccggtcttgagagattcgattgacaatgttccgagcctgcatgtgccgatggttaagtcgctgatttcttccgcgctgaaggaccccgacttcaagctgtctacaaagacaacggcgtcagtctatcattacaagatataa

SEQ ID NO: 22663 - DNA, 837 bp, Burkholderia sp. MSMB1835
atggcaaaagttaaattttttgacaagcgacttagaaagaaatttcttgagatcacgtccgtcattagtgtctcgctctcattattcgcactatttgtcaatatcccaagtgatcacaagtcactatacggttggatttttctagcattacttttcggaatttacctgacactctggatttggtcgaatagcctgaacagcatcgacataaaaatcgaagatagcaaagtcacgataaaaacgggggatatcttcgaccaaccgggcttgaaggtgatcgcattcaatgaatatttcgacacccaggttgacaacgtaatcatcggggaaggctctctcaacggcatttttatcaaaaaatacttgaacgcccctgtctccgaactggatcgtcacatcgaaaattacgcatttgatcgcagcgagttactcggaaaaaatgacgatcgaaagcagggaaagaagctgcaatatcaggtcggaacggtttgcgtctacaaggactatctgctgacagcattctccaagtttgacgagaacaataaagcgctgttgacgatgcccgaatacctagaatttttgatcacattttgggacaaggttaacaacatatacgctcaacaaagcgtatcaaccaccatcttcggatcgggaattacgcgtatcaagggacataagaacattagcgacgaggatcttttgaagataatgttatggaccttcagaatcagtgaaatgcgattcaagtatccagctaaactgaccatcgtcattcacagggacaagattgatcagattaaccttctcgacatcaaatcggtgagaaacggtgtgtaa

SEQ ID NO: 22664 - DNA, 564 bp, Burkholderia sp. MSMB1835
atggtgtatcgaaacgggaactacactgccttttatgtcgctgaaccgttcagcgctagcgcgttaggagctcatgcgacgaaggacttctgctactacaatcttctgcgatcgtggaaggggaatgacgcatcgttcccctttgttgactcacataacaagacttacaacgtccgcgacagcagcgactgggaagtgacattaaaaccaagactcagggagcggattcgaaattccaagaacattgttctgttcctgagcgcgaacactaaaaactcgcgagcccttagggaagagatcgactacggcatcaatgaccaagggctaccggtaatcgtcgtttatcctgagtacgacacgaaggagagccttgtgaacaacggctcgctgaagcaagcggttaaaaacctctgggacaatttacccgtgttccgggattcgatgagcaatgtgcccacgcttcacgttcccatgaaaaaagcccttattaaagaatcactagaacacagcggcttcatgctcaacaccaagttggccgcagatttctactggtacaaggtttaa

SEQ ID NO: 22665 - DNA, 858 bp, Ruminococcus sp. DSM 100440
atgaaaaaaatatataattggtatatcaatctttcacgacaaatccgagatagtatcactgcttcagttacgacagtaggtctaatttccacaattctttctgtgctaggtatttcgctgggagattggaaggattcaaatgtttggatgaggattggggttgttttggtaatctttgtggtgatttatagtctcatttattttgctattggcaggatttttagagattctgtaaaccttacaattcgacagacgcaagtagttattagctgtggggacatatttgaagcttctggttggaagattattggatgtgatacgcattttgacactagagttgacgatattgtaatatcgaagaagtcattgcatggccaattagtcttaaaccatggaaaaaaggaggaaattgaagcggttgtagagaatgaagcaaagaggcttggtctccaaaagaagaatgatggattgtatgagttcccgcttggaacagtaattcgttatgatagtagtgtagataatcagacgtatcttatgttagcgatgacagaactaaatatacaacatgaagctcatactaatatggcaaagtttgaacttatgctcatgaagatgtggacagagatagacagggtgtatgcgagtaatgatattgtacttcccgtacttggtacgggaatatctagatttgatgatggcccgaaagatagagaagcactactaagatgtatgctatgtacattaaatagtagcggagtaagccttaaatctaaagtagatattataatctatggcgatgttaaggatattccgatgtatgaatataaaaatatgtttcatatgacattaaggaggtaa

SEQ ID NO: 22666 - DNA, 564 bp, Ruminococcus sp. DSM 100440
atggcaaataggacagcaaattatgcggcattttatgtgagtgaaccttttagtgaatcaaatttaggagctaatgccacaccagattttctttattacaatcagcttcgtgcatggaaaggagcagatagttcttttccttttgtggatgctcatgcaaaaacatataatgttcgagataatagctcatgggaaacattaaagaaaagattgcatgataggcttgatgtatcaaaaaatattattctgtttttgagcaataatacaaagaatagtcaagcattacgggaagaaattgaatatggaattaacacaaaaggacttccggtaatcgttatttaccctgattttaaggaaaaatcagatatttggtgttcaacgggaatgagaaaacaggttaaggatctttgggataagttaccgaaattcagagacaatatggataaagttgccacattacatgttccatacaaaaagaatttaattgtgagcgctttagaagatcctgattttaaggtacaaacaatgactaatgctgggcagtatcattataaattggattga

SEQ ID NO: 22667 - DNA, 837 bp, Escherichia coli 536
atggcgaaagttaattttttcgataagcgtatacttaaaaaattttcagactacacatcaactattagtaccatattttcactttttttgatttttgtagacattccaacagaaaacaaactaacacttggtattatatttttaattattttattcttactgtatttcggcatatggtttaaatcaaataatctttcggaaattaatttagatgttgagggcagcattgttactgtaaaagcaggcgatttattcagacaagatggattcaaggtcattgcttttaatgaatattttgacacgcaagttgatgatgttatcatttctcataattcacttaatggattatatattgataactatttagcgggatccgtatctgatttggaccatcgtatttcaaatcatcagtttgaagaagatgaactgcttgaggtcaaccataaaagaaaagtgggtaaaacacaaaaatattcgctaggaactatcttcgttaataatgattatctattaactgcgttttcaaaatttgacgacaaaaatagagcttttcttacaatgccggattatctagcatttttaataaatttttgggacaaagttaatcgtatatatgctcaaaaaagtgtctctgttcctatctttggatctggaatcactagaataaaggaacataaaaatattagcgatgaggatttacttaaaataatgttgtggacttttagaataagtgaaatgaggtttaaatttccggcaaagcttactatcgttatccacaaagataagatagataaaataaacttattggatataaaatcagcgagaaatggtctttag

SEQ ID NO: 22668 - DNA, 864 bp, Escherichia coli 536
atgtataatatccttttcttcatctttctttcaatagcaattccattccttttattcctcgcatggaaacagcacctaaaaaccaaagagattcgttcatatctattgaaagagggatataatattattttcaacggagaaggtaactcatatctcgcgtttaatattagtaatgcgacatttcgcgcaggtaatttaacttccaatgattattttcaagcatcaatttcttatatccacgattatagatgggagtggaaggaggttgaggcaaagaaaataaataatatatttattatttacatttcgaatattgatttcccttcccaaaaactattttatcgcaataataaatctttagcagaaatagactgggcaaaattacaagcaatttttcatcaaccatatgaaatacagaatgacgtcatgcaagataacaataatacgcactatgattttttcatatcccatgcaaaagaggataaagatacttttgtcagaccactggtagacgagttaaatagacttggtgtaattatttggtatgatgaacagacacttgaagtcggcgatagcttaaggagaaatattgatttaggcctaagaaaagcaaattatggcatagtcatactttctcataactttctaaacaagaaatggacacaatacgaattagatagtttaattaatcgtgcagtgtatgatgataataagattatattgccaatctggcataatatcaatgctcaagaggtatctaaatacagccattatttggcggataaaatggcactgcaaacttctttatatagcgttaaggaaatagcaagagagttggctgaaatagcatacaggagaagataa

SEQ ID NO: 22669 - DNA, 837 bp, Escherichia coli Nissle 1917; identical to SEQ ID NO: 22667

SEQ ID NO: 22670 - DNA, 864 bp, Escherichia coli Nissle 1917; identical to SEQ ID NO: 22668

SEQ ID NO: 22671 - DNA, 837 bp, Escherichia coli 1-182-04_S4_C3
atggcgaaagttaactttttcgataagcgtatacttaaaaaattttcagactacacatcaactataagtaccatattttcactttttttgatttttatagacattccaacagaaaacaaactaacacttggtattatatttttaattattttattcttactatatttcggcatatggtttaaatcaaataatctttcggaagttaatttagatgttgagggcagcattgttactgtaaaagcaggtgatttattcagacaagatggattcaaggtcattgcttttaatgaatattttgatacacaagttgatgatgttatcatttctcataattcccttaatggattatatattgataactatttagtgggatccgtatctgatttggaccatcgtatttcaaatcatcagtttgaagaagatgaactgcttgatgtcaaccataaaagaaaagtgggtaaaacacaaaaatattcgctaggaactatcttcgttaataatgattatctattaactgcgttttcaaaatttgacgataaaaatagagcttttcttacaatgccagattatctagcatttttaataaatttttgggacaaagtcaatcgtatatatgctcaaaaaagtgtctctgttcctatctttggatctggaatcactagaataaaggaacataaaaatattagcgatgaggatttacttaaaataatgttgtggacttttagaataagtgaaatgaggtttaaatttccggcaaagcttactatcgttattcacaaagataagatagataaaataaacttattggatataaaatcagcgagaaatggtctttag

SEQ ID NO: 22672 - DNA, 924 bp, Escherichia coli 1-182-04_S4_C3
gtgataacatatgaaaacatagaattttttatatgcttggtgaatgttttggacaacaatatatataatatccttttcttcatctttctttcaatagcaattccattccttttattcctcgcatggaaacagcacctaaaaaccaaagagattcgttcatatctattgaaagagggatataatattattttcaacggagaaggtaactcatatctcgcatttaatattagtaatgcgacatttcgtgcaggtgatttaacttccaatgattattttcaagcatcaatttcttatatccacgattatagatgggagtggaaggaggttgaggcaaagaaaataaataatatatttattatttacatttcgaatattgatttcccttcccaaaaactattttatcgcaataataaatctttagcggaaatagactgggcaaaattacaagcaatttttcatcaaccatatgaaatacagaatgacgtcatgcaagataacaataatacgcactatgattttttcatatcccatgcaaaagaggataaagatacttttgtcagaccactggtagacgagttaaatagacttggtgtaattatttggtatgatgaacagacacttgaagtcggcgatagcttaaggagaaatattgatttaggcctaagaaaagcaaattatggcatagtcatactttctcataactttctaaacaagaaatggacacaatacgaattagatagtttaattaatcgtgcagtgtatgatgataataagattatattgccaatctggcataatatcaatgctcaagaggtatctaaatacagccattatttggcggataaaatggccctgcaaacttctttatatagcgttaaggaaatagcaagagagttggctgagatagcatataggagaagataa

SEQ ID NO: 22673 - DNA, 837 bp, Escherichia coli 1-182-04_S4_C2; identical to SEQ ID NO: 22671

SEQ ID NO: 22674 - DNA, 924 bp, Escherichia coli 1-182-04_S4_C2; identical to SEQ ID NO: 22672

SEQ ID NO: 22675 - DNA, 837 bp, Escherichia coli 1-182-04_S4_C1; identical to SEQ ID NO: 22671

SEQ ID NO: 22676 - DNA, 924 bp, Escherichia coli 1-182-04_S4_C1; identical to SEQ ID NO: 22672

SEQ ID NO: 22677 - DNA, 837 bp, Escherichia coli 8-415-05_S4_C1; identical to SEQ ID NO: 22667

SEQ ID NO: 22678 - DNA, 864 bp, Escherichia coli 8-415-05_S4_C1; identical to SEQ ID NO: 22668

SEQ ID NO: 22679 - DNA, 837 bp, Escherichia coli 8-415-05_S4_C2; identical to SEQ ID NO: 22667

SEQ ID NO: 22680 - DNA, 864 bp, Escherichia coli 8-415-05_S4_C2; identical to SEQ ID NO: 22668

SEQ ID NO: 22681 - DNA, 837 bp, Escherichia coli 8-415-05_S4_C3; identical to SEQ ID NO: 22667

SEQ ID NO: 22682 - DNA, 864 bp, Escherichia coli 8-415-05_S4_C3; identical to SEQ ID NO: 22668

SEQ ID NO: 22683 - DNA, 837 bp, Escherichia coli 8-415-05_S3_C3; identical to SEQ ID NO: 22667

SEQ ID NO: 22684 - DNA, 864 bp, Escherichia coli 8-415-05_S3_C3; identical to SEQ ID NO: 22668

SEQ ID NO: 22685 - DNA, 837 bp, Escherichia coli 8-415-05_S3_C1; identical to SEQ ID NO: 22667

SEQ ID NO: 22686 - DNA, 864 bp, Escherichia coli 8-415-05_S3_C1; identical to SEQ ID NO: 22668

SEQ ID NO: 22687 - DNA, 837 bp, Escherichia coli 8-415-05_S3_C2; identical to SEQ ID NO: 22667

SEQ ID NO: 22688 - DNA, 864 bp, Escherichia coli 8-415-05_S3_C2; identical to SEQ ID NO: 22668

SEQ ID NO: 22689 - DNA, 837 bp, Escherichia coli 9.1649; identical to SEQ ID NO: 22667

SEQ ID NO: 22690 - DNA, 864 bp, Escherichia coli 9.1649; identical to SEQ ID NO: 22668

SEQ ID NO: 22691 - DNA, 681 bp, Acinetobacter baumannii ATCC 17978
atgaacatattaattgacttatcaacttggcgattctggcgccatttttttttacaatctttagcatgtggtgggggtatttctgctgctattcaatttatattaattatatttcctgaatacgcgcaaaagttccaaggacttattccaataatactaatctttatagtttcaacaatatttggtttagttagatcttggcctcgtcctatcgaaatggaatatagcgcacctaaaactaaaattaaaataattaaaggtgatttattagatcaagatgaacatctagtaatcgggatctgtaatacttttgatactgaaactcctcatattgtttctaaaaaaagtttactaggacaatctatagatagattatttggaggagatattaaaaagcttgatgagcttcttaatcaagcattagttgggaaatcatttgaaaatagagagcctgttaaagatggaaaaaacaaacaatatccactcggaacagtagctatagttgaacactctccacgtttaatttttttcttagcatattgtcaaatgagtgataaaaatgaagcatttggtacagtagattctgtttggaaaagtttactatcttatggactgtcgcaatcagaacgaggaaatcaacgaccctatatcaattcctgttattggtggcggacaagctag

SEQ ID NO: 22692 - DNA, 510 bp, Acinetobacter baumannii ATCC 17978
atgagctataaaaacaaaacttatatcgcttttgcgagtgaagatattcatctatatcgtttaatggaagcatggagagaaaatgaaaaaattgattttgatttttttgatgctcatgacctctatatttcaagagatagtagtaagcctgaaaccattaaaagaaaccttcgtgagagacttaaaaacgctaagcaaataatattaattggaagtagtgattgtaaaagaaagggaggagatggaaaatctttcctagctcatgaaattgatgtcataaaagaatttaatttacccatagttatagctaataaggatggagatagaaatattgatcgaagttttataccggaccctttgctacaagcaaactactatacagtatcagtttcgctacaaccaaaaattattaaatatgctctagataactatgccaaattatatagtagttctaacaataaaggccctcattactatttaagtagtatttacgaaaagataggtctctaa

SEQ ID NO: 22693 - DNA, 837 bp, Pseudomonas putida H8234
atgagtcaaataggcttttttgatcagcggataatcaaaagattctggggcgcgctcgccgcgaccggcacagcgctgtcattactactaattttcgtaaccatacctgaaactggaaaggtcacagcggggatcgcctgtgtggcattcttgattttaatttatattcacttttggtggacatctaacaacctaaccgaagtagaactaaagatagaaagcacaacagtcatcgtaaaagtaggcgacatattcaagcaacccggccttaaagtgatcgcctttaacgagtactttgacacccaagttgacgacgaaataatctctcacagctctttaaacggcatattcatagacaggcacttaccaaaagcattagtagaccttgaaaatcatctgaccgcctatcgattcgacgagtgtgaaatcttagagttaaacgaaaccagggcaactggaaagaaacagagatacgacataggcactatatgtgtgtacgaagattttcttcttgcagcattctcaaaattcaacgaacgcaaccaagcctatttaacgatgcctgagtacctagggtttttgatcaaattctgggacaacgtcaatagagtgtacgcacagcaaagcgtttcaacaccaatattcggatcgggcatcacgcgcattaaagaacatcgaaatataagcgacgaagaactactaaaaatcatgctttggacttttagaataagcgagatgcgcttcaagcacccagcaaagctcaacataataattcacaaagacaaaattagtcaaattaatttgcttgacataaagtccgctaggaacggcttgtaa

SEQ ID NO: 22694 - DNA, 510 bp, Pseudomonas putida H8234
atggcgtatcgaaataaaacttacgtcgctttcgcaagcgaagacattaacttgtatcggctcatggaagcatggcgcgagaatgataagatagacttcgattttttcgatgctcacgatctattcatttcgagggatacaagtcagcgggaaacgattaagcgaaatcttcgccagcgtatgaaaaatgcaaagcaggttgtcttgattggcagtccagatgccaaaaagaaaggcggggatggatattcgtttttggctcacgagcttgagctaattgtggagtttgacttgcccgttgtggtggcgaataaaggcggcagtcgcgaaattcaacgagcgttaataccgactcccctgctgaatgcggactactatacaatgtcagtttcgctgcagccagctataataaagtttgcgctggatgaatatgtcccagcgttcgcccagaaggtgagaaaaggtccgcattattatccggcggatatttataaaaggcttggtatctag

SEQ ID NO: 22695 - DNA, 879 bp, Xanthomonas campestris
gtgaggtacttcttcgagtcgattaggacacgagcctattggcgctacgccctcttctccggtgaagcgattggcaagttcttcgccgtgatgggcattttgtacctgtgtgttgacttggcagacgccttcaacatctacaagaagaaccagtacagctactacgggttgatcttcttggtcgtgcttgcactgctgtacgtgttgtccacgcgacggccgctctcgcgtatcagctacaagattccgcagaaggacttcgcagtagaggtcttgatcggcgatctcttcaaaattcccggtgaggtcatcatcagcaccagctcgacattcgatacggacatgtcgtcggggctgatcgccgcgtcgagcttgcaaggtcagttggcgacgaactacttcaacggccagaccatcgaaattgatcggcagatcgaggtttcgcttgaaaaagaggcgttcaccatcaacgagaagaggccgggcaagaagaaggaatatccaatcggcactgtcgcccgtgtgagcgcgcacagcaagaacttctacctcgtggcgatgtcgcacatggaagagaacaagaacgcccgatccgacttgaagatgattgacgaggcgcttgagaagctgtgggtgaacttggcgtccaaggccgaggtgggtgacatcgtgatgccgttgataggcacggggcgcgggcgggttccctatcccagaaagaagatgatcgagcgcattgctcaatccttcgcagacgctgcgagcgaacgcgcattctccaacaagctcatcatcgttgtgcgtcccgaagatgcctccatgttctcgttaaatctgttccaggtccgggattacttgggacagagccttcacacctag

SEQ ID NO: 22696 - DNA, 501 bp, Xanthomonas campestris
atggcatatcgaaataagacctacatcgccttcgacggcgacaacgacatgcactggtaccgcctgatgacggcatggaaggcaaacgacgggttttcgcttaactttcataatgcccacgatctgaacacggcgcgggattccagccaggaagagagcatcaagcgacaactccgcgagcgcttcgccaattccaagctgcttgtggtactcatcggggctaacaccaaatacctgacgaagttcgtcaagtgggagatggaggtggctttgcgccttgggctgcccattatcggcgtgaacttgaacggcagccggaagatggacgaccggtgtccgcccgcgatccgtgatcaactcgtagtctatacctcgttcaaccacaaaatcatcgaacacgcgatggaccactggcccgccgaatttcattcgttgcgcagcgcaggtacctccgggaatcgccactacaacgatgatgtgtacaggcggttcggcctgtga

SEQ ID NO: 22697 - DNA, 813 bp, Ralstonia solanacearum
atgcaacgccaccctttcaagttgctggccaatgcgttcgccgcgttcagtgtcattcagacgatcatcagaggggtatcgctgtttgtgccaggcatctcgatcagtggccctattccacttctcgcggtttttcttttcagcgtcgggtggggggccaagaaggtctggaagccttcgcgtatcgaggtgcccgttgcgaactgcggtactgtgattgaggtacttttcggcgatcttttcgagcaagacggaatccgagccattgctgttaacgacttcttcgacagcgagctcggcaaaccggtgtcagataaaagcgtgcacggcatttttctcaaaaagtgctttggcggccaccaagaagctttcgacaagcaagtcgatgctgagcttgcaaatgttgcgagcgagcctgcggtacgctcccaaggcaaaatgaagcgattcccaatcggctcgaccgccttgatcacggccaacaacgatcgctacatcgcctttgctttcgccaccacggatccaaccacatgcaaggcgagcgccaacgtgaccatgatgtgggcggcgctccacgacctctggcagcggggccgaattgaggccggtggatatccgatcaacttgcccttggtgggcagtggcttgtcggggcttggtctacccacccgcgacctgttgaatctcatcatcctctcagccatcaccgaaacgaaaagcaaagagatcactccgcgagtccgcattgtccttgggcgagaccgtttcgatcacctcgatttgagagacgtcaaaaagcactggagcgaatga

SEQ ID NO: 22698 - DNA, 558 bp, Ralstonia solanacearum
atggcctacagaaatggcacctacattgccttccacgccaacggtaccaaccgcccgggcggcaactcggacattgactactacaacttgatgaaggcttggaccggtaaagacgacgacagctttgcgttgattaacagccacgacaaagcggcggccgtcagagattcgagtaagcgggaaaccttacgtcagtcccttctcgaaaggctacggaactccaaaaacatggtcttgatcatcggcgagacaacccgcctagacaccgactgggtcccgtttgaaatcgaaaaggcgatcgatcaatacaagctgccgatcatcgccacctacacccagtacagcacgccaattcgagatcctgcctcgctgaagtcgctttggccgcaggctctagcatcgagaattgcgtccaacacggcaagagtgattcatgtgcctttcaagcaggccgccttgaacgatgcgatttctcagttttcgcacaacaatcttcccgggggttctctgtcctactattcggacgaggcttaccaaagcttcggcattaccgactag

SEQ ID NO: 22699 - DNA, 858 bp, Acinetobacter baumannii NIPH 70
atgaacatattaattgacttatcaacttggcgattctggcgccatttttttttacaatctttagcatgtggtgggggtatttctgctgctattcaatttatattaattatatttcctgaatacgcgcaaaagttccaaggacttattccaataatactaatctttatagtttcaacaatatttggtttagttagatcttggcctcgtcctatcgaaatggaatatagcgcacctaaaactaaaattaaaataattaaaggtgatttattagatcaagatgaacatctagtaatcgggatctgtaatacttttgatactgaaactcctcatattgtttctaaaaaaagtttactaggacaatctatagatagattatttggaggagatattaaaaagcttgatgagcttcttaatcaagcattagttgggaaatcatttgaaaatagagagcctgttaaagatggaaaaaacaaacaatatccactcggaacagtagctatagttgaacactctccacgtttaatttttttcttagcatattgtcaaatgagtgataaaaatgaagcatttggtacagtagattctgtttggaaaagtttactatctttatggactgcgcaatcagaacgaggaaatcaacaccctatatcaattcctgttattggtggcggacaagctagaatgtctagtgtactacccgcacaagattctattaaattgattgtgttatcttttatgttcgcttcacgtaaacataaaattactgatgaattacgtattatcatacaaccaaatgattatgatcgcttagaccgtatggaacttcaatcatttttagcttcattgaggccgtcataa

SEQ ID NO: 22700 - DNA, 510 bp, Acinetobacter baumannii NIPH 70; identical to SEQ ID NO: 22692

SEQ ID NO: 22701 - DNA, 879 bp, Pseudomonas fluorescens
atgaggtactttttcgagtcgattaggacgcgggcttattggcgctacgcactgttctccggcgaagcgattgggaagtttttcgctgtcgtgggcatcttatacctctgcgttgaccttgctgatgccttcaacatctacaagaaggatcagcacagctactacggcctgatatttttggtcgtgctcgcattgctgtatgtgctgtctacgcgcaggcccctttcacgcgttagttataagattccgcagaaggactttgctgtcgaggtcctgattggcgacctgttcaagatccctggcgaagtcatcatcagcaccagctccacgttcgatacggacatgtcgtcagggctcatagctgtgacgagcttacagggtcagttggctacgaattatttcaatggtcaaacgacggagattgatcgtcaaatcgagatgtcgctttcgggggagcaattcaccatcaacgagagacgccctggtaagacgaaggaatattcgattggcaccgttgcgcgtgtgagcgcgcacagcaagaatttttatcttgtggcgatgtcgcacatggacgaaaacaggaatgcttcgtcagacttgaagatgatcgacgaggcgcttgaaaagctctgggtgaacctggcgtctaaggctgaggtaggcgacattgtgatgccgttgatgggcacggggcgtggacgtgtcgcgtatcctcggaagaagataattgaacgtattgctcagtccttcgccgacgcctgcaatcagcgagcgttctccaataagctgattatcgtcgtgcgccctgaggacgcgtcgaagttctcgttaaatctgttccaagtccgggactacctagggcagagccttcacacctag

SEQ ID NO: 22702 - DNA, 501 bp, Pseudomonas fluorescens
gtggcatacagaaacaagacctacatcgcctttgacggcgacaaagacatgcactactaccgtcttatgactgcgtggacagcgcatgacggcttttcgctcaatttccacaacgcgcatgacctaaacacggcgcgggattctagccaggaagaaagcatcaagcgccagcttcgggagcgcttcgcaaactccaagcttcttgtggtgctaatcggcgagaacactagatatctgacaaagttcgtaaagtgggagcttgaagtggcgttgcggcttaatctgcctctcattggcgtgaacttgaatggaagtcgacagatggatgaccgttgccccccgacaatccgggatcaactcgtgctctacacctcgttcaatcacaacttcatcgaacacgcgatgtaccactggcccgatgagttcgaccgattgcgcagcgcgggcacgactgggggccgctactactccgatgatgtgtataggcagctcggactatga

SEQ ID NO: 22703 - DNA, 879 bp, Pseudomonas aeruginosa
gtgaagtacttcttcgagtcgattaggacaagggcctattggcgctacgcgctcttctccggtgaggcgattggcaagttcttcgcagtcatgggcattctgtacctgtgcgttgacttggcggacgccttcaacatctacaagaaggaccagtacagctactacgggttgattttcttggtcgtgctcgcgctgctgtacgtgctgtccacgcgacggccgctctcgcgtatcagctacaagattccgcagaaggacttcgcagtagaagttttgatcggcgatctcttcaaaattcccggtgaggtcatcatcagcaccagctcgacattcgacacggacatgtcgtcagggctgatcgccgcgtccagcttgcaaggtcagttggcgacgaactacttcaacggccagaccacggagattgatcggcagatcgaggtctcgcttgaaaaagagcagttcaccatcaacgagaagaggccaggcaagaagaaggagtatccaatcggcactgttgcccgcgtaagcgcgcacagcaagaatttctacctcgtggcgatgtcacacatggaagagaacaagaacgcccgatctgacttgaagatgatcgacgaggcgcttgagaagctgtgggtgaacttagcggccaaggccgaggtgggcgatatcgtgatgccgttgatgggcacggggcgcgggcgggttccctatcccagaaagaagatgatcgagcgcattgctcaatccttcgcagacgctgcgagcgaacgggcgttctccaacaaacttattatcgttgtacgtcccgaagatgcctcgatgttctcgttaaatctgttccaggttcgggattacttgggacagagccttcacacctag

SEQ ID NO: 22704 - DNA, 501 bp, Pseudomonas aeruginosa
atggcataccgaaataagacctacatcgcctttgacggtgacaatgacatgcactactaccgtctcatgacggcatggaaggcaaacgacgggttttcgctcaactttcataacgcccacgacctgaacacggcgcgggattccagcctggaagagagcatcaagcgccaactccgcgagcgcttctccaattccaagcagctcgtggtactcatcggggccaacactaagtacctgacgaagttcgtcaagtgggagatggaggtggctttacggctcgggctgcccatcatcggcgtgaacttgaacggtagccggcagatggacgaccgttgcccgcccacgatccgagatcaactcgtggtctacacctcgttcaaccacaacatcatcgagcacgcgatggaccattggcccaccaatttccagagcctgcgtgccgctggcacgactggcccccatttctacaacgatgacgtgtacaggcggctcggcctgtga

SEQ ID NO: 22705 - DNA, 858 bp, Acinetobacter baumannii; identical to SEQ ID NO: 22699

SEQ ID NO: 22706 - DNA, 510 bp, Acinetobacter baumannii; identical to SEQ ID NO: 22692

SEQ ID NO: 22707 - DNA, 837 bp, Enterobacter cloacae
atggcaaaagttaactttttcgacacgcgtattgttaaaaaattttcagactacacatcaacaataagcactattttttcacttttattgatttttgttgacattccaacagaaaataaaattacgcttgggattatattcttattcactttgtcattgttgtattttggaatttggttgaaatcaaataatcttacggaagttaatttagatgtagagggaagtattgttactgtaaaagctggggatctatttctacaagacggattcaaggttatagcttttaatgaatactttgacactcaagttgatgacaatattatctctcataaatcccttaatgggttatacattgataaccatttatcaggtcctgtctctgatttagaccagcgtgtttcaaattataagtttgatgaagatgaaatccttgaagtcaaccaagacaggaaggtaggcaagaaacaaaaatattcgttaggaactatcttcgtaaatgaagattatctattaactgctttttcaaaatttgatgataaaaatagagcgtttcttaccatccctgactatttagtttttttaataaatttctgggacaaggtaaatcgtatatatgctcaaaaaagcgtttcggtccctatctttggctctggaataacacgaataaaagaacataagaatataagcgatgaagatttgcttaaaataatgttgtggacatttagaatcagtgagatgcgatttaagtttccggcaaagctcactattgtcattcacaaagataaaattgataaaataaatttattggacattaaatcagcaagaaatggtctttag

SEQ ID NO: 22708 - DNA, 510 bp, Enterobacter cloacae
atgagctatcgtaataaaacatatgtagcatttgcgagtgaaaatataagttcttatcgtctaatggaggcgtggaaagcaaatgagaacattgacttcaacttttttgatgcacatgacctttatatttcaagagatacgagcaaaccagaaacgataaagaaaaatctccgtgagcgtatgaaaaacgctaaacaggttgtacttcttgggagcagcgatgcgaagagaaaaggtggtgatggtgactcattccttgcgcatgaaatagatctcattattgagtttaatctccctgtggtcatcgcaaatctggatggtgataggaaggtggatcggaattttattcctaaaccattactggatgcagaccactatactgtctctgtttcgttccagcccaaaattatcaaatatgctttagataactattgtgcgacttattcttcaagcacaaataaagggcctcatcaatatccagatagcgtctatagtggtttggatatttaa

SEQ ID NO: 22709 - DNA, 837 bp, Escherichia coli DEC10E
atggcaaaagttaactttttcgacacacgtatagtaaaaaaattttcagactacacatcaacaataagcactattttttcacttttattgatttttgttgacattccaacagaaaataaaattacgcttgggattatattcttattcactttgtcattgttgtattttggaatttggttgaaatcaaataatcttacggaagttaatttagatgtagagggaagtattgttactgtaaaagctggggatctatttctacaagacggattcaaggttatagcttttaatgaatactttgacactcaagttgatgacaatattatctctcataaatcccttaatgggttatacattgacaaccatttatcaggtcctatctctgatttagatcagcgtgtatcaaattataagtttgatgaagatgaaatccttgaagtcaaccaagaaagaaaggtaggaaagaaacaaaaatattcgttaggaactatcttcgtaaatgaagattatctattaactgctttttcaaaatttgatgataaaaatagagcgtttcttaccatgcctgactatttaggttttttaataaatttctgggacaaggtaaatcgtatatatgctcaaaaaagcgtttcggtccctatctttggttctggaataacacgaataaaagaacataagaatataagcgatgaagatttgcttaaaataatgttgtggacatttagaatcagtgagatgcgatttaagtttccggcaaagctcactattgtcattcacaaagataaaattgataaaataaatttattggacattaaatcagcaagaaatggtctttag

SEQ ID NO: 22710 - DNA, 510 bp, Escherichia coli DEC10E
atgagctatcgtaataaaacatatgtagcgtttgcgagtgaaaatataagttcttatcgtctaatggaggcgtggaaagcaaatgagaacattgacttcaacttttttgatgcacacgacctttttatttcaagagatacgagcaaaccagaaacgataaagaaaaatctccgcgagcgtatgaaaaatgctaaacaggttgtacttcttgggagcagcgatgcgaagagaaaaggtggtgatggtgactcattccttgcgcatgaaatagatctcattattgagtttaatctccctgtggtcatcgcaaatctggatggtgataggaaggtggatcggaattttattcctaaaccattactggatgcagaccactatactgtctctgtttcgttccagccaaaaattatcaaatatgctttagataactattgtgcgacttattcttcaagcacaaataaagggcctcatcaatatccagatagcgtctatagtggtttggatatttaa

SEQ ID NO: 22711 - DNA, 837 bp, Escherichia coli DEC14D; identical to SEQ ID NO: 22709

SEQ ID NO: 22712 - DNA, 510 bp, Escherichia coli DEC14D; identical to SEQ ID NO: 22710

SEQ ID NO: 22713 - DNA, 837 bp, Escherichia coli KTE103
atggcaaaagttaactttttcgacacgcgtattgttaaaaaattttcagactacacatcaacaataagcactattttttcacttttattgatttttgttgacattccaacagaaaataaaattacgcttgggattatattcttattcactttgtcattgttgtattttggaatttggttgaaatcaaataatcttacggaagttaatttagatgtagagggaagtattgttactgtaaaagctggggatctatttctacaagacggattcaaggttatagcttttaatgaatactttgacactcaagttgatgacaatattatctctcataaatcccttaatgggttatacattgataaccatttatcaggtcctgtctctgatttagaccagcgtgtttcaaattataagtttgatgaagatgaaatccttgaagtcaaccaagacaggaaggtaggcaagaaacaaaaatattctttaggaactatcttcgtaaatgaagattatctattaactgctttttcaaaatttgatgataaaaatagagcgtttcttaccatgcctgactatttaggttttttaataaatttctgggacaaggtaaatcgtatatatgctcaaaaaagcgtttcggtccctatctttggctctggaataacacgaataaaagaacataagaatataagcgatgaagatttgcttaaaataatgttgtggacatttagaatcagtgagatgcgatttaagtttccggcaaagctcactattgtcattcacaaagataaaattgataaaataaatttattggacattaaatcagcaagaaatggtctttag

SEQ ID NO: 22714 - DNA, 510 bp, Escherichia coli KTE103; identical to SEQ ID NO: 22708

SEQ ID NO: 22715 - DNA, 837 bp, Escherichia coli HVH 194 (4-2356805); identical to SEQ ID NO: 22709

SEQ ID NO: 22716 - DNA, 510 bp, Escherichia coli HVH 194 (4-2356805); identical to SEQ ID NO: 22710

SEQ ID NO: 22717 - DNA, 837 bp, Escherichia coli 910096-2; identical to SEQ ID NO: 22709

SEQ ID NO: 22718 - DNA, 447 bp, Escherichia coli 910096-2
atggaggcgtggaaagcaaatgagaacattgacttcaacttttttgatgcacacgacctttttatttcaagagatacgagcaaaccagaaacgataaagaaaaatctccgcgagcgtatgaaaaatgctaaacaggttgtacttcttgggagcagcgatgcgaagagaaaaggtggtgatggtgactcattccttgcgcatgaaatagatctcattattgagtttaatctccctgtggtcatcgcaaatctggatggtgataggaaggtggatcggaattttattcctaaaccattactggatgcagaccactatactgtctctgtttcgttccagccaaaaattatcaaatatgctttagataactattgtgcgacttattcttcaagcacaaataaagggcctcatcaatatccagatagcgtctatagtggtttggatatttaa

SEQ ID NO: 22719 - DNA, 837 bp, Escherichia coli 2-005-03_S3_C2; identical to SEQ ID NO: 22709

SEQ ID NO: 22720 - DNA, 510 bp, Escherichia coli 2-005-03_S3_C2; identical to SEQ ID NO: 22710

SEQ ID NO: 22721 - DNA, 837 bp, Escherichia coli 2-316-03_S1_C2; identical to SEQ ID NO: 22709

SEQ ID NO: 22722 - DNA, 447 bp, Escherichia coli 2-316-03_S1_C2; identical to SEQ ID NO: 22718

SEQ ID NO: 22723 - DNA, 837 bp, Escherichia coli 2-316-03_S1_C1; identical to SEQ ID NO: 22709

SEQ ID NO: 22724 - DNA, 447 bp, Escherichia coli 2-316-03_S1_C1; identical to SEQ ID NO: 22718

SEQ ID NO: 22725 - DNA, 837 bp, Escherichia coli 5-172-05_S4_C2; identical to SEQ ID NO: 22709

SEQ ID NO: 22726 - DNA, 510 bp, Escherichia coli 5-172-05_S4_C2; identical to SEQ ID NO: 22710

SEQ ID NO: 22727 - DNA, 837 bp, Escherichia coli 5-172-05_S4_C1; identical to SEQ ID NO: 22709

SEQ ID NO: 22728 - DNA, 510 bp, Escherichia coli 5-172-05_S4_C1; identical to SEQ ID NO: 22710

SEQ ID NO: 22729 - DNA, 837 bp, Escherichia coli 5-172-05_S4_C3; identical to SEQ ID NO: 22709

SEQ ID NO: 22730 - DNA, 510 bp, Escherichia coli 5-172-05_S4_C3; identical to SEQ ID NO: 22710

SEQ ID NO: 22731 - DNA, 837 bp, Escherichia coli C691-71 (14b); identical to SEQ ID NO: 22709

SEQ ID NO: 22732 - DNA, 510 bp, Escherichia coli C691-71 (14b); identical to SEQ ID NO: 22710

SEQ ID NO: 22733 - DNA, 837 bp, Escherichia coli; identical to SEQ ID NO: 22709

SEQ ID NO: 22734 - DNA, 510 bp, Escherichia coli
atgagctatcgtaataaaacatatgtagcgtttgcgagtgaaaatataagttcttatcgtctaatggaggcgtggaaagcaaatgagaacattgacttcaacttttttgatgcacacgacctttttatttcaagagatacgagcaaaccagaaacgataaagaaaaatctccgcgagcgtatgaaaaatgctaaacaggttgtacttcttgggagcagcgatgcgaagagaaaaggtggagatggtgactcattccttgcgcatgaaatagatctcattattgagtttaatctccctgtggtcatcgcaaatctggatggtgataggaaggtggatcggaattttattcctaaaccattactggatgcagaccactatactgtctctgtttcgttccagccaaaaattatcaaatatgctttagataactattgtgcgacttattcttcaagcacaaataaagggcctcatcaatatccagatagcgtctatagtggtttggatatttaa

SEQ ID NO: 22735 - DNA, 837 bp, Klebsiella pneumoniae UCICRE 7
atggatttacttcgtgggattattaggaagccattcaaaacagttacctattttttcacttcatttagtgtattatttaccatagttagaatgatcgtttattttgtcccaagcattaagtttgatggagtaatccctcttataataatgctttgtattagtctgggttttactcttaaaaaggtttggaaaccgtcaaaagttgtaattccaatccccaacactgctacaaagatagaaatagtatttggagatattttcaatcaggatggcatacgtgtgattcctgcaaatgaatactttgacagcaagttaggacttccggtttctgaaaatagcttacatggtatattcattaataaatgttttggtggccatcctgagtcattcgataagcaggtagaagaaggcttatccgggaaagaatcggaagtcgtaaataataaaattgatggaaactttaggaaatatgagataggaacaagtgtccttatggaagctgactcaaagaaatatcttgtttttgctttcgctcacactaatgaatccacctgcaaagcttttatcgatgttaaagatacctggattgcattacatgaaatgtggagttcattaaggattttttcagggggatcagcagttaaccttccattaattggtagtggaatttcaggcttaggcttaccaacacgagatattctcaatttaattattttatctgccattactgaaaccaagaataaagaggttactaaactgataagggttatactgcatcgcgatagatttgatgatcttgatttacgagaaataaaagattattgggagaagaagtaa

SEQ ID NO: 22736 - DNA, 567 bp, Klebsiella pneumoniae UCICRE 7
atggcatatcgtaatggaacatatgtagcatttcacgcaaatggcaccaatagaccaggagaatcagacattagctattataatcttttgaaagcatggtcaggaaaaggagatgatagcttcacctttattaatagtcatgacaaagcctcagcagtaagagactcaagtaaggctgaaacattgagaaggtctctgaatgaacggcttaagaattcaaagaacatgttacttattatcggcgatactaccaaagatgatgatgattgggttccgtttgaaataaataaagcagttgatacatataaactccccctgataattgcatatacaaaatcagtacataatgggagcttaattagaaaccctaatgcactgtcagagtattggcctgatgtattaaaagaaaaaatagaatcgtcttctataaatgcaatacacatacctttttcaaaaaatgtaataaatgatgctattgggcagttcaatcataccaagccaccattaggtaaggggcttggtatttatagtgatgatgcgtatcgaagttttggttttgctctttaa

SEQ ID NO: 22737 - DNA, 837 bp, Klebsiella pneumoniae UCI 64; identical to SEQ ID NO: 22735

SEQ ID NO: 22738 - DNA, 567 bp, Klebsiella pneumoniae UCI 64; identical to SEQ ID NO: 22736

SEQ ID NO: 22739 - DNA, 837 bp, Klebsiella pneumoniae; identical to SEQ ID NO: 22735

SEQ ID NO: 22740 - DNA, 567 bp, Klebsiella pneumoniae; identical to SEQ ID NO: 22736

SEQ ID NO: 22741 - DNA, 837 bp, Serratia marcescens SM39
atggcaaaagttaactttttcgacacgcgtatagttaaaaaattttcagactacacatcaacaataagcactattttttcacttttattgatttttgttgacattccaacagaaaataaaattacgcttgggattatattcttattcactttgtcattgttgtattttggaatttggttgaaatcaaataatcttacggaagttaatttagatgtagagggaagtattgtcactgtaaaagctggtgatctatttctacaagacggattcaaggttatagcttttaatgaatactttgatactcaagttgatgacaatattatctctcataaatcccttaatgggttatacattgataaccatttatcaggtcctatctctgatttagaccagagtatttcaaattataagtttgatgaagatgaaatccttgaagtcaaccaagaaaggaaggtaggcaagaaacaaaaatattcgttaggaactatcttcgtaaatgaagattatctattaactgctttttcaaaatttgatgataaaaatagagcgtttcttaccatgcctgactatttaggttttttaataaatttctgggacaaggtaaatcgtatatatgctcaaaaaagcgtttcggtccctatctttggctctggaataacacgaataaaagaacataagaatataagcgatgaagatttgcttaaaataatgttgtggacatttagaatcagtgagatgcgattcaagtttccggcaaagctcactattgtcattcacaaagataaaattgataaaataaatttattggacattaaatcagcaagaaatggcctttag

SEQ ID NO: 22742 - DNA, 510 bp, Serratia marcescens SM39
atgagctatcgtaataaaacatatgtaacgtttgctagtgaaaatataagttcttatcgtctaatggaggcgtggaaagcaaatgagaacattgacttcaacttttttgatgcacatgacctttttatttcaagagatacgagcaaaccagaaacgataaagaaaaatctccgtgagcgtatgaaaaacgctaaacaggttgtacttcttgggagcagcgatgcgaagagaaaaggtggtgatggtgactcattccttgcgcatgaaatagatctcattattgagtttaatctccctgtggtcatcgcaaatctggatggtgataggaaggtggatcggaattttattcctaaaccattactggatgcagaccactatactgtctctgtttcgttccagccaaaaattatcaaatatgctttagataactattgtgcgacttattcttcaagcacaaataaagggcctcatcaatatccagatagcgtctatagtggtttggatatttaa

SEQ ID NO: 22743 - DNA, 837 bp, Yersinia enterocolitica
atggcgaaagttaacttttttgatacacgtatagctaaaaaattctccgactacacttcaacaataagcaccatattttcactttttttgatttttatagacatcccgacagacaacaaacttacactgggtgttattttcttattcattttgtttttgttatattttggagtatggtttaaatcaaataaccttactgaggttaatttagatgtggaaggcactattgtaacggtaaaggcaggtgatctattcaaacaggatggattcaaagccattgcttttaatgaatattttgatacacaagttgatgacaaagtaatctctcacaaatcccttaacggtatatatatcgataattatttgtcatgttctacatctgatttagatcagcgtatttcggattatcacttttatgaggatgagattcttgacatcaacaaaacaaggaaagttggtaaaaatcaaaaatattcacttggaaccatttttgtcaatgatgattttttattgaccgcattttcaaaatttgatgacaaagatagagctttccttacaatgcctgattatttaggttttttaatcaacttctgggacaaagtaaatcgtatctatgctcaaaaaaatgtttctgtccctatctttggttctggaataacacgaataaaagaacataagaatataaatgatgaggatctacttaaaataatgctgtggacttttagaattagtgagatgagatttaaatttcccgcaaaacttactattgtcattcataaagataagatagataaaataaatttgctggacataaagtcagcaagaaatggactgtag

SEQ ID NO: 22744 - DNA, 510 bp, Yersinia enterocolitica
atgagctatcggaataaaacatatgtagcgtttgcgagtgaagatataaaatcttatcgtctaatggaagcatggaaagcaaatgataatattgattttaacttttttgatgcacatgacctttttatatcgagagataccagtaaaccagaaacaataaagaaaaatcttcgtgagaggatgaaaaacgcaaaacaggttgtactgcttggaagcagtgatgcgaagaagaaaggtggcgatggagaatcatttcttgctcatgaaatagacctgattattgaatttaatcttccagtggttattgctaatttggatggcgacagaactgtagatagaaatttaatccctaaacctttattagactctgaacattatactgtatccgtttcgtttcagccaaaaataattaaatatgctttagatgattattgcgcagattattcctcaagtgttaagaaaggacctcatcagtatcctgattctgtttatagcggtttgaaaatttaa

SEQ ID NO: 22745 - DNA, 837 bp, Yersinia enterocolitica
atggcgaaagttaacttttttgatacacgtatagttaaaaaattctccgactacacttcaacaataagcaccatattttcactttttttgatttttatagacatcccgacagacaacaaacttacacttggtgttattttcttattcattttgtttttgttatattttggaatatggtttaaatcaaataaccttactgaggttaatttagatgtggaaggcactattgtaacggtaaaggcaggtgatctattcaaacaggatggattcaaagccattgcttttaatgaatattttgatacacaagttgatgacaaaataatctctcgcaaatcccttaacggtatatatatcgataattatttgtcatgttctacctctgatttagatcagcgtatttcggattatcactttgatgaggatgagattcttgacatcaacaaaacaaggaaagttggtaaaaatcaaaaatattcacttggaaccatttttgtcaatgatgattttttattgaccgcattttcaaaatttgatgacaaagatagagctttccttacaatgcctgattatttaggttttttaatcaacttctgggacaaagtaaatcgtatctatgctcaaaaaaatgtttctgtccctatctttggttctggaataacacgaataaaagaacataagaatataaatgatgaggatctacttaaaataatgttgtggactttcagaattagtgagatgagatttaaatttcccgcaaaacttactattgtcattcataaagataagatagataaaataaatttgctggacataaagtcagcaagaaatggactgtag

SEQ ID NO: 22746 - DNA, 510 bp, Yersinia enterocolitica
atgagctatcggaataaaacatatgtagcgtttgcgagtgaagatataaaatcttatcgtctaatggaagcatggaaagcaaatgataatattgattttaacttttttgatgcacatgacctttttatatcgagagataccagtaaaccagaaacaataaagaaaaatcttcgtgagaggatgaaaaacgcaaaacaggttgtactgcttggaagcagtgatgcgaagaagaaaggtggcgatggagaatcatttcttgcccatgaaatagacctgattattgaatttaatcttccagtggttattgctaatttggatggcgacagaactgtagatagaaatttaatccctaaacctttattagactccgaacattatactgtatccgtttcgtttcagccaaaaataattaaatatgctttagatgattattgcgcagattattcctcaagtgttaagaaaggacctcatcagtatcctgattctgtttatagcggtttgaaaatttaa

SEQ ID NO: 22747 - DNA, 861 bp, Vibrio cholerae
atttactgttctaaaaaaaggaatcatagcttgaaagttaagattacagacaaagctgtttggcaggagtttttgaagaaagtatcgataatatctgccattttctcaatagccttcatttttattgatgtttctgaacagtataaaacttatgcaggcttatcagttgtattattctttgctgtcttgtacgtctatctatggtggcgatataacaacctaaaaaatcttaaccttgttattgatggtagcaaagtttctatattgacaggtaacctatttgaacaatcaggcttaaaagcgatagccttcaatgagtacttcgatactcaagtagacgataggattatttccaaaaattcattaaatggaatatacataaatgaacattcaagtcactccgtggatgagctcgatcaaataatcactgattatttgtttgaagatggagagctaatagaaagtggagttgaacgatctggaaaatcaaaaaaatacaggcttggaaccatatgccttgtcgatgattatttgttagtcgctttttctaagtttgacagtcaaaacaaagctgttctaaccatgcctgagtatttggagtttctgataaatttttgggatagtgttaacaggatatattctcaaaaaagtgtttcagttcctatattcggctctggaattactcgcattaaagaacacaaaaacatcagtgatgaagagctacttaagatcatgctgtggacgtttagaatcagtgaaatgagattcaaacatcccgcaaagctgactgttattatccatcacgataaaattgactcaataaatttactggacattaagtccatagaaaatggaatttga

SEQ ID NO: 22748 - DNA, 552 bp, Vibrio cholerae
atgggaaatagaacaggtacctatatcgcgtttgatgggcttggaaaaaccaaccctactgaatcagattttcggtattactcgacactgcaggcatggagtgaaggcaaaagtatagactttaagtttgttaacagtcatgacaaaactgctgcagtcagagatacaagtcttcgtagtacattagaatcgagaattcgagagcgactagcggtatcaaaaaactgtgttgtaatattaagtgatgacactagaaaaacaggtagtatgttgtcgtatgagattgaaaaggcagttgatttatacaaaattcctttaatctgtgtatatgtagggtttgaaaaaattaataaaccgaaagaattgtctaaccggtggccaaatgctttagaaaccagaattaacaatggaacagcgaaggctatccatatcccttttaagaaagaaatacttttaactgcgattaatcagttctcagtaaatagtagttttccaaatggatcactggttacttatacaaatgaagcacaagaaaaaatgaactctaaatag

SEQ ID NO: 22749 - DNA, 834 bp, Bacteroides fragilis
atgataattaaactcttttggaaagaatttatcgcagcccttgccgcactatcttcagttgcaactttggttgtttttatctgtgattggaataccacaaaactatccatatatgagactttggctggtggattaatgattttagcaatatgtatatgttatggcttatatcagatacagaggaagaaaaaaatcatattacaattagattctaaattcattgtgaccgtaacggaaggagaccttttcaaatttgaaggcgtaatagttattcctgtaaatgaatactttgatacgattgttaatgatataattattgcaaaaaatactatacatggtaaatttataaatcaatattttggtgataggttacaagagttagatgataaaatagagcagtcattgaccggaattgcatttgaagaaaatgatcaaagaaaaaatggtggaaaaaataaaaaatatgctttaggaacatgtgcaaaaattcgtgatggaaagaattgttatatacttcttgcaatgacacattttgataaagatgaccatgcatatattgatacacacgaatttaaggatgttatttataatttgagtatttgtctcaataaaaatgcaaatagccgtcctatctatatgccattgatgggtacaggacaaagcggtataaaaaaaccagcacaaagaatattgctatttactttaacctgttttgaatttatgaactcaaattctcttccacaaggattaaatattatcatacattcttctatgatgaaaaatgtaaatcttaatcttatagaagaatactacaataataaacttttaaattaa

SEQ ID NO: 22750 - DNA, 522 bp, Bacteroides fragilis
atggcttacagaagtggtacatatgtggcatttgatggacaaggagaaccctgtcctgcaaatagtgattacaagtattttaacacattgaaaatgtggcaaaattcaaataaatgtgattttaactttgttaatagtcacgagaaaacgtatgctgttagagatacgagttgtgacatcacattgcgaaatagattaagagaaagaatgcgtaattccaaaaatatgttagtaataatctctaatgaaaccaattataatagaggattacttaattgggaaatagaaacagcggttaatgattacaatttacctattattgtagcttatactggtgaaactaatttctcctatctaactgaaaggttaattcagagattacctaaaaagttaaaagaatatgtcgtaaataatacggcaaaagtggtacatatacctttcactcaagacaaaattaaatatgccatcgcatattatggagtaaatagtaatgtaccatataattctaaaactatatattga

SEQ ID NO: 22751 - DNA, 831 bp, Parabacteroides distasonis CL09T03C24
atgaaatttgtgcactacataaatagtccgttactttggaaagatagtaccaatacggcttttgctatacttgcaggtatagaaacattatttgcagtttctgcaatttctctggagaaattttggggagattatagttggattattaaattattatttgtcatagttatctttttgattatagatgttgttatttttatcattaaacacagtcttgcaaaagatggaatatcgttaaatattcgtggtataaaagttaatataagaaaaggtgatatttttaaggcaaatggctggaaagttattgcttttaatgaatattttgacacacaggtcgatgatataataattgcgcataatacattgaatggcaaatttatagataattatgtcgctgatataaatgaactaaacaaaattatttcatcagagaacgatgataacacctcttttaagaggcgaactcggaataataggtcaatttttccacttgggcgaattattagatataaagattatatgttattggcatttactcattttgataataatcaagctcatcttacacaaaaagattatgagaattgtttgcgagtaatgtgggcggaaataagtcgtacctatgcgaataagcccatatttattcctcttttaggctctggtataacacgattcgacgggacaccacataaatcaaattttgatcttttaagatgtatgttgtgtaccttacgaactagtggagtaaatataaatcaaacaataacaattctactgactgaagaagcgatgcaaagtattaatatttatgaaataaaaggagtaaaataa

SEQ ID NO: 22752 - DNA, 513 bp, Parabacteroides distasonis CL09T03C24
atggtgtacagaacaaaaacttacattgccgcagattgggatggcgataaaaatgctgtagaacaactctacaaatggaaaaaaagtaattattggagcttggattttcatgatgcacatgatttaacacaagcacgtgatagcagcctaaattgtagtattaaaagttctcttgctacaaggcttgatgtatctaagacgttcgtattgattgtaggtaataccacaaaaacagtgagaagtggtagctgtcaatattgcggtagttataatagttggacacagagttgtgctagaggtcatagtgttgattatcgtagctatatcgaatatgagtgtgaaaaagctatccgtgatggattaaaaatagttgttttatataatgctggttctgtgaataaatccaaatgtcccgattctataaaatatcatggaactcatgtcgctatgtggaaatgggagaatgggcaatattattgggattatcaatctgtaaagcgtgcgttagaataa

SEQ ID NO: 22753 - DNA, 831 bp, Desulfovibrio piger ATCC 29098
atgtttaaaaaaatttttcgtcatatgtcatgggcttttggcataacatcagctatatttgcttttgtttctgacagtatttttaaaaaaatttttattattgagaatataaaagcaaatatttctgatgattttaaggttgcgataattaaaattttattgtttatttttatatttttgataatcaaaattattgtatttatatataaaaaatttagaagcactgttgttataaaaaaaataggctattcaatatatatcgaatacggagatatccttagtaagtgtaatggaaagcggatcataaactttgatgaatgcttctcaacagatgtcggtgaaaaaacttacgaaataaataaaacatcactttgtggtcagtatattcaaaagacgaatataaaaaatcatcagatacgtaaattgttaaaacagtataacattaaagcatctgcaacaaattctctatttcaaaataaaataagatatgagtcagggaccttacttcctaatggagatgatttgttgttggcttttgcaaaattaaataaagatggtttaggatgtatgagttatgacgagtttattgaatgtctgaatcttctatggaaagaaatagataaatactatggaggaaaagatgtctatatgccaatattaggttcaggagttactcggatgtgggatgagtcacttacgcaacaaaaaatacttgaaataatattaaaatcatatagtctgacacgatataaattaaagcttccatgtaaattgcatattgtgtgtaaggaacgtgaagggttttccttaaacgaaatagagaattattga

SEQ ID NO: 22754 - DNA, 459 bp, Desulfovibrio piger ATCC 29098
atggatgaatgctatccatgtgatttaaaagcggaatttaataggcaaataaatgcttcttctattgttatttgcattattggtgataaaacagcaacaagaacagctggaagcacttgttcaagatttggaaaagattatttttttggatgtacatgcacgccatataaacaatcaagaaatggaattagggattgtaaagttgatataacatatcctgcaatgggtgagattggaaatattaataattattcatatttgagacatgagtttgagcaggcaaaaataaaaaataagactattattgttgtctataattcactaattagagagcctaaatggcttccgcactatatgaaagaatatgaaagtagagcagagccattttggaaaaaagatgattatggaagaaaagttggtaattatactcgaataaaggaagctctcggctatgtttaa

SEQ ID NO: 22755 - DNA, 1113 bp, Nitrobacter hamburgensis X14
atgatagtctcccgccttgctgaattttcggagccgttagcggaacgtggcttcgttgcgaaaatgcagcatagctgccgttatcgtggcaatatcgccgatcaagcttccacggtcatagggtcttgcaagtcagcaacgatgcaagtcgttcgtggtttcgaatttcaccgcttccgacgatccttgtggatgtgtcgtcacaatccattgctgcaaaaggcggtacccgccaatctggcagtggatatggcgactcacctcatcaaatctttgactgtcggttttctacggcgctggaaagccggattaacgcgggcctttggtgtggccggagcgatctggctggtcactgaaatagtgactcgtgtctccagctcggcgaacgattggctgaccgccaacggagacgtttacttgggcggcgtcctgctcgcaggggctatgtggtttgtcgcctactcctacgagcagcgaaaggtgaaatttcgagttccgaccacaaacagctacatcacaatcaagttcggtaacctattcgaagaaaggtcagactggctaattggcgttaacgagttcttcgacggccgtcttggacaagtgatcgcaaagacctccgtccacgggcagttcatcactaacgtattccacggcgacgagacgcgatttcgagaagcagtgacggcagctctggctggcgtgccttgcacatccactgccaggatgaacttgccagcggattcctacgagattggcaccacggccgtcgttgctaacgggtcacagaaggcgttcctcgtggctatgtcccgaaccgaccttgtgacgcataaggctggatcaacggtgcccatgcttttcgaagcgatgaagggcgcgctcgaatcagtaaagaactatggcaacggcgaaccgctggcgttgccgctaatcggcaacggcctttccagcgtcaacttagagccgcaacacctgctcaggctcatcacgctggctttggtggactttgggcgaaaagtcagcttgcccaagcaagtgaccatcgtggcacccgagggatgctttgaacagctcgatatccgtgaaatcaagcgagattggatgaagcgctag

SEQ ID NO: 22756 - DNA, 552 bp, Nitrobacter hamburgensis X14
gtggcttatcgaaacggcacctatattgcgttccacgcagagggtaactctgaccctaccgcgtcagacattagatactaccgcacgctgaagatgtggcacaccaacgataatatcgaattcaagttcgtgaacagccacgagaaggtcgccgccgtgcgggacacaagtcaggcagcgactatcaagcggagcctgagggcgagactcgataattcaaaaaacatggtcctcatcatcggtcagcggactaggttcgatatggacttcgtgccttatgagatcgcctacgcggtggacacttgtcgcatccccattatcgctacatatccggggcaatctgtgatccgtgtctccaacgcgctgaggccgctgtggcccgaggcgctgcgggagaggatagacaacggcgcggctagcgtcatccatatcccgttcaaccagaaggcgattgacgacgccatcggccagttcagtcacaacaaactcccgttcggcggagggatcggtatctacagcgatgacgcctataggtcgtttgggctgctctaa

SEQ ID NO: 22757 - DNA, 861 bp, Afipia clevelandensis ATCC 49720
atgaagcttttttggaagtctttgtatctggggttacggcggcgctggcggacggggtttacgcgagggttcgctttggccggcgtaatttggctctttaccgaaatctcgatgaagtcttttgcggctttggatggcttggtatcgacctatggaacgggatacttctcaaccgttattgctctatgcgtactgaccttcttcattcacgtttacgagacgaggtcagtatctttccgcgtgccgacgaccgatagctggatcaacatctattacggcgatttgctcagcaccgacaccgattggctggtgggcgtcggtgagttcttcgacagcgacttgggccatgtcgtctcgcgagagtcgctgcatggcaagctgatcgagactgtctggaatagcgacggcggccggtttcgcaaggcagtggacgatgcgctcaaaggcaagccattcgagattactgaacgctcaattaagccaaacaagaaatacccaatcggcactacggccgtgctcccaagggcatcgcgcaaaattttcttggtcgcgatggcccgaaccgatttgcagaatgcgaaagcttcttcgacagtaccgattttgtgggacgctttgctcggcgcatttcactcgatacataacttcggcaatggcggaacggtatcgcttccgctgatcgggaacggacgttccagcgtgaacatcgagccgcagcatttgcttcggttgattgttctttcgcttatcgatttcggccggaaaacagcactgcctaaacaagtcaatatcgttctgcccgaagagtgttttgaacgactagatattcgcgaaatcagacgcgattggagccatagatag

SEQ ID NO: 22758 - DNA, 552 bp, Afipia clevelandensis ATCC 49720
atggcgtacaggaacggcacatacattgcgtttcatgcggagggaaacgcagacccgaccgcctccgacattcgatactatcggatgattaaggcatggcatgagcacgataagatcgaatttaagtttgtgaacagccatgaaaagacgtcagccgttcgcgatagcagcttaaaagcgacccttcggagaagtttagtcgagcggctgaacaactctcgaaacatgctgctgatcatcggagatacgacgcggttcgataccgattgggtgccgttcgagatcggctacgcgatcgacgcctgcaaaattcctgtcatcgcggtttataccggctacacatccattcgacagcccgcacttctcagcaatctttggcctgtcgccttaggacgtcgcatcagtaacggcaccgcgcgggttatccatattcctttcaaacaagccgcaatcgatgatgcgataaagcagtttgaccataccaatctgccgaaaactgggcttgaagcctattcggtagaagcgcatcgatttttcggaattagtatctaa

SEQ ID NO: 22759 - DNA, 858 bp, Leuconostoc mesenteroides P45
atgaaaatcagttttgcaaataaatatttattggacaatgtcacaaggcaagttggttatgtatttgctatatcttccggcatattgacatttttagatttttctaaaaacattaagttgtttatttttgttggtactttgacaatttcgctagtcatatacatagcaaatttaatatttgccaatttgatgagtttcactacttttaaggttggggaatcagaaatcagaattcagaagggggatattttctcaaatgaaatttttaataatcctgattttataaaggttataaatgctaatgagtattttgacacgattgttaatgaagaaatcatatctaaaagatcggttcatggaaaatttttattaaggagcgatgtcgacgtttctcaagtaaatgatgctattaaaaaagataaacggctaaataagcgacataaggtgggtgaaaatttagatcgtgaagagggtaaccaaataaagtacgagcttggatcgatttttaaatattcagatgatgtttttttaacagcgttgacacatttcgatgaatataataaggcttatttgtcaatacaagattttattcgatttttaataaatttctgggatgaaattgatgaattatatgctggaagaacagtcgtaataacgctatttggttctaatctagcaaggttggataataatacctatagcaacacacaaattttagacacaattctctggacatttagactaagaaggattaaatttaagaagcctactaaattaattattttattggacaaagaaacaaatcagaaaattaattactataagataaaggataggttttatggcttacaggaataa

SEQ ID NO: 22760 - DNA, 501 bp, Leuconostoc mesenteroides P45
atggcttacaggaataaagtatatgttgcgttcgatggggacaacgatatattcaaatatgatttaattaaagcatggtctaaaaaccaaaatatagattttcacattgatgacgcacatgatttgaatacatctaaagattcaagtcaagaagcttctatcaaacacaatctgagtattagattttcaaactcaaaagcgtttatattattggttggagaacatacaaaaaatttgacgaaatttgtgaagtgggaaattgaaacagcgattagattagagttaccaattattgctgtgaatttgaatggtaaaaagagagcggatgaattgatgcctccactactaaaagaaaatctttctattgtagtaccatttaaaatggttgctattaaatacgcattggaaaattggccagaatctgataaagaataccgaaaaaaccaagatcatagacaatatcactataatgataaagtctatgatagcttaggaatataa

SEQ ID NO: 22761 - DNA, 873 bp, Pediococcus acidilactici DSM 20284
atgaggttattggtaatgaagattggaatatttaatggcgaactatggaaaaaaatatcagccaccggaggatgggtctttggatttttaggagctttaatatcttttatagatattgaagaagcaatcagagtgaaaatgttatgcgcctttgttgttcttatgattattttcttcttatttgagttaattaaagctaatatcttgtggaaagcaaggttaaatgttggagaatcagaaataataataagagaaggagatatttttagtaacgatatatatgaaaataagaaactaataaaggtttttgcttttaatgaatattttgatacagaagttgatgataatgtaatatcacacggttctttaaatggacaatttatagataagcatgtaaataatgtattgtcgttagataaagctattgattcagataaaagattgtcaaccaggcataaattaggagaagatagtactagagaatccgggaaaaaaataaagtacgaattaggttcaatctttaaattctcagatgatatatttttgactgcgttaacccattttgatagcaaaaatagagcttacttatctattcaagattacattaagtttctggttaatttttgggacgaaatagatgagttatatgctggaaaaacagtggttattactctctttggatctggaataactaggttggatcatgatagatattctgcaacggaaatacttgacacgatcctctggacttttaaactacgcaggattaaatttaagaagccaactaaacttatgatacttttagataaggatacaaataggcaaatcaattattttcttttaaggagtagattttatggcttacagaaataa

SEQ ID NO: 22762 - DNA, 477 bp, Pediococcus acidilactici DSM 20284
atggcttacagaaataaagtatatgttgcttttgatggcgataatgacattaaatattactatttaatgaaagcgtggaataaaaatcctaattttgacttcgaaattagtgacgctcatgatttgcacagctccagggatacaagtactgaagaatcaattaagagaagtttaagacaacggtttgcaaactctaaactatttatattattaataggagagcatactaagtatttaacaaaatttgtgaaatgggaaattgaaacagcgattaggttggaactgcctataattgcagttaatttgaacggttctgaaaaagaagataatttagtgccttcaagtttaaagggcgaattagcagttttcgtcccatataaagaaagagctattaaacacgctatggaaaattggcctacttttgataagaaataccgaaaagctggtaaaactggagcatattactacgaaaactaa

SEQ ID NO: 22763 - DNA, 834 bp, Streptococcus sanguinis SK330
ttgaaattgaaagtaaatatatttaatagggatattttaaaacaattttctaaagtatgtgctacgcttactgcaatattatcaggagtactaatttttcttgatattcctgataactgtcgactttatgcaggcgttgcttatatttcattgcttttagctatttatatttttatatggataagagcaaatagaatgaaacaaatagttattaaaataggtctcacgacggttcttgtaaagtctggtgatatttttgatgaagaaggacttaaagcggtggctttcaatgaatattttgatacaatggtcgatgataaagtaattgccagacaatcattaaatggccagtttattatcaactatattgacgatgttgagaaattgaactctgatattaaaaacgatgatgatttaaaaaataatattgtcgaagagggagtaagacggcagcatggtaaaacgacaaaatatgggcttggaagttcaattttgatagacgatgagtatattttgactgcttttagccgatttaataaaaataatcaagctgaactaactattcaagaatatgtcaattttcttttaacattttggaacgaaattaataggttatatgctcaaagatcggttatagttccagtatttggttctggaataacgaggtttaaaaatggttttgaggatattgatattaatgaattgttacggattatgatttggacttttaaaattagtaaaattaaatttgcatatcctgcaaaattaactattatcatacataatgatttactcagccaagtaaatttatatgaattaagggagaatgaataa

SEQ ID NO: 22764 - DNA, 501 bp, Streptococcus sanguinis SK330
atggcctatcgcaataaaacttatgttgcttttgatggtgataatgatatgcgttattatcagttaatgaaggcatggaagcaaaatgacaacacatcatttaattttcatgatgctcatgatattaacagcgctagagatacaagccaggaagagtcaattaaaagacagcttcgtgaaagaatggctaacagtaaggcctttgttttattaattggcgaacacactaaatacttaacgaaattcgtaaaatgggaaattgaacttgctattaagaaagggttgccaattatttgtgttaatctaaataaaaacaaaaggaaagatgaattgtgtccgtcaagtttgaatggacagttggcaatattcattccttttggaagcaaaatgatgcaatatgctcttgagaattggccaaaatcgcatgagcaataccttaaaaatggagaaataagttcttactgttataaagatgcggtatataaacgattgggcctgtaa

SEQ ID NO: 22765 - DNA, 828 bp, Streptococcus suis
atgaaagtaaatatctttgataaggatattttaaagcagttttctaatatatgtgctacgattactgcgattttatcggccgtattgatttttctggatattcctaatcaatggagaattgtttctggcgttgtatacgttttatttctcagtgtcacttatgtctttttatggataagggcaaatagattgagacaagttgatattaaaataggtactacaaccgttgtcgtgaaatcaggtgatatttttaaggaagatgggttaaaagcaattgcttttaacgagtattttgacactgtagttgatgacaagataattgcaaagaagtctttaaacggacagtttattatgaatcacattactaatgttgaagaattagactctgatattgaatacgatgatgacttaaagagcaatattattgggcgagcagtagaacgaaaacaagggaaaacaactaaatataaactaggtagttctattttgatagatgatgaatatattttgaccgcctttagccgatttaataaggaaaatcaagccgagctgactattcaggaatatgtcaatttcctgttaacattttggaacgagattaatagattatacgctcaaagatcggttacagttccagtgtttggttcgggaattacaagatttaaaaatggttttgaagatattgatattaatgaactactgcgtatcatgatttggacttttaagataagtaaaataagatttgcatatcctgcaaagttaactattatcgtacatgatgacttacttagtaaagtaaatttatatgaattaagggagaatgaataa

SEQ ID NO: 22766 - DNA, 510 bp, Streptococcus suis
atggcttatcggaataaaacatatgttgcttttgatggtgataataatatgcgctattatcaactcatgaaagcttggaagcagagtgatagcacttcatttaatttttatgatgcccatgatattaacagagccagggattctagtcttgaagaatcaattaaaagacagcttcgtgaaagaatggctaacagcaaggtttttgttttgttgattggtgaacgtactagatatttaacaaaattcgtaaaatgggaaattgaacttgctattaagaaagaattaccaattatctgtgttaatctgaacaagaatagaaaaaaagataacttatgtccatcaagtttagatgaaaagttggctatatttattccttttggaaataaaattatgcagtatgctcttgaaaattggcctcgttcgcatgaaaaatatcgtaatgaaggcaaaataggagcctatcgttatcctgattcaatatatgaaaatttaaaatactggcattattaa

SEQ ID NO: 22767 - DNA, 828 bp, Streptococcus suis; identical to SEQ ID NO: 22765

SEQ ID NO: 22768 - DNA, 510 bp, Streptococcus suis; identical to SEQ ID NO: 22766

SEQ ID NO: 22769 - DNA, 828 bp, Streptococcus mutans NLML8
ttgaaagtaaatatatttaatagggatattttaaaacaattttctaaagtatgtgctacgcttactgcaatattgtcaggagcactaatttttcttgatattcctgataactgtcgactttatgcaggcgttgcttatatttcattgcttttagctatttatatttttatatggataagagcaaatataatgaaacaaatagttattaaaataggtctcacgacggttcttgtaaagtctggtgatatttttgatgaagaaggacttaaagcggtggctttcaatgaatattttgatacaatggtcgatgataaagtaattgccagacaatcattaaatggccagtttattatcaactatattgacgatgttgagaaattgaactctgatattaaaaacgatgatgatttaaaaaataatattgtcgaagagggagtaagacggcagcatggtaaaacgacaaaatatgggcttggaagttcaattttgatagacgatgagtatattttgactgcttttagccgatttaataaaaataatcaagctgaactaactattcaagaatatgtcaattttcttttaacattttggaacgaaattaataggttatatgctcaaagatcggttatagttccagtatttggttctggaataacgaggtttaaaaatggttttgaggatattgatattaatgaattgttacggattatgatttggacttttaaaattagtaaaattaaatttacatatcctgcaaaattaactattatcatacataatgatttactcagccaagtaaatttatatgaattaaaggagaatgaataa

SEQ ID NO: 22770 - DNA, 501 bp, Streptococcus mutans NLML8
atggcctatcgtaataaaacttatgttgcttttgatggtgataatgatatgcgttattatcagttaatgaaggcatggaagcaaaatgacaacacatcatttaattttcatgatgctcatgatattaacagcgctagagatacaagccaggaagagtcaattaaaagacagcttcgtgaaagaatggctaacagtaaggcctttgttttattaattggcgaacatactaaatacttaacaaaattcgtaaaatgggaaattgaacttgctattaagaaagggttgccaattatctgtgttaatctaaataaaaacaaaaggaaagatgaattgtgtccgtcaagtttgaatggacagttggcaatattcattccttttggaagcaaaatgatgcaatatgctcttgagaattggccaaaatcgcatgagcaataccttaaaaatggagaaataagttcttactgttataaagatgcggtatataaacgattgggtctgtaa

SEQ ID NO: 22771 - DNA, 828 bp, Streptococcus mutans N3209
ttgaaagtaaatatatttaatagggatattttaaaacaattttctaaagtatgtgctacgcttactgcaatattgtcaggagcactaatttttcttgatattcctgataactgtcgactttatgcaggcgttgcttatatttcattgcttttagctatttatatttttatatggataagagcaaatataatgaaacaaatagttattaaaataggtctcacaacggttcttgtaaagtctggtgatatttttgatgaagaaggacttaaagcggtggctttcaatgaatattttgatacaatggtcgatgataaagtaattgccagacaatcattaaatggccagtttattatcaactatattgacgatgttgagaaattgaactctgatattaaaaacgatgatgatttaaaaaataatattgtcgaagagggagtaagacggcagcatggtaaaacgacaaaatatgggcttggaagttcaattttgatagacgatgagtatattttgactgcttttagccgatttaataaaaataatcaagctgaactaactattcaagaatatgtcaattttcttttaacattttggaacgaaattaataggttatatgctcaaagatcggttatagttccagtatttggttctggaataacgaggtttaaaaatggttttgaggatattgatattaatgaattgttacggattatgatttggacttttaaaattagtaaaattaaatttgcatatcctgcaaaattaactattatcatacataatgatttactcagccaagtaaatttatatgaattaagggagaatgaataa

SEQ ID NO: 22772 - DNA, 501 bp, Streptococcus mutans N3209
atggcctatcgtaataaaacttatgttgcttttgatggtgataatgatatgcgttattatcagttaatgaaggcatggaagcaaaatgacagcacatcatttaattttcatgatgctcatgatattaacagcgctagagatacaagccaggaagagtcaattaaaagacagcttcgtgaaagaatggctaacagtaaggcctttgttttattaattggcgaacatactaaatacttaacaaaattcgtaaaatgggaaattgaacttgctattaagaaagggttgccaattatctgtgttaatctaaataaaaacaaaaggaaagatgaattgtgtccgtcaagtttgaatggacagttggcaatattcattccttttggaagcaaaataatgcaatatgctcttgagaattggccaaaatcgcatgagcaataccttaaaaatggagaaataagttcttaccgttataaagatgcggtatataaacgattgggcctgtaa

SEQ ID NO: 22773 - DNA, 828 bp, Streptococcus mutans; identical to SEQ ID NO: 22771

SEQ ID NO: 22774 - DNA, 501 bp, Streptococcus mutans; identical to SEQ ID NO: 22772

SEQ ID NO: 22775 - DNA, 828 bp, Streptococcus agalactiae ATCC 13813
atgaaagtaagtatttttgataaggatattttaaaacagttttctaatatatgtgctacgattactgcaattttatcggccgtattgatttttcttgatatccctaataaatggaggcttacttctggcgttgtatacgttgcatttctctgtgtcatttatatctttttatggagaagggcaaatagattgagacaagtcaatattaaaataggtgttacaacccttattgtaaaatcaggcgatatttttgaagaagatggtctgaaagcgattgcttttaatgaatattttgatacgacagttgatgataaaataattgctaaaaaatctttgaacggacagtttattttgaatcatattgatgatgttgctaaattaaattccgatattgaaagtgatgatgatttaaaaaatagtattgtagagaaggaagtaaagcgaaagcaaggaaaaatgactcaatataagttaggaagttccattttgataaatgatgaatatattttaactgcttttagccgatttaataaaaataatcaagcagaactgacaattcaggaatatgtcaattttcttttaacgttttggaatgagattaatagattgtatgctcaaaggtcagttacagttccagtatttggctcgggaataacgagatttaaaaatggttttgaagatattgatattaatgagctactgcgtatcatgatttggactttcaaagtcagcaaaataaagtttgcgtaccttgcaaaattaactattattgtgcataatgatttactcaatcaggtaaatctatataaattaaaggagaatgaataa

SEQ ID NO: 22776 - DNA, 501 bp, Streptococcus agalactiae ATCC 13813
atggcttatcggaataaaacttatgttgcttttgatggtgataatgatatgcgttactatcaactaatgaaagcttggaaacaaagtgataatacagcgtttaatttctatgatgctcatgacattaatagtgctagagattctagccaggaagaatccattaaacggcaacttcgtgaaagaatgactaatagcaaggtttttatcttattaattggtgagaacaccaagtatttaagaaagtttgtaaagtgggaaattgagcttgccattaagaaaggcttaccaattatctgtgttaatctaaataaaagcaaacaaagggataactattgtccatcaagtttagatggtcaactggctatatttatcccttttggaaataaaattatgcagtatgctcttgaaaactggcctccttcgcatgaacaataccttaaaaaaggggaagcgggttcttatttttataaaggtacagtatataaacaattaggatattaa

SEQ ID NO: 22777 - DNA, 639 bp, Streptococcus agalactiae FSL S3-026
ttgagacaagtcaatattaaaataggtgttacaacccttattgtaaaatcaggcgatatttttgaagaagatggtctgagagcgattgcttttaatgaatattttgatacgacagttgatgataaaataattgctaaaaaatctttgaacggacagtttattttgaatcatattgatgatgttgctaaattaaattccgatattgaaagtgatgatgatttaaaaaatagtattgtagagaaggaagtaaagcgaaagcaaggaaaaatgactcaatataagttaggaagttccattttgataaatgatgaatatattttaactgcttttagccgatttaataaaaataatcaagcagaactgacaattcaggaatatgtcaattttcttttaacgttttggaatgagattaatagattgtatgctcaaaggtcagttacagttccagtatttggctcgggaataacgagatttaaaaatggttttgaagatattgatattaatgagctactgcgtatcatgatttggactttcaaagtcagcaaaataaagtttgcgtaccctgcaaaattaactattattgtgcataatgatttactcaatcaggtaaatctatataaattaaaggagaatgaataa

SEQ ID NO: 22778 - DNA, 501 bp, Streptococcus agalactiae FSL S3-026; identical to SEQ ID NO: 22776

SEQ ID NO: 22779 - DNA, 828 bp, Streptococcus agalactiae FSL S3-501; identical to SEQ ID NO: 22775

SEQ ID NO: 22780 - DNA, 501 bp, Streptococcus agalactiae FSL S3-501; identical to SEQ ID NO: 22776

SEQ ID NO: 22781 - DNA, 639 bp, Streptococcus agalactiae FSL S3-586; identical to SEQ ID NO: 22777

SEQ ID NO: 22782 - DNA, 501 bp, Streptococcus agalactiae FSL S3-586; identical to SEQ ID NO: 22776

SEQ ID NO: 22783 - DNA, 238 bp, Streptococcus agalactiae FSL S3-251
gaatgagattaatagattgtatgctcaaaggtcagttacagttccagtatttggctcgggaataacgagatttaaaaatggttttgaagatattgatattaatgagctactgcgtatcatgatttggactttcaaagtcagcaaaataaagtttgcgtaccttgcaaaattaactattattgtgcataatgatttactcaatcaggtaaatctatataaattaaaggagaatgaataa

SEQ ID NO: 22784 - DNA, 501 bp, Streptococcus agalactiae FSL S3-251; identical to SEQ ID NO: 22776

SEQ ID NO: 22785 - DNA, 828 bp, Streptococcus agalactiae
atgaaagtaagtatttttgataaggatattttaaaacagttttctaatatatgtgctacgattactgcaattttatcggccgtattgatttttcttgatatccctaataaatggaggcttacttctggcgttgtatacgttgcatttctctgtgtcatttatatctttttatggagaagggcaaatagattgagacaagtcaatattaaaataggtgttacaacccttattgtaaaatcaggcgatatttttgaagaagatggtctgaaagcgattgcttttaatgaatattttgatacgacagttgatgataaaataattgctaaaaaatctttgaacggacagtttattttgaatcatattgatgatgttgctaaattaaattccgatattgaaagtgatgatgatttaaaaaatagtattgtagagaaggaagtaaagcgaaagcaaggaaaaatgactcaatataagttaggaagttccattttgataaatgatgaatatattttaactgcttttagccgatttaataaaaataatcaagcagaactgacaattcaggaatatgtcaattttcttttaacgttttggaatgagattaatagattgtatgctcaaaggtcagttacagttccagtatttggctcgggaataacgagatttaaaaatggttttgaagatattgatattaatgagctactgcgtatcatgatttggactttcaaagtcagcaaaataaagtttgcgtaccctgcaaaattaactattattgtgcataatgatttactcaatcaggtaaatctatataaattaaaggagaatgaataa

SEQ ID NO: 22786 - DNA, 501 bp, Streptococcus agalactiae; identical to SEQ ID NO: 22776

SEQ ID NO: 22787 - DNA, 828 bp, Streptococcus agalactiae; identical to SEQ ID NO: 22775

SEQ ID NO: 22788 - DNA, 501 bp, Streptococcus agalactiae; identical to SEQ ID NO: 22776

SEQ ID NO: 22789 - DNA, 639 bp, Streptococcus agalactiae; identical to SEQ ID NO: 22777

SEQ ID NO: 22790 - DNA, 501 bp, Streptococcus agalactiae; identical to SEQ ID NO: 22776

SEQ ID NO: 22791 - DNA, 828 bp, Streptococcus uberis C8329
atgaaagtaagtatttttgataaggatattttaaaacagttttctaatatatgtgctacgattactgcaattttatcggccgtattgatttttcttgatattcctaataaatggaggcttacttctggcgttatatacgttgcatttctctgtgccatttatatctttttatggagaagggcaaatagattgagacaagtcaatattaaaataggtgttacaacccttattgtaaaatcaggcgatatttttgaagaagatggtctgaaagcgattgcttttaatgaatattttgatacgacagttgatgatcaaataattgctaaaaaatctttgaacggacagtttattttgaatcatattgatgatgttgctaaattaaattccgatattgaaagtgatgatgatttaaaaaatagtattgtagagaaggaagtaaagcgaaagcaaggaaaaatgactcaatataagttaggaagttccattttgataaatgatgaatatattttaactgcttttagccgatttaataaaaataatcaagcagaactgacaattcaggaatatgtcaattttcttttaacgttttggaatgagattaatagattgtatgctcaaaggtcagttacagttccagtatttggctcgggaataacgagatttaaaaatggttttgaagatattgatattaatgagctactgcgtatcatgatttggactttcaaagtcagcaaaataaagtttgcgtaccctgcaaaattaactattattgtgcataatgatttactcaatcaggtaaatctatataaattaaaggagaatgaataa

SEQ ID NO: 22792 - DNA, 501 bp, Streptococcus uberis C8329
atggcttatcggaataaaacttatgttgcttttgatggtgataatgatatgcgttactatcaactaatgaaagcttggaaacaaagtgataatacagcgtttaatttctatgatgctcatgacattaatagtgctagagattctagccaggaagaatccattaaacggcaacttcgtgaaagaatgactaatagcaaggtttttatcttattaattggtgagaacaccaagtatttaagaaagtttgtaaagtgggaaattgagcttgccattaagaaaggcttaccaattatctgtgttaatctaaataaaagcaaacaaagggataactattgtccatcaagtttagatggtcaactggctatatttatcccttttggaaataaaattatgcagtatgctcttgaaaactggcctccttcgcatgaacaataccttaaaaaaggggaagcgggtgcgtatttttataaagatacagtatataaacaattaggatattaa

SEQ ID NO: 22793 - DNA, 909 bp, Enterococcus faecalis TX1467
atggtatactcatataaaattgtttgtttaaatttgttaggagatgtaatcactttgaaaattataaaagtaaaattttttgacaaaagaatcagagctaaatttctgaaaatactaggagctattagtacattcatatctttattacttatatttgtagatattcctgaaaatctatcaatcaaagctggaatagtatttgtagtcatacttttagttatatacattgttctatatgtgtatgcaaataaattatctgaggccacaattgatattggtggtacatcagtattagtaaaaaaaggagatatttttaaggaagatggattaaaggttattccgtttaatgagtattttgatactatagttgataatcaagtgattaccgaattatcacttaatgggaaatatataaaaaaatttggagatgtacacaaattagacgagttaatttatagtaatacttttttgaattcttccgaaaatattttggaggaggatgtatcaagaaatggaaatattgggaaaaaagtacgctataaattaggtagttctatagtagttgatgattatgttttgacagctttttcaaaatttaatcagaagaacgaagctcaattaacaatgactgaatatataaactttcttctaaatttttggaatgagataaatagggtttacgctcaaaaaagtgtaactgtacctatatttggctctggaataacaagatttaaaggtggattcaatgatattgaaattaacgaactgttaaacataatgttatggacttttagaattagtggaactcgttttaaatatcccgctaagctaaccattatagtttatggggatttatttaaaaaaataaatttatttggcttacaggaggatgtaaattatggtatatag

SEQ ID NO: 22794 - DNA, 561 bp, Enterococcus faecalis TX1467
atggtatatagaaatggtacttatgttgcttttgatggacaagcaacaaccaatccaactcaaagtgatatgaaatattatggcttacttcaaaattggaatgctaataatacttcggggatgacttttagtgatagtcataagaagacataccaagtaaaagatactagttcaagagcaactttggaaagtagactaatggatcgtttaagaaattccaaaaatttcttactaattatatctgatgaaacgaattgggatagaggaatgctaaattttgaaatcgaaaaagcagtagataaatttcaactaccaattatagttgcatatacaggatataattcgattttagctccttctcaactccgctcaaagtggcctaaaaatttagctagtcgaattgatgataagactgccaagtgtatacacattccttttaaaaaagaagccattatgtcagctatctcccaattcagtattcatagtactgggaataatgtactaacaggtccgttacactattacagtacagaagctcagaaagagtggggatatatttaa

SEQ ID NO: 22795 - DNA, 855 bp, Enterococcus faecalis EnGen0327
ttgaaaattataaaagtaaaattttttgacaaaagaatcagagctaaatttctgaaaatactaggagctattagtacattcatatctttattacttatatttgtagatattcctgaaaatctatcaatcaaagctggaatagtatttgtagtcatacttttagttatatacattgttctatatgtgtatgcaaataaattatctgaggccacaattgatattggtggtacatcagtattagtaaaaaaaggagatatttttaaggaagatggattaaaggttattccgtttaatgagtattttgatactatagttgataatcaagtgattaccgaattatcacttaatgggaaatatataaaaaaatttggagatgtacacaaattagacgagttaatttatagtaatacttttttgaattcttccgaaaatattttggaggaggatgtatcaagaaatggaaatattgggaaaaaagtacgctataaattaggtagttctatagtagttgatgattatgttttgacagctttttcaaaatttaatcagaagaacgaagctcaattaacaatgactgaatatataaactttcttctaaatttttggaatgagataaatagggtttacgctcaaaaaagtgtaactgtacctatatttggctctggaataacaagatttaaaggtggattcaatgatattgaaattaacgaactgttaaacataatgttatggacttttagaattagtggaactcgttttaaatatcccgctaagctaaccattatagtttatggggatttatttaaaaaaataaatttatttggcttacaggaggatgtaaattatggtatatag

SEQ ID NO: 22796 - DNA, 561 bp, Enterococcus faecalis EnGen0327; identical to SEQ ID NO: 22794

SEQ ID NO: 22797 - DNA, 855 bp, Enterococcus faecalis EnGen0329; identical to SEQ ID NO: 22795

SEQ ID NO: 22798 - DNA, 561 bp, Enterococcus faecalis EnGen0329; identical to SEQ ID NO: 22794

SEQ ID NO: 22799 - DNA, 855 bp, Enterococcus faecalis EnGen0289; identical to SEQ ID NO: 22795

SEQ ID NO: 22800 - DNA, 561 bp, Enterococcus faecalis EnGen0289; identical to SEQ ID NO: 22794

SEQ ID NO: 22801 - DNA, 855 bp, Enterococcus faecalis EnGen0285; identical to SEQ ID NO: 22795

SEQ ID NO: 22802 - DNA, 561 bp, Enterococcus faecalis EnGen0285; identical to SEQ ID NO: 22794

SEQ ID NO: 22803 - DNA, 876 bp, Enterococcus faecalis 20.SD.W.06
ttgttaggagatgtaatcactttgaaaattataaaagtaaaattttttgacaaaagaatcagagctaaatttctgaaaatactaggagctattagtacattcatatctttattacttatatttgtagatattcctgaaaatctatcaatcaaagctggaatagtatttgtagtcatacttttagttatatacattgttctatatgtgtatgcaaataaattatctgaggccacaattgatattggtggtacatcagtattagtaaaaaaaggagatatttttaaggaagatggattaaaggttattccgtttaatgagtattttgatactatagttgataatcaagtgattaccgaattatcacttaatgggaaatatataaaaaaatttggagatgtacacaaattagacgagttaatttatagtaatacttttttgaattcttccgaaaatattttggaggaggatgtatcaagaaatggaaatattggaaaaaaagtacgctataaattaggtagttctatagtagttgatgattatgttttgacagctttttcaaaatttaatcagaagaacgaagctcaattaacaatgactgaatatataaactttcttctaaatttttggaatgagataaatagggtttacgctcaaaaaagtgtaactgtacctatatttggctctggaataacaagatttaaaggtggattcaatgatattgaaattaacgaactgctaaacataatgttatggacttttagaattagtggaactcgttttaaatatcccgctaagctaaccattatagtttatggggatttatttaaaaaaataaatttatttggcttacaggaggatgtaaattatggtatatag

SEQ ID NO: 22804 - DNA, 561 bp, Enterococcus faecalis 20.SD.W.06; identical to SEQ ID NO: 22794

SEQ ID NO: 22805 - DNA, 855 bp, Enterococcus faecalis EnGen0403; identical to SEQ ID NO: 22795

SEQ ID NO: 22806 - DNA, 561 bp, Enterococcus faecalis EnGen0403; identical to SEQ ID NO: 22794

SEQ ID NO: 22807 - DNA, 855 bp, Enterococcus faecalis EnGen0404; identical to SEQ ID NO: 22795

SEQ ID NO: 22808 - DNA, 561 bp, Enterococcus faecalis EnGen0404; identical to SEQ ID NO: 22794

SEQ ID NO: 22809 - DNA, 855 bp, Enterococcus faecalis EnGen0405; identical to SEQ ID NO: 22795

SEQ ID NO: 22810 - DNA, 561 bp, Enterococcus faecalis EnGen0405; identical to SEQ ID NO: 22794

SEQ ID NO: 22811 - DNA, 855 bp, Enterococcus faecalis EnGen0406; identical to SEQ ID NO: 22795

SEQ ID NO: 22812 - DNA, 561 bp, Enterococcus faecalis EnGen0406; identical to SEQ ID NO: 22794

SEQ ID NO: 22813 - DNA, 855 bp, Enterococcus faecalis EnGen0408; identical to SEQ ID NO: 22795

SEQ ID NO: 22814 - DNA, 561 bp, Enterococcus faecalis EnGen0408; identical to SEQ ID NO: 22794

SEQ ID NO: 22815 - DNA, 855 bp, Enterococcus faecalis EnGen0410; identical to SEQ ID NO: 22795

SEQ ID NO: 22816 - DNA, 561 bp, Enterococcus faecalis EnGen0410; identical to SEQ ID NO: 22794

SEQ ID NO: 22817 - DNA, 855 bp, Enterococcus faecalis EnGen0412; identical to SEQ ID NO: 22795

SEQ ID NO: 22818 - DNA, 561 bp, Enterococcus faecalis EnGen0412; identical to SEQ ID NO: 22794

SEQ ID NO: 22819 - DNA, 855 bp, Enterococcus faecalis EnGen0415; identical to SEQ ID NO: 22795

SEQ ID NO: 22820 - DNA, 561 bp, Enterococcus faecalis EnGen0415; identical to SEQ ID NO: 22794

SEQ ID NO: 22821 - DNA, 855 bp, Enterococcus faecalis EnGen0418; identical to SEQ ID NO: 22795

SEQ ID NO: 22822 - DNA, 561 bp, Enterococcus faecalis EnGen0418; identical to SEQ ID NO: 22794

SEQ ID NO: 22823 - DNA, 855 bp, Enterococcus faecalis EnGen0421; identical to SEQ ID NO: 22795

SEQ ID NO: 22824 - DNA, 561 bp, Enterococcus faecalis EnGen0421; identical to SEQ ID NO: 22794

SEQ ID NO: 22825 - DNA, 834 bp, Lactococcus lactis subsp. lactis A12
ttgaaaactaaaaaagttccactttttgataagcaagttataaggcaatttggcagtcgctctgcaacattatttgccattttgtctgccgtactaatatttgtagatattccagtgaatttaagactaattgctggtggtgttgttctcttggttttggttgctatttattttttgacttggcacagagctaataccttaaacgatatttcaataagtataggagcgacaacagttcaaataaaatcgggagatttatttaaacaggatggattgaaagctattgcttttaatgagtactttgacacacaagtggatgatgtgattattgctaagaggtctttaaatggacaggtgattgaaaaatattttccagatattcaaggattggataagcagattgagagcgataaaagtcttgaaaaaggcttgattgaagagatgaatcgagaagtcgggaaaaagaaaagatataagcttgggagttctgtcttaattgatgatgaatttattcttactgcttttagccgatttgatgatgacaataaagcagaactaacgatgcaggaatatatcaactttcttttggctttttggaatgagattaataggctatatgcacagagaacggtatcagttcctgtttttggagcaggtataactagatttagaaatggctttgaggatatagacatcaatgaattacttcaaatcatggtctggacatttaaagtcagcaagataaagtttacttatcctgctaaacttcagataatcgtacacgaggatttattaaaaaaagtaaatttatatgaactaaaggagaatgaataa

SEQ ID NO: 22826 - DNA, 501 bp, Lactococcus lactis subsp. lactis A12
atggcataccgaaacaaaacatatgttgcttttgatggagataaagacattagatattatcgtctgatgaaggcatggaaacagagtgataaaacagattttaatttctatgatgcccacgatttaaatactgccagagattcaagtcaagaagaatctatcaaacgccaactaagagaacgaatggcaaacagtaaagtatttgtacttctaattggagaaagtacgaaaaatttaacaaaatttcttaagtgggaaattgaactagcgataaagaaagaattaccaattatctgtgtaaatttaaatggaaagaaaagtaaagataccctttgtccaaagagtttagatgataagttaagcatctttattccatttggaagtaagataatgcaatatgctttggaaaattggcccacgtcagatgcaagttatcgtaaagacggaaaaacgggtgcttatcattataagcagtcagtttatgatgaactaggaatttaa

SEQ ID NO: 22827 - DNA, 780 bp, Clostridium cylindrosporum DSM 605
atgatgagttacataaagtatgcttgttcacaatattttacttggcttggatatatcgctactataatagggttagtggcggttgttccatttgacgaaaaatataactatattgctctgttaatagttattgctttttttgcattagcgtttataattccatttattatagctatggtaagacgtaacttcaagctaataacggttggaaaatccgacatatcgtttgaatttggggatttatttgaagaaaaatgttttgtcatcacaacaaaccgccattatgatgtgaacccaactggtgaatggatagctcctgattcgttgttaggaatttatgtaaatagatattttcttaacgatactgaacggcttgaatctttaatttccgcagaattaggaagcagtgttgcaccgcatgagtacggaaaaacaattaagatacagcatgatgataagaaagtttatttattagtttttactgatagaaaaaagacaaagcaaccaaaagatttctatgagaagtcattacaaggtttgtttgaaaccattgttaatgaaaatcatggtgaaacaatcgctgtcccattaataggagataacaacaatcttagtgattcgggatttgacagttcagcaatgacatttaagtgtttaatggctatgataaacagttttgatactcgtcatcaaaggtcaggaatcaaattgaagattgttgctttacctaaaaaacgtgctgagttaataaaagtagttcattcttactctaaaagttaa

SEQ ID NO: 22828 - DNA, 525 bp, Clostridium cylindrosporum DSM 605
atgatttacagaacaagaacttacattgctgctgattggactgacgacaaggacgctgttgaccagttaatgaaatggaacagtagtaaacattggggactgactttcggtgatgctcacgaattaagtcagtgtttaagtgatgacacaaataactgtaacattaaaaagaactgttcacaaaactttgaccattctaaattttttgtacttatcgttggtgataaaacaaaaagtttacgtagtggttactgtatgtattgtaaagcatatagctattgccagtatacatacaaaaccaataagtcgtatgttgagtatgagtgcgattatgctgtaagaaataatctaccgattattgttctttataattcgacaacaattgacaaaagcaagtgtatcgattcggttgttaaagttgcaaaggctcacgcaaaaatggttatgtatggtacagacaacaaactttattgggattatcaaagcgtaaaagacgcatttgataagttggctatgcctatatga

SEQ ID NO: 22829 - DNA, 858 bp, Clostridium perfringens
ttgattgatttcatcaaaaaaagtgtagcattggcatttgctttcgttacgggtatatttacctttgtgccggaggcgttctttgggaaacatgaatgggtaacgcaagagacacttaaacaagataagtggtttaatcatttagatgttcaagatgttaatatagtaatttctcgtcttgtgtgctttttgcttgtctggggtgcaatatcgttgctgtatatgggctttctaaaaatatgtagatggattacaatcaaaggccagaattattcaattagagtagagtatggaaatatactcacaaagaggaaatgtaagcgagtaatcaattttgatgagtgttttacaacaaaagtaggtagcgcaaccccagatgtcaaacccaattccatatgtgggcagtatttatcattacatccagatttagatgtccagcagttgatagaaacttccaaaattaaaccagcagggagcaaatcaaaatatctgaataaaacacggtatgattcaggaaccatagttccaaatggcgatgacttattgatggcatttgcaaaattagatgaacgaggtaaagggcgattcttttctcgtgacgagtatcttgtgtgcttggatttgttgtggaaggaattagagaatcacaattctgaaaaagacatatgcgtaccagtattaggagcaggaacaacaacatttgatggtggatcgggagcatccatttcacagcaagatttgctagacatgatgatttggtcttataaattaagttctcataaaataaaagctccgcataagttgcgtattgtctgcaagaaaaacagtggtttttccatcaataatataggaaaatga

SEQ ID NO: 22830 - DNA, 609 bp, Clostridium perfringens
atgagcaagcaagtttacatcagtgctgattatgatcgacttaatggcgatcaagatgttgtagatgaattgaataaatggggaagtgataatctacataaagtcgatttcattgatatgtcgaaggtgtcgtctggcactgtagctaatagtgatgattgtcgtatttgtgatttaaaagccgaatttaatcgtcaaattaatgcatcgtcggcagtaatttttgttgtgggggatatgacctcttctcgtacagctggaagtggatgcgaacgtgcatcaaaagaacaatggcagtgttcttgtacaccttataagcaaaataccaatggtactaaagcgtgtaaggtttacagtacttctaagtgtggagaaaatgacaattacggaaacataaatggatgttcttatctccgtcatgaatttgagcaggcaaaaaagaagaaaaaaacaatcattattgtatataattctacacgtaatgaattaaattggcttccatcatatatgaatggttacggaaatgatgcgaaaccattctggaaaaaagattctaatgggaagaaagttggagactattcctacataaaagaggtgcttggattttga

SEQ ID NO: 22831 - DNA, 837 bp, Clostridium sordellii
atgattaaattaattctgacatgttgcggcatagcattttcgattacatcagctattatttctttcgtacctgaaagtttatatttaaagataaaagttggaatggcggaaattgattctatttcaaaaatccaagatggaaattttatacttatgagccgattgtttatttttatagcagtacttattatttgcactattttcggatcgattatcagaacattctggtggaggagaagattcaaaggaaaaagctatactataattgtgaaatatggtaacttgtttaaacagaaaaaatgcaaaaagattattagttttgatgaatgctttactacaaaagttggagaatcaccatcagatattaagccagattctatttgcggtcagtatttgttagcgaatccgaatttgaacattaagaaattgataactgactgtggacttaaatcactagataaaaaatcagaatttcaaaaacaagatgtatataaatccggcagtatagtgccaaatggtgactacttgttaatggcttttgcaaagctaaatcaggatggacttggggaaatgtcatatgaggaatatctgatgtgtctggataatttatggaaaaatattgataagaattatgggtctaaaagtgtatgtttgcctattttaggatcaggtcgtacacgatttgatggcattcagccaagtcaacaggaattgttagacattatgattgaatcatataagcttagcagaacaaagataaagttgccgtataaattgtatataatttgtcgcaagtcagaaaatttcacactaaatcaaataggacaaacactttga

SEQ ID NO: 22832 - DNA, 603 bp, Clostridium sordellii
atgaagaaaaaagtttatattagtgcagattattcagaagaccatggtgacagagatgttgttaatgagttaaacagattcgcaaaagataaccgttattcactcgaattcattgacatggctgcagttgcttccggtagtgtttccaataataaccccgattgtcgtccctgcgatttgaaactagagtttaaccgtcaaataaattcatcctcggcagtgatttttgtagttggcgataaaacagccgctcgaactgccggtagtagttgtagtagaaaaggaagcgattggtggaattattcttgtacaccatacaagcaaaatacaaatggctcaaaaatgtgtaaggttacttcaacggcatctgctggcgatgatgttggaagtataaatacatactcatatcttcaacatgaattcatgcaagcagttaaacgtaacaaacaaatcataatcttttataatgcaaaaataaagaaagaaagttggttgccatcatacatgctaggatatgccgatcaagccagaccattctggattgaagaaagttcgggttatcttcacggaaattatgattacttaaggcaggagttgttgtaa

SEQ ID NO: 22833 - DNA, 828 bp, Ruminiclostridium thermocellum BC1
atgttttcaatgaaagcaatacctagaatatggaaagatagtgcctcaatgggttcaactatttttgctattatttcaacctttatgggagtcgcaggaatttcgcttgatagcattataagtagccaaaaatggtggaaccgtttattgattatacttgctttatatactgttcttgtagttttcttaagagtaatattaggattaactgtgagtaatggtattaagataaaaatccgaggtatttctgtcagcattaagcaaggtaatatttttgatgcaaatgggtggaaagtaattccattcaatgagtattttgacacgatcgttgatgatgtgattgtatcaagtacaactcttaatggtatttttattaatgactatgttagtgatattaaaaaattgcaagatgcaataatgtcagccgataaggattattcagatcttaaaaaatataaaaagggcaatcggtttgcatatccacttggtcgtatcataacctttgaagattacatgttattagccttttcacattttaacgaacagaacgtagcacatattagcaaaccagaatatgaacgttgtctgctggcaatgtggaaagagatacgccgtacttacgcaaatagaccagtttttctccctctaataggctcaggaataacaagttttgatgatgtaccagaaaagtcaaatattgacttgctaaaatgtatgctttgtactttaagggcaagcggtgagaattttaatcagccgataactatccttttaacaaaagagattatgcaagaattaaatttatatgaattgaaaggggttgtttag

SEQ ID NO: 22834 - DNA, 513 bp, Ruminiclostridium thermocellum BC1
atggcttacagaactaagacttacattgctgcagattggactggagacaaagatgccgtagaacagttacataaatggaatgacagtgatcattggagtttatcgtttattgatgctcacgatttaacacaagctagagacgaaagtttaaattgcagtattaaagcttcactcagaactaggctcgacgcttcaaagacttttgttcttattgttggtgaaaatacaaagactcttagaagtggaggatgccaatactgttatagttataacagttggacaagaagttgtgcgcgtgggtattctgtggattatcgtagctacatagaatacgaatgtgataaagctgttcaggatggattaaaaattgttgtgttgtacaatgcagcaacagtaaataaatccaagtgccctgattctgtaaagaatataggcactcatgttgctatgtgcttttttagagatggtaaatattattgggattatcagtctgttaaggctgccttaagttga

SEQ ID NO: 22835 - DNA, 816 bp, Clostridium clostridioforme 2_1_49FAA
atgcttaagcttctaaagaaaagcagtacctgggcgctgagtatcattacggtagtctttacctttgtccccgaatcggtctttgggaaatggaaatggttacccaatgcctctgacgaagccaatgttgtcttagcccgtgttttggcttttatcgcggcgcttgtcatatcaatcataataaataccctgtacgtactcggtcgaagaagcattcgcataaaagggaagaattatagtatccaggttcaatatggagatttatttaagatgcgcgcctgtaaaatagtgataccctttgacgaatgcttcacgacaagtgtaggggcagctccttctgatataaatccggactccatctgtggacagtatcttaaagaatatccgatacaggatatccagagtttaattgacaatgtacagttaaaaccagcgaaaggcaagtcaaaatatcaaaacaaggaaagatatgattctggaaagctggtgcccaatggtaattatttactgatggcattcgcaaagctggacaaagacgggttgggaagaatgacccgtgatgaatttcttgcttgcctctcagtcctgtggaaggaaattgacaaatactatggacagaaggatgtatgcatacctgtattgggctccggaatcacccgtatggatgatacatctcttacacagcaggaactgctggaaataataatcggatcatacaggctaagcccccacaaaatgaaatctcctagtcaattacatatcgtatgcaaaaagcgtgaagacttttccttaaataaagtcggtgaaaacatgtag

SEQ ID NO: 22836 - DNA, 612 bp, Clostridium clostridioforme 2_1_49FAA
atgagcaaacgagtttatattagcgcagattatgcagaagatagcggtgaccgtgatgtcgttgatattctgaatcaatgggggtccgataaccggcataaagtagattttatagacatgtcaaaagtagcttcaggcagtgtttccaatgatccggattgtcgcccttgtgacttgaaacgtgagtttaatcaacagataaacgcttcctccgctgttatttttattgttggtgataagaccgcatcccgtaaagccggcagcagctgttcacgggcaagcagcgagcaggcagactgcagctgtactccgtataagcaaaattccaagggctccaagacctgcaaagtgattcataccagttcagccaaagcagatagtgatgttggcaatatcaatgcgttttcctacctccagcatgagtttgagcaggccaagaaacgtaaaaagcccatcattattgtttataactcattacgcaaggaatcaaattggcttccatcttatatgaaaggctatgaatccgatgcgcggcctttttggaaaaggaacgattatggtgaaaaggtgggtgattatacctacataaaacaggtgctgggatatgcttaa

SEQ ID NO: 22837 - DNA, 816 bp, Clostridium novyi A str. GD211209
atgagtaattttataaaaaaaagtcttacattgacagtgagcttgattactatatcttttacccttatacctgaatctatgtttggaaaatataaattgatatcaaatgtgtctgacggaaaaaatattttattaaatcgtttactaatttgtatctttgtgttttcaataagttctttatacttacactatagaaaaaaaattatcctaaaagggcataattatattattgatattgaatatggagatttatttaaaatgcatgattgcaaaaaagtaattgattttgatgaatgtttcactacgagtgtagggaatgagccttcagaaataaagccaggttctatatgcggacagtaccttgaaaagaatcctatacaagatatacagagcttaattgacaaagcaaaattaaaaccatctaaaaccaattcaaaatatgaaaataaggaaagatatgagtctggtaaattaataccaaatggggactacttattaatggcttttgcaaagttagataaagatggattaggaataatgtcgcgtgatgaatttattgattgtttgtcagtgctttggcaagaaatagataaatattatggacaagaagatgtatgtatacctatattaggatcaggattaactcgtatgaatggggatggttcattgtttaagaagcaggaattgcttgatatgataatatattcatataagttaagttctcacaaaataaaatctcctaataaattgcatattgtatgcaaaaaatgtaaggatgacgatttttctttaaataaaattggtacaagtatatag

SEQ ID NO: 22838 - DNA, 612 bp, Clostridium novyi A str. GD211209
atgagtaaacgtgtttatattagtgccgattattcacaggagaacggtgatcgtgatgttgtagatatacttaataaatggggcaaggatagtctgcataaagtagatttcatagatatgtctcaagtgatttcaggtagcatttcaagtgatcctgattgtcgtccttgtgacttgaaacgagagtttaatcaacagataaatgcatcttctgctgttatttttattgttggtgataagactgcatctcgtaaagcaggtagcagttgttcacgagtaaatacagatttgataaaatatgtttgtactccgtataagcaaaatacaaatggagctaagacttgtaaggtccttacgacttatacggttggagaagatgatgatgttggaaacataaataactattcgtatattcagcatgagtttgaacaagcaaaaaaacgtaaaaagcctatcattataatttataactcgttacgcaaggaatcaagttggcttccttcttacatgaaagattatgaatcagaggctcaaccgttttggaataagaatgataggggagaaaagattggtaactattcctatataaaaaaggtgcttggatatgagtaa

SEQ ID NO: 22839 - DNA, 858 bp, Lactobacillus brevis ATCC 14869 = DSM 20054
atgaatgtagggttttttaataaagaactgttgaaatcagtatctgcaagtgccggttggctttttggggttattggtgcattattgtcatttgttgatttcaaggaacagacgaaaaaggatgtactaattggttttgtattgctcacaattgtattttatattgttaaattaatttgggcaaacttgataagaagcgccggttttaaggttggggattcgaatatatcggtgaaacacggagatatatttaacagtaaatattatgacaatggtaagtttattaaagtgtttgcttttaacgagtattttgatacaaaagttgatgatgagataatatcgcatggctctcttaacggacaatttatcgataaaaaagtagataacatctcaaaattagatatttctattgataaagatgggagactggaacatagacacaaattggatatcaatagagataggccaagaggtaaaaaaacaagatacgaacttggatcaattcataaattttcagaagatgttttcttgacagccttaactcattttgatgataaaaaccgagcgtacctgtctattcaagattatgtaaaatttctaattaacttttgggatgaaattgatgaaatgtatgctggaagaactgtagtcataactctattcggatcgggtataaccagactagaccatgataggtatagtgcgacagagatattggatacaatactctggactttcaagctccgaagaattaaatttaagaggcctactaagttaattatccttctagacaaaaatacaaatcgggaaatcgactatttcctgttaaggagtaaattttatggcttacagaaataa

SEQ ID NO: 22840 - DNA, 495 bp, Lactobacillus brevis ATCC 14869 = DSM 20054
atggcttacagaaataaggtatatgttgcatttgatggtgacaatgatatgcggtattacgaattgatgcgaggttggagcgtcaaagatgattttgaatttaatgatgcacatgacttacacagtgcaagagattcgagcaccgaagaatcaattaaaaaaagtttaatggacagatttaagaattctaaattgttcattcttttgattggtgaacatacaaaaaatctaacgaagtttgttaaatgggaaattgaagtggcgattcgattggatttaccgattatcgctgtcaatttgaatggcaaacgacaagatgatgctttaatgcctgcagttttgagagatgaattacatataactgttccctataaagaaaaaattattaagtatgcaatggataattggccagattatgatgaaagttatcgaggagatggtaaaaaaggtggatattcttataaagataaagtgtatgaaagcttgggtttgtag

SEQ ID NO: 22841 - DNA, 858 bp, Lactobacillus brevis ATCC 14869 = DSM 20054; identical to SEQ ID NO: 22839

SEQ ID NO: 22842 - DNA, 447 bp, Lactobacillus brevis ATCC 14869 = DSM 20054
atgcggtattacgaattgatgcgaggttggagcgtcaaagatgattttgaatttaatgatgcacatgacttacacagtgcaagagattcgagcaccgaagaatcaattaaaaaaagtttaatggacagatttaagaattctaaattgttcattcttttgattggtgaacatacaaaaaatctaacgaagtttgttaaatgggaaattgaagtggcgattcgattggatttaccgattatcgctgtcaatttgaatggcaaacgacaagatgatgctttaatgcctgcagttttgagagatgaattacatataactgttccctataaagaaaaaattattaagtatgcaatggataattggccagattatgatgaaagttatcgaggagatggtaaaaaaggtggatattcttataaagataaagtgtatgaaagcttgggtttgtag

SEQ ID NO: 22843 - DNA, 861 bp, Actinomyces viscosus C505
atgaggccgttgacgcaatacaagcaggttcaaaaatactctagtgcaaaacacaagctatttgacgcctacaaaacttggtttctagcaatgctcaccacctgctcggcggcattggcattttttccggagtgcaccaaatgtcgatgggcggcattggctgcgctactaatcctccctgcgatgcttgcagtattgttctaccggccaaaacttcccgaacaacaataccgaaacaacttcaaaatcaaggtcatttcaggtgacatacttaagcaaaacggcaactgcgtcatcggattcacgaacactttcgatacagataccgtccatagaattatatcaaatgaaagtttgcaaggacaatttcaaaaccgaatttatcaaaatgatgtgagcagactggatgacgacctttcgaaagttctcaacaaactagagccagtcgatactatcgcaaaaaaaggcaagaggaaggtttatccattaggaactgtagtgccaatcagaaaagaaggagggggtttttggtactgcttggcctacacaaaaatgaacgaagaaaacgtggctaccgcaaaactttcagaactacgtcatgccttagacctgctgtgggaggaaattctcgcaacctcaaacggcgaaccagtctcgctccccctgataggacttgggaacgccagaaccccgagcatgagcgccgaattgtctttacacttagttgcattctcgtactatatccgatccagagagtctgtcgtatgcgagtccctgaatatcatcattaacgaagagacgatcgagaacatcgacctcacaaagtttcaatcttttctgtcaagccttaacactctttaa

SEQ ID NO: 22844 - DNA, 1173 bp, Actinomyces viscosus C505
gtgatattcatttcccactcgtccagtgacatcatcaccaccagaaaactagtatttgaactgaactatttgggtgcaaaaacgtggtttgatgaaacagaaatcacggcagtttcaccggtttttggtagtatcgaacaggccatccgcaattgcgatgtagtcgtattggtagcctcagtcgattcgctcgaatcagactacgttaaacgtgagattaaacttgcattgcagctggataaaccgttggcaattgtgcgcgttccgggaagcaatgtagatatttcaggcgatctcgccgattacaaacattttaatcttagtgacttcccgtctttcagtcgtgccgctcgagaaatcatcaaaaaggacaatctaaagaagcgaggagagtctccggaggaattttggggcgtgtgcagaggagtggatcctctattaaatgacagcgtgcgatcaaatattcatgcactaaagagcgttgtgaaccaatctgctacacaagagccgctagttcgcttactgcgagaggattacacagatctagttcagtctttcgatgtggttcacgacatcgacgtttcctggctcccaccggaacttcgcagagattttattgacctccctgaaaaagcggatcgagttagcaactacatcagctcccttacctatgactacctccagaatcctgctctagattctcaaacattcgagtcggaatatttcaggattgtttccacgcatctcattgtttctctcaatgttgaacttctgaagctgccttgggctcaagacccagacgggatctcgtcggcatgccgagtcctaaccaatgcacgaaatgcgctcacatcatcatcgccatttccaacagaaggaatctcggcagacatatgcttaggagaagttactgagcagggcctagcaaagtaccataagtacgtcggaaaatgccactgtccggactacgtggaagagaaagactttcgttttagcgttttcccaaacggctccccaacaaccttaaccgagggtcttggagtcgtcgttccttatcagcttggaataatgacagggtgggcagattcgtggaatatatggcgaactctacgggagcgtagagctgaagctcgaattccatcacctgatagtgttcttctcgggattagttga

SEQ ID NO: 22845 - DNA, 810 bp, Propionibacterium acidipropionici
atccaagaattctcccgccgtttcctagaggcattgggcgtgctcgcggtggtcgccggcgcggtcgcgctcttcgctccggacttgctgcaaggtcgatggtggctggtagggattgcagcactactcgcaatcgggtgggcgagcttcactcttcggcagaagagctcggagcagtggtttccgtctgagtcggtcaccattcgtcttgtcgaaggcgacttgttcgagcagagcgcatcggcgatggttggcatgaccacgacgttcgacaccgagtccggcatcatcgagaacaagagcgtccagggcagcctcctccgtgcgatctacgacggatcgcagacgcggctcgacgccgcgttgacggcggcgctgagcgaggtaggacctgtcgacacgatcacgaagcccggcaagcacgacatctacccgctcggtacagttgctgtcctgcccggtcagggagctatccgttactactgcgtcgcctacaccgagatggacgtccacaatcgagcgaagggaacgatccgcggcatcctcgacagtcttgacgcggtgtgggacgcggccgatcgtcacggcaacggcgagccgatttgcgtgccgcttcttggacaaggtcagtctcgaatcccggaactcacagccgagaccgccgtccggctcatcgcattttcgttcctgctccgcacgcggcgcgggcgattctccaaggagttgcgcatcgtggttcatccaaatgaaatcggcaaggttgatcaagccgagttccaagcgttcctgcgttcgttggtggcgggatga

SEQ ID NO: 22846 - DNA, 516 bp, Propionibacterium acidipropionici
gtgagttaccgcaacaaaacctacgtcgcgttcgcaagtgaggacattcgctactaccggctcatgacggcctggcgggcgaacgacaacatcgagttcgacttcatcaatgcgcatgacatctacacggctcgggacagcagcactccggaaaccatcaagaggcgactgcgcgagcgactgaacaacaccaagcaggtcgttcttctcggtagtgcagacgcccgtcgcaaaggtggcaacggcaactcatttctcgcctatgaggtgggcgcaatcatttcgctcaaccttcctgtcgtcgtagcgaatctggacggctccaggcagggcgtcagcggaaatattcccgccccgttcgccagtaaggattactacacgatgtcggtgtctttcgggccgaccatcatcaagtacgcactcgataactacgcgccagactttgccggctcggaaaagaccggctcctacttctacaaggagtccgtttacgagcgcctcggcctcaacaagtga

SEQ ID NO: 22847 - DNA, 861 bp, Sphingomonas paucimobilis
atgtccaagttcgttcaatcggcaatcacagggcttaggcgtcgctggcagcgggcgaccgccacctttttaagcgtcctaggttccgtttggcttgttactgaagtcctgacgcgcgtctcacacgtcacgaaccagtggctggacgatcacggaaccacatatttggtcttcgccgtttgcagcgcgataatcgggatcctgatcgctgcatatgaggcccggtcggtatccttcacaataccgaacacggacacgactttgaccctaagtttcgcgagcatcttcgatgagtctgcagattggatcatcggcgtaaacgagtttttcgatagcaccttgggcaacatcgtgtcggctaactcgctgcacgggcaaatcattgcgaagctctacagcggcaatgaagcgaacttccgccgtgacgtcgacgctgcgctagcgggacggcaaagcgagcatatccagcgggcggagggccaaacggcaaaattcccactggggacgacagccgtaatccctcgcggtcctcacaagatttttctcgtcgcgatttcgaagaccgatctggctacacatcgctcaagctcgaccgtcccaatcctatgggatgcactgagcgaagccttcaaagaagtggacggcctcggcaacggtgatccactagcgatgcccttgataggcaatggtcgagcgagcttgaatataccgcctcagcatttgttgaggattatcacgctcaagatcaccgagcttggaaagcgatatgatctaccgaggcagatcaccatcaatctatcagacgactgcttcgagcacctcgatttagtcgaaataaagcggggatggagcgtcgtttaa

SEQ ID NO: 22848 - DNA, 546 bp, Sphingomonas paucimobilis
atggcttacagaaacggtacctacatcgcgttccacgctgaaggtaagacagacccgacggcctccgatataaagtactatcggatgatgaaagcgtggcatgaacacgacgatgttgatttcaaattcgttaacagtcacgacaaggtagccgccgtccgcgacgccagcacgaagcagacgatcatgcgaagccttcgcgagcgcttgaacaactctaagaatatggtgctaattatcggtaacaccacaaagaacgacaccgacttcgtgccttacgaaatcgcctacgccgtcgacacgtgcaaaattccgatcatctgcgtttacacagcctatgccagcatcctaaatccaaagtcgcatcgtagtgaatggccttccgccctggccgaacggatcgacgcaaaagcggtgcgggcgcttcacatccccttcaagcggcgagtgatcgacacagcgatcgggcagttccaccttggtaatttgccgtccgggtcgttgtcgtattactcgaaagagggccagcatgttgattgccactga

SEQ ID NO: 22849 - DNA, 816 bp, Prevotella intermedia ZT
atgagacaaaccaaagttttcttatctcatttcttgatatttataggtgctatttctgcttgtataggagcatttatatggctaagtggttatagtacgacaacccaaattatagttggcggttgtattattcttgtaggtataggatatgcttggtttcaaatgcgcccaagtaagtctatacaaatacgcatcaatgattctttccctcttcaagtagaatttggagatctgtttgaaaagaaaggcgtagtaataatttctgttaatgaatactttgacaccatcgtagataacagaataatagctacagataccattcatggaaagtttatagaacgattattcaagggaagaattcaagaattagataacaaaataagaaaggctttgaataaattcatagcagaagacacacctaatcgaactcgtgggaagaaacaacgttaccctttgggaacttgtgctgtcattgaagaaggagaaaacacttacattcttgctgccctaactgagtttgatgctaataaccatgcattcattcctttatcggagtatggggctatcattcagagaattatctcgacagctgcgactgttgccaacagcagacccgtatatatgcctcttttagggagtgggcagggaggaattcagaagtcagcacaaaaaatactattctatatgataagccaaatagagttttgttcaaacgtaagtatccccaaggggctgcatattgttatttatgatctcaacaagaaaggaattaatctggataatataaagagtgtttggcagtctgcaattaaatag

SEQ ID NO: 22850 - DNA, 696 bp, Prevotella intermedia ZT
atggaattatataaagttacaacggaagtggtaggcgaggtgtttaacacctcgcctattacatcaacacagcctttagagagacctcgtggattacagaatgaattgcgttgtcttgtaaaaggagaaaggggcatcatcgatggggaaagattgcgaaattttgttttcccaaccgataattatgatgtattcatctcacattcacatgacgatttagaaatagcaaaacaatttgctgcttggcttaaagagaaatatagatatagtgtgtttttagactcctttgtttggaatagtgctgatggcttgctccgagaaatagataacctatattgtaagcagagaaacggactttataactaccatagaagaaattattcaacagctcacatacatacaatgctaagtatgtcaattatggaaattataaagcgaagtaaggtgggaatattaatagatagtcaccactctataaatcttgagagacttcgtaattccaatcagggaaaaaccctctctccatggatttttcaagagattatgtttatgcgtcaatttgcaaaccaaaaatcatctactcgtatgtttagcagtgaaagtctaaatgaaggtttacaaatagcacatactgttgatttgtcagattttactccattaacagcaatggatttaatcagtaaagcacctttctaa

SEQ ID NO: 22851 - DNA, 843 bp, Burkholderia pseudomallei K96243
gtgaattcgatcagagaccttttgaacggggttcggcggcatccagtgaagatgctcgcctacatgttcacggcattcagcatcattcaaacggttgttcgtggtgtttccctgttcgtcccgggaatttccatcagcggcccgattcctttcgccgccgtgatcgtcatcagcgtctcgtggggcttgaaaaaggtttggaagccatcccgcatcgaattgccgatcgccaattgcgcgaccgtgatcgaagtcgttttcggtgatctgttcgagcaagagggcattcgagccatcgcggtcaacaatttttttgacagcgcgcttggcaaacccgtttccgacaagagcgtgcacgggatttttctgaaaaagtgctttggcggccacgctgagcccttcgacaagcaagtggacgagcagctcgccgcgatcgagagcgaaagcgtcgagcgcgcggaagggaagacaaagcgctttccgattggctcgaccgccatgatcaatgtcaaccaagaccgctacatcgctttcgccttcgcggagaccgaccccgcgaccagcaaagcgcattcggacgtgaccatgatgtggtcggccctgcactccctctgggagcgcgcccgcgtcgaggcgggcgggcactcgctgaaccttcctttggtcggaagcggcctgtccggcttgggcctgccaacccgcgacctgttgaacctcatcattttgtcggcgatcaccgagacgaaaacccgagaggtcacgcagagaatcagaattgtcttgggccgagaccgattcgaccacctcgatttgcgggacgtgaaagcgcattggagcgaatga

SEQ ID NO: 22852 - DNA, 558 bp, Burkholderia pseudomallei K96243
atggcttacagaaacgggacctatgtggcgttccatgccaacggcaccaaccgaccgggcggaaactccgacatcgactactacaacctgttgaaggcgtgggtcggcaaagacgacgaccatttcacgatgaacaacagccatgacaaggcgtctgctgtccgcgattcgagcaagaaggaaaccttgcgggcctcgcttctcgagcgcctgagaaactcaaagaacatggtgctcatcatcggggacacaactcttctggacgacgattgggtcccttttgaaatctcgtcggccgtggacacatacgagattcccatcatcgccgtctacacccaatactcgaccccgatacgaaatcctgcggcgttgcgctcgcggtggcccgacgccctcgcgacccggatcgattcgcaaaaagccaaagtcatacacattccattcaaaaaggcggcgctaaacgacgctatatcgcagttctcccacaacaatatgccgaagggaccgctatccttttatagcgacgaggcctacgaaagcttcggaattgacggataa

SEQ ID NO: 22853 - DNA, 798 bp, Burkholderia pseudomallei 1106a
gtgaagatgctcgcctacatgttcacggcattcagcatcattcaaacggttgttcgtggtgtttccctgttcgtcccgggaatttccatcagcggcccgattcctttcgccgccgtgatcgtcatcagcgtctcgtggggcttgaaaaaggtttggaagccatcccgcatcgaattgccgatcgccaattgcgcgaccgtgatcgaagtcgttttcggtgatctgttcgagcaagagggcattcgagccatcgcggtcaacaatttttttgacagcgcgcttggcaaacccgtttccgacaagagcgtgcacgggatttttctgaaaaagtgctttggcggccacgctgagcccttcgacaagcaagtggacgagcagctcgccgcgatcgagagcgaaagcgtcgagcgcgcggaagggaagacaaagcgctttccgattggctcgaccgccatgatcaatgtcaaccaagaccgctacatcgctttcgccttcgcggagaccgaccccgcgaccagcaaagcgcattcggacgtgaccatgatgtggtcggccctgcactccctctgggagcgcgcccgcgtcgaggcgggcgggcactcgctgaaccttcctttggtcggaagcggcctgtccggcttgggcctgccaacccgcgacctgttgaacctcatcattttgtcggcgatcaccgagacgaaaacccgagaggtcacgcagagaatcagaattgtcttgggccgagaccgattcgaccacctcgatttgcgggacgtgaaagcgcattggagcgaatga

SEQ ID NO: 22854 - DNA, 558 bp, Burkholderia pseudomallei 1106a; identical to SEQ ID NO: 22852

SEQ ID NO: 22855 - DNA, 798 bp, Burkholderia pseudomallei Pasteur 52237; identical to SEQ ID NO: 22853

SEQ ID NO: 22856 - DNA, 558 bp, Burkholderia pseudomallei Pasteur 52237; identical to SEQ ID NO: 22852

SEQ ID NO: 22857 - DNA, 798 bp, Burkholderia pseudomallei 1710a; identical to SEQ ID NO: 22853

SEQ ID NO: 22858 - DNA, 558 bp, Burkholderia pseudomallei 1710a; identical to SEQ ID NO: 22852

SEQ ID NO: 22859 - DNA, 798 bp, Burkholderia pseudomallei 1106b; identical to SEQ ID NO: 22853

SEQ ID NO: 22860 - DNA, 558 bp, Burkholderia pseudomallei 1106b; identical to SEQ ID NO: 22852

SEQ ID NO: 22861 - DNA, 624 bp, Burkholderia pseudomallei 1258a
ttgccgatcgccaattgcgcgaccgtgatcgaagtcgttttcggtgatctgttcgagcaagagggcattcgagccatcgcggtcaacaatttttttgacagcgcgcttggcaaacccgtttccgacaagagcgtgcacgggatttttctgaaaaagtgctttggcggccacgctgagcccttcgacaagcaagtggacgagcagctcgccgcgatcgagagcgaaagcgtcgagcgcgcggaagggaagacaaagcgctttccgattggctcgaccgccatgatcaatgtcaaccaagaccgctacatcgctttcgccttcgcggagaccgaccccgcgaccagcaaagcgcattcggacgtgaccatgatgtggtcggccctgcactccctctgggagcgcgcccgcgtcgaggcgggcgggcactcgctgaaccttcctttggtcggaagcggcctgtccggcttgggcctgccaacccgcgacctgttgaacctcatcattttgtcggcgatcaccgagacgaaaacccgagaggtcacgcagagaatcagaattgtcttgggccgagaccgattcgaccacctcgatttgcgggacgtgaaagcgcattggagcgaatga

SEQ ID NO: 22862 - DNA, 558 bp, Burkholderia pseudomallei 1258a
atggcttacagaaacgggacctatgtggcgttccatgccaacggcaccaaccgaccgggcggaaactccgacatcgactactacaacctgttgaaggcgtgggtcggcaaagacgacgaccatttcacgatgaacaacagccatgacaaggcgtctgctgtccgcgattcgagcaagaaggaaaccttgcgggcctcgcttctcgagcgcctgagaaactcaaagaacatggtgctcatcatcggggacacaactcttctggacgacgattgggtcccttttgaaatctcgtcggctgtggacacatacgagattcccatcatcgccgtctacacccaatactcgaccccgatacgaaatcctgcggcgttgcgctcgcggtggcccgacgccctcgcgacccggatcgattcgcaaaaagccaaagtcatacacattccattcaaaaaggcggcgctaaacgacgctatatcgcagttctcccacaacaatatgccgaaggggccgctatccttttatagcgacgaggcctacgaaagcttcggaattgacggataa

SEQ ID NO: 22863 - DNA, 624 bp, Burkholderia pseudomallei 1258b; identical to SEQ ID NO: 22861

SEQ ID NO: 22864 - DNA, 558 bp, Burkholderia pseudomallei 1258b; identical to SEQ ID NO: 22862

SEQ ID NO: 22865 - DNA, 624 bp, Burkholderia pseudomallei 354e; identical to SEQ ID NO: 22861

SEQ ID NO: 22866 - DNA, 558 bp, Burkholderia pseudomallei 354e; identical to SEQ ID NO: 22852

SEQ ID NO: 22867 - DNA, 624 bp, Burkholderia pseudomallei 354a; identical to SEQ ID NO: 22861

SEQ ID NO: 22868 - DNA, 558 bp, Burkholderia pseudomallei 354a; identical to SEQ ID NO: 22852

SEQ ID NO: 22869 - DNA, 798 bp, Burkholderia pseudomallei BPC006; identical to SEQ ID NO: 22853

SEQ ID NO: 22870 - DNA, 534 bp, Burkholderia pseudomallei BPC006
gtggcgttccatgccaacggcaccaaccgaccgggcggaaactccgacatcgactactacaacctgttgaaggcgtgggtcggcaaagacgacgaccatttcacgatgaacaacagccatgacaaggcgtctgctgtccgcgattcgagcaagaaggaaaccttgcgggcctcgcttctcgagcgcctgagaaactcaaagaacatggtgctcatcatcggggacacaactcttctggacgacgattgggtcccttttgaaatctcgtcggccgtggacacatacgagattcccatcatcgccgtctacacccaatactcgaccccgatacgaaatcctgcggcgttgcgctcgcggtggcccgacgccctcgcgacccggatcgattcgcaaaaagccaaagtcatacacattccattcaaaaaggcggcgctaaacgacgctatatcgcagttctcccacaacaatatgccgaagggaccgctatccttttatagcgacgaggcctacgaaagcttcggaattgacggataa

SEQ ID NO: 22871 - DNA, 792 bp, Burkholderia pseudomallei
atgctcgcctacatgttcacggcattcagcatcattcaaacggttgttcgtggtgtttccctgttcgtcccgggaatttccatcagcggcccgattcctttcgccgccgtgatcgtcatcagcgtctcgtggggcttgaaaaaggtttggaagccatcccgcatcgaattgccgatcgccaattgcgcgaccgtgatcgaagtcgttttcggtgatctgttcgagcaagagggcattcgagccatcgcggtcaacaatttttttgacagcgcgcttggcaaacccgtttccgacaagagcgtgcacgggatttttctgaaaaagtgctttggcggccacgctgagcccttcgacaagcaagtggacgagcagctcgccgcgatcgagagcgaaagcgtcgagcgcgcggaagggaagacaaagcgctttccgattggctcgaccgccatgatcaatgtcaaccaagaccgctacatcgctttcgccttcgcggagaccgaccccgcgaccagcaaagcgcattcggacgtgaccatgatgtggtcggccctgcactccctctgggagcgcgcccgcgtcgaggcgggcgggcactcgctgaaccttcctttggtcggaagcggcctgtccggcttgggcctgccaacccgcgacctgttgaacctcatcattttgtcggcgatcaccgagacgaaaacccgagaggtcacgcagagaatcagaattgtcttgggccgagaccgattcgaccacctcgatttgcgggacgtgaaagcgcattggagcgaatga

SEQ ID NO: 22872 - DNA, 558 bp, Burkholderia pseudomallei; identical to SEQ ID NO: 22852

SEQ ID NO: 22873 - DNA, 792 bp, Burkholderia pseudomallei; identical to SEQ ID NO: 22871

SEQ ID NO: 22874 - DNA, 558 bp, Burkholderia pseudomallei; identical to SEQ ID NO: 22852

SEQ ID NO: 22875 - DNA, 792 bp, Burkholderia pseudomallei Pasteur 52237; identical to SEQ ID NO: 22871

SEQ ID NO: 22876 - DNA, 558 bp, Burkholderia pseudomallei Pasteur 52237; identical to SEQ ID NO: 22852

SEQ ID NO: 22877 - DNA, 822 bp, Burkholderia pseudomallei
ttgaacggggttcggcggcatccagtgaagatgctcgcctacatgttcacggcattcagcatcattcaaacggttgttcgtggtgtttccctgttcgtcccgggaatttccatcagcggcccgattcctttcgccgccgtgatcgtcatcagcgtctcgtggggcttgaaaaaggtttggaagccatcccgcatcgaattgccgatcgccaattgcgcgaccgtgatcgaagtcgttttcggtgatctgttcgagcaagagggcattcgagccatcgcggtcaacaatttttttgacagcgcgcttggcaaacccgtttccgacaagagcgtgcacgggatttttctgaaaaagtgctttggcggccacgctgagcccttcgacaagcaagtggacgagcagctcgccgcgatcgagagcgaaagcgtcgagcgcgcggaagggaagacaaagcgctttccgattggctcgaccgccatgatcaatgtcaaccaagaccgctacatcgctttcgccttcgcggagaccgaccccgcgaccagcaaagcgcattcggacgtgaccatgatgtggtcggccctgcactccctctgggagcgcgcccgcgtcgaggcgggcgggcactcgctgaaccttcctttggtcggaagcggcctgtccggcttgggcctgccaacccgcgacctgttgaacctcatcattttgtcggcgatcaccgagacgaaaacccgagaggtcacgcagagaatcagaattgtcttgggccgagaccgattcgaccacctcgatttgcgggacgtgaaagcgcattggagcgaatga

SEQ ID NO: 22878 - DNA, 558 bp, Burkholderia pseudomallei; identical to SEQ ID NO: 22852

SEQ ID NO: 22879 - DNA, 792 bp, Burkholderia pseudomallei; identical to SEQ ID NO: 22871

SEQ ID NO: 22880 - DNA, 558 bp, Burkholderia pseudomallei; identical to SEQ ID NO: 22852

SEQ ID NO: 22881 - DNA, 822 bp, Burkholderia pseudomallei; identical to SEQ ID NO: 22877

SEQ ID NO: 22882 - DNA, 558 bp, Burkholderia pseudomallei; identical to SEQ ID NO: 22852

SEQ ID NO: 22883 - DNA, 843 bp, Burkholderia pseudomallei B03
atgaattcgatcagagaccttttgaacggggttcggcggcatccagtgaagatgctcgcctacatgttcacggcattcagcatcattcaaacggttgttcgtggtgtttccctgttcgtcccgggaatttccatcagcggcccgattcctttcgccgccgtgatcgtcatcagcgtctcgtggggcttgaaaaaggtttggaagccatcccgcatcgaattgccgatcgccaattgcgcgaccgtgatcgaagtcgttttcggtgatctgttcgagcaagagggcattcgagccatcgcggtcaacaatttttttgacagcgcgcttggcaaacccgtttccgacaagagcgtgcacgggatttttctgaaaaagtgctttggcggccacgctgagcccttcgacaagcaagtggacgagcagctcgccgcgatcgagagcgaaagcgtcgagcgcgcggaagggaagacaaagcgctttccgattggctcgaccgccatgatcaatgtcaaccaagaccgctacatcgctttcgccttcgcggagaccgaccccgcgaccagcaaagcgcattcggacgtgaccatgatgtggtcggccctgcactccctctgggagcgcgcccgcgtcgaggcgggcgggcactcgctgaaccttcctttggtcggaagcggcctgtccggcttgggcctgccaacccgcgacctgttgaacctcatcattttgtcggcgatcaccgagacgaaaacccgagaggtcacgcagagaatcagaattgtcttgggccgagaccgattcgaccacctcgatttgcgggacgtgaaagcgcattggagcgaatga

SEQ ID NO: 22884 - DNA, 558 bp, Burkholderia pseudomallei B03
atggcttacagaaacgggacctatgtggcgttccatgccaacggcaccaaccgaccgggcggaaactccgacatcgactactacaacctgttgaaggcgtgggtcggcaaagacgacgaccatttcacgatgaacaacagccatgacaaggcgtctgctgtccgcgattcgagcaagaaggaaaccttgcgggcctcgcttctcgagcgcctgagaaactcaaagaacatggtgctcatcatcggggacacaactcttctggacgacgattgggtcccttttgaaatctcgtcggccgtggacacatacgagattcccatcatcgccgtctacacccaatactcgaccccgatacgaaatcctgcggcgttgcgctcgcggtggcccgacgccctcgcgacccggatcgattcgcaaaaagccaaagtcatacacattccattcaaaaaggcagcgctaaacgacgctatatcgcagttctcccacaacaatatgccgaagggaccgctatccttttatagcgacgaggcctacgaaagcttcggaattgacggataa

SEQ ID NO: 22885 - DNA, 843 bp, Burkholderia pseudomallei A79A; identical to SEQ ID NO: 22883

SEQ ID NO: 22886 - DNA, 558 bp, Burkholderia pseudomallei A79A; identical to SEQ ID NO: 22884

SEQ ID NO: 22887 - DNA, 792 bp, Burkholderia pseudomallei TSV28; identical to SEQ ID NO: 22871

SEQ ID NO: 22888 - DNA, 558 bp, Burkholderia pseudomallei TSV28
atggcttacagaaacgggacctatgtggcgttccatgccaacggcaccaaccgaccgggcggaaactccgacatcgactactacaacctgttgaaggcgtgggtcggcaaagacgacgaccatttcacgatgaacaacagccatgacaaggcgtctgctgtccgcgattcgagcaagaaggaaaccttgcgggcctcgcttctcgagcgcctgagaaactcaaagaacatggtgctcatcatcggggacacaactcttctggacgacgattgggtcccttttgaaatctcgtcggccgtggacacatatgagattcccatcatcgccgtctacacccaatactcgaccccgatacgaaatcctgcggcgttgcgctcgcggtggcccgacgccctcgcgacccggatcgattcgcaaaaagccaaagtcatacacattccattcaaaaaggcggcgctaaacgacgctatatcgcagttctcccacaacaatatgccgaagggaccgctatccttttatagcgacgaggcctacgaaagcttcggaattgacggataa

SEQ ID NO: 22889 - DNA, 843 bp, Burkholderia pseudomallei A79C; identical to SEQ ID NO: 22883

SEQ ID NO: 22890 - DNA, 558 bp, Burkholderia pseudomallei A79C; identical to SEQ ID NO: 22884

SEQ ID NO: 22891 - DNA, 843 bp, Burkholderia pseudomallei A79D; identical to SEQ ID NO: 22883

SEQ ID NO: 22892 - DNA, 558 bp, Burkholderia pseudomallei A79D; identical to SEQ ID NO: 22884

SEQ ID NO: 22893 - DNA, 798 bp, Burkholderia pseudomallei; identical to SEQ ID NO: 22853

SEQ ID NO: 22894 - DNA, 558 bp, Burkholderia pseudomallei; identical to SEQ ID NO: 22852

SEQ ID NO: 22895 - DNA, 798 bp, Burkholderia pseudomallei; identical to SEQ ID NO: 22853

SEQ ID NO: 22896 - DNA, 558 bp, Burkholderia pseudomallei; identical to SEQ ID NO: 22852

SEQ ID NO: 22897 - DNA, 843 bp, Burkholderia pseudomallei; identical to SEQ ID NO: 22851

SEQ ID NO: 22898 - DNA, 558 bp, Burkholderia pseudomallei; identical to SEQ ID NO: 22852

SEQ ID NO: 22899 - DNA, 798 bp, Burkholderia pseudomallei; identical to SEQ ID NO: 22853

SEQ ID NO: 22900 - DNA, 558 bp, Burkholderia pseudomallei; identical to SEQ ID NO: 22852

SEQ ID NO: 22901 - DNA, 792 bp, Burkholderia pseudomallei K96243; identical to SEQ ID NO: 22871

SEQ ID NO: 22902 - DNA, 558 bp, Burkholderia pseudomallei K96243; identical to SEQ ID NO: 22852

SEQ ID NO: 22903 - DNA, 822 bp, Burkholderia pseudomallei; identical to SEQ ID NO: 22877

SEQ ID NO: 22904 - DNA, 558 bp, Burkholderia pseudomallei; identical to SEQ ID NO: 22852

SEQ ID NO: 22905 - DNA, 792 bp, Burkholderia pseudomallei; identical to SEQ ID NO: 22871

SEQ ID NO: 22906 - DNA, 558 bp, Burkholderia pseudomallei; identical to SEQ ID NO: 22852

SEQ ID NO: 22907 - DNA, 792 bp, Burkholderia pseudomallei; identical to SEQ ID NO: 22871

SEQ ID NO: 22908 - DNA, 558 bp, Burkholderia pseudomallei; identical to SEQ ID NO: 22852

SEQ ID NO: 22909 - DNA, 792 bp, Burkholderia pseudomallei; identical to SEQ ID NO: 22871

SEQ ID NO: 22910 - DNA, 558 bp, Burkholderia pseudomallei; identical to SEQ ID NO: 22852

SEQ ID NO: 22911 - DNA, 792 bp, Burkholderia pseudomallei; identical to SEQ ID NO: 22871

SEQ ID NO: 22912 - DNA, 558 bp, Burkholderia pseudomallei; identical to SEQ ID NO: 22852

SEQ ID NO: 22913 - DNA, 792 bp, Burkholderia pseudomallei; identical to SEQ ID NO: 22871

SEQ ID NO: 22914 - DNA, 558 bp, Burkholderia pseudomallei; identical to SEQ ID NO: 22852

SEQ ID NO: 22915 - DNA, 792 bp, Burkholderia pseudomallei; identical to SEQ ID NO: 22871

SEQ ID NO: 22916 - DNA, 558 bp, Burkholderia pseudomallei; identical to SEQ ID NO: 22852

SEQ ID NO: 22917 - DNA, 822 bp, Burkholderia pseudomallei; identical to SEQ ID NO: 22877

SEQ ID NO: 22918 - DNA, 558 bp, Burkholderia pseudomallei; identical to SEQ ID NO: 22852

SEQ ID NO: 22919 - DNA, 792 bp, Burkholderia pseudomallei; identical to SEQ ID NO: 22871

SEQ ID NO: 22920 - DNA, 558 bp, Burkholderia pseudomallei; identical to SEQ ID NO: 22852

SEQ ID NO: 22921 - DNA, 792 bp, Burkholderia pseudomallei; identical to SEQ ID NO: 22871

SEQ ID NO: 22922 - DNA, 558 bp, Burkholderia pseudomallei; identical to SEQ ID NO: 22852

SEQ ID NO: 22923 - DNA, 792 bp, Burkholderia pseudomallei; identical to SEQ ID NO: 22871

SEQ ID NO: 22924 - DNA, 558 bp, Burkholderia pseudomallei; identical to SEQ ID NO: 22852

SEQ ID NO: 22925 - DNA, 792 bp, Burkholderia pseudomallei; identical to SEQ ID NO: 22871

SEQ ID NO: 22926 - DNA, 558 bp, Burkholderia pseudomallei; identical to SEQ ID NO: 22852

SEQ ID NO: 22927 - DNA, 822 bp, Burkholderia pseudomallei; identical to SEQ ID NO: 22877

SEQ ID NO: 22928 - DNA, 558 bp, Burkholderia pseudomallei; identical to SEQ ID NO: 22852

SEQ ID NO: 22929 - DNA, 822 bp, Burkholderia pseudomallei; identical to SEQ ID NO: 22877

SEQ ID NO: 22930 - DNA, 558 bp, Burkholderia pseudomallei; identical to SEQ ID NO: 22852

SEQ ID NO: 22931 - DNA, 822 bp, Burkholderia pseudomallei; identical to SEQ ID NO: 22877

SEQ ID NO: 22932 - DNA, 558 bp, Burkholderia pseudomallei; identical to SEQ ID NO: 22852

SEQ ID NO: 22933 - DNA, 822 bp, Burkholderia pseudomallei; identical to SEQ ID NO: 22877

SEQ ID NO: 22934 - DNA, 558 bp, Burkholderia pseudomallei; identical to SEQ ID NO: 22852

SEQ ID NO: 22935 - DNA, 792 bp, Burkholderia pseudomallei; identical to SEQ ID NO: 22871

SEQ ID NO: 22936 - DNA, 558 bp, Burkholderia pseudomallei; identical to SEQ ID NO: 22852

SEQ ID NO: 22937 - DNA, 792 bp, Burkholderia pseudomallei; identical to SEQ ID NO: 22871

SEQ ID NO: 22938 - DNA, 558 bp, Burkholderia pseudomallei; identical to SEQ ID NO: 22852

SEQ ID NO: 22939 - DNA, 792 bp, Burkholderia pseudomallei; identical to SEQ ID NO: 22871

SEQ ID NO: 22940 - DNA, 558 bp, Burkholderia pseudomallei; identical to SEQ ID NO: 22852

SEQ ID NO: 22941 - DNA, 822 bp, Burkholderia pseudomallei; identical to SEQ ID NO: 22877

SEQ ID NO: 22942 - DNA, 558 bp, Burkholderia pseudomallei; identical to SEQ ID NO: 22852

SEQ ID NO: 22943 - DNA, 792 bp, Burkholderia pseudomallei; identical to SEQ ID NO: 22871

SEQ ID NO: 22944 - DNA, 558 bp, Burkholderia pseudomallei; identical to SEQ ID NO: 22852

SEQ ID NO: 22945 - DNA, 822 bp, Burkholderia pseudomallei; identical to SEQ ID NO: 22877

SEQ ID NO: 22946 - DNA, 558 bp, Burkholderia pseudomallei; identical to SEQ ID NO: 22852

SEQ ID NO: 22947 - DNA, 822 bp, Burkholderia pseudomallei; identical to SEQ ID NO: 22877

SEQ ID NO: 22948 - DNA, 558 bp, Burkholderia pseudomallei; identical to SEQ ID NO: 22852

SEQ ID NO: 22949 - DNA, 792 bp, Burkholderia pseudomallei; identical to SEQ ID NO: 22871

SEQ ID NO: 22950 - DNA, 558 bp, Burkholderia pseudomallei; identical to SEQ ID NO: 22852

SEQ ID NO: 22951 - DNA, 792 bp, Burkholderia pseudomallei; identical to SEQ ID NO: 22871

SEQ ID NO: 22952 - DNA, 558 bp, Burkholderia pseudomallei; identical to SEQ ID NO: 22852

SEQ ID NO: 22953 - DNA, 822 bp, Burkholderia pseudomallei; identical to SEQ ID NO: 22877

SEQ ID NO: 22954 - DNA, 558 bp, Burkholderia pseudomallei; identical to SEQ ID NO: 22852

SEQ ID NO: 22955 - DNA, 822 bp, Burkholderia pseudomallei; identical to SEQ ID NO: 22877

SEQ ID NO: 22956 - DNA, 558 bp, Burkholderia pseudomallei; identical to SEQ ID NO: 22852

SEQ ID NO: 22957 - DNA, 822 bp, Burkholderia pseudomallei; identical to SEQ ID NO: 22877

SEQ ID NO: 22958 - DNA, 558 bp, Burkholderia pseudomallei; identical to SEQ ID NO: 22852

SEQ ID NO: 22959 - DNA, 792 bp, Burkholderia pseudomallei; identical to SEQ ID NO: 22871

SEQ ID NO: 22960 - DNA, 558 bp, Burkholderia pseudomallei; identical to SEQ ID NO: 22852

SEQ ID NO: 22961 - DNA, 792 bp, Burkholderia pseudomallei; identical to SEQ ID NO: 22871

SEQ ID NO: 22962 - DNA, 558 bp, Burkholderia pseudomallei; identical to SEQ ID NO: 22852

SEQ ID NO: 22963 - DNA, 792 bp, Burkholderia pseudomallei; identical to SEQ ID NO: 22871

SEQ ID NO: 22964 - DNA, 558 bp, Burkholderia pseudomallei; identical to SEQ ID NO: 22852

SEQ ID NO: 22965 - DNA, 822 bp, Burkholderia pseudomallei; identical to SEQ ID NO: 22877

SEQ ID NO: 22966 - DNA, 558 bp, Burkholderia pseudomallei; identical to SEQ ID NO: 22852

SEQ ID NO: 22967 - DNA, 822 bp, Burkholderia pseudomallei; identical to SEQ ID NO: 22877

SEQ ID NO: 22968 - DNA, 558 bp, Burkholderia pseudomallei; identical to SEQ ID NO: 22852

SEQ ID NO: 22969 - DNA, 822 bp, Burkholderia pseudomallei; identical to SEQ ID NO: 22877

SEQ ID NO: 22970 - DNA, 558 bp, Burkholderia pseudomallei; identical to SEQ ID NO: 22852

SEQ ID NO: 22971 - DNA, 792 bp, Burkholderia pseudomallei; identical to SEQ ID NO: 22871

SEQ ID NO: 22972 - DNA, 558 bp, Burkholderia pseudomallei; identical to SEQ ID NO: 22852

SEQ ID NO: 22973 - DNA, 822 bp, Burkholderia pseudomallei; identical to SEQ ID NO: 22877

SEQ ID NO: 22974 - DNA, 558 bp, Burkholderia pseudomallei; identical to SEQ ID NO: 22852

SEQ ID NO: 22975 - DNA, 792 bp, Burkholderia pseudomallei; identical to SEQ ID NO: 22871

SEQ ID NO: 22976 - DNA, 558 bp, Burkholderia pseudomallei; identical to SEQ ID NO: 22852

SEQ ID NO: 22977 - DNA, 792 bp, Burkholderia pseudomallei; identical to SEQ ID NO: 22871

SEQ ID NO: 22978 - DNA, 558 bp, Burkholderia pseudomallei; identical to SEQ ID NO: 22852

SEQ ID NO: 22979 - DNA, 822 bp, Burkholderia pseudomallei; identical to SEQ ID NO: 22877

SEQ ID NO: 22980 - DNA, 558 bp, Burkholderia pseudomallei; identical to SEQ ID NO: 22852

SEQ ID NO: 22981 - DNA, 822 bp, Burkholderia pseudomallei; identical to SEQ ID NO: 22877

SEQ ID NO: 22982 - DNA, 558 bp, Burkholderia pseudomallei; identical to SEQ ID NO: 22852

SEQ ID NO: 22983 - DNA, 822 bp, Burkholderia pseudomallei; identical to SEQ ID NO: 22877

SEQ ID NO: 22984 - DNA, 558 bp, Burkholderia pseudomallei; identical to SEQ ID NO: 22852

SEQ ID NO: 22985 - DNA, 798 bp, Burkholderia pseudomallei; identical to SEQ ID NO: 22853

SEQ ID NO: 22986 - DNA, 558 bp, Burkholderia pseudomallei
atggcttacagaaacgggacctatgtggcgttccatgccaacggcaccaaccgaccgggcggaaactccgacatcgactactacaacctgttgaaggcgtgggtcggcaaagacgacgaccatttcacgatgaacaacagccatgacaaggcgtctgctgtccgcgattcgagcaagaaggaaaccttgcgggcctcgcttctcgagcgcctgagaaactcaaagaacatggtgctcatcatcggggacacaactcttctggacgacgattgggtcccttttgaaatctcgtcggctgtggacacatacgagattcccatcatcgccgtctacacccaatactcgaccccgatacgaaatcctgcggcgttgcgctcgcggtggcccgacgccctcgcgacccggatcgattcgcaaaaagccaaagtcatacacattccattcaaaaaggcggcgctaaacgacgctatatcgcagttctcccacaacaatatgccgaagggaccgctatccttttatagcgacgaggcctacgaaagcttcggaattgacggataa

SEQ ID NO: 22987 - DNA, 798 bp, Burkholderia pseudomallei; identical to SEQ ID NO: 22853

SEQ ID NO: 22988 - DNA, 558 bp, Burkholderia pseudomallei; identical to SEQ ID NO: 22986

SEQ ID NO: 22989 - DNA, 798 bp, Burkholderia pseudomallei; identical to SEQ ID NO: 22853

SEQ ID NO: 22990 - DNA, 558 bp, Burkholderia pseudomallei; identical to SEQ ID NO: 22852

SEQ ID NO: 22991 - DNA, 822 bp, Burkholderia pseudomallei; identical to SEQ ID NO: 22877

SEQ ID NO: 22992 - DNA, 558 bp, Burkholderia pseudomallei; identical to SEQ ID NO: 22852

SEQ ID NO: 22993 - DNA, 822 bp, Burkholderia pseudomallei; identical to SEQ ID NO: 22877

SEQ ID NO: 22994 - DNA, 558 bp, Burkholderia pseudomallei; identical to SEQ ID NO: 22852

SEQ ID NO: 22995 - DNA, 792 bp, Burkholderia pseudomallei; identical to SEQ ID NO: 22871

SEQ ID NO: 22996 - DNA, 558 bp, Burkholderia pseudomallei; identical to SEQ ID NO: 22852

SEQ ID NO: 22997 - DNA, 822 bp, Burkholderia pseudomallei; identical to SEQ ID NO: 22877

SEQ ID NO: 22998 - DNA, 558 bp, Burkholderia pseudomallei; identical to SEQ ID NO: 22852

SEQ ID NO: 22999 - DNA, 792 bp, Burkholderia pseudomallei; identical to SEQ ID NO: 22871

SEQ ID NO: 23000 - DNA, 558 bp, Burkholderia pseudomallei; identical to SEQ ID NO: 22852

SEQ ID NO: 23001 - DNA, 792 bp, Burkholderia pseudomallei; identical to SEQ ID NO: 22871

SEQ ID NO: 23002 - DNA, 558 bp, Burkholderia pseudomallei; identical to SEQ ID NO: 22852

SEQ ID NO: 23003 - DNA, 822 bp, Burkholderia pseudomallei; identical to SEQ ID NO: 22877

SEQ ID NO: 23004 - DNA, 558 bp, Burkholderia pseudomallei; identical to SEQ ID NO: 22852

SEQ ID NO: 23005 - DNA, 792 bp, Burkholderia pseudomallei; identical to SEQ ID NO: 22871

SEQ ID NO: 23006 - DNA, 558 bp, Burkholderia pseudomallei; identical to SEQ ID NO: 22852

SEQ ID NO: 23007 - DNA, 822 bp, Burkholderia pseudomallei; identical to SEQ ID NO: 22877

SEQ ID NO: 23008 - DNA, 558 bp, Burkholderia pseudomallei; identical to SEQ ID NO: 22852

SEQ ID NO: 23009 - DNA, 792 bp, Burkholderia pseudomallei; identical to SEQ ID NO: 22871

SEQ ID NO: 23010 - DNA, 558 bp, Burkholderia pseudomallei; identical to SEQ ID NO: 22852

SEQ ID NO: 23011 - DNA, 792 bp, Burkholderia pseudomallei; identical to SEQ ID NO: 22871

SEQ ID NO: 23012 - DNA, 558 bp, Burkholderia pseudomallei; identical to SEQ ID NO: 22852

SEQ ID NO: 23013 - DNA, 822 bp, Burkholderia pseudomallei; identical to SEQ ID NO: 22877

SEQ ID NO: 23014 - DNA, 558 bp, Burkholderia pseudomallei; identical to SEQ ID NO: 22852

SEQ ID NO: 23015 - DNA, 792 bp, Burkholderia pseudomallei; identical to SEQ ID NO: 22871

SEQ ID NO: 23016 - DNA, 558 bp, Burkholderia pseudomallei; identical to SEQ ID NO: 22852

SEQ ID NO: 23017 - DNA, 792 bp, Burkholderia pseudomallei; identical to SEQ ID NO: 22871

SEQ ID NO: 23018 - DNA, 558 bp, Burkholderia pseudomallei; identical to SEQ ID NO: 22852

SEQ ID NO: 23019 - DNA, 792 bp, Burkholderia pseudomallei; identical to SEQ ID NO: 22871

SEQ ID NO: 23020 - DNA, 558 bp, Burkholderia pseudomallei; identical to SEQ ID NO: 22852

SEQ ID NO: 23021 - DNA, 792 bp, Burkholderia pseudomallei; identical to SEQ ID NO: 22871

SEQ ID NO: 23022 - DNA, 558 bp, Burkholderia pseudomallei; identical to SEQ ID NO: 22852

SEQ ID NO: 23023 - DNA, 822 bp, Burkholderia pseudomallei; identical to SEQ ID NO: 22877

SEQ ID NO: 23024 - DNA, 558 bp, Burkholderia pseudomallei; identical to SEQ ID NO: 22852

SEQ ID NO: 23025 - DNA, 822 bp, Burkholderia pseudomallei; identical to SEQ ID NO: 22877

SEQ ID NO: 23026 - DNA, 558 bp, Burkholderia pseudomallei; identical to SEQ ID NO: 22852

SEQ ID NO: 23027 - DNA, 792 bp, Burkholderia pseudomallei; identical to SEQ ID NO: 22871

SEQ ID NO: 23028 - DNA, 558 bp, Burkholderia pseudomallei; identical to SEQ ID NO: 22852

SEQ ID NO: 23029 - DNA, 822 bp, Burkholderia pseudomallei; identical to SEQ ID NO: 22877

SEQ ID NO: 23030 - DNA, 558 bp, Burkholderia pseudomallei; identical to SEQ ID NO: 22852

SEQ ID NO: 23031 - DNA, 822 bp, Burkholderia pseudomallei; identical to SEQ ID NO: 22877

SEQ ID NO: 23032 - DNA, 558 bp, Burkholderia pseudomallei; identical to SEQ ID NO: 22852

SEQ ID NO: 23033 - DNA, 822 bp, Burkholderia pseudomallei; identical to SEQ ID NO: 22877

SEQ ID NO: 23034 - DNA, 558 bp, Burkholderia pseudomallei; identical to SEQ ID NO: 22852

SEQ ID NO: 23035 - DNA, 822 bp, Burkholderia pseudomallei; identical to SEQ ID NO: 22877

SEQ ID NO: 23036 - DNA, 558 bp, Burkholderia pseudomallei; identical to SEQ ID NO: 22852

SEQ ID NO: 23037 - DNA, 792 bp, Burkholderia pseudomallei; identical to SEQ ID NO: 22871

SEQ ID NO: 23038 - DNA, 558 bp, Burkholderia pseudomallei; identical to SEQ ID NO: 22852

SEQ ID NO: 23039 - DNA, 792 bp, Burkholderia pseudomallei; identical to SEQ ID NO: 22871

SEQ ID NO: 23040 - DNA, 558 bp, Burkholderia pseudomallei; identical to SEQ ID NO: 22852

SEQ ID NO: 23041 - DNA, 822 bp, Burkholderia pseudomallei; identical to SEQ ID NO: 22877

SEQ ID NO: 23042 - DNA, 558 bp, Burkholderia pseudomallei; identical to SEQ ID NO: 22852

SEQ ID NO: 23043 - DNA, 792 bp, Burkholderia pseudomallei; identical to SEQ ID NO: 22871

SEQ ID NO: 23044 - DNA, 558 bp, Burkholderia pseudomallei; identical to SEQ ID NO: 22852

SEQ ID NO: 23045 - DNA, 792 bp, Burkholderia pseudomallei; identical to SEQ ID NO: 22871

SEQ ID NO: 23046 - DNA, 558 bp, Burkholderia pseudomallei; identical to SEQ ID NO: 22852

SEQ ID NO: 23047 - DNA, 822 bp, Burkholderia pseudomallei; identical to SEQ ID NO: 22877

SEQ ID NO: 23048 - DNA, 558 bp, Burkholderia pseudomallei; identical to SEQ ID NO: 22852

SEQ ID NO: 23049 - DNA, 822 bp, Burkholderia pseudomallei; identical to SEQ ID NO: 22877

SEQ ID NO: 23050 - DNA, 558 bp, Burkholderia pseudomallei; identical to SEQ ID NO: 22852

SEQ ID NO: 23051 - DNA, 792 bp, Burkholderia pseudomallei; identical to SEQ ID NO: 22871

SEQ ID NO: 23052 - DNA, 558 bp, Burkholderia pseudomallei; identical to SEQ ID NO: 22852

SEQ ID NO: 23053 - DNA, 822 bp, Burkholderia pseudomallei; identical to SEQ ID NO: 22877

SEQ ID NO: 23054 - DNA, 558 bp, Burkholderia pseudomallei; identical to SEQ ID NO: 22852

SEQ ID NO: 23055 - DNA, 822 bp, Burkholderia pseudomallei; identical to SEQ ID NO: 22877

SEQ ID NO: 23056 - DNA, 558 bp, Burkholderia pseudomallei; identical to SEQ ID NO: 22852

SEQ ID NO: 23057 - DNA, 822 bp, Burkholderia pseudomallei; identical to SEQ ID NO: 22877

SEQ ID NO: 23058 - DNA, 558 bp, Burkholderia pseudomallei; identical to SEQ ID NO: 22852

SEQ ID NO: 23059 - DNA, 792 bp, Burkholderia pseudomallei; identical to SEQ ID NO: 22871

SEQ ID NO: 23060 - DNA, 558 bp, Burkholderia pseudomallei; identical to SEQ ID NO: 22852

SEQ ID NO: 23061 - DNA, 822 bp, Burkholderia pseudomallei; identical to SEQ ID NO: 22877

SEQ ID NO: 23062 - DNA, 558 bp, Burkholderia pseudomallei; identical to SEQ ID NO: 22852

SEQ ID NO: 23063 - DNA, 792 bp, Burkholderia pseudomallei; identical to SEQ ID NO: 22871

SEQ ID NO: 23064 - DNA, 558 bp, Burkholderia pseudomallei; identical to SEQ ID NO: 22852

SEQ ID NO: 23065 - DNA, 792 bp, Burkholderia pseudomallei; identical to SEQ ID NO: 22871

SEQ ID NO: 23066 - DNA, 558 bp, Burkholderia pseudomallei; identical to SEQ ID NO: 22852

SEQ ID NO: 23067 - DNA, 822 bp, Burkholderia pseudomallei; identical to SEQ ID NO: 22877

SEQ ID NO: 23068 - DNA, 558 bp, Burkholderia pseudomallei; identical to SEQ ID NO: 22852

SEQ ID NO: 23069 - DNA, 822 bp, Burkholderia pseudomallei; identical to SEQ ID NO: 22877

SEQ ID NO: 23070 - DNA, 558 bp, Burkholderia pseudomallei; identical to SEQ ID NO: 22852

SEQ ID NO: 23071 - DNA, 822 bp, Burkholderia pseudomallei; identical to SEQ ID NO: 22877

SEQ ID NO: 23072 - DNA, 558 bp, Burkholderia pseudomallei; identical to SEQ ID NO: 22852

SEQ ID NO: 23073 - DNA, 822 bp, Burkholderia pseudomallei; identical to SEQ ID NO: 22877

SEQ ID NO: 23074 - DNA, 558 bp, Burkholderia pseudomallei; identical to SEQ ID NO: 22852

SEQ ID NO: 23075 - DNA, 792 bp, Burkholderia pseudomallei; identical to SEQ ID NO: 22871

SEQ ID NO: 23076 - DNA, 558 bp, Burkholderia pseudomallei; identical to SEQ ID NO: 22852

SEQ ID NO: 23077 - DNA, 822 bp, Burkholderia pseudomallei; identical to SEQ ID NO: 22877

SEQ ID NO: 23078 - DNA, 558 bp, Burkholderia pseudomallei; identical to SEQ ID NO: 22852

SEQ ID NO: 23079 - DNA, 822 bp, Burkholderia pseudomallei; identical to SEQ ID NO: 22877

SEQ ID NO: 23080 - DNA, 558 bp, Burkholderia pseudomallei; identical to SEQ ID NO: 22852

SEQ ID NO: 23081 - DNA, 792 bp, Burkholderia pseudomallei; identical to SEQ ID NO: 22871

SEQ ID NO: 23082 - DNA, 558 bp, Burkholderia pseudomallei; identical to SEQ ID NO: 22852

SEQ ID NO: 23083 - DNA, 792 bp, Burkholderia pseudomallei; identical to SEQ ID NO: 22871

SEQ ID NO: 23084 - DNA, 558 bp, Burkholderia pseudomallei; identical to SEQ ID NO: 22852

SEQ ID NO: 23085 - DNA, 750 bp, Salmonella enterica
  subsp. enterica serovar Oranienburg str. 0250
ttgattttcgtagacattccaacagaaaacaaactaacacttggcattatatttttaattattttattcttactgtatttcggcatatggtttaaatcaaataatctttcggaagttaatttagatgttgagggcagcattgttactgtaaaagcaggtgatttattcagacaagatggattcaaggtcattgcttttaatgaatattttgacacgcaagttgatgatgttgtcatttctcataattcacttaatggattatatattgataactatttagcgggatccgtatctgatttagaccatcgtatttcaaatcatcattttgaagaagatgaactgcttgaggttaaccataaaagaaaagtgggtaaaacacaaaaatattcgctaggaactatcttcgttaatagtgattatctattaactgcgttttcaaaatttgacgataaaaatagagcttttcttacaatgccggattatctagcatttttaataaatttttgggacaaagttaatcgtatatatgcacaaaaaagtgtctctgttcctatctttggatctggaatcactagaataaaggagcataaaaatattagcgatgaggatttacttaaaataatgttgtggacttttagaataagtgaaatgaggtttaaatttccggcaaagcttactatcgttattcacaaagataagatagataaaataaacttattggatataaaatcagcgagaaatggtctttag

SEQ ID NO: 23086 - DNA, 888 bp, Salmonella enterica
  subsp. enterica serovar Oranienburg str. 0250
ttggtgaatgttttggacaacaatatatataatatccttttcttcatctttctttcaatagcaattccattccttttattcctcgcatggaaacagcacctaaaaaccaaagagattcgttcatatctattgaaagagggatataatattattttcagtggagaaggtaactcatacctcgcgtttaatactagtaatgcgacatttcgtgcaggtaatttaacttccaatgattattttcaagcatcaatttcttatatccacgattatagatgggagtggaaggaggttgacgcaaggaaaataaacaatatatttatcatttacatttcggatattgatttcccttcccaaaaactattttatcgcaataataaaattttagcagaaatagactgggcaaaattacaagcaatttttcatcaaccatatgaaatacagaatgacgtcatgcaagataacaataatacgcactatgattttttcatatcgcatgcaaatgaggataaagatacttttgtcagaccactggtagacgagttaaatcgacttggtgtaattatttggtatgatgaacagacacttgaagtcggcgatagcttaaggagaaatattgatttaggcctaagaaaagcaaattatggcatagtcatactttctcataactttctaaacaaaaaatggacacaatacgaattagatagtttaattaatcgtgcagtgtatgatgataataagattatattgccaatctggcataatatcaatgctcaagaggtatctaaatacagccattatttggcggataaaatggccctgcaaacttctttatatagcgttaaggaaatagcaagagagttggctgagatagcatacaggagaagataa

SEQ ID NO: 23087 - DNA, 837 bp, Salmonella enterica
  subsp. enterica serovar Anatum str. CDC 06-0532
atggcaaaagttaactttttcgataagcgtatacttaaaaaattttcagactacacatcaactataagtaccatattttcactttttttgatttttgtagacattccaacagaaaacaaactaacacttggcattatatttttaattattttgttcttgttgtatttcggcatatggtttaaatcaaataatctttcggaagttaatttagatgttgagggcagtattgttactgtaaaagcaggtgatttattcagacaagatggattcaaggtcattgcttttaatgaatattttgacacgcaagttgatgatgttgtcatttctcataactcacttaatggattatatattgataactatttagcagggtccgtatctgatttgaatcatcgtatttctaatcatcagtttgaagaagatgaacggcttgagatcaaccataaaagaaaagagggtaaaacacaaaaatattcgctaggaactatctttgttaataatgattatctattaactgcattttcaaaatttgacgataaaaatagagcttttcttacaatgccggattacttagcatttttaataaatttttgggacaaagttaatcgtatatatgcacaaaaaagtgtctctgttcctatctttggctctggaatcaccagaataaaggaacataaaaatattagcgatgaggatttacttaaaataatgttatggacttttagaataagtgaaatgagatttaaatttccggcaaaacttactatcgttatccacaaagataagatagataaaataaacttattggatataaaatcagcgagaaatggtctttag

SEQ ID NO: 23088 - DNA, 912 bp, Salmonella enterica
  subsp. enterica serovar Anatum str. CDC 06-0532
atgaaatatgaatttttcatatgcttggtgaatgttttggacaacaatatatataatatccttttcttcatctttctttcaatagtaattccatcccttttattcctcgcatggaaacagcaccaaaaaaccaaagagattcgttcatatctattgaaagagggatataatattattttcaacggagaaggtaactcatacctcgcgtttaatattagtaatgcgacatttcgtgcaggtaatttaatttccaataattattttcaagcatcaatttcttatatccacgattatagatgggagtggaaggaggttgacgcaaagaaaataaaaaatatatttattatttacatttcggatattgatttcccttctcaaaaactattttatcacaataataaatctttagctgaaatagactgggcaaaattacaagctatttttcatcaaccatatgaaataaagaatgacgtcatgctagataacaatgatacgcactatgattttttcatatctcatgcaaatgaagataaagatacttttgtcagaccattggtagacgagttaaatcgacttggtataattatttggtatgacgaacagacacttgaagtcggcgatagcttaagaagaaatattgatttaggcctaagaaaagcaaattatggcatagtcatactttctcatgactttctaaacaagaaatggacacagtacgaattagatagtttaattaatcgtgcagtgtatgatgataataagattatattgccaatctggcataatatcaatgctcaagaggtatctaaatacagccattatttggcggataaaatggcactacaaacttctttatatagtgttaaggaaatagcaagagagttggctgagatagcatacaggagaagataa

SEQ ID NO: 23089 - DNA, 837 bp, Salmonella enterica; identical to SEQ ID NO: 23087
  subsp. enterica serovar Anatum str. USDA-ARS-USMARC-1175

SEQ ID NO: 23090 - DNA, 912 bp, Salmonella enterica
  subsp. enterica serovar Anatum str. USDA-ARS-USMARC-1175
atgaaatatgaatttttcatatgcttggtgaatgttttggacaacaatatatataatatccttttcttcatctttctttcaatagtaattccatcccttttattcctcgcatggaaacagcaccaaaaaaccaaagagattcgttcatatctattgaaagagggatataatattattttcaacggagaaggtaactcatacctcgcgtttaatattagtaatgcgacatttcgtgcaggtaatttaatttccaataattattttcaagcatcaatttcttatatccacgattatagatgggagtggaaggaggttgacgcaaagaaaataaacaatatatttattatttacatttcggatattgatttcccttctcaaaaactattttatcacaataataaatctttagctgaaatagactgggcaaaattacaagctatttttcatcaaccatatgaaataaagaatgacgtcatgctagataacaatgatacgcactatgattttttcatatctcatgcaaatgaagataaagatacttttgtcagaccattggtagacgagttaaatcgacttggtataattatttggtatgacgaacagacacttgaagtcggcgatagcttaagaagaaatattgatttaggcctaagaaaagcaaattatggcatagtcatactttctcatgactttctaaacaagaaatggacacagtacgaattagatagtttaattaatcgtgcagtgtatgatgataataagattatattgccaatctggcataatatcaatgctcaagaggtatctaaatacagccattatttggcggataaaatggcactacaaacttctttatatagtgttaaggaaatagcaagagagttggctgagatagcatacaggagaagataa

SEQ ID NO: 23091 - DNA, 705 bp, Mycobacterium abscessus
atggctttggcggcactcgggctgccggtcgcgatctggagcacctggccacgcccaattgaagaaagctacagcacacctaacactcgtatctgtgtcgttaagggcgacatctttgatttcggaaccgagcacgtcgtcatccccacctgcgacactttcgatacggcgcctccacacatcatcgcgaggacgagcctacaagcccaggctctgtcgcgcatctatgacaacgacctcgcgaaactcgatgaggaccttgatgccgcactcgcagataccgttccggtgggaactatcgcgaaagcgggtaagacctcccgctacgagatggggacggtagctacgatcaaccacacccatcggaaactgtactttctggccgttaccgtcatggatacaaacaacaacgcgcaagggacgccggacggtctttggataagcctcaaccggctgtgggcggagatcggacgctcatcgaacgggagagccatctgcatgcccgttatcggcggcggtatgtcgcgcatgtcgagcatcgttccgactcaggattcgttgcgcttcactatcttgtcgttcatgttcgcttccaggcggcaacgagtgtgcgaggagttacgtatcgttcttcggccagaagactacgacaagttggatcgcctcgaactgcaagcattcttgacatcgcttaagccgtcatga

SEQ ID NO: 23092 - DNA, 513 bp, Mycobacterium abscessus
ttgagctaccggaacaagacctacgtagcctttgccagtgaggacatcaactactacaggctgatggaggcgtggcggggcaatagacacatcgacttcaacttcttcgatgcccacgatctatacaaggcgcgtgacacaagccaaccggagacgatcaaacgcaacttacgtgagcgcatgaagaacgccaaacagatcgtgttgttaggaagcgctgctggtcgacggaaaggaggcgacggcagatcgtttctggctcacgaagtgaaggtggccatcgagtttcgcctgccgatcgtcatagcgaacatcgacggcaaacgaaccattgaccatacggtcatcccgcaaccgctgctcgatgccgattattacacgctttctgtgtcgtttcaggccgcaatcattaagtttgcgttggacagctacgtacccgccttcatgggctgtaacggcaagactggtcctcactactacaaatcagatatttatcaaggcctcagcctgtga

SEQ ID NO: 23093 - DNA, 840 bp, Gordonia aichiensis NBRC 108223
gtgcgatacaaacggtcggtgagacggtacgccgaaggactggcccggcgattcctcgaagcattgggcgcgttggctgttctggccggggcggtcgctcttttcgctccagatctgatcaagggccaatggtggcttcttatcgttgccggagcgatcgccgccgcgtgggcgctgatcttcctgcggcagaaggaccccgagcagcggtttcctgcagagaacatcgtcatcaggcttatcacgggcgacttgttcgaccagaaggagtcatcgctgatcgggatgaccacaactttcgacaccgaaccgggcatcatcgatagggggagtgtccagggcaacatgcttcgggtgatctacggcgattcgcaatcgcgactcgatgccgagctagcatctgcgctggcagggacagcgaccgttggaacgattacgaagccgggcaagaaggacgtctatccggtcggcaccgtcgcggtccttcggggccagggtacatcgcactactactgtgttgcctacacaaccatggacgaacacaaccgagccaaggggacgatccggggaattctggacagcctcgacagcgtgtgggacgctgccgaccgctgcggaaacggcgaaccgatctgcgtgccgctgctcggtcaaggccagtcccgaatacccgaactcacggcagaagttgctgtcagactcattgccttctctttcctgcttcgcactcgtcggtcgcgattctccaaagagttgcgtatcgtcgtacatcccaatgagatcggcaagatcgaccgtaccgagtttcaggcgttcctacgctcgttggtcgccggatga

SEQ ID NO: 23094 - DNA, 516 bp, Gordonia aichiensis NBRC 108223
atgagctaccgcaacaagacttatgtggccttcgcaagtgaagacatccactattaccgattgatgacggcttggagggaaaacaagtcaattgatttcgacttcgtcaatgcacacgacatctacactgcgcgtgacaccagcacgcctgacaccatcaagcgccgcctgcgtgagcggttgaataacacaaaacaagtcgtgctactcggaagctcagacgcccggcgtaaaggcgggaacgggacgtcatttcttgcctatgaagtgggagcgatcctcgctctgaacctgcccgtggtcgttgcgaacctgaacggatcccgagtaggtgtcagcggcaacattcctgccccgttctccgcgaacgactacttcacgatgtcggtctcgttcggccccacaatcattaaatatgcactggaccactatgttcccgacttcgccagttcggacaagaccggctcctatcactacaaagagtcggtatacgagagcctgggattgaataactag

SEQ ID NO: 23095 - DNA, 777 bp, Paenarthrobacter aurescens TC1
ttgggcttctttgccgttcccatcggcatcctggcgccccttgcccctcaatggtgggacggtaaatggtggctggttctcggcgtccttgccgtcgccgttggatggacagctcttggattgcgccgaaaggagcccaaccagcgctaccgcgaaaacgtaacgattcggctggtcgtcggtgacctcttcatccaggatgcgagcccggtcattggaatgaccgcaacgttcgacaccagagtccctgaggtcatcgcccctaccagcgtccaagggcatttcctcaaaaggatctacgacgggtcccaagaaaggcttgacgccgatcttgaccacgcactggccaacgtcaaacccgaaggaatgatcgcgaaaccaggcaagcagacggtctaccctctggggacggtagcgactctaagtcccccgggccgcctccgctactactgcgctgcgtacacccgaatggacgaaaagaacagggccagcgggacgatccgcagcgtcttggacagtctcgacaacagctgggaggaagccgatgttcacggaaacggcgatcccatctgtgtcccggtcatcgggcaaggacagtcccgcatacccgaactcactcccgaaatctcgatccggctcattgcattctcgttcctgctgcggagtaagaaatccaggtttgccagtgaactacgcatcgtcgtccatccctcggaacgagacaagatcaatttccccgagttccaagccttcctcacatccctggcggcctcatga

SEQ ID NO: 23096 - DNA, 510 bp, Paenarthrobacter aurescens TC1
atgagctaccgaaacaagacctacgtggcattcgccagcgaagacatcaagtcctaccggctcatggaagcttggcgcgaaaacaagaacatcgcgttcgatttctacgacgcccacgacctgttcatttcccgcgatacaagccggcccgagacgatcaaaaagaatctccgggaacggatgaagaacgcaaagcagatcgttctcctcggcagcccggatgccaagaggaagggtggggacggtgtttcattcctggcctacgagatccaaatcgcactggagttcaaccttcccgtcgtcgtcgcccaccttgacggttcccgcggcggaaactccgccaattaccccaagcccctgtcggacgctaaccactacaccatgtcggtctcgttccagccgaccatcatcaaacacgcactggagaactacgccggtagcttcgcaaccagcaaaaccaccggtgaacgcatctatctggctagcgtgtattccggactcggcctctaa

SEQ ID NO: 23097 - DNA, 858 bp, Rhodococcus equi NBRC 101255 = C 7
gtgagctccgctctccgcagcgatctgttcagcaaacggttcctgctctcggcagccacatggttcttcgcgtgggctggcgtcatcgcggctcttggccaactactggactggactttcaaactcgctaagtacgggtggtggagccacgcggttctgggcgtggcactcgtcggaatcccactttcgatatggcgatcatggccccgccccgtcgaggagacctacgagtcccccagaactcggatccgaatcgtcaagggtgacctcttcgatgaggaagaacacctggtgatcggcacttgcgacaccttcgatacagcgattccgaatattatcgagcggaccagtcttcagggcatcgcgttggaccgcctatacggtaacgatgtggctaggttggacgccgatctcgacgctgcactagtcaacacggagtttcgcgaaaaagtctgcaaggaaggaaagacggttcgctacccgttgggaaccgtcgcggttgttgaacggccccctagaagacttttcttcgtcggttacacgaagatggacgagaacaacaatgctcagggaacccctgatgggctgtgggtcagcctcaactcgctgtggaacgccatctcgcagcacgggaacggacgtacggtctgcatgccagttatcggtggtggcatgtcacgcatgtccaatatcgtcccgacgcaagattcgatccgattcacaatcttgtcgttcatgttcgcatcgaggaccaacaagatctgcgacgagctgcgcatcgttcttcgaccacaggactacgaccggctggatcgacttgagctgcaagcctttctgacatcactcaagccatcatga

SEQ ID NO: 23098 - DNA, 510 bp, Rhodococcus equi NBRC 101255 = C 7
atgagctacagaaacaagacctacgttgccttcgccagcgaagacatccattgctacaggctgatggaagcctggcgggaaaacgacaagatcgacttcgacttctacaatgcccacacactcttcatttctcgcgatgagagtaagccggagacgatcaaaaggaatctgcgggagcgtatgaagaacgccaagcaggtcgttctgcttggcagcgccacggggcggcggaagggaagcgacggtaagtcgttcctcgcccatgagatcaaggtggcgatggagttcaaccttccgatcgtcatcgcgaacctcgacggtggtcgaatcgtcaacagggcagtgattcctcagccattgctagatgacgactactacacgctgtcagcgtcgtttcaaccgaaaatcatcgacttcgcgctcaagaactacgccgttgaatacgcgaccgcggacaaggccggcccccacgagtacaacagccaggtctacacaggcctcgggctgtga

SEQ ID NO: 23099 - DNA, 693 bp, Legionella geestiana
gtgttgtatgtcgtttataaggtaactgaaccactaaaaattttgattaatcttcgaggagctggtaccgaacttaatatctacttcggtaatattttttcgaaaaatgaaaagagtcatcttgctataccggttaacgaattttttgatacacagttagctggagctaaaggaccgtctggagacatcgtggcgccgaactcgattcacggccagtttataaccaaagtttataattctgactcagttaaactggacgatgatcttaatgtagctctgagcggaattgtccctaacgatttacctcgttaccttggtaaaacttcgcagtacccaataggtacaactgcagttattggaagcggtaaatatagatatttgctatttgtgttgtcatgtactgacccgattactgcaaaagcaaaatcagacgtgcccaccatgtggaatgctctcgaaggactatggacgtctgttcgcaattattcgaacggattgccagttgctctgccactggttggaagcggtcaatctcatgttggattggattcaattaatcttctcagacttattgtgttgagcattatcaaatcatcggagggccaaagaatcactagtcaaattaacatagtgcttcatgaaagtgtcatgcgtgatgtggcactgcgcaagatcaaagaggagtttaattga

SEQ ID NO: 23100 - DNA, 558 bp, Legionella geestiana
atggcatatagaaatggaacttatgtggtttttcatgcgcaaaatacttctgatccaactaaaagtgatatgaagtattatcgtttgcttacagcatggcatgaacacagtgatatagaattcaaaatgattaatagtcatgacaaaacctccgctgttcgtgacagtagcaagcgcgctacattacagagtagaattcgagagagacttaataattcaagaaacatgctgcttattattggtagcaccactcacttggacgacgataatgttcctttcgaaatatcatatgctgtagataaatgtggtatcccaataattgcggcatacacaggctatgatagtatttgcacgcctagcagactgagatatttatggccaaatgcattagcggcaagaataaacaacaatactgccaaggttatacatgtcccatttagaaaggagcctatcaaagccgcattacagaaatatgactatcaagatccaccaaagggaagcttggtacattatacccaagaaactttcagaaaatgggggctacttcagccgagctag

SEQ ID NO: 23101 - DNA, 894 bp, Acholeplasma brassicae
atgacttatctaacagaagtaaaattaaatcttaaacctatttttcacctatttttgaagattagcggtatagtattttcagtttttgcaattttggtgacttttatatctttagaagatattggtctaactaatatttggcataaaatcggaattattatatcaattttagtactttcgctaataatgagtatgattttaattttgtttttattcaagaaaaatcgaatatggtctaatgggaaaaacaaagtatttgcaagttatggagatctaataaaatatgcctttaaagtaaaagagaaaaacaagaggataattgtaatacctgtaaatgacacatttgaaacaattgttgatgttggaggcgaaaaagtagtaaatcctcttgtttcacccaattcattacacggaatatggatagaagaattctgtaaaaaatatgaaattactgtcaatgaactaaattcaaggataagtgcgaatttaaaattacaaaatcgaaaaccagttcaaatttacagtgaagatgaaaaacgacgcggaaataaggaaaaatatgatttaggaacagttgcgatacttaatgcaggtaatactatattttatttagttgcaatttcagaatttgatgagaaaaataatgcacagtctaataaaatatatattagaaaagctgtcgaaacacttattgagttttatgatgaaaatggacaagggtttcctctgtatatgccacttatggggacgggaacttctagagcaaaacttactcataaacaatctttaaagttgataaaatctggtatttttgctttcgaagaaaagataaatggccaaataaatattatcgtttttcataaagatagagataaaatttcaatatttgattaa

SEQ ID NO: 23102 - DNA, 489 bp, Acholeplasma brassicae
atggcttatagaaacaaaacatatgtagcttttgatggtgataacgacataacctattattatttgatgaaggcttggaaggcgaatgataataatgattttgattttcacaatgcgcatgacttaaatacggcaagagattcctcacaagaagaatcaataaaatctcagctaagagtaaggatgcaaaattctaaaatgtttgtattgctagttggagataaaacaaaatatttgactaaattcgttaagtgggaagttgagagtgcaattagaagagaaatacctattgctgttgtttatttaaaagattattcgaggtttgatgaaaaaatgtgccctacttggctaaataatgttctaagtattcacattccatttaaaaaaacaatacttcaatatgttattgacaattggccaactgtatccaagcaaaaagaagataaaggtcattattggtacagcgatgatttcgtaaacagtttatag

SEQ ID NO: 23103 - DNA, 837 bp, Pluralibacter gergoviae; identical to SEQ ID NO: 22741

SEQ ID NO: 23104 - DNA, 510 bp, Pluralibacter gergoviae
atgagctatcgtaataaaacatatgtagcgtttgctagtgaaaatataagttcttatcgtctaatggaggcgtggaaagcaaatgagaacattgacttcaacttttttgatgcacatgacctttttatttcaagagatacgagcaaaccagaaacgataaagaaaaatctccgtgagcgtatgaaaaacgctaaacaggttgtacttcttgggagcagcgatgcgaagagaaaaggtggtgatggtgactcattccttgcgcatgaaatagatctcattattgagtttaatctccctgtggtcatcgcaaatctggatggtgataggaaggtggatcggaattttattcctaaaccattactggatgcagaccactatactgtctctgtttcgttccagccaaaaattatcaaatatgctttagataactattgtgcgacttattcttcaagcacaaataaagggcctcatcaatatccagatagcgtctatagtggtttggatatttaa

SEQ ID NO: 23105 - DNA, 831 bp, Sulfurospirillum multivorans DSM 12446
gtgaaggttaaaatatccgatagaatggttttcaaagactttttagagaaggtttcaataatatctgcatttttcacaataattttcatttttgttgatataccaaaacaatataaaacgtgtacaggactggtagtcgcatttatttttgtttgtttgtatctaggcttgtggtggtgggacaacaaactaaaaaatgtaaatcttctcatagaaggaagtaaagttgtaataaaaacaggagatatttttaaacagtcaggacttaaagctattgcttttaatgaatattttgacactcaagtagatgacaaaattatttcaaaaaaatctctaaacggcattttcatagataagtattcaaataagtcattggatgaattaaaccatttaatagatagctaccaatttgatgaagaaaacttaattgatagtaacgtatctagattgggaaagtcaaagaaatacaaacttggaacagtttgtattttggatgattatcttttggttgctttttcaaaatttgatagcaaaaatcaagcaaatcttactatgccagaatatttaggttttttgataaacttctgggataatgtaaatagagtgtattcacagaaggatgtgtccgtacctatatttggatcaggaataacccgaataaaagaacataaaaatattagtgatgaaaatctcttgaaaatcatgctttggacattcagaataagtgaaatgcgattcaaatacccggcaaagttaagcatcataatacacgaagataaaataaactctataaatctattagatataaaagcagcagagaatgggctttga

SEQ ID NO: 23106 - DNA, 552 bp, Sulfurospirillum multivorans DSM 12446
atggcaaatagaaccggaacgtacatagcatttgatggtcttggaaagactaatcctacagaatctgatttcaagtattatgctacgatacaggcttggagtgcaaataaaaatatcgattttaagtttgttaatagtcatgataaaactgcagcggttagagatgcaagccttcgtagtacactagaaagcaggataagggaacgtttagctgcatccaaaaattgtcttgtcatcttgagtgctgacacgaggaaatctggcagcatgttatcttatgagattgaacaagcggttgataaatacaaaatcccactaatatgtgtatatactgactatgaaacaatttacaaaccaaaagagctttcaaatagatggcctgatgctttaacaaaaagaattaacgatgggactgctgatgctattcatatagctttcaaaaaagaaattttattgactgcaatgagtcaattttctgtaaataatgactctcctggtagttcattagttatatatacaaaagaaacacaagaacgattgaattctaagtga

SEQ ID NO: 23107 - DNA, 846 bp, Streptomyces regalis
atgctgttcggtacccggctcggtctgtccacggcgggccgagcctgcgccgtgcagttcggcttgttgtcgggtgccgctcagctgtatctcaccttctggccggacagttctctgcctcgcggtgcgacctttcttgccattgcctgtctggccttggtcggcggcactctgcggtcctggccccgggatcgcatcagccacgagttcgtccgtccgggtttccgggtcaccattgcggtgggcgacttgttcgaccagccgtgccatctcgtcatcggcagcaacgacgtattcgacacggacacccaggacgatctactgatcgtgcgccgcagtgtgcagggccagtttctgcagagggtctacgcgggcgacgtcgcccggctggacgatgaactcaatactgctctgttcggcacacagccgactcgggtggaggagcggacatcgaaacgtgctggaaagctcgttcgctaccccgtcggcacggtcgccttgcttggctcgccaggacagcggtacttcctcaccgcctacggcgccatgtgcaacgacctgacggtcagttcggggccggaccagctctggcttagtctgggagaactgtggcgggcggtgcatctgcacgcacgacgggaggccgtggccatgccggtcatcggatccgacctggcccggatcgacagcatggaccacgctggcctggtcaagctgatcctgctgtcattcgtcaccaggtcacggcagtcggtcgtgtgcaaggagctgacgatcgtggtccacccgggtgactatgagcgcgtcgacatgctggagctggccgcgttcctgcggacgctgtga

SEQ ID NO: 23108 - DNA, 1275 bp, Streptomyces regalis
gtgaggcagcaaccggatcggtcggaccggcaggcgccgtatttctttctgagctacgcgcacacgccgcggttcgacgcatccgcggaccccgaccactgggtccaccagttgttccgggacctgtgcgactacatcatggcgctgacggaccatccgccgggccagccgatcggcttcatggcaagagagatgcgtatcggcgaacgttggagcgatcgcttgtcggaggcgctcgcgacctgccgggtgttcgtcccgctctactcgccgcgctatttcgtcagcgacgtgtgcggcaaggaatggtgggccttctcccagcgccaagaacaccggaggtctaggggcgccactgccgacccggcgatcgtgcccgcgctctgggtaccggtgcagtccgaacagcttcccgacgcggcggaagccctgcaatacgatcacgagaagttcggccgggactacgccaccgaaggcctgtacggcctgatgaaactgcggatgttccgcgacgagtacgagcgtgcggtctaccagctggccagggcgatcgtcgtcacggccgagcagaatccgatccccaccggggaaccactcgacttcgccgatctgcccaatgccttcgggcgacggtccggctcgcggcgcctgcgcatcgtcgtggcggcgcccagcatgcaggagctgccgcggggacgctcgccccactgctacgggccctccgccgtcgactggaatccgtaccgggtcagcgatgcggacgccacccgtccgctcgccgagttcgccgccgaggaggtgcgccgactcgactaccggacggcgatccagccgctcagcgaggcggccgacggtctgctcaccgaccggccgccggacgggccgacgctggtgctgctcgacaggtgggctctggcagaccccgggcagcgagaactgctggcccgggtggacctggcagcgcaaccgtgggtcagtgtgatcgtgccgtggaaccgatccgacccggacaacacatccgcggcgtacgagttgcagaccgtcctggagaagaccctcccgcgcaccatccaacgtggccgaagcgtctcccgggcggccacgggcggggtgccgtcgctggaggcgttcgccgccatcctgccgaccgtgatccagtgggcggcggcgcagttcatccggtacgccccggtccatccgcccaagggcccagcgatcgcccggccccggctgagggggcccctggaggaggcgaccgatgaccgccgggcgtga

SEQ ID NO: 23109 - DNA, 828 bp, Streptococcus constellatus subsp. constellatus SK53
ttgaaagtaaatatatttaatagggatattttaaaacaattttctaaagtatgtgctacgcttactgcaatattgtcaggagcactaatttttcttgatattcctgataactgtcgactttatgcaggcgttgcttatatttcattgcttttagctatttatatttttatatggataagagcaaatagaatgaaacaaatagttattaaaataggtctcacgacggttcttgtaaagtctggtgatatttttgatgaagaaggacttaaagcggtggctttcaatgaatattttgatacaatggtcgatgataaagtaattgccagacaatcattaaatggccagtttattatcaactatattgacgatgttgagaaattgaactctgatattaaaaacgatgatgatttaaaaaataatattgtcgaagagggagtaagacggcagcatggtaaaacgacaaaatatgggcttggaagttcaattttgatagacgatgagtatattttgactgcttttagccgatttaataaaaataatcaagctgaactaactattcaagaatatgtcaattttcttttaacattttggaacgaaattaataggttatatgctcaaagatcggttatagttccagtatttggttctggaataacgaggtttaaaaatggttttgaggatattgatattaatgaattgttacggattatgatttggacttttaaaattagtaaaattaaatttgcatatcctgcaaaattaactattatcatacataatgatttactcagccaagtaaatttatatgaattaagggagaatgaataa

SEQ ID NO: 23110 - DNA, 501 bp, Streptococcus constellatus subsp. constellatus SK53
atggcctatcgtaataaaacttatgttgcttttgatggtgataatgatatgcgttattatcagttaatgaaggcatggaagcaaaatgacaacacattatttaattttcatgatgctcatgatattaacagcgctagagatacaagccaggaagagtcaattaaaagacagcttcgtgaaagaatggctaacagtaaggcctttgttttattaattggcgaacatactaaatacttaacaaaattcgtaaaatgggaaattggacttgctattaagaaagggttgccaattatctgtgttaatctaaataaaaacaaaaggaaagatgaattgtgtccgtcaagtttgaatggacagttggcaatattcattccttttggaagcaaaatgatgcaatatgctcttgagaattggccaaaatcgcatgagcaataccttaaaaatggagaaataagttcttactgttataaagatgcggtatataaacgattgggcctgtaa

SEQ ID NO: 23111 - DNA, 828 bp, Streptococcus constellatus subsp. constellatus SK53; identical to SEQ ID NO: 23109

SEQ ID NO: 23112 - DNA, 501 bp, Streptococcus constellatus subsp. constellatus SK53; identical to SEQ ID NO: 23110

SEQ ID NO: 23113 - DNA, 840 bp, Lactobacillus paralimentarius DSM 19674
atgtttgatcgcaatctcttattaaaagctgctggtaccgttgggactttgtttggagttgtaggaacggctgtcggcttttttgattttagtgtaaagacaagatatcatatttttattttattttttattatttgttttctgttttatattcttgagtggcttagtgccaatagaataagtgatttggtattaaaatatgatgaatcgacaatagaaataaagagtggtgatattttttctggcaagtatataaacgatgatactattagaatatttgcttttaatgaatattttgatacaaaagttgataatgaaattatttctaaatcatcattaaacggtcaggttattattaaagaggtttccgatattgatgaactggataggagagtttcagatgataaacatttaaaaaagaatgaagttggaacaaatagggacagatcaaatggcaaaaagaaaaaatataagttggggactatatttaagtataatgacaatactatgttcacagcaatgacacattttgatgatgaaaataaagcaaatttgacaatacaggagtacataaggtttcttattaatttttgggatgaggttaatacaatatatgcgggaaagacagtagttataactcttttaggcagtggaataacgagattggataataatacttatacatcaaatcaaatcttagaaataatattgtggacattttatttaagacgaattaaatttaagaaacctgcacaattgattatacttatggatgataatactaataaaggtattaattattataaaataaggggtatgttcaatggcttacaaaaataa

SEQ ID NO: 23114 - DNA, 498 bp, Lactobacillus paralimentarius DSM 19674
atggcttacaaaaataaaatctatattgcttttgatggggataatgacattagatattatgatttgatgttggcgtggaaagctcagaatgatgattttaacttctataatgcgcatgatttgcatacggctagcgattctagtaaagaggagtccattaaggcctcattgagagatagatttgccaattcaaaaatgtttattttaattataggtgaacacacaaagtatttaaccaagtttgttaaatgggagattgaaactgcaataagattaaaattaccgatagttgctgtcaatataaataaatcaagaatttcggatgaattgtgtcctcctattttaaaaaatcaattagctattttcgttccatttgaaaagaaaatagtaaaattagcaattaacacttggtcagaaaatgataaaaattatcgtaaaaaaggagaaattagtaatttttattataaaggttcagtatataaagatttagaagactaa

SEQ ID NO: 23115 - DNA, 840 bp, Achromobacter xylosoxidans C54
atgaaattaaaagtcacgatcttcgatcgaaatgtgatcaagaggtccgtgaaatttattgcaggcatatcaacgggcctatctgcggtcctattatttgtcgagataccgtccggctacaagatacatgcaggcattgcatttttgatcgtgcttgccttgactcacatcgtcatttggttgcgcgcaaacttgcttcgcgaaatcagcatcgaaattgaaggaagtaatgtaaatattatttccggcgacatttttaagcaggaagggctgaaggcaattgctttcaatgagtacctcgatacccaggttgacaacatcataatcagcaaagcgtcgctaaatggaaagttcatcgagtctgagttgaaagagtctatcgaggctcttgatacacatatcgcacactttcgattcgacgatgaggatgttgtcgagaccgaagtccagcggcgtataggcaagactacgcggtatagacttggcaccatctgcgtgtacaacgagtacctcctcacagcctttgcccgatttgacgctaagaaccaggctcacctgacgatgccagagtatcttgaatttctcatcaacttctgggacaaagtcaacaagatctatgctcagcagagcgtatcaacgactatttttggttcggggattactcgcatcaaaggtcacaggacaattagcgatgaggatttgttgaaaattatgttatggaccttccggatcagcgagatgcggttcaagtatccggcaaaacttaccattgtcatccatgcgagcaagattgatcagatcaatctcttggacattgcatcggtaaagaacggcgtatag

SEQ ID NO: 23116 - DNA, 561 bp, Achromobacter xylosoxidans C54
atggcttaccgtaatggcacctatgttgctttccacgcaggcggcacgaccgatccaaccgcatcagatatcaaatactacaacacaatgaagatgtggagtgtcaataaaaatatcgacttcacattaataaacagccatgagaaaacctcggcagtacgagattcatcaaaaaaagaaacgttgcgccggtcgcttgtcgcacgcctcaacaactccaagcacatggtgcttatcctaacggcgacaacaaagaacgataccgactgggttcctttcgagatagcccacgccgtagatgtgtgtcaaattccgataattgctgtctatccggactacgactcaatactggctccagcaggacttgctaactattggcctcctgccctcgcgtctcgtatcgcgaacggcacggctcgcgtaattcacatcccgtttaaactactggctgtatttgatgctatagagcagtttggtgtctcgaatacaacctatccgacaaatggctatggtttctacaaccgtgaaacccaggttggttggggactcataaaatcctga

SEQ ID NO: 23117 - DNA, 822 bp, Eubacterium plexicaudatum ASF492
atgtgtaaatatttaaagatatgcagtgcatgggcattgagtgcaataactataatcttcacttttattccagaaaaatgtttcagccaatataaactaccaataaatgtttccgaagaagtgcatattataattaatcgtattttgacgtatattattatatttgtaatatcagcggtattataccaatggtacttacaaaccagaaaggaagtcactataaaaggtaagaattaccgtattcaaattgaatatggagatttattacaaaaacatgactacaaaaaggtaatttcatttgacgaatgttttacaacaagtgtaggccctgctccatctgatgtaaatgcagactctatttgtgggcagtttctgcaaagccatcctatttctgcacaagaaatgcaacttttgattgataaagtacctttgaaaccgatgagaagtaagtcaaaatttcaaagtaaaacaaggtatgaatctggtaagttagtaccatacaatgattttttattgatgtcatttgcaaagttaaacgaaaacggaagaggtgaaatgacccatgatgacttccttgattgtctgtctctgttgtggaaagagattgacacacattacgggcaaaaaaacgtatgtatatccattttaggttcaggtgttacttatatgggagatgaatcactttcacagcagaaattactagacatcataattgcttcgtataaattaagtactcataaaatcaaacttccttatcagttatttattatatgcaaagaaagtgatgatttttctttaaataaaattggagaatctatataa

SEQ ID NO: 23118 - DNA, 609 bp, Eubacterium plexicaudatum ASF492
atgagtaaacgagtttatattagcgcagattattcagaaaacagcggagaccgtgatgttgtcaacttacttaataagtggggtagtgataatcttcataaagtggattttgttgatatggctaaagtggtttcaggtagtgtttccaaagatcccgattgccgtatttgtgatttgaaacgtgaatttaaccaacaaataaatgcgtcatcagctgttattattgtcattggtgataggactgcatcacgggaggctggtagtgcttgctcgcgtgaaaacaacagtcaagcagaatgtcgatgtacgccatataaacaaaatgccaatggctctaaaccttgtcgtgtatcatggactgttccttccggagaatctaatgttgggaatataaataattattcttatctcaggcacgagtttgagcaagctaaaaaaagcggaaagcccatcattgttgtctataattcattacgcaaggaatcaagctggctacctttctatatgaaggaatatggattaaatgcacaaccattttggataataaataattttggtcaaaaggttggaaactatgattacataaagaaggcacttggatatgtgtaa

SEQ ID NO: 23119 - DNA, 873 bp, Streptomyces ipomoeae 91-03
gtggccggtcccgtacgacgtctgcgcatgctgttcggcacaaggctcggtctcgtcctgctcgggcgcaactgcgccgtccagttcggcctgttggcgggtgcggcccagctcgtcttcacgttgtggcccgacgccgacctgccccgctggcccaccttcctcggtatcgcgggcctggccgcgctgatcgcgacgctggtctcgctcccccgcaacaggatcagccgcgacttcacccatcccgacatcacggtcacggtcgaggtgggtgacctgttcgaccatcggtgccatctcgtcatcggcttcaccgacacgttcgacaccgacacggccgacgagtccctcgtctcacgccgcagcgtccagggtcagttcctgcaccgggtgtacgacggcgacgtcaccaccctcgacgcccgcctcgacgaggccctcgcggacgtgacaccggtgcggacggaggcccgtaccgagaagcggctcgggaaactggagcggtatccgatcggcacggtcgccgtggtcaaggactccgggcgcgccttcttctgcacggcgtacggccgcatgaacaatgacctgatggtcggttgcggcacggaacaactgtggaacagcctcgcccgactctgggacgccgtccggcgccacggccaccgcgacgaggtcgccatgcccatcaccggatccgacctcgcccggatcaacaacatggaccacgcgagcctgctgaagatgatcctgctgtcgttcgtggcccactcgcgggcacagggggtgtgcggatcactgaccatcgtggtgcacccgcaggactactaccgtattgacatgctcgaactcggggtctttctgcggtcgttgtga

SEQ ID NO: 23120 - DNA, 1233 bp, Streptomyces ipomoeae 91-03
atgcaggacaggcggtcaaactctgcgaagccgtacttcttcctgagctatgcccacgcccggaagcgggacgcgggcgacgccgatcccaacgtctgggtgcggaagctgtatgacgacctgtccgcacacgtcctgcagctgaccgaccttccatggggctcccgggccggcttcctggaccagagcacggcggtcggcgtccgttggagggacgagttgtcggagaacctcgcccactgcagggtgttcgtcccgctgtactcgccgcggtacttcgtcagcgagcagtgcggccgggagtggtgggcgttctcccagcgccaggtcgaccggcgggcgcgcgacggtgccccgcgggagagcgcgatcgtcccggcgttgtgggtccccgtggagccgagtcacctgccccgagtggccagggacttgcagttcgaccatgccgcgttggggcaggactacgcggacgagggcttctacgggctgatcaagctccgctacttgcgggacgaatacgaacgggctgtgtaccgactggccaagcagatcgtgaaggtggcccgcgaagcgactctcgacgacggccacgtctatcgggactacgagtcactgcccagtgcgttcggctccgggggcccgccggacttcgacatctcggtgctcgcctgtacccgttcggacctgccgccgggccgcgagccggactactacggagaccggccgcacgactggaacccgtaccatcccgaatcggccagaccactcggtgacgatgtcgccgatcacgtccgcaggatggactacaaagtccacgtcggtgacttcgagcgggatgccgaccgtttcctccgcgcggggccgccgagggcgcccgggatccttctcgtcgatccctgggtgctgcgcagtcggttccatcgcgacctgctctcacgggtggaccggatggcgtccccgacgatggcggtggtggtgccgtggaatcagcaggatcccgggagccatgccgacggagggccgggacccgccgagttggaggccgtcatgccgcgtctcctcaggctgagtcgttccgcgtcccggacgtcggtgggcggagtcggaacactggcggcgttgcatcagatcctgcccacagtggtgcgtcatgccgtcgacgggttcagcagcctcaccaaggagttcgtgtacccgcgtccccgcctgcgcggcccggactctccgcggtag

SEQ ID NO: 23121 - DNA, 882 bp, Sinorhizobium medicae WSM419
atgcgctacttttggaaatccattttgacattatcattttggcgctattcgctgttctcaagaggtgcattggtaagcatcttttctatcgctggcgctatatatctcgccatcgaaatgcttgatttttttagtatgtacaccaaagataagtacagcaagtacacgatttttgccatccttgcggcatcagcatcaattacgcttggaacgaggcggcctgtttcgagaatatcttacaaaatccccaaacgagacttttcctatgatgtggctataggagacttgctggacacaaagtgttccaatgttgtcataagcacaaataccaccttcgatacggatatagccagcgggcttatttctccagacagcctccaaggacaattggcctttcgctacttcaacagcaacactgccgagatggataggcaaatcgctgaatcacttcagggcgtcgaggcaatcgatcacccctcgggacgtggcaaaaagaagcgctatccgacagggacaattgccaaaattcaagcgcatggaaagacatttttcttcatcgcaatgtccgagttgaatgaggatggaaacgcccgttcttcagttcggatggtcgacgaagcggtggaagcactttgggtctatatcgccgaacgcggagaacttgcggatgtggcaatgccaatcatcggcacggggcgcggccgtatccaactttcccggacgaagatgattgagagacttgctcagtcgttcgcggacgcctccgccgagcgtgttttcagcaaccgactggtgatttacatccaccctgaagacgctgccaagcacgcagtgaacctcttcgaaatacgggattatttggcaatgagccttcatatctga

SEQ ID NO: 23122 - DNA, 501 bp, Sinorhizobium medicae WSM419
atggcataccgcaacaagacgtatatctgcttcgacggcgataacgatatgaaatactatcgcctgatgaccgcttgggcggagaacccgaactttagtttcaatttttacaacgcccacgacttaaattctgcaagggatagcagccaggaggagagcattaagaagcaactgcgagagcgatttgcgaactctaagcttctcgtggtgctcattggtaacaacacccgctatctgacaaaattcgtgaaatgggaaatggaggttgctctgcgactaaacctaccaatcatcggcgtaaacctaaatggcagtcgggcacaggatgatctatgtcctccgaaaatccgcaacgaactggcaatttatgttccatttggcctgaaaatcgtggagtacggcatgaagaattggccagatgaccattacgcgtataaaaaggaaggaaagtcaggcccttactactatacagaacaaacttacaaaaatatgggcctgtaa

SEQ ID NO: 23123 - DNA, 879 bp, Pannonibacter phragmitetus
ttgaaacatttttgggactcggtatcgacgatctcgtactggcgctacgcccttttctcagcggaggcggccgctaagatattggcctgcatgggcggcctctacctcctggtggagctgctcgacacgttccaaatctactcgaaagacaaatacagcgggtatggcctgatcgtcatgttggtgctgtcgatcctttacgtgctgactacgcgccggcccgtgagccggatccgttacaaaccgccggggaaggacctaacctttgcggtcgaaatcggcgacctgctatcccagcccggcgagatcattatcagtacgaatacgacgttcgacaccgacatggcgagtgggttgatcgctgctgaaagccttcaagggcaactggcaatccggttcttcaatggacaaaccgacgagattgacaggcagatcgccgcgtcgctcgaaagcgtgccgttcaccccaaacgatggtcgaccgggcaaaaagagcgagtacccgctgggcactgtcgccaggatcaacgctcacggaaaaaacttctatctcgtggctatggcccatcttaatgctcagggaacagcctactcggacgtaaggatgctcgacgaagctctcgagaacctgtggaagaacatggcggagaaggccgaatacggcgatatatacatgccaattatgggtacggggcgaggccgggtgaaactgccgcgaaagaaggtgatcgagaaaatcgcgcagtccttcgcggatgcgtcgcaagagaccgtcttctcaaacagactgaccatcgtcgtcaggcccgatgacgcgtcgaatttctcgatcaacctgttccaagtgagggactatctgagccagagcctgcacgtctga

SEQ ID NO: 23124 - DNA, 501 bp, Pannonibacter phragmitetus
atgagctaccgcaacaagacctacatcgccttcgatggtgataccgacatgcactactacaggttaatgacagcctggaaggcgcacgacggaaactccttcaactttcacaacgctcatgacctcaacaacgcgcgagacacgagccttgaagaaagcatcaagaagcagctacgagagcggttcgcgaactcgaaactcttcattctactgatcggcgaaaaaaccaagaacctgcacaaattcgtccgctgggaaattgaggtggcgctcagcctcggattaccgatcatcgcggtgaatctgaatggctcgcgtcagcgcgacgaccgatgtcccgcgattctgcgagatgaacttgcgatttttgttacgttcaatcccaggattattgagcacgctatggcgaattggcctacctcctatcagaaacataaacgcgacggcacttctggtagccgacattatgttgacagcgtgtattcaggatttggtctttga

SEQ ID NO: 23125 - DNA, 858 bp, Leuconostoc kimchii IMSNU 11154
atgaaaattggttttgcaaataaatatttattagacaatgtcacaaggcaagttggttatgtatttgctatatcttccgtcatattaacatttttagatttttctaaaaaaattaagttatttatttttgttggcactttgatactttcactattcatatacatagcaaatttaatatttgccaatttgatgagtttcactacctttaaggttggggaatcagaaatcagaattcagaagggggatattttctcaaatgaaatttttaataaccctgattttataaaggttataaatgctaatgagtattttgacacgattgttaatgaagaaatcatatctaaaagatcggttcatggaaaatttttattaaggagcgatgtcgacgtttctaaagtagatgatgccattaaaaaagataaaaggctaaataaacgacataaggtgggtgaaaatttagatcgtgaagagggtaaccaaataaagtatgagcttggatcgatttttaaatattcagatgacgtttttttaacagcattgacacacttcgatgagtataataaggcttatttgtcaatacaagatttcattcgatttttaataaatttctgggatgaaattgatgaattatacgctggaagaacagtcgtaataacgctatttggttctaatctagcaaggttggataataatacctatagcaacacacaaattttagacacaattctctggacatttagattaagaaggattaaatttaagaagcctactaaattaattattttattagacagagaaacaaatcagaaaattaattactataagataaaggacaggttttatggcttacaggaataa

SEQ ID NO: 23126 - DNA, 501 bp, Leuconostoc kimchii IMSNU 11154
atggcttacaggaataaagtatatgttgcgttcgatggggacaacgatatattgaaatacgatttaattaaagcatggtctaaaaaccagaatatagattttcacattgatgacgcacatgatttgaatacatctaaagattcaagtcaagaagcttctatcaaacacaatctgagtattagatttttaaactcaaaagcgtttatattattagttggagaacatacaaaatatttgacgaaattcgtgaagtgggaaattgaaacagcgattagattagagttgccaattattgctgtgaatttgaatggtaaaaagagagcggatgaattgatgcctccactactaaaaggaaatctttctattgtagtaccatttaaaatggttgctattaaatacgcattggaaaattggccagaatatgataagaaataccgaaaaaaccaagatcatagacaatatcactataatgataaagtctatgatagcttagggatataa

SEQ ID NO: 23127 - DNA, 873 bp, Collinsella stercoris DSM 13279
gtgagtgagttggttgagatcggaggagacatgggtctgcctcagggtgcaaaattatctattctgaaaaaggatgcgatttccgtcgctaccggaattgtagccgtggtggagacagcgcttgcggtttctggtatttcacttcatgacatgattcccggtcaagtatggtgggtctatctgctcattgtgcttgctgttttcgctgcactcgtagtatccatccgctttattctagcctgtctctacagagagcatatcgaactagaaataaatggcaatcgaatcgagatagtcgaaggagacctttttgcccaagatgggaaaaaggttgttccgttcaatgagtacttcgattccgacgtcgacgacatcgttatctcccattcctcgttgaacggtaagttcatcgattgccatgttgatgatttggctgaattaagaagtgaaattgaaagcgaaaagagttcgcctcttcctgtatatgatcgcgacggtcgccgtcaatatgaccttgggacaatcaagcggtttggggaggactatctcttgctcgcgttttcgcatttcgatgagcaaaaacaggctcgtttgacgatggccgaatatgagagatgtctcatgaatatgtggcaagagctttgcagggcgtatgcgggacggccaatatcgcttccgctcctgggatcgggaattactcgatttgatgatgtccggcaaaagagtgtgagcgaactgctgaagtgtatgttgtgcactttgagatcgacgggctgttatttctcgcagcctatcagtatcgttctcaccagtgaagcaatgagcaaagttgatctgtatgagatgaagggagtttcacggtatggcctatag

SEQ ID NO: 23128 - DNA, 507 bp, Collinsella stercoris DSM 13279
atggcctataggacgaagacgtatatcgccggggattgggacggggacaaagatgcaattgagcagctgtacaaatggaaggagagcaagtatctttcgctggacttcatcgatgcccacgaccttcatcaggctcgggacacgagcttgaattgcagtatcaaaaaatcacttagccagagacttaatgtctcgaaacgttttgtgctcgttgtgggagagaaaactaaggatctcaggagtggcggctgccaactgtgctcgagctacaacagatggaccagggcttgcgcccgtggccaccatgtcgattatcgcagctacgttgagtacgagtgcgagaaggcgaaaagtgacgggttggctatcgttgtcctgtacaactcgacacgcgttgatagggacaaatgcccggactgtatcaaatggtccgggaagcacgtggcgatgcaatattacaaaaacggaaaatattattgggattatcaggccgtaaaggagctctga

SEQ ID NO: 23129 - DNA, 855 bp, Hungatella hathewayi WAL-18680
atgaaaccaaagataattattaaaacaatcgtagacttatttgcaccgggcatggctgttataggtacaatttggtccgttatggaaattctagaaaagtattattcagatacaccgtttataaacttttatcaaaatcatatcagctgtatgctgattccgggcattcttgcagtggtaataaatgttgtgtgtcttttaaacaatgagcggaaagtatcatttacaatcaaagatgcaaaaataacgattgagattggtgatattctgcgaaagagggatggagtaatcgttgtcggtattaataaccagtggaatacgaatggcgcacagattggcaaatcgagtatacataaggcattactggacaaatatgggcaggataggcttgatgccgcttttgctaagggcaaaacagaagcggaacggttattctttcaggaagaaataggcggcaaagaatatttgtttttgcgaatgtctgatctgaacaataacaatgcggcaagcacaacaattgatcaaatgcagaaggccttggatgaactgttttatcatcaggattatttaagcatgtatgaggggcgtatctatttccctgtattgggaacgggagagggaggaatctgcctaaacagagtagagacgattgaatttatggttaagcgtttttggaaatttcaaaagcaaattaacaggaacagtattgtaaaaataaaagaactccatattgtaatttattggaaggattttaataggaaagagtggaatcaaatcaagcagtgggtagataagataggacagtattgtatggaatgccagatgtttcaatctggtgaggaagtagagtgttaa

SEQ ID NO: 23130 - DNA, 996 bp, Hungatella hathewayi WAL-18680
atgtatgagttgattcacggcagtatattcgataaaaaatgcgatgtgattatcgtaccatgcaatcatctgggaggaatcacccgcagtgtaagcgatgagttaaataaatttaatatacaaaatatacccacggtgaaggaaccagggagtgttgtgtttgaaaattgtgttggggactttgcatttgcaacggttatcggatttgcggcgtctgtaaatagttttacgggcatgggaactcctgagtatctccacagtatttgcaatgatatcaggcggtactgtaaggaaaatctgtttactctcgtcaatattcccctgctgggggccggaaacggtgggttaggcagagaagagtcgtttcaaataattaaaaaggagttcgaggacgacaagaccatctccgtaagaatatttgtgcctgccgacaatgtttatcagaaacttttagagaaagcaggaggccggcaggagataaagaatccgcgggtgtttgtcagttatgcgggcaagaatcctgagaataagaagtgggtaagggaactggtctgtaaattgaggaaaaatggcgttgatgcgcgagtggatatgtttcatttaaagccgggacaaagtctgcctcaatggatgacaaatgagatcatcatggccgacaaggtgctgctgatttgcgacagattttatgtggaaagagccaacagggggagaggcggcgtggggtgggaatccatgattatacagggagacatgatggccgagatgtatgattcccagtcggagacattgtcgaataaatatatctgtattgtacacgaaaaggatatggcagaagggatgccggtatatgcgagaacccggctgtcgatgcattggacagattgggagattccggaggaagaattcatgacgcttttgtactgtttgtttgactgtgaaacagtgcctgaattatgtgagataccgttagaaatcaggaaattgaaaaatagttga

SEQ ID NO: 23131 - DNA, 846 bp, Turicibacter sanguinis PC909
gtgagaataaaagtcaatttttttgacaaaaaaattataaatcaatggttagctattttaggtatattcgggggaatatatacctatataacaatttttattccagttcccgaacaaattaaaaataataaaggttcaattattttagcaattattattagcactctgcttatagcaatatatatttttttatggataaaagctaacttatctaccaaagtaaccctcaatattaataactctatactagaagtaaaaactggaaatatatttagacaaaagaattttaaagtaattccgtttaatgaatattttgatacattagttgatgatgacctaatctcaaaaacctctttgaatggaattttcatagaaaatgaattagatattgatgtgcaacttttagataatcatatagagaaacaattaataagtagatatttagaaactgaagaaacaaaaaatagaaataaaggtaaaaaagtcaaatatcctctaggtacaatatgtaaatatgatgattatcttttaacagctttctctaaatttgatagcgataataaagcttatttaacaatgcaaaactatattaattttcttatgaaattttgggatgaaatagacagggtttatgcaggaaaatctatagctatccctgtacttggaagtggtataactagatttaaagaaaatataaatattactgatcaagaactactagaaattttaatttggtctttcaaaataagtaggataaaaattaaatatccttcaaaagtgtcaataattatatatgatgagaatgtagataaaatagacttttataaattaaaggagctgaaatag

SEQ ID NO: 23132 - DNA, 546 bp, Turicibacter sanguinis PC909
gtgggatatagaaatggaatctacgtagcttttaatggttgtggaacaacaaatccaacagaatcagacattaaatattttaatattctaaaaggatggaaagaaaataaaaaaatagatttttcatttgtagacagtcatcaaaaaacatacaaagtattagacagtagtactgaaaaaactttattaagtagattaaatgaaagaatggcaaactcaaaattaatgtttctaattgtaacagataatactaagaattcaagtcatatagttgatcatgaaataatacgtgctatagagcatgataacatacctattgttgtggcttatacggataaagaaataataaaatctgtatcaccagagataaaaagtaaactaccgaaatctcttcagaaacacatcaaaaacaatgagtgtaagattttattcataccatttaaaatgaaagctataaaaaaagcttttcaagattttggagttaatcaagttaaagaaatgtataataacacttatgtttatccaaatgtagatagttgggaataa

SEQ ID NO: 23133 - DNA, 831 bp, Paenibacillus naphthalenovorans
atgaaggtacagtttttggacaaaaggatactacataaattttatggcgctttgagcgtaataagtgtcataacatctattgtatttctgtttatagatattgacacgaagtacaaaacggccataggcttagcagccttatcttttcttattgttctatacattggcatctgggttcattctaattttcgccagaacatcaagttgaaaattaacacctcgcaaatcgaggtgaaatttggtgatattttttcagagcaagctgatctgaaagtgattgccttcaatgagtatttcgacactttggtggacgataagatcatcgctaaaagctctctgaatggaatatttgtcgataagtttttcaaaaacaaggtcgatgaactggacggaattatttcctccgaaactcaattaacggaagcgagtgtcggagaaaacccgagccgtccttctggtaaaaaaataaaatataaacttggaacaatatgtgttgtaaacgattatctcattacagcccttacgcactttgatgacaacaacaaagcgtatctcgagataaatgactacattaactgtctactaaacttttggaatgaggtagacagagtttatgcaggcagaaccgtggcattgcctgttttgggttcaggaataactcgctttaagggttacgaaaacatttcagaccaagagctactcgaattaatcatttggacattcaaggttagccgcataaaattcacgtatccgtccaaggtgaagattgtagtttataagaacaagtgcgaaaagatagatctgctggcactgaaagacctggaaacctaa

SEQ ID NO: 23134 - DNA, 555 bp, Paenibacillus naphthalenovorans
atggcaaacaggacaggaacctatgtagcctttgatggtttaggagaaaccgatcctacaaagtctgaattcaaatattatgcgaccattcaagcatggggtgcaaataaaaatattgcattttcgctaaccaatagccacgaaaaaacagatgctgtgcgcgatacaagcaaacgggcaacattatatgctcgcattcaagaacggattagggcatcaaaaaatatgcttgtcattcttacgaaaaacactcgctataatggaagtgtcctatcatatgagattgaaaaagccatagacacttacaagattccactgattatcgcttaccctgaatactcatcaatattaaatgtgaacagccacagcgatatttggccaaaagcccttgccgaccgcattaatgatgataaaacagcggcaatccatatcgcatttgcaaaagattgcattttggatgctatcacacgctttcatgtgaatggtgagtcccttaaaggcggtaagaactattatagccgtgaagcatatgtccaatgggggctgattaaataa

SEQ ID NO: 23135 - DNA, 828 bp, Streptococcus sinensis
ttgaaagtaggattattggataagaatatccgaaaacagttttataagttctgctcgaaattaacagctatcttaacagttggattgatttttatagatataccaagaaattttaaactattagctggtattatctatcttgcagtattagtcatcgcttatctgatttattggcatattgctaataaaatgactcaaaccgcaataaaaataggtctcactacagttattgtaaagtcaggtgatatttttaaagaaaatgggttaaaagcaattgcctttaatgaattttttgatacggtagttgatgataaaataattgccaagaagtctttaaacgggcagtttattataaatcatattgataatattgaaaaactaaattctgatattgagaatgatgattatttaaagagcagtattgtgggaaaaggagtaaaacgaaagcaaggaaaaacaactaaatacaggctaggaagttccattttgatagacgatgaatatattttgactgcttttagccgatttaataaaaacaaccaagcggaactaactattcaagaatatgtcaattttcttttaacattttggaacgaaattaatagattatatgctcaaagatcggttacagttccagtatttggttctggaataacgaggtttaaaaatggttttgaggatattgatattaatgaattgttacggattatgatttggacttttaaaattagtaaaatcaaatttgcatatcctgcaaaattaactattatcatacacaatgacttactcagccaagtaaatttatatgaattaagggagaatgaataa

SEQ ID NO: 23136 - DNA, 501 bp, Streptococcus sinensis
atggcctatcgtaataaaacttatgttgcttttgatggtgataatgatatgcgttattatcagttaatgaaagcatggaagcaaaatgacaacacattatttaattttcatgatgctcatgatattaacagcgctagagatacaagccaggaagagtcaattaaaagacagcttcgtgaaagaatggctaacagtaaggcatttgttttattaattggcgaacatactaaatacttaacaaaattcgtaaaatgggaaattgaacttgctattaagaaagggttgccaattatctgtgttaatctaaataaaaacaaaaggaaagatgaattgtgtccgtcaagtttgaatggacagttggcaatattcattccttttggaagcaaaatgatgcaatatgctcttgagaattggccaaaatcgcatgagcaataccttaaaaatggagaaataagttcttactgttataaagatgcggtatataaacgattgggcctgtaa

SEQ ID NO: 23137 - DNA, 882 bp, Enterobacter sp. DC1
atgagatattttataaactcaataaaaacttggtcgtattggaaatatgcattattttcatctgcagggttagcacgtttattagccgttactggtgctatatatttacttttggaaatgttagatttcttctcaatgtataccaaaaataaatatagtgcttacagtttttttgttgttattattttttcaacctttgttacagtattatctagaaggccagcatcaaaaataacttatcgcattcctaaaaaagattttggatatgaagttattattgatgacttactaagctccactgctgaaaatattgtaattagtacaaacactactttcgataccaatatagctaatgggcttataagtcctgacagtctacaaggtaaatttactgctaaatttttcgctgggaacactgccgaacttgacagaaaaattgccgaatcactcagtaatgtagagcattctgcgcatcccctgggtaaaggaaaaaaagtaaaatatccaatcggaacagtagcaaaaatatcgtctcatgggaaaacattttatctatctgccatgtcagagttgaatagtgaagggaccgcaagatcaaccccaaaaatgatcgatgaggctcttgaatctttgtgggagtttatagcaacgaagggggaactaggggacattgcaattgctttgatagggactggacgaggaagggtaagtttatcaaggaagaaaattgcagaaaaaatagcccagtcctttgcggatgcttctcaaaatagaacgttttctaacaaactgactatagttgtttaccctggtgatgctgatcgcttcggagtcaatttatttgaaatcaaagattatctttcccaaagtcttcaagcttaa

SEQ ID NO: 23138 - DNA, 504 bp, Enterobacter sp. DC1
atggcttatcgaaacaaaacatacatctgcttcgacggcgataacgatatggcatactatcgactgatgacagcatggaaatcaaacgataatttttcctttaattttcataatgctcacgatatgaattctgcacgtgacgagagtcttgaagaaagtataaaaaagcaactcagagaaagattcgctaactcaaaaacactcatcgtgttgattggtgaaaatacaaaaaatttaacaaagtttgtgagatgggaaatggatgttgccttgaagttaggcattcctattattgccgttaatcttaatggctcccgtcagaaagacgaattgtgcccaagaataatcaaaaatgaattggttgtttttgttagtttcaatatgaaaattattgaatatgcaatgaataattggcctgaatatcacaacacattcacaaaagaaaacaaaaaagcatcgttttattataccaacaagacttacgaggctctaaacatcaaatga

SEQ ID NO: 23139 - DNA, 930 bp, Cyclobacterium amurskyense
atgaattggtttgaaagacttaaatacaatttctggctattttgggataggcttaatctcaagaatttcggaaaaagtattctatccgtattcgggggactttggcttctcattgaaattttcgccttttttggacaaaatacttggtcaaataatattcggtcaatttggtgggtatttatagttattggtctaataataattatttacagaaattggccaaaatcatttttcacatttaaagtccataatagagaagtttccgtttctattaaaattggggatatctttaagattgatggagctctgattgtccctatcaacaatagacttgattgtgtaaacaatgggattgttaaaaaatcaagtagtatcctcaggtactttattgaccaggtgtatgaggaaactacggctcatctaaatacagatatatgccaacaattagaagacaattcagattggtatgaaaattttgttgaaaatgataatcctaagacttataaagtaggaacagttgtcccagtatttagaagtgataaacaatattatttactttgtagttctactcttaatgcacaaggacgctcaaaaacaacggttgatgaccttagattatccttaactgagttatgggcataccttacgcatagtggaagcaaggataatctaataatcccaattgtgggtacaggtcgtggtagaataaccttgaaaagagaagatgtaatcaaagaaattgtactctcatttttagtatcactaagccaagaaagttattgcgaacagttgacaatttgtattcacccaaatgatttgaaaaaatacaatgttaacttggacgatctattagattttattagacttcattgcaataacacagggtatttaaaaggtaatgaaaaccctttagggactgccatagaataa

SEQ ID NO: 23140 - DNA, 504 bp, Cyclobacterium amurskyense
atgccatatagaaacaaaacatatgtcgctttcgatgcggatagtgatattagatactatagattaatgactgcatggaaacaaagtgacaaatcggactttaattttaacaatgcacacgacttaatgagcatatggcaacacagtagtgaagaaaccattaaaagaaatctaagagaaagaatgaataattcgaaagttttcattctactcgtgggagaaaaaacaaagtatttatacaagtatgttaaatgggaaattgagcaagcaatcaaactcaatttgccaattattgtagtcaaccttaacggaaaaagatctttagatagtgacaagtgtcctgcagttctaagagacaaacttgcacttcacgttagtttcaactctaagattattcagctcgcattggagaaatggagcgatttacattattcatattccaaagaagataaaacaggttctttttattacaatgacaatgtatattcaaatctagggctatga

SEQ ID NO: 23141 - DNA, 624 bp, Aquitalea magnusonii
atcaagattgcaaacagcaatactactattgaagttgtttttggagacctattctcacaagatggcgtacgggcaatatcggttaatgactttttcgatagcaagctagggaagcccgtgtccgacaagagcctgcatggggcatttcttcagaaatgttttggtggccacccggaatctttcgataagcaagtcgatgaacaacttaagaatgttgctggcgaacatgtagaaaagctagaagggaagacatttcgttatcctgttggaactacagcagtaataaaggttaatcacgaccaatatttgctggtttccttggcaaagtccgacccagctacatgcaaggcaagcgccgatgtaaccatgatgtgggatgcattacacgcactttggcaacgttccagaatagagtgtggtggtcatccgctaaaccttgctctagtaggtagtggcttggcagggcttgggctccctactcgagatttgctgaatcttataatactttcagcaataactgaaacgaaatcaaaggaaattacgcaacgcatccgcgttgtgttgtacaaagatcgcttcgatgatctggacctgagagacgtaaaacagcactggaaggaataa

SEQ ID NO: 23142 - DNA, 561 bp, Aquitalea magnusonii
atggcctaccgaaacggcacgtatgtcgcatttcacgcaaacggtacaaatattcccggcgggaactcggatatagattattacaacctactaagagcttggtctgcaaatccagacgacgagtttacgatgaacaacagtcacgataaggctgcggcggttcgagattcgagcaaaaaagaaaccctcaagaattctcttatggcgcggttgcgaaactccaagaacatggctctcattattggagaaaccacagcctcagatgatgattgggttccttttgaaatagaaaaagccgtcgatttgtataaaattcctatcattgcgatctacacagggcaagacaagccaatccgcaatccttctgcattgaaagcgctttggcctaaagctcttgaaacaagaataaataatggaacggcgcatgttatccatattcccttcaagaaggccgctatactggacgcaattgggcagtttggccctcttaagtatccgctcggtggtgggttgggaatatataacgatgcagcttatgaatcttttggcatcaacggctag

SEQ ID NO: 23143 - DNA, 762 bp, Rhodanobacter spathiphylli B39
acttcagaattgaactcgcccgtcgacataccagccgactacaagataggggctggcatcgcgttcttggccgtgcttgccctgattcacctcgccacttgggtgcgcgcgaattcgcttcgtgaaatcagcatcgagattgaaggaagtaaagtaagcatcaccaccggtgacattttcaagcaaaaggggctgaaggcgattgctttcaacgaatacctagacacccgggtggacaacgtcatcatcagcaaggcatcgctaaacggaaagtttatcgagtctgagctgaaggagtctgtcgaggcgctcgacgactatatcgcgaactttcgattcgacgatggggatattttcgagaccacggttcggcgacgtatcggcaagacgacgcggtaccggcttggcacgatctgcgtgtacaacgacttcctcctcacggcttttgcccgatttgacgctaagaaccaggccaacctgacgatgccggagtacctagagttcctcatcaacttctgggacaaagttaataaggtctatgcccagcaaagcgtgtcaacaactatttttggctctgggattacccgtatcaagggtcacaagacgatcagcgatgaggacttgttgaagatcatgctgtggaccttccggatcagcgagatgcggttcaagtatcctgcaaagctaaccatcgtcattcacgagagcaagatcgatcagatcaatctcttggacatcgcatcggtgaagaacggcgtctag

SEQ ID NO: 23144 - DNA, 378 bp, Rhodanobacter spathiphylli B39
ttgcgtcggtcgctggtcgcgcgcctcaacaactccaagcacatggtgcttgtcctgacgacgacgacaaaaaacgacaccgactgggttccattcgagatagcccacgccgtagatgtgtgtcagatgccgatcatcgctgtctatccggacttcgactcgatactggcaccggcagaccttgcgaattattggcctcctgctcttgcatcacgcatcacgaacggcaaggctcgcgtaatccacatcccgttcaaactaccggctgtgcttgacgctatcgcgcagtttggcgtctcgaacacggcttatccgacaaatggctacggcttctacaaccgtgaaactcaggttggctgggggctcataaagccctga

SEQ ID NO: 23145 - DNA, 876 bp, Flavobacterium reichenbachii
atgaattattatttaaaatcactgaggacaaaatcctactggatttatgcacttttgagtattgattcaatgacaacttttatagcagtagtcggtggcgcttggtcattagttgatatcttaagctcttggcattttgtcaacaaagagaaattgccattttggtttttgatatgtctttttttatcgggattattagttgttatttttacaagaagaccggtaaaaaaaataaaatacaaatatccgggacaagatcttaccattgaagtgtgcattgatgatttgtttacagtgaatggacagaaaatcataagtacaaatactacttttgatacagatatggcaagcggaattatttcagaaaaaagtcttcagggacagtttacaaaaaagtactatcccggagatgttcctaaattggataaagaaattgaagatggtttggcgggttattcatttacagagatacagaaagagtcaggtaagacaaagcgatatgattttggagccactgttaaattaaggcatgccgatcagtttttttattggtttgccatgtctgatttgaattataataataatgctaaaacgactttgaaaaatgttcatcaggcattggacggtctatgggaatttatagaaaataaaggtgaaaaacaggatatagtaattcccttgattggttcaggacttggtaggctttcaataggacgtaaaaaattgatagcgattattgcacaatcatttctaaatgcatcagaagataatattttttcaaataaactgataattgtaattcatcctaatgatgttgataaagcaaatttaaatttatttgaagttaaagatttacttaatcattacttgccatag

SEQ ID NO: 23146 - DNA, 501 bp, Flavobacterium reichenbachii
atggcttatactgcttgttatacctgttttgatggtgatactgatatgcattactataatttaatgaaagcatggcataaaaatggaaaattcaattttaggttcgataatgttcatgatttggaacaggtgcgtgataccagtactgaagagacaattaaacgcagcttgcgaagacgattaaacgcaagtgatgtctttgtggttttaattggaagaagtaccagatacctctataaatttgtacgatgggaaattgaagttgcaattgatatgaatttgcctataattgcaataaatttggataacagcagagcaattaattatgatttatgtcctccgattttaagagatactttagcaattcatgttcctttcagcccggatatagtaaattatgcaattactaattggccttattcgcacagaaattatagatcgcagggtgtttcgggtagttatcactattataattcagtttattcacaacttggctattga

SEQ ID NO: 23147 - DNA, 921 bp, Labrenzia alexandrii
atgataataatttggcagttaaaaagactgatgtcgaatattggtatttggcagtctttgtttgcgccagttggggtaggctggaccctaacccagattgctattcaaatgggttatgaaagtatattggcgccgtatcttttcttgctttggtatttaatgccgcttggtttaatcgtgggaggttatatttactggccgaaaagatcatcatctaaaacgctaccaaatttggataccgaaattgaaataagggtcggtgatattttctcttctaaagcacctattgtggttactattcctactaccctcgagaccgagttccacagcaatgcaattagtgaggatagtatccaggggcagtatacaaagaaatattgtaaagatccaagtgtattaaagttatgtctgcaaaaattagtgcaggataataatgatttttcaactgtaaaaaatttttattcgaatggtggagatgtccggaagtataagcctggagaggttcttgtaattagagaatttgatcgtattgcatactgtactacttttgcttcatttaacgagcatggtacagcacagattagtcagcaggagttttatgatctactcccgaaaatgtggatgggtattcgtgaaaaaggagaatttgggtctgtcgatgtaccgctaattggttccaggtttgcgagaactggaattagcaggaataaggatatcctgcgcgaattggtttattcgctttcagtagccagtgctgatgctagattggctgacaaggttacattttttattagaccttccgattttacgcgatggggtttttcattcgaatttatcgaaaggctattgttaaacgtatgtgatgaacatcaacaaaggatgatggaaaacggtagcatcgggcagccgttagatgtttga

SEQ ID NO: 23148 - DNA, 510 bp, Labrenzia alexandrii
ttggcataccgaaataaagtctttgtatccttcgacggtgatagcgatatgagttattatcgtctgatgttagcatggagaaagagcgaccattcttcttttaatttttataatgcgcatgatcttactagttccagagacagtagtttggagcttacgataaaaagtagtcttcaacaaaggatgataaactcgaaattgtttattcttctggtgggtgctaatacgcgatacttatacaagtttgttcgctgggaaattgagcaggcgataaaacgcgaccttccaatagtctgtgttaacctcaatgggctcagacacattgataatgaacgatgtccagcgatattgcgagatgaattagctttacatgtgagttttaactcaagaattattgaaagagctataaacgagtggccctcctcaaaaaaaaatctagaaatacaaggaaggaaaggaccgtttttctatcctgaagatgtgtattcccttctaggtattgtgagatga

SEQ ID NO: 23149 - DNA, 843 bp, Psychrobacter piscatorii
atgaaagtacatttttatgatagaagtttatggaatgatttttacaaatacctgtcagctataggactagtaacgagtactaccttcttgttcatcactacttctgataatttcaagattattacaggaggagtcttatctatagcaatattcacagtgtttctagctttatggtttagagccaatagtttgaaatacgtaaaagtaaaaattgattcaacaagtgtagaaattaaagaaggtgatttatttgaacaagaaggtttgattgctataggttttaatgaatattttgatacagttgtagacgacaaaataatatctaaaaaatctttgaatggaattttcattgacacatatctaattcatactggtaaagaagttgacgaacttgatgtactcattgagaacggcgtagagaacgaacacaaagctaaagggaaaaagcgtaaagcagaagggaagttacaacgatataagctaggagcaatttatctacttgacgatagatatattttaactgcatttacaaaatttaatgatagaaacgaagctaggcttactatgtcagagtacttagagtttttagtcaatttctgggataacgttaattctatatacgctcaaaggtcagtaagtgttcctatatttggtggtggtattactaggtttaaagagcataaaactatttcagatgaagagctacttaaaatcatgctttggacttttaaaattagtgaaatgcggtttaaacatcctgctaggcttacgataataattcatcctgagaaaataaaagcaattaatttaaatgacattaaaggactaggcaatggcttatag

SEQ ID NO: 23150 - DNA, 567 bp, Psychrobacter piscatorii
atggcttatagaaatgggacttatgtagcgtttgatggtttagatactacaaaccctacaattggagatataaagtacttcaatatgctcaagatgtggaaaaatataagtagcaaatcattaattgatttcaaatttagtgacagccatcaaaaaacatctcaagttagggacaccagtagtaggaatacgctagagagagtgctcttagagcgtctgaaaaactctaaaaatatggttttaattttaactgaaaaaactagacatgacagagaaatgttgaactacgaaatagaaaaagctataaagatggatttaccaattattgtatgctatccaaaagtacgacaacctatatttaatccaaaatattactcagattattggcctctagctctagccgaaggtattagaaaagaagaagttcagtgtattcatataccttttaaaaagaaaccagttttagatgctattccaagatttcatatccatagcaatgagaagttagaatctttaggtttttataatagagatgcatatgatttttttaatattacatgggaatag

SEQ ID NO: 23151 - DNA, 855 bp, Microbacterium azadirachtae
atggagtctgtacggcgggatatccgcacccgacggttctggaagatcctcactacccaagcattcgccctgttcggtgcgtcggcggcggtggcgggcgccatcgccttgttcgcacccgacctgttcacccaacacggctggattgcatggtgcgccctgatggcgtccctgttgtacgggcttgcgcaggcttggccacgtcctatcgaaaccacctaccagtcgccggcaacggtgatcaagctcatccgcggtgacctgttcgcccagcatgacgcgcacctgatcatcggtgtcagtgacacgtttgacaccgctgccccgcacatctcacccaacagcgtgcaggggcagttcctggaccgcatctacggcagcgacggcgctcaactcgatgcggatatcgacgatgagctcagtcatgtggatcccgtcggcacggtggccggcaagcagggcaagacggtgcggtacccacttgggacgaccgtgacgctgcgtgcgaatgcgcgccgcttcttccttgtggcgtacacgctgatggataagggcagcaccgcctcctccacgaccgatggggtgtggaacagcctcagcgagctgtggaaaactgtgcgaagcaatagcaatggtggaccggtgtgtgtgccgatgatcggcgggggacagtccaaactctcccctgtactgccagcagcggattccgtgcggttcatcgcgttgtcattcatgctcgcctcccgcacagcgaaagtctgcgacgaactcgtgatcgttgccccaccggcccagtacgacgcactcgatcacctcgagatccaggcattcctgaactcgttgaagccgtcatga

SEQ ID NO: 23152 - DNA, 510 bp, Microbacterium azadirachtae
atgagctatcgcaacaagacctacgtcgctttcgccagcgaagacatctcgtcctaccgtctgatggaggcgtggcgcgagaacgacaagatcgatttcgatttcttcgacgcgcacgatctgtacatctctcgcgacaccagcaaaccggagacgatcaaacgcaacctgcgtgagcggctgaagaacgccaagcagatcgtgctcctgggcagcgcgaatgcgaagaagaagggctcagacgggacgtcgttcctggctcacgaggtgaaggtgatggccgagttcaacttgccgatcgtcgtcgccaacctcgacggggaccgcaccatcgaccgcaacttcattcccgatccgttgttggaagcggactactacaccctgtcggtgtcgttccagccgaagattatccagttcgctctcgacaagtatgtacccggtttcgcctcgagtagctccaccggcccgcactactacaaagaaaacgtctacgcccaactcggccggtga

SEQ ID NO: 23153 - DNA, 831 bp, Paenibacillus sp. Aloe-11
atgaaagtcccatttttcgataaaaagatactacatatattctatggctttctaaacgcgataagcgtaatcacctctattgtgtttcttttcgttgaaatagaccctaaaatcaagatggtcattggtggaggagcactggcattgttggtccttgtttacatcggaatctgggcccatgccaatatgcgtcgcagcatcaaactaacgattaacacttcagagattgaggtaaagttcggtgatatattttctgaggaggctgatctgaaagcgatcgcttttaatgaatattttgacacactggtagacgagaaagtcatctcaagcagttcactcaacggaatatatattaaaaaattctatcagggaaataccgctgttttagacgaaattatctcttctgacccccacttgccagaaatgattgtctacgaaaatgcaggcagaactgtcgggaagaagactagatataggcttggaacaatctgcacggtagacgattatctccttacggcgttctcacgtttcgatgatagaaacaaagcatatctcgagatgaacgactatataaactgcctgttgaatttctggaatgagatagacagagtctatgccggtagaacagttgccttgcctgttttgggatctgggatcactcgctttagaggatacgaaaatatattggatcaagaattgcttgaactcattatatggacatttaaagtgagccgtataaaattcacatttccttccaaggtgaaaatcgtggtctggcagaaaaaacaagaaaagataaatctactcgctctgaaggacttggaatcgtga

SEQ ID NO: 23154 - DNA, 552 bp, Paenibacillus sp. Aloe-11
atggaaaatcgaactggaacctatgttgcttttgatggtttaggagaggcagaccctacaaagtctgacttcaaatactatgccactcttcaagcatggaatgcgaataaaaacatccagttttcgctgactaacagtcacgagaaaacggatgcggtacgtgatacaagtaaacgggcaacattgtatgcacgcattcaggaacggcttagagcatcgaaaaacatgctcgtcattcttacgagtaagactcgttataccggaagtgctttatcttatgagatcgagcaggccatagacacgtacagaattccgcttattgtcgcttaccctgaattctcatctattttgtatgtggatagccacagtggcatttggccaaaggcacttaaagaccgtataaatgatacgggtatagaagcaatacatatccctttcgctaaagagtgcattttaaatgctatcacacgttttcatgtgaatggtgagcatcttagtagtggtaagaatcattacaaacgcgaaacgcaaatcaaatggggcctaatttaa

SEQ ID NO: 23155 - DNA, 876 bp, Flavobacterium sp. CF136
atgaattattatttaaaatcacttcggacaaaatcttactggatttatgcactcttaagtattgattcaatgacaacttttattgcagtagtgggcggagcctggtcattggtggatattttaagttcttggcattttgtcaataaggaaaaattaccattttggtttttagtatgtctttttttatcaggcttaatagttgttatttttacaagaagaccggtaaaaaaaataaaatataaatatccaggacaagatctaaccatagaagtatgtatagatgatttgtttacagtcaatggtcagaaagtaattagtacaaacacgacctttgatacagatatggcaagcggaattatttctaaaaaaagtttgcagggtcaattcacgcaaaaatattatccgggggacgttcctaaattggataaagaaattgaggacggtttagcaggttattcatttacagctatacagaaacaggcaggtaagacaaaacgatatgattttggaaccactgttaaattacgatatgcagaccaatttttttattggtttgccatgtctgatttaaattatagtaataatgctaaaacaactttgaaaaatgttcatcaggcattagatggtctttgggagtttattgagactaagggtgaaaaacaggatattgtaattcccttaataggctcgggacttgggagactttcaataggacgtaaaaaattgatagcgattattgcacaatcatttctaaatgcatctgaagataatattttttcaaacaagcttataattgtaattcacccaagtgatgttgataaagcaaatttaaatctatttgaagttaaagatttacttaatcattatctgccatag

SEQ ID NO: 23156 - DNA, 501 bp, Flavobacterium sp. CF136
atggcttatactgcttgttatacttgttttgacggtgatactgatatgaattgctataatttaatgaaagcatggcataaaaatggaaaatttaattttacgttcgacaatgttcatgatttagaacaggtgcgtgatactagtactgaagagacaattaagcgcagcttacgaagacggttaaacgcaagtgatgtctttgtggttttaattgggaaaagtaccaaatatctttacaaatttgtgcgatgggaaattgaagttgcaattgatatgaatttgccaataattgcaataaacttagatggcaggagaacaataaataatgatttatgtcctccgattttaagagatgccttagcggttcatgttcccttcagcccggatatagtaaattatgcaattactaactggccgtattcccatagagattacaaatcccagcgtatttcgggcagttatcgttataatgactcagtttactcacagcttggctattaa

SEQ ID NO: 23157 - DNA, 837 bp, Pantoea sp. GM01
atgttaaaggttagtttttgcgataaaaaaatcagaaccctttttttaaaatatgcttctgccacaacggcaagcattgctgcggctgctctgttttgggatatccctaaagagtataagcattactctggattggcttgcatagctgttttagtaatgatttatctaatattatggtataaagccaacaaacttacagcaattaacttatctgttgaaggaagcacagtaactattaaaactggcaatattttcgctgagcaaggattaaaagcgattgcttttaatgagtactttgatactaaagtggataacatagtcattgctcatcagagtctcaacggccagtttgttacggatcaactcacctgctcagtgcaacaattggatacctacattgatgaatataactacgaagcagaagactttgctgatattaattcaacgcggttatccggtaagaatcaacgctataaaattgggacaatttgcgtctggaatgagtacttgctgacggctttttctaaattcaacaagtataacgaagcttatttatccatgcctgaatatcttgagttcctgattaacttttggaataaggtcaaccgcgtttatgcccagcaaagtgttactgtgccgatttttggttcgggtataacacgaattaaggggcataagctgatcagtgatgaagagttgctaaaaatcatgttatggacattcagggtcagtgaaatgcgatttacccatcctgcgaaattaacaataattattcatgaagacaagattagtaaagtaaacctatttgagcttcagatggcaagaagcggcttataa

SEQ ID NO: 23158 - DNA, 501 bp, Pantoea sp. GM01
atgatataccgtaccaaaacatacattgcgggtgaatgggatggcgatcaggatgccattgaacaattacatacctggaatgagagcaaatactgggacttctctttcaccgacgctcacgatataacacaagccagagatagcagtttaaattgcaatataaaatcgtcccttgcaacacgcttaaatgcctcaaaaacatttgtcctcatcgtcggaaacaataccaaggcagcacggagtggcggctgtcgatactgtgatagctacaatagtctaagtagtcaatgtgaccggggatactcagtagatcatcgaagttatattgagtatgaatgcgataaagccttgaaggacgacttaaacatcatcgttctgtacaatgcaaccacaattaataaatccaaatgtcctgacgtcttaaagggtgtcggaacgcataccgctatgcgctcaacccacggttgggattacctcgcggttaaaaacgcgctcaattaa

SEQ ID NO: 23159 - DNA, 930 bp, Imtechella halotolerans K1
atgaaatgtcgtttaacaataggtaatggcctatggcttctatggaaatctttaagttttattaaagttgggaacaatttactatctgtatttggtgtactttggttagttattgaagtttttacattttttaacaaacaagaaatcgtaaatcaaattaaggaattttggggtctatttgtttttattggaataataatagtgatttatcaaaattggcctaaaaacaaattttcctacaaggttaacaatagagacgtttttataactttgcaaattggtgatatatttaaatcagacggcgcattgataattccggttaataatcgtttggatgttgacaatcatggcattattgcaaaatctagtagcattttacgtttatttattgacaaggtatacaatcaaaagcataattacttggcatctgatatatcttgtgaattaaaagattctgagaaattttactcaaatttcatattaacagagaatccattgacttataaaataggaacagttgtacctatttaccgcgacgaaaaacaatactaccttttatgtagctcaacactaaatggtcaaaatcgttccaagtcaacggaggatgatcttcgttcttcattaattgaattatgggcatttctatcgcattgtggatcaaaagataatttagtgattccaatcattggaactggtcgaggcagaatacaaatgacacgtgaagaagtaattaaggaaattgttctttcatttttatcatctttagacattgaatcatattgcgaacagctcacaatttgcattcatccaaacgacataaaaaaatataatgtgaatattgaaggtataactgattttataagattacactgtatgaatgcaaatttcagtcgtagaaatcacatgtcatttggacagacaatcacataa

SEQ ID NO: 23160 - DNA, 504 bp, Imtechella halotolerans K1
atgccatacagaaataaaacatatgtagcttttgacgctgacagtgatataagatattacagattaatgaaagcttggaaacaaagtgacaattcagaatttaatttctttgacgcacatgatttgacaaatatttggcaatacagttcagaagaaacaatcaagagaaatcttagagaaagactaatgaatactaaaatatttgtccttcttgttggcgaaaagacaaaatatttatacaaatatgtaaagtgggaaattgaacaagcgctaagcctagatttgcctataatagttgtaaatctaaatggaaatagaggtttagatgacgtcaattgcccatcaatcttgaaagacaagttagccttgcatattagttttaatgctaaaataattcaaaaatcactagagaattgggagacccttcatgaaaattatacatctgaaaaaaagtcagggccatttcaatatgacgaaaccatttataaacatttaggattatga

SEQ ID NO: 23161 - DNA, 843 bp, Burkholderia pseudomultivorans
atgaattcaatcaaagatctttggaacggggttcggagtcatccgtggaagctgctcgccaacatgttcacggcgttcagcgtcatccaaacggtcattcgcggcgtgtcgctattcattcccggcgtcacgatcagtggttggattcccatcctcgccgttctcgcggtcagcgtcggttgggggctgaagaaagtttggaaaccgtcgcgtatagagtttcaggtcgccaactccggctcaacgatcgagattgttttcggcgaccttttcgcacaagacggtatccgggccatcgctgtcaatgatttttttgacagcgagcttggcaagcccgtgtcggacaaaagcgtccacggcatctttttaaagagatgttttggtggacacgcggagcccttcgacaagcaagttgacgccgaactcgccaatgtccaaagcacatccgtcaaacgggcggaggggaagacgaaacgctatccgatcgggtcgaccgccctgctccaagcaaaccaagatcgctacatcgctttcgtgttcgcaaccacagatccaaacacaagcaaggcgagcgcggacgttacgatgatgtggacatcgcttcacgccttgtgggaacgcactcgaatcgaggctggcggctatcccatcaacattcctctcgtcggaagtggcctatccggattgggccttcccacgcgggaccttctgaacctcattgtcttgtcggcgatcaccgaaacgaaggccaaagagatcacgcctcggatccgaattattctcgggcgagaccggttcgaccagctcgacctacgagatgtgaagaagcattggagggagtga

SEQ ID NO: 23162 - DNA, 558 bp, Burkholderia pseudomultivorans
atggcttacagaaacggcacctacatcgcttttcacgccaacggcacaaaccgcccaggcggtaactcggacatcgactactacaacttgatgaaggcgtggaccggcaagggcgacgacagcttcacgatgatcaacagccacgacaaggcgtcggcggtcagagattcgagcaagcgggaaacgttgcgccgctctttgttggaacggctccgcaattcgaagaacatggttttgatcgtcggcgacacgacacgcctcgacacggattgggttccgtttgaaatcgcaaaggcgattgacgaatacaaactgcccatcattgccgcttacacgaaatgcagcaagcccattcggaatccggaagcgttgaagcttctttggccgcaagccctttccacaagaatcgcggctaaaacagccagggtgattcatgtgccgttcaagcaggcggcattggaagacgcaatctcgcagttttcacacgacaatttgccgaagagcgctctgtcctattactcggacgaagcctatcggagcacgggaatcacggactga

SEQ ID NO: 23163 - DNA, 858 bp, Blautia sp. KLE 1732
ttgagtaatttatttaaaaagagtgcagcatatgcttttgcaattatttcagcagtttttacctttgttccagaagctgtctttcaaaagattacgttgattccaaaagaatcttttgaacaatttgcgtggatttatataaatatttcagaaattaatattatcataaatcgtatgttggcttttgcgcttgtatgggggattgtagcagttatatatggaatctatctatgtttacgaaaaaaagttagcatgaagggggataattatcagattacagttgaatacggtgatttgcttaaaataaaaaaatgtaagaaggtaattacctttgatgaatgtttttcaacaaaggtaggagatgcgcctgctgatataaaaccaacgtctatttgtggacaatatttaaagagcaaccccaatttaaatattcaatcattaatatctggttcgcaactaaatcctatcaagagcagatcgaagtatcaaaataaggaaaggtatgagtcaggcagaatagtgccaaatggagatgacttattattggcatttgctaaattagataaaaagggattggggagattaacacgtgatgaatatttggaatgtctgacgatattgtgggaggaaatagatacatattatgggcagacagatgtatgtatacctattttaggatcaggattaactcgttttgatggcggatcgggggcatcaatttctcaacaggaattacttaatatgatgatttggtcttataagttaagttctcataaaataaaattgccgcataaattaaggataatctgtaaaaagagtggagatttttcgctaaataaaattgattctcaaatatag

SEQ ID NO: 23164 - DNA, 648 bp, Blautia sp. KLE 1732
ttgagtgctaataacgatgaagactgggaggacacatatatgagtaaacaagtatacataagtgcagactattctgaaaatgatggagatcgtgaagttgtgaaagaattaaataaatggggacaggataatcttcataaagttgattttattgatatgtctcaagtggcatctggaagtgtatcaaaagattctgattgtcgaatatgtgatttgaaaaaagagtttaatgctcaaattaatgcttcatcagcagttatatttgtggttggggataaaacagcattacgtacagcggggagttcttgtagaagggtaaacaatagtcaaagtttgtgtagttgtacaccttataagcagaatacaaatggaacgaagccttgtaaagtagcttttacatctactccaggtgaaaatgatgatgtaggatgcattaattcatactcatatttgaaacatgaatttaaacaagctgaaaaacgaaataaaaaaattattatagtttataattcatcaaggaaagaatcgacctggcttccttcttatatgaaagcgtatgaaaaagaagcgagacctttttggactaaaaatattttaggggacaaggtaggtgattactcgtatataaaagaggtgcttggtttttga

SEQ ID NO: 23165 - DNA, 960 bp, Lachnospiraceae bacterium M18-1
atgaaaagttggggttatagaataattcttaagtattttgcgcctatttcaagaaatccaattcaatatattagctgtgcgtttgcgctgttaggtgcattttatacattagttgaaattgaacaaggtgtttttggcagtgaaattttattgatgatttttagaaataatataataattattatactttcaataatatttatttctatttttctctatagggataaattagaattttctgcttttttaggccgtaaagatgataagattacattaaaaatgtcaaatttacttaaaatgcgggatacagctatagtcattccaactaatacgacatttgatacaactatgaataatgattttatcagtgaaaagagtattcagggacaatttcagaaaaagttttatggcgttgattttgctgaactcgataaggccttacaatattcgcttgatgaacagtatccgaatgaatatatagagttagatgatagaaagcaaactaaacgtaagcgctacagtataggaacggttgcaaaggtaacaaaagaaaaaacgcattactattttcttgctgtagcagatataagcagaagtggaagacccgaaaatgtaacaatgcaaaatttaacgcaagcacttgttaatttgtggaattatttgtcaaaggaaggacactctgaatcagtagcaattcccgtgataggtacaggaagagcaggcttaaaagatggaaatattgaagatgtagttcatgaaacaatattttcatttgctttggctatgcaagaagagtttgttgcaaaaggattgactgtatgcatatatccaccaacgttaagaaatgcaaatgttacttgggatgacttgtgtaattatctaaaattgcagtgctgttttgctacagaaaatgaaaagcatagaaagcaagcagaggtattaggcgctcccatcgaataa

SEQ ID NO: 23166 - DNA, 501 bp, Lachnospiraceae bacterium M18-1
atggcttataaaaataaagtatatgtgtctatggatgcagataatgatttgcggtattattttttaatgaaagcctggaagcagaacgataattcttcgtttaacttttatgatgcgcatgatattaataccatacttgataaaagtgaagaatctattaaggctggacttcaaaagcgctttatagacacaaaggtttttgtattgcttgtaggggaacatacgaaatatttatataaatatgttcggtgggaaatagatcaagcgataaaaagggaacttccatgtatagttgttaatttgaatggtaaacgttcactagatgaaaatctttgccctgcattaatgcgagatagcttagcagttcacattagtttcaactctaaaatattgcagtatgctttggaaaattggccagctagcgataaagtatatcgttccaatggagaaatagattcttatcactataaggatgttgtttatgaaaagttggggttatag

SEQ ID NO: 23167 - DNA, 858 bp, Lachnospiraceae bacterium COE1
ttgattggctttatcctaaaaagcgtagcgatggcatttggtatcgccacaggtatatttacttttgtgccagaggcgttttttggaaaatacgaatgggtaacgcagacgactcttgaacaatataaatggtttgctttttgcgatgctcaagatattaacataataatttcacgtcttgtatgctttctgcttgtgtggattggaacatcgttgttatatggagcattcctgaaatttcgaagatggactactattaaaggccagaattattcaatcaaagttgagtatgggaatatacttaaaaagaggaagtgcaagagagtaattagttttgatgagtgttttacaacacaagtaggaaatgcaacggcagatattaatccaaagtcaatatgtggacagtatttatccttacatccgaatttagatgtccaacagttgattgaaacagctcaaataacaccggcacggagtaaatcaaagtatcagcataagactcggtatgactcgggaacgatagttccgaatggcgatgacttattgatggcatttgccaaattagatgaaaggggtaaggggcgattcttttctcgagatgagtatatcaagtgcttggatttactgtggaaggaattagagaattactattctgaaaaagatgtatgcgtaccaatattaggagccggaacaacatcatttgatggcgggagcggagcctccatttcacagcaagatttacttaacatgatgatttggtcatataaattaagttctcataaaataaaggctccatataaattgcgtattgtttgtaaaaagaatagtgatttttccatcaataatatagatgggtag

SEQ ID NO: 23168 - DNA, 609 bp, Lachnospiraceae bacterium COE1
atgagcaaacaagtctatatcagtgctgactatgaccagctttatggtgatcgcaatgttgttgaagaactaaataaatggggaagtgatagtctccataaagtagatttcattgatatgtcgaaagtttcatctggaaccgtggcaaacggcgatgattgtcgaatttgtgatttaaaggcggaatttaatagacagattaatgcttcatcagctgtgatttttgttgtaggtaatcagacaggttctcgtacagcaggcagcagctgtgagcgtatgtctaaagaacaatggcaatgctactgcacaccttataaacaaaatgctaatggtattaagctatgcaagattcccagtgtttcaacacctggcgagaatgatgattatggaaacataaataaatgttcatatcttcgccatgaatttgaacaagccaaaaagaagaaaaatacaatcataattgtttataattccacacgtaaggaatcaagttggcttccttcatatatgaatggttacgaagaccttgcgagaccattttggaaaattgatgataatgggaagaaagttggagattacgcatacataaaggaggcacttggattttga

SEQ ID NO: 23169 - DNA, 816 bp, Clostridium clostridioforme CAG:511; identical to SEQ ID NO: 22835

SEQ ID NO: 23170 - DNA, 612 bp, Clostridium clostridioforme CAG:511; identical to SEQ ID NO: 22836

SEQ ID NO: 23171 - DNA, 954 bp, Porphyromonas sp. COT-108 OH1349
atgataatgtttaaacattttgttttcacaagaaagtacttaaccttgtatgagttgcgcgttatatcttgggattttgtcttcagcgtctgtaagtggataggttttttttggcttatcatagagccattaagcttcttctctcctagcattgaagaatttataaagggcaagggatggtggttattcggtgtaagtattttaatcacattaattaaaagaagacctcgactcaagtttaaatatttcatcagagataaagatgtgcatgttaacattgtcattggagacctattagcaatgaacaataaggatatagttattcctacaaacgttcattttatcacagagatatctgataaattaatttccgaaaatagtgtacaagggcagtttacaaagaaatatttcacttcacatgcccatcttgacgcagacattgtcaataacctgcgagagaccaaatatacagatgaaaatccgccatattttggtaaagacaaacaatatcctttggggaccgtcgctaaactcccaataaaaaaaaacaacaaaacaacattttggtcatatttgtttgcccttgcaaaattgaatgaacatggagtttgtcaatcgaatatagctgaatttcaaaaaaccttaccgttgttatgggattacatccaaacaaaaggagaattatcagatattgcaatgccaattcttggttcaggtttttgtcgaatcgactcttccagagaggatttgtttaaagagattttactttcgtttttagcggcaacaaggaattcaaaattttgcaaaagcttgacaattgtgatttactacagagatgtttctgagacaaatatagacctcgaatcgattaaagaatttactaaataccaaacattaaatttttcaagagaaagcgctcataaaaagggaaaaggacaagcaatcggagaataa

SEQ ID NO: 23172 - DNA, 513 bp, Porphyromonas sp. COT-108 OH1349
atggcatacaagaacaaaacatacattgcatttgatggagacaaagatattcgttactattggttgatgaaagcttggaaatataactcaaaagactttttctccgagttcaacttctatgatgcacacgatataaatttcgcaagagattcatctaaagaacaatctataaaaaggcaactttctgaaaggctcgataatacaaaactttttattttgcttgttggcgaatccacaaagtttttgtacagatttgtgagatgggaaattgagcaagcaatagaaaaaaaaataccaatcatagtaataaatctcaatggcaaaagacagtttgatattgacagatgcccctatttacttaaagatgaaaccgctatacacataagttttaatcaaaaaattatagagtatgcactgaaaaaatgggaaacccaacttcaaaagataaaacaggaaggaaaaaaaggacctttctattacactgatgaggtttataaaagcataggcttatga

SEQ ID NO: 23173 - DNA, 834 bp, Desulfotomaculum sp. 46_296
atgaaagtattgtttttcgacaaaagaatactacgtaaattctatttcgctttgagtgtgataagcgtcataacgtctatcgcattcctttttgtcgaaataggtacgaagtgtaaaacagccataggcctgaccgccttggtcattctcattgttctgtacattgggatttggattcattcgaatgtgcgccggagcatacggctgaaaatcaacacctcggaggttgaggtgaaattcggcgatatcttctcagagcaggcagatctcaaagctatagctttcaatgagtattttgacacgctggtggacgataaggttatcgcaaaaagtactctaaatggaatatttatcaataagttcttcaaagataatgtcgaggagcttgatggcattatctccgccgatgcccatttgcgcgaggtggtaatcgcggaaaatgcaactcgctctgctggcaagaagacaaagtataagctcgggacgatatgcgttgtaaatgattatcttcttacagccctgacacacttcgacgccgacaacagagcgtatctcgaaataaatgattacattaactgcttgttgaatttctggaatgaagtagatagggtttatgcaggcaagaccgtcgccttgcctgtcttgggttcggggataactcggtttaggggatatgacaacattttagaccaggaactgcttgagctcataatctggacttttaaggtgagtcgcattaagttcacgtatccgtccaaagtaaagatagtagtttataaaaataaaagcgataaaactaatttacttaaactaaaagacttggaaactgcttga

SEQ ID NO: 23174 - DNA, 513 bp, Desulfotomaculum sp. 46_296
atggcttacaggacaaagacctatattgcagcggattggaccggagataaagacgcagttgaccagctacataaatggaatgacagtaaatattggagcttgtcttttacagatgctcatgatttaacacaagcacgggatggaagtctaaactgcagtattaagacttcgctcgggaaaaggcttgacgtatctaaggctttcgtgctgattatcggaaaaaacacaaaaactgtaagaagtggaagttgccaatactgtaatagttataacagtcagacaaaaagttgtgtacgcggatactctgtggattatcgtagctacatagagtacgagtgtgataaagctgttagtgatggtttgaaaattattgtgctatataaagcggcaacaatttataaaaccaattgtccagatgctgtaaaaaacacaggcactcatactgctatgtgttaccgtaaagacggtcaactttattgggattatcaagctgtaaaagatgcaataggttaa

SEQ ID NO: 23175 - DNA, 882 bp, Sphingobacterium sp. Ag1
atgaatttaagttatacatggcagtctatcaagactaagtcttattgggagtatgcattgtggacatacgattccttaaaaatgtttcttgcggttcttggagcgttttggacaatttttgaaatgatatcttttttcaaacttttagaccagaataagcttccatcttacacatttcttatcctagtggggatatccttgattattgtgatcattacaagaaggcctattaccagtataacttacaaagttgcgggaagagaccaggtaatagttgttaagatcggagatatttttaacgagaagggtcaaaaggtcataagtacgaataccacatttgatacagatattcaaacgggtattatcgcacaaggaagtttgcagggccaatttacgaaaagatattttcagcagaatatgcaggcgctggataacctcattgataatggacttgtaggtttaaatttcgttgtatatcaaaaaagggcaggtaaggacaagaagtacccacttggtactacggtaagaatggatattatgggagagaccttttattggttagctatgtcaaatctaaattatgataatacagcaggttcaacattgcaggaagtgcttacttccttggacggactttgggattttataattgcgaaaggcgaaaatgacccaattgttttacctctggtcggcacaggtcgtggaagggtgaagacccatagaaaacgggtaatagctcgtttagcacaatcattcacacaagcaagtgaacatactgtttttagcaaaaagctgatcattgttgtacatcccagtgacgcggaagaatttggagtaaacctttttgaggttcgtgatcttttaaaacattatttaccttag

SEQ ID NO: 23176 - DNA, 552 bp, Sphingobacterium sp. Ag1
atggcgtatagaaacggaacttatgtagcgttccatgcaaatggaacaaattatcctcttgattcggatataagatattataatattattaaggcctggtcgggtagaacaagtgatgacttcacaattgtaaacagtcatgataaaactggcgctgtcagagacaccagctctaaagaaaccttaagacgaagtttaaaagaacgacttaataatagtaagaatatgatacttataattggtgaaactacaaagaatgacgacgattgggttccctttgagattgaatacgctgttgatacctgcaaaatacctttaataattacatatgtggatgttagtacgccgatttatgattgtaccccgcttctgtcaaaacttcctgcagcactgcgcactaggattgcggacagaactgcttctgctattcatattcccttcaataaaaatgctttgaaggatgctcttcgttttacatttaattttaagcctaatggttatggtaagggagtatattccgagcaagcctataaaaactttggaatgatttga

SEQ ID NO: 23177 - DNA, 837 bp, Pantoea sp. RIT-PI-b
atgttaaaggttagtttttgcgataaaaaaatcagaacccttttttttaaatatgcttccgccacaacggcaagcattgctgcggttgctctgttttgggatatccctaaagagtataagcattactccggattggcttgcatagctgttctagtaatgatttatctcctgttatggtataaagccaacaaacttacagcaattaacttatctgttgaaggaagcacagtaactattaaaactggcgatattttcgctgagcaaggattaaaagcgattgcttttaatgagtactttgatactaaagtggataacatagttattgctcatcagagtctcaacggccagtttgttacggatcaactcacctgctcagtgcaacaattggatacctacattgatgaatattcctacgaagaagaagactttgctgaaattaattcaacgcggttatccggcaagaatcaacgctataaaatagggacaatttgcgtctggaatgagtacttgctgacggctttttctaaattcaacaagtataacgaagctcatttatccatgcctgaatatcttgagttcctgattaacttttggaataaggtcaaccgcgtttatgctcagcaaagtgttactgtgccgatttttggttcgggtataacacgaattaaggggcataagctgatcagtgatgaagagttgctaaaaatcatgttatggacattcagggtcagtgaaatgcgatttacccatcctgcgaaattaacaataattattcatgaagacaagattagtaaagtaaacctatttgagcttcagatggcaagaagcggcttataa

SEQ ID NO: 23178 - DNA, 501 bp, Pantoea sp. RIT-PI-b
atgttataccgtaccaaaacatacattgcgggtgaatgggatggcgatcaggatgccattgaacaattacatacctggaatgagagcaaatactgggacttctctttcaccgacgctcacgatataacacaagccagagatagcagtttaaattgcaatataaaatcgtcccttgcaacacgcttaaatgcctcaaaaacatttgtcctcatcgtcggaaacaataccaaggcagcacggagtggcggctgtcgatactgtgatagctacaatagtctaagtagtcaatgtgaccggggatactcagtagatcatcgaagttatattgagtatgaatgcgataaagccttgaaggacgacttaaacatcatcgttctgtacaatgcaaccacaattaataaatccaaatgtcctgacgtcttaaagggtgtcggaacgcataccgctatgcgctcaacccacggttgggattacctcgcggttaaaaacgcgctcaattaa

SEQ ID NO: 23179 - DNA, 630 bp, Serratia sp. Leaf51
attccaattcctaataccgggtcgaagattgaaatagtatttggtgatatattcaatcaagagggcatacgagttattcctgcaaatgagtattttgacagtaagttaggacttccggtttcagagaaaagcttacatggaatattcattaagaaatgctttggaggacattctgagccattcgataagcaggcagaatctggcttgtctggaaagatctttgacgtagtacataacaaaagtgatggtaagcttaataaatatgaaataggaacgagtgttcttatggaagcagatacaaacaaatatcttgtttttgcttttgctcatacaaatactgaaacctgtaaagcatacattgatgtaaaagatacatgggtcgcactgcatgaaatgtggaattcattgaggaatgtgtctggcggggaaatagtaaaccttccgcttatcggtagtgggatatctggtctgggcttaccaacacgcgacatcctcaatttgatcattctatctgcaattactgaaaccaagcataaagaggttactaaattaatcagggttgtattgcaccgtgatagatttgatgatcttgatttacgtgaaataaaagattattgggagaagaaataa

SEQ ID NO: 23180 - DNA, 567 bp, Serratia sp. Leaf51
atggcataccgtaatggaacatacgtagcttttcacgcaaatggcacaaatagaccaggagagtcagatattagctattataatcttttaaaagcatggtcaggtaaaggagatgacagtttcgcgtttattaatagtcatgataaagcttcagccgtaagagattccagtaaagctgaaacattgagaaaatctctacatgaacgacttaagaactccaagaatatgttactcatcattggtgacaccacaaaagatgatgatgattgggttcctttcgaaataaataaagccgtggatacttataaactaccccttattatcgcgtatacaaaagcagtgaacgatggaggcataatcagaaatcctaatgctttatcgaagtattggcctgaagcattaaaagaaaaaatagatacatcttccgtaaatgctatacatataccttttctgaaaaatgcaataaatgatgctattgggcagttcgatcacaagaacccaccaccaggaaaagggcttggtatttatagtgatgacgcttatcgaagctttggttttactctgtaa

SEQ ID NO: 23181 - DNA, 831 bp, Methanosarcina mazei
atgttattgttgtcttttggaaaaacatatttttcgtgtgtaggcgtgatatggctctttgttggaatgtataacgagcttacacctttgaacaaaataggttgctctttttggttcctaattagcattgcactaatatttgcggtattttggtttttagtagatggatattttattgatggatttttgaaacggaaaattgttttgaaaagcaacgcattcgatacacaaatagttattaagttcggtgatctcttcaaacaagatggttggaaagccatccctgtaaatgaattctttgacagtattgttgatgataatcatgtgtcttctaaaagccttcatggtatacttttaaagaattactggagctgcaatactgaaaactgggaccaacaaataaacgactctttatcagatagagatttaattgaaaatgtttcaaggaatccagggaaatcaaaaaggtatagaatcggagcaacagcgatagctaggaagaatggaaataattttttatgtgtagcattgacaaaaacagacattgataccctacaggcatcggctaatcctatcgaattgtaccaatcaataaatggattgcttataaaatcaagggaagtttgttctggttcatcattgaatattcccctcataggttcaggattgtcaagaactggcataaagacaaacattattgtaaatattatattgatgaatatttttgaggaaagtaagaaaagcaaaattactgaagaaattagaattattctccctaaaaataaaaagaaggatttcaatctaaacaccatacagaaagactggaggtaa

SEQ ID NO: 23182 - DNA, 582 bp, Methanosarcina mazei
atggcttatcgtaatggcacgtatatagcatttgacgggcttggtcaaacaaacccaatattatccgattttaaatattatggaaatattcaggcttgggctgcaaacaaaaatatagatttcaaatatgttgacagccacgacaaaacatgtgcagtaaaggacagcagcttgagaacaacccttgaagataggataagagagcgtttatctaactcaaaaaacatgatcgtaatacttagttctgatactcgaaaaacaggaagctatctctcatacgaaatagagaaagccgttgactactatgaaattccattgattatagcttatgttgattatcgagttgttgccaatccatctcaactatcagaatactggcctgatgttcttagttcaagggtagaaaacggcactgccaaggctattcatatcccattcgtcaaagatgcaattcttgattctattggacaatttaatatttccaatatgcctgcaactgcaaagaattattacagcaaggaagctcatcaggcatttggtgtcttaagctcgactagtaacttcacaaatactctgaagtga

SEQ ID NO: 23183 - DNA, 831 bp, Methanosarcina mazei; identical to SEQ ID NO: 23181

SEQ ID NO: 23184 - DNA, 582 bp, Methanosarcina mazei; identical to SEQ ID NO: 23182

SEQ ID NO: 23185 - DNA, 831 bp, Methanosarcina mazei; identical to SEQ ID NO: 23181

SEQ ID NO: 23186 - DNA, 582 bp, Methanosarcina mazei; identical to SEQ ID NO: 23182

SEQ ID NO: 23187 - DNA, 831 bp, Methanosarcina mazei; identical to SEQ ID NO: 23181

SEQ ID NO: 23188 - DNA, 582 bp, Methanosarcina mazei; identical to SEQ ID NO: 23182

SEQ ID NO: 23189 - DNA, 831 bp, Methanosarcina mazei; identical to SEQ ID NO: 23181

SEQ ID NO: 23190 - DNA, 582 bp, Methanosarcina mazei; identical to SEQ ID NO: 23182

SEQ ID NO: 23191 - DNA, 831 bp, Methanosarcina mazei; identical to SEQ ID NO: 23181

SEQ ID NO: 23192 - DNA, 582 bp, Methanosarcina mazei; identical to SEQ ID NO: 23182

SEQ ID NO: 23193 - DNA, 831 bp, Methanosarcina mazei; identical to SEQ ID NO: 23181

SEQ ID NO: 23194 - DNA, 582 bp, Methanosarcina mazei; identical to SEQ ID NO: 23182

SEQ ID NO: 23195 - DNA, 831 bp, Methanosarcina mazei; identical to SEQ ID NO: 23181

SEQ ID NO: 23196 - DNA, 582 bp, Methanosarcina mazei; identical to SEQ ID NO: 23182

SEQ ID NO: 23197 - DNA, 831 bp, Methanosarcina mazei; identical to SEQ ID NO: 23181

SEQ ID NO: 23198 - DNA, 582 bp, Methanosarcina mazei; identical to SEQ ID NO: 23182

SEQ ID NO: 23199 - DNA, 831 bp, Methanosarcina mazei; identical to SEQ ID NO: 23181

SEQ ID NO: 23200 - DNA, 582 bp, Methanosarcina mazei; identical to SEQ ID NO: 23182

SEQ ID NO: 23201 - DNA, 831 bp, Methanosarcina mazei; identical to SEQ ID NO: 23181

SEQ ID NO: 23202 - DNA, 582 bp, Methanosarcina mazei; identical to SEQ ID NO: 23182

SEQ ID NO: 23203 - DNA, 831 bp, Methanosarcina mazei; identical to SEQ ID NO: 23181

SEQ ID NO: 23204 - DNA, 582 bp, Methanosarcina mazei; identical to SEQ ID NO: 23182

SEQ ID NO: 23205 - DNA, 831 bp, Methanosarcina mazei; identical to SEQ ID NO: 23181

SEQ ID NO: 23206 - DNA, 582 bp, Methanosarcina mazei; identical to SEQ ID NO: 23182

SEQ ID NO: 23207 - DNA, 831 bp, Methanosarcina mazei; identical to SEQ ID NO: 23181

SEQ ID NO: 23208 - DNA, 582 bp, Methanosarcina mazei; identical to SEQ ID NO: 23182

SEQ ID NO: 23209 - DNA, 831 bp, Methanosarcina mazei; identical to SEQ ID NO: 23181

SEQ ID NO: 23210 - DNA, 582 bp, Methanosarcina mazei; identical to SEQ ID NO: 23182

SEQ ID NO: 23211 - DNA, 768 bp, Bacillus amyloliquefaciens EGD-AQ14
gtgagtacattcatttcatttctagacttggatgctcgttgtagattaattattttacttatattagtagggttgtcgctagtcataataattgttcaattcattagactactttttatgaataatatcactcttaatctcaatggttccgaagttgaaattaaaaaaggtgatatttttgaagtgccaagaaataattataaagtcattgcatttaatgagtattttgacactcaagtagatgacgtaataatcgcccgcgaaacattaaatggtcaatatataaagcgttattattcacatcaagatatcactgagttggatcagaaaattaaagatgacgtaaaacttaaaattgaagaaaaaaatgttgaaagaccttttggaggaaaaacaacacgttacagcttgggatcagtctttaaagatatggatttttttctagttgctttttcgaagtttgatagggaaaatcgtgcccaattaaaactaaatgaatatgcaagctgcatgcttaatgtatggaatgaaatcaatacattacatgcaagcaaagaagtgtttatccccttattaggttctggaataacaagacatgtggattctgatgttggagtcaatgaactattacatataatgttgtggacatttcagatcagtaaagtaaagtttagagaaccagccaaagttacaattcttttgtacaaaaatgatcacaagaagatcaatttttataagttaaaggagtttgagaagaatgggttatag

SEQ ID NO: 23212 - DNA, 573 bp, Bacillus amyloliquefaciens EGD-AQ14; identical to SEQ ID NO: 22550

SEQ ID NO: 23213 - DNA, 840 bp, Thiomonas intermedia K12
atgaacataaaagtcacgatcttcgatccaaatgtaatcaagagatccgtgaaaattattgctggcgcatcaaccagcctgtccgtgtccctattgttcatcgacatcccaatcaaattaaagatatgtgcaggcattgcatttttggtcgtgctggccttgatccacgtcgtcacatggttgcgcgcaaactcgcttcgagaaatcattatcaagatcgaaggaagtaatgtaaaaatcacttccggagacatttttaaacaagaggggcttaaggcgattgctttcaacgaatatctcgacactcaggttgacaacatcatcatcagcaaggcgtcgctaaacggaaaatttatcgagtctgagttgcaggattcagtcgaggctcttgatacgcatattgcacattttcaattcgacgaaggcgatattatcgagaccgaagtccaccgacctatgggcaagacaacgcggtaccgacttggcacgatctgcgtgtacaacgacttccttctcaccgcctttgcccgatttgacgcgaggaaccaggccaacttaacgatgccagaataccttgagtttctcatcaacttctgggataaagttaataaggtctatgcgcagcggagtgtgtcaacgactatttttggctcggggattactcgcatcaaaggtcacaagacgatcagcgatgaggatttgttgaaaattatgttgtggaccttccggattagcgagatgcggttcaaatatccggcaaagctcaccatagtaattcatgagagcaagatcgatcagatcaatctcctggacattgcatcggtgaagaatggcgtatga

SEQ ID NO: 23214 - DNA, 564 bp, Thiomonas intermedia K12
atggccgctcggaatggaaattacgctgcgttttacgtggctgagccgtttagcagtaccgccttgggggcgcacgcaacacctgattttgtttactacagccagctaaggatgtggaaaggggcagacgccaacttcccgttcgttgactctcacgatcagacttacagtgttcgcgacggcagcgattgggaagccacgttgaagccacgtcttcgtgagcgtttgcgcgcctcaaagaacataatactgtttctgagtaagtcgacgctggcgtccaaggcgctaatcgaagagatcgattatggcataaacaacgagggccttccagtaatcgtcgtttacccggattttcattccaaagccagcttgcggagttctgccagcttcgcggccggcatcacatcactctggagcaaagtctccatcttcaagtcttcgatgggcaaggttccaacaattcacattccgcttctcaaggatgccatctcatcagcactgcgaaataaggacttcatgctcagcacaagggctcgcgcaggggcttatttctacaagccttga

SEQ ID NO: 23215 - DNA, 561 bp, Thiomonas intermedia K12
atggcttaccgcaatggcacctatgtcgctttccacgctggaggcacgaccgatccaactgcatcagatatcaagtattacaatacaatgaaaatgtggtgcgttaacaagaacgtcgatttcacattcatcaacagtcacgagaaggcatcggcagtacgagatacatcaacaagggagactttgcgccgctcgctggtcgcgcgcctcaacaactccaagcacatggtgcttatcctgacggcgccgacaaagaacgacaccgactgggttccattcgaaatagcctacgccgtagatgtgtgtcaaataccgatcattgctgtctatccagactacgcctcgatactggctccagcagaactctcgaactattggccccctgctcttgcatcacgcatcacgaacggcacagctcgcgtaatccacatcccgttcaaactaccggccgtgcttgattctattgagcagtttggtgtctcgaacacagcctatccgacaaatggctatggtttctacaaccgtgaaactcagattggctggggtctcataaatccctga

SEQ ID NO: 23216 - DNA, 822 bp, Porphyromonas gingivalis
atgaaacaagctaaagttttcttgtctcactttttaatagctatcggtacaatctcagcttgtatcggggctttttcatggcttggtggtagtggttatagtacaaaaaatcagattatagtcggcatatgtattctttttataggtgttgtatatgcttggtttcaaatgcgcccaagtaagtctatacaaatactcatcaatgattcttttcctcttcaggtcgagtttggagacctctttgaaaagaaaggggtagtagtcatttctgttaatgaatactttgacaccatagtagataacaaaataatagctacagagaccattcatggaaagtttatagatcgactattcaaaggaagaattccagaattggataacaagataagaaaggctttgaataatgtcatagctgaagaggcatctaatcgagttattgggaagaaaaagcgttatcctttgggaacttgtgctgtcattgaagaaggagaaaacacttacattcttaccgccctaactaagtttgatgctaataaccatgcatccattcctttatcagaatatggggctatcattcagagaattatcttgactgctgccaccgttgccaatagtagacctgtatatattcctcttttaggaagtgggcagggaggtattcagaagtcagcacaaaaaatactatcctatatgataagtcaaatagagttttgcccagatgtcagtattcccaaaggcttacatatagtagtatatgactctggtaataagaatgtaaatttagataatatcaaaagtgcttggctatcgacagttaaatag

SEQ ID NO: 23217 - DNA, 567 bp, Porphyromonas gingivalis
atgatatatcgcaatagtaactatacagctttttatgtagatgagccttttagtccatctccacttgcagcttatgcaactaaagatttttgttattatagtatgttgaaagcgtggaaaagaagtgatacttcatttcctttcaatgatgcgcacgcaaaaacatatagcgtaagagataggagtgattgggaactaacactgaagcccagattacgagaaagattaaaggtttctaaaaatatcattcttttcttgagttcaaatacaagaagtagtaaggccttaagagaggaaattgagtatggagcttgtatattagggcttccaatcattgttgtctatcctgaattagacaacaatgatattgtagagaatgataatatctctctgaaagtgaaaatgttatggaacaaactccctattttaggaacagcaatggagaatgtccctacaatccatattcctatgaaaaaggaatctcttcaacatgctttatccgactcagagctaactatacagggaaagatagcaaataatcacactcaatacttttatcacaaatga

SEQ ID NO: 23218 - DNA, 696 bp, Porphyromonas gingivalis
atggaattgtataaagtttcaacagaaacaatagatgaggtagtaaacaaattgcccattcaatctattgtacatacgtcgaaaacaccgaataatctacgagataggcttcgtgaccttatcaaaggggaaaaggggattgtaaatggtgaacgattgcgagattttgtttttccaatagataaatttgatgtattcatctctcactcacataatgatttaaaaatagcaagcctatttgcagtttggctcaaagagaaatgcgggcttagtgtatttttagactcctttgtttggggtagtgcggatggattgcttcaagaaatagacaatcagtattgtaaacaacgaaacggaaattacaactatcatagaagaaattactccacagctcacatacatacaatgttgagtatgtcaattatggaaattataaagcaaagtagaattggaatttttatagatagcccacattctattgatctccgtaatttgagcaatagtaatcgagccaaaacattatctccatggatttaccaagagattatgtttatgcgtcaatttgcagacaaaaaatcatctacccgtatgtttagctgtgagaatctaaatgagagttttcaaatagcccattctgttgatttatcagactttgcccttttaactgtaaatgatttaatcagcgttgcatcttga

SEQ ID NO: 23219 - DNA, 846 bp, Bacteroides ovatus CAG:22
atgaaaaaggttactctatttgataaaagaatcttaacgaaattctgggggtatttttctataatttcaggtataatatcttttgtctatttatttaatttctttcccgacgcatgtgagaaatgcaatctatgggtaggtcttttatgtctaattcttcttgtttttatttatctttcaatatggatttgtgttaacaaattaaagaatgtgaagatacaaattgatgggagcagtgtaattatcaaggagggagatttatttgaagaagaaggatataaagctataggatttaatgaatattttgacactcaagttgataatagaataatttcagaacattccttaaatggtatttttataaataccatatgcgccaacaagacaaaagaacttgacaagtatataactgaacaatgcgatgatgatgatattatagagaaaggggttaatagaaaaaatggaggaaaagcgattaaatacaaattgagtactattattgtttacaaagaatatttattaacagctttttctaaattcgacgataagaatagggcttatttaactatgcctgaatatgtcgaatttcttatcaatttttgggatagggttaatagaatttatgctcaaaaaagcgtttctgtacctatttttggatcaggtattactcgaataaaggaacataaaaatataactgatgaagatttattaaaaataatgctttggacatttaagttaagcgaatacagattcaaatatcctgcaaaattaactatcatcatacataaagacaaaatagatgaaattaacttattagatattgaatcgatgggaaaaggattatag

SEQ ID NO: 23220 - DNA, 564 bp, Bacteroides ovatus CAG:22
atgggatataaaaatggtaattattctgcattttatgtcagtgaaccttttagcgaatcatcactaggtgcttatgctgcaaaagattttcagtattataatttgctaagagcatggaagggcagggatagttcgtttcttttcaatgattcgcataataaaacatataatgttcgtgatggaagtgattgggagaagacactaaaaccaagactaagagaaagattaaattgttccaaaaatattatcctctttctaagttccgtaacgaaaaattcaaaagcattgagagaagaaattgattatggaattaacacgcttgggcttcctgtaattgtaatatatcctgagcttaaagacaaatcatcattgttaacatctacagggaaagcattaaatagtactgtggaagccctttggaataatctcccaattttcagggattcaaaatcagtagttcctgttttacacatccctctaaacaaagagcttattgaacaggctcttaatgatccagatttaatgataaatagcaaatgcgatccaggtgattattttttttaa

SEQ ID NO: 23221 - DNA, 513 bp, Bacteroides ovatus CAG:22
atgacttacaggacaagaacttacattgctgctgaatgggatggagatagtgatgccgtccagcaattacataaatggaatgatagtaaccattttagtttgtcgtttactgatgcccacgatttacagcaatcaagagatggtagtctaaattgcagtataaaacgttctcttgcggaaaggcttgatgcatctaaaacatttgtacttattgttggtagcaatacaaaaagtgtacgaagtggtagttgtcaatactgcggtagtaaaaatagttggacaggagtttgcgcacgaggaaattttgtggataatcgtagttatagcgaatatgaatgtgaaaaagctgttcgagatggactaaaaattgtagtattgtataatgctgctacagtagataaatctaaatgtccagatgctgtaaaatatgttggtactcataaagcaatgtgttattatcaaaatggacaatactactgggattatcagactgttaaatctgctttaggttaa

SEQ ID NO: 23222 - DNA, 894 bp, Clostridium sp. L2-50
atgaacaaagtaaatgtgataaaacaaaatttggagttcataggtaaaacgtggattaagtgtattggtacatttgcaagtatattatcgcttttctttttgttttggacttgggatgatatacgcattacgtcaacacgatataaatgtgtgataataatattattatgtgtgcttgcgctcatacttgcaattctatggacgtgtatttttaagagaacaaagacaatttgggaaagtccatctgggaaaataaaagtatgttattctgatattatgaaagatgggtttgacaaaaggaacaaggaagaaaagttatttgtaattccggttaattcatgttttgacactattgtagatgaagatatatcaacatgttcaaagccattggtatcacctaattcgctacatggaagatggataaaaacaatggttaataagggatttactatagaagaaatagacaacaagatacataattgcttggaaatgcaaaatttagtgcccaaaagtattattgctgacgaagataaggaacgtgggaaaagagaagtatatgagttaggtacagtggcgatgattaggggaaataacaatagtacctttttgttacttgcaatttcggaatacgataaagataatatcgctcatacttctgtcgatgatttagaaatgtgcataaaatcacttcttaatttttacgatcaacatggtcaagggcatagattggtaattccattgatgggaacaaacctttcgagagcaggattgtcacataatgattcactgagagtaataacatcgttatttcaattgtatggagataaaatacatggagaagttgatgttgttatatataaaggagataaagataaagtaacattagacatatag

SEQ ID NO: 23223 - DNA, 246 bp, Clostridium sp. L2-50
gtgcgagatggtagtgattgggaaaagactcttaagcctagacttcatacaagacttgacaattctaagaacattattttatttttaagttccattactgccaatagtcgtgcattgagggagaaaatgaattacggaataggtacaaaaggtttaccggtaattgtaatttatccagattacgacaagaagtcagatatagttgatagtaatagcggcatagctaattgccatgtaatcacatga

SEQ ID NO: 23224 - DNA, 555 bp, Clostridium sp. L2-50
gtgaacagaacaggtacatatgttgcctttgacgggcagggatcgacagatcctacagaaagcgatattcattattttaacttgctgaaggcatggaataaatctggaagtatagattttaggtttactaattcacatgaaaaaacttatcaggtacgtgatagctcatcaaaagcaacgctttttaacagattagaaactagattatcagcgagtaagaattttcttctgattatatcggataagacaaattatgacagaggaattcttaattgggaaattgaaaaggccgttgattattatgagttgccaatcataatagcatatccagggtattctaagattggcgcaccttctgaattgaatagcatgtggacaaaatctttggcggaacgaataaaaaatgaaagggcacattgtatacatataccgtttaaaaaagaaccgatatttgacgcgattaatcagttttctgttgttaattcaaagtatcctaagggaggcgctttggggttttactcagaggaagcgtataaaagctggggtattgtttag

SEQ ID NO: 23225 - DNA, 816 bp, Porphyromonas sp. COT-290 OH860
atgaagcaattgaagattttctcgtcttattttctgtcttttattggtgcaatatcagcctttgtaggtgctttttcatggctaaatggttatggattgatggcttgcattgtatttgtcggaggtatcgtgcttattggtactggatatgccttgttccaaatgcgtccaagcaaatccattcagttactaatcaataactcgtttcctcttcaaatagaagatggagacctctttgcaaagaaaggtgttgtaattatttctgttaatgattattttgatacgattgtcgacaacagaataatagcagcagatactattcatggaaaattcatagagaaatttttcagagggagaatttcagaacttgatgataaaattgatactgcgttaagaagtgaagtacccattgatgttcccaatcgtgcagaaggaaagaagaaacgctatcctcttggtacatgtgcagtcttagatgagggtgagaatacatatattcttgcagctttaactaagtttgatgagaacaatcatgctttcatccctttatctgaatatggtacaatcattcagaaaatcatcgtaaaagcttctatcactgctaatagcagacctgtatatatgcctttattaggaagtggtcagggtggtatacaaaaatcggcacaaaggatattgtcttatattataagccaaatagagttttgttcaaatgtaagtattcctaaggggctgcatattgtgatttatgatctcagcaaaaagggaatcaatttggacaacatgaagagtgcttggcagtctgcaattaaataa

SEQ ID NO: 23226 - DNA, 564 bp, Porphyromonas sp. COT-290 OH860
atgatgtatcgcaatagtaactatacagctttttatgtagatgagccttttagtccatctccacttgcagcttatgcaacgaaagatttttgttattataatatgttgaaagcatggaaaggaaatgatgctttattcccttttaatgatgcgcactcaaaaacatatagcgtaagagatggaagtaactgggaactaacattgaagcccagattacgagaaagactaagactctccaaaaatattattttatttttgagttctaacaccaaatatagtcgtgctttaagggaggaaattagttatggagcttgtactcttgggctccctatcattgttgtttatcctgaattagataattcgcaaatagtttcaaacgagcagctatcgagcagagtgaaattgctttgggataaattgccaattctaaaagaagctatgaccaaggttcctacattacacattcctatgagacagaatagtgtgagtaatgccttatcagactcggaactgacaattcaaggcaaaaaaggtggtgatgtaactaaatacttttacaaataa

SEQ ID NO: 23227 - DNA, 675 bp, Porphyromonas sp. COT-290 OH860
atgaatgtaataggcgaggtgttagacacctcgcctattacatcaacacagccattagagagacctcgcgaattacacagtgaattgcgtcgtcttgtaaaaggagaaagaggcatcatcgatggagaaagattgcaaaatttcgttttcccaaccaataattatgatgtattcatctcacattcacatgacgatttagaaatagcaaaacaatttgctgcttggcttaaagagaaatatagatatagtgtgtttttagactcctttgtttggaatagtgctgatggcttgctccaagaaatagataacctatattgtaagcagagaaacggactttataactaccatagaagaaattattcaacagctcacatacatacaatgctaagtatgtcaattatggaaattataaagcgaagtaaggtgggaatattaatagatagtcaccactctataaatcttgagagacttcgtaattccaatcaggcaaaaaccctctctccatggatttttcaagagattatgtttatgcgtcaatttgcaaaccaaaaatcatctactcgtatgtttagcagtgaaagtctaaatgaaggtttacaaatagcacatactgttgatttgtccgattttactaccttaacagcaagggatttaatcagtaaaacatctttataa

SEQ ID NO: 23228 - DNA, 834 bp, Acetobacter pasteurianus
ttgaaagtcaatctaattaataagcaggttcgtgattcattcttcaagattgcggctggaattggaaccgcactgtctaccttactgctttttgtggaaataccccagaactggaagctccgctcactcataatttttgctgtaattttggctggtatctatctggtgatctggtggtgcgcgaataatctaaaaaaagtaactatcaagatcgacggcaccacagtcacagtgaaatctggggatatcttcaatgagtcggggctgaaagctattgctttcaacgagtattttgacacagttgtagataataaactgatcagtgagcgatctctcaatgggatattcctaaaatcaaagttaaatggaaccatagaggaactggacatagaaattgaacaatttccgttcgaggaaggggaggttctgcagcgagaggtatcgcgggacgctggaaaatcagtgaaatttaagctaggcaccatttttgtgaaagatgattttctcttgactgcaatgtccaaatttgatgccagcaatcgtgcaaacctgactatgccggaatacttggagttcttaataaacttctgggatggggtaaataaagtttatgcacagcgctccgtcgtaacgccgatattcgggtccggaattacgcgtatcctcggacaccgaaacataactgatgaagatctactgaagataatgttatggacattccgtataagtgagatgcgttttaagtatcccgcaaatcttacgatagtggtgcacgaagagaaaattgatcaggtaaatcttcttgacctaaaggcattgcgaaacggcgtataa

SEQ ID NO: 23229 - DNA, 552 bp, Acetobacter pasteurianus
atggtaaatcgaactggaacctatattgcttttgacggacttgggcaaaaggacccaacgaagtcagattttagatattatgccacgattcaggcgtggaatgcctcaaagcacagagaatttagattcaccaatagtcatgagaaggcaagcgctgttcaagatacaagtaagctcgccaccttacatgccagtatcaggaataggcttctggcttcaaagaacatgttgattgttctatcagataatacgcgaaaaagcggtagtgtactttcttgggaaatagagaaagctgttgatgaatacggccttcctttaatcattgcgcacacgggatactcggcaatcttggcccccaaagaattatcgaatcgttggcccacatcattggcggtaaggttgaataatggaacagcaaaagcaatacacgtacccttcaagcaagatgccattttcaacgcaattcaacgctttactgttaatggagaaaaattagacggatcatttatttgctataacaaagcggtacaaaagcaatggggttacatttaa

SEQ ID NO: 23230 - DNA, 510 bp, Acetobacter pasteurianus
atggcatatcgtaataagacctacgtcgcgttcgccagtgaagacattagcagctaccgcctgatggaagcatggaaggccaactcgaaaatagattttaactttttcgatgcccacgatctttttatatctcgcgacacgagtaagccagaaactatcaaaaaaaacttacgggaaaggttaaaaaacgcgaagcagattgtccttttaggtagcagagaaggcaaaaagaaaggggatgacggcgtatcctttctggctcacgaaatagcggttattatggagtttaatctacctgtcgttgtcgccaatcttgatggtgatcgaagcatcgataggaattatattccaaataagttgatagacgctgattattacactgtttcaacttcattccagccacagataataatgcatgcgctggatgactatgtatcagatttttacctgagtagtaaaaagggcccccatcagtacccggcgaaaacctataccgaccttggcctgtaa

SEQ ID NO: 23231 - DNA, 879 bp, Enterobacter cloacae S611
atgaaatattggtgggagtcggtaagaactacagcatattggcgatatgctctattttcaggcgaggcaatagcaaagtttttttctgtccttggcgtgttatatttgttgattaatttagccgatactttcaagatttacgagaaagggcagtatagcaattatgggattttcattcttattggtttggccattgtctttgtgatatttacaaggcgcccagtgtcacgagtgtcttacaaagtgcctaagaaagattactcatttgaagtgaaaataagtgatttattcaaggagagtggagagataataattagttcaaacaccacatttgatactgatatgagttcgggtctaatatctacagctagtttacagggtcaatttgcaactcagttttttaatgggcaaacaacagaaatagaccgacagattgaagaatcacttgcgcgagaaaactatgtagaaattgatggcaagcccggcaaactaaaaaaataccctcttggtactgttgctcgcgtttcagctcatggcaagaatttctattttgtcgcaatgtcagatattaatcctgaaggaacagcattttcaaatagtagaatgctggacgaggctcttgaaggtctatggtcaaatatggcacgaaaaggagaattaggtgatattgttatgcctctaatggggacaggaagagggcgggtggctatatcaagaaagaaagtaatagagcgcattgctcagtcgtttgccgatgcggctcaagaacgagtgttttccaataagttatctattatagtccggcctgaagatgcatcaaaattcactttaaatttgtttcaagtgagagattacctaagtcaaagccttaatgcttaa

SEQ ID NO: 23232 - DNA, 915 bp, Enterobacter cloacae S611
atgaaaaccgatttatttatttcttacgcatggacgtcagcagagcattgtaagtgggttcacctctttgcttctcatcttcatatggcaggtttcatcgttaaaattgacgaaagagtcgactatggaagtagcttgagcggatttatgcgtgagatgacagattgtgcgcatgttcttatgatcgttgacgccaactacgttgaacgcgcgaataacatgccactttcaggggtagccattgaaaacagatggataagcgatgttttggaaaccaagccagagacgtggctgtcagttatgtttgttgacaatcctagttgcgaattgccgggctggcttactccacataatcctaaaggttttgatttcaattatcctgaagagaggatggcttaccctggggccagccaaattgaagcgatttggcgctggatcgcgggtttgccagccgacaaaagcaatgcggtttcaattgcaacccacagagagcgctgcgcaagacttgagcatgccgatactctgcttgatccggcgaattacaccaacccagctcttaacggacgcgttacattcaatcatagagaccatagctactatagagtcggttacggtgaacataaattcgatatcatgttcgacgaagcgaacagtaatatagtcagaatctataaagattatgacctcaaagctgtatggaagcttcagggagaaaattcagacccattagatttcagggctgaaatgaggccaacacgtacggtatctctgatggttgggcagaaagcaatgctgttaaacaatagtggaatggtttgcgaagtaaccattgaagaaatacaacctgaagttgaaggtgaaaattacgtgaaggaacacgtaacattctcgtataagatacatcacgataagtaa

SEQ ID NO: 23233 - DNA, 552 bp, Enterobacter cloacae S611
atggcttacagaaatggaaattatatagcgttcgatggcttaggtgaaactgatccaaccaaatcggattttcgctattatgcctcaattcaggcatgggcagcgggaaagggatacgattttaaatatgtagacagtcatgataaaactttcgcagtacgagattctagtctgagagcaacactcgaagcgcgtataaaagagcgtcttgctgcatcaaaaaatattgtaatcatcttaagtgataaaacacgtaagactggaagtatgctttcatatgaaatcgagaaggctgttgatatttataaacttccactaatctgcgcttatacagatttaaatcaaatgttgactccttctgcgtggagtcaccgctggcctcttgcactcaaagatcgtatagaaaacggaagtgctagagctatccatattccattcaaaaaactagctttactagatgcactgacctataccgtacatagccataatttggagaatgggttgcactattattctcctgaggctcatcttaaattcgggtgcatagattaa

SEQ ID NO: 23234 - DNA, 837 bp, Escherichia coli CFT073; identical to SEQ ID NO: 22667

SEQ ID NO: 23235 - DNA, 924 bp, Escherichia coli CFT073
gtgatagcatatgaaaacatagaattttttatatgcttggtgaatgttttgggcaacaatatgtataatatccttttcttcatctttctttcaatagcaattccattccttttattcctcgcatggaaacagcacctaaaaaccaaagagattcgttcatatctattgaaagagggatataatattattttcaacggagaaggtaactcatatctcgcgtttaatattagtaatgcgacatttcgcgcaggtaatttaacttccaatgattattttcaagcatcaatttcttatatccacgattatagatgggagtggaaggaggttgaggcaaagaaaataaataatatatttattatttacatttcgaatattgatttcccttcccaaaaactattttatcgcaataataaatctttagcagaaatagactgggcaaaattacaagcaatttttcatcaaccatatgaaatacagaatgacgtcatgcaagataacaataatacgcactatgattttttcatatcccatgcaaaagaggataaagatacttttgtcagaccactggtagacgagttaaatagacttggtgtaattatttggtatgatgaacagacacttgaagtcggcgatagcttaaggagaaatattgatttaggcctaagaaaagcaaattatggcatagtcatactttctcataactttctaaacaagaaatggacacaatacgaattagatagtttaattaatcgtgcagtgtatgatgataataagattatattgccaatctggcataatatcaatgctcaagaggtatctaaatacagccattatttggcggataaaatggcactgcaaacttctttatatagcgttaaggaaatagcaagagagttggctgaaatagcatacaggagaagataa

SEQ ID NO: 23236 - DNA, 510 bp, Escherichia coli CFT073
atgagttatcgtaataagacatatgtggcttttgcaagtgaagatataaagttttatcgtcttatggaggcatggaaagcaaatgaaaaaatagactttaacttttttgatgctcatgatctctttatttcaagggatacaagtaaacctgaaaccataaagcgaaacctccgcgaaaggatgaaaaatgctaaacaagtagtactgttgggaagcggtaatactaagagaaaaggtagcgatggagtatcgtttcttgcccatgaaatagatcttatcgtagaatttaatcttcctgttgtaatagctaatttagacggagatagaacagtcgataagaacttcattcctaaaccacttttagattcagaacattatacagtatctgtctctttccaacctaaaattattaaatatgcattagataattactgtgttaactattactcaagttcaaatagtggtagttatctataccctacatctgtttatactaagctaggtctgtaa

SEQ ID NO: 23237 - DNA, 837 bp, Escherichia coli MS 45-1; identical to SEQ ID NO: 22667

SEQ ID NO: 23238 - DNA, 924 bp, Escherichia coli MS 45-1; identical to SEQ ID NO: 23235

SEQ ID NO: 23239 - DNA, 510 bp, Escherichia coli MS 45-1; identical to SEQ ID NO: 23236

SEQ ID NO: 23240 - DNA, 837 bp, Escherichia coli MS 110-3; identical to SEQ ID NO: 22667

SEQ ID NO: 23241 - DNA, 924 bp, Escherichia coli MS 110-3; identical to SEQ ID NO: 23235

SEQ ID NO: 23242 - DNA, 510 bp, Escherichia coli MS 110-3; identical to SEQ ID NO: 23236

SEQ ID NO: 23243 - DNA, 837 bp, Escherichia coli MS 153-1; identical to SEQ ID NO: 22667

SEQ ID NO: 23244 - DNA, 924 bp, Escherichia coli MS 153-1; identical to SEQ ID NO: 23235

SEQ ID NO: 23245 - DNA, 510 bp, Escherichia coli MS 153-1; identical to SEQ ID NO: 23236

SEQ ID NO: 23246 - DNA, 837 bp, Escherichia coli MS 200-1; identical to SEQ ID NO: 22667

SEQ ID NO: 23247 - DNA, 924 bp, Escherichia coli MS 200-1; identical to SEQ ID NO: 23235

SEQ ID NO: 23248 - DNA, 510 bp, Escherichia coli MS 200-1; identical to SEQ ID NO: 23236

SEQ ID NO: 23249 - DNA, 837 bp, Escherichia coli MS 60-1; identical to SEQ ID NO: 22667

SEQ ID NO: 23250 - DNA, 924 bp, Escherichia coli MS 60-1; identical to SEQ ID NO: 23235

SEQ ID NO: 23251 - DNA, 510 bp, Escherichia coli MS 60-1; identical to SEQ ID NO: 23236

SEQ ID NO: 23252 - DNA, 837 bp, Escherichia coli NC101; identical to SEQ ID NO: 22667

SEQ ID NO: 23253 - DNA, 924 bp, Escherichia coli NC101; identical to SEQ ID NO: 23235

SEQ ID NO: 23254 - DNA, 510 bp, Escherichia coli NC101; identical to SEQ ID NO: 23236

SEQ ID NO: 23255 - DNA, 837 bp, Escherichia coli H263; identical to SEQ ID NO: 22667

SEQ ID NO: 23256 - DNA, 864 bp, Escherichia coli H263; identical to SEQ ID NO: 22668

SEQ ID NO: 23257 - DNA, 510 bp, Escherichia coli H263; identical to SEQ ID NO: 23236

SEQ ID NO: 23258 - DNA, 837 bp, Escherichia coli str. 'clone D i2'; identical to SEQ ID NO: 22667

SEQ ID NO: 23259 - DNA, 924 bp, Escherichia coli str. 'clone D i2'; identical to SEQ ID NO: 23235

SEQ ID NO: 23260 - DNA, 510 bp, Escherichia coli str. 'clone D i2'; identical to SEQ ID NO: 23236

SEQ ID NO: 23261 - DNA, 837 bp, Escherichia coli str. 'clone D i14'; identical to SEQ ID NO: 22667

SEQ ID NO: 23262 - DNA, 924 bp, Escherichia coli str. 'clone D i14'; identical to SEQ ID NO: 23235

SEQ ID NO: 23263 - DNA, 510 bp, Escherichia coli str. 'clone D i14'; identical to SEQ ID NO: 23236

SEQ ID NO: 23264 - DNA, 837 bp, Escherichia coli H397; identical to SEQ ID NO: 22667

SEQ ID NO: 23265 - DNA, 924 bp, Escherichia coli H397; identical to SEQ ID NO: 23235

SEQ ID NO: 23266 - DNA, 510 bp, Escherichia coli H397; identical to SEQ ID NO: 23236

SEQ ID NO: 23267 - DNA, 837 bp, Escherichia coli J96; identical to SEQ ID NO: 22667

SEQ ID NO: 23268 - DNA, 864 bp, Escherichia coli J96; identical to SEQ ID NO: 22668

SEQ ID NO: 23269 - DNA, 510 bp, Escherichia coli J96; identical to SEQ ID NO: 23236

SEQ ID NO: 23270 - DNA, 837 bp, Escherichia coli KTE106; identical to SEQ ID NO: 22667

SEQ ID NO: 23271 - DNA, 924 bp, Escherichia coli KTE106; identical to SEQ ID NO: 23235

SEQ ID NO: 23272 - DNA, 510 bp, Escherichia coli KTE106; identical to SEQ ID NO: 23236

SEQ ID NO: 23273 - DNA, 837 bp, Escherichia coli KTE124; identical to SEQ ID NO: 22667

SEQ ID NO: 23274 - DNA, 924 bp, Escherichia coli KTE124; identical to SEQ ID NO: 23235

SEQ ID NO: 23275 - DNA, 510 bp, Escherichia coli KTE124; identical to SEQ ID NO: 23236

SEQ ID NO: 23276 - DNA, 837 bp, Escherichia coli KTE131; identical to SEQ ID NO: 22667

SEQ ID NO: 23277 - DNA, 924 bp, Escherichia coli KTE131; identical to SEQ ID NO: 23235

SEQ ID NO: 23278 - DNA, 510 bp, Escherichia coli KTE131; identical to SEQ ID NO: 23236

SEQ ID NO: 23279 - DNA, 837 bp, Escherichia coli KTE133; identical to SEQ ID NO: 22667

SEQ ID NO: 23280 - DNA, 924 bp, Escherichia coli KTE133
gtgatagcatatgaaaacatagaattttttatatgcttggtgaatgttttgggcaacaatatgtataatatccttttcttcatctttctttcaatagcaattccattccttttattcctcgcatggaaacagcacctaaaaaccaaagagattcgttcatatctattgaaagagggatataatattattttcaacggagaaggtaactcatatctcgcgtttaatattagtaatgcgacatttcgcgcaggtaatttaacttccaatgattattttcaagcatcaatttcttatatccacgattatagatgggagtggaaggaggttgaggcaaagaaaataaataatatatttattatttacatttcgaatattgatttcccttcccaaaaactattttatcgcaataataaatctttagcagaaatagactgggcaaaattacaagcaatttttcatcaaccatatgaaatacagaatgacgtcatgcaagataacaataatacgcactatgattttttcatatcccatgcaaaagaggataaagatacttttgtcagaccactggtagacgagttaaatagacttggtgtaattatttggtatgatgaacagacacttgaagtcggtgatagcttaaggagaaatattgatttaggcctaagaaaagcaaattatggcatagtcatactttctcataactttctaaacaagaaatggacacaatacgaattagatagtttaattaatcgtgcagtgtatgatgataataagattatattgccaatctggcataatatcaatgctcaagaggtatctaaatacagccattatttggcggataaaatggcactgcaaacttctttatatagcgttaaggaaatagcaagagagttggctgaaatagcatacaggagaagataa

SEQ ID NO: 23281 - DNA, 510 bp, Escherichia coli KTE133; identical to SEQ ID NO: 23236

SEQ ID NO: 23282 - DNA, 837 bp, Escherichia coli KTE137; identical to SEQ ID NO: 22667

SEQ ID NO: 23283 - DNA, 924 bp, Escherichia coli KTE137
gtgatagcatatgaaaacatagaattttttatatgcttggtgaatgttttgggcaacaatatgtataatatccttttcttcatctttctttcaatagcaattccattccttttattcctcgcatggaaacagcacctaaaaaccaaagagattcgttcatatctattgaaagagggatataatattattttcaacggagaaggtaactcatatctcgcgtttaatattagtaatgcgacatttcgcgcaggtaatttaacttccaatgattattttcaagcatcaatttcttatatccacgattatagatgggagtggaaggaggttgaggcaaagaaaataaataatatatttattatttacatttcgaatattgatttcccttcccaaaaactattttatcgcaataataaatctttagcagaaatagactgggcaaaattacaagcaatttttcatcaaccatatgaaatacagaatgacgtcatgcaagataacaataatacgcactatgattttttcatatcccatgcaaaagaggataaagatacttttgtcagaccactggtagacgagttaaatagacttggtgtaattatttggtatgatgaacagacacttgaagtcggcgatagcttaaggagaaatattgatttaggcctaagaaaagcaaattatggcatagtcatactttctcataactttctaaacaagaaatggacacaatacgaattagatagtttaattaatcgtgcagtgtatgatgataataagattatattgccaatctggcataatatcaatgctcaagaggtatctaaatacagccattatttggcggataaaatggcactgcaaacttctttatatagcgttaaggaaatagcaagagagttggctgaaatagcatacaggagaagatga

SEQ ID NO: 23284 - DNA, 510 bp, Escherichia coli KTE137; identical to SEQ ID NO: 23236

SEQ ID NO: 23285 - DNA, 837 bp, Escherichia coli KTE153; identical to SEQ ID NO: 22667

SEQ ID NO: 23286 - DNA, 924 bp, Escherichia coli KTE153; identical to SEQ ID NO: 23235

SEQ ID NO: 23287 - DNA, 510 bp, Escherichia coli KTE153; identical to SEQ ID NO: 23236

SEQ ID NO: 23288 - DNA, 837 bp, Escherichia coli KTE160; identical to SEQ ID NO: 22667

SEQ ID NO: 23289 - DNA, 924 bp, Escherichia coli KTE160; identical to SEQ ID NO: 23235

SEQ ID NO: 23290 - DNA, 510 bp, Escherichia coli KTE160; identical to SEQ ID NO: 23236

SEQ ID NO: 23291 - DNA, 837 bp, Escherichia coli KTE174; identical to SEQ ID NO: 22667

SEQ ID NO: 23292 - DNA, 924 bp, Escherichia coli KTE174; identical to SEQ ID NO: 23235

SEQ ID NO: 23293 - DNA, 510 bp, Escherichia coli KTE174; identical to SEQ ID NO: 23236

SEQ ID NO: 23294 - DNA, 837 bp, Escherichia coli KTE88; identical to SEQ ID NO: 22667

SEQ ID NO: 23295 - DNA, 924 bp, Escherichia coli KTE88; identical to SEQ ID NO: 23235

SEQ ID NO: 23296 - DNA, 510 bp, Escherichia coli KTE88; identical to SEQ ID NO: 23236

SEQ ID NO: 23297 - DNA, 837 bp, Escherichia coli KTE145; identical to SEQ ID NO: 22667

SEQ ID NO: 23298 - DNA, 924 bp, Escherichia coli KTE145; identical to SEQ ID NO: 23235

SEQ ID NO: 23299 - DNA, 510 bp, Escherichia coli KTE145; identical to SEQ ID NO: 23236

SEQ ID NO: 23300 - DNA, 837 bp, Escherichia coli KTE167; identical to SEQ ID NO: 22667

SEQ ID NO: 23301 - DNA, 924 bp, Escherichia coli KTE167; identical to SEQ ID NO: 23235

SEQ ID NO: 23302 - DNA, 510 bp, Escherichia coli KTE167; identical to SEQ ID NO: 23236

SEQ ID NO: 23303 - DNA, 837 bp, Escherichia coli KTE15; identical to SEQ ID NO: 22667

SEQ ID NO: 23304 - DNA, 924 bp, Escherichia coli KTE15; identical to SEQ ID NO: 23235

SEQ ID NO: 23305 - DNA, 510 bp, Escherichia coli KTE15; identical to SEQ ID NO: 23236

SEQ ID NO: 23306 - DNA, 837 bp, Escherichia coli KTE189; identical to SEQ ID NO: 22667

SEQ ID NO: 23307 - DNA, 924 bp, Escherichia coli KTE189; identical to SEQ ID NO: 23235

SEQ ID NO: 23308 - DNA, 510 bp, Escherichia coli KTE189; identical to SEQ ID NO: 23236

SEQ ID NO: 23309 - DNA, 837 bp, Escherichia coli KTE191; identical to SEQ ID NO: 22667

SEQ ID NO: 23310 - DNA, 924 bp, Escherichia coli KTE191; identical to SEQ ID NO: 23235

SEQ ID NO: 23311 - DNA, 510 bp, Escherichia coli KTE191; identical to SEQ ID NO: 23236

SEQ ID NO: 23312 - DNA, 837 bp, Escherichia coli KTE201; identical to SEQ ID NO: 22667

SEQ ID NO: 23313 - DNA, 924 bp, Escherichia coli KTE201; identical to SEQ ID NO: 23235

SEQ ID NO: 23314 - DNA, 510 bp, Escherichia coli KTE201; identical to SEQ ID NO: 23236

SEQ ID NO: 23315 - DNA, 837 bp, Escherichia coli KTE206; identical to SEQ ID NO: 22667

SEQ ID NO: 23316 - DNA, 924 bp, Escherichia coli KTE206; identical to SEQ ID NO: 23235

SEQ ID NO: 23317 - DNA, 510 bp, Escherichia coli KTE206; identical to SEQ ID NO: 23236

SEQ ID NO: 23318 - DNA, 837 bp, Escherichia coli KTE220; identical to SEQ ID NO: 22667

SEQ ID NO: 23319 - DNA, 924 bp, Escherichia coli KTE220; identical to SEQ ID NO: 23235

SEQ ID NO: 23320 - DNA, 510 bp, Escherichia coli KTE220; identical to SEQ ID NO: 23236

SEQ ID NO: 23321 - DNA, 837 bp, Escherichia coli KTE53; identical to SEQ ID NO: 22667

SEQ ID NO: 23322 - DNA, 924 bp, Escherichia coli KTE53; identical to SEQ ID NO: 23235

SEQ ID NO: 23323 - DNA, 510 bp, Escherichia coli KTE53; identical to SEQ ID NO: 23236

SEQ ID NO: 23324 - DNA, 837 bp, Escherichia coli KTE57; identical to SEQ ID NO: 22667

SEQ ID NO: 23325 - DNA, 924 bp, Escherichia coli KTE57; identical to SEQ ID NO: 23235

SEQ ID NO: 23326 - DNA, 510 bp, Escherichia coli KTE57; identical to SEQ ID NO: 23236

SEQ ID NO: 23327 - DNA, 837 bp, Escherichia coli KTE58; identical to SEQ ID NO: 22667

SEQ ID NO: 23328 - DNA, 924 bp, Escherichia coli KTE58; identical to SEQ ID NO: 23235

SEQ ID NO: 23329 - DNA, 510 bp, Escherichia coli KTE58
atgagttatcgtaataagacatatgtggtttttgcaagtgaagatataaagttttatcgtcttatggaggcatggaaagcaaatgaaaaaatagactttaacttttttgatgctcatgatctctttatttcaagggatacaagtaaacctgaaaccataaagcgaaacctccgcgaaaggatgaaaaatgctaaacaagtagtactgttgggaagcggtaatactaagagaaaaggtagcgatggagtatcgtttcttgcccatgaaatagatcttatcgtagaatttaatcttcctgttgtaatagctaatttagacggagatagaacagtcgataagaacttcattcctaaaccacttttagattcagaacattatacagtatctgtctctttccaacctaaaattattaaatatgcattagataattactgtgttaactattactcaagttcaaatagtggtagttatctataccctacatctgtttatactaagctaggtctgtaa

SEQ ID NO: 23330 - DNA, 837 bp, Escherichia coli KTE72; identical to SEQ ID NO: 22667

SEQ ID NO: 23331 - DNA, 924 bp, Escherichia coli KTE72; identical to SEQ ID NO: 23235

SEQ ID NO: 23332 - DNA, 510 bp, Escherichia coli KTE72; identical to SEQ ID NO: 23236

SEQ ID NO: 23333 - DNA, 837 bp, Escherichia coli KTE86; identical to SEQ ID NO: 22667

SEQ ID NO: 23334 - DNA, 924 bp, Escherichia coli KTE86; identical to SEQ ID NO: 23235

SEQ ID NO: 23335 - DNA, 510 bp, Escherichia coli KTE86; identical to SEQ ID NO: 23236

SEQ ID NO: 23336 - DNA, 837 bp, Escherichia coli KTE87; identical to SEQ ID NO: 22667

SEQ ID NO: 23337 - DNA, 924 bp, Escherichia coli KTE87; identical to SEQ ID NO: 23235

SEQ ID NO: 23338 - DNA, 510 bp, Escherichia coli KTE87; identical to SEQ ID NO: 23236

SEQ ID NO: 23339 - DNA, 837 bp, Escherichia coli KTE93; identical to SEQ ID NO: 22667

SEQ ID NO: 23340 - DNA, 924 bp, Escherichia coli KTE93; identical to SEQ ID NO: 23235

SEQ ID NO: 23341 - DNA, 510 bp, Escherichia coli KTE93; identical to SEQ ID NO: 23236

SEQ ID NO: 23342 - DNA, 837 bp, Escherichia coli KTE8; identical to SEQ ID NO: 22667

SEQ ID NO: 23343 - DNA, 924 bp, Escherichia coli KTE8; identical to SEQ ID NO: 23235

SEQ ID NO: 23344 - DNA, 510 bp, Escherichia coli KTE8; identical to SEQ ID NO: 23236

SEQ ID NO: 23345 - DNA, 837 bp, Escherichia coli KTE22; identical to SEQ ID NO: 22667

SEQ ID NO: 23346 - DNA, 924 bp, Escherichia coli KTE22; identical to SEQ ID NO: 23235

SEQ ID NO: 23347 - DNA, 510 bp, Escherichia coli KTE22; identical to SEQ ID NO: 23236

SEQ ID NO: 23348 - DNA, 837 bp, Escherichia coli KTE59; identical to SEQ ID NO: 22667

SEQ ID NO: 23349 - DNA, 924 bp, Escherichia coli KTE59; identical to SEQ ID NO: 23235

SEQ ID NO: 23350 - DNA, 510 bp, Escherichia coli KTE59; identical to SEQ ID NO: 23236

SEQ ID NO: 23351 - DNA, 837 bp, Escherichia coli KTE63; identical to SEQ ID NO: 22667

SEQ ID NO: 23352 - DNA, 924 bp, Escherichia coli KTE63; identical to SEQ ID NO: 23235

SEQ ID NO: 23353 - DNA, 510 bp, Escherichia coli KTE63; identical to SEQ ID NO: 23236

SEQ ID NO: 23354 - DNA, 837 bp, Escherichia coli KTE65; identical to SEQ ID NO: 22667

SEQ ID NO: 23355 - DNA, 924 bp, Escherichia coli KTE65; identical to SEQ ID NO: 23235

SEQ ID NO: 23356 - DNA, 510 bp, Escherichia coli KTE65; identical to SEQ ID NO: 23236

SEQ ID NO: 23357 - DNA, 837 bp, Escherichia coli KTE118; identical to SEQ ID NO: 22667

SEQ ID NO: 23358 - DNA, 924 bp, Escherichia coli KTE118; identical to SEQ ID NO: 23235

SEQ ID NO: 23359 - DNA, 510 bp, Escherichia coli KTE118; identical to SEQ ID NO: 23236

SEQ ID NO: 23360 - DNA, 837 bp, Escherichia coli KTE123; identical to SEQ ID NO: 22667

SEQ ID NO: 23361 - DNA, 924 bp, Escherichia coli KTE123; identical to SEQ ID NO: 23235

SEQ ID NO: 23362 - DNA, 510 bp, Escherichia coli KTE123; identical to SEQ ID NO: 23236

SEQ ID NO: 23363 - DNA, 837 bp, Escherichia coli KTE183; identical to SEQ ID NO: 22667

SEQ ID NO: 23364 - DNA, 924 bp, Escherichia coli KTE183; identical to SEQ ID NO: 23235

SEQ ID NO: 23365 - DNA, 510 bp, Escherichia coli KTE183; identical to SEQ ID NO: 23236

SEQ ID NO: 23366 - DNA, 837 bp, Escherichia coli KTE207; identical to SEQ ID NO: 22667

SEQ ID NO: 23367 - DNA, 924 bp, Escherichia coli KTE207; identical to SEQ ID NO: 23280

SEQ ID NO: 23368 - DNA, 510 bp, Escherichia coli KTE207; identical to SEQ ID NO: 23236

SEQ ID NO: 23369 - DNA, 837 bp, Escherichia coli KTE209; identical to SEQ ID NO: 22667

SEQ ID NO: 23370 - DNA, 924 bp, Escherichia coli KTE209; identical to SEQ ID NO: 23283

SEQ ID NO: 23371 - DNA, 510 bp, Escherichia coli KTE209; identical to SEQ ID NO: 23236

SEQ ID NO: 23372 - DNA, 837 bp, Escherichia coli KTE215; identical to SEQ ID NO: 22667

SEQ ID NO: 23373 - DNA, 924 bp, Escherichia coli KTE215; identical to SEQ ID NO: 23235

SEQ ID NO: 23374 - DNA, 510 bp, Escherichia coli KTE215; identical to SEQ ID NO: 23236

SEQ ID NO: 23375 - DNA, 837 bp, Escherichia coli KTE218; identical to SEQ ID NO: 22667

SEQ ID NO: 23376 - DNA, 924 bp, Escherichia coli KTE218; identical to SEQ ID NO: 23235

SEQ ID NO: 23377 - DNA, 510 bp, Escherichia coli KTE218; identical to SEQ ID NO: 23236

SEQ ID NO: 23378 - DNA, 837 bp, Escherichia coli KTE223; identical to SEQ ID NO: 22667

SEQ ID NO: 23379 - DNA, 924 bp, Escherichia coli KTE223; identical to SEQ ID NO: 23235

SEQ ID NO: 23380 - DNA, 510 bp, Escherichia coli KTE223; identical to SEQ ID NO: 23236

SEQ ID NO: 23381 - DNA, 837 bp, Escherichia coli KTE104; identical to SEQ ID NO: 22667

SEQ ID NO: 23382 - DNA, 924 bp, Escherichia coli KTE104; identical to SEQ ID NO: 23235

SEQ ID NO: 23383 - DNA, 510 bp, Escherichia coli KTE104; identical to SEQ ID NO: 23236

SEQ ID NO: 23384 - DNA, 837 bp, Escherichia coli ATCC 25922; identical to SEQ ID NO: 22667

SEQ ID NO: 23385 - DNA, 924 bp, Escherichia coli ATCC 25922; identical to SEQ ID NO: 23235

SEQ ID NO: 23386 - DNA, 510 bp, Escherichia coli ATCC 25922; identical to SEQ ID NO: 23236

SEQ ID NO: 23387 - DNA, 837 bp, Escherichia coli KTE195; identical to SEQ ID NO: 22667

SEQ ID NO: 23388 - DNA, 924 bp, Escherichia coli KTE195; identical to SEQ ID NO: 23235

SEQ ID NO: 23389 - DNA, 510 bp, Escherichia coli KTE195; identical to SEQ ID NO: 23236

SEQ ID NO: 23390 - DNA, 837 bp, Escherichia coli KTE226; identical to SEQ ID NO: 22667

SEQ ID NO: 23391 - DNA, 924 bp, Escherichia coli KTE226; identical to SEQ ID NO: 23235

SEQ ID NO: 23392 - DNA, 510 bp, Escherichia coli KTE226; identical to SEQ ID NO: 23236

SEQ ID NO: 23393 - DNA, 837 bp, Escherichia coli KTE89; identical to SEQ ID NO: 22667

SEQ ID NO: 23394 - DNA, 924 bp, Escherichia coli KTE89; identical to SEQ ID NO: 23235

SEQ ID NO: 23395 - DNA, 510 bp, Escherichia coli KTE89; identical to SEQ ID NO: 23236

SEQ ID NO: 23396 - DNA, 837 bp, Escherichia coli HVH 1 (4-6876161); identical to SEQ ID NO: 22667

SEQ ID NO: 23397 - DNA, 924 bp, Escherichia coli HVH 1 (4-6876161); identical to SEQ ID NO: 23235

SEQ ID NO: 23398 - DNA, 510 bp, Escherichia coli HVH 1 (4-6876161); identical to SEQ ID NO: 23236

SEQ ID NO: 23399 - DNA, 837 bp, Escherichia coli HVH 4 (4-7276109); identical to SEQ ID NO: 22667

SEQ ID NO: 23400 - DNA, 924 bp, Escherichia coli HVH 4 (4-7276109); identical to SEQ ID NO: 23235

SEQ ID NO: 23401 - DNA, 510 bp, Escherichia coli HVH 4 (4-7276109); identical to SEQ ID NO: 23236

SEQ ID NO: 23402 - DNA, 837 bp, Escherichia coli HVH 7 (4-7315031); identical to SEQ ID NO: 22667

SEQ ID NO: 23403 - DNA, 924 bp, Escherichia coli HVH 7 (4-7315031); identical to SEQ ID NO: 23235

SEQ ID NO: 23404 - DNA, 423 bp, Escherichia coli HVH 7 (4-7315031)
atgagttatcgtaataagacatatgtggcttttgcaagtgaagatataaagttttatcgtcttatggaggcatggaaagcaaatgaaaaaatagactttaacttttttgatgctcatgatctctttatttcaagggatacaagtaaacctgaaaccataaagcgaaacctccgcgaaaggatgaaaaatgctaaacaagtagtactgttgggaagcggtaatactaagagaaaaggtagcgatggagtatcgtttcttgcccatgaaatagatcttatcgtagaatttaatcttcctgttgtaatagctaatttagacggagatagaacagtcgataagaacttcattcctaaaccacttttagattcagaacattatacagtatctgtctctttccaacctaaattattaaatatgcattag

SEQ ID NO: 23405 - DNA, 837 bp, Escherichia coli HVH 16 (4-7649002); identical to SEQ ID NO: 22667

SEQ ID NO: 23406 - DNA, 924 bp, Escherichia coli HVH 16 (4-7649002); identical to SEQ ID NO: 23235

SEQ ID NO: 23407 - DNA, 510 bp, Escherichia coli HVH 16 (4-7649002); identical to SEQ ID NO: 23236

SEQ ID NO: 23408 - DNA, 837 bp, Escherichia coli HVH 20 (4-5865042); identical to SEQ ID NO: 22667

SEQ ID NO: 23409 - DNA, 924 bp, Escherichia coli HVH 20 (4-5865042); identical to SEQ ID NO: 23235

SEQ ID NO: 23410 - DNA, 510 bp, Escherichia coli HVH 20 (4-5865042); identical to SEQ ID NO: 23236

SEQ ID NO: 23411 - DNA, 837 bp, Escherichia coli HVH 21 (4-4517873); identical to SEQ ID NO: 22667

SEQ ID NO: 23412 - DNA, 924 bp, Escherichia coli HVH 21 (4-4517873); identical to SEQ ID NO: 23235

SEQ ID NO: 23413 - DNA, 510 bp, Escherichia coli HVH 21 (4-4517873); identical to SEQ ID NO: 23236

SEQ ID NO: 23414 - DNA, 837 bp, Escherichia coli HVH 26 (4-5703913); identical to SEQ ID NO: 22667

SEQ ID NO: 23415 - DNA, 924 bp, Escherichia coli HVH 26 (4-5703913); identical to SEQ ID NO: 23235

SEQ ID NO: 23416 - DNA, 510 bp, Escherichia coli HVH 26 (4-5703913); identical to SEQ ID NO: 23236

SEQ ID NO: 23417 - DNA, 837 bp, Escherichia coli HVH 27 (4-7449267); identical to SEQ ID NO: 22667

SEQ ID NO: 23418 - DNA, 924 bp, Escherichia coli HVH 27 (4-7449267); identical to SEQ ID NO: 23235

SEQ ID NO: 23419 - DNA, 510 bp, Escherichia coli HVH 27 (4-7449267); identical to SEQ ID NO: 23236

SEQ ID NO: 23420 - DNA, 837 bp, Escherichia coli HVH 28 (4-0907367); identical to SEQ ID NO: 22667

SEQ ID NO: 23421 - DNA, 924 bp, Escherichia coli HVH 28 (4-0907367); identical to SEQ ID NO: 23235

SEQ ID NO: 23422 - DNA, 510 bp, Escherichia coli HVH 28 (4-0907367); identical to SEQ ID NO: 23236

SEQ ID NO: 23423 - DNA, 837 bp, Escherichia coli HVH 30 (4-2661829); identical to SEQ ID NO: 22667

SEQ ID NO: 23424 - DNA, 924 bp, Escherichia coli HVH 30 (4-2661829); identical to SEQ ID NO: 23235

SEQ ID NO: 23425 - DNA, 510 bp, Escherichia coli HVH 30 (4-2661829); identical to SEQ ID NO: 23236

SEQ ID NO: 23426 - DNA, 837 bp, Escherichia coli HVH 31 (4-2602156); identical to SEQ ID NO: 22667

SEQ ID NO: 23427 - DNA, 924 bp, Escherichia coli HVH 31 (4-2602156); identical to SEQ ID NO: 23235

SEQ ID NO: 23428 - DNA, 510 bp, Escherichia coli HVH 31 (4-2602156); identical to SEQ ID NO: 23236

SEQ ID NO: 23429 - DNA, 837 bp, Escherichia coli HVH 35 (4-2962667)
atggcgaaagttaattttttcgataagcgtatacttaaaaaattttcagactacacatcaactattagtaccatattttcactttttttgatttttgtagacattccaacagaaaacaaactaacacttggtattatatttttaattattttattcttactgtatttcggcatatggtttaaatcaaataatctttcggaaattaatttagatgttgagggcagcattgttactgtaaaagcaggcgatttattcagacaagatggattcaaggtcattgcttttaatgaatattttgacacgcaagttgatgatgttatcatttctcataattcacttaatggattatatattgataactatttagcgggatccgtatctgatttggaccatcgtatttcaaatcatcagtttgaagaagatgaactgcttgaggtcaaccataaaagaaaagtgggtaaaacacaaaaatattcgctaggaactagcttcgttaataatgattatctattaactgcgttttcaaaatttgacgacaaaaatagagcttttcttacaatgccggattatctagcatttttaataaatttttgggacaaagttaatcgtatatatgctcaaaaaagtgtctctgttcctatctttggatctggaatcactagaataaaggaacataaaaatattagcgatgaggatttacttaaaataatgttgtggacttttagaataagtgaaatgaggtttaaatttccggcaaagcttactatcgttatccacaaagataagatagataaaataaacttattggatataaaatcagcgagaaatggtctttag

SEQ ID NO: 23430 - DNA, 924 bp, Escherichia coli HVH 35 (4-2962667); identical to SEQ ID NO: 23235

SEQ ID NO: 23431 - DNA, 510 bp, Escherichia coli HVH 35 (4-2962667); identical to SEQ ID NO: 23236

SEQ ID NO: 23432 - DNA, 837 bp, Escherichia coli HVH 37 (4-2773848); identical to SEQ ID NO: 22667

SEQ ID NO: 23433 - DNA, 924 bp, Escherichia coli HVH 37 (4-2773848); identical to SEQ ID NO: 23283

SEQ ID NO: 23434 - DNA, 510 bp, Escherichia coli HVH 37 (4-2773848); identical to SEQ ID NO: 23236

SEQ ID NO: 23435 - DNA, 837 bp, Escherichia coli HVH 40 (4-1219782); identical to SEQ ID NO: 22667

SEQ ID NO: 23436 - DNA, 924 bp, Escherichia coli HVH 40 (4-1219782); identical to SEQ ID NO: 23283

SEQ ID NO: 23437 - DNA, 510 bp, Escherichia coli HVH 40 (4-1219782); identical to SEQ ID NO: 23236

SEQ ID NO: 23438 - DNA, 837 bp, Escherichia coli HVH 48 (4-2658593); identical to SEQ ID NO: 22667

SEQ ID NO: 23439 - DNA, 924 bp, Escherichia coli HVH 48 (4-2658593); identical to SEQ ID NO: 23235

SEQ ID NO: 23440 - DNA, 510 bp, Escherichia coli HVH 48 (4-2658593); identical to SEQ ID NO: 23236

SEQ ID NO: 23441 - DNA, 837 bp, Escherichia coli HVH 51 (4-2172526); identical to SEQ ID NO: 22667

SEQ ID NO: 23442 - DNA, 924 bp, Escherichia coli HVH 51 (4-2172526); identical to SEQ ID NO: 23235

SEQ ID NO: 23443 - DNA, 510 bp, Escherichia coli HVH 51 (4-2172526); identical to SEQ ID NO: 23236

SEQ ID NO: 23444 - DNA, 837 bp, Escherichia coli HVH 55 (4-2646161); identical to SEQ ID NO: 22667

SEQ ID NO: 23445 - DNA, 924 bp, Escherichia coli HVH 55 (4-2646161); identical to SEQ ID NO: 23235

SEQ ID NO: 23446 - DNA, 510 bp, Escherichia coli HVH 55 (4-2646161)
atgagttatcgtaataagacatatgtggcttttgcaagtgaagatataaagttttatcgtcttatggaggcatggaaagcaaatgaaaaaatagactttaacttttttgatgctcatgatctctttatttcaagggatacaagtaaacctgaaaccataaagcgaaacctccgcgaaaggatgaaaaatgctaaacaagtagtactgttgggaagcggtaatactaagagaaaaggtagcgatggagtatcgtttcttgcccatgaaatagatcttatcgtagaatttaatcttcctgttgtaatagctaatttagacggagatagaacagtcgataataacttcattcctaaaccacttttagattcagaacattatacagtatctgtctctttccaacctaaaattattaaatatgcattagataattactgtgttaactattactcaagttcaaatagtggtagttatctataccctacatctgtttatactaagctaggtctgtaa

SEQ ID NO: 23447 - DNA, 837 bp, Escherichia coli HVH 56 (4-2153033); identical to SEQ ID NO: 22667

SEQ ID NO: 23448 - DNA, 924 bp, Escherichia coli HVH 56 (4-2153033); identical to SEQ ID NO: 23235

SEQ ID NO: 23449 - DNA, 510 bp, Escherichia coli HVH 56 (4-2153033); identical to SEQ ID NO: 23236

SEQ ID NO: 23450 - DNA, 837 bp, Escherichia coli HVH 58 (4-2839709); identical to SEQ ID NO: 22667

SEQ ID NO: 23451 - DNA, 924 bp, Escherichia coli HVH 58 (4-2839709); identical to SEQ ID NO: 23235

SEQ ID NO: 23452 - DNA, 510 bp, Escherichia coli HVH 58 (4-2839709); identical to SEQ ID NO: 23236

SEQ ID NO: 23453 - DNA, 837 bp, Escherichia coli HVH 61 (4-2736020); identical to SEQ ID NO: 22667

SEQ ID NO: 23454 - DNA, 924 bp, Escherichia coli HVH 61 (4-2736020); identical to SEQ ID NO: 23235

SEQ ID NO: 23455 - DNA, 510 bp, Escherichia coli HVH 61 (4-2736020); identical to SEQ ID NO: 23236

SEQ ID NO: 23456 - DNA, 837 bp, Escherichia coli HVH 68 (4-0888028); identical to SEQ ID NO: 22667

SEQ ID NO: 23457 - DNA, 924 bp, Escherichia coli HVH 68 (4-0888028); identical to SEQ ID NO: 23235

SEQ ID NO: 23458 - DNA, 510 bp, Escherichia coli HVH 68 (4-0888028); identical to SEQ ID NO: 23236

SEQ ID NO: 23459 - DNA, 837 bp, Escherichia coli HVH 70 (4-2963531); identical to SEQ ID NO: 22667

SEQ ID NO: 23460 - DNA, 924 bp, Escherichia coli HVH 70 (4-2963531)
gtgatagcatatgaaaacatagaattttttatatgcttggtgaatgttttgggcaacaatatgtataatatccttttcttcatctttctttcaatagcaattccattccttttattcctcgtatggaaacagcacctaaaaaccaaagagattcgttcatatctattgaaagagggatataatattattttcaacggagaaggtaactcatatctcgcatttaatattagtaatgcgacatttcgcgcaggtaatttaacttccaatgattattttcaagcatcaatttcttatatccacgattatagatgggagtggaaggaggttgaggcaaagaaaataaataatatatttattatttacatttcgaatattgatttcccttcccaaaaactattttatcgcaataataaatctttagcagaaatagactgggcaaaattacaagcaatttttcatcaaccatatgaaatacagaatgacgtcatgcaagataacaataatacgcactatgattttttcatatcccatgcaaaagaggataaagatacttttgtcagaccactggtagacgagttaaatagacttggtgtaattatttggtatgatgaacagacacttgaagtcggcgatagcttaaggagaaatattgatttaggcctaagaaaagcaaattatggcatagtcatactttctcataactttctaaacaagaaatggacacaatacgaattagatagtttaattaatcgtgcagtgtatgatgataataagattatattgccaatctggcataatatcaatgctcaagaggtatctaaatacagccattatttggcggataaaatggcactgcaaacttctttatatagcgttaaggaaatagcaagagagttggctgaaatagcatacaggagaagataa

SEQ ID NO: 23461 - DNA, 510 bp, Escherichia coli HVH 70 (4-2963531); identical to SEQ ID NO: 23236

SEQ ID NO: 23462 - DNA, 837 bp, Escherichia coli HVH 74 (4-1034782); identical to SEQ ID NO: 22667

SEQ ID NO: 23463 - DNA, 924 bp, Escherichia coli HVH 74 (4-1034782); identical to SEQ ID NO: 23235

SEQ ID NO: 23464 - DNA, 510 bp, Escherichia coli HVH 74 (4-1034782); identical to SEQ ID NO: 23236

SEQ ID NO: 23465 - DNA, 837 bp, Escherichia coli HVH 76 (4-2538717); identical to SEQ ID NO: 22667

SEQ ID NO: 23466 - DNA, 924 bp, Escherichia coli HVH 76 (4-2538717); identical to SEQ ID NO: 23235

SEQ ID NO: 23467 - DNA, 510 bp, Escherichia coli HVH 76 (4-2538717); identical to SEQ ID NO: 23236

SEQ ID NO: 23468 - DNA, 837 bp, Escherichia coli HVH 77 (4-2605759); identical to SEQ ID NO: 22667

SEQ ID NO: 23469 - DNA, 924 bp, Escherichia coli HVH 77 (4-2605759); identical to SEQ ID NO: 23235

SEQ ID NO: 23470 - DNA, 510 bp, Escherichia coli HVH 77 (4-2605759); identical to SEQ ID NO: 23236

SEQ ID NO: 23471 - DNA, 837 bp, Escherichia coli HVH 78 (4-2735946); identical to SEQ ID NO: 22667

SEQ ID NO: 23472 - DNA, 924 bp, Escherichia coli HVH 78 (4-2735946); identical to SEQ ID NO: 23235

SEQ ID NO: 23473 - DNA, 510 bp, Escherichia coli HVH 78 (4-2735946); identical to SEQ ID NO: 23236

SEQ ID NO: 23474 - DNA, 837 bp, Escherichia coli HVH 89 (4-5885604); identical to SEQ ID NO: 22667

SEQ ID NO: 23475 - DNA, 924 bp, Escherichia coli HVH 89 (4-5885604); identical to SEQ ID NO: 23235

SEQ ID NO: 23476 - DNA, 510 bp, Escherichia coli HVH 89 (4-5885604); identical to SEQ ID NO: 23236

SEQ ID NO: 23477 - DNA, 837 bp, Escherichia coli HVH 92 (4-5930790); identical to SEQ ID NO: 22667

SEQ ID NO: 23478 - DNA, 924 bp, Escherichia coli HVH 92 (4-5930790); identical to SEQ ID NO: 23235

SEQ ID NO: 23479 - DNA, 510 bp, Escherichia coli HVH 92 (4-5930790); identical to SEQ ID NO: 23236

SEQ ID NO: 23480 - DNA, 837 bp, Escherichia coli HVH 95 (4-6074464); identical to SEQ ID NO: 22667

SEQ ID NO: 23481 - DNA, 924 bp, Escherichia coli HVH 95 (4-6074464); identical to SEQ ID NO: 23235

SEQ ID NO: 23482 - DNA, 510 bp, Escherichia coli HVH 95 (4-6074464); identical to SEQ ID NO: 23236

SEQ ID NO: 23483 - DNA, 837 bp, Escherichia coli HVH 96 (4-5934869); identical to SEQ ID NO: 22667

SEQ ID NO: 23484 - DNA, 924 bp, Escherichia coli HVH 96 (4-5934869); identical to SEQ ID NO: 23235

SEQ ID NO: 23485 - DNA, 510 bp, Escherichia coli HVH 96 (4-5934869); identical to SEQ ID NO: 23236

SEQ ID NO: 23486 - DNA, 837 bp, Escherichia coli HVH 100 (4-2850729); identical to SEQ ID NO: 22667

SEQ ID NO: 23487 - DNA, 924 bp, Escherichia coli HVH 100 (4-2850729); identical to SEQ ID NO: 23235

SEQ ID NO: 23488 - DNA, 510 bp, Escherichia coli HVH 100 (4-2850729); identical to SEQ ID NO: 23236

SEQ ID NO: 23489 - DNA, 837 bp, Escherichia coli HVH 103 (4-5904188); identical to SEQ ID NO: 22667

SEQ ID NO: 23490 - DNA, 924 bp, Escherichia coli HVH 103 (4-5904188); identical to SEQ ID NO: 23235

SEQ ID NO: 23491 - DNA, 510 bp, Escherichia coli HVH 103 (4-5904188); identical to SEQ ID NO: 23236

SEQ ID NO: 23492 - DNA, 837 bp, Escherichia coli HVH 109 (4-6977162); identical to SEQ ID NO: 22667

SEQ ID NO: 23493 - DNA, 924 bp, Escherichia coli HVH 109 (4-6977162); identical to SEQ ID NO: 23235

SEQ ID NO: 23494 - DNA, 510 bp, Escherichia coli HVH 109 (4-6977162); identical to SEQ ID NO: 23236

SEQ ID NO: 23495 - DNA, 837 bp, Escherichia coli HVH 111 (4-7039018); identical to SEQ ID NO: 22667

SEQ ID NO: 23496 - DNA, 924 bp, Escherichia coli HVH 111 (4-7039018); identical to SEQ ID NO: 23235

SEQ ID NO: 23497 - DNA, 510 bp, Escherichia coli HVH 111 (4-7039018); identical to SEQ ID NO: 23236

SEQ ID NO: 23498 - DNA, 837 bp, Escherichia coli HVH 112 (4-5987253); identical to SEQ ID NO: 22667

SEQ ID NO: 23499 - DNA, 924 bp, Escherichia coli HVH 112 (4-5987253); identical to SEQ ID NO: 23235

SEQ ID NO: 23500 - DNA, 510 bp, Escherichia coli HVH 112 (4-5987253); identical to SEQ ID NO: 23236

SEQ ID NO: 23501 - DNA, 837 bp, Escherichia coli HVH 114 (4-7037740); identical to SEQ ID NO: 22667

SEQ ID NO: 23502 - DNA, 924 bp, Escherichia coli HVH 114 (4-7037740); identical to SEQ ID NO: 23235

SEQ ID NO: 23503 - DNA, 510 bp, Escherichia coli HVH 114 (4-7037740); identical to SEQ ID NO: 23236

SEQ ID NO: 23504 - DNA, 837 bp, Escherichia coli HVH 116 (4-6879942); identical to SEQ ID NO: 22667

SEQ ID NO: 23505 - DNA, 924 bp, Escherichia coli HVH 116 (4-6879942); identical to SEQ ID NO: 23235

SEQ ID NO: 23506 - DNA, 510 bp, Escherichia coli HVH 116 (4-6879942); identical to SEQ ID NO: 23236

SEQ ID NO: 23507 - DNA, 837 bp, Escherichia coli HVH 117 (4-6857191); identical to SEQ ID NO: 22667

SEQ ID NO: 23508 - DNA, 924 bp, Escherichia coli HVH 117 (4-6857191); identical to SEQ ID NO: 23235

SEQ ID NO: 23509 - DNA, 510 bp, Escherichia coli HVH 117 (4-6857191); identical to SEQ ID NO: 23236

SEQ ID NO: 23510 - DNA, 837 bp, Escherichia coli HVH 118 (4-7345399); identical to SEQ ID NO: 22667

SEQ ID NO: 23511 - DNA, 924 bp, Escherichia coli HVH 118 (4-7345399); identical to SEQ ID NO: 23235

SEQ ID NO: 23512 - DNA, 510 bp, Escherichia coli HVH 118 (4-7345399); identical to SEQ ID NO: 23236

SEQ ID NO: 23513 - DNA, 837 bp, Escherichia coli HVH 120 (4-6978681); identical to SEQ ID NO: 22667

SEQ ID NO: 23514 - DNA, 924 bp, Escherichia coli HVH 120 (4-6978681); identical to SEQ ID NO: 23235

SEQ ID NO: 23515 - DNA, 510 bp, Escherichia coli HVH 120 (4-6978681); identical to SEQ ID NO: 23236

SEQ ID NO: 23516 - DNA, 837 bp, Escherichia coli HVH 132 (4-6876862); identical to SEQ ID NO: 22667

SEQ ID NO: 23517 - DNA, 924 bp, Escherichia coli HVH 132 (4-6876862); identical to SEQ ID NO: 23235

SEQ ID NO: 23518 - DNA, 510 bp, Escherichia coli HVH 132 (4-6876862); identical to SEQ ID NO: 23236

SEQ ID NO: 23519 - DNA, 837 bp, Escherichia coli HVH 137 (4-2124971); identical to SEQ ID NO: 22667

SEQ ID NO: 23520 - DNA, 924 bp, Escherichia coli HVH 137 (4-2124971); identical to SEQ ID NO: 23235

SEQ ID NO: 23521 - DNA, 510 bp, Escherichia coli HVH 137 (4-2124971); identical to SEQ ID NO: 23236

SEQ ID NO: 23522 - DNA, 837 bp, Escherichia coli HVH 138 (4-6066704); identical to SEQ ID NO: 22667

SEQ ID NO: 23523 - DNA, 924 bp, Escherichia coli HVH 138 (4-6066704); identical to SEQ ID NO: 23235

SEQ ID NO: 23524 - DNA, 510 bp, Escherichia coli HVH 138 (4-6066704); identical to SEQ ID NO: 23236

SEQ ID NO: 23525 - DNA, 837 bp, Escherichia coli HVH 142 (4-5627451); identical to SEQ ID NO: 22667

SEQ ID NO: 23526 - DNA, 924 bp, Escherichia coli HVH 142 (4-5627451); identical to SEQ ID NO: 23235

SEQ ID NO: 23527 - DNA, 510 bp, Escherichia coli HVH 142 (4-5627451); identical to SEQ ID NO: 23236

SEQ ID NO: 23528 - DNA, 837 bp, Escherichia coli HVH 143 (4-5674999); identical to SEQ ID NO: 22667

SEQ ID NO: 23529 - DNA, 924 bp, Escherichia coli HVH 143 (4-5674999); identical to SEQ ID NO: 23235

SEQ ID NO: 23530 - DNA, 510 bp, Escherichia coli HVH 143 (4-5674999); identical to SEQ ID NO: 23236

SEQ ID NO: 23531 - DNA, 837 bp, Escherichia coli HVH 144 (4-4451937); identical to SEQ ID NO: 22667

SEQ ID NO: 23532 - DNA, 924 bp, Escherichia coli HVH 144 (4-4451937); identical to SEQ ID NO: 23235

SEQ ID NO: 23533 - DNA, 510 bp, Escherichia coli HVH 144 (4-4451937); identical to SEQ ID NO: 23236

SEQ ID NO: 23534 - DNA, 837 bp, Escherichia coli HVH 149 (4-4451880); identical to SEQ ID NO: 22667

SEQ ID NO: 23535 - DNA, 924 bp, Escherichia coli HVH 149 (4-4451880); identical to SEQ ID NO: 23235

SEQ ID NO: 23536 - DNA, 510 bp, Escherichia coli HVH 149 (4-4451880); identical to SEQ ID NO: 23236

SEQ ID NO: 23537 - DNA, 837 bp, Escherichia coli HVH 157 (4-3406229); identical to SEQ ID NO: 22667

SEQ ID NO: 23538 - DNA, 924 bp, Escherichia coli HVH 157 (4-3406229); identical to SEQ ID NO: 23235

SEQ ID NO: 23539 - DNA, 510 bp, Escherichia coli HVH 157 (4-3406229); identical to SEQ ID NO: 23236

SEQ ID NO: 23540 - DNA, 837 bp, Escherichia coli HVH 158 (4-3224287); identical to SEQ ID NO: 22667

SEQ ID NO: 23541 - DNA, 924 bp, Escherichia coli HVH 158 (4-3224287); identical to SEQ ID NO: 23460

SEQ ID NO: 23542 - DNA, 510 bp, Escherichia coli HVH 158 (4-3224287); identical to SEQ ID NO: 23236

SEQ ID NO: 23543 - DNA, 837 bp, Escherichia coli HVH 159 (4-5818141); identical to SEQ ID NO: 22667

SEQ ID NO: 23544 - DNA, 924 bp, Escherichia coli HVH 159 (4-5818141); identical to SEQ ID NO: 23235

SEQ ID NO: 23545 - DNA, 510 bp, Escherichia coli HVH 159 (4-5818141); identical to SEQ ID NO: 23236

SEQ ID NO: 23546 - DNA, 837 bp, Escherichia coli HVH 160 (4-5695937); identical to SEQ ID NO: 22667

SEQ ID NO: 23547 - DNA, 924 bp, Escherichia coli HVH 160 (4-5695937); identical to SEQ ID NO: 23235

SEQ ID NO: 23548 - DNA, 510 bp, Escherichia coli HVH 160 (4-5695937); identical to SEQ ID NO: 23236

SEQ ID NO: 23549 - DNA, 837 bp, Escherichia coli HVH 161 (4-3119890); identical to SEQ ID NO: 22667

SEQ ID NO: 23550 - DNA, 924 bp, Escherichia coli HVH 161 (4-3119890); identical to SEQ ID NO: 23235

SEQ ID NO: 23551 - DNA, 510 bp, Escherichia coli HVH 161 (4-3119890); identical to SEQ ID NO: 23236

SEQ ID NO: 23552 - DNA, 837 bp, Escherichia coli HVH 169 (4-1075578); identical to SEQ ID NO: 22667

SEQ ID NO: 23553 - DNA, 924 bp, Escherichia coli HVH 169 (4-1075578); identical to SEQ ID NO: 23235

SEQ ID NO: 23554 - DNA, 510 bp, Escherichia coli HVH 169 (4-1075578); identical to SEQ ID NO: 23236

SEQ ID NO: 23555 - DNA, 837 bp, Escherichia coli HVH 171 (4-3191958)
atggcgaaagttaattttttcgataagcgtatacttaaaaaattttcagactacacatcaactattagtaccatattttcactttttttgatttttgtagacattccaacagaaaacaaactaacacttggtattatatttttaattattttattcttactgtatttcggcatatggtttaaatcaaataatctttcggaaattaatttagatgttgagggcagcattgttactgtaaaagcaggcgatttattcagacaagatggattcaaggtcattgcttttaatgaatattttgacacgcaagttgatgatgttatcatttctcataattcacttaatggattatatattgataactatttagcgggatccgtatctgatttggaccatcgtatttcaaatcatcagtttgaagaagatgaactgcttgaggtcaaccataaaagaaaagtgggtaaaacacaaaaatattcgctaggaactatcttcgttaataatgattatctattaactgcgttttcaaaatttgacgacaaaaatagagcttttcttacaatgccgaattatctagcatttttaataaatttttgggacaaagttaatcgtatatatgctcaaaaaagtgtctctgttcctatctttggatctggaatcactagaataaaggaacataaaaatattagcgatgaggatttacttaaaataatgttgtggacttttagaataagtgaaatgaggtttaaatttccggcaaagcttactatcgttatccacaaagataagatagataaaataaacttattggatataaaatcagcgagaaatggtctttag

SEQ ID NO: 23556 - DNA, 924 bp, Escherichia coli HVH 171 (4-3191958); identical to SEQ ID NO: 23235

SEQ ID NO: 23557 - DNA, 510 bp, Escherichia coli HVH 171 (4-3191958); identical to SEQ ID NO: 23236

SEQ ID NO: 23558 - DNA, 837 bp, Escherichia coli HVH 172 (4-3248542); identical to SEQ ID NO: 22667

SEQ ID NO: 23559 - DNA, 924 bp, Escherichia coli HVH 172 (4-3248542); identical to SEQ ID NO: 23235

SEQ ID NO: 23560 - DNA, 510 bp, Escherichia coli HVH 172 (4-3248542); identical to SEQ ID NO: 23236

SEQ ID NO: 23561 - DNA, 837 bp, Escherichia coli HVH 175 (4-3405184); identical to SEQ ID NO: 22667

SEQ ID NO: 23562 - DNA, 924 bp, Escherichia coli HVH 175 (4-3405184); identical to SEQ ID NO: 23460

SEQ ID NO: 23563 - DNA, 510 bp, Escherichia coli HVH 175 (4-3405184); identical to SEQ ID NO: 23236

SEQ ID NO: 23564 - DNA, 837 bp, Escherichia coli HVH 184 (4-3343286); identical to SEQ ID NO: 22667

SEQ ID NO: 23565 - DNA, 924 bp, Escherichia coli HVH 184 (4-3343286); identical to SEQ ID NO: 23460

SEQ ID NO: 23566 - DNA, 510 bp, Escherichia coli HVH 184 (4-3343286); identical to SEQ ID NO: 23236

SEQ ID NO: 23567 - DNA, 837 bp, Escherichia coli HVH 185 (4-2876639); identical to SEQ ID NO: 22667

SEQ ID NO: 23568 - DNA, 924 bp, Escherichia coli HVH 185 (4-2876639); identical to SEQ ID NO: 23235

SEQ ID NO: 23569 - DNA, 510 bp, Escherichia coli HVH 185 (4-2876639); identical to SEQ ID NO: 23236

SEQ ID NO: 23570 - DNA, 837 bp, Escherichia coli HVH 192 (4-3054470); identical to SEQ ID NO: 22667

SEQ ID NO: 23571 - DNA, 924 bp, Escherichia coli HVH 192 (4-3054470); identical to SEQ ID NO: 23235

SEQ ID NO: 23572 - DNA, 510 bp, Escherichia coli HVH 192 (4-3054470); identical to SEQ ID NO: 23236

SEQ ID NO: 23573 - DNA, 750 bp, Escherichia coli HVH 194 (4-2356805)
ttgatttttgtagacattccaacagaaaacaaactaacacttggtattatatttttaattattttattcttactgtatttcggcatatggtttaaatcaaataatctttcggaaattaatttagatgttgagggcagcattgttactgtaaaagcaggcgatttattcagacaagatggattcaaggtcattgcttttaatgaatattttgacacgcaagttgatgatgttatcatttctcataattcacttaatggattatatattgataactatttagcgggatccgtatctgatttggaccatcgtatttcaaatcatcagtttgaagaagatgaactgcttgaggtcaaccataaaagaaaagtgggtaaaacacaaaaatattcgctaggaactatcttcgttaataatgattatctattaactgcgttttcaaaatttgacgacaaaaatagagcttttcttacaatgccggattatctagcatttttaataaatttttgggacaaagttaatcgtatatatgctcaaaaaagtgtctctgttcctatctttggatctggaatcactagaataaaggaacataaaaatattagcgatgaggatttacttaaaataatgttgtggacttttagaataagtgaaatgaggtttaaatttccggcaaagcttactatcgttatccacaaagataagatagataaaataaacttattggatataaaatcagcgagaaatggtctttag

SEQ ID NO: 23574 - DNA, 924 bp, Escherichia coli HVH 194 (4-2356805); identical to SEQ ID NO: 23460

SEQ ID NO: 23575 - DNA, 510 bp, Escherichia coli HVH 194 (4-2356805); identical to SEQ ID NO: 23236

SEQ ID NO: 23576 - DNA, 837 bp, Escherichia coli HVH 197 (4-4466217); identical to SEQ ID NO: 22667

SEQ ID NO: 23577 - DNA, 924 bp, Escherichia coli HVH 197 (4-4466217); identical to SEQ ID NO: 23235

SEQ ID NO: 23578 - DNA, 510 bp, Escherichia coli HVH 197 (4-4466217)
atgagttatcgtaataagacatatgtggcttttgcaagtgaagatataaagttttatcgtcttatggaggcatggaaagcaaatgaaaaaatagactttaacttttttgatgctcatgatctctttatttcaagggatacaagtaaacctgaaaccataaagcgaaacctccgcgaaaggatgaaaaatgctaaacaagtagtactgttgggaagcggtaatactaagagaaaaggtagcgatggagtatcgtttcttgcccatgaaatagatcttatcgtagaatttaatcttcctgttgtaatagctaatttagacggagatagaacagtcgataagaacttcattcctaaaccacttttagattcagaacattatacagtatctgtctctttccaacctaaaattattaaatatgcattagataattactgtgttaactattacttaagttcaaatagtggtagttatctataccctacatctgtttatactaagctaggtctgtaa

SEQ ID NO: 23579 - DNA, 837 bp, Escherichia coli HVH 199 (4-5670322); identical to SEQ ID NO: 22667

SEQ ID NO: 23580 - DNA, 924 bp, Escherichia coli HVH 199 (4-5670322); identical to SEQ ID NO: 23235

SEQ ID NO: 23581 - DNA, 510 bp, Escherichia coli HVH 199 (4-5670322); identical to SEQ ID NO: 23236

SEQ ID NO: 23582 - DNA, 837 bp, Escherichia coli HVH 210 (4-3042480); identical to SEQ ID NO: 22667

SEQ ID NO: 23583 - DNA, 924 bp, Escherichia coli HVH 210 (4-3042480); identical to SEQ ID NO: 23235

SEQ ID NO: 23584 - DNA, 510 bp, Escherichia coli HVH 210 (4-3042480); identical to SEQ ID NO: 23236

SEQ ID NO: 23585 - DNA, 837 bp, Escherichia coli HVH 211 (4-3041891); identical to SEQ ID NO: 22667

SEQ ID NO: 23586 - DNA, 924 bp, Escherichia coli HVH 211 (4-3041891); identical to SEQ ID NO: 23235

SEQ ID NO: 23587 - DNA, 510 bp, Escherichia coli HVH 211 (4-3041891); identical to SEQ ID NO: 23236

SEQ ID NO: 23588 - DNA, 837 bp, Escherichia coli HVH 212 (3-9305343); identical to SEQ ID NO: 22667

SEQ ID NO: 23589 - DNA, 924 bp, Escherichia coli HVH 212 (3-9305343); identical to SEQ ID NO: 23235

SEQ ID NO: 23590 - DNA, 510 bp, Escherichia coli HVH 212 (3-9305343); identical to SEQ ID NO: 23236

SEQ ID NO: 23591 - DNA, 837 bp, Escherichia coli HVH 216 (4-3042952); identical to SEQ ID NO: 22667

SEQ ID NO: 23592 - DNA, 924 bp, Escherichia coli HVH 216 (4-3042952); identical to SEQ ID NO: 23235

SEQ ID NO: 23593 - DNA, 510 bp, Escherichia coli HVH 216 (4-3042952); identical to SEQ ID NO: 23236

SEQ ID NO: 23594 - DNA, 837 bp, Escherichia coli HVH 218 (4-4500903); identical to SEQ ID NO: 22667

SEQ ID NO: 23595 - DNA, 924 bp, Escherichia coli HVH 218 (4-4500903); identical to SEQ ID NO: 23235

SEQ ID NO: 23596 - DNA, 510 bp, Escherichia coli HVH 218 (4-4500903); identical to SEQ ID NO: 23236

SEQ ID NO: 23597 - DNA, 837 bp, Escherichia coli HVH 220 (4-5876842); identical to SEQ ID NO: 22667

SEQ ID NO: 23598 - DNA, 924 bp, Escherichia coli HVH 220 (4-5876842); identical to SEQ ID NO: 23235

SEQ ID NO: 23599 - DNA, 510 bp, Escherichia coli HVH 220 (4-5876842); identical to SEQ ID NO: 23236

SEQ ID NO: 23600 - DNA, 837 bp, Escherichia coli HVH 227 (4-2277670); identical to SEQ ID NO: 22667

SEQ ID NO: 23601 - DNA, 924 bp, Escherichia coli HVH 227 (4-2277670); identical to SEQ ID NO: 23235

SEQ ID NO: 23602 - DNA, 510 bp, Escherichia coli HVH 227 (4-2277670); identical to SEQ ID NO: 23236

SEQ ID NO: 23603 - DNA, 837 bp, Escherichia coli HVH 228 (4-7787030); identical to SEQ ID NO: 22667

SEQ ID NO: 23604 - DNA, 924 bp, Escherichia coli HVH 228 (4-7787030); identical to SEQ ID NO: 23235

SEQ ID NO: 23605 - DNA, 510 bp, Escherichia coli HVH 228 (4-7787030); identical to SEQ ID NO: 23236

SEQ ID NO: 23606 - DNA, 837 bp, Escherichia coli KOEGE 10 (25a)
atggcgaaagttaattttttcgataagcgtatacttaaaaaattttcagactacacatcaactattagtaccatattttcactttttttgatttttgtagacattccaacagaaaacaaactaacacttggtattatatttttaattattttattcttactgtatttcggcatatggtttaaatcaaataatctttcggaaattaatttagatgttgatggcagcattgttactgtaaaagcaggcgatttattcagacaagatggattcaaggtcattgcttttaatgaatattttgacacgcaagttgatgatgttatcatttctcataattcacttaatggattatatattgataactatttagcgggatccgtatctgatttggaccatcgtatttcaaatcatcagtttgaagaagatgaactgcttgaggtcaaccataaaagaaaagtgggtaaaacacaaaaatattcgctaggaactatcttcgttaataatgattatctattaactgcgttttcaaaatttgacgacaaaaatagagcttttcttacaatgccggattatctagcatttttaataaatttttgggacaaagttaatcgtatatatgctcaaaaaagtgtctctgttcctatctttggatctggaatcactagaataaaggaacataaaaatattagcgatgaggatttacttaaaataatgttgtggacttttagaataagtgaaatgaggtttaaatttccggcaaagcttactatcgttatccacaaagataagatagataaaataaacttattggatataaaatcagcgagaaatggtctttag

SEQ ID NO: 23607 - DNA, 924 bp, Escherichia coli KOEGE 10 (25a); identical to SEQ ID NO: 23460

SEQ ID NO: 23608 - DNA, 510 bp, Escherichia coli KOEGE 10 (25a); identical to SEQ ID NO: 23236

SEQ ID NO: 23609 - DNA, 837 bp, Escherichia coli KOEGE 30 (63a); identical to SEQ ID NO: 22667

SEQ ID NO: 23610 - DNA, 924 bp, Escherichia coli KOEGE 30 (63a); identical to SEQ ID NO: 23235

SEQ ID NO: 23611 - DNA, 510 bp, Escherichia coli KOEGE 30 (63a); identical to SEQ ID NO: 23236

SEQ ID NO: 23612 - DNA, 837 bp, Escherichia coli KOEGE 58 (171a); identical to SEQ ID NO: 22667

SEQ ID NO: 23613 - DNA, 924 bp, Escherichia coli KOEGE 58 (171a); identical to SEQ ID NO: 23235

SEQ ID NO: 23614 - DNA, 510 bp, Escherichia coli KOEGE 58 (171a); identical to SEQ ID NO: 23236

SEQ ID NO: 23615 - DNA, 837 bp, Escherichia coli KOEGE 70 (185a); identical to SEQ ID NO: 22667

SEQ ID NO: 23616 - DNA, 924 bp, Escherichia coli KOEGE 70 (185a); identical to SEQ ID NO: 23235

SEQ ID NO: 23617 - DNA, 510 bp, Escherichia coli KOEGE 70 (185a); identical to SEQ ID NO: 23236

SEQ ID NO: 23618 - DNA, 837 bp, Escherichia coli UMEA 3053-1; identical to SEQ ID NO: 22667

SEQ ID NO: 23619 - DNA, 924 bp, Escherichia coli UMEA 3053-1; identical to SEQ ID NO: 23235

SEQ ID NO: 23620 - DNA, 510 bp, Escherichia coli UMEA 3053-1; identical to SEQ ID NO: 23446

SEQ ID NO: 23621 - DNA, 837 bp, Escherichia coli UMEA 3113-1; identical to SEQ ID NO: 22667

SEQ ID NO: 23622 - DNA, 924 bp, Escherichia coli UMEA 3113-1; identical to SEQ ID NO: 23235

SEQ ID NO: 23623 - DNA, 510 bp, Escherichia coli UMEA 3113-1; identical to SEQ ID NO: 23236

SEQ ID NO: 23624 - DNA, 837 bp, Escherichia coli UMEA 3121-1; identical to SEQ ID NO: 22667

SEQ ID NO: 23625 - DNA, 924 bp, Escherichia coli UMEA 3121-1; identical to SEQ ID NO: 23235

SEQ ID NO: 23626 - DNA, 510 bp, Escherichia coli UMEA 3121-1; identical to SEQ ID NO: 23236

SEQ ID NO: 23627 - DNA, 837 bp, Escherichia coli UMEA 3122-1; identical to SEQ ID NO: 22667

SEQ ID NO: 23628 - DNA, 924 bp, Escherichia coli UMEA 3122-1; identical to SEQ ID NO: 23235

SEQ ID NO: 23629 - DNA, 510 bp, Escherichia coli UMEA 3122-1; identical to SEQ ID NO: 23236

SEQ ID NO: 23630 - DNA, 837 bp, Escherichia coli UMEA 3159-1; identical to SEQ ID NO: 22667

SEQ ID NO: 23631 - DNA, 924 bp, Escherichia coli UMEA 3159-1; identical to SEQ ID NO: 23235

SEQ ID NO: 23632 - DNA, 510 bp, Escherichia coli UMEA 3159-1; identical to SEQ ID NO: 23236

SEQ ID NO: 23633 - DNA, 837 bp, Escherichia coli UMEA 3172-1; identical to SEQ ID NO: 22667

SEQ ID NO: 23634 - DNA, 924 bp, Escherichia coli UMEA 3172-1; identical to SEQ ID NO: 23235

SEQ ID NO: 23635 - DNA, 510 bp, Escherichia coli UMEA 3172-1; identical to SEQ ID NO: 23236

SEQ ID NO: 23636 - DNA, 837 bp, Escherichia coli UMEA 3175-1; identical to SEQ ID NO: 22667

SEQ ID NO: 23637 - DNA, 924 bp, Escherichia coli UMEA 3175-1; identical to SEQ ID NO: 23235

SEQ ID NO: 23638 - DNA, 510 bp, Escherichia coli UMEA 3175-1; identical to SEQ ID NO: 23236

SEQ ID NO: 23639 - DNA, 837 bp, Escherichia coli UMEA 3185-1; identical to SEQ ID NO: 22667

SEQ ID NO: 23640 - DNA, 924 bp, Escherichia coli UMEA 3185-1; identical to SEQ ID NO: 23235

SEQ ID NO: 23641 - DNA, 510 bp, Escherichia coli UMEA 3185-1; identical to SEQ ID NO: 23236

SEQ ID NO: 23642 - DNA, 837 bp, Escherichia coli UMEA 3193-1; identical to SEQ ID NO: 22667

SEQ ID NO: 23643 - DNA, 924 bp, Escherichia coli UMEA 3193-1; identical to SEQ ID NO: 23235

SEQ ID NO: 23644 - DNA, 510 bp, Escherichia coli UMEA 3193-1; identical to SEQ ID NO: 23236

SEQ ID NO: 23645 - DNA, 837 bp, Escherichia coli UMEA 3216-1; identical to SEQ ID NO: 22667

SEQ ID NO: 23646 - DNA, 924 bp, Escherichia coli UMEA 3216-1; identical to SEQ ID NO: 23235

SEQ ID NO: 23647 - DNA, 510 bp, Escherichia coli UMEA 3216-1; identical to SEQ ID NO: 23236

SEQ ID NO: 23648 - DNA, 837 bp, Escherichia coli UMEA 3220-1; identical to SEQ ID NO: 22667

SEQ ID NO: 23649 - DNA, 924 bp, Escherichia coli UMEA 3220-1; identical to SEQ ID NO: 23235

SEQ ID NO: 23650 - DNA, 510 bp, Escherichia coli UMEA 3220-1; identical to SEQ ID NO: 23236

SEQ ID NO: 23651 - DNA, 837 bp, Escherichia coli UMEA 3222-1; identical to SEQ ID NO: 22667

SEQ ID NO: 23652 - DNA, 924 bp, Escherichia coli UMEA 3222-1; identical to SEQ ID NO: 23235

SEQ ID NO: 23653 - DNA, 510 bp, Escherichia coli UMEA 3222-1; identical to SEQ ID NO: 23236

SEQ ID NO: 23654 - DNA, 837 bp, Escherichia coli UMEA 3244-1; identical to SEQ ID NO: 22667

SEQ ID NO: 23655 - DNA, 924 bp, Escherichia coli UMEA 3244-1; identical to SEQ ID NO: 23235

SEQ ID NO: 23656 - DNA, 510 bp, Escherichia coli UMEA 3244-1; identical to SEQ ID NO: 23236

SEQ ID NO: 23657 - DNA, 837 bp, Escherichia coli UMEA 3257-1; identical to SEQ ID NO: 22667

SEQ ID NO: 23658 - DNA, 924 bp, Escherichia coli UMEA 3257-1; identical to SEQ ID NO: 23235

SEQ ID NO: 23659 - DNA, 510 bp, Escherichia coli UMEA 3257-1; identical to SEQ ID NO: 23236

SEQ ID NO: 23660 - DNA, 837 bp, Escherichia coli UMEA 3391-1; identical to SEQ ID NO: 22667

SEQ ID NO: 23661 - DNA, 924 bp, Escherichia coli UMEA 3391-1; identical to SEQ ID NO: 23235

SEQ ID NO: 23662 - DNA, 510 bp, Escherichia coli UMEA 3391-1; identical to SEQ ID NO: 23236

SEQ ID NO: 23663 - DNA, 837 bp, Escherichia coli UMEA 3585-1; identical to SEQ ID NO: 22667

SEQ ID NO: 23664 - DNA, 924 bp, Escherichia coli UMEA 3585-1; identical to SEQ ID NO: 23235

SEQ ID NO: 23665 - DNA, 510 bp, Escherichia coli UMEA 3585-1; identical to SEQ ID NO: 23236

SEQ ID NO: 23666 - DNA, 837 bp, Escherichia coli UMEA 3617-1; identical to SEQ ID NO: 22667

SEQ ID NO: 23667 - DNA, 924 bp, Escherichia coli UMEA 3617-1; identical to SEQ ID NO: 23235

SEQ ID NO: 23668 - DNA, 510 bp, Escherichia coli UMEA 3617-1; identical to SEQ ID NO: 23236

SEQ ID NO: 23669 - DNA, 837 bp, Escherichia coli UMEA 3707-1; identical to SEQ ID NO: 22667

SEQ ID NO: 23670 - DNA, 924 bp, Escherichia coli UMEA 3707-1; identical to SEQ ID NO: 23235

SEQ ID NO: 23671 - DNA, 510 bp, Escherichia coli UMEA 3707-1; identical to SEQ ID NO: 23236

SEQ ID NO: 23672 - DNA, 837 bp, Escherichia coli UMEA 3955-1
atggcgaaagttaattttttcgataagcgtatacttaaaaaattttcagactacacatcaactattagtaccatattttcactttttttgatttttgtagacattccaacagaaaacaaactaacacttggcattatatttttaattattttattcttactgtatttcggcatatggtttaaatcaaataatctttcggaaattaatttagatgttgagggcagcattgttactgtaaaagcaggcgatttattcagacaagatggattcaaggtcattgcttttaatgaatattttgacacgcaagttgatgatgttatcatttctcataattcacttaatggattatatattgataactatttagcgggatccgtatctgatttggaccatcgtatttcaaatcatcagtttgaagaagatgaactgcttgaggtcaaccataaaagaaaagtgggtaaaacacaaaaatattcgctaggaactatcttcgttaataatgattatctattaactgcgttttcaaaatttgacgacaaaaatagagcttttcttacaatgccggattatctagcatttttaataaattttggggacaaagttaatcgtatatatgctcaaaaaagtgtctctgttcctatctttggatctggaatcactagaataaaggaacataaaaatattagcgatgaggatttacttaaaataatgttgtggacttttagaataagtgaaatgaggtttaaatttccggcaaagcttactatcgttatccacaaagataagatagataaaataaacttattggatataaaatcagcgagaaatggtctttag

SEQ ID NO: 23673 - DNA, 924 bp, Escherichia coli UMEA 3955-1; identical to SEQ ID NO: 23235

SEQ ID NO: 23674 - DNA, 510 bp, Escherichia coli UMEA 3955-1; identical to SEQ ID NO: 23236

SEQ ID NO: 23675 - DNA, 837 bp, Escherichia coli UMEA 4075-1; identical to SEQ ID NO: 22667

SEQ ID NO: 23676 - DNA, 924 bp, Escherichia coli UMEA 4075-1; identical to SEQ ID NO: 23235

SEQ ID NO: 23677 - DNA, 510 bp, Escherichia coli UMEA 4075-1; identical to SEQ ID NO: 23236

SEQ ID NO: 23678 - DNA, 837 bp, Escherichia coli UMEA 3652-1; identical to SEQ ID NO: 22667

SEQ ID NO: 23679 - DNA, 924 bp, Escherichia coli UMEA 3652-1; identical to SEQ ID NO: 23235

SEQ ID NO: 23680 - DNA, 510 bp, Escherichia coli UMEA 3652-1; identical to SEQ ID NO: 23236

SEQ ID NO: 23681 - DNA, 837 bp, Escherichia coli UMEA 3426-1; identical to SEQ ID NO: 22667

SEQ ID NO: 23682 - DNA, 924 bp, Escherichia coli UMEA 3426-1; identical to SEQ ID NO: 23235

SEQ ID NO: 23683 - DNA, 510 bp, Escherichia coli UMEA 3426-1; identical to SEQ ID NO: 23236

SEQ ID NO: 23684 - DNA, 837 bp, Escherichia coli UMEA 3290-1; identical to SEQ ID NO: 22667

SEQ ID NO: 23685 - DNA, 924 bp, Escherichia coli UMEA 3290-1; identical to SEQ ID NO: 23235

SEQ ID NO: 23686 - DNA, 510 bp, Escherichia coli UMEA 3290-1; identical to SEQ ID NO: 23236

SEQ ID NO: 23687 - DNA, 837 bp, Escherichia coli UMEA 3693-1; identical to SEQ ID NO: 22667

SEQ ID NO: 23688 - DNA, 924 bp, Escherichia coli UMEA 3693-1; identical to SEQ ID NO: 23235

SEQ ID NO: 23689 - DNA, 510 bp, Escherichia coli UMEA 3693-1; identical to SEQ ID NO: 23236

SEQ ID NO: 23690 - DNA, 837 bp, Escherichia coli 907391; identical to SEQ ID NO: 22667

SEQ ID NO: 23691 - DNA, 924 bp, Escherichia coli 907391; identical to SEQ ID NO: 23235

SEQ ID NO: 23692 - DNA, 510 bp, Escherichia coli 907391; identical to SEQ ID NO: 23236

SEQ ID NO: 23693 - DNA, 837 bp, Escherichia coli 907892; identical to SEQ ID NO: 22667

SEQ ID NO: 23694 - DNA, 246 bp, Escherichia coli 907892
tggttgtctggagattcagggggccagtctaacaagaaatggacacaatacgaattagatagtttaattaatcgtgcagtgtatgatgataataagattatattgccaatctggcataatatcaatgctcaagaggtatctaaatacagccattatttggcggataaaatggcactgcaaacttctttatatagcgttaaggaaatagcaagagagttggctgaaatagcatacaggagaagataa

SEQ ID NO: 23695 - DNA, 510 bp, Escherichia coli 907892; identical to SEQ ID NO: 23236

SEQ ID NO: 23696 - DNA, 837 bp, Escherichia coli 910096-2; identical to SEQ ID NO: 22667

SEQ ID NO: 23697 - DNA, 924 bp, Escherichia coli 910096-2; identical to SEQ ID NO: 23235

SEQ ID NO: 23698 - DNA, 510 bp, Escherichia coli 910096-2; identical to SEQ ID NO: 23236

SEQ ID NO: 23699 - DNA, 837 bp, Escherichia coli A25922R; identical to SEQ ID NO: 22667

SEQ ID NO: 23700 - DNA, 924 bp, Escherichia coli A25922R; identical to SEQ ID NO: 23235

SEQ ID NO: 23701 - DNA, 510 bp, Escherichia coli A25922R; identical to SEQ ID NO: 23236

SEQ ID NO: 23702 - DNA, 837 bp, Escherichia coli A35218R; identical to SEQ ID NO: 22667

SEQ ID NO: 23703 - DNA, 924 bp, Escherichia coli A35218R; identical to SEQ ID NO: 23235

SEQ ID NO: 23704 - DNA, 510 bp, Escherichia coli A35218R; identical to SEQ ID NO: 23236

SEQ ID NO: 23705 - DNA, 837 bp, Escherichia coli HVH 86 (4-7026218); identical to SEQ ID NO: 22667

SEQ ID NO: 23706 - DNA, 924 bp, Escherichia coli HVH 86 (4-7026218); identical to SEQ ID NO: 23235

SEQ ID NO: 23707 - DNA, 510 bp, Escherichia coli HVH 86 (4-7026218); identical to SEQ ID NO: 23236

SEQ ID NO: 23708 - DNA, 837 bp, Escherichia coli HVH 86 (4-7026218); identical to SEQ ID NO: 22667

SEQ ID NO: 23709 - DNA, 924 bp, Escherichia coli HVH 86 (4-7026218); identical to SEQ ID NO: 23235

SEQ ID NO: 23710 - DNA, 510 bp, Escherichia coli HVH 86 (4-7026218); identical to SEQ ID NO: 23236

SEQ ID NO: 23711 - DNA, 837 bp, Escherichia coli LAU-EC6; identical to SEQ ID NO: 22667

SEQ ID NO: 23712 - DNA, 924 bp, Escherichia coli LAU-EC6; identical to SEQ ID NO: 23235

SEQ ID NO: 23713 - DNA, 510 bp, Escherichia coli LAU-EC6; identical to SEQ ID NO: 23236

SEQ ID NO: 23714 - DNA, 837 bp, Escherichia coli UMEA 3489-1; identical to SEQ ID NO: 22667

SEQ ID NO: 23715 - DNA, 924 bp, Escherichia coli UMEA 3489-1; identical to SEQ ID NO: 23235

SEQ ID NO: 23716 - DNA, 510 bp, Escherichia coli UMEA 3489-1; identical to SEQ ID NO: 23236

SEQ ID NO: 23717 - DNA, 837 bp, Escherichia coli BIDMC 83; identical to SEQ ID NO: 22667

SEQ ID NO: 23718 - DNA, 924 bp, Escherichia coli BIDMC 83; identical to SEQ ID NO: 23235

SEQ ID NO: 23719 - DNA, 510 bp, Escherichia coli BIDMC 83; identical to SEQ ID NO: 23236

SEQ ID NO: 23720 - DNA, 837 bp, Escherichia coli BIDMC 65; identical to SEQ ID NO: 22667

SEQ ID NO: 23721 - DNA, 924 bp, Escherichia coli BIDMC 65; identical to SEQ ID NO: 23235

SEQ ID NO: 23722 - DNA, 510 bp, Escherichia coli BIDMC 65; identical to SEQ ID NO: 23236

SEQ ID NO: 23723 - DNA, 837 bp, Escherichia coli; identical to SEQ ID NO: 22667

SEQ ID NO: 23724 - DNA, 924 bp, Escherichia coli; identical to SEQ ID NO: 23235

SEQ ID NO: 23725 - DNA, 510 bp, Escherichia coli; identical to SEQ ID NO: 23236

SEQ ID NO: 23726 - DNA, 837 bp, Escherichia coli Nissle 1917; identical to SEQ ID NO: 22667

SEQ ID NO: 23727 - DNA, 924 bp, Escherichia coli Nissle 1917; identical to SEQ ID NO: 23235

SEQ ID NO: 23728 - DNA, 510 bp, Escherichia coli Nissle 1917; identical to SEQ ID NO: 23236

SEQ ID NO: 23729 - DNA, 837 bp, Escherichia coli ATCC 25922; identical to SEQ ID NO: 22667

SEQ ID NO: 23730 - DNA, 924 bp, Escherichia coli ATCC 25922; identical to SEQ ID NO: 23235

SEQ ID NO: 23731 - DNA, 510 bp, Escherichia coli ATCC 25922; identical to SEQ ID NO: 23236

SEQ ID NO: 23732 - DNA, 837 bp, Escherichia coli; identical to SEQ ID NO: 22667

SEQ ID NO: 23733 - DNA, 924 bp, Escherichia coli; identical to SEQ ID NO: 23235

SEQ ID NO: 23734 - DNA, 510 bp, Escherichia coli; identical to SEQ ID NO: 23236

SEQ ID NO: 23735 - DNA, 837 bp, Escherichia coli; identical to SEQ ID NO: 22667

SEQ ID NO: 23736 - DNA, 924 bp, Escherichia coli; identical to SEQ ID NO: 23235

SEQ ID NO: 23737 - DNA, 510 bp, Escherichia coli; identical to SEQ ID NO: 23236

SEQ ID NO: 23738 - DNA, 837 bp, Escherichia coli; identical to SEQ ID NO: 22667

SEQ ID NO: 23739 - DNA, 924 bp, Escherichia coli; identical to SEQ ID NO: 23235

SEQ ID NO: 23740 - DNA, 510 bp, Escherichia coli; identical to SEQ ID NO: 23236

SEQ ID NO: 23741 - DNA, 837 bp, Escherichia coli; identical to SEQ ID NO: 22667

SEQ ID NO: 23742 - DNA, 864 bp, Escherichia coli; identical to SEQ ID NO: 22668

SEQ ID NO: 23743 - DNA, 510 bp, Escherichia coli
atgagttatcgtaataagacatatgtggcttttgcaagtgaagatataaagttttatcgtcttatggaggcatggaaagcaaatgaaaaaatagactttaacttttttgatgctcatgatctctttatttcaagggatacaagtaaacctgaaaccataaagcgaaacctccgcgaaaggatgaaaaatgctaaacaagtagtactgttgggaagcggtaatactaagagaaaaggtagcgatggagtatcgtttcttgcccacgaaatagatcttatcgtagaatttaatcttcctgttgtaatagctaatttagacggagatagaacagtcgataagaacttcattcctaaaccacttttagattcagaacattatacagtatctgtctctttccaacctaaaattattaaatatgcattagataattactgtgttaactattactcaagttcaaatagtggtagttatctataccctacatctgtttatactaagctaggtctgtaa

SEQ ID NO: 23744 - DNA, 837 bp, Escherichia coli; identical to SEQ ID NO: 22667

SEQ ID NO: 23745 - DNA, 864 bp, Escherichia coli; identical to SEQ ID NO: 22668

SEQ ID NO: 23746 - DNA, 510 bp, Escherichia coli; identical to SEQ ID NO: 23236

SEQ ID NO: 23747 - DNA, 837 bp, Escherichia coli; identical to SEQ ID NO: 22667

SEQ ID NO: 23748 - DNA, 864 bp, Escherichia coli; identical to SEQ ID NO: 22668

SEQ ID NO: 23749 - DNA, 510 bp, Escherichia coli; identical to SEQ ID NO: 23236

SEQ ID NO: 23750 - DNA, 837 bp, Escherichia coli; identical to SEQ ID NO: 22667

SEQ ID NO: 23751 - DNA, 864 bp, Escherichia coli; identical to SEQ ID NO: 22668

SEQ ID NO: 23752 - DNA, 510 bp, Escherichia coli; identical to SEQ ID NO: 23236

SEQ ID NO: 23753 - DNA, 837 bp, Escherichia coli; identical to SEQ ID NO: 22667

SEQ ID NO: 23754 - DNA, 864 bp, Escherichia coli; identical to SEQ ID NO: 22668

SEQ ID NO: 23755 - DNA, 510 bp, Escherichia coli; identical to SEQ ID NO: 23236

SEQ ID NO: 23756 - DNA, 837 bp, Escherichia coli; identical to SEQ ID NO: 22667

SEQ ID NO: 23757 - DNA, 864 bp, Escherichia coli; identical to SEQ ID NO: 22668

SEQ ID NO: 23758 - DNA, 510 bp, Escherichia coli; identical to SEQ ID NO: 23236

SEQ ID NO: 23759 - DNA, 837 bp, Escherichia coli; identical to SEQ ID NO: 22667

SEQ ID NO: 23760 - DNA, 864 bp, Escherichia coli
atgtataatatccttttcttcatctttctttcaatagcaattccattccttttattcctcgcatggaaacagcacctaaaaaccaaagagattcgttcatatctattgaaagagggatataatattattttcaacggagaaggtaactcatatctcgcgtttaatattagtaatgcgacatttcgcgcaggtaatttaacttccaatgattattttcaagcatcaatttcttatatccacgattatagatgggagtggaaggaggttgaggcaaagaaaataaataatatatttattatttacatttcgaatattgatttcccttcccaaaaactattttatcgcaataataaatctttagcagaaatagactgggcaaaattacaagcaatttttcatcaaccatatgaaatacagaatgacgtcatgcaagataacaataatacgcactatgattttttcatatcccatgcaaaagaggataaagatacttttgtcagaccactggtagacgagttaaatagacttggtgtaattatttggtatgatgaacagacacttgaagtcggcgatagcttaaggagaaatattgatttaggcctaagaaaagcaaattatggcatagtcatactttctcataactttctaaacaagaaatggacacaatacgaattagatagtttaattaatcgtgcagtgtatgatgataataagattatattgccaatctggcataatatcaattctcaagaggtatctaaatacagccattatttggcggataaaatggcactgcaaacttctttatatagcgttaaggaaatagcaagagagttggctgaaatagcatacaggagaagataa

SEQ ID NO: 23761 - DNA, 510 bp, Escherichia coli; identical to SEQ ID NO: 23236

SEQ ID NO: 23762 - DNA, 837 bp, Escherichia coli; identical to SEQ ID NO: 22667

SEQ ID NO: 23763 - DNA, 864 bp, Escherichia coli
atgtataatatccttttcttcatctttctttcaatagcaattccattccttttattcctcgtatggaaacagcacctaaaaaccaaagagattcgttcatatctattgaaagagggatataatattattttcaacggagaaggtaactcatatctcgcatttaatattagtaatgcgacatttcgcgcaggtaatttaacttccaatgattattttcaagcatcaatttcttatatccacgattatagatgggagtggaaggaggttgaggcaaagaaaataaataatatatttattatttacatttcgaatattgatttcccttcccaaaaactattttatcgcaataataaatctttagcagaaatagactgggcaaaattacaagcaatttttcatcaaccatatgaaatacagaatgacgtcatgcaagataacaataatacgcactatgattttttcatatcccatgcaaaagaggataaagatacttttgtcagaccactggtagacgagttaaatagacttggtgtaattatttggtatgatgaacagacacttgaagtcggcgatagcttaaggagaaatattgatttaggcctaagaaaagcaaattatggcatagtcatactttctcataactttctaaacaagaaatggacacaatacgaattagatagtttaattaatcgtgcagtgtatgatgataataagattatattgccaatctggcataatatcaatgctcaagaggtatctaaatacagccattatttggcggataaaatggcactgcaaacttctttatatagcgttaaggaaatagcaagagagttggctgaaatagcatacaggagaagataa

SEQ ID NO: 23764 - DNA, 510 bp, Escherichia coli; identical to SEQ ID NO: 23236

SEQ ID NO: 23765 - DNA, 837 bp, Escherichia coli; identical to SEQ ID NO: 22667

SEQ ID NO: 23766 - DNA, 864 bp, Escherichia coli; identical to SEQ ID NO: 23763

SEQ ID NO: 23767 - DNA, 510 bp, Escherichia coli; identical to SEQ ID NO: 23236

SEQ ID NO: 23768 - DNA, 837 bp, Escherichia coli; identical to SEQ ID NO: 22667

SEQ ID NO: 23769 - DNA, 864 bp, Escherichia coli; identical to SEQ ID NO: 22668

SEQ ID NO: 23770 - DNA, 510 bp, Escherichia coli; identical to SEQ ID NO: 23236

SEQ ID NO: 23771 - DNA, 837 bp, Escherichia coli; identical to SEQ ID NO: 22667

SEQ ID NO: 23772 - DNA, 864 bp, Escherichia coli; identical to SEQ ID NO: 22668

SEQ ID NO: 23773 - DNA, 510 bp, Escherichia coli; identical to SEQ ID NO: 23236

SEQ ID NO: 23774 - DNA, 837 bp, Escherichia coli; identical to SEQ ID NO: 22667

SEQ ID NO: 23775 - DNA, 864 bp, Escherichia coli; identical to SEQ ID NO: 22668

SEQ ID NO: 23776 - DNA, 510 bp, Escherichia coli; identical to SEQ ID NO: 23236

SEQ ID NO: 23777 - DNA, 837 bp, Escherichia coli; identical to SEQ ID NO: 22667

SEQ ID NO: 23778 - DNA, 864 bp, Escherichia coli; identical to SEQ ID NO: 22668

SEQ ID NO: 23779 - DNA, 510 bp, Escherichia coli; identical to SEQ ID NO: 23236

SEQ ID NO: 23780 - DNA, 837 bp, Escherichia coli; identical to SEQ ID NO: 22667

SEQ ID NO: 23781 - DNA, 864 bp, Escherichia coli; identical to SEQ ID NO: 22668

SEQ ID NO: 23782 - DNA, 510 bp, Escherichia coli; identical to SEQ ID NO: 23236

SEQ ID NO: 23783 - DNA, 837 bp, Escherichia coli; identical to SEQ ID NO: 22667

SEQ ID NO: 23784 - DNA, 864 bp, Escherichia coli; identical to SEQ ID NO: 22668

SEQ ID NO: 23785 - DNA, 510 bp, Escherichia coli; identical to SEQ ID NO: 23236

SEQ ID NO: 23786 - DNA, 837 bp, Escherichia coli; identical to SEQ ID NO: 22667

SEQ ID NO: 23787 - DNA, 864 bp, Escherichia coli; identical to SEQ ID NO: 22668

SEQ ID NO: 23788 - DNA, 510 bp, Escherichia coli; identical to SEQ ID NO: 23236

SEQ ID NO: 23789 - DNA, 837 bp, Escherichia coli; identical to SEQ ID NO: 22667

SEQ ID NO: 23790 - DNA, 864 bp, Escherichia coli; identical to SEQ ID NO: 22668

SEQ ID NO: 23791 - DNA, 510 bp, Escherichia coli; identical to SEQ ID NO: 23236

SEQ ID NO: 23792 - DNA, 837 bp, Escherichia coli; identical to SEQ ID NO: 22667

SEQ ID NO: 23793 - DNA, 864 bp, Escherichia coli; identical to SEQ ID NO: 22668

SEQ ID NO: 23794 - DNA, 510 bp, Escherichia coli; identical to SEQ ID NO: 23236

SEQ ID NO: 23795 - DNA, 837 bp, Escherichia coli; identical to SEQ ID NO: 22667

SEQ ID NO: 23796 - DNA, 864 bp, Escherichia coli; identical to SEQ ID NO: 23763

SEQ ID NO: 23797 - DNA, 510 bp, Escherichia coli; identical to SEQ ID NO: 23236

SEQ ID NO: 23798 - DNA, 837 bp, Escherichia coli; identical to SEQ ID NO: 22667

SEQ ID NO: 23799 - DNA, 864 bp, Escherichia coli; identical to SEQ ID NO: 22668

SEQ ID NO: 23800 - DNA, 510 bp, Escherichia coli; identical to SEQ ID NO: 23236

SEQ ID NO: 23801 - DNA, 837 bp, Escherichia coli; identical to SEQ ID NO: 22667

SEQ ID NO: 23802 - DNA, 864 bp, Escherichia coli; identical to SEQ ID NO: 22668

SEQ ID NO: 23803 - DNA, 510 bp, Escherichia coli; identical to SEQ ID NO: 23236

SEQ ID NO: 23804 - DNA, 837 bp, Escherichia coli; identical to SEQ ID NO: 22667

SEQ ID NO: 23805 - DNA, 864 bp, Escherichia coli; identical to SEQ ID NO: 22668

SEQ ID NO: 23806 - DNA, 510 bp, Escherichia coli; identical to SEQ ID NO: 23236

SEQ ID NO: 23807 - DNA, 837 bp, Escherichia coli; identical to SEQ ID NO: 22667

SEQ ID NO: 23808 - DNA, 864 bp, Escherichia coli; identical to SEQ ID NO: 22668

SEQ ID NO: 23809 - DNA, 510 bp, Escherichia coli; identical to SEQ ID NO: 23236

SEQ ID NO: 23810 - DNA, 837 bp, Escherichia coli; identical to SEQ ID NO: 22667

SEQ ID NO: 23811 - DNA, 864 bp, Escherichia coli; identical to SEQ ID NO: 22668

SEQ ID NO: 23812 - DNA, 510 bp, Escherichia coli; identical to SEQ ID NO: 23236

SEQ ID NO: 23813 - DNA, 837 bp, Escherichia coli; identical to SEQ ID NO: 22667

SEQ ID NO: 23814 - DNA, 864 bp, Escherichia coli; identical to SEQ ID NO: 22668

SEQ ID NO: 23815 - DNA, 510 bp, Escherichia coli; identical to SEQ ID NO: 23236

SEQ ID NO: 23816 - DNA, 837 bp, Escherichia coli; identical to SEQ ID NO: 22667

SEQ ID NO: 23817 - DNA, 864 bp, Escherichia coli; identical to SEQ ID NO: 22668

SEQ ID NO: 23818 - DNA, 510 bp, Escherichia coli; identical to SEQ ID NO: 23236

SEQ ID NO: 23819 - DNA, 837 bp, Escherichia coli; identical to SEQ ID NO: 22667

SEQ ID NO: 23820 - DNA, 864 bp, Escherichia coli; identical to SEQ ID NO: 22668

SEQ ID NO: 23821 - DNA, 510 bp, Escherichia coli; identical to SEQ ID NO: 23236

SEQ ID NO: 23822 - DNA, 837 bp, Escherichia coli; identical to SEQ ID NO: 22667

SEQ ID NO: 23823 - DNA, 864 bp, Escherichia coli; identical to SEQ ID NO: 22668

SEQ ID NO: 23824 - DNA, 510 bp, Escherichia coli; identical to SEQ ID NO: 23236

SEQ ID NO: 23825 - DNA, 837 bp, Escherichia coli; identical to SEQ ID NO: 22667

SEQ ID NO: 23826 - DNA, 864 bp, Escherichia coli; identical to SEQ ID NO: 22668

SEQ ID NO: 23827 - DNA, 510 bp, Escherichia coli; identical to SEQ ID NO: 23236

SEQ ID NO: 23828 - DNA, 837 bp, Escherichia coli; identical to SEQ ID NO: 22667

SEQ ID NO: 23829 - DNA, 864 bp, Escherichia coli; identical to SEQ ID NO: 22668

SEQ ID NO: 23830 - DNA, 510 bp, Escherichia coli; identical to SEQ ID NO: 23236

SEQ ID NO: 23831 - DNA, 837 bp, Escherichia coli; identical to SEQ ID NO: 22667

SEQ ID NO: 23832 - DNA, 864 bp, Escherichia coli; identical to SEQ ID NO: 22668

SEQ ID NO: 23833 - DNA, 510 bp, Escherichia coli; identical to SEQ ID NO: 23236

SEQ ID NO: 23834 - DNA, 837 bp, Escherichia coli
atggcgaaagttaattttttcgataagcgtatacttaaaaaattttcagactacacatcaactattagtaccatattttcactttttttgatttttgtagacattccaacagaaaacaaactaacacttggtattatatttttaattattttattcttactgtatttcggcatatggtttaaatcaaataatctttcggaaattaatttagatgttgagggcagcattgttactgtaaaagcaggcgatttattcagacaagatggattcaaggtcattgcttttaatgaatattttgacacgcaagttgatgatgttatcatttctcataattcacttaatggattatatattgataactatttagcgggatccgtatctgatttggaccatcgtatttcaaatcatcagtttgaagaagatgaactgcttgaggtcaaccataaaagaaaagtgggtaaaacacaaaaatattcgctaggaactatcttcgttaataatgattatctattaactgcgttttcaaaatttgacgacaaaaatagagcttttcttacaatgccggattatctagcatttttaataaatttttgggacaatgttaatcgtatatatgctcaaaaaagtgtctctgttcctatctttggatctggaatcactagaataaaggaacataaaaatattagcgatgaggatttacttaaaataatgttgtggacttttagaataagtgaaatgaggtttaaatttccggcaaagcttactatcgttatccacaaagataagatagataaaataaacttattggatataaaatcagcgagaaatggtctttag

SEQ ID NO: 23835 - DNA, 924 bp, Escherichia coli; identical to SEQ ID NO: 23235

SEQ ID NO: 23836 - DNA, 510 bp, Escherichia coli; identical to SEQ ID NO: 23236

SEQ ID NO: 23837 - DNA, 837 bp, Escherichia coli; identical to SEQ ID NO: 22667

SEQ ID NO: 23838 - DNA, 864 bp, Escherichia coli; identical to SEQ ID NO: 22668

SEQ ID NO: 23839 - DNA, 510 bp, Escherichia coli; identical to SEQ ID NO: 23236

SEQ ID NO: 23840 - DNA, 837 bp, Escherichia coli; identical to SEQ ID NO: 22667

SEQ ID NO: 23841 - DNA, 864 bp, Escherichia coli; identical to SEQ ID NO: 22668

SEQ ID NO: 23842 - DNA, 510 bp, Escherichia coli; identical to SEQ ID NO: 23236

SEQ ID NO: 23843 - DNA, 837 bp, Escherichia coli; identical to SEQ ID NO: 22667

SEQ ID NO: 23844 - DNA, 864 bp, Escherichia coli; identical to SEQ ID NO: 23763

SEQ ID NO: 23845 - DNA, 510 bp, Escherichia coli; identical to SEQ ID NO: 23236

SEQ ID NO: 23846 - DNA, 837 bp, Escherichia coli; identical to SEQ ID NO: 22667

SEQ ID NO: 23847 - DNA, 864 bp, Escherichia coli; identical to SEQ ID NO: 22668

SEQ ID NO: 23848 - DNA, 510 bp, Escherichia coli; identical to SEQ ID NO: 23236

SEQ ID NO: 23849 - DNA, 837 bp, Escherichia fergusonii; identical to SEQ ID NO: 22667

SEQ ID NO: 23850 - DNA, 864 bp, Escherichia fergusonii; identical to SEQ ID NO: 22668

SEQ ID NO: 23851 - DNA, 510 bp, Escherichia fergusonii; identical to SEQ ID NO: 23236

SEQ ID NO: 23852 - DNA, 858 bp, Enterococcus faecalis VC1B-1
atgaataaagtgtctttttttgataaaagacttttaaaaaaattttggcaagttttttcatgtattggtgggataatttcgttcatattactctttttagatattccacagagttgtaaactaataacgctcgttgtaatggtcataactttattaatatattatttagtgatttggagaatagcaacacgacaaaaagaaataacattgcattttggagaatcaattgttgaggtatactttggagatatttttcaatctgaagaagaagatttgaaaataatttctttcaacgaatattttgatacagaaatgggaggtaatactaaaataatttctccaggtacgattaatgggaaatttcttgaaatgaataaggataaaatacctcaatttgacaaaataatcgctgaagatgaatatcttaattctgaaatgttacttgaaacagttaatgaaagaaaacatggtaagaaaaataagtataaattgggatcactagtaaatttatcagataattatttcgcagttgctgcttccaaatttgataaagataacaaagcaaatataacaatgcgtgaatatattggttttttattgactctttggagtgaagtagaccgaatatataataatcggagtatagtaattccagtgtttggttccaatattttacgttttactgatggttatgctggtgcaacatctcaggacttattagaaatcattatttggacatttaaaattagtcgaataaaaattgcttatcctagtaaaattaaaatagttgtatttgaaaacaaatcagatatgtataatttatataagttaaaggagttagaaaaaaatggtatataa

SEQ ID NO: 23853 - DNA, 1425 bp, Enterococcus faecalis VC1B-1
atggaggctatagtattgggaaatattgagggtaaaaaagtgtttatttcttatagttggtcaaatgaagaacaccaaacaaaggtaataaaattagctgaagaattagtaaatttggggattgatgtaatactagatgtatgggatctaaaacctggtcaagataaatacaattttatggaaaaaatggttaaagatccttctctagataaagtattaattattactgataaaacttacgctgaaaaagcaaataacagacaaggtggtgtaggcacagaaactcaaattattactccttctatatataacaatttgggagaagataaatttattccaattatttttgaaaaagataagagtactggtgaagcatttttacctgtttatgctcaatcgcgtatatatattgatttaactaatgatacagtttatcaagaaggtcttgaacagcttgttagagagatatatgaaagacctacgtataaaaaaccaaaattaggtaacgctccttcgtatatacttgaggataaaataaatacttttaatattgaaaggaaagctgatgatgtagagcatgccttaagtaaaggaactcaaagagttagatttgctatcaaagattattttgatagctttattgaagaattagataaattgattgtgaaagaaaatgagggggaagcttttgatgctgcagcagtaaggatgatagacgagtcgcttccgtttcgaaaatcatttataaaaatgcttaatgtttttgtacaaatagataatatagactcggaatttattagtgagttttttgaagattatagtaataaaatttttcaaatggaaagaaaggatgagttagctccagaagcagtaaaatttttgctgctagaactatttatttgttcaacatcaatatttatcaagtataaaagatgggaaatgttagcacatatactaaatcatgaatattacaacaaattagaacgtaagacgtactcatttggttatttatatatgccaactagcttcatattagaaggttctttgcaaagaatgaataacaaaagtttagtatcagataaaatggaaaaaagagctacggagagagattttaatttgatggtcgaagcagatatgtttttgtactatataagcaagataaacccaaatgtaggtgtagactatcgtgtgccgtggtttccaatactccatatctttacaacaagattgaacgggcatatgaaagttcttaatttgctaaaatctaaaaataaattaagcgaaatgttaccaatttttggtgtttctgaagaagaattaaaattaaaaattcgtgaaatgaagagtgattctggatacagttacagaccaattcaagaatttcaattttttttaaaagtagaagatattggaattaaagcataa

SEQ ID NO: 23854 - DNA, 462 bp, Enterococcus faecalis VC1B-1
atggtatataaaacaaaaacgtatgttgcttttgatggaacaaatgacatgacttattatagaacattaaaaatgtggagcgaaaatgacaatattgattttacattaaataatgcccatgatttaaagagttctcgagattctagtttaccagaaacaatcaaacgaagtttacgtgaacgtattcaagcaagtaaagtcatgattttgatagttggaaaagaaacacatcatcatacaaaatttgtaaaatatgaaatagaatatgctaaatcgctaaatattcctattattttagctattgttgataatggagttactcctaaaagttggtttaatgattatcctgttatagaagtcccatttaaattaaaagatattaactatgccatgaataactggcctataagttttaaaacacataacaaaaatggtgatgtaggtatttggcattataaatag

SEQ ID NO: 23855 - DNA, 852 bp, Enterococcus faecalis EnGen0413
atgaacaaagtaaatttctttgatattaggcttcttcgcatatttggaatgatattaaccggtgtaagcacgatgttttccctaattttaatatttgttactattccagaagatgctaaaaaatatttaggactattcttgctgatccttttaattattggatatgttcttttatggaagtatatgtcgggattaaaagaagttcatcttagaattggtgaaactaatgttgaaataaaatttggagatattttcaatgagaaaggcttaaaagtaattccatttaatgagtattttgatactgctgtagacaataacattatttccgaaaattctttgaatggtcaatttataaataaattttatttcaataaacaacttgtcaaagaattagataatattattttgaatagtccacttttgaaagaaagtaaagtcgggattgttcctgaacgagaagtgggtaataaaaacaaatatgttttaggtagtttggtggcactagataatgaatatatagttacagcaatgagcagatttgatgagaataacaaagcgtttttgtctatggaagattatattgcttttcttatgaagttttgggaaaaaattagtattgtttacaatcaacgaactgttgttattccagtaatggggtcggggataacaagatttcctaatggttacgacaatgctaagttacaagatttgcttcaaattattttatggactttcgaggtaagtaaaataaaacttgatttaccagctaagctagtaattgtgattagtgagaaaaaagaagatcgtattaatctattcaaattaaaggagatggggaaagatggcctatag

SEQ ID NO: 23856 - DNA, 846 bp, Enterococcus faecalis EnGen0413
gtgtataaaggatataatttgattttagaaaaaaatgagccacagaatttttttggaattacagattttgctatgagaaattttgataaagatattttgaagatgaggaaaaatgttcaagaaaaaatggaagctaaattagaatttccgcttgattcagatagtaatatcgatgcacaaaagatcatgaatgattggtttccaaattataaagctgatatttttatttcccattcacataaagatgagaaaactgctaaaagactagccatatggttaaaagagaagctaggactaaccgtttttattgattctattgtttggggaagtgcagatgatcttttaaaaaaaatagacgatgagtatagtgtattatctcggaaaggtagtcaagtagcttataattatggaatccgtaattatacaacttcacacgttcacatgatgttaatggctgcactaactgaagttataaataatacggaatgcctatttttcttaaatacgcctaactccgtctcggtcagggaggttcaaaataaaaaaactaattctccgtggatttatgctgaattgaagatggcaggagtaattgaaaaaaaactgccaaaaagaatacaaatagaaataaataaagagctacaacgtagtgaaacttttaatagtaaggataaacttccaaaatttgattatttattgaataatgatttaaacaagctaaaaatattaaagaaacatgatctggttatgtggtcagagttgattgctcggagctccaacgaagatttaaataaaatgcacccacttgacctattatacggggaggagaggaaaaaagacttatga

SEQ ID NO: 23857 - DNA, 522 bp, Enterococcus faecalis EnGen0413
atggcctatagaaataagacctatgtcgcttttgatggggacaatgacattcattattatcgtacaatgaagatgtggaagcaaaatgataaaagtgattttaatttttttgatgcacatgatttaaataatgcaagagatacaagttctgaagatacgattaaaagaaggttgagggagagattgtctaattcaaaagtttttgttttgttggtaggtgatggtacgagatacttatataagtttgttaggtgggaaattgagcaagcggtgaaactgaacttacctattattgttgtaaatttaccacaagatgccggtcaagaaggtgaaagacaagttgatttcgagagatgtcctaaaattgtacgggataatctagcaattcatatttcgtttaaatctaatattcttcaatatgcattagaaaattggccggaatctcactataatcatagaaaaaaaggagatactgggggatattcttataaagattatgtctatgattctttaggtatatag

SEQ ID NO: 23858 - DNA, 846 bp, Enterococcus faecium EnGen0048
atgaaaaaaataaagtttatggatcaccgtattagaaaagtctttttaagattccttggtgtaattagtaccattctttccttggttctgatttttattgagataccagattattgcaagttatatctgggaatttcattcggagtactattagtgataacttatattggaatatggttttatgccaataagaaagcatctacgagtttaaaaattggaggaactacggtagaaataattcgtggagatatttttgcacagaaaggattgaaggttatcccctttaatgaatattttgatacggtggttgatgataaaattatttctaaaaagtcattacatggcaaatttatccagaaatattatacaaatccatctgatttaaaacaaaaaattgaagatgatccagactttaatgacgatgaaaattggtgtatgaaaaaaaggtataaagatgtttatcaaaaaagttataaactagggagtacttttgttgatggtgattttgttcttactgctttttcaaagtttaatgagaagaatgaagcgcgactttcaatgtctgagtacatcaattttctattgattttttggaatgaaatcaatagggtatattcgctacaaaatgtttctgttccaatttttggtgctgggattacacgtttttctaatgggtttaataatattccgattaacgaactacttaatataatgttgtggactttcagaataagtgaaacaagattcaaatatccagctaagctaaggatcattatttataaagatcagtttgatgaaatagatttattcggattaaagggggaaattaacgatggtagcttatag

SEQ ID NO: 23859 - DNA, 834 bp, Enterococcus faecium EnGen0048
atgtataaaggatataacttggatttatcagttattgagaagcaatcatttttgaacgttactgattatgaaattgatctatttgaaaagaaaatacattcgaaaaaaaacgagctcttatccagaataaaagagactatttatttacctagaactgaagataataaaattgatggatcgcaattaataaatgattggtttcctaattataaatctgatatttttttatctcactcacataatgaccacaggactgccaagaggcttgctgtatggctgaaacgtgaatttgggctggaagttttcctagattctattgtttgggggagtgctgataagcttttgaaaaatattgataatgaatatgcaatactcagaaaaaagggagataatataacttataactatgatataagaaatttcacgacaagtcatgttcatatgatgctatcaacagcattgaatgatgttatcaataatacggaatgtctaatcttccttaacaccccagagtcaataagtatcggtgaagtttccaagcgtaaaaccaattcaccatggatatataatgagctcaaaatagcgtcacttatagaaaagaaaaatccaagagaaacaattttgaaagagcaattgggaaaaagacaaaaagaaatatatgctaatggtggtcttgatattttatatgatgtacaaactcagctaggctgtttagagacgcttgataataagaaaatacaagaatggcaaaaagaatgggaaatatccaatcacaaatttcaccctctggatttgttgtattatggtaattctagttactttttaaaggagtag

SEQ ID NO: 23860 - DNA, 501 bp, Enterococcus faecium EnGen0048
atggtagcttatagaaataaaacgtacgtagcttttgatggagataacgatattcgctattattggatgatgaaagcgtggaagcagaaagataatacaacatttgatttttatgatgctcatgatcttaattctgcaagagatactagtaaagaagaatctataaaaagccagcttagagagagaatgaaaaattcaaaagtttttgttttgttaataggagaaaatacaaaatatctacgaaaatttgttaaatgggaaattgaatcagctataaggatggggttgccgataatatgtgttaatctaaatgggaagcgaatgaaagatgaactttgcccaccttgtttgaatgatgagctttcgatttttataccttacgagaagaaaataatgcaatatactttagaacattggccgagttcgtatagtcagcatatgataaatggcgattcaggtgcgtatcaatccttgactatgaaattttcttaccaagattag

SEQ ID NO: 23861 - DNA, 816 bp, Clostridium clostridioforme 90A8; identical to SEQ ID NO: 22835

SEQ ID NO: 23862 - DNA, 297 bp, Clostridium clostridioforme 90A8
atgagcaaacgagtttatattagcgcagattatgcagaagatagcggtgaccgtgatgtcgttgatattctgaatcaatgggggtccgataaccggcataaagtagattttatagacatgtcaaaagtagcttcaggcagtgtttccaatgatccggattgtcgcccttgtgacttgaaacgtgagtttaatcaacagataaacgcttcctccgctgttatttttattgttggtgataagaccgcatcctggtgtggtataaaaaaagttgacagtttattctcaaggatttcataa

SEQ ID NO: 23863 - DNA, 405 bp, Clostridium clostridioforme 90A8
gtgtcagtcggcaaggcttctataaatatcttgcaaacaaagactaaagccggcagcagctgttcacgggcaagcagcgagcaggcagactgcagctgtactccgtataagcaaaattccaagggctccaagacctgcaaagtgattcataccagttcagccaaagcagatagtgatgttggcaatatcaatgcgttttcctacctccagcatgagtttgagcaggccaagaaacgtaaaaagcccatcattattgtttataactcattacgcaaggaatcaaattggcttccatcttatatgaaaggctatgaatccgatgcgcggcctttttggaaaaggaacgattatggtgaaaaggtgggtgattatacctacataaaacaggtgctgggatatgcttaa

SEQ ID NO: 23864 - DNA, 837 bp, Salmonella enterica; identical to SEQ ID NO: 23087
  subsp. enterica serovar Anatum str. ATCC BAA-1592

SEQ ID NO: 23865 - DNA, 885 bp, Salmonella enterica
  subsp. enterica serovar Anatum str. ATCC BAA-1592
gtgaatgttttggacaacaatatatataatatccttttcttcatctttctttcaatagtaattccatcccttttattcctcgcatggaaacagcaccaaaaaaccaaagagattcgttcatatctattgaaagagggatataatattattttcaacggagaaggtaactcatacctcgcgtttaatattagtaatgcgacatttcgtgcaggtaatttaatttccaataattattttcaagcatcaatttcttatatccacgattatagatgggagtggaaggaggttgacgcaaagaaaataaacaatatatttattatttacatttcggatattgatttcccttctcaaaaactattttatcacaataataaatctttagctgaaatagactgggcaaaattacaagctatttttcatcaaccatatgaaataaagaatgacgtcatgctagataacaatgatacgcactatgattttttcatatctcatgcaaatgaagataaagatacttttgtcagaccattggtagacgagttaaatcgacttggtataattatttggtatgacgaacagacacttgaagtcggcgatagcttaagaagaaatattgatttaggcctaagaaaagcaaattatggcatagtcatactttctcatgactttctaaacaagaaatggacacagtacgaattagatagtttaattaatcgtgcagtgtatgatgataataagattatattgccaatctggcataatatcaatgctcaagaggtatctaaatacagccattatttggcggataaaatggcactacaaacttctttatatagtgttaaggaaatagcaagagagttggctgagatagcatacaggagaagataa

SEQ ID NO: 23866 - DNA, 510 bp, Salmonella enterica
  subsp. enterica serovar Anatum str. ATCC BAA-1592
atgagttatcgtaataagacatatgtggcttttgcaagtgaagatataaagctttatcgtctaatggaagcatggaaagcaaatgaaaacatagactttaacttttttgatgctcatgatctctttatttcaagggatacaagtaagcctgaaaccataaagcgaaacctccgcgaaaggatgaaaaatgctaaacaagtagtactgttgggaagtagtaatactaagagaaaaggtagcgatggagtatcgtttcttgcccatgaaatagatcttatcgtagaatttaaccttcctgttgtaatagctaatttagacggagatagaacagtcgataagaacttcattcctaaaccgcttttagattcagagcattatacagtgtctgtttccttccaacctaaaattattaaatatgcattagataattactgtgttaactattattcaagttcaaatagtggtagttatctataccctgcatctgtttatactaagttaggtctgtaa

SEQ ID NO: 23867 - DNA, 837 bp, Salmonella enterica subsp. enterica serovar Saintpaul str. S-70
atggcgaaagttaactttttcgataagcgtatacttaaaaaattttcagactacacatcaactataagtaccatattttcactttttttgattttcgtagacattccaacagaaaacaaactaacacttggcattatatttttaattattttattcttactgtatttcggcatatggtttaaatcaaataatctttcggaagttaatttagatgttgagggcagcattgttactgtaaaagcaggtgatttattcagacaagatggattcaaggtcattgcttttaatgaatattttgacacgcaagttgatgatgttgtcatttctcataattcacttaatggattatatattgataactatttagcgggatccgtatctgatttagaccatcgtatttcaaatcatcattttgaagaagatgaactgcttgaggttaaccataaaagaaaagtgggtaaaacacaaaaatattcgctaggaactatcttcgttaatagtgattatctattaactgcgttttcaaaatttgacgataaaaatagagcttttcttacaatgccggattatctagcatttttaataaatttttgggacaaagttaatcgtatatatgcacaaaaaagtgtctctgttcctatctttggatctggaatcactagaataaaggagcataaaaatattagcgatgaggatttacttaaaataatgttgtggacttttagaataagtgaaatgaggtttaaatttccggcaaagcttactatcgttattcacaaagataagatagataaaataaacttattggatataaaatcagcgagaaatggtctttag

SEQ ID NO: 23868 - DNA, 888 bp, Salmonella enterica subsp. enterica serovar Saintpaul str. S-70; identical to SEQ ID NO: 23086

SEQ ID NO: 23869 - DNA, 510 bp, Salmonella enterica subsp. enterica serovar Saintpaul str. S-70
atgagttatcgtaataagacatatgtggcttttgcaagtgaagatataaagttttatcgtttaatggaagcatggaaagcaaatgaaaacatagactttaacttttttgatgctcatgatctctttatttcaagggatacaagtaagcctgaaaccataaagcgaaacctccgcgaaaggatgaaaaatgctaaacaagtagtactgttgggaagtggtaatactaagagaaaaggtagcgatggagtatcgtttcttgcccatgaaatagatcttatcgtagaatttaatcttcctgttgtaatagctaatttagacggagatagaacagtcgataagaacttcattcctaaaccgcttttagatttagagcattatacagtatctgtctccttccaacctaaaattattaaatatgcattagataattactgtgttaactattactcaagttcaaatagtggtagttatctataccctacatctgtttatactaagttaggcctgtaa

SEQ ID NO: 23870 - DNA, 837 bp, Salmonella enterica; identical to SEQ ID NO: 23867
  subsp. enterica serovar Oranienburg str. S-76

SEQ ID NO: 23871 - DNA, 888 bp, Salmonella enterica; identical to SEQ ID NO: 23086
  subsp. enterica serovar Oranienburg str. S-76

SEQ ID NO: 23872 - DNA, 510 bp, Salmonella enterica; identical to SEQ ID NO: 23869
  subsp. enterica serovar Oranienburg str. S-76

SEQ ID NO: 23873 - DNA, 837 bp, Salmonella enterica; identical to SEQ ID NO: 23087
  subsp. enterica serovar Bareilly str. CFSAN000207

SEQ ID NO: 23874 - DNA, 912 bp, Salmonella enterica; identical to SEQ ID NO: 23090
  subsp. enterica serovar Bareilly str. CFSAN000207

SEQ ID NO: 23875 - DNA, 510 bp, Salmonella enterica; identical to SEQ ID NO: 23866
  subsp. enterica serovar Bareilly str. CFSAN000207

SEQ ID NO: 23876 - DNA, 837 bp, Salmonella enterica subsp. enterica; identical to SEQ ID NO: 23087

SEQ ID NO: 23877 - DNA, 864 bp, Salmonella enterica subsp. enterica
atatataatatccttttcttcatctttctttcaatagtaattccatcccttttattcctcgcatggaaacagcaccaaaaaaccaaagagattcgttcatatctattgaaagagggatataatattattttcaacggagaaggtaactcatacctcgcgtttaatattagtaatgcgacatttcgtgcaggtaatttaatttccaataattattttcaagcatcaatttcttatatccacgattatagatgggagtggaaggaggttgacgcaaagaaaataaacaatatatttattatttacatttcggatattgatttcccttctcaaaaactattttatcacaataataaatctttagctgaaatagactgggcaaaattacaagctatttttcatcaaccatatgaaataaagaatgacgtcatgctagataacaatgatacgcactatgattttttcatatctcatgcaaatgaagataaagatacttttgtcagaccattggtagacgagttaaatcgacttggtataattatttggtatgacgaacagacacttgaagtcggcgatagcttaagaagaaatattgatttaggcctaagaaaagcaaattatggcatagtcatactttctcatgactttctaaacaagaaatggacacagtacgaattagatagtttaattaatcgtgcagtgtatgatgataataagattatattgccaatctggcataatatcaatgctcaagaggtatctaaatacagccattatttggcggataaaatggcactacaaacttctttatatagtgttaaggaaatagcaagagagttggctgagatagcatacaggagaagataa

SEQ ID NO: 23878 - DNA, 510 bp, Salmonella enterica subsp. enterica; identical to SEQ ID NO: 23866

SEQ ID NO: 23879 - DNA, 837 bp, Salmonella enterica subsp. enterica; identical to SEQ ID NO: 23087

SEQ ID NO: 23880 - DNA, 864 bp, Salmonella enterica subsp. enterica; identical to SEQ ID NO: 23877

SEQ ID NO: 23881 - DNA, 510 bp, Salmonella enterica subsp. enterica; identical to SEQ ID NO: 23866

SEQ ID NO: 23882 - DNA, 837 bp, Salmonella enterica; identical to SEQ ID NO: 23087
  subsp. enterica serovar Anatum str. USDA-ARS-USMARC-1735

SEQ ID NO: 23883 - DNA, 912 bp, Salmonella enterica; identical to SEQ ID NO: 23090
  subsp. enterica serovar Anatum str. USDA-ARS-USMARC-1735

SEQ ID NO: 23884 - DNA, 510 bp, Salmonella enterica; identical to SEQ ID NO: 23866
  subsp. enterica serovar Anatum str. USDA-ARS-USMARC-1735

SEQ ID NO: 23885 - DNA, 837 bp, Salmonella enterica subsp. enterica serovar Anatum; identical to SEQ ID NO: 23087

SEQ ID NO: 23886 - DNA, 912 bp, Salmonella enterica subsp. enterica serovar Anatum; identical to SEQ ID NO: 23090

SEQ ID NO: 23887 - DNA, 510 bp, Salmonella enterica subsp. enterica serovar Anatum; identical to SEQ ID NO: 23866

SEQ ID NO: 23888 - DNA, 837 bp, Salmonella enterica subsp. enterica serovar Anatum; identical to SEQ ID NO: 23087

SEQ ID NO: 23889 - DNA, 912 bp, Salmonella enterica subsp. enterica serovar Anatum; identical to SEQ ID NO: 23090

SEQ ID NO: 23890 - DNA, 510 bp, Salmonella enterica subsp. enterica serovar Anatum; identical to SEQ ID NO: 23866

SEQ ID NO: 23891 - DNA, 834 bp, Salmonella enterica subsp. enterica serovar Anatum
atggcaaaagttaactttttcgataagcgtatacttaaaaaattttcagactacacatcaactataagtaccatattttcactttttttgatttttgtagacattccaacagaaaacaaactaacacgcattatatttttaattattttgttcttgttgtatttcggcatatggtttaaatcaaataatctttcggaagttaatttagatgttgagggcagtattgttactgtaaaagcaggtgatttattcagacaagatggattcaaggtcattgcttttaatgaatattttgacacgcaagttgatgatgttgtcatttctcataactcacttaatggattatatattgataactatttagcagggtccgtatctgatttgaatcatcgtatttctaatcatcagtttgaagaagatgaacggcttgagatcaaccataaaagaaaagagggtaaaacacaaaaatattcgctaggaactatctttgttaataatgattatctattaactgcattttcaaaatttgacgataaaaatagagcttttcttacaatgccggattacttagcatttttaataaatttttgggacaaagttaatcgtatatatgcacaaaaaagtgtctctgttcctatctttggctctggaatcaccagaataaaggaacataaaaatattagcgatgaggatttacttaaaataatgttatggacttttagaataagtgaaatgagatttaaatttccggcaaaacttactatcgttatccacaaagataagatagataaaataaacttattggatataaaatcagcgagaaatggtctttag

SEQ ID NO: 23892 - DNA, 912 bp, Salmonella enterica subsp. enterica serovar Anatum; identical to SEQ ID NO: 23090

SEQ ID NO: 23893 - DNA, 510 bp, Salmonella enterica subsp. enterica serovar Anatum; identical to SEQ ID NO: 23866

SEQ ID NO: 23894 - DNA, 837 bp, Salmonella enterica; identical to SEQ ID NO: 23867

SEQ ID NO: 23895 - DNA, 864 bp, Salmonella enterica
atatataatatccttttcttcatctttctttcaatagcaattccattccttttattcctcgcatggaaacagcacctaaaaaccaaagagattcgttcatatctattgaaagagggatataatattattttcagtggagaaggtaactcatacctcgcgtttaatactagtaatgcgacatttcgtgcaggtaatttaacttccaatgattattttcaagcatcaatttcttatatccacgattatagatgggagtggaaggaggttgacgcaaggaaaataaacaatatatttatcatttacatttcggatattgatttcccttcccaaaaactattttatcgcaataataaaattttagcagaaatagactgggcaaaattacaagcaatttttcatcaaccatatgaaatacagaatgacgtcatgcaagataacaataatacgcactatgattttttcatatcgcatgcaaatgaggataaagatacttttgtcagaccactggtagacgagttaaatcgacttggtgtaattatttggtatgatgaacagacacttgaagtcggcgatagcttaaggagaaatattgatttaggcctaagaaaagcaaattatggcatagtcatactttctcataactttctaaacaaaaaatggacacaatacgaattagatagtttaattaatcgtgcagtgtatgatgataataagattatattgccaatctggcataatatcaatgctcaagaggtatctaaatacagccattatttggcggataaaatggccctgcaaacttctttatatagcgttaaggaaatagcaagagagttggctgagatagcatacaggagaagataa

SEQ ID NO: 23896 - DNA, 510 bp, Salmonella enterica; identical to SEQ ID NO: 23869

SEQ ID NO: 23897 - DNA, 837 bp, Salmonella enterica subsp. enterica serovar Anatum; identical to SEQ ID NO: 23087

SEQ ID NO: 23898 - DNA, 864 bp, Salmonella enterica subsp. enterica serovar Anatum; identical to SEQ ID NO: 23877

SEQ ID NO: 23899 - DNA, 510 bp, Salmonella enterica subsp. enterica serovar Anatum; identical to SEQ ID NO: 23866

SEQ ID NO: 23900 - DNA, 837 bp, Salmonella enterica subsp. enterica serovar Anatum; identical to SEQ ID NO: 23087

SEQ ID NO: 23901 - DNA, 864 bp, Salmonella enterica subsp. enterica serovar Anatum; identical to SEQ ID NO: 23877

SEQ ID NO: 23902 - DNA, 510 bp, Salmonella enterica subsp. enterica serovar Anatum
atgagttatcgtaataagacatatgtggcttttgcaagtgaagatataaagctttatcgtctaatggaagcatggaaagcaaatgaaaacatagactttaacttttttgatgctcatgatctctttatttcaagggatacaagtaagcctgaaaccataaagcgaaacctccgcgaaaggatgaaaaatgctaaacaagtagtactgttgggaagtagtaatactaagagaaaaggtagcgatggagtatcgtttcttgcccatgaaatagatcttatcgtagaatttaaccttcctgttgtaatagctaatttagacggagatagaacagtcgataagaacttcattcctaaaccgcttttagattcagagcattatacagtgtctgtttccttccaacataaaattattaaatatgcattagataattactgtgttaactattattcaagttcaaatagtggtagttatctataccctgcatctgtttatactaagttaggtctgtaa

SEQ ID NO: 23903 - DNA, 837 bp, Salmonella enterica subsp. enterica serovar Kentucky; identical to SEQ ID NO: 23087

SEQ ID NO: 23904 - DNA, 864 bp, Salmonella enterica subsp. enterica serovar Kentucky; identical to SEQ ID NO: 23877

SEQ ID NO: 23905 - DNA, 510 bp, Salmonella enterica subsp. enterica serovar Kentucky; identical to SEQ ID NO: 23866

SEQ ID NO: 23906 - DNA, 837 bp, Salmonella enterica subsp. enterica serovar Anatum; identical to SEQ ID NO: 23087

SEQ ID NO: 23907 - DNA, 864 bp, Salmonella enterica subsp. enterica serovar Anatum; identical to SEQ ID NO: 23877

SEQ ID NO: 23908 - DNA, 510 bp, Salmonella enterica subsp. enterica serovar Anatum; identical to SEQ ID NO: 23866

SEQ ID NO: 23909 - DNA, 837 bp, Salmonella enterica
atggcaaaagttaactttttcgataagcgtatacttaaaaaattttcagactacacatcaactataagtaccatattttcactttttttgatttttgtagacattccaacagaaaacaaactaacacttggcattatatttttaattattttgttcttgttgtatttcggcatatggtttaaatcaaataatctttcggaagttaatttagatgttgagggcagtattgttactgtaaaagcaggtgatttattcagacaagatggattcaaggtcattgcttttaatgaatattttgacacgcaagttgatgatgttgtcatttctcataactcacttaatggattatatattgataactatttagtagggtccgtatctgatttgaatcatcgtatttctaatcatcagtttgaagaagatgaacggcttgagatcaaccataaaagaaaagagggtaaaacacaaaaatattcgctaggaactatctttgttaataatgattatctattaactgcattttcaaaatttgacgataaaaatagagcttttcttacaatgccggattacttagcatttttaataaatttttgggacaaagttaatcgtatatatgcacaaaaaagtgtctctgttcctatctttggctctggaatcaccagaataaaggaacataaaaatattagcgatgaggatttacttaaaataatgttatggacttttagaataagtgaaatgaggtttaaatttccggcaaaacttactatcgttatccacaaagataagatagataaaataaacttattggatataaaatcagcgagaaatggtctttag

SEQ ID NO: 23910 - DNA, 912 bp, Salmonella enterica
atgaaatatgaatttttcatatgcttggtgaatgttttggacaacaatatatataatatccttttcttcatctttctttcaatagtaattccatcccttttattcctcgcatggaaacagcaccaaaaaaccaaagagattcgttcatatctattgaaagagggatataatattattttcaacggagaaggtaactcatacctcgcgtttaatattagtaatgcgacatttcgtgcaggtaatttaatttccaataattattttcaagcatcaatttcttatatccacgattatagatgggagtggaaggaggttgacgcaaagaaaataaacaatatatttattatttacatttcggatattgatttcccttctcaaaaactattttatcacaataataaatctttagctgaaatagactgggcaaaattacaagctatttttcatcaaccatatgaaataaagaatgacgtcatgctagataacaatgatacgcactatgattttttcatatctcatgcaaatgaagataaagatacttttgtcagaccattggtagacgagttaaatcgacttggtataattatttggtatgacgaacagacacttgaagtcggcgatagcttaagaagaaatattgatttaggcctaagaaaagcaaattatggcatagtcatactttctcatgactttctaaacaagaaatggacacagtacgaattagatagtttaattaatcgtgcagtgtatgatgataataagattatattgccaatctggcataatatcaatgctcaagaggtatctaaatacagccattatttggcggataaaatggcactacaaacttctttatatagcgttaaggaaatagcaagagagttggctgagatagcatacaggagaagataa

SEQ ID NO: 23911 - DNA, 510 bp, Salmonella enterica
atgagttatcgtaataagacatatgtagcttttgcaagtgaagatataaagctttatcgtctaatggaagcatggaaagcaaatgaaaacatagactttaacttttttgatgctcatgatctctttatttcaagggatacaagtaagcctgaaaccataaagcgaaacctccgcgaaaggatgaaaaatgctaaacaagtagtactgttgggaagtagtaatactaagagaaaaggtagcgatggagtatcgtttcttgcccatgaaatagatcttatcgtagaatttaaccttcctgttgtaatagctaatttagacggagatagaacagtcgataagaacttcattcctaaaccgcttttagattcagagcattatacagtgtctgtttccttccaacctaaaattattaaatatgcattagataattactgtgttaactattattcaagttcaaatagtggtagttatctataccctgcatctgtttatactaagttaggtctgtaa

SEQ ID NO: 23912 - DNA, 849 bp, Clostridium spiroforme DSM 1552
atgagaaagatatataaatggtacagtaaattaacaaaacgagtaaaagatagtattattattactatgtcttcaataggagtaatatctacttttctatctgtgttaggtctatcgttggcggatatagagacgttaactatttggttaaggatagttataagtgtatttgctttcattgtattatatataattatatatatgttgataggtagaatatttaaagattctgttagtaccacgattcatcaaacatctgtaactgttgtttgtggtgatatatttgaagttccagaatttagagtgataggttgtgatacaaattttagaaccgaaattgatgatgtaattatatcgaaaaaatctttacatggacaattgattttaaatcatggggtaccagatgagattaatgcagtaattgaatcggaagcaaaacgtttaggattacataaaaatgatgagggattatatgattttccacttggtacgataattcgttatgatagcagtgttgataatcatacatatttgatgttggctatgacagaattgaatagtaattatgagagtcatacaaatatggctaaatttgaatatatgctaatgagaatgtggaaggaaattaacagggtttatgcaggaaacgatattgctcttcctttgttgggatcgggtatttcaagatttgatgatggtccaaaagaatatggagcgttattaagatgcatgttgtgcactcttaatggtagtggagtaacttttaattcaaatattaagattcttatatatggaaatataaaggatattcccttatacgaatataaagatatatttaatatagtttaa

SEQ ID NO: 23913 - DNA, 855 bp, Clostridium spiroforme DSM 1552
atgtatagatgttttaaattgtctctagaccagtgggaatttaaaaataatcataagcaatttttagataattgtaagacatgtgggatagaactgaaagaaaatcttgttaatgcttttgattcaatactaaatgcatcaattgatggtaatggtgtgataagtggagaaaattttattgatagttggtttccgattgataactatgatgtgtttctttcatattctcatgatgatgaagaactagctttgctattggcaggattcttaaaataccaatttggattgagagtgtttatagatgaactgttttggggaagtgctgatgatttgcttcataagcttgatgataaatattgtaaaactaaagaaggaaattacgattatagaaaacgaaattttacaactacccatgtacatgctatgttatcaactgctattgcaagaacaatcaataattcagaagttataattttccttaattcagaaaagtcgatatataaagtaagagaagaagtgaatgtgggccaaactctttctccttggatttatgaagaaattattttcacaactgttattggtgaaagagaatggtatgaacatagactagatgagttaaaagagtcaactattaattttcagaaatcaatggaaatatcatatttagttccgaatgaacatctaatacctattcagtataatgatttatgcgagtggatcaaattgtgggaggagagaaaagataatggtaatggaccctatggaaatatctgccttaaacctaatgaaaagatacgtcatccgttgaatgttttgtatgatttcaaatgtggatatgatataaaatgtagctaa

SEQ ID NO: 23914 - DNA, 654 bp, Clostridium spiroforme DSM 1552
atgggacacaaatgttttattagtttcaaaaaagaagatgattattacaaaaatgaaatctctaaaatattggaggaagggcaaattcaaggaaaatcgcttgataagtggatagattctgaagatattgactatgttatgcaggtaattcgctctcaatatatgaagaatacttctgtaacacttttcttaataggagaacattcttcagaaaatgaaggattcgaatatagttggtcagatggatgctattataataaacaaaatttcattattagagaattaaaagctacactttatgatggaaaaggtaacagacgaagtggattattgggaatagttttaccaaatatgtatgatactgtatatggtggaagttatacatgttcacattgtggtaaagaggttaacgtggttaatattaattcaaatacagtaattaaggaattttcagaaaactattatctaaacccaaactgtaatgatggacattgtgacgaaacagggcgttattgtgttttggtaaagtatgatgattttattaaaaatcctaatgtgtatatagatatggcatatgataaaacaaatgaagaaataagcgattttgttcattggaaagatattaaacatgaatataagaaaacgtatttatga

SEQ ID NO: 23915 - DNA, 876 bp, Elizabethkingia miricola
atgaactattatatccgttcgtttagaacaaaatcatattgggtatatgctctttggtctgtcgattccgtaaaaacctttatggctgttgtgggtggaatatggctttttgttgatatcctaagctcgtttaagttaatagacaaagaaaagctatcactttggagcttagcaccaattgtaatatttggtttaataatagtaattattacaagaagacctgttaaaaaaatatcgtacaaatatcctgggcaagatttgagaattgaagtatgcataggcaatctttttgacatcccaggacaaaaagtaataagtacaaatacaacttttgacaccgatgttgctagtgggattatttcttctagaagtttacaaggacagtttactgaaaaattctttccttctaatcttccagctcttgacgaagctttaaataaaggattgcaaggtttaccaaaaactacagtcgaaaaagacgccggaaaaacggaaagatatgatttcggaactactgtaaaattaaatttgtcaggacagtatttctattggtttgcgatggcagatttaaaccgtagtaataatgcaaaaaccacactaaaaaatgttcatcaatcattagatggactatgggaatttatagaaactaagggagagaagcttccgaccgttattcctctaattggaacagggcttggtcgattaactactagcagaaaaaaattaattgcaattatagctcaatcatttattaatgcttctgaagataatttattttcggaaaaattagtcattgtagttcatccttctgatgccgaagcatcaggtttgaatctatttgaggttaaagaccttcttcatcattatttaccataa

SEQ ID NO: 23916 - DNA, 855 bp, Elizabethkingia miricola
atgagtattcaaagtattacaagttctatttctagtttagaccgagaaattagtagtttagaaaatcagctgcaaactatcaataacaatcttagtcgtaaagaaaaggaagccacttccattttggaaaaaataagtaaggagaaagatttgaaacgaatagttacttataacaaagaccttctaagaaagaatgatgaaattaataggataaataaagataaatcttctaaatcaaagactctttcagacaagcaaacaaaaaaattaaaactacttcaagacttaaacaaagaagaacaaaaagtaagagataaaacaaaaaaagagcaaaaggaaattctcacaatgcaacaaagcattactagagaaatggaaagacagaaaaccctttcactctcatctctgcctaaaaagcattttgaattacctattaatacacaaaaaagctatgatgtttttatttctcatgcttccgaagataaagcaggtttcgtaagaccctttgtagaagcattaagagctaaagatgtggttgtatggtatgatgactttgagcttcaagtaggtgatagtttaagacgctcaatagataatggacttaaaaattctaaatatggaattgtagtattatccgatgctttttttaataaagaatggcctcaacgagaattagacggattgtttgcgagagaagtaaatggtgaaaaagttatcttacctatttggcacaaaatttcaaaaaatgaagtaatgagttatagtccaattattggagatatgctcgccataaacactactgattttatgattgaagaaattgcagagaaaatagcaacgagaattaaaagataa

SEQ ID NO: 23917 - DNA, 507 bp, Elizabethkingia miricola
atatattttatgaatccaacatgttatgtttgttttgatggcgataatgatattcactattatagattaatgcaagcttgggacaaaaatgaaagatttgactttacgtttgttaatgctcatgatatcacccaagcacgagatacaagtactgaggaaactattaaacgtagtttaagaactcgtctaaaagcaagtgacgtacttattgttttagttggagaaagcacaagaaatctttacaaatttgttcgttgggaaatagaagttgcccttgaaatggagctttcaattattgtggttaatttagatggtaaaaaatcaataaataatgatctttgtcctcctattcttaggaatgagcttgctattcatattccttttgctcagaaaattttaggctacgcaataagaaactggccatcaagctcagcgaggcataaagcaaaaggagaaactgggccgtaccattataataattcagtctatatctctttaggcctttaa

SEQ ID NO: 23918 - DNA, 837 bp, Bacteroides cellulosilyticus CL02T12C19
atgctgagtaactacaatttctttcttaagcaagtagcgttggcaatgggtaccatttcttgtatcctgacaatctttatcggtatatggccgcgatttaattgtagttgtatgtgggggtgctgcctatttgcttctattgcttggggcttcagttcaataataccaggaaaagaaatcaggatagattttattcgcagacgtagaattcgtgtgaaggtgggtgatctatttgatacagaatgtggaagtatcgtggtcattccggtgaataactatttagacactcagttgcaacatgatgtgataggtccgcgtactgttcatggactgtttatacagcattatcgtgataaatatccgagaaagaatttagatgatgaaataaccaatgcaatatcaagagatggtatcctctcatcgggaagcgttgcgtctcgtagaaatgtaagtggcaaacttaataaatatccgttaggaacagttgtccgtttgtttgaggaagacaaacagtactatcttgtggtggcgacagagtttgatgaaaacaaccatgtgatttatcagccagagaaatatacttatatgctgcttactatgatggagaagataaacacctataatagcggtcatcctatctatatgcctattattggttccggacagaccgggctaaatctttccaaacaaaaaacattatgtcatattttgcaatgtttcagtttggtggaccattatgtaactatgggtggaactaccattgtagttcataaaagtgatacgaaatttatatccttaaataaggtaaagtatgagtttaacaatttaggaacataa

SEQ ID NO: 23919 - DNA, 531 bp, Bacteroides cellulosilyticus CL02T12C19
atgaatatacgggctttaaaaaacaagactaaaacttatcttgccggagactggtctggtgataaggctgccattgataaattgcacgaatggaatgagggaaatcgttggagtcttcatttcattgatgtacacaacttgacacaatctagagataacagtaacaactgcaatataaaagcttcactgagaatgagaatgggaatttcaaagactttcgttcttattattggtgaacatactaaatctctgaggagtggtgcttgttatttatgtaaatggtatagggaaaattcttgtttgttgagacattctgtagataatcgtagttatgtggactatgagtgcgatatggcgattaaagaaaatgctaagattgtgatactttataattctatcattgtagaccgaaacaaatgtccagaaatgctacggaacaaaggaatctataagcctatgaagaaatttaactttaatacttggaatgtggagtgggattatcagactgtgaaatctgcaatcaatgattaa

SEQ ID NO: 23920 - DNA, 531 bp, Bacteroides cellulosilyticus CL02T12C19
atgggaacttatagaaatggcacatacgtggcctttgatggacagggagaagtaaatcctgtcaatagcgacttgcataattttgaattgctaaaagcatggcaagcaaatgacaatgttcgttttaattttgtaaatagtcatgagaaaacttatagtgtgagagactcaagtagtttggaaacattgaaagcgagattgaaagaacgaatggctaattctaagaatatgttggttatagtttcttctcaaacaaataaaaacagagggttgttgaattgggagatacagcaagctgttgaagtttataaattaccgattatcgtggcgtatgtaggtttacagtctttaaatagttttagtctaaacctttactataactggttaccttctaagttgcgtgagtacgttaatagcaacactgcaaaagtagcacataccctctttacacaattcaagattggaggagcaattaattactattctgtagtaactccaacgatgcctataaatagtatggagatatattga

SEQ ID NO: 23921 - DNA, 894 bp, Lachnospiraceae bacterium 3-1
ttgaaatttttaaacattttggaaaaaaatttaaaacaagtatggaaggtttggtttgcggtttctagtagtttattcagcatattatcaataatattgtcatttctgtcgtgggaggattttggaataactaaaacaagtgctaaacttattgcttttattatcattattcttttttcgcttgtgacgggagttttttggacatgttttataacgaaaaagcatgtgtattggtcaaatggagatggaaaaattaatatctgttatgctgatataatgaaaatatcgtttccttggaaaagtaaaggtaagaagatagtggttattccagtaaatacaagttttgatacaattgttgatgaaaatttagcatcatgtgatagacctcttgtttcggccacaacagttcatgggttatggttgaagaatatgataaaaaatggtacaagcatagccgatattgatttagcaatcgacagatacattttaaataaaaatataagatgtgttaaggaactgacaatagaagaaaaaagcagaggaaagcgcaaatgctttgaaaatgggacaacagttatcatagagggaaaaaatgatataactttttttctattagcgctatcagaatttgatgagaataatagggctcaaagttcaaaagaagatgttgtaaaatgcatgaaagagttgttggagttttatgatattaacgggcaaggatatgagatgtatgtgacattggtgggaacaggaaggtcaagggctggattatcgcatgaagagtcgcttcagacaatgaaatcaatcttttcgatatatagccataaaatacatggaactattaatattgtaatttattctaaagataaagagaaagtttcgatttttagctaa

SEQ ID NO: 23922 - DNA, 843 bp, Lachnospiraceae bacterium 3-1
atgtatagaggatttaatcttatgttagatgaaattgatttttggttaatggatgaaaaaaagatagcagaatatgaaaatagaggaaagaaaagattagagtatctacatgataatgtagttgatattttaaaggaacatgtttcggaaggaattattgacgggactgaattatcaaaaacatggtttaaatgtataaagactgatgtatttttatcacattctcacaatgatgctaaattagcattattattggctgggtggttagaaaaaaacatgggaataaatgtttttctggatgaagtgatatggggaagtgctgataaacttttaaaagcaattgacgatgaatattgtataagtgatataaatgaagatacttatgattataaaaaaagaaacttatcaacaagtcatgttcatgcaatgctttcagttgctatgtttgatgcgattgacaaagcagaggtagttttctttattaatacagaaaactcagttcctaaaatagaagatagcataaatataagaaatcaaaccttatcaccatggatatatgaagaaatagttgcaacaaaattaattcgaaaaagagaatgggaagaacatcgaattgtttcaatcatggaagattatacagaaaaacagctaaaagtttcatataaaattccgttagaagatttaacagaaataaatatggaggatttagataaatggaatagagaatatatacaatctaaagcatcaagaaatagttatggcggtttactagaaaaaaatccagatcatccattgaattatttgtatagtacaaaatttggatttaaggaggataacaattga

SEQ ID NO: 23923 - DNA, 465 bp, Lachnospiraceae bacterium 3-1
atgagaaccaaaacttatattgcagcagattggtctggtgatattgacgctgtagagcagcttcataaatggaataaaagttattattggagtttatcttttagtgatgcccatgatataactcaagctagagatactagcttaaattgcagcattaaatcttcactgagagtcagattagaagcatcaaaaagatttattttaattgtaggaaatcaaaccaaaaccgtcaagagtggtagttgtcaatattgccccagttataatagttggacatatagctgtgcaaggggtggccatgttgattatcgtagttacatagaatttgaatgtgagaaggcaataaaagataatattgaaattattgtcctttataatgcggctactattgataaaaataaatgtcctgacattataaaaaattatggaaagcatgtggcgatgtgttatagaaaagatggatga

SEQ ID NO: 23924 - DNA, 837 bp, Escherichia sp. 3_2_53FAA; identical to SEQ ID NO: 22667

SEQ ID NO: 23925 - DNA, 924 bp, Escherichia sp. 3_2_53FAA
gtgatagcatatgaaaacatagaattttttatatgcttggtgaatgttttgggcaacaatatgtataatatccttttcttcatctttctttcaatagcaattccattccttttattcctcgcatggaaacagcacctaaaaaccaaagagattcgttcatatctattgaaagagggatataatattattttcaacggagaaggtaactcatatctcgcgtttaatattagtaatgcgacatttcgcgcaggtaatttaacttccaatgattattttcaagcatcaatttcttatatccacgattatagatgggagtggaaggaggttgaggcaaagaaaataaataatatatttattatttacattccgaatattgatttcccttcccaaaaactattttatcgcaataataaatctttagcagaaatagactgggcaaaattacaagcaatttttcatcaaccatatgaaatacagaatgacgtcatgcaagataacaataatacgcactatgattttttcatatcccatgcaaaagaggataaagatacttttgtcagaccactggtagacgagttaaatagacttggtgtaattatttggtatgatgaacagacacttgaagtcggcgatagcttaaggagaaatattgatttaggcctaagaaaagcaaattatggcatagtcatactttctcataactttctaaacaagaaatggacacaatacgaattagatagtttaattaatcgtgcagtgtatgatgataataagattatattgccaatctggcataatatcaatgctcaagaggtatctaaatacagccattatttggcggataaaatggcactgcaaacttctttatatagcgttaaggaaatagcaagagagttggctgaaatagcatacaggagaagataa

SEQ ID NO: 23926 - DNA, 510 bp, Escherichia sp. 3_2_53FAA; identical to SEQ ID NO: 23236

SEQ ID NO: 23927 - DNA, 882 bp, Prevotella stercorea CAG:629
atgctaatcgataagatatctatgtttgtaaagaatctgtggacttacaaaacgattgttttttcaaaattcttgaaaagtttgggagttttgttttcaatagaaaagctattggaactattggacactggtgactgtcttaaaactcattcttttatattaggtgttgttttgttgattgcaagtgcttttgggggaatcagttttttgttgttcaagaagaaaaaaatacaattatccattaataaacgaacgaaactctcaacctattatggtgacttatttaatgaacagggcatacgagtgatacctgtcaatgaatattttgatactcacttgggtgatggaattattgcttctaataccattcatggcaagtttctagcaagattcacggctcatattaatgagttgagacgtatgatagatgaccaattagcattgaaagacacattgccttctaatcgtgagaggactcttgttgaaggtttgccgcaaaatcgttatcctttgggtacgactattcgtgtaaccatcaataatcaaacctatctattagttgcagtgacacgattcaatgaaaatgagcatgtggaggttgatgattctgaatacatgggaatcatgcagaaaatgttttattctgtggaacaattgaatgatgcacaaacagtaaatataccattgatcggtggtggacaagcaggttttgggtataccaatatgcaattgttgaacatgatggtacaagcagcctgtttgacagacggattggctgtcgtgaatggaatcaatattatattgtatgatggcaaaagcataaaaaatagtattgatctgaatgtaataaagattttatttgaaaactggaaaatattataa

SEQ ID NO: 23928 - DNA, 801 bp, Prevotella stercorea CAG:629
atgtttgctaaatttaagattaattctggaactatagaacaattgcgattgcaagttggaaaagtttcgctgttaaggcaatctattgttaatgatgccttttataatgacattgttacaaaagtattaggaaatgatggggtcttggatggttcgcagcttcaaaatctcaattttccttcgctccgggataattatcatgtgtttatatcctattcccacaatgacgaggaattagccttgtatcttgcttcttatttacagaataattgtggtttaaattgtttccttgattctactgtatggcatagtgctgattctttattgaaaaggcttgatgatatatattgcctaaatgaagatggacaaacatataattacaattcccgtaatttttcaacatcacatgtccatgccatgttatctatggctatgcatagtattatcaacaggtctgaatgttgcatcgtattgaatagtgaacattcttttaccttacaagacggtattgataatgcaacattttctccttggttgtatgaagaagtaactttcatgaagggaatgaaaatcagtatccccccaagattacgtcttcgtcaagaaagacgtagttatagcttgggtggtcaaattgtgtgcgaaagtgcaagcccacagttacagattaagtatacggttgatttgaatatgtttcccaatctatatgtaacagatttgttaaatcttggtggacaaggtgaaacaggtttgaataatttgtaccgttcaaaaggaattttacgttatgctaatcgataa

SEQ ID NO: 23929 - DNA, 558 bp, Prevotella stercorea CAG:629
atgacaataacagatagatcatatagaacatgtacatatatagcaggagattggacaggggactcttctgctatagaagaattacataaatggaacgaaagtgaccattggggacttagttttacagatattcataacctcacccaatcaagagattcaagtcagaattgttcgattaagagtagtttgagaaccagaatgaattattgtaagacttttgtacttattgtgggtgaacaaaccaatacggttaccagcggtgcatgtttttggtgcaatagttatatagctccaacaactacaaaatgtgcttcgtgtaagaaaggatatagtatagataatcggagctatatcaaaacagaatgtgacatggcagcttcagattacgatgcaagcaagttgaaaataattgttctctataatgctgaaaaagttgatagaaatagatgtccagaggctgtacgttggaaaggaacgcatttaaatatgtattacaaaggttttgacggaagatattattggaattattcagcaataaaacaagcttttgaagaataa

SEQ ID NO: 23930 - DNA, 837 bp, Salmonella enterica
  subsp. enterica serovar Sloterdijk str. ATCC 15791
atggcaaaagttaactttttcgataagcgtatacttaaaaaattttcagactacacatcaactataagtaccatattttcactttttttgatttttgtagacattccaacagaaaacaaactaacacttggcattatatttttaattattttgttcttgttgtatttcggcatatggtttaaatcaaataatctttcggaagttaatttagatgttgagggcagtattgttactgtaaaagcaggtgatttattcagacaagatggattcaaggtcattgcttttaatgaatattttgacacgcaagttgatgatgttgtcatttctcataactcacttaatggattatatattgataactatttagcagggtccgtatctgatttgaatcatcgtatttctaattatcagtttgaagaagatgaacggcttgagatcaaccataaaagaaaagagggtaaaacacaaaaatattcgctaggaactatctttgttaataatgattatctattaactgcattttcaaaatttgacgataaaaatagagcttttcttacaatgccggattacttagcatttttaataaatttttgggacaaagttaatcgtatatatgcacaaaaaagtgtctctgttcctatctttggctctggaatcaccagaataaaggaacataaaaatattagcgatgaggatttacttaaaataatgttatggacttttagaataagtgaaatgaggtttaaatttccggcaaaacttactatcgttatccacaaagataagatagataaaataaacttattggatataaaatcagcgagaaatggtctttag

SEQ ID NO: 23931 - DNA, 912 bp, Salmonella enterica
  subsp. enterica serovar Sloterdijk str. ATCC 15791
atgaaatatgaatttttcatatgcttggtgaatgttttggacaacaatatatataatatccttttcttcatctttctttcaatagtaattccatcccttttattcctcgcatggaaacagcaccaaaaaaccaaagagattcgttcatatctattgaaagagggatataatattattttcaacggagaaggtaactcatacctcgcgtttaatattagtaatgcgacatttcgtgcaggtaatttaatttccaataattattttcaagcatcaatttcttatatccacgattatagatgggagtggaaggaggttgacgcaaagaaaataaacaatatatttattatttacatttcggatattgatttcccttctcaaaaactattttatcacaataataaatctttagctgaaatagactgggcaaaattacaagctatttttcatcaaccatatgaaataaagagtgacgtcatgctagataacaatgatacgcactatgattttttcatatctcatgcaaatgaagataaagatacttttgtcagaccattggtagacgagttaaatcgacttggtatcattatttggtatgacgaacagacacttgaagtcggcgatagcttaagaagaaatattgatttaggcctaagaaaagcaaattatggcatagtcatactttctcatgactttctaaacaagaaatggacacagtacgaattagatagtttaattaatcgtgcagtgtatgatgataataagattatattgccaatctggcataatatcaatgctcaagaggtatctaaatacagccattatttggcggataaaatggcactacaaacttctttatatagcgttaaggaaatagcaagagagttggctgagatagcatacaggagaagataa

SEQ ID NO: 23932 - DNA, 876 bp, Salmonella enterica
  subsp. enterica serovar Sloterdijk str. ATCC 15791
atgagtattagtgtttttttgagccataatcacaatgacaaaccattcgtcagaaagttagctagagacttagaaaatcatggtgttcgttattggcttgatgaagcagaaatgaaaattggcgactctctgattcaaaaaatcagggagggaattgatggtgttgattactttgctgttgttctatcacctgactctataaatgcgccttgggtagtcaatgaacttgatgtagcaatgaattatcaaataagcggtaaagaaataaaagtattacctattatgctgaaagaatgtgagcctccgggttttctcattgggaaactgtatgcagattttagaaatgaagataactatgttgaagcctttaaaagattaattcaaagcatagggatggtttttaataaaaacgtcatgagcgacgagaaagtatttgataatcttggcaccgctttagataaagcatctcatgccaatatccctataatgtgtaaaccatttcacagaccgtttcaatacatgggaatgcaagttccacaagcagaaaaaatctttgagtgtaaaggcaatgaagttggcagcatctttgtagaagatggtgattgccgaatgcatctttgtgctgaaggtaattatattagctttgtagaagttgattttaaaaaaacaattccacattacagaaatcaagaattcgattctgaaattttcctcggagcattaagtataggcttatcagaacttgagttggttggtaaaaaaacgcatagccatacatattatgatcatcgacggaaattaaaaataactgtaagttgtttatacgatgaagccccaataaccgtatcgtttagttctaaatactacgggatgtag

SEQ ID NO: 23933 - DNA, 510 bp, Salmonella enterica; identical to SEQ ID NO: 23911
  subsp. enterica serovar Sloterdijk str. ATCC 15791

SEQ ID NO: 23934 - protein, 531 aa, Clostridium sordellii
MDKAKENYKVGEVRIVSADQIKIEYARSVSYEEKKFFCSNCGEYVTYVNKDKGKTFFRHIKKTEETKECELRIDAQSQLSVYQKVGLPTYLKKDSNGNFNLFIGFYAIDKKIMELSKNEKASITILGGKSNYNLTKKYFIDNINFSSDILTLKQINFLATKYKMEYSTLNAKSLLSDKWGDEIEGINANGALFKFGENGGRKIRINEEITTNTDYFCICKDNSKFISFSGINYLEVGSISFVNGVYKVYKISFSLSGWDNERLSEFCREIFKISLVNKPYEIIPIWPPTINCDNKIELVFNKNNLLLLKSLQQNTRAFIHRMKYYSEINLNKVSDNQYLFKISPSYMERAININDEYNSKYLLVSNYKGNFKSFSNNIILTDVNENVIERGKYDKLPLQGKLKIYSNSEIDIIHYRRGIIYKLYRVKSKENLINDLKYGDKLIAKIGLKKNTIIEFEKVKEEITELFLNDVEIYKKLKKLNEPFEPVDTYTRAIFRYLKNYPKTFNLIKSYIIKNKMPIAAKKILKKIEIK

SEQ ID NO: 23935 - protein, 669 aa, Clostridium sordellii
MSYATTQELINNKLKKYNEEEFYCLINSIDNKELIKPIKKNSKKFIQDTKGWRIDKLDKNKLKEIYFKYVYKKREPNLSANLVNLINQNSVDIIDILESKLDDIENIKLEIRSNNKQYLDKIVSVLIDTYYSENIILCFKLIDIELGEESSSYIEKVIKQKKLIKEEKIKITNDITIEFNEKLKESEKNYNEIIKNKEKQIKALNSHIDKINKKFSLEIEKKEIEIFKLKDHNVSKEIKLNLKLETLNKKIVDLEQNLKKSIVKTEEAQKINYKKEEEINKLVYLLEDKYSMFDKYAKSRWEKENKELLLKNREIEKNIIDLDVYKQCIEEELVVLKKDKENIESAINSLEDNSKDFIKNINYIIDRIRKCEIIEDDRIDTKNEVSSRINHIPSRLIEENPEVKAHVYDFIDDLSDNFESIGIGNDYTYDLAKYVYSTISNKMGLFIMGYNNRLFADAISYTMSNSSADILVIPPGFTDSRLLIETVNNLTSKVVLIENTIDNVVENVYMPLLKENQEKILIFSMESNENINIIPKSVFNYLMVVDLDSIIESEQVEALYASITSDDIFKLDKNKKIKKSRLLRDLSNIVELSNISKTKIIEVINIINNFDSEKNSKNGIYSLLLFSVGMLSKSQNKYEQIENFIKKQNFEREKLDILDFIIGMGNKDE

SEQ ID NO: 23936 - protein, 345 aa, Clostridium sordellii
MNNKAQILSEISNDLNIGQYKEENFILYKSRVIYSALSKWIKISTLDKDILKDKEYDIGQSSKYLVNKAKEILENIIEVFPEINIWFHPKGMKESPEILIIDRLKNSGEIIKSGFRTQLALPTYEECIISDNTKVTRGIENNEMHVYTGLVQLKSLDNICKIDKTGLFEFYGLEDKTAQEIWYKYIKNAEWKKRKSITCNIFNKYSKFNFYRSWEENYNLKDGEISIYKENYNDYGVIKNIDGEIYTSQFTRPLVESYEIRRFMYALKCEVKNNTIANYKYIGKYDAVELNLRSALPNHENNILLALGWPKNSIQDTNNLIFNIHVWEFVKLILENLNIVTREID

SEQ ID NO: 23937 - protein, 1753 aa, Clostridium sordellii
MNKYGVSKTHSAIKDKLIDYIKAQYLAENQLLIEACEDIIDKQGILFQEPYIEANPAYEILEDGINKSDIPNDIKNILVEMSNNKLGVFKNPFKHQVNALEGFYSGKDLFIATGTGSGKTECFMWPMISSIISEAVNNSSSWEQKGVRALMLYPMNALVSDQLGRLRKMIGDTEGRFRKVFYNNVNSDNIRLPKFGMYTGRTPYPGDKNSKEDKALASTLSKDLLNKEDIIKNKLIEIGKYPAKYNLEEYISNLKESKHITHDFDAELITRQEMQQMCPDILITNYSMLEYMLIRPIEQSIWQNTKQWLDKSKENKLLLIIDEAHMYRGASGGEVSLLIRRLLHKLNIGRDKVSFILTSASVPKNKEQEIVNFACNLTAQSPKDSNFTIIHGSTQHIDTKNLIDIEVDELCSIDIDDFQSDNDKKTKAINNFISKFIKNDISANVLEEAQDKLYAFLSKVRPMVYIMKICRGNGVSFTELAQKVFPDENLEIAKRATQVLLGIAPLAKNKEGQVLFPSRLHMMFRGLQGIYACSNPNCDEKVSYDGINLGKIYLNKKYSTCKCCGSKVYELVNDRRCGALFFKAYIDEKESDPKFIWNNIGEQYDNTMKEVHLYIIPNNRDFEKNTYTKLGYLNSITGRLYDDDKYRDSDGFIYVSYENKEQKGKPGILTYYSCPKCSKSHLNVSDFVTKGNEPFYNLVSEQLRIQPQSVFDEKLIKKTPNAGRKVLLFSDSRQRAACLAKDLTRAADDDAARKIIVMACKQLHEWAKKNGKDPTMDLLYIVFLEIACNNNLQLFYGKEGEFFKEHILKIESKIEKSIKRGRDLRYDSIRKEINDTINLYNEQILKLMCSSYRSLTDIGLCFIEPCNEGLQEDIIDELEDSDIDMSWKEFCRLFSAWANIIMKDVYALGGQIDDEVRRNVNTTRFDRYGIEEKKSIPKAIGKVLEKNDLKKYSDEEIEKIYECLLKFTETPVGSDKKYLNLNLITLKYNATQKWYHCKKCSGVFFTVLWGRCAHCGDKNVEEMNQKDLDRFKFWREPVLKALDGNELIASINTEEHTAQLSHKDQRQKIWSTTENYEMRFQDVHVNDEMPIDILSCTTTMEVGIDIGSLTAVGLRNIPPMRENYQQRAGRAGRRSAAISTIVTFTDNGPHDTHYFLNPREIISGEVRVPWIDVENKKLIYRHLNMVVITEFLSTINKSIDKIGITEFIDKNYKEFADFAKAYNYTLDKVNVLIPNKNMIDLEESKNLLIQQLGKIKDKVLKMPEEYIDEKDSSKSLLDVLYDESVLPTYSFPKNIVGLFIEDKKGEKIEQKPDRALDMAISEYAPGRIIVVDKKTYKSGGIYNHHSKLRQGYYEKPARPYFENNEYFKNLYSCNNKACGWFGTELPEDNKCPFCKGGEIKSEKLLKPWGFAPLNATSIPESEAENEVSYAEQPCYSTTPAKDDMLSTGYENIRKAKRADQTLIILNKGPKEEGFNVCKDCGAAVIGSEELNKKVNAPYRHPRVFNKKCNHRDFENVVLGHSFMTDMVVFEIKLDCNKINTNIEDLWINSAAITLSEGMILAAGRLLDIEFNEIRSGYRLRSGEDCVFVDVFLFDSLSSGAGYSAELANKSKELLEYTLRLLKSCDCEDSCHKCLNHFWNQRVQNKLDRYLAIQLLEWGQFGNMARKYEVTEQEMLFKPIRELLELENEYVIENSDEFIIIKKGKSLKKVYVYPVMWNANSLGLEKDIICISDKMIIKALPKSYNYLVNLLKNK

SEQ ID NO: 23938 - protein, 411 aa, Acidibacillus ferrooxidans
MSTDRYKVTTQYMKKELFRALMLQGYVIRRDRVDLPTLDTKEDIREAHLIQRRSRLKVEQLFYKSRGTDLIDDFFANGHDVNPSSFDPEIIPVESGKWTGELFRVATLLWSIPVSRGYGRRMRFLVMDKFNGKLVGIIALGDPVFNLKVRDQHIGWNSNQRKERLFNVMDAYVLGAVPPYNELLAGKFIAGVLLTNEIRDQFRKKYQNTSTIIQGIVKPADLVLITTTSALGRSSIYNRVFYDNNSIRRFLMEKIGYTSGYGHFHIPEEIFELMRKFLEERDDNYANGHQFGNGPNWRMRVIRKTMQYLGYSKTPVLHHGIKREVFVAPLARNFREYLKGETGCPDFLPLTLEEYGTYFVERFMVPRYDRIGGISHHYVSNVKAHIEQLLTEDINRPLQSDSLNFSPSQLM

SEQ ID NO: 23939 - protein, 468 aa, Acidibacillus ferrooxidans
MDGSDAPHPWQLQVHIPEPVLPEELRSGRLLIRQALGGTRIIPLRSIQSVGIRVAVSPQLLPYKIEGIEVEESDWMNRISVVPALSSQANVFHTGLNGGRRLNDKEPITWGKSYVLLWDEANPIKTPVFLHSQELNLQDSWIGQIVYLPKTYDSVVAKWVLSVLGRPIIPQQRTLILMSPVPLNELADGTLVVPTDQEVIIGTMGGQPKSTLTLLFTGEGITRKIQLVKADDMPCVFRFGHLNDGMMHLWIENEPDCALHLLARTSELCHPSFPKVSLVTSGSENEIFLHADGSVKKLQNVRDSGGYLTQVNLPPRVSMKVVSSEFDEPLELTGGSDDEAYERTLAFINEVMHKKEIPITFDAGAFGNLTLEGSTPKSVGQVRMSAEWRRKVSWVLGLSETGWNRHYSVIHRLIRAADHTFMERLDIRLLRMLSQKSSPPELDGHVINLLAECRRLVYERVERGRTMP

SEQ ID NO: 23940 - protein, 604 aa, Acidibacillus ferrooxidans
MNLSYSDEKRLILSTIEIENIMLFIADIPLKERQGIFNHLVVKVNGFRPNTRQYLERKMQIYLQRRHHWSEREWNIFVQLWLQWTMGHPKILTNIGCSKLDEVVNIVSEMSADEDVMIKYFDGLSNAEYSVSVSRRDLRNWFDFGPFNPNDCVAALIERAPTEKFLQFVAKADTIQSTLNGLEGRLQQVIEHVSTSREELWTAVNETLTKVQKFTSAIEDVSDRQQHLQLAHEENAKAGELSLRGVQAELEERIVRLEQETSQFNVRFQDSLARTTNVIDHLSSGLGTLSVVQGRRNDKNFDVSKLQSEPGPIDIIETTDALISKIRKSVNSLGVQLSDAKLVAAIVTASVGAGQLTTFTGSYSLTIARCCALSLAGDAVYIVRVPTGLLDFNEIWSGVDELIKDASGKGAPIGVIFEGLNRAFCSASGNRLKELIEERMLGVTDGQLRSPYLFATLVDGPAGLQERAPFEMGPVLYTDILQWKKTPGFIQSPSKAAGAVWNGFTEGINSHGSMVTEHEEILPEWLSPHLSALSYRVFHSAFHYLNMIDYANADRALSFGWIAPCLINFNRSEFDRLVDDDYFDEKLSRPLEALVKLVDRNGYN

SEQ ID NO: 23941 - protein, 363 aa, Acidibacillus ferrooxidans
MDTINSASSEEFLHFKLAEIGSGVRDETAGIVVIVAEYIRDWLWHLSLHMPQSFGQYKFSPVHILRLLDNVENQLTPAWSESSENGVGNDVFNIRNIIMWTLERLQEIGDVVKVGTHHWIPAPIRFVKMPDTERIFVFGGVSNSILKRQLPKLRYVGLGRYLLDVEIPDNMRHESNFWQSYTSWLGEIPDNLESWIDELKTVVNKHGGVSSASFADYEVFVSVPEVRRTTHKSWVSANELHCTREDIFLCRTTDFTEYFIGQIKNGQLLKELPMGNIDRQWLQIGLCTRHGLSPLATLKDTKIYFSPQLPEALRRRLMTCLVPLPPIEGRQQYYVSKGSLSDAENVYSYYGYQTKHVGGRQSI

SEQ ID NO: 23942 - protein, 1851 aa, Acidibacillus ferrooxidans
MNEDKSIGVFGLTTTLHNVLRSYLESAYHIRNISLIEERRRLLDKTGTISQQAYVESTPSYALGKCYKELDLPHVSLKVLHDISNLTPSVGIYPTPYHHQSEALEAFFRGDYDLIIATGTGSGKTESFLMPILASLALEADSHPDSAKLPGCRALLLYPMNALVNDQLARIRKLFGDERVSQILKKGRNRPVRFGSYTSRTPYPGLRSANRDDKHIRPLFEKFYLKYTNDDEKVELLKDKGKWPSKDIRAFYGKELEEEDVYSSGKRKGKPRIIRHWEKRLRTQPDDRELITRDEVQRTCPDILITNYSMLEYMLMRPIERSIFKQTTEWLESNPGNRLILVLDEAHMYRGTGGAEVALLIRRLMARLQISRDRLQCILTSASLGEGAEAEAAVLDFAGKLTGLTSESNRRFKLIKGVQESVNHAQPGTFQEAEILAKFNLDDFQKGIVEHHPGRTALLPLVSDLSWGTLPSDWDDIPDFLYRKMKNWGPAELMVESLSGHAVQVDELSSTLFPRVPEMISHPATEALIALGTFAQNKHDGRVFLPTRLHLFYRGLPALYACTDVACTDRLGTEETQSILGCLHTTPRLRCTCHSKSRVYELLTHRDCGAAFIKGYTRATADSFLLHEPVGDVGIQDSSERFYDVQLLVDGEPHVDALQDCNLLWLDAKTGRLAREEPRDKRGFLRVYAPVPKTGNGEDRVFGRCPICLRTWRGRSKIMDLSTKGEAPFANLVKEQLFLQSPKITETSKYPNGGRKVLLFSDGRQKAARLARDIPREVEWDSFRQAISLAVRKYHQVTDRDPRINSSLYGALIAVASEFNTIFFDGPDRKELLKAVKEFRDELDGSLEVAIEENWDFTPPQSYYRLLLRQLCSPEFSLRAATLGYVRPASIERLIQELRRINESLSRDDVEQISVSFVQEVLSDYAFETESLISASVRRDAAGHPQNSWASDGKLPNAVRNILIQSFGLRYDDVEKIEGVLRRKLCHSLGDAYVLKGNEVSLTIRPDETWYQCNACTYLSPVHLAGHCVNCGSREVQPLIPESSEYIRARKGFLREPVMLALSGLKSPKNITAEEHTAQLSQRDTGNLFATTEKYELRFQDILIEDDEGAVDVLSSTTTMEVGIDIGSLVAVGLRNVPPQRENYQQRAGRAGRRGSSVSTVITYAQGGPHDSYYFHHPAWIVSGQPRLPMIKTDNAKIAQRHVNAYLMQTFFHHRIDEGTVEDLNYNQGILSVLGTASDFFQNTNGNLTFEEFSQWVRVLILESYSPIMENIVRWLPTDISSDMYSWVKATAKELLDQLKAVRDMVKIPLEKSSGVPLDTNDEDTVETGYDFGDSRDELLSFLFDQGLLPSYAFPIDLCSFVIEGKESRLGGFKVVVKERPQQSIDKSLSEYAPGRLIVVDKITYRSGGITANSSLPTDPDRALPLFESKRNLRPYVSCPRCTFVQDLIADPQNLENCPVCQGPLEKGEMLIPEVFHPERGESLNLNDTEQEYTYATSAQFPVPVSVDDLQEWTNVGENIRVTYARNKRLVMVNKGDSETNEGFSICEKCGAASVFDSHKFQQREHVRPYKVEPKSGVYARERCDGLFRQVFLGHQFQTDLLVLRINLQSPLVRRLDANVSANVLHDALRTISEVLILATSECLDLDPSEFHAGYRLVRPQSGDAIRGDIYLFDTLSGGAGYGEQAGKVVDVILSKSLERLENCPAHCDTSCTECLRHYQNQYWHSNLDRRLGAALLRYCLFGTVPEFSPTEEQSDMLIALARLLQLDGMKCTMKFDVNGVFSPLVVSDGTTRLAVGVVPSLLEENEGVVTHPMMNVEAGNLKRVVFSQYLLVRNLPLVYHRVKLMFEEWR

SEQ ID NO: 23943 - protein, 504 aa, Anoxybacillus flavithermus NBRC 109594
MERAFDQLGKLVHAKNAHKYGIVYTCPCCGARVFKAEGRIQSAHFRHERGQGSERCELYVQRLTGSSHFNDYSAIVNRPFITFEPFEDDWELFITFPYLTPSQARQCDLQHLHFKIKCNEMNSFISSAQLWPSSNENKLRIVPKESYSFSFARKEDERCYEKLGLFWPEYMKGFRSNIYLFQLINKNFCMIEPREVSLNDTFYMMSRKKIEFPEEIYAKALNKKYGWFAYKIQIPCVLTDSLIKWFQRFGYFLKSPYYYLDIVTPSVFGRKNDALLIEEKECVIQITFRDFKPQIIHLVHIQPDYVSKEYRLSGTYFKVTLNKEGFHTFYIKNQEGKMLHLYYGEKINTCFLERFDSSIIADQQKLTLFEEKSISKYKSISVMESPFFSYWIKEKNKFARKLDHGGDFSYPSVEKIFIPGIWTFSFSLEEDQRHNEFDWHKILLAYIRMEQGATTWISNEQYIFLQKCLGSIYDKNLQSKLTYYLKLYRNQVPKLVKESIQRMK

SEQ ID NO: 23944 - protein, 659 aa, Anoxybacillus flavithermus NBRC 109594
MKTIFGIIERERRQNKKYMFVKVLAEYKDHQLIEVKDPCLDYPSEGEVIWSPVPEEINVGKLGFYTIEERKEEDYIGKSVYSKYMVYKELEDLKYYEVVKIPLSLAKNTEIIYLIQNGIDAPQKFSSDILLLTNDNYLIGPYRTKQTKDGKWTIDSFDDKWLEIRKKSINLVEYYDKNIGGMRYFTSTMLMDRVEDYLDCATNERIMRYALKVLKEYQQVQEISRKVISQLSDLVSELPSQVHYERIMTAIELLTEYEVTEEDVSRFEGELLQYPAIQKKMQALLEEKFNAEKKRIEEEHRKTLNETAHLRKEKEHLLLEMEKLSQQIKLSEEKLKKADKALNDKIKEMKENIFHTLTDLVPLASLGINVSQHQVTNYRNESPWKVKDNEETVVYDSIHDLVDHAVKNLSMLGIEDNKALLVAKTVIGAMLFRTPIVVKGGSSFELAQVIGWTIAGNEHLTIFPDMKNFSNQTLVESFSNYVRFDCVKSVHLCQIENSPAELYLPSFLDYWRVSIEESLPELILISIKEDSDLTDSFIQKLPFVPIINADEIVTNANIRSLRKARSLVFGSISSNLLIEDDILRRKSSEFSSFLEIVKEVIPFTKQKESFKKWFRLLEDELLEEEEVSVWITKVLLQPYIDNEKAMKILEEFDYESMMV

SEQ ID NO: 23945 - protein, 312 aa, Anoxybacillus flavithermus NBRC 109594
MLGKRWEPKIQQFRQIKSHALSLLHFYAFEDQKMQPVHFQQLIPSLQRLIKSDFFEDFRNLMKDEDSRTEAQVLLEWLSSLGEVLKLSHGYYLPLPSRSVELPASKNLILLSSMKGTSDKYYGCGSGYIEDSNVFPTLTLDEWMPSLSVNEFIKTIKSEKPTQLTDEPTEVFLAKTKRKWRPFQTNLISQFDCYIARYNLKNSQPFYFWVEKGSYYKIPADYLDIAKYALEYRAGIKITVKCTKIHGELIHIRFSKRLPISEERMLMLFAFPFSFIKPIEWIMSLQHYSDFIWVLQRLGIDHTSILWEGAEV

SEQ ID NO: 23946 - protein, 1784 aa, Anoxybacillus flavithermus NBRC 109594
MMEFTINSVSARLHQKLREYIEAQYPISHHSLLLERRELLDSQGIISKEPYIEATPVYEPGSTYEQINLPSHCKEAMMCFSDLSPSVGIYKRPYVHQQEALESFLKDGNDLVVATGTGSGKTESFLHPILNALIDEGTSRREQFQTHAVRALILYPMNALVSDQIARLRKLFGDERVAKYFRERFGRHPLFGMYTSRTPYPGERTEEKDKYQLKEILQYYLDIETNQPQLAIEMKKRGKWLAKNLEAFCSGKRGDWKSRYLTSPDDRELFTRHEMQTTPPDILVTNYSMLEYMLMRPIERPIWEKTRQWLAENEENKFILVLDEAHMYRGTSGAEVALLMRRLQARLGITRDRLRCILTSASLGAENDDSVAIEFAEQLTGKPKSRSFKLIKGTREKRAPGRIGTANEAYSLALLDSEQFTNRIHQYDMLKNNLQVIADRLGWQNVPNDLEELPAYLYKSLDGFGPLELIIEQISGNAQKFSDIAKMVFPNVEEEIAQKATSHLLMLANAAKNNERVLLPVRIHLFFKGVSGIYVCTNPKCDARRVKEDDSILGKMYDSPKLKCTCREEARIYELLTHRKCGTAFIRGYISKRNDNYLWAEKGKGIVDEELTEVHLLVEPPHEKIQKGNRAARPVWLDIRTGYLMKSPPDDPEGYLKLYWPNNEVNKNKKKNQTVTFQQCPCCMRKVQGTITDLKTKGEQPFANIVREQFLLQPPVKLDKKLPNEGRKVLLFSDGRQKAARLARDIPYEVELDSFRQAILLAAQKLIDQEVEPKLGNSLYCSFLQVVDEHKLYFFDDQDRKSLASHVQTLKDNFDDDYEELVEDGDIEPLTRFKTELLRQLCHPLYSIYTTATGYLEPVEKEVARIDKKLKGILSKEDIYVLIAIFIQEMLDKIAIDSTVQFYERLKIRGFGEDEWGVNKGYISKNLENIINLYVQNQEHKQLIVDALFKLCTESEGRYYLSPRKLKLMPGIYTTWYKCNDCKEINMVIAKNKCVNCLSENIEILDVNSKSLDSEKGFWRSPIQKIMTNNEKISNITVEEHTAQLSQKDAKIAIATTEEYELRFQDIILNESEGPVDILSCTTTMEVGVDIGSLTAVGLRNVPPQRENYQQRAGRAGRRGTALSTVVTYAQGGPHDYYYFRHPEKMISGSTRKPIVYTDNKKIAKRHLNAFLIQTYFHEKVSTVTTASSILSSSLGDTKSFFEGEPPFNYVQFKKWLNDNVECRFRDCPVIFDLIPDEVVSAKEALGENILQLKWGVVKEACNELVNELEKNYEKVKHTLKALVDDTVEVNPNDKFLDFLFNHGLLPTYAFPQDLCSFYIEGKDRRTGKIIVKQRPQLEINRALSEYAPGRQIVVDKKTYRIGGVYVPNPQDPLKPARDLSIDSLPTVTYCEKCSFVSLDMIKDTNCTVCGNELRRSPLLRPTGFSPEKGKEVKEGDRDQEFTYAMPPQLPIPISGEKLELKPYLNSKRLQYANEMNKQLIVMNKGTENQEGFEICTDCGAIWLAGEKENKSVHEVPYRLKTHLGQKESLCRGNIKKVFIGNIFNSDLLLLRMSFDEQIDFHPGNQWVHDGLKTIGEAMVLAASRVLDIDYNELLSGYRILPLESKDSKHMYQADVYLFDTLSGGAGYSHVAGEVLPDIIETAREILMNCENNCETSCYKCLRHYSNQFYHSQLNRFVALELLDYVAKGELKKLTLQEQKKVLSPIKRMMEIHNEKFEEIQVGNQYFIRMGSKGRYLIGAKNNIEKIVTKTSDDSTVVYVSAYEVLHDLPNVYLNYERKQQLLV

SEQ ID NO: 23947 - protein, 678 aa, Aureimonas sp. Leaf427
MKGGMMAKNDSDPSDLRKFAPFLAPKERDQLHGLLNFAGPTPAGFAESLRQLARSYIDDGDSAKLRAICLLVADLLEQGWRVSFESEGLHFKPPGIATGSGQSVEDVKGRIRAALQAARRRQLAEPSVRAFIARMERRTLRAPGVRSSIFDLIDDGAALADDLAAIAALPEADRDMALARLVDPVVEICQAGTRCPDTGLPLNDIWRYFRHTWAHEYRPIPGRQLLVLVRNAARPNRPVMGIAMLASPVMRVSVRDNWIGWLREAAEANLREGRWRPDRLARAMTDRIEISIGAVRWDDLARPDEIEAPVDNTVLRLEQKAAGAAFARDLELRAHYQANVEAGGRVKPMRGAVKVAGAGTDWRTASEDVLFVRKRAELLAQLLFAKQVFRAADLEGDPAAALDQLLSAKTGQRAIDIVLTEFRKAGLSSRVADVSICGAVAPYNELLGGKLVALLLASSEVHDHYARRYGGQVSVIASQMAGRAISKPADLRVLTTTSLYGVGSSQYNRLTLRASEHEGLELDIRWDSIGRSKTGGFGTLHLGADTAHALRQMAQDLHTSRRVNNRFGEGTSPRLRQIREGLDALGIASDSVLHHATPRLFYACKLGGDARASLLGMAGEEAQPSPAAAIAQAWRRRWLDGRSRRPETLDAMRAQGPESVSRSLLDQPRGDLLADLEG

SEQ ID NO: 23948 - protein, 358 aa, Aureimonas sp. Leaf427
MIEVVDQGSVIGAACASLGVELDAEGVLGTTYLSAAVRRLAGFLCPCSPRTLVRRMVESHVGLVDDVPMLEERVESSIEGLIAIGDLLELSDVALEGEHVRGTWLVAAPPAFVVRPSGSAFILGLSADEQTPLPTEMRSRIVSRQGVRSIDPVPPEDLSTMLGDLGLRELSAAGWLRSPKATRPADLAASYDAKLAAQQHSGEVAELLVLDGTRRTRSYRARWTKPGTLSGNYVVRRPQAFGSDLWGYAQISNGVPVKLLDLPLHGDRWRGCDAAWRVQMAIDAIACRPQEYRLRAVEGGAILDLFSPIPKWARRRLAIIGSEVQPAGCLMSFLVPEAEIATEEEFLRDLLFLSRVAG

SEQ ID NO: 23949 - protein, 1847 aa, Aureimonas sp. Leaf427
MSTTIQETIDRLHSSLKEYIEATYHIGAPSLIDQRRILLDRTGVTHQEPFLETTPRYQVGARFGDVDGLPPAARTIFEKLSSVRADRPRLLFDPPYRHQGDAVRHALIDGRNLVIMTGTGSGKTESFLLPILGKFAREASESPWSFAQPAMRALLLYPMNALVNDQLGRLRAIFGDPDLVERFTAWAGRPPRFARYTSRTPYAGVRSGKKDGRKLASFEEFYVDIERQAAGPESDEQRRASRLRSQLQERGKWPAKPDLDRWFGSKGSRWYDPKTAEFLRATTLPEDSELITRHEVQASCPDLMVTNYSMLEYMMMRPIERPIFDSTRAWLAANPAEKFTVVLDEAHLYRGAAGAEVGLLLRRLRDRLDIPVERFQVICATASFDSKVYAAEFGAQLSGVPAETFVAVTGDLDHRAHAAVGSKADAQVLAALDLGQFYSPDEADRAGAVAPFLAHRGVAPTHGVERDLFEALKDFSPLGRLVNTTMGSAQPVAELGAELFPDTPDLADAAVTALLAIGSVAREQPDASGPLPCRVHNFYRGLPGLWVCMDPECAEIVEEERTGICGRMYSQPREVCGCGSRVLEFFTCRSCGSGYARAYSDDLDAPDALWSEPGRRLRMSGGETLPLLDLDLLLEKPKRPDAGELAEYDLDTGRLSAGQRTRTVYIRKDRITPPVGDDGEVDTNSERRGQFVPCGVCGQTARGRTTVQDHQTKGDQPFQALVSRQLAVQPPGKQAATRFAPLRGRKVLVFSDSRQVAARLAPNLQMYSVRDALRSLIIWGHGVLSKPQMVQQMLSLEELYLAVLLASQGLGVRLRPERKSGENFSAAEEMVAKGLAENALSDEARLTMLWMEVRGETPPAALLDDIVKTVQDKYLGLEALALASLRERANKTKELHALPSIPGIAENDEDKVALARAWLRCWRSVGFWLNTMPTTWYKRPAGKGTTVNSRKGMFKAMDVVLKDAAARKAFKAWTPLLLNIFTTDMDGGFRRLAGQNLSLELEGDWRRCADCKSVHRPVRTIAHCLDCGSDQVVALHPEEDTVFTARKGYYRSPVLGALSDPPEVPMALIAAEHTAQLNAPQSDDVFSMAEVNELLFQDVDLDWGATAGNSTAIDVLSSTTTMEVGIDIGALSGVALRNMPPGRANYQQRAGRAGRRGNAVATVVAFGSADSHDEHYFSEPREMISGKVIDPKLTLDNPDIVKRHIRAYLLQSYHQVRLPTFDPMANPDLFSVLGSVQDFKTAGAQLNAADFRQWLIDNEAALKARVSGWIPHEVAGEVRQALLDGMVVDCVTAVETAIANDSVAGAKVEKDDESDGADAGAEVQEEVGEEAPPQKAVTGTLLDRLLYKGVLPRYAFPTDVATFSVFDLERSTQYKPVMRFAPSQGLPVALSQYAPGKQVWISGKCYTSGAIYSPMSEDRYDAWRNRRLYRECSECGFAETVKIDEGLERDAVTDCHACGSEETFGPTRYWLRPPGFAHRVDQEEVTSPDDMPETSYATRAKLVMPTPADDEKWTLVNDRIRVMPNREHLLVSNTGPKHEGYNYCTLCGRIESSAEGTASMFSPHPKPFPDKEPTCPGTGTTRHLVLGTDFITDIALFSLRVEAPLKLKPGRYPTDVALRTVSEAMAKAACSLLEVEPGEMMAEYRPALTPAGMAGLEAEIFLYDTLPGGAGFARQLADRSLELFQRALKVMKTCEEDCDSSCYRCLRSFKNKFEHGQLDRHVGAELVEFLLTDQMQPFSPQRVAASTKVLLLDLQRNTGNGMTYSGEASVMVSGMGDVPVPILATRSDGAVSVIAIAGPLTADHPADPLIAELRERWDGGAVIPVNELLVRGNLPAATRAVEEEVLR

SEQ ID NO: 23950 - protein, 678 aa, Aureimonas sp. Leaf460; identical to SEQ ID NO: 23947

SEQ ID NO: 23951 - protein, 358 aa, Aureimonas sp. Leaf460; identical to SEQ ID NO: 23948

SEQ ID NO: 23952 - protein, 1847 aa, Aureimonas sp. Leaf460; identical to SEQ ID NO: 23949

SEQ ID NO: 23953 - protein, 502 aa, Bacillus cereus
MKKAFDRVGNLVHAKDAHKGINGYTCPCCREEVTKAEGVRQSAHFRHRGRQKREYCDLYVQGLGNFDSFNDYATKMRIPYITFEENEGDWDFYARFPKIRRGLTSMFEDFQLYFNVTCLEMGSRISAIKLRHDSEDNKMKISPRDSYHFNIDDKEAAKKLELHWPIKIIGFTRGIYIFRFIHGEFIRVEQEFLTLSDVFYVVAKRKIIFPEKIMVQKLKPKNGWFAYRIQLPKVMDDKLIGSFYRETGHRLQNPFYYLDLLTPSTYGRKDYAYMIYSSMCSMAITFQTFRKNEFTVVHISPDMTSKQYEKCKEMVDISNLEQGFHTFYIKNHEGKILNLYVDRKANQHSVIEYEAPFIINGENITVFKDKKMNIQGRLNIPADYPLPLLKKEIDKFPYVLSRSVSEHNVSEGERLYTPGVWSVEFVGNGIDDNLEINWSDLILAYLKIESRRTFIITNKKYQGLLNLVDTIVDESKKKKLKFFLNMYRNRVPKDVKDLLDHI

SEQ ID NO: 23954 - protein, 662 aa, Bacillus cereus
MKVIFGAIDWINERKQTFIKVLAKVQNNHLCRLEDSIEEFPNTGKVFYYKVPSDAYKGKLGFYTVVESNTYDINIPVSSKYVVSQEASNIGYVEIVKVDYSVERHELELVSLIKNGIVKTHEFTSKIVLLTADGYLIGPYSPKLNKENQWIAELNDNGLLDVRKNNVDIIEYYDVNFGVERYFISTAFINTKVDHYLDCSNNDRIVRDALKILKDEKETHEITRKITKMLVDLVSEIPEEVRKGRISRAVNLLQNHLISPEEMELFEKELLQYGPVIKKINEEVDKDLVVARKKIESDYKKVINETKKLKLENENLKVELKNMTDKKNRIDDHIKKAEEALQLKLREMQQNVYQTMLNLLPLPMTLSTGNEAESSVTNVRSSQWFVREQEKEIMIGGIEILIRNIITNLERIHVEKERAELIALTTIGAILFRNPIIIEGANSFDIAQILGWTIAGNDHITIFPDIKEYSNEVLTSYFTQYNRIDKIKSLHLSNIESSSAELYIPSFIDYWSVSTNGRYPELLIVSMKDITEVSNDFIGKLNYAPVINTDSIGIKGELRKARLLGEIKFGFISIEDFVENELLVGKSKAFREFKDVVEEIGMQPKMIVHTFKQWFCLFEKVEYDEEMIINWVLQVFLQKYIDIEQFNFIAEELDVEVSVSLP

SEQ ID NO: 23955 - protein, 316 aa, Bacillus cereus
MELLELKQKVDILNTLNNHVKSQIIFYALENGAIQKVHFSKLYPLVQRMLGMAMFQEIIYLFDKEENMTIAKQVLNMLSSLGEIAKLPNGYYLPLPERVVELPVSKSRILLSSTQGQEKRTNYIGFGSGYSSDAVDLPKLMLEEWMPSVGIKEFFRILNQSQMCNLYDKPDQIFIGRKKREWMSYEKGINHCNSAAIVKYYIAQGPASYYWLKKIRNRMSYYKIPNEYVNVAKFALEKQAGISRKVECFEINDTFFKAKFFHRLPEDERNMLMLFGFPENVYDPFCWIIPTVHYDDFVYVINRLGMKVDSLSITSR

SEQ ID NO: 23956 - protein, 1775 aa, Bacillus cereus
MTDYTIKSISKRLHQKLQEYIEAQYPISETSLLLERRRLLESQGVISKEPYIEATPVYEPGEIYTDIKMPKHCQEMMMSLSKMIPDVGVFPRPYVHQKEALESFLEEQKDLVIATGTGSGKTESFLHPILNSLLDEGYKRPEQYKRNAVRALILYPMNALVSDQITRLRKLFGDKRVSNYFEEKCGRHPLFGMYTSRTPYPGERTEKKDKYQLAEIIKYYNEIEENDPNLGEEMKKRGKWIAKDLKKFSRGKRGEWESKYVTVSGDRELFTRHEMQQTPPDILVTNYSMLEYMLMRPIERSIWEETKEWLAQDKENKFILVLDEAHMYRGTSGAEVALLIRRLQARLGIDRDRLQCILTSASLGSDKDDNAATEFAKQLTGKAETREFKLIKGTREKRKAGRIGTTEEANIFANINSDLFTKRIYQYRGLKKHLDELLMQLDWKETPYDIEDLSSYLYKQLDGFGPLETVIASISGNAKKFTEIAESIFPKVEREVAEKATSNLLMLANAAKEKGRVLLPVRIHLFFKGVSGIYVCTNASCNVKRKNNEQSLLGKMYDSSKLKCSCDEGARVYELLTHRKCGSSFIRGYVAKNNQNYLWAEKGFGIVGDELTEIHLLVEKPHSKVWDSSNPPNRVWLDIKTGFLAYNQPSEEEEYLQLYIPNQKSQGKKKNKKQSVITFDQCPCCMRKINGTLQDLKTKGEQPFANIVREQFMLQQPIKKDSSLPNEGRKVLLFSDGRQKAARLARDIPYEVELDSFRQVILLAAQKLINEGEEAKLSGSLYTAVLDVIDKHKVHFFEDEDRKSIMKNVQVFKENFDDDYDELIDDGDVEVLKRFKTELLRQICHPLYSIYATATGFIEPMDKEKKKMKKALKGILSEDDIYTIVAVFIQELLDSVAIDTTIESHERIKVKGFNQGTWGVDRGYRSRKLNKVIDMYIEKEEEKEQVVETLYKLCVEHEAKCYLTPKKLKLVPGIEVDWYKCNRCKELNMVVAKGKCINCLSDEIEILSPESTILDSEKGFWRSPINGVINKNEKISNLTVEEHTAQLSQKDPKVALATTEEYELRFQDIILDDLDGAVDVLSCTTTMEVGVDIGSLTAVGLRNVPPQRENYQQRAGRAGRRGSALSTVLTYSQGGPHDHYYFKQPDMIISGASRKPIIYIDNEKIAKRHLNAFFIQTYFHEYVLKDGRTDGVLNSSLGDTKAFFESSSVPSMDGFDEWLKFVTSDLPIYSPVIFNIIPDEVISKMEGSETAAITLKIKIIKEAASQLINDLRENYEGIKHTLIDIEDEDTEHNSNNKFLDFLFNHGMLPTYAFPKDLSSLYIEEWDHISKKVITKQRPQLEINRALSEYAPGKQVVVDKKTYRIGGIFVPTPRNRLKPARDLKIEGLKKVTYCDSCLFVSLDEFDNNQCPVCCSKLKKDSFLRPTGFSPEKGREVREGDREQEFTYAMPPQLPIPVSEESLNLHTFEDSSLLKYTNALDKKLIVMNKGIDGKSGFEICVDCGAIWVAGEKERKSFHDVPYRLKKEFGQKDSQCSGETRKVFLGNVFHSDLLLLRLQFGSEIDFNSEKQWVHDGLKTIGEALVLAASRVLDIDYNELSAGYRLLPLSIGGADIYLFDTLSGGAGYAHIAGTVLKEIIKEARYILADCENNCEKSCYKCLRHYANQFYHNQLNRFVALELLDYVVSGTLKQLSLEEQKEILAPVKRMMEIHNEVYEEIEQDGKYFIKKVDGNLIGAKNNIECRIENQIPTRYVSAYEVLYDLPNVYLGSEDGSKVTS

SEQ ID NO: 23957 - protein, 502 aa, Bacillus cereus HuB5-5
MKKAFDRVGNLVHAKDAHKGINGYTCPCCREEVTKAEGVRQSAHFRHRGRQKREYCDLYVQGLGNFDSFNDYATKMRIPYITFEENENDWDFYVRFPKIRRGLTSMFEDFQLYFNVSCLEMGSQISAIKLRHDSDNNKMKISPKDSYHFDIDDKEAAKKLELHWPIKIIGFTKGIYIFRFIHGEFVRVEQESVTISDVFYVVAKRTIIFPEKIMVQELKSKNGWLAYRIQLPEVMDDRLISSFYRETGYRLQNPFYYLDLLTPSTYGRKDYAYMIYSSMCSMAITFQTFRKNDFTVVHISPDMTSKQYGKCKEIVDVPNLEQGFHTFYIKNHEGKMLDLYVDRKAKQHEVIEYEAPFIINSGKVSIFEDKKMNIQGRVNIQSDYPLPFYKKEIDKFPYILSQSISDHNVSEGDRLYTPGVWSVEFVGNEINDNLEINWSDLILAYLKIESTKTFIITNKKYQGFLKLVETIVDESKKKKLKFFLTMYRNRVPKVVKDLLDHI

SEQ ID NO: 23958 - protein, 662 aa, Bacillus cereus HuB5-5
MKIIFGAIDWINERNQTFIKVLAKVQNNHLCRLEDSIEEFPNTGKVFYYKVPSDAYKGKLGFYTVVESNSYDINIPISSKYVVSQEASNIGYVEIVKVDYSVEMHELELVSLIKNGIVKTHEFTSKIVLLTADGYLIGPYSPKLNKENQWIAELNDNGLLDVRKNNVDIIEYYDVNFGVERYFISTAFINTKVDRYLDCSNNDRIVRDALKILKDEKETHEITRKITKMLVDLVSEIPEEVRKGRISRSVNLLQNHLISQEEMELFEKELLQYGPVIKKINEEIDKDLLVARKKLESDHKKVINETKKLKLEKENLKVELKNMTDKKNRIDDDIKKAGEALQLKLREMQQNVYQTMLNLLPLPVALSTGNKAESGVTNVRSSQWLVREQEKEIMIDRIEILIRNIITNLERIHVEKERAELIALTTIGAILFRNPIIIEGENSFDIAQILGWTIAGNDHITVFPDIKEYSNEVLTSYFTQYNRIDKIKSLHLSNIESSSAELYIPSFIDYWSVSTNCRYPELLIVSMKDITEVSNDFIGKLKYAPVINTDSIGIKGELRKARLLGEIKFGFISIEDFVENELLVGKSKAFREFKDVVEEIGMQPKMIVHTFKQWFCLFEKVDCDEEMIINWVLQVFLQKYIDIEQFNFIAEELDVEVSVSLQ

SEQ ID NO: 23959 - protein, 316 aa, Bacillus cereus HuB5-5
MELLESKQKFDILNTLNNHVKSQIIFYALENGAIQKVHFSRLYPFVQRMLGMAMFQEIIYLFDKEKNMTIAKQVLNMLSSLGEVAKLPNGYYLPLPERVVELPVSKRQVLLSSTQGREKNTNYIGVGSGYGSDEVDLPKLMLEEWMPSVGIKEFCQILNQSQVCNLYDKPDQIFIGRKKREWMSYENGITQCNGAAIVKCHIAQGPASYYWLKKIRNRISYYKIPNEYVGIAKFALEKQAGISRTAECFEIDATFFKVKFFQRIPENERNMLMLFGFPENVYDPFSWIIPTVHYGDFVYVINRLGMKVDSLSITSR

SEQ ID NO: 23960 - protein, 1777 aa, Bacillus cereus HuB5-5
MTDYTIKSISKRLHQKLQEYIEAQYPISETSLLLERRRLLESQGVISKEPYIEATPVYEPGEIYTDIKMPKHCQEMMMSLSKMIPDVGVFPRPYVHQKEALEGFLEEKKDLVIATGTGSGKTESFLHPILNSLLDEGYKRPEQYKRNAVRALILYPMNALVSDQITRLRKLFGDKRVSNYFEEKCGRHPLFGMYTSRTPYPGERTEKKDKYQLAEIIKYYNEIEENDPNLGEEMKKRGKWIAKDLKKFSRGKRGEWESKYVTVPGDRELFTRHEMQQTPPDILVTNYSMLEYMLMRPIERSIWEETKEWLAQDKENKFILVLDEAHMYRGTSGAEVALLIRRLQARLGIDRDRLHCILTSASLGSDKDDNAATEFAKQLTGKAETREFKLIKGTREKRKAGCIGTTEEANIFANINSDLFTKRIYQYRELKKHLDELLMQLDWEETPYDIEDLSSYLYKQLDGFGPLETVIASISGNAKKFTEIAESIFPKVEREVAEKATSNLLMLANAAKKKGRVLLPVRIHLFFKGVSGIYVCTNASCNVKRKNDEQSLLGKMYDSSKLKCSCDEGARVYELLTHRKCGSSFIRGYVAKNNQNYLWAEKGFGIVGDELTEIHLLVEKPHSKVWDSSNPPNRVWLDIKTGFLAYNQPSEEEEYLQLYIPNKKSQGKKKNKKQAVITFDQCPCCMRKINGTLQDLKTKGEQPFANIVREQFMLQQPIKKDSRLPNEGRKVLLFSDGRQKAARLARDIPYEVELDSFRQVILLAAQKLISGDEEAKLSGSLYTAVLDVIDKHKVHFFEDEDRKSIMKNVQVFKENFDDDYDELIDDGDVEVLNRFKTELLRQICHPLYSIYATATGFIEPMEKEKRKMKKALKEILSESNIYTITAVFIQELLDSVAIDTTIESHERIKVKGFNQGTWGVDRGYRSRKLNKVIDMYIEKEEEKEQVVETLYKLCVEHEAKCYLTPKKLKIVPGIEVDWYKCNRCKELNMVVAKGKCINCLSDEIEILSPESTILDSEKGFWRSPINGVINKNEKISNLTVEEHTAQLSQKDPKVALATTEEYELRFQDIILNDLDGAVDVLSCTTTMEVGVDIGSLTAVGLRNVPPQRENYQQRAGRAGRRGSALSTVLTYSQGGPHDHYYFKQPDMIISGASRKPIIYIDNEKIAKRHLNAFFIQTYFHEHVLKDGRTDGVLNSSLGDTKAFFESSSVPSMDGFDEWLKFVTSDLPIYSPVIFNIIPDEVISKMEGSETAAITLKIKIIKEAASQLINDLRENYEGIKHTLIDIEDEDTEHNSNNKFLDFLFNHGMLPTYAFPKDLSSLYIEEWDHISKKIITKQRPQLEINRALSEYAPGKQVVVDKKTYRIGGVFVPTPRNRLKPARDLKIEGLKKVTYCDSCLFVSLDEFDNNQCPVCCSKLKKDSFLRPTGFSPEKGREVREGDREQEFTYAMPPQLPIPVSEEGLNLNTFEDSSLLKYTNALDKKLIVMNKGIDGKSGFEICVDCGAIWVAGEKERKPFHDVPYRLKKEFGQKESQCRGETRKVFLGNVFHSDLLLLRLQFGSDIDFNSEKQWVHDGLKTIGEALVLAASRVLDIDYNELSAGYRLLPLSIGGADIYLFDTLSGGAGYAHIAGTVLKEIIKEARYILADCENNCEKSCYKCLRHYANQFYHNQLNRFVALELLDYVVSGTLKQLSLEEQKEILAPVKRMMEIHNEVYEEIEQDGKYFIKKANGHLIGAKNNIECKIEKQNKIPTRYVSAYEVLYDLPNVYLGSEDGSKVTS

SEQ ID NO: 23961 - protein, 481 aa, Bacillus sp. LF1
MFVALDKDYHLVDVKQGIEKSIFYCPCCLEPVHFVRSQKKVWYFRHNKLIGEKKRQECELFSSNLSFSYEIDLEEECNRKIRLQLHRGDKTHFSLLFPKLTKGQTLRQEDNKSYFHVTIEETKQQISSVNLMHNCETNFLPVSLCDSYTISISEEVIDNAITEIYQGGYYPLQKPALFKPIAGRIIHIPYVDITIQDEFYILSRQMLFFAQDIHVLETEKLNTFTLYKCVMNDAFSTDCISWFKRVLSKNLLPSSYHLDVIKPVKFIRGDGLFQIQQANLELNLAFTGKQNEQQLLKIKHPNEQITYQKVTPGIVKLQLPQYGIYQISVALQRGPWLTINQVKKLTTFDVVSPSWLINNEEVIFRQNIIKGEQFVTKSVFPICYYSGSTKSHGKKTVFDFKEEMVASIPYLWSVKLRKPKLDIKLDFQELLFFYKTQAELVKVDSVTYQSILARIEASKHRQLLTFVRSYPNMIPKRFIDR

SEQ ID NO: 23962 - protein, 640 aa, Bacillus sp. LF1
MIVLGRTKSLSFANTDIPERLVIDVVGTLSDNSLIPLHADVRQQALPNNGRVFIPNYFSVPEEHQYKLWELNESLTYEPSLANSSKYVLGKEVHNVPLYEVITLQGNFETQKNLIETKLRNSINSKETPLPNVLFTTEDGYVIGPVKIKHLVDEAYTLVEDNFVAVYKIDISLTMIHNRLFTIAKLLEDDFVGFIDVANDERAVRAALKILKEQYEYGDLSRKVIARLSQIYTSTSGEMNQRLTRVQQIIQSKTFNEETELFFRNQFLDLPYVQQMIEANKNDAFEKLLVDFKVKHRDLIKEVEITEHALENKNLELTHTEEVIQQKIALLQNIEESFSVKLTQLEKQFADVYVEHFLRQGINVQQQIPQTNHSQKVTEIPQACVKVITNNEPFASIDKTLEIFHTSRKRLHIRDRYETLHKTVLGAILFRDPVIIAGTHSFELAQFIGRTYSANQFYSIVPEVNLFSFAALENLTPHAEDILSAVHIHNLHFTQGEFALKSYVELMKWNDKATQLLILTFDDVQQAKTCITSLSCTPLLYAEDFLNFAVLPRKFITVNFAQIDLSEVEDLELEDCSTFNREFEAWFEEKFGYKFEQSFVLDNWLSILTSDLDGSNESELEHIYKLFEHYITSLKRDGKS

SEQ ID NO: 23963 - protein, 292 aa, Bacillus sp. LF1
MNWIQYLTEKSLYVKSILSSQKQMGIDKVHFRQLTPVLNRLLEYAPQEAQEFLKHKTDTSAQCLLTWLATIGEIIKLDNGYYAIWPACNLVLPRTKQQIGVRYVLDHEIQPITITSKPNKTKPILAMTDYLYTSSLQETLNDYKSFTKSNDIDTIYRFTKHGKQQVTKNFTPNELYFAEKKQVFVHGGHKTDRFLAKFQNGWHIQQVAERNVRRVYYALNARAGRYYTYSLKKHTVYTELELQFCLPHEEFAMISLIGMPKIFKNAKTFYIPNMYVEDMIAILQRLEMKERC

SEQ ID NO: 23964 - protein, 1752 aa, Bacillus sp. LF1
MDYTLNKVADRLQKRLVEYIETRYVISNDILQKKRHSLLETPGTLRTAPYIEATPVYELGSTYQEMNILASTKSLMNELAEYGIGVFPRPYVHQQTAMEAFLTDNKDLIVSTGTGSGKTESFLHPMLATLYEEAVTRPASFARRGVRALILYPMNALVSDQMTRLRKLMGDERVKSRFHVHGRNPQFGMYTSRTPYAGAPNKFKDKLQLQPILMHYLEVEKNNPDIAKQLKERGKWYAKDLQAFKDSKMPKTFRYTTSPNDAELLTRHEMHETPPDILVTNYSMLEYMLMRPIEHTIWQDTKDWLASDSANQFVLVLDEAHMYRGTSGAEVALLIRRLQARLGISRDRMKVILTSASLGKEGDTETPIRFAQQLTGAAESRKFKLITGKKETRPQGKTMTPDEASHWANIDYPLVAEWNKKYKDIVEHLQPIFEALKFDTLPADKNEFQEFVFKQLNGYGPVEQVIKKISGNATSVEELVETVCPKVYFPTAEKAISNLLLLANMAVKNGRVLLPARLHLFFRGLSGVFICMNPNCDNSGFLGKIYDAYREQCTCGSRVFELYTHMLCGAAFIKAFCEKDTNFPTYLWSEPGSDIVGEPLEEIHLLIEKPNDRALEGKTLKPLWINVKTGYIVDSPQQDTNFIRVYMSLERPKKNRKQKYYSSAKSFNTCPCCLKKSQYNIRDLRTKGDQPFGEIVREQFAIQPPVSGKEKLPNEGRKVLIFSDGRQKAARLARDIPLEMEKDVIRQLILQATTLKKGSIKIDNYLYNTLLYLLNENRVQILEGDERKSVQNDADYLKKEYDNDLDYIFEEALEPSKTLIKRIYQVIGNPGFSIYDTATGYVTLSAPILKRKYQKVEDYISKEDFETIVILFIKEMLADVSIFDAVLTPNDRKEILGQYRSEEDWSRNYGGLSRSLKKLIEHLAPGHVQEIIDELYSLCQMQNERYLLKKDPLIIKHALEETWYYCSDCREIHLRTANNLCVNCLSDNLKELTPNSEDFNALKGFWRSPIQEVLDNRRIKNIRVEEHTAQLSQKDVRHALATTEKYELGFQDIEMDKGMGVVDILSSTTTMEVGIDIGSLTAVSLRNMPPQRENYQQRAGRSGRRGSSLSTVITYAQDSPHDHYYFDNPKKMISGDTRDALIYINNKKIVQRHINALFIQTYFHKVVHTSLKHEKYTKINESLGFTVDFFEGEPPFNFESFDEWLSEQNYRKFKGIPGIYDIIPQDMVAEEDDPIRVKEMLIRETMDILLEKLRAKYEENIDSLKLADEDEAEEHVATRMFIEFLFNYGFLPSYAFPVDLTSFYIQKKENKEIVLEQQPQLQLNRALSEYAPGRMLVVNKKKYRVGGIFNPYLKNPFSDEVNHQLDEVVYCDRCHFTKLEHYTETRCPTCNAKLKRMPYMRPTGFSPEMGRELQDFDLEQDYSYTNDPQLPFTHSHESLEFSILYNGNIQYATKLNDELIIMNRGVQRQTGFNMCKDCGFIQPVYEGIEPPASHLKPFLTVGRDNECRGELLQVFLANRFNSDLLFIRLHLSKQLDVGDIKPWLNNSLTTIGEAFSLAAGRVLDIDAQELSVGHRFVRGEDNELYADIYVFDTLEGGAGYSLMAGEKMQDILEETLKVLNVCPNDCDSSCYKCLRHYNNQFKHKSLHRKLGYELLHYLMTNQIKSYDETDQQLWLSRIIETHQLFSGTISIPFNKQNNIVYIELFGQKIALKNNIIAMNNDDFLYFSPFEIQFDLPNVYLKVKGAKEESNQF

SEQ ID NO: 23965 - protein, 519 aa, Bifidobacterium pseudocatenulatum IPLA36007
MDRAKTLKDGKEITVFAHDLSSKGRKRIAHGARFKCPYCGRPVDLAALDSTKVTTYFKHHRNDELAKFCDEYVSGNGSGNLLMRNPVVPIFLDLEEESTKRYVLKAGLYGIGRKLRDDLKKNAEAYMSVNGRTYQLWQMAAESLSIPIRKLPTLELSNEITVIAPESIRRRVGEAEDCESGMVFTSDYSGAPPNHANHIGIRIRRGNDVYVGRRYYLVIDSREPKLSKSVATSFDTAKKVGALTANSCFTVWRVSVAASSSKRETAANMFAHFGCRLTDKERTVDLLWPPSLTSNGIDQPLFENTSVIYHEPEGNASHKDTGTVQLTHPAEIYALGDNYLFPFGYIGTGKHERPIYELDTGFLVSRPDEFHTWRMISQDQIDLSAFSTSECDEASVSLTSEDKPDLTCLFPVNVEIRSKTGNVQNENLLANEKTLPARRKDLVLAAAARKTFPRSFLLCVNNAGMTVKSASCPVTGLDSKLQLRKVSHGMSITMRRAGITTRKNNTSKNKILIQARRGE

SEQ ID NO: 23966 - protein, 333 aa, Bifidobacterium pseudocatenulatum IPLA36007
MKHDDLLKIMGADLGISRYRNESDESFGIRTVYSASRFWIEAFCLDDGRMGADGCQPGIISRRLNLWLDRISSIYPFIGQWIRSQQHYTPFSKLLYNRLIMVGDIISENNGGTYRCSSRHTIQIGNDLQALLGVYDTTGNDTSLPISGMMLSKREQAEPRIKCDPEWWNLPREYYAWSSCSDEGINEYADPSRKSVRDCWTSKPVLPDGIGLGRRRETHKYTYFLLHSHQNTIEARIIDNYRWPSLYTHLRNIVGNPYWADVEKLDDAHSRIEAPFSLLPPETSRWLDFMTWPEKTPDDCVFRIIRTELLKTATDMLESCGIKVRNSKTCQSN

SEQ ID NO: 23967 - protein, 1743 aa, Bifidobacterium pseudocatenulatum IPLA36007
MPVQLSIADAEKAISNRLIEYIETEYFGKTRELLSRCKETLAAPGTLFQKPYLEAAKAYQLAEGGIGNAKIPERIRILLQTMAEKDKGVFTKPYSHQIESLESFWNGYDVLVSTGTGSGKTECFMWPLVSKMAGEAIGLTGDRRSWEGSRAVRALILYPMNALVSDQVGRLRKMVGDKQGSFLDIWKSAVGDVRRPQFGMYTGRTPYAGDARSKRRDKEYAETLRRDFGELSEEDKLHLSETGRFPEKQDILAYADVIAEGRDGWSPLDAEMLMRFEMQRHTPDILVTNYSMLQYMLIRSTENGIWKNTSKWLERNPKEQMLLVLDEAHMYKGAAGGEVALLLKRLAAKLGVGMDRFQFILTSASIPENHEPVAHFFEDMAGRTASKLRIITGREQKVTRGSRILSAKDVVATAGADDGSDTSMMRLRRFLSGIGRSVPEDMDEQALRELAGDELQKIEQFGTLEEILRQRTMTLDEIAKEIFKDEPEAVKATDILLNIAALALNEGRPLLPTRMHLFIRGIQSLTVCADPGCPHVEKRDDLPLGKAFINRSVGRCSYGAKTYELATDRTCGALFLKGYANPGEDGFFFWNEKPVGNSEIKEIIVMPIAEDSCPDDVKTGWLNTISGKIYRDDHRGQPHFSHVAFSFDQPKDLDGKKMQFTTCPKCNGRLSVSDFTTKGNEPFYNVVAEQFSLQEPSSDPEKLRRNPNAGKKVILFSDSRQAAARIALDLTESSDKDLMRKLLCRAAYDLYQQYEDEATVSAIYPMFLKTVSEHKSRIFYGADRTTIMEKIRKNQRRFSRHFDRFLNEGDEGAPQEYYYLLLSLICDRYRSLSDMTIGWIEPSDYHMDLIYDDLDEIGISDSEFKSVFYAWSEYLLIHNAALNPNIEWSTRDRAMPFSTEYGVDHDNIFKGQMQGKRSLYEFLKKRFNANEMTYLESALDHFLETSTKNIRYKYLNPHYVTLRIDPDANWKACDRCGKNAPYNLWGKCPHCRQGDMHELTDFSSVAFWRDPIIKILQGDDDSLRARINTEEHTAQLSHKDGQNESWSTTEEYEMRFQDIYTSDNEEPVDVLSCTTTMEVGIDIGSLTAVALRNIPPMRENYQQRAGRAGRRGSSISTIVTYVDARPFDNHYFEHPDHIVRGELREPHIDVDNEKLIRRHLATILLTDFSAEHGFSMENITIENFFENYWKEWNSFLESYDFGTIVQQQIIPQNWNLDSKGFRRALSAELNNLKEDFGKYRENYLSADNKTCKSLLDSLLEAAILPTYSFPRNVTGFDIEDSSDAKTLEQRPERSLDMAISEYAPGRELIVNKKRYISGGIYSHSSRFAKKQGESFEPAKKYFNNKDYRNEVLLCTNPTCGWFGYEKELREPDRCPFCKEPGLEHKPFLKPWGFAPKDGRPSPSASERSELSFAEPPFYSATPSEEMTDAGYAHIKYSERHDCSLMVINKGPNSEGFTICSRCGAAFPTTDSAGIAKRIKAPYTKTPQNRQPDCAHDFDSGIYIGDVFNTDMIIFALHLNPSEVSVGQSNRWLKRARVSLAEAMRLAAVDLLDIDFNELCVGSRSRLDGSGESAFADVFLFDSLSSGAGYSSTLSKGHNLEKLFGKTRGILTNCDCEDACFSCLKHYYNKQFHNQLDRHAALDLLDYAMNGTVRNHVSDDDARDAFASLAEVIQDDAKATCSFESDKMTFMLDGKETTLTCLPDMKPKSSMSAVNEYWQYEMKHNVPGIVETLIKEQSGDSTLF

SEQ ID NO: 23968 - protein, 513 aa, Bifidobacterium sp. MSTE12
MMKDSREIIVFAHEIDDRSKKHVPWGARFKCPYCDRPVDLAALDSKKVRTYFKHHRNDDLAKFCDEYVSGSGSESLLARNPVIPIFLEREGGSANRYVLKAGLCGIGQRLRDDLRKTVEAYMSVNGRAYSLWQMAAESLKAPIRKLLTLELSKVVTVTASESILSRIGTVEDCRTGMVFTSNYDGIPTDHAVHIGVRIRHGNDVYAGRHYCLVLDSGEPKLTQSVVKSFDTAKKIGSLAANNRFTVWLVSVSTSSSKRDDAANMFASFGCRLTDEEKTVDLLWPPSLTSNGMDQPLFESTPVIYHEPEGNARPEDAGMVRIMHPAATYGLGDDYISPFGYIGTGKNEYIYELDTGFLVSRPDEFHTWRTIIRDRIDWSAFATSGYDESSVSLTSGDKPILTGSFPVDVEIRSRTGKIWSESLFKSERTLPARRKDLVLIRAAKGAFPKTFLLRFNDVGKAEESAARSTAKTDTRLLLRKTNLGTSIAMKRTGIKVGKTNTSRSETVVRARRGE

SEQ ID NO: 23969 - protein, 330 aa, Bifidobacterium sp. MSTE12
MKYDNLLSIMATDLGVRRYLNETDESFGIRTVYSASRFWIEAFCLDDGRMGADGCRPGTISRRLNLWLRRISLIYPFIEQWFGDPPASKLLYDKLIMVGDIISENSGGTYRCPSRHTIQISDDLKALLGVYDMTGNVMSLPISGMMLSAREHGKPQVERNPAWWNLPREYHVWSSCTDERVYEYADPFRQNVRDCWAANPILLNGIGIGRREEAYRRSTYFLLRDRRGDIEARIIDGSQWKPLYTHLRSVAGNPYWAELEPLGESHTRIKTPFGMLPTEISRWLDFMTWPEKAPDDENMRIIRNELLETAVDMLESCGIKVRSNRICQSN

SEQ ID NO: 23970 - protein, 1747 aa, Bifidobacterium sp. MSTE12
MPVQLSIADTEKAISNRLVKYIETEYFGKTPELLSRCEKTLAAPGTLFQKPYLEATKAYQLADGGIGNAAVPERIKTFLQSMAEKDKGVFAKPYSHQVESLESFWNGCDVLVSTGTGSGKTECFMWPLVSKMAGEAMGLTDRRSSWEESHAVRALVLYPMNALVSDQVGRLRRMIGDKQGSFLDIWEGVVGNARRPQFGMYTGRTPYAGDTRSTRRDKEYAETLRHDFGELGEEDRFHLSETGRFPEKKDILSYADIVTEGEDGWSPLDAEMLMRFEMQRHTPDILVTNYSMLQYMLIRATENGIWENTAKWLERNPKERILLVLDEAHMYKGAAGGEVALLLKRLAARLGVGMDRFQFIMTSASIPEDHEPVERFFEDMAGRPASNLRIITGKEQKVVHGSRILSAKDIVAAVGTGDDSNTSMMRMRRFLSGIGQPIPDNMAERAIRERAGEELQKIERFGAVEEILRRKTLTLEEAAKEIFKDDSEAVRATDILLNLAALALDGGRPLLPTRMHLFIRGIQSFMVCADPKCPHAEEKDGLSLGKTLINGSAGRCSCGAKTYELATDRTCGALFLKGYANPKEDDFFFWNEEPAGNSEIKELIVMPIAEDSRPDDVKTGWLNTISGKIYRDDHHGQAHFSHVAFSFDQPKDMDGKKMQFITCPKCNGRLSVSDFTTKGNEPFYNVVAEQFSLQEPSNDPEKLRRNPNAGKKVILFSDSRQTAARIALDLTESSDKDLMRKLLCRAAYDLYRQHSNDATVSAIYPMFLKTVSEHGSHIFYGADRTAIMEKIEKSQRKFEDPRRFAKFLGEGDEGAPQEYHYLLLSLICDRYRSLSDMTVGWIEPFDDDMCDIHDDLDEMGISEDEFKSVFYAWSEYLLIHNAALNPNIEWSTRDRAMPFSAEYGVDHDNIFKGQTQGKRSLYEFLKKRFNADEMAHLENALDHFLGTSAKYVRYKYLNPRSVTLRIEPDARWKACDRCGKNAPYDLWGKCPHCRQGNMRELTDFSSVAFWRDPIVRILQGDDDSLRARINTEEHTAQLSHKDGQNESWSTTEEYEMRFQDIYTFDDEDPVDVLSCTTTMEVGIDIGSLTAVALRNIPPMRENYQQRAGRAGRRGSSISTIVTYVDARPFDNHYFEHPDSIVRGELREPHVDVDNEKLIRRHLATILLTNFSAEQDFSMENISIEDFFEMYWKKWNSFLKAYDFGTIIHQQLIPRDWKLDTDRFRRILSKELADLKEDFREYRENYLSTDNKNCKSLLDSLLEAAILPTYSFPRNVTGFDIEDPSEVKKLEQRPERSLDMAISEYAPGRELIVNKKRYISGGIYAHSSRFAKGQGTSFEPAKKYFDNKDYHNEVFLCTNPTCGWFGFEKELRKPGRCPFCKEPGLEHKPFLKPWGFSPKDGRPSPSASERSELSFAEPPFYSATPSEKMTDAGYAHVEYSERHDCSLMVINKGPNGEGFTVCSRCGAAFPTTDSAGIAKRIKAPYTKTPQNRQPDCAHDFANSSGLYIGDVFNTDMIIFALHLNPNEVSVSQSNKWLKRARVSLAEAMRLAAVNLLDIDFNELCVGSRTRLDGSGESAFADVFLFDSLSSGAGYSSALSKRHNLKKLFNKTRSILNGCDCEEACFSCLKHYYNKQFHNQLDRHAALDLLDYAMSGTVKGRVSDEDARIAFTALAEVIQNDTRSMCSFKGDKMTFMFDGKETVLTCLPDMKPKSSASAVNECWQYQLKHNVPGIVDALAKERTGNLTLF

SEQ ID NO: 23971 - protein, 418 aa, Blastochloris viridis
MTKSKNALPNRNRSGVARPFSADALLKRSIRSHFTRLGFARANDGTLILPGTGKDDVRTLHAEQRAERLERSSQFLKLVLPDALKYFADGAELDPSKIKLQLKRVRSGSEAADLFRIATLTWSVPVSAGYGRRLRYLVWDAHHEKVAGVIALGDPVFNLRVRDELIGWDAEARGKRLVGLLDAYVLGAVPPYSMLLCGKAVACLVRSREVFDDFKKTYGGAVGIISGRKKRAKLLAVTTTSSMGRSSIYNRLKLGKQTFFERIGYTIGWGHFHITDRLFADIREFLRLRRDPYAGNHQFGDGPSWRLRTIRRALDILEINQSVLKHGIQREVFICPFGANAFEILKTGNGELDLSTLQTVEEISDLARARWIEPRALRRPEFREWKREGILDLIKGKPPSAAKPSIQVQPGRGAAVGR

SEQ ID NO: 23972 - protein, 360 aa, Blastochloris viridis
MTTLITSREAIASVAKALGMRTDPAPTQLGDELIAQALRRAAFILAPCAAHELAHAVSGSLASLALEDPEFAGRVETILESLVTYGDILEMRADAENPWVTSTAYTLRSAPPSFVARKNGSIFLLGVAGDQISALTEDLGARIVHRGLLRVLLPLSGEELPLYLKELGLLPLSERTWLRLPRSEPASAYAGHIRSLVAAEPRAGSMDGLTILDTSRPVNFYRDRWVEPRNQHTGFYVARRPQKYGAAIWCVADLEAGRVNRFTDLSEPGDRIRPSDMAWRIQAAFDALAGHPQRYRSSPRGATTLVRFYAPIPSWAERRLTLAGTKTRAERCLFSYDIPNEEWPGERAFLNEALWMNPID

SEQ ID NO: 23973 - protein, 1854 aa, Blastochloris viridis
MSATTIQQTIDELRQTLTEYLEATYHIGHPAMVAQRNRLLKELGGIYQNPYIESTPRYVTDERYEDMTALPTAVRGTLVALSGSQDGKAILFNPPYKHQAQSLKESLANKKNLMIMTGTGSGKTESFLLPILGKLAIEARGNPTGFRDHSAVRAIVLYPMNALVNDQLGRLRLLFGNPRVVSMFKQWTGRPARFARYTSRTPYAGVRTPNKDSNRLGSIGDFFSEIENAAARYAAGRPRIPEEDEKASALRDKLAKKGKWPAKENIASWFGTPGSQWRDRDGRYKRAVVQPDDAELLTRHEVQENPPDLLITNYSMLEYMMMRPIERPIFDKTREWLQAFPEERILVVLDEAHLYRGAQGAEVGLLLRRLRERFNIGPERFQVICATASFSAENKEAAGTFGAQLSGVPADTFVPITGTLRMRSPATRGSDLDVAVLKDIDLAKFYSPDPADQMSAAEPFLRFRGVKPEGDVSAALLAALDSYAPLNLLINETMKAALPVKELSALVFGTPDEEASARAVSSLLAFGSRARRAPDEPSLLPCRVHSFFRGLPGLWVCMDSDCAALPANERGGPAGKLYGQPQERCSCGAPVLEYFTCRYCGTSYARAYTNDLANPRFVWANSGERLQTGGGMFETLKHLDLLLEEPSRPDRGRPAIYDLRSGRLDPDQPGDRTRTVYLRPEGDIALDEEEEARAQPGEFAPCGCCGRLFMFGQSSVQDHQTKGDQPFQALLSTQIRVQPPGPQPATEFAPLRGRKVLIFSDSRQMAARLAPTLQSYSLRDSIRALLPVGYRMLSQDQQFTSVLTLNHAFLAVVIAGHRFGVRIRPELDQSESMPTIDGVPPGQAPSGTKLFDLMSARCPANLMRAIVNVIRDTGLALEPLAVASLRESPQLTARIAGLPPLSGLAETEPEKLAVARAWIRAWARGPGIWFSDMPPEWWTNEVRTHKGEFKPMETVLVSKEAKRVFKKDWLSRLLQAFTERLSDGGTRLLASKLALELGGSWVRCTTCKSVHRPIPNVTTCLDCRAPTIQMFDPVSDPVFVARRGFYRGPVAAALEQSEPNFISLIAAEHTAQLNAAQPEDVFSQAERHEVRFQDINLAWRDTDEREPAIDVLSSTTTMEVGIDIGELSGVALRNMPPGRANYQQRAGRAGRRGTAVATVVAFGSSDSHDDHYFVAPDEMIRGPVVDPRLTLENRDIACRHLRAYLLQRYHEARIPGVDPQADPNLFSVLGRVRDFRSGTGVLNREDFRHWLTDNSDELKVSADRWLPIELSATDRADLIETMISDVTKAVDDAIGFVQSDGATAAEENGDSENAEEEESEKDESAMQEVVEAADETGEYDEETEFVDPSADKLLDRLLYWGVLPRYAFPTDVAPFYVFNPALSTPFRPKMEFAPSQGLNIALSQYAPNKQIWIKGKQYTSKAIYSPYRKERKDAWGRRKLYFECSRCGHARTEEYSDERRNAVIQCEACRSPATFGPAKPWFRPPGFAHPIDKPPVTTPDAPNETAYATRAKLVMPTPAPDTGWIQAGPRIRAFPTRKHLLVSNSGPDGDGYNYCVLCGRIETAVDPEVILQQPHSRPYPSDEDGPCPGRVSPRVVLGTDFRTDIALFSLPIDDPFCVFPGNDETASALRTVCEALAKAACRLLEIESGEILAEYRPALTDAGAIGREAEIFVYDTLAGGAGFSPQLAARGEKLFTEALDILESCPAECDASCYRCLRNFRNKIEHRLLDRKLGQQLLRHAMYGGYQPYPPDRMQSSNDILADDLARQFPNFRVEKNAPRRVGNTDLTVDIVMTNARGAETWIALSSPVAPDVAATAELRELAEEQVQPIVYVDDLLVRRNLPAAVEIVRQMLQ

SEQ ID NO: 23974 - protein, 418 aa, Blastochloris viridis; identical to SEQ ID NO: 23971

SEQ ID NO: 23975 - protein, 360 aa, Blastochloris viridis; identical to SEQ ID NO: 23972

SEQ ID NO: 23976 - protein, 1854 aa, Blastochloris viridis; identical to SEQ ID NO: 23973

SEQ ID NO: 23977 - protein, 400 aa, Burkholderia pseudomallei
MKTGLVISLPGNEARLKRKVRAHFKRLGFLKAPDGTLMPPNLDKQSYRDMHAHQRDSRLNDNRAWIANRSARLIQHFASGAELDVERIRPRIEVVRSGTWQGDLFRFATYFWRIPISEGYGRRMRFLVWDEHHEKVMGLFALGDAVFNLRARDEFIGWDHHRRADAMVNLMDAYALGAVPPYNMLLGGKLVASLIRSQDVVDTFQAKYHESVGVISGQSKHAKLVAVTTTSALGRSSLYNRLKIGGQSIFEPIGSTSGWGHFHISDELFSDLRDYLRSLDHHYADSHGYGQGPNYRLRLIRKALGLLGLDPDMARHGLMREVFFCSLASNALQFLRGEHKRARYGHLPTVAQMGEAAKLRWVIPRAERMPEFRTWRSEQFLRELDGTAGRMQRRRLEQVG

SEQ ID NO: 23978 - protein, 505 aa, Burkholderia pseudomallei
MSGFGLTCPSCGEPVRRRAGAERRPHFAHYSHRAKPECDNYFPSQGRLVATGPGSGVRLPPSRWKRESLGCGLFLTAEPGQTSLTLWLRIPPMEPETTSAGRLELQSGLGHRTYHLADLSVARLVPMAPQVPLAVVAGVGSMLPVAAHIATQIRAFVAGRNFFYAEEKGGRFVFSDEPLELGCQYRLLSIDDVVPPLDLGAALDWRPEGKFGSWNIYAMALPSSFVVGAQRNLLREIAEFLGRGIRSRRPRVYVVDPLPHHVEVDGTCIYPELPTSLLLRRTGICAVDVTASGGMAVARVIEQSDEWVRLEEFRPGEQEFTVAVDGDEQMIIRTEHCALFRPGGIAISTDEVTWDLCTDPPLAGSELLRHELTIDCENDRIATHLASLNDGWLLEKTRLLSPAGSPKNLYAGGFGELRGMVQTPQQEPEKQGEKNAAIKQLGGALNWLEHLVARSFGADGARRVKSYLADPTPANLRRLGPIMTSRLMPYIRAAQHQQQERTEGN

SEQ ID NO: 23979 - protein, 854 aa, Burkholderia pseudomallei
MTYEGIDRRRFIQLLEWGAADDELRRFFADCRIQLIQRGARVQNPPRGKPARVRMLAQGLPPATDRIVQRWFNEHLTMLDPKPASDLVAELRLYEEMGESPPEDEAKRLARSCLVHLFSSDPPADLVSFLRPAQAGNAAEPSKVQAEAVNGQNSDAFPVALGQALVALAEGRDPDEYLSSLSSTAASFVGGLQAVRSGRDDEAKIALEALDHEPEVRALLLEYAVRSASARTGNTVRGLQMLRFASPDEAFSFDFDRDEVLAVCTRDYPETTVFLHPFAIRAADGSWIDLSNDTDCQKLFYTSGDLIAFPGRDTPRQPKRGEIGIWRVAENKGANTGHRTNFHIASEMTPVYEVRDVPFPSTDYDSVREYIKHQFEQGEVLLATKPLFVLRDQLVVGCPPGKDLSRDEGFESGLPCWQTLSACRFEGRVLVPGPLPPPGTYECEALGTSLRKLFAKGEWGTDKPTKALARKLQELIASGEPGLSSARVARLRAELSFIDQHEGAMDALLEEIMRDPSISARVDEQVNARVEALVEQQEQLKNSVQQLEQKKRDLQEQQRKAERDQKAVAPAIARAIREAFDKARSDALGTLGQVAVFKALIDELIERPAAPGGGAGPAHPDPTYAGFRPAASVVRLPHGGPLPVIETLRALGVTPKSARAIELVGQMAHQCGLILIIDGLAGRLAAELWLSGNETSGKVFECGFGEVEDHQIRSIVADAPETLAILDANLSPLDLYARPLIDAVQRRLAGIDGGTFATRILMSVSDDTASLPMPATVESLSLRVSLDRIPMFAQDNEVARQLEEIDSTDTSAGWFARIWKPARPRVLSHLRSVPIEDVAFIFAALEAAEIKGTD

SEQ ID NO: 23980 - protein, 260 aa, Burkholderia pseudomallei
MADALGTMQFLREAESLGGGYWIPTPVRTVDLGFGRCLLVGPQPTSELQRHFAGVRRAGAGRVTDRAAVPDLPSQSQDAWRGSDGSDACTWTQSAVDSALKQLASSLVPDSLQVFGTRIASGRRREPAWVKPGSSAACEWHGIGLFRAPTGATRYRYFFGKYGAGKQFLEGPPVQDAARLQFGFAALQRQPMTATITAVSGTTSISLPLAPPRNVRRLLVALCDAHPRSFGRVWTCREPVNLPVLLGAIQELKCEIAHHE

SEQ ID NO: 23981 - protein, 1752 aa, Burkholderia pseudomallei
MSEPKIYSARAVFEGMKGTLHRYLEAQYHIWDEGLIEARKRLLESEGVTFQEPRIEATPFYATGSTYSQMQIPAAARAVLELAAKHAGTGIPERPYKHQADALESFLGRGEEIIVATGTGSGKTECFLMPILGSLAAESSERPESWLNPGCRALLLYPMNALVNDQLSRLRRLMGQRDVAEYIRGRRLGRATFGMYTSRTPYPGVTSRARDQSRLRPLVQHAYLDLPPDAKERLDREGKWPTKDLDGFIASSFVTGANDSEMLSRGEMQARCPDLLITNYSMLEYMLLRPIERSIFNQTAAWLAADKSNYFTVVLDEAHMYRGSGGAEVAYLLRRLHARLGVGRDRVRYILTSASLGKSPEAVARMKSFAADLSGLGASQREFTLIRGEQLKKSGERPATREEAAALARFDIAALLDSAINPGKAIQGFASLLEALGQEAMKAAGDEQTALQHTVYKWLESFGPASLVANLVTAHPQKLGAVAALAFPGAPDAEAAMEATLALMSFAKERDSGRVFAPVRSHLFFRGIAGIYACTDASCSARDPSISSGPLGKLYSEPMLKCECGARVYEVLTHRDCGAAFIRGYIQDQFGMFLWHQPSSGLWGTGGLMEAHFLVEVERRAAGTHGRMEGAHVWLHKATGRLVLAPPAEAERGQYLALLRPDGAVPISGQRALSFNCECPVCTRRWRAGSTKIMDLATKGEAPFAQLVRTQVELQPITHPKTDSSPNGGRKSLLFSDGRQKAARLARDIPREIENDVFRQLLLLAARELRGLGREATLGDHIYVALLHVLAKNALLLFDGADRERLQRDVLDHRRHYLGELRDALDESPPAKPPRFSSLLLRHLGSPFYSLSALTLAHVVPIARVRRQIVAALPGMDEAHLRAVWTAWIQSFASDFAVDADLPQGVRSQAAGYPVGGGLDRNGGFSARQQAFLRARVPELDRIFDTLTALLCQARPGSPGFFIVPRFLALELASDQHDWYQCGQCATVSPVEWWGHCPNCLAGEVTAVRPGATQYLRARKAFFRDPVNEILEGKASPFNLSVEEHTAQLSYRDVDDSTTTIEEFERRFRDILVERNDTSIDVLSSTTTMEVGIDIGSLIAVGLRNVPPLRQNYQQRAGRAGRRGSAVSTVVTYAQNSPHDNHYFGNPEPIISGEPTLPGVDTANPKIVERHIRAQLIQAYFHSQPLNSASGDVFSVLGETMDFYTGTGPFSLSSFNDWLSGSQAVQACYTAMRQWLPASFRKSPSDVATEFVARLEQVRPRAAHELDPADERLIEFLFDRGFLPSYAFPRDLCALQIEGLERRGNFTQPKIVQRPQQGLNVALSEYAPGRLVVVDKKTYRVGTVAADGSTAVVDRAQRLFDERRYYVHCPECEYTSGFKIAAPVGEQCPLCRTAVLQATSVIEPQVVFPEGRGEVDEFDDEQTFTNATSAQLSVPAESSAFDLRKLGVHCEIGFARTQQLVMVNKGEEDAGQYVGFLICNRCGKAASDPQRVGPHERDYYLSTRAPGRCTGQFEQVYLGYGFASDVLIVRLPMSPPLRFDPVRTTEREPISNALQSLAEAFVLGISQELDIDIREINAGFRFVRVGEKHFADIFVYDTLSGGAGYATQAAELFEAVMANAEALLSRCTCSASCDKCLRHYGNRFHHAILDRHLALDLLRYARDGYVPVAPSHDEQRVTLQPLKDMMLLAGWSQDPSVAAPYVVEHQGRRVQLFSLPSLVDPVHYGFQPTSNRFAFSAFELARDLPGAFGEVA

SEQ ID NO: 23982 - protein, 405 aa, Burkholderia pseudomallei MSHR4299
MSIKPASKAFSIEGRIKRRLRAHLSDLGFQRADDGSLVLPDAGKDTVRALHRQQRLEILARNACFLDAHMPALQSYFASGEEVVVDKIKPVLQRISADTWESNLFRLASLTWSVPVSAGFGRRMRYLVWDEFNGKLIGIAAIGDPVYNLSVRDNLIEWSVADRAERLVCLMDAYVLGAVPPYNALLGGKLVASLLRTRDVYDDFKSSYGGTTGIISGRHKQARLLAITTSSSMGRSSVYNRLKLNGTTYFRPIGYTGGWGHFHIPDDLFEEMRDYLRSMQHDYADFHAFGQGPNWRLRTIRAALNALGFKQDMLKHGIQREVFLCEMAQNSLQILAGEQKRPNLRTLLTAEEVGQAAIERWMVGRAQRMPEFRQWRNDDLLSVIHAVTHCDYVKSTSTSLKARRK

SEQ ID NO: 23983 - protein, 359 aa, Burkholderia pseudomallei MSHR4299
MIIQLGRDDVIRTARENVGLPLALGEAVHIDEEFLAACLRRIAGFHCPCSPLTLRTMLAESLSALVADETALAANIDRAIECTYVTGDLLELSQVAVADNTTPSTWVFAAPPSFVSRARGVFHIFGLGTEEPTPLPLALKARLRLFGANRLLDAEPDEDIRSILLDAGFQEQSIEVWLKLPKKESPQEYLCRTEALLTGKAQCGELEQLRIFDADERGGSYTRRWVRPTRQTGRFVCRRAQAYGADLWGYVELSVGQPIKLLDLPMTSSRYRGCDEGWRLQMAIDAASGRPQQYRVRRFDDSIALAFDRPIPMWATRRLETVGRQVVDSGALLEYMVPPQFAEEERKYLEETLGLVSTS

SEQ ID NO: 23984 - protein, 1856 aa, Burkholderia pseudomallei MSHR4299
MADTIQQSIEQLHAALRDYIEATYHISHPALIAQRRALLDQPGVIRQIPYLESTPRYQSGSSFSSIHGLSSGAVSVLTALSEATKSEPQILHNPPYVHQSEALRLSLVEGKNLVVVTGTGSGKTESFLMPILAKLATEASERPQSFGNYSAMRAMILYPMNALVNDQLGRLRSIFSDSRVVELFSKWSGRPPRFARYTSRTPYAGIRTPKRDQRKLKSFESFFVEAERLAHGAVSDEQVRAAQLCSDLKAKGKWPAKPSLASWFGDKGERWVDKEGNFKRAVTLPNDSELITRHEVQATPPDLLVTNYSMLEYMLMRPIERSIFDRTSEWLRANPNEKFLVVLDEAHLYRGAAGAEVGLLLRRLRDRLDIDESRFQIICATASFTDKNYAPEFGSQLSGIAKDSFVAVTGTLRLAEVDKPGSVEDARSLASVQLSDYYSSVEETRKRAVREFLLYRNVEPTDDVVVDLYKALKDFGPLGRLINATMREALAVVELVDIVFPGVSEELANAALTSLMSIASVARENQDGTSLLPSRIHNFFRGLPGLWVCTNPDCSEIVDPSHQSRVCGRLYSQPRQRCGCGSQVLELFTCRNCGAAYGRAYADVVEEPQALWNDPGKPLRMESGEVSALNPLDLLLEEPRQLDNVEPASYDMDTGRMNPPVLSDRARQVFIRKDRLQGVTNEDGERDDRLEARGLFIPCGVCGTTAAFGRTSVQDHQTKGDQPFQSLVSKQIQIQPPNSKPATAFAPLRGRKVLVFSDSRQVAARLAPNLQMYSTRDSLRPLVMWGFEKLKTFAPIRPKLSLDDLYLSVLLAANVMDIRLRPEMSSGESMAAKSTVDAAIRDQDLFDDPGAMQSLWVELKGERPPAALLDDIYKTVTDRHLGLEALALASIAVREDKQAIVGALPSIPGVAECLDDKVMLVEAWLRCWHRRGFWLNSMPDAWWLRSHPSGTNIRGQKSKFKAMNRVLPDASSRRLFDSKWLPSLLAEFTSEQGGGLRRLEGKSLTLRLDGAWVRCSACKSVHRPVSTLKHCLDCGSSDIIELKPDSDIVFKARKGYYRDRVMAAFATPPLYPQALIAAEHTAQLNAPQSEDVFSKAEENELLFQDVEISLPGEKSNRTAIDVLSSTTTMEVGIDIGALTGVALRNMPPARSNYQQRAGRAGRRGNAVATVIAFGSSDSHDEHYFSNAKEMIRGAVVDPALTLDNPELAKRHIRAYLLQAYHRDRIPEFDAGSPSNLFSVLGTVAAFRSSTGRLNRDDFEAWLLQNESLLRARIEQWLPTELASADSEKLLDEMVADCLDAVDGAINIDGDAVKATKDVHASEDDEELEMPAEAGDESPAQIDAEDKLLDRLLYCGVLPRYAFPTDVATFSVFDREKSTSFKHVMRFAPSQSLPVALTQYAPGKQVWISGKCYTSGAIYSPIISERFEAFKKRRLYRECDRCGFADTKPFGAGVERGAISDCPACGGHESFGPARQWLRPPGFAHPVFEQEVTSPDDIPPTSYATRAKLTMVTPADTADWERINPRLRVMTSRQHLLVSNTGPKKLGYTHCVACGCIEADVTPEPKLFMPHLKPYPDNESTCPGDYAHKHLVLGTDFISDVALFSLRVEYPMILRPGTYPTSVALRTVSEALAKAACQLLDIEPSEIMAEYRPALTKDSAGRDGLQAEIFLYDTLPGGAGFSTQAARLGGALFERTMQMLTECPEKCDSSCYRCLRSFKNKIEHHLLDRHIGSELIDYLLTGRIPEFNAQRIAASAHLLMADLRRQHSDGIQFEGDVTIELPGGGNAHIPILCSTTDGRRVAVFISAPLTEDDVEVNSTAKRVAEELSLSVVFVNELLVRENLPAATAIVQSELGQP

SEQ ID NO: 23985 - protein, 400 aa, Burkholderia pseudomallei Pasteur 52237
MKTGLVISLPGNEARLKRKVRAHFKRLGFLKAPDGTLMPPNLDKQSYRDMHAHQRDSRLNDNRAWVAERSARLIQHFASGAELDVEHIRPRIEVVRSGTWQGDLFRFATYYWRIPISEGYGRRMRFLVWDDHHEKVMGLFALGDAVFNLRARDEFIGWDHQRRADAMVNLMDAYALGAVPPYNMLLGGKLVASLIRSQDVVDTFRAKYHDSVGVISGQSKRAKLVAVTTTSALGRSSLYNRLKISGQAIFEPIGSTSGWGHFHISDELFDDLRDYLRSVGHRYADSHGYGQGPNYRLRLIRKALGLLGLNPDMARHGLTREVFFCSLASNALQFLRGEHKRARYDHLPTVAQMGEAAKLRWIIPRAERMPEFRTWRSEQFLQELDGTGVRMQRRRLEQVG

SEQ ID NO: 23986 - protein, 523 aa, Burkholderia pseudomallei Pasteur 52237
MDWARDYLGNDVPAWLGGMSGFGLTCPSCGEPVRRRAGAERRPHFAHYSHRAKPECENYFPSQGSLMATGPEAGVRVPRSRWKRESLGCGLFLTAEPGRTSQTLWLRIPPMDPETISAGRLELQSGLGHRTYDLADLSVARLVPMAPQVPLAVVVGVGSMLPVAAHIARQIGAFVADRNFFYAEEKGGRFVFSDEPLELGCRYRLLSIDDVVPPLDLGAALNWRPEGKFGGWNSYAMALPSSFFVGAQRNLLREIAEFLGRGIRSSRPRIYVVDPLPHHVEVDGTCIYPEFPESLLLRRTGICTVDVTASGGTPVPRVIEQSDEWVRLEEFGPGEQEFTVAVDGDEQMIIRTEDCPLFRPGGIAISTDDVTWDLCTDPPLAGSELLRHEVTIDCGNDRIAMHIAHLNDGWVLEKTQLSSPAGSPKNLFAGGFGELRAIVQTSLQEPEERVGESAAIQQLGAARNWLEHMVARSFGADGARRVRSYLADPTPANLRRLGPIMASRLMPYIRAAQHQHQEWTEGN

SEQ ID NO: 23987 - protein, 858 aa, Burkholderia pseudomallei Pasteur 52237
MTYAGIDRRRFIQLLEWGAADDELRRFFADCRVQLIQKGARVQNPPRGKSTRVRMLAQGLPPATDRLVQRWFKEHLTMLDPKPASDLVAELRLYEEMGESPPEDEAKRLARSCLVHLFSSDPPADLVSFLRPAQAGNAAEPSDAKDGQAGDVNGQSSDAFPVALGQALVALAEGRDPDEYLSSLSSTTASFVAGLQAVRSGRDDEAKIALEALDHEPEVRALLLEYAARSASARTGNAARGLQMLRFASPDEAFSFDFDRDEVLAVCTRDYPETTVFLHPFAIRAADGSWIDLSNDTDCQKLFYSSGDLIAFPGGRDTPRQPRRGEIGIWRVAENKGANTGHRTNFHIASEMTPVYEVRDVPFPSTDYDSVREYIKHQFQQGGVLLATKPLFVLRDQLVVGCPPGKDLSRDEGFEAGLPCWQTLSACRFEGRVLVPGPLPPSETYECEALGTSLRKLFTKGGWGADKPTKALARKLQELIASGELGLNSARVARLRAELSFIDQHEGAMDALLEEIMRDPSISARVDEQVNARVEALVAQKEQLKNSVQQLEQKQRDLQEQQRKAERDQKAIAPAVAKAIRGAFDKARGDALGTLGQVAVFKALIDELIERPAAPGGGVGPAQPAPAYAGFRNAASVVRSPHGGLLPVVETLRALGVTPKYARAIELVGQMAHQCGLILIIDGLAGRLAAEVWTSGNEMSSKVFECGFGEVEDHEIRSILADAPDTLAILDANLSPLDLYARPLIVAVQRRLAGIDGGTFATRILMSVSDDTAALPVPATVESLSLRVSLDRIPVFSQDSEVGRQLEEIDSTDTSAGWFARIWKPARPRVLSHLRSIPMEDVAFIFAALEVAEFEGRD

SEQ ID NO: 23988 - protein, 1787 aa, Burkholderia pseudomallei Pasteur 52237
MPIPDRSGASGLAASRSICRFSSERYKTSNAKLHTMSEPKIYSARAVFEGMKGTLHRYLEAQYHIWDEGLIEARKRLLESEGVTFQEPRIEATPFYVAGSTYSQMQIPAAAKAVLELAAKQAGTGIPERPYKHQADALESFLGRGEEVIVATGTGSGKTECFLMPILGSLATESSERPESWLNPGCRALLLYPMNALVNDQLSRLRRLMGQRDVAEYIRGRRPGRATFGMYTSRTPYAGVTSRARDQSRLRPLVQHAYLDLPPDAKERLDREGKWPTKDLDGFIASSFVTGANDSEMLSRGEMQTRCPDLLITNYSMLEYMLLRPIERSIFNQTAAWLAADKSNYFTVVLDEAHMYRGSGGAEVAYLLRRLHARLGVGRDRVRYILTSASLGKSAEAVARMKSFAADLSGLGAGQREFTLIRGEQLKKSGERPATREEAAALARFDIAALHDSAINPGKAIQGFASLLEALGLEAMNVAGAEQVALRQAVYEWLQSFGPASLVANLVTAHPQKLRAVAALAFPGAPDAEAAMEATLALMSFAKERDSGRVFAPVRSHLFFRGIAGIYACTDANCSARDPSIPSGPLGKLYSEPMLKCECGARVYEVLTHRDCGAAFIRGYIQDQFGMFLWHQPSSGLWGTGGLMEAHFLVEVDRRAAGTHGRMEGAQVWLHKATGRLVLTPPAEAELGQYLALLRPDGAVPISGQQALSFNCECPVCTRRWRTGSTKIMDLATKGEAPFAQLVRTQVELQPITHPKTDSSPNGGRKSLLFSDGRQKAARLARDIPREIENDVFRQLLLLAAKELRGLGREATLGDHIYVALLHVLAKNALLLFDGADRERLQRDVLDHRRHYLGELRDALDESPPAKPPRFSSLLLRHLGSPFYSLSALTLAHVVPIARLRRQIVADLPGMDEAHLRAVWTAWIQSFASDFAVDADLPQGVRSQAAGYPIGGGLDRNGGFSARQQAFLRARVPELDRIFDTLTALLCQARPGSPGFFIVPRFLALELASDQHDWYQCGQCATVSPVEWWGHCPNCLAGEVTAVRPGATQYLRARKAFFRDPVNEILEGKASPFNLSVEEHTAQLSYRDVDDSTTTIEEFERRFRDILVERNDTSIDVLSSTTTMEVGIDIGSLIAVGLRNVPPLRQNYQQRAGRAGRRGSAVSTVVTYAQNSPHDNHYFGNPEPIISGEPTLPGVDTANPKIVERHIRAQLIQAYFHSQPLNSASGDVFSVLGETMDFYNGTGPFSLSAFNDWLSGSQAVEACYTAMRQWLPASFRKSPSDVATEFVACLEQVRPRAAHELDPADERLIEFLFDRGFLPSYAFPRDLCALQIERSERRGNFTQPKIIQRPQQGLNVALSEYAPGRLVVVDKKTYRVGTVAANGSTAVVDRAVRLFDERRYYVHCPECEYTSGFRIAAPVGEQCPLCRTAVLQAASVIEPQVVFPEGRGEVDEFDDEQTFTNATSAQLSVPAESSAFDLQKLGVHCEIGFARTQQLVMVNKGEEDAGQYVGFLICNRCGKAASDPQRVGPHERDYYLSTRAPGRCTGQFEQVYLGYGFASDVLIVRLPMSSPLRFDPVRTTEREPISNALQSLAEAFVLGISQELDIDIREINAGFRFVRVGEKHFADIFVYDTLSGGAGYATQAAELFEAVMTNAEALLSRCTCSASCDKCLRHYGNRFHHAILDRHLGLDLLRYARDGYIPVAPSHDEQRATLQPLKDMMLLAGWSGDPSVAAPYVVEHKGRRVQLFSFPSLVEPVHYGFEPTANRFAFSAFELARDLPGAYGEVA

SEQ ID NO: 23989 - protein, 400 aa, Burkholderia pseudomallei Pasteur 52237; identical to SEQ ID NO: 23985

SEQ ID NO: 23990 - protein, 457 aa, Burkholderia pseudomallei Pasteur 52237
MATGPEAGVRVPRSRWKRESLGCGLFLTAEPGRTSQTLWLRIPPMDPETISAGRLELQSGLGHRTYDLADLSVARLVPMAPQVPLAVVVGVGSMLPVAAHIARQIGAFVADRNFFYAEEKGGRFVFSDEPLELGCRYRLLSIDDVVPPLDLGAALNWRPEGKFGGWNSYAMALPSSFFVGAQRNLLREIAEFLGRGIRSSRPRIYVVDPLPHHVEVDGTCIYPEFPESLLLRRTGICTVDVTASGGTPVPRVIEQSDEWVRLEEFGPGEQEFTVAVDGDEQMIIRTEDCPLFRPGGIAISTDDVTWDLCTDPPLAGSELLRHEVTIDCGNDRIAMHIAHLNDGWVLEKTQLSSPAGSPKNLFAGGFGELRAIVQTSLQEPEERVGESAAIQQLGAARNWLEHMVARSFGADGARRVRSYLADPTPANLRRLGPIMASRLMPYIRAAQHQHQEWTEGN

SEQ ID NO: 23991 - protein, 858 aa, Burkholderia pseudomallei Pasteur 52237; identical to SEQ ID NO: 23987

SEQ ID NO: 23992 - protein, 260 aa, Burkholderia pseudomallei Pasteur 52237
MADALGTMHFLREAEPLGGGYWIPTPVRTVDLGSDRCLLVGPQPTSELQRHFAGVRRAGAGRVTDRADVPDLPSQSQDAWRGSDGSDACAWTQSAVDSALKQLASSLVADGLQVFGTRIASGRHREPAWVEPGSGAACEWRGIGLFRARTGATRHRYFFGKYGAGKEFLEGPPVQDAARLQFGFAALQRQPMTVTITAVSGATSISLPLAPPRNVRRLLVALCDANPRSFGRVWTCREPVYLPVLLGAIQDLKCETAHHE

SEQ ID NO: 23993 - protein, 1752 aa, Burkholderia pseudomallei Pasteur 52237
MSEPKIYSARAVFEGMKGTLHRYLEAQYHIWDEGLIEARKRLLESEGVTFQEPRIEATPFYVAGSTYSQMQIPAAAKAVLELAAKQAGTGIPERPYKHQADALESFLGRGEEVIVATGTGSGKTECFLMPILGSLATESSERPESWLNPGCRALLLYPMNALVNDQLSRLRRLMGQRDVAEYIRGRRPGRATFGMYTSRTPYAGVTSRARDQSRLRPLVQHAYLDLPPDAKERLDREGKWPTKDLDGFIASSFVTGANDSEMLSRGEMQTRCPDLLITNYSMLEYMLLRPIERSIFNQTAAWLAADKSNYFTVVLDEAHMYRGSGGAEVAYLLRRLHARLGVGRDRVRYILTSASLGKSAEAVARMKSFAADLSGLGAGQREFTLIRGEQLKKSGERPATREEAAALARFDIAALHDSAINPGKAIQGFASLLEALGLEAMNVAGAEQVALRQAVYEWLQSFGPASLVANLVTAHPQKLRAVAALAFPGAPDAEAAMEATLALMSFAKERDSGRVFAPVRSHLFFRGIAGIYACTDANCSARDPSIPSGPLGKLYSEPMLKCECGARVYEVLTHRDCGAAFIRGYIQDQFGMFLWHQPSSGLWGTGGLMEAHFLVEVDRRAAGTHGRMEGAQVWLHKATGRLVLTPPAEAELGQYLALLRPDGAVPISGQQALSFNCECPVCTRRWRTGSTKIMDLATKGEAPFAQLVRTQVELQPITHPKTDSSPNGGRKSLLFSDGRQKAARLARDIPREIENDVFRQLLLLAAKELRGLGREATLGDHIYVALLHVLAKNALLLFDGADRERLQRDVLDHRRHYLGELRDALDESPPAKPPRFSSLLLRHLGSPFYSLSALTLAHVVPIARLRRQIVADLPGMDEAHLRAVWTAWIQSFASDFAVDADLPQGVRSQAAGYPIGGGLDRNGGFSARQQAFLRARVPELDRIFDTLTALLCQARPGSPGFFIVPRFLALELASDQHDWYQCGQCATVSPVEWWGHCPNCLAGEVTAVRPGATQYLRARKAFFRDPVNEILEGKASPFNLSVEEHTAQLSYRDVDDSTTTIEEFERRFRDILVERNDTSIDVLSSTTTMEVGIDIGSLIAVGLRNVPPLRQNYQQRAGRAGRRGSAVSTVVTYAQNSPHDNHYFGNPEPIISGEPTLPGVDTANPKIVERHIRAQLIQAYFHSQPLNSASGDVFSVLGETMDFYNGTGPFSLSAFNDWLSGSQAVEACYTAMRQWLPASFRKSPSDVATEFVACLEQVRPRAAHELDPADERLIEFLFDRGFLPSYAFPRDLCALQIERSERRGNFTQPKIIQRPQQGLNVALSEYAPGRLVVVDKKTYRVGTVAANGSTAVVDRAVRLFDERRYYVHCPECEYTSGFRIAAPVGEQCPLCRTAVLQAASVIEPQVVFPEGRGEVDEFDDEQTFTNATSAQLSVPAESSAFDLQKLGVHCEIGFARTQQLVMVNKGEEDAGQYVGFLICNRCGKAASDPQRVGPHERDYYLSTRAPGRCTGQFEQVYLGYGFASDVLIVRLPMSSPLRFDPVRTTEREPISNALQSLAEAFVLGISQELDIDIREINAGFRFVRVGEKHFADIFVYDTLSGGAGYATQAAELFEAVMTNAEALLSRCTCSASCDKCLRHYGNRFHHAILDRHLGLDLLRYARDGYIPVAPSHDEQRATLQPLKDMMLLAGWSGDPSVAAPYVVEHKGRRVQLFSFPSLVEPVHYGFEPTANRFAFSAFELARDLPGAYGEVA

SEQ ID NO: 23994 - protein, 400 aa, Burkholderia thailandensis
MKTGLVVSLPGNEARLKRKVRAHFKRLGFLKAPDGTLMPPNLDKQSYRDMHAHQRDSRLNDNRAWIANRSARLIQHFASGAELDVERIRPRIEVVRSGTWQGDLFRFATYFWRIPISEGYGRRMRFLVWDEHHEKVMGLFALGDAVFNLRARDEFIGWDHHRRADAMVNLMDAYALGAVPPYNMLLGGKLIASLIRSQDVVDTFQAKYHDSVGVISGQSKHAKLVAVTTTSALGRSSLYNRLKISGQSIFEPIGSTSGWGHFHISDELFSDLRDYLRSLDHHYADSHGYGQGPNYRLRLIRKALGLLGLDPDMARHGLTREVFFCSLASNALQFLRGEHKRARYGHLPTVAQMGEAAKLRWVIPRAERMPEFRTWRSEQFLRELDGTGERMQRRRLEQVG

SEQ ID NO: 23995 - protein, 211 aa, Burkholderia thailandensis
MAVARVIEQSDEWVRLEEFSPGEQEFTVAVDGDEQMIIRTEHCALFRPGGIAISTDEVTWDLCTDPPLAGSELLRHELTIDCENDRIATHLARLNDGWLLEKTRLLSPAGSPKNLYAGGFGELRGIVQTSQQEPEKQGEKNAAIKQLGGALNWLEHLVARSFGADGARRVKSYLADPTPANLRRLGPIMTSRLMPYIRAAQHQQQERTEGN

SEQ ID NO: 23996 - protein, 1752 aa, Burkholderia thailandensis
MSEPKIYSARAVFEGMKGTLHRYLEAQYHIWDEGLIEARKRLLESEGVTFQEPRIEATPFYATGSTYSKMQIPAAAKAVLELAAKHAGTGIPERPYKHQADALESFLGRGEEIIVATGTGSGKTECFLMPILGSLAAESSERPESWLNPGCRALLLYPMNALVNDQLSRLRRLMGQRDVAEYIRGRRLGRATFGMYTSRTPYPGVTSRARDQSRLRPLVQHAYLDLPPDAKERLDREGKWPTKDLDGFIASSFVTGANDSEMLSRGEMQARCPDLLITNYSMLEYMLLRPIERSIFNQTAAWLAADKSNYFTVVLDEAHMYRGSGGAEVAYLLRRLHARLGVGRDRVRYILTSASLGKSAEAVARMKSFAADLSGLGASQREFTLIRGEQLKKSGERPATREEAAALARFDIAALLDSAINPCKAIQGFASLLEALGQEAMKTAGDEQVALQQAVYEWLQSFGPASLVANLVTAHPQKLRAVAALAFPGSPHAEAAMEATLALMSFAKERDSGRVFAPVRSHLFFRGIAGIYACTDASCSARDPSISSGTLGKLYSEPMLKCECGARVYEVLTHRDCGAAFIRGYIQDQFGMFLWHQPSSGLWGTGGLMEAHFLVEVERRAVGTHGRMEGAHVWLHKATGRLVLAPPAEAERGQYLALLRPDGAVPISGQQALSFNCECPVCTRRWRAGSTKIMDLATKGEAPFAQLVRTQVELQPITHPKTDSSPNGGRKSLLFSDGRQKAARLARDIPREIENDVFRQLLLLAARELRGLGREATLGDHIYVALLHVLAKNALLLFDGADRERLQRDVLDHRRHYLGELRDALDESPPAKPPRFSSLLLRHLGSPFYSLSALTLAHVVPIARLRRQIVAALPGMEEAHLRAVWTAWIQSFASDFAVDADLPQGVRSQAAGYPIGGGLDRNGGFSARQQAFLRARVPELDRIFDTLTALLCQARPGSPGFFIVPRFLALELASDQHDWYQCGQCATVSPVEWWGHCPNCLAGEVTAVRPGATQYLRARKAFFRDPVNEILEGKASPFNLSVEEHTAQLSYRDVDDSTTTIEEFERRFRDILVERNDTSIDVLSSTTTMEVGIDIGSLIAVGLRNVPPLRQNYQQRAGRAGRRGSAVSTVVTYAQNSPHDNHYFGNPEPIISGEPTLPGVDTANPKIVERHIRAQLIQAYFHSQPLNSASGDVFSVLGETMDFYNGTGPFSLSAFNDWLSGSQAVQACYTAMRQWLPASFRKSPSDVATEFVARLEQVRPRAAHELDPADERLIEFLFDRGFLPSYAFPRDLCALQIEGLERRGNFTQPKIVQRPQQGLNVALSEYAPGRLVVVDKKTYRVGTVAANGSTAVVDRAQRLFDERRYYVHCPECEYTSGFRITAPVGEQCPLCRTAVLQATSVIEPQVVFPEGRGEVDEFDDEQTFTNATSAQLSVPAESSAFDLRELGVHCEIGFARTQQLVMVNKGEEDAGQYVGFLICNRCGKAASDPQRVGPHERDYYLSTRAPGRCTGQFEQVYLGYGFASDVLIVRLPMSPPLRFDPVRTTEREPISNALQSLAEAFVLGISQELDLDIREINAGFRFVRVGEQHFADIFVYDTLSGGAGYATQAAELFEAVMTNAEALLSRCTCSASCDKCLRHYGNRFHHAILDRHLALDLLRYARDGYVPVAPSHDDQRATLQPLKDMMLLAGWSEDPSVAAPYTVEHQGRRVQLFSFPSLVDPVHYGFQPAANRFAFSAFELARDLPGAYGEVA

SEQ ID NO: 23997 - protein, 400 aa, Burkholderia ubonensis
MKTGLVISLPGNEARLKRKVRAHFKRLGFLKAPDGTLMPPNLDKQSYRDMHAHQRDSRLNDNRAWIANRSARLIQHFASGAELDVERIRPRIEVVRSGTWQGDLFRFATYFWRIPISEGYGRRMRFLVWDDHHEKVMGLFALGDAVFNLRARDEFIGWDHHRRADAMVNLMDAYALGAVPPYNMLLGGKLVASLIRSQDVVDTFQAKYHDSVGVISGQSKHAKLVAVTTTSALGRSSLYNRLKISGQSIFEPIGSTSGWGHFHISDELFSDLRDYLRSLDHHYADSHGYGQGPNYRLRLIRKALGLLGLDPDMARHGLTREVFFCSLASNALQFLRGEHKRARYGHLPTVAQMGEAAKLRWVIPRAERMPEFRTWRSEQFLRELDGTGGRMQRRRLEQVG

SEQ ID NO: 23998 - protein, 211 aa, Burkholderia ubonensis
MAVARVIEQSDEWVRLEEFSPGEQEFTVAVDGDEQMIIRTEHCALFRPGGIAISTDEVTWDLCADPPLAGSELLRHELTIDCENDRIAMHLARFNDGWVLEKTRLLSPAGSPKSIYAGGFGELRGIVQTSQQEPEEQGDKNAATKQLGAALNWLDHLVARSFGADGARRVRSYLADPTPANLRRLGPIMTSRLMPYIRAAQHQQQERTEGN

SEQ ID NO: 23999 - protein, 841 aa, Burkholderia ubonensis
MLEWGAADDELRRFFADCRVQLIQRGAKVQNPPRGKSARVRMLAQGLPPATDRLVQRWFNQHLTMLDPKPASDLVAELRLYEEMGESPPEDEAKRLARSCLVHLFSSDPPADLVSFLRPAQAGNAAEPSEAQAEPVNGQSSDAFPVALGQALVALAEGRDPDEYLSSLSSTTASFVAGLQAVRSGREDEAKIALEALDHEPEVRALLLEYAARSASARTGNAVRGLQMLRFASPDEAFSFDFHRDEVLAVCTRDYPETTVFLHPFAIRAADGSWIDLSNDTDCQKLFYTSGDLIAFPGRDTPRQPKRGEIGIWRVAENKGANTGHRTNFHIASEMTPVYEVRDVPFPSTDYDSVREYIKHQFEQGEVLLATKPLFVLRDQLVVGCPPGKDLSRDEGFESGLPCWQTLSACRFEGRVLVPGPLPPPGTYECEALGTSLRKLFAKGEWRTDKPTKALARKLQELIASGEPGLSSARVARLRAELSFIDQHEGAMDALLEEIMRDPSISARVDEQVNSRVETLVEQQEQLKNSVQQLEQKKRDLQEQQRKAERDQKAVAPAIAKAIRGAFDKARSDALGTLGQVAVFKALIDELIERPAAPGGGAGPAHPDPTYAGFRPAASVVRLPHGGPLPVIETLRALGVTPKSARAIELVGQMAHQCGLILIIDGLAGRLAAEVWLSGNETSGKVFECGFGEVEDHQIRSIVADAPETLAILDANLSPLDLYARPLIDAVQRRLAGIDGGTFATRILMSVSDDTASLPVPATVESLSLRVSLDRIPMFAQDNEVARQLDEIDSTDTSAGWFARIWKPARPRVLSHLRSVPIEDVAFIFAALEAAEIKGTD

SEQ ID NO: 24000 - protein, 1752 aa, Burkholderia ubonensis
MSEPKIYSARAVFEGMKGTLHRYLEAQYHIWDEGLIEARKRLLESEGVTFQEPRIEATPFYATGSTYSQMQIPAAAKAVLELAAKHAGTGIPERPYKHQADALESFLGRGEEIIVATGTGSGKTECFLMPILGSLAAESSERPESWLNPGCRALLLYPMNALVNDQLSRLRRLMGQRDVAEYIRGRRLGRATFGMYTSRTPYPGVTSRARDQSRLRPLVQHAYLDLPPDARERLDREGKWPTKDLDGFIASSFVTGANDSEMLSRGEMQARCPDLLITNYSMLEYMLLRPIERSIFNQTAAWLAADKSNYFTVVLDEAHMYRGSGGAEVAYLLRRLHARLGVGRDRVRYILTSASLGKSPEAVARMKSFAADLSGLGASQREFTLIRGEQLKKSGERPATREEAAALARFDIAALLDSAINPGKAIQGFASLLEALGQEAMKAAGDEQIALQHTVYKWLQSFGPASFVANLVTAHPQKLRAVAALAFPGAPDAEAAMEATLALMSFAKERDSGRVFAPVRSHLFFRGIAGIYACTDASCSARDPSISSGTLGKLYSEPMLKCECGARVYEVLTHRDCGAAFIRGYIQDQFGMFLWHQPSSGLWGTGGLMEAHFLVEVERRAAGTHGRMEGAHVWLHKATGRLVLAPPAEAERGQYLALLRPDGAVPISGQQALSFNCECPVCTRRWRAGSTKIMDLATKGEAPFAQLVRTQVELQPITHPKTDSSPNGGRKSLLFSDGRQKAARLARDIPREIENDVFRQLLLLAARELRGLGREATLGDHIYVALLHVLAKNALLLFDGADRERLQRDVLDHRRHYLGELRDALDESPPAKPPRFSSLLLRHLGSPFYSLSALTLAHVVPIARVRRQIVAALPGMDEAHLRAVWTAWIQSFASDFAVDADLPQGVRSQAAGYPIGGGLDRNGGFSARQQAFLRARVPELDRIFDTLTALLCQARPGSPGFFIVPRFLALELASDQHDWYQCGQCATVSPVEWWGHCPNCLAGEVAAVRPGATQYLRARKAFFRDPVNEILEGKASPFNLSVEEHTAQLSYRDVDDSTTTIEEFERRFRDILVERNDTSIDVLSSTTTMEVGIDIGSLIAVGLRNVPPLRQNYQQRAGRAGRRGSAVSTVVTYAQNSPHDNHYFGNPEPIISGEPTLPGVDIANPKIVERHIRAQLIQAYFHSQPLNSASGDVFSVLGETMDFYTGTGPFSLSAFNDWLSGSQAVQACYTAMRQWLPASFGKSPSDVATEFVARLEQVRPRAAHELDPADERLIEFLFDRGFLPSYAFPRDLCALQIEGLERRGNFTQPKIVQRPQQGLNVALSEYAPGRLVVVDKKTYRVGTVAANGSTAVVDRAQRLFDERRYYVHCPECEYTSGFKIAEPVGEQCPLCRTAVLQATSVIEPQVVFPEGRGEVDEFDDEQTFTNATSAQLSVPAESSAFDLRKLGVHCEIGFARTQQLVMVNRGEEDAGQYVGFLICNRCGKAASDPQRVGPHERDYYLSTRAPGRCTGQFEQVYLGYGFASDVLIVRLPMSPPLRFDPVRTTEREPISNALQSLAEAFVLGISQELDIDIREINAGFRFVRVGEKHFADIFVYDTLSGGAGYATQAAELFEAVVTNAEALLSRCTCSASCDKCLRHYGNRFHHAILDRHLALDLLRYARDGYVPVAPSHDEQRATLQPLKDMMLLAGWSQDPSVAAPYAVEHQGRRVQLFSFPSLVDPVHYGFQPTANRFAFSAFELARDLPGAFGEVA

SEQ ID NO: 24001 - protein, 400 aa, Burkholderia ubonensis; identical to SEQ ID NO: 23997

SEQ ID NO: 24002 - protein, 211 aa, Burkholderia ubonensis; identical to SEQ ID NO: 23998

SEQ ID NO: 24003 - protein, 1753 aa, Burkholderia ubonensis
MSEPKIYSARAVFEGMKGTLHRYLEAQYHIWDEGLIEARKRLLESEGVTFQEPRIEATPFYATGSTYSQMQIPAAAKAVLELAAKHAGTGIPERPYKHQADALESFLGRGEEIIVATGTGSGKTECFLMPILGSLAAESSERPESWLNPGCRALLLYPMNALVNDQLSRLRRLMGQRDVAEYIRGRRLGRATFGMYTSRTPYPGVTSRARDQSRLRPLVQHAYLDLPPDARERLDREGKWPTKDLDGFIASSFVTGANDSEMLSRGEMQARCPDLLITNYSMLEYMLLRPIERSIFNQTAAWLAADKSNYFTVVLDEAHMYRGSGGAEVAYLLRRLHARLGVGRDRVRYILTSASLGKSPEAVARMKSFAADLSGLGASQREFTLIRGEQLKKSGERPATREEAAALARFDIAALLDSAINPGKAIQGFASLLEALGQEAMKAAGDEQIALQHTVYKWLQSFGPASFVANLVTAHPQKLRAVAALAFPGAPDAEAAMEATLALMSFAKERDSGRVFAPVRSHLFFRGIAGIYACTDASCSARDPSISSGTLGKLYSEPMLKCECGARVYEVLTHRDCGAAFIRGYIQDQFGMFLWHQPSSGLWGTGGLMEAHFLVEVERRAAGTHGRMEGAHVWLHKATGRLVLAPPAEAERGQYLALLRPDGAVPISGQQALSFNCECPVCTRRWRAGSTKIMDLATKGEAPFAQLVRTQVELQPITHPKTDSSPNGGRKSLLFSDGRQKAARLARDIPREIENDVFRQLLLLAARELRGLGREATLGDHIYVALLHVLAKNALLLFDGADRERLQRDVLDHRRHYLGELRDALDESPPAKPPRFSSLLLRHLGSPFYSLSALTLAHVVPIARVRRQIVAALPGMDEAHLRAVWTAWIQSFASDFAVDADLPQGVRSQAAGYPIGGGLDRNGGFSARQQAFLRARVPELDRIFDTLTALLCQARPGSPGFFIVPRFLALELASDQHDWYQCGQCATVSPVEWWGHCPNCLAGEVAAVRPGATQYLRARKAFFRDPVNEILEGKASPFNLSVEEHTAQLSYRDVDDSTTTIEEFERRFRDILVERNDTSIDVLSSTTTMEVGIDIGSLIAVGLRRNVPPLRQNYQQRAGRAGRRGSAVSTVVTYAQNSPHDNHYFGNPEPIISGEPTLPGVDIANPKIVERHIRAQLIQAYFHSQPLNSASGDVFSVLGETMDFYTGTGPFSLSAFNDWLSGSQAVQACYTAMRQWLPASFGKSPSDVATEFVARLEQVRPRAAHELDPADERLIEFLFDRGFLPSYAFPRDLCALQIEGLERRGNFTQPKIVQRPQQGLNVALSEYAPGRLVVVDKKTYRVGTVAANGSTAVVDRAQRLFDERRYYVHCPECEYTSGFKIAEPVGEQCPLCRTAVLQATSVIEPQVVFPEGRGEVDEFDDEQTFTNATSAQLSVPAESSAFDLRKLGVHCEIGFARTQQLVMVNRGEEDAGQYVGFLICNRCGKAASDPQRVGPHERDYYLSTRAPGRCTGQFEQVYLGYGFASDVLIVRLPMSPPLRFDPVRTTEREPISNALQSLAEAFVLGISQELDIDIREINAGFRFVRVGEKHFADIFVYDTLSGGAGYATQAAELFEAVVTNAEALLSRCTCSASCDKCLRHYGNRFHHAILDRHLALDLLRYARDGYVPVAPSHDEQRATLQPLKDMMLLAGWSQDPSVAAPYAVEHQGRRVQLFSFPSLVDPVHYGFQPTANRFAFSAFELARDLPGAFGEVA

SEQ ID NO: 24004 - protein, 401 aa, Candidatus Competibacter denitrificans Run_A_D11
MQRQRTKASVIPVFTLEATLKRKIRLHFTRLGFSKRPDGTLVCPASSKDSIRQLHHIQRDERIESATHLLSEFLPGALRYFASGSEIDPAMIRLSLIRVEANTFESSLFRTAALTWSVPVSNGYGRRLRYLVWDDGHDRLAGIFALGDPVFNLSVRDDLIGWTSSERSSRLVNILDAYVLGAVPPYNMLLGGKAIACLVRSRDIYDAFASTYGSTTGIISGEEKSARLLAVTTSSSMGRSSVYNRLKLDGVSYFESIGYTVGWGHFHITDELFEQMREYLRLSKHPYADHHHFGEGPNWRLRTIRVALKQLGINEAVLRHGIRREVFFCQLAENARKILATGKGKPDLSTLKTVDEISEMARRRWIEPRALRREDYKSWSRDDIPRLIRGLPTGMSKVRTA

SEQ ID NO: 24005 - protein, 359 aa, Candidatus Competibacter denitrificans Run_A_D11
MTGIVMLSRADSLQCVARSLGLPGPANLDNALIAQSLRRTVFIAAPCSARVACALVVDALRPLVDDPEELRMRVDDVIDSLIAMGDLLEMRSEITGETNLVLRPAPPAFVQRRDGTFIVLGVAGDEITPSQAQDFSLLYRPSGLRTLAPPDAQPCRRILLDLGLIELPMPIWLHAPATVTAKEFVRSWVAKLPDKPHPEKIENLEVLDTSVTTSYYKRRWRPLNERHAGIFVSRRPQRYGANLWSLTEVQDGLVHRFIDIHPRDVRFRDCDEAWRLQAALDTQAGTPQRVKVEHAGEKAVVSFTSPLPTWAVRRLSLIGERVTPPRALLGFALPSQNCEDELRWLEKTLWLARDQGGTA

SEQ ID NO: 24006 - protein, 1842 aa, Candidatus Competibacter denitrificans Run_A_D11
MTTATIQQTIDDLRLTLTHYIEATYHISHPVLVDQRRELLKQIGGIYQTPYLESTPRYQSARPYTEIDNLPSAVLEALRALSDTGAGKPIIYNRPYLHQLEALQEILINNRNLMIMTGTGSGKTESFLLPILGKLAIEARDRPQGFLRYNAVRALVLYPMNALVNDQLGRLRTMFGDPRTVALFENWAKRPALFARYTSRTPYAGLRTAKKDGNRLASIGEFFGEIEDAKRRYEQNSSGDEERRAVELFSTLKKRGKWPAKESVSDWLGKAPTPWAKRAIRRPHDAELLTRHEVHASPPDLLITNYSMLEYMMMRPIERRVFDSTKAWLEACPNEKFLVVLDEAHLYRGAQGAEVGLLMRRLRERLGVPAERFQVICSTASFSEEGKKNAGTFGAQLSGVPTESFVPIRGELLLRSPAVTGTAADAAVLAAVDLDQFYSAEPKQQLAAIESFLAFRGLPSQDDVDATLYMALRDYGPFNRLVNETMVAAVSLAELPVIVFDATVPADAAEKAASVLLALGSRAREKPGEASLLPCRIHSFFRGLPGLWACMDSDCPDASADTQSPAGRLFAQPHERCSCGAPVLEYFTCRHCGTSYARAYTNDVAQPRYLWAKQGEKIETASGLLEGLHPLDLLLEEPPAEDRAKAAYYDLVSGQLNPDELGEKYRTVFLAPEKPVSSDAQDSARGARPGQFAPCACCGRSAGYGQSSVQDHQTKGDQPFQALLGSQLRIQPPGPQQQTSFAPLRGRKVLIFSDSRQVAARLAGTLQNYSLRDAIRALLPVGYEILRGDPDFSKTLVLNHAYLAVLVAAHKLGVRLRPQLGDAETLSEVEGASPGPAPAGLQLFHLHNSLSRCPQRLMQAIFDALKHTNMGLDLEALAIATVGEAPAHSAKITKLPNLPGVAETDEAKLAVCRAWLRCWTLDPGIWFSDMPCSWWNDRVTSHKGAFTAMNRVIVSAQARSVFTKQWLSTLMTIFTEQTSGGGHRLLASKLSLYFGGQWRRCNSCKSVHRSVGTVSTCIDCESPDVSDFDPDTDEVYRARRGFYRDPIALALHAQAPQLMTIIAAEHTAQLGAAQPDEAFSHAERHEIRFQDIDVAWRDSDRPGDPAIDVLSSTTTMEVGIDIGELSGVALRNMPPGRANYQQRAGRAGRRANAVATVVAFGSADSHDDHYFTDPGEMIRGSVIDPRLTLENPEIARRHLRAYLLQRYHEDRIPGPSPGADPNLFSVLGKVGDFKTYGSVLNRYDFAKWLEDHAQDLAQAADRWLPRELPTNDRHKLIAEMAMDVTATIDEAIDFRQGEDEEDKPVEDKEKSDDQAEVEITAEPDDNGRIVDPATDKLLDRLLYRGVVPRYAFPTDVVAFHVFNRDQSTPFRPVIDYAPTQGLTLALSQYAPNKQLWINGKQYTSKAVYSPYPNDRWIAWGKRKLYFECNVCSHAKTEVYVKERENATENCPACNSSSSFGPARVWFRPVGFAHPINTPPETEPDAPNETARATRAKLVMQTPKPDKGWVQVSDRVRAFRAREFLLVSNTGIDGDGYDYCLACGRIESSAAPDELLSQPHARPFRDNKDDPCPGGAAKRHVMLGNDFKTDIALFSLPLTDPFRLLPGSIEAESALRTVCEALAKAACQTLDIEPGEVLAEYRPALTENGTSGHEVEIFLYDTLSGGAGFSTEFVVRASELFERAQSLLASCPEGCDASCYRCLRSFRNRMEHSLLDRKLGIQLLEHALNGGYPAYPPERAHRSLDLLARDLERQYRAEFSFARNVLRNDVTAGIVLIPIVATRLATGAETWIALCSPLAPNIPSDLTLQKLSPQGLAILECANDLIIRRHLPDAILRLQSNLR

SEQ ID NO: 24007 - protein, 522 aa, Candidatus Magnetomorum sp. HK-1
MKYAINTRLNQTVPASDNISRYVSYVCPTCKKAVHFVSSVNKDTYIRIPHFAHNKGEGSTECEFYCPPNKGTQVNYLGQSKRNPVLKRKKPIFSRHLKIRISDFRWSLEAIIHLTRFTGLIRIEEGFQGTIEKEVEDKSFFKFNLAPNTDYSIEIDDRLTIPLPGLSENQINIFCDNGKHLTQSHKPLYWGSKYFFVWQKKIKKNIPKEILGKELLSLNEWECSEIVFPEQKNASIDQWIFDQLNRSMESLPDQEKITIIFPPENYFDDEHPLILGIYRESFEKPIQGELSITIRDKEIKPIKINQTSPVHINTESSNQSIESMTFNEEMYICPKLDLSKKNLNYPAVFLRTDQVCVEANDLKTIVKNIDTHKLKEIILPAKMPVSFIIDKEDTRMRQITIKPLKNELLENFKKRLLDKIIESLEDVSLSLDLNFENYGLIILLKQRKSKDEILLSNHIKRQIQWLNSMKLQQGWYGKGLPNTVNELKIYLKGHNQMLRPELEPHYRSMLMNFNKNNLKKRC

SEQ ID NO: 24008 - protein, 594 aa, Candidatus Magnetomorum sp. HK-1
MIGKNYPKEKVLYILEKPFEEWLAVFDKISEQYKRQWSHKFPSVKGFRDKHPSSYEPRFKQLVSIAKKKPYDEKLQGLILKELSVGWIISNDKFYKILENYKNDEDFRKEGQMVPPNSFLDIGCFYYLRKAEKENEVDLEDIKLYYEFGYFLKDPMIDMIIYDDAKPDFENQKIPGQFMFDFIKHYFTNAAIYADIKDIQKDVELTIDDFAEFMTDSLKEVKETLKNGLNQRKINDDFEIKIAPVNEKIQSIEQMMEKLKASFKTKQLVVKTAIPEKTAKSEKPEKTAKTDRIYTSIIHLTQIQIPEKLEITDSLDKLHLHMMKNLKAIGLIKIKARQLANEILAGLGAGSLIMFSGSLSRFLAETCAKSIAAKNEIQVLHIPVGLLDGYQFHQELSHCLDLALHSDYLTAIIFEGINLSAFECYGQTLRQIITNRLITNNDSYNHIACFATLAEGLAGLPLTKEFCELGPIFDTDLLGWGAKGISGKAHGGTISKTNWNHWINSCPKSEIPESLQTLFEEMSDVSQLWKISIRKTSQFLQKENPLESMGFAWLMQRAFCDEKNQNVLFQFCEENICDNKIDDRVVKMIKNLKV

SEQ ID NO: 24009 - protein, 351 aa, Candidatus Magnetomorum sp. HK-1
MQIISHKDTINIILQNMSLQTNAFTDNHHLKTIVAEYLRYILNDLCMTNENSIAPVYQKSLTNQVYRHLKTFFSNHEKQKDRLIKVILWQLLMIRDIAKLSGGFLLPAPIRAIQMPCSDYVLIVGGMETKKLSEIIGATVKIAGFARYIHKKSINDNTLKQNNILWQDYYSYLGNNGISDLNDWIQQKKKQAKMRLEQVSVDSFQIDVYHPKQKVHMSQNKRWIGIEKLQEHNDEMMLCRRIEGKRFSFFWGKLSHKKPYPLIRETSIHFKDVRKLQYGIDHYYKCPTEIIVKQLKDYYQISLKNRLPQSYQRIIMALTQAVNEKNLYFSKDFKNDIVYLLEKLGIHVREI

SEQ ID NO: 24010 - protein, 1795 aa, Candidatus Magnetomorum sp. HK-1
MKEKNMSEKYSVQNMVEALNSTFTAFLEMQYHIKDESLIRERHQMLTQGKNIISRLPFIEATPVYKQLKSFKNVDLNPIVKKTLIKLSTLNVGIYPKPYEHQVEALKAFFNDNKDLVISTGTGSGKTESFLMPILGKLAIEASERPNTAKLSGCRALLLYPLNALVNDQLGRLRKLFGNPEVAKIISGNCGRFFRFGAYNSRTPYPGQRSSAKDSQHMKTLFEDYYLNPIFLNRKEKLENMGKWPSKDLKAFYAKDLEAKKQYQSGKKAGELYTQYNWNDRLKTQSGDRELLMRHEMHTFCPDILITNYSMLEYMLMRPIERSIFQQTKSWLFSDPRNELILVIDEAHTYRGTGGAEVALLIRRLQSRLGVSRERIRFILTSASLGNEPDIITFANDLTGFPQESKSSIFHVIIGEKEKYMPGRNATINEAKALASFDINKFLNYTIDPKGAINSIEILSKQLGWSQNNMDSLHHYLFDQMNSFPPAKALIEKISKFPLEFKKLSESIFPKASASVQVKATSTLLSLCTFARRESDGRIFLPARLHLFYRGLPGLYACINPKCHCRLDQKGDSFILGRLYGISKNNCDCGGRVFELLTHQDCGSAFIRGYIHGSSGDFLLHEPSKNVGREITQELIEVHLLVEHLNQPSEADASKLFIDINTGKLIRGKLPEDPMSYLQAFIPNKAHPERIQGKMKISFDRCPICNRGLTQSPYKMMSFTTKGEGAFANLVKAQIIHQPPQKIEHKFAPNAGRKTLLFSDGRQKAARLALFIPREVELDSFRQVICLAWQKLQQLNREARLTKDLYIAFIAVVSDFHLQFFDQRDQQDLRQHIQHFEEDYDSDLQDVLEYGWEVTPPPKYYEALLRQLCHPFYSFQATTIGYVSPSKRAEKRLIKDFESIVNIPKQECLNITLSWINELLKEYAFNKSIPGIHRNRAANFSRLWGHSGIFRSSMKKILLNDLQINETSIIELQNILCKNLCNEADERYFLDPSNIRLTIDLERNWYHCQNCAYISPVIVAKQCPQCKSTNVNECHPSDSYIKARKRFFREPVLAALSGGHPRHITAEEHTAQLSQKDSGNLYATTEKHELRFQDILLDDREGPIDVLSCTTTMEVGVDIGSLIAVGLRNVPPQRENYQQRAGRTGRRGTAVSTVITYAQGGHHDSYYFHHPEKIIAGQVRKPVIDITNEKIVKRHVYAFLFQTFFHETIDKGKARVSKTSDLFSALGSTIDFFNENDHEPFNLKAFEKWIYFSQSFPENDLFHEILKWLPNIRLPAHIPNKRKWLEDIVQDLIKRLKLIFINKQESEGLLAFLFDQNFLPTYSFPRDLVSFMVQKKKNNKIEIKEQPQRNISLALSEFAPGRLVVINKTIYRSGGITSLKSTVKDTDQAEKLFASKQLKKYVHCTACSYVQDTFTVYNTIVKNIENCPICNGIIAESDMLIPEKFHPEKAKAIEEFDNDQEITYAGSAQFPVPVGEVDLGNWRPIGKKGQLIHALDRRLVIVNTGKGFDMDGGFEICVKCGATVPINSHLSLPKRHKRPYLLSKYEELCTGETRKVILGTTFLSDLLLIRIPIRKPFSTNMISSINRNALEDALRSLSETLLLAASRVLDVDPVEFKVGFRIVPNPKSKAVDGDIYLFDSLSGGAGYSDQAGFQIDEILDTALEILRECPSKCEHSCQDCLRHYGNQFWHDNLDRFLALSLLNYVMTGNLPKAEGFAEQRKQLSGLKRLLVLDGYQCIETDDCPLSLQYLGKMIDLSICPALMESKFNKNSSTINHYFLQRNLPGVYQMVKDLLK

SEQ ID NO: 24011 - protein, 632 aa, Candidatus Thiomargarita nelsonii
MNYKPYPKEKLTLILNKSDEELRTFFNQIQNNKHILNNKVLPNVHGFRAENIEGVPIRFRNLLREAKGTSSKNMNAQKRLQFIWDSWINSHSTLQEVLENYDNSADFPEDGTVIPANTSLDIGGFTYLAEASRSHNLSKALIQRFYEFGYFQSDYNIDFIINSIKEPSNEIRETELTLDKLLPKLPQVLHDLQVRVNRIPSRTEPALLKQIVETHLVEVKAATQKVQLNAKTNTSDLKTLYDQVENLSQTLNVIKHQLDMTVSTVQLSELIDKVELIHQQMTEIPIKSEIDDLKQQFEQLKQELNEQEELFFNELEQHNSATITQTGLYTSQLKISAPPKILSKDELLSHLTDNLKAIGLIKGSAENLAKEILAGLAAGEFIVFSGSLAFQFAQLCTQAIAAKPPPTVIHIPIGLLNGQQFNEYLGRAIRKAKTEKHVCAIIIEGINCSALEIYAQALRQIITQRLLGQTDLAPHIVFFGTLVEGLATLPVPLELCELGPIFDTDVLGWRRQLKPITYKSGAISDQVWQSWRAIDNKLDSDFERELIDNVIFYPSQLWKICVQQAYYRLDILDDSVEESILNSLAFGWFIPRAAAAEQDWMEIEKWLLEHVSSEDTHETRIGKLLRPHCENK

SEQ ID NO: 24012 - protein, 359 aa, Candidatus Thiomargarita nelsonii
MRVIHNKQEMLKKLIHNIGLAPTLIKKSPSILMDQLIAEYLRHALYTLTHGSTTVQPVFVTKLTNQVRCQLTPLWPDIFQNANADDPIRRVLEQLKQVGDVAELGDGYWLPTPLRLVRLLNNRQILLIGGVDTKSLITRFGDIVQPMGFVRRIKPSADIKHLINAGIDWQHFEDWVGETEKADIGIWTRNLLDEARKRLKPSGSDLTDFEVYMPCLSQTNLQYYRWISVQKLKKVPKEIVLCRFKQTFVTYCLGRLTGEKSVRLHRESELGQEIEIRKLLYGLDALYKCPTKAKFEQLNDKKGKLIFRSWLPATQRRLLLALGHEVSSRLSLSYEVSSDFQKDIFSQIQKLGIKIIEEK

SEQ ID NO: 24013 - protein, 1796 aa, Candidatus Thiomargarita nelsonii
MDITEDYSVQHVVEALKATLISYLEMQYHIKDTSLIKERRRLLDQEGTVFQRPFIESTPIYEQGTPYDKIDIPQPVKKILTQLTKFNVGIYPKPYRHQTEALKAFLTDKHDLIVATGTGSGKTESFLMPILGSLVLESLQRPKSTKKSGCRALLLYPMNALVNDQLSRLRRLFGNEKVAELLAQNRGRRVRFGAYNSRTPYPGPRSSTKDGQHIKPLFEEYYLNDEFVAKKDALEELGRWPSKDLEGFYALNKMEKAATNTERNKYHWDKRLKTQPNDRELLTRHEMQATCPDLLITNYSMLEYMLIRPVERDLFNQTKNWLAADKRNEFILVLDEAHMYRGTGGAEVALLIRRLQARLGIPRERMRCILTSASLGETDDAKVAVKKFAADLTGLTSKTQRQFKLITGVREKRRGAKVATVAEAQALADFDLKQFYDNYSTNDSKAAAIDSVLTLAKSLKWPTKKPTDLQQYLYDNLTGFGPAETLIKQVSGNAVEFTKLAQQLFPKQPTQTQATSTLLALCTFAQGLDKRVLAPMRLHLFYRGLPSLYACINPNCNQRLDNSEEKYLLGRLYTAPITHCDCGGRVYELLTHQDCGSAFIRAYIQGTQGDFLLHLPSGNVGQESVPPLDEIHILVEKTIHPNISYTPIWLDIKTGRIARKQPDKTNDFLKAYVPTTPPELVNGKLQITFSDCPVCTRNLERFRYKLSSLETKGEGTFANLVKTQVINQPPQKAESSKSPNAGRKSLLFSDGRQKAARLALYIPREVELDSFRQAICLAAQRLIKLRGEARPTRDLYVAFVAVALEFNLQFFDRDDQRDLRQHILTFRDDYEANLGDALGEPWDVTPPAKYQEALLRQLCHPYYSLQTTTIAYVEPSKRAQRLLNREIEKLGLDAEKANITIAWINDLLRDYAFDKTIYNSQRQKAAGYPRGRWGNTGKFRKILKQILLKHCGLDDKKVIKQLEDILRNKLCVEKNQLYLLDPNKLRLVVDLERDWYQCQMCAFISPVVVAKHCPQCGGSNVESLSPEHDYIQSRKRFWRDPVANALTQQTHPRHITAEEHTAQLSHKDVGKLYATTEKRELQFQDILLDKGEGAVDVLSCTTTMEVGVDIGALTAVGLRNVPPQRENYQQRAGRSGRRGSAVSTVITYAQGGHHDGYYFHHPDKIIAGDPRKPVVNVNNEKIAKRHIHAFLFQTFFHTTINQGKIKANPSSRLFSALGDTQDFFKGDNPVNLLAFETWVKQNVIESTGNLREQILEWLPDIEVPDRSQWLQKISETLLDRLNAVTLKESDAEELLNFLFDNGFLPMYAFPTDLCSFPIEEWTKTGIAIKEQPQQSIAKALSEYAPGRIVIVDKRSYRVGGVTSAAAKNSDLDKAAPLFKAKKLSKYVHCTQCSYVQDTFEDDNTPTLLECPVCHSSLKASEMLIPEVFRPEKGNEIQEYDRDQEWTYASSAQFPLPVAEDFDWKSIGEHGRFTQTSDRRLVIVNKGKELGTEEGFEICEKCGAAAPINTQIVLDANKHKRPYLLTKKMTDNEYCNGQLHQVLLGTVFRSDLLLIRISIESPFRTNMQSSVTRQVLEDALRTLSEALLLAASRTLDIDPTEFSAGFRIVPTKQDKAIEADVYLFDTLTGGAGYAEQAGQQLDEILKETLDLLEHCPNKECTHSCQDCLRHYANQYWHEQLDRYLATDLLRYMLTGMVPSIKAVSEQTKQLQALKRLLELDGYECHQDDKTPLLIKSNAHQVGTYPGLLDADNFQHPLRDDYQREKDIHLVNDYFLDRNLPGAYQALKNSFYMGESGR

SEQ ID NO: 24014 - protein, 409 aa, Chromobacterium violaceum
MPKGYTTVVRINPREANLKRKLREHLQSLGFTKSEEGALQAPGNGKDAIRSLHRAQREERFSANREFVSRKSGRLMRFFASGKEVEPEKISPVLERVSSGTLHGDLFRLAALSWSVPVSNGFGRRLRYLVWDENNGKLMGLIAIGDPVFNLAVRDKFIGWDSHDRSARLVNLMDAYVLGALPPYNALLGGKLIACLLRSRDLYDDFASVYGDTTGVISQEEKKARLLAITTTSSMGRSSVYNRLKLDGVQYLKPIGYTGGWGHFHIPDWLFVELRDYLRDIDHTYADQHRFGQGPNWRLRTTRAALTALGFKDDLLRHGIQREVFICQLAANASRILQAGKGQPDLTSLLSAKDIAEQAMERWMIPRSRCRPEYRDWTSNDLIGMFGNQAQILPTQIESAEIVKRASQL

SEQ ID NO: 24015 - protein, 555 aa, Chromobacterium violaceum
MEYAINKVTGRLESATEAKRWGQYLCPVCKAKVSHRSGAKRTPYFAHWPGWGSPDCENFVPGQYGHHTQGQASASGERRRMELRLLIPMGAERAGWSIELVLPPCHECRATVSLDVGGRIQTLDMRGMQGRRRVTVELSVAPYRIVSFSGKPDPSFVAGVERECPGLPTMGAAAFAALGRGELKGFPRTWELRGSETFALLWREPAEPGFPDELAVDRLSGRQGWNLALITIPDEPSPECTDWLRSFTRLPFAPPVPSIIPIWPFLTRNSSINEVECVRSGMVLLSAKMMPVGLRDQGPTMQVQSASAKLSVVGVERSPSFFALKPDGVGFVKVAEANTSDIEAFVSFSLHSKLPQKHPEVELAFTTPEGGRCIVPLHQRRCVELATEARMHRMGLEYLSMPRGAMGMLRVDGPTGRSVTALSSGCDAPPHCQHMRLPPPDVLVKLTSVLVDPTNHVEIEFGGFGRLRLAGSWISAAMGDGRKKLAPALRSRLLSFMLQLRLAVPTVVHEDDVALVGALIAARPELPLIPHYRSLVKEVLACGFELKYLGEGTPL

SEQ ID NO: 24016 - protein, 623 aa, Chromobacterium violaceum
MSYQYSQEAKERISALGQTAVVEFIDEIPQDLRRVFYSRLPRVQGFRPGTQAELKEKQKRLIGHLIHPEASQTFDWKNFAFLWEGWARLQFGDTFPQSDNVEPTADAGSTFLKGLVGSFPGAAREDMERLFIFSGFPDHPDVAVALERFRPASDIARDRMIDGLPVRLGEIESRLEVTKATAEDVVERIERLEATSASLAKNVEDASGGLGRSSNAVAELWAALDAESARSDRTEKLVDAIDTAGKKFAEATVVSDARTDALEQSMRALVARVDGWDRVATEVAALKSAITDFSARETDWAVATEAVNVLVERVAALEGILAGGNSGSVTKQRVRLLEHKPNGPFVDIHSIEKACVMVESNLLAAGITKGAAVATARQTVAALIAGQMVQFSGSLADLVADAVAAAIGGPTYHEWRVPVGLVSDEAASDCIEEVAESSGCLLLKGANLSAFEVYGAPVRDIVVRRQFDASSNGRLAVIASWAQGPAVFPNGGTLAELGPVFDTDTLPTRGVSAKLPKLTFGRLMKNSWGQVEGLDNNASKPAAGELGELLKEAGFEGGSLWERIVNLVYATLRAMPGGPLEVDLHSLLVSWAIPWAKATGGPAEEISRIAKRELAERRAEASV

SEQ ID NO: 24017 - protein, 350 aa, Chromobacterium violaceum
MEWQAVSRERAWNIVASGMRCRLTEEGLRISAVSECLRAVSHLCSAPEGGHGAWEPSASLRLTSMVRRRLALLWPDLADDGEDTRPGVMKVLDSLAELGDMVRLEGGRWLVAPAYAVQAGDGLAVLLGGGPMEVLPQTMAVSARAAGRVRLVETTACVGWADLWDADEWIGAPAEGLEAWSVRLLAETAARLTDAPNDMGETSAYLLREWVRLVDLPADKGGLLLCRSRIGQASSYFIGEFIRGRLRRLSAIGSPDARRLRFHLDAQSNRPIRVKASVSKGLAKLRLVRRLPEREARVLLLGWQVPVPEGEHPGVTYHVFPLEMLSIVRRAFEGLGILLDERIDERKGKR

SEQ ID NO: 24018 - protein, 1843 aa, Chromobacterium violaceum
MSVTSKKVEATGVHETARSLAENLRQYIEAQYHIRDEGLVRERHALLRKDTTIAQVPYVEATPVYKVGDPYGSLPIPKAAVDVLTQLAGMGIGLYPRPYEHQSQALASFLGDEAADLVVATGTGSGKTESFLMPVIGKLAIEGAERPESAVLPGCRAMLLYPMNALVNDQLARIRRLLGNPKAAGVLSKGRSKPVRFGSYTGRTPYPGRRSSVRDEHFIKPLFEEFYRKVAEKPAIQSELERIGRWPSKDLDAFYGHGLVQTKIYASGKKAGKQYIANNWGGRLNTQPGDRELMTRHEMQQNCPELLITNYSMLEYMLMRPIERGIFEQTRDWLKADPRNEFILVLDEAHMYRGAGGAEVALLIRRLCARLEIPRERMRCILTSASLGSGPTSVADGERFARDLTGLSETSPRRIRVIQGTPEPRPPSRVATCGEAEVLAAFDLGAFQNAANDLGSARAAASTLAVGLGWCVPPEGDHESFRNWLFESMTGFGPLEELITTVSGKAARLDALSEALFHGCPPDTAARAADALLALGSYARRSSDGRVLIPTRLHLFHRGLPGLHACVDPECSERLGGHAAPTILGRLHTKPLDQCGCSSKGRVYELLTHRDCGAAFIRGYVSTDMDFVWHQPSGPLSEGGTIDLIPIEILVEESVHPRSRHKDMWLHIPTGRLSPMCPPGASGYRKVYVPDKVAAGSEISFDECPVCMRRTQSSKDEPSKVMDHVTKGEAPFTTLVRTQMARQPASRSIDAKHPNGGRKVLIFSDGRQKAARLARDIPRDIELDVFRQAVALACVRLERIPQEPRPTQNLYLAFLSVLSDHDLPIFDGQDARKVTAARAEFERDCDSDLRQGLEDGFAPSEAPPARYRIALLKLLCSNYYSLSGTTVGFVEPVRTKLKNLKEDFKATGIVVGDEDVHALAVAWIDALLREFSFDPSLDPTIRCKAAGYFKPGWGSKGQFDRAFREALARRPGWGKPAVEAVEAAFRRQLASEKDGAWFLSPNSLRLRVDLSHVWAQCPDCTALMPLAFGEMICLACGGEGVRPVDPATSGYVAARKGFWRQPVQEALAPGSRLSNLSVEEHTAQLSNRDRSSVHATTELYELRFQDVLIEDSDRPIDVLSCTTTMEVGVDIGSLVAVALRNVPPQRENYQQRAGRAGRRGASVSTVVTYSQTGPHDSHYFLNPEHIVAGPPRTPEVKVDNAKIARRHVHAYLVQTFFHERMEQGGHGSGEKTSILEKALGPTREFFHGAQDTGLNLDGFGDWVSRRVLDAGGDLRVSIAAWLPPPLDTDGRTLGEWLADITEEFLANLRKLGADVPQPATSDGGIEGDETEGDENAGVKLEQEELLEFLFFHGLLPSYAFPTSLCSFLVEKGEKNAKGIWEIRTVQRPQQSISQALSEYAPGRLIVIDKKTYRSGGVFADLPTGEVNRARPLFTDTKRLVHCEACSFVRNPHKAQGGDNTCPVCGGELKEETMIQPEVFGPEGARELPEDDREQEVTFATMAQFPLPVDPEAFTFRPCGPNASFTHAADQRLVTVNRGKEGGHIGGFSVCVECGAASVFDQFSPDRGPHERPYRYLGPQGTPTRCSGEFRRVLLGHDFTTDLLLLRLRIAAPLVTDTADTVALRMLEDALHTIAEALRLAASRHRQLDLDPAEFGSGFRVVPALQDEARMLDLFLYDTLSGGAGYAEVAARNLPEILQATLGLLEGCTCDTSCTECLNHFHNQHIQGRLDRKLGASLLRYAVHGEEPYCSAPNVQAATLSQLCSSLELDGFRCSEGGEPEIPILVERDGHRMAMGCYPGLIGRPEFVHAVKDAHNIHGYLALNEYLLRSNMPDAHQRVRNLFR

SEQ ID NO: 24019 - protein, 531 aa, Clostridium bornimense
MRKAIHNYATGKQKEIDASEVNKIDGLKLFICPECGEKVRFVSGMKQLPHFKHYKKTEISPECEKRVDGFVKTYLYERIGLPLYIKRSNSSFELYISFPVLKDNLLDKLIEEKLYITIKDTDKYYENKQQKFAINRFLNDASTLLPINFIPKNNSNFIIDFSTSKYNEEILKYWSQYSEGFYKDNAIFSYGESGGKKIHRNDSIYTEKKYYMVSKNNLINIPPGMKKEYIGSLPINNLNYNVYTIQITPYDDIEFKRIAEYLLLNFKIGLLYCKPEIIPLWPPVVQKDSNFNLIHSNKDLICTVKTGNDVPKIYSYIEDKVTELFIPSFGDNCFKIKVYPNSNKFLSVDRKYIGNEVIFSNIHQELIYGKLNCILYDIDNTNNIININTEYTLSKKYVDLIAKSNNKLNIYHKTNYLYRKYELLNDKELRISNIQLNDELLFFNSYKLIGKICFVNKIISKKIIDSDLYHKLLLTSHTVKISIPIEIKKILILLSNYPMCYYLIKRYSDEGKIPIGTWYIIKQEFKEGLHE

SEQ ID NO: 24020 - protein, 299 aa, Clostridium bornimense
MNLNQKKNKIEKDIDNELKLFKDNIVHSVAMTGIIESIIPTSNNIEISSVQSDLCLIEDIDTMVNLEVRNDIDDLVDDLADNLRIMGVSNDYNYPLADIIIASIATNTSLIVNDSADELSDAISYVIDGKPSSKLYFPSNYNNLNQLIDRINSINSKVLLIEGVLDSLNINAYSILTKHCKNKLFIFTVNNSVDIKYIQNIVSNYSLFINTSNYLEVPTDNTLYKYKFDYNKIRNEYSADKLSDVYKVIKRNFGNDITLSNKSLVTLSKVLSMKNISIDFNNLIIKDYINSLKDGLMNE

SEQ ID NO: 24021 - protein, 340 aa, Clostridium bornimense
MNNIDLLSSVSKDLKILTYESEPVYQYRGRIIYSAISLLMLACTFDSESPFDKDTIGVSKRYLYNKSSNLLNEYLLLYSDAKQWFYPNSKCNPIEIIRTRLLQSGNLINVGFSTNVATQEPYLNQMIDGISRLYGYPLDFANGKMSGLTWIVKDNNVVEINNNENIINFTNNYLNSLRYTEKNVIEGYEFFNPHKQSSNMYNCWEDKPSLISEKYTLLREKVYDYTYNYNYYIKKEHNSSTFIYRIDELSVHERIPTKIMYGLRAIYKNPIKAYYEFHGDYIMIHLKAKLPLSEEISLYTLGWPCKSIDDEFCWLFTSDIWPYIKTILEGLNIIMEEYYG

SEQ ID NO: 24022 - protein, 1761 aa, Clostridium bornimense
MDKYTIESTHEALKNKMINYIKTIYLGKNEDLLEACNEELSKPGILFQEPYIEGNPAYLKIEGGIKNSPYITPEIKDVLLEMIKIDIGVFSSPYKHQIAALEGFCDNKDLFIATGTGSGKTECFMWPMVSSIVSEAINNKSTWQQEGVRALMLYPMNALVSDQLGRLRKMIGDDNKKFHNMFKKLTECERVPKFGMYTGRTPYAGEQNEKRDIELADTLTKELKLNNPDLKDNIKKELIKLGKYPSKINLESFVDNLRCGNHITDKYDTELITRQEMQKCCPDILITNYSMLEFMLIRSTEADIWNKTKKWLNLSPDNKLLFIIDEAHMYRGCSGGEVALLIRRLMHKLDIDRSKIRFIMTSASIPENSEKEILEFANNLSANEYTNNNFILLTGEKEKLQYENANDISASNFKDFDISSLQTKTGKGLSHEQIEAIKEFSCCAGYNLNTCDFSDNNAVQSWLYDQLKSSLPMIRIMEKCRGNATQFDNLAYIAFPNDDKRSAKKATSAFLAIAPLAKDKEEVLFPSRLHLMFRGLSGIYACSNPNCSEKHPTNNLNIGKVYINSSKSTCKCGGKIYELLNDRTCGALFFRGYLDTSEVGDKFVWNQKSELTDEFYKEVHFYIVQNNDIKDINRKKKIKICWINSITGKIFYDDSHANELNYLQVAYNEEENKENPTLYTFNSCPKCKKHKLKVTDFSTKGNEPFFNLVSEQLYIQPPTMFDESQIKQTPNAGRKVLLFSDSRQRAATLAKDLTRAADEDAMKKALSVAASELQSWAKKNNKQASMDLLYIVFLKIAYENNLRFFYGKDEDDLRKALEKMEKLYKRTNGNIDYDNKKSKFTHVPGLYKEQLLKQLCSNFRSLTDIGLCWLEPSDDDDLDDVEDSFNENNVNMSISDFKVFFAAWCNEILTDSYALGNDIEDDIRKNITGFDRFGVQLPLKLPDKYIKLLKNNGFTDDNIKVISENLEIFLANGNKNNSSYLNLSQIQLKYEEKHEWYKCNKCGRIFPFKLYDKCAICCNSTPKLMNSDDFEGVNFWRVPVIKALHGDKSVLMTRINTEEHTAQLSHKDQKEKMWSTTEDYEMKFQDIYIGNVKPVDVLSCTTTMEVGIDIGSLTAVGLRNVPPMRENYQQRAGRAGRRSAAISTIVTYTDNGPHDNYYFNNPEKIISGSPSLPWIDIKNEKLINRHLHVVDFAEFIMNNSEDINNLSINTFFDSYYEQFVDFLNNRKLTDKDITQLVPSKMDYVFNNYISVFVKDLETIRLKVSDFPENYKNSTGKDKSVLDVMLEEGVFPTYSFPRDVVGFYIEDYTGSKIEQKPEQSLDRAITEYAPGRIIVVDKKTYKSGGIYNFHSKFSTKNSYTPARHYFNSKDYCRSLFYCNNASCNWFGLKEPSENKCPFCGKSDVKSHVLVKPWGFSPQDGASIKESQAENEVSYAEEPCYSATPNDDDMKTCDGLFNIRFANRSDQPLIILNKGPQSKGFTVCKDCGAAIPGDDINKLKGIGKPFKHPNNKQRCYHSDNVIENVFLGHQFLTDMVVYEIALDPDKINISFDGLWIKSAAQTLSEALILSAGRLLDIDFKDIKSGYRMRYDENKTFIDIFIFDSLSSGAGYSSSLANRSIELFELTKETLISCKNNCDTACHDCLKHYWNQRIQDNLDRFAALDLLNWAMNNELSLPLTFTKQKELIKPLKELVELDTNIKLISKNNKFYIEHGNLLEEVYVYPAMWNEFDNRLSKNSINISDKIIKKALPKAYKKVISSLTR

SEQ ID NO: 24023 - protein, 674 aa, Clostridium novyi B str. ATCC 27606
MIKIETLNKDEKILMIEFLPINEVVKFLKLKKNIAKFAKELAGTRIDEKSSLLQKKLPKMFSDAIDSGDKITINFIQMCLHNKLLKINEHLEANIGSVEVIKNIIQNKKKENYMELIKIFEEKEDLKYILLVLKLNEIELKVRQKSLLNNSIEEFNYYKKVKSQVEKIQKEKFDIEYNKKIQLIEEKGQTLLKNQESIIKDLRCKILEKDKIIQEKNKEIKFKIKELNEEQKKYKKLKKKIELANEEIKKIKEVAKDNKVNYDLYIEREINRNKELEKTIEDQTIIINRLENDIEERYEQYSEKYLVRFQEEYDEFIQEKITLMKEVEDLNIEFNLLKSEISDLEQRKEISKKKLEEYDKLVNDFIENIDKEIVLSKLKSSILNVPQSNIQMETRKEKLYIRNSFKGDEILEISSIDEWSEILDHNLKSIGVRKDRDSWSDYILSVLASKIIPLIVGYKTRDIANCISSSYAGETPLIISLPSSYSDLNELIDIYHNCSSKVILIEGVIGQMNESLLLPLLKEYTESKETDKIIIMSCEDTNMVDLIPSYLFEYIAPIEIKDIRPVIQSNYINANNMDTLRKFKNSQLDINFSYKKLSRLFKNINNFNSYIFTRTLILGYLCEQMEYDNALVCLGICDLQFVIKDENIKEKIENNIENYENDFCEDFKTLIVGE

SEQ ID NO: 24024 - protein, 352 aa, Clostridium novyi B str. ATCC 27606
MKELINQIATDLAIYPYNSESNEEYGNRLIYCALVSWAKVQLLGASYTEISDIEKEYPYVSQRYISERLNFVLEGLVSTIPHSTNWLYINNDESNLKELVKYILQRLIFCYQISKTIRTSWVTMSPQKIVYFKNYELLLGGTEWNSSINGACSIGLGVWRKKQFKKDINYKQVFNIPNCNLKDYYKSLEKNVSWKESELDYDYEYFNAGKGIWHNKAWGKLNKKYIEKGISLIRKKDENYNKYNYFLLYYKNHIFLIYSLDQWYYKEKEISRIMYALDYYRGKPAQFKAKQNSEVVQVHCHSQLPNAENRILLMASWPKKTYNDVYYREIPIHIWSDVKEIFNGLGIEVVFE

SEQ ID NO: 24025 - protein, 1767 aa, Clostridium novyi B str. ATCC 27606
MNEQGIRKIHKHLKERLENYIKAQYFAENDLLLEATESILKKEGVLFQEPFIEATQNYKIEVNGFENSNLDKDIKKYLKSLIKYKLGVFDTPFVHQVKALEAYHAGKDLLVTTGTGSGKTECFLWPILTEILKQVSNNLNNWEQEGIRTLILYPMNALVSDQLGRIRNIIGDKDDAYMTLLKKESNENIRRIRFGMYTGRTSYPGSENKNKNKNLAKLLDKTYLNCKEKVYNQLKKIGRIPTKDLKSFVKNLHEGKQITGENDAELLTRNEMQNICPDILITNYSMLEYMLMRPIEQCIWEKTRKWLKCSKDNKFLLVIDEAHMYRGAAGGEVSLLIRRLMDKLDISRDQIRCILTSASVPDNKEKELREFACGLTGTNLENDNFEIIKGEKNNLSLHKKGNKEDVKRILQLNYNKLQGSDEEIKEQIAILTQLFGWGEVNGNYKNWIYDKLCKYPPMLELINVCSGKGVAFKEIAKNIFEGVSQEEAEAATEILLVLGTLACSKEEKVLLPARVHLLFRGINGIYACINPECEDNHEVMGIKIGHIDHIPRFTCPKCGGRVFELVADRRCGTLFLRAFKEKDDVGNSTFLWQENSKLIKTPNEIHLWLAPKGRTSIFKEGVKHSKAKEESKFGYINSRTGMLYYTEEFSNKKGFIKVLIPRSYDKERKSYTFKMCPNCGREKNKLTPFKVRGNEPFANLVTEQLINQPVKDMNLKNGGKKVLLFSDSRQRAATLARDLTIATDGDAGRQAIFMAQKELEKKYRDDQKPISILYYAFLKVVEENNISFFYGEEKQEFIKQINNYKEMYLGKKRLNYERMEKRLGNPPEMFYQLFLKNISDSYRSFNNFCLGQIVILEKGEEAEELEEDILEKIESKTGLDIEIIRDIYNAWIQNILVKDIAVFPSISDDVRNSILSFDKGDLGISEDCKMPKYIKKILKENNITESQIEQLSKMFILFTDTYKGSNTVHNNRYLLPGNLTLKTNENGKWFRCNRCSGTSTFTLFDSCVYCGSKDYLSEVSQKDLTRYDFWRKPVIEATKGRKIRNFVTNEHTAQLSHKDQLNDVWTTTEEYEMRFRDIVTDEESEPIDILSCTTTMEVGIDIGSLTAVGLRNIPPMRENYQQRAGRAGRKGSAVSTIVTYTEDGPHDAWYFNNPKEIISGDPRTPWIDYTNKKLIKRHLNLILLQEFFEPHSISIEDLEGVRFFSKEYELNYLEFINWLQRKSLLSKERRNILIPNEVTIDWEKYKKYVIQQIEKIQLKVNKNPVIYKIAKKNKANDEKYTYSSLLDILFTEGFLPTYSFPRDIVHFWIENEYGKVVESPERSIDIAISEYAPGRMLVVNKKSYISGGLYDYYTKYDKNYLYNAAEPWLKLNEYNKNIYCCENDRCGWFGLENKTGICPLCGAHLKEEILVKPWGFAAREGRNIPEIRDNQEYSISSKPSYTSVYEDTSNMKSISKTGLIRMENREDQQLILMNKGPNDEGFDLCTKCGAIDPHIVLDRDKKERKRPYKNPYIGKKDMQSCSHMRQNILLGYDILTDMLVLELKLQQEYINIENENLNIWVIPAVATLSEAIVLAASKVLDIEFSDLKVGYRLRYGSDHIFADIYIYDSLSSGAGYSSRLAGLIEQVMDEAKKRLENCDCETSCPNCLQNFWNQSIKQNLDRKAGLQLLNWIREGILDKETSIEEEEKYIKTLNEIVMLQEKQGEIIKKNDDYWININGVIKKVKIYPAMCSLNKIDVEKNTILIPDRLFKVSIADVWNIVEKSVRA

SEQ ID NO: 24026 - protein, 478 aa, Clostridium sp. D5
MDKAFDVVFQSEVDATVIAKTSYRSYGERFRYQCLCCGEEVYLAAAESTEKSPHFRHRRGNNDIDCEQYLGQPGAIESYVSIRRQRNKARIGFCFNIDRLTFEMSLSLSSKEIEFYSQTQTKLNLYSKYYSQPFFGIPISKTVLRPNIANYFTITEYSNDYYASIDDGNMKYSYPEVMKKGGKLNVYRVNQLDEHYKRNTSDILYMDTEYVVISESEDNIKELISLQGVQTIDESFSFITLGKTFFALRLVIKYVNSDLKLYFLKHDCQIESSENFDILWPPVTLIDSTAVTSDSEVYVISSFELIPHGNVDIDGNKIEEIDCDISKISIDDKVAIYEKNVDIVIQKAYQVTFEYFHVEPEIIYTDKFIVPDDYEYFCFDISGCTRLNVGSTVYLAKEDQIIGYKNGHVKTYIHSMDGPLQSIEERLRDILKYHPQIEPFNPDDYMDVDVNETILEYLETCYRTGMINSVVKRFIMEK

SEQ ID NO: 24027 - protein, 483 aa, Clostridium sp. D5
MKKKGAEIDKKVEELNDKFLEEEKKTERLRKNALDMKAALEEKDSIIWTERKRNSELADEIESLRQKLEMAEKERAKKASEFIEKTSLIIEQSESREKEIEDLQKSLEEADCIITEYREKIASSKDGSEAIKAVNRDLEAQILVFRRRILEMEEKVADLLAEKKDLDILIQQLREENVALNAHNDELQSAVQELEVVVKNMPLSVENVCIETKKALLYTIPKCPVDMDDFDECFSYNFTNIGFDKTDEAANELVDYVKQTVFRGVPLLIKRGPGINLANCLANTIYGQSHARVFSYKSGMKLSEIEKLLADNNDRVICIDGFIGTCNEIELVPILEQHRDKIIVLTYMYDKTLRYVPVEILSSFCFISMDRFHALMKIKDITEDSSEIMEKDSPNQNKCKDNRSRKIFMEIAQECGIDFATASAMTDSIEDEASMNRILLFTLLPFVVSVIGVNPYNCSKRLQKYAGESGRCPNKETIMRWFG

SEQ ID NO: 24028 - protein, 342 aa, Clostridium sp. D5
MVWVVNKLIEIMAKDMNIPHYSGESDESYCYRVLYSALGLWCLTSSLNEADGIKEISKNTQTILLHGLLENYLKLCPLAKRFLAGSRTADIAIHIRNLYEQMGYFVTLDNNRNVLNQGGESIKVSEKEYLFLGIPKDKYCVNGLGIHTQDNGREIDLKEYLVRDNLSPEEYLLSCFDSCDFDEKDVEISELEFFNPFYRGKLSEAWKKYRNADMTITRKSPSGPFYRVMVDEDSNLVFAPEKNNDEIDSKTGAEFRRIYIALKEYYLNPMIAFICPIDENYTHIRILGQLPNREYYYMLLNAWPKRIFSDRNNFIIRNELTTQAVKILTDIGFTAKEGEFYG

SEQ ID NO: 24029 - protein, 1738 aa, Clostridium sp. D5
MDLQRKKVSFMDRNTNGVQQYYQAIRSRLANYIKSDYLANSETLLLYADDILGEACGDDINIAKEPYIETSSSYKKLMDGIKTADIAENVKEVLLKLVDAKLGIYSTPFVHQVKALTSALNGKDLFVSTGTGSGKTECFLWSIIAREIEESLNRPEDFKLPAVRTLIIYPMNALVSDQLARFRKIMGAEEFMEIFTTSSGSDRIPHFGMYTGRTPYSGDAKKQSNIKLAETFRAQYLVDETASPSEQKAQKRKIEGFKSINKYPARYGGDAGLKLFIDNLENGIHNPGPFDAEYITRFEMQQNTPDILITNYSMLEFMLMRQLEAGIWDDTKEWLQKSEENRFMIVLDEAHMYRGSSGGEIALLLDRLFSRLGITLDKVQFILTTASMPSDDDAIAGFFNGLTGKEYSKCVPLFGDKDEVKTEFKVNTDAEALASVGTSQVTEAEISDRIRLFAKKVFQVDLSEGLSTSDAQVWLFDNLPNYEAYVVLHKLCRDGAKPYSLLRKEIFGDSEYAGVALDALLIVASLAKKEGNILFPVRLHMFVRGLQGLYACSNPRCTCGAKYSDKEKLPLGKVISIPREKCECGARMYELVNHVKCGALYFKGYVQKTAGTGYWYVFPNKGLSGGAYDLTEMLLYICPDDYELGEKDKLGYLDPITGKLYLDYQSDKSLLKVLYPDYDEKHDRYMFGSCPKCKKIMPLKKPTDFATKGNIPFYNLTKAQFELQPPRSELINESKKVLLFSDSRQNAAKLALDLSKSSDADGFRQCIILAANKIAEDGKEHSLKELYNIFLAVCIEQRLYFFTGNSSDKFREHLDTAKTKIRRNRNITRMDFEPLPSDYYEQLLTFFTESPRSFKDIGLGFLAPMDSCLEECLDELEDDYDIVIDEELFRTLLVLLFWDVMDGSAALGNAIEDDIRRKLPGRSKNQEFGLDGDFMKSVDKKFITGVKAITGLNDTQVGKFLDCIKRNFFGTGSETSQRYYLKLDTVKIIITDDDFNWYYCEKCGKISPYKLGDKCGSCFDSEKVHLLNSEELTRFDFWRKPVLASLNEGEKVHTIDTEEHTAQLSHKETTSDILSRTEDYEIRFQDIDVGEFGEESIDVLSCTTTMEVGIDIGSLTAVGLRNIPPMRENYQQRAGRAGRKNAGISTIVTYAFGGVHDSHYFKHPEEMISGEPRKPWIDRNNPKIFQRHYNMKALNSFMSTDAMKGLYDSIVKVGIVTFCEKLTDTFIEHAKILDFPTDGTIEMICKIRDMVLAEGKRNEYFNGDKETPAFDVFYSEGFIPSYSFPKNVVRFFVENEMGSGRRSSLEIKYAPERDIAVAISEYAPGRFITIDKKIYKSGGLYANPRPKGFEGNQAEYYFTSKDYKKEIIVCTECNWFGEGQEEYAECPYCHAKIERHPMIKPWGFAPVKGDPVKFEDEEEEKTYAEAPYYSYVPKETEMQGYKNSHIRYANLENRHVLTVNMGKKKNGFNICTKCGGAEVAEPVPSGNYYFSQPYHDRCLCRHEGTVATNIFLGYEFLTDMFTLDIKYDTRRLVSNFDNEEKNILRSAATTLHEAIKKAVSLSLDIDYNEINGGWRTRYEDNGEAHIEMFFYDNLTSGAGYSSLIGEDEVLDDVFRRTREILSGCSCSKSCRNCLDNFYNQRNHDIFDRTLAVQLFEYALDGKYPEDYSQEEQEKYLVPLKKLISETKGITLDGSIRFEVIPSLRKRIRDDAGEMYLNPYNLSDWLPNAFMEFLGKINE

SEQ ID NO: 24030 - protein, 479 aa, Desulfitobacterium hafniense DCB-2
MRKAYDTFLLSEVSADLAAKAGSFEPYRYECAHCGEEVRLAAVGSTSMVPHFRHRSGNSDIECEYYLGQFSAITDARSRKSKNERAEFYFDSNTKMFYLGLRFSEDEISAYEQLSTIFELRVASQAQPFYSLQINGRNFTSDMQRLIPLEKFSYSYFLSNTLNGVKRKYEVFNNVANNAATFFKMQVGDSDYRAKLVRSAVLYTNIPYFIAFQSQSHHWSPIDIRLPREIRVESTFKFETMGRKFLGKILTITAKTAQIDSLLFSWGYQLESSEKLTLLWPPAILSEDISIINADTAYLYSTFELQAHGNINVHSEDITKIVDGLTKIAVKPRIKVYKKNAELMLETCERETDTHINILVARTVEKNYRVPDDVSFLFNRSGVLLLSKGVTVQMTPDSEVRHYTNGYLDGIVAPSEQAMLVGESLLQDALIHYKRMETFNWADFKSLDLSQIAFQYIEDCEKSGLINSAAKHFIEEGRI

SEQ ID NO: 24031 - protein, 339 aa, Desulfitobacterium hafniense DCB-2
MMNGLLTTMSNDMNIPRYLNESDKSFIYRLCYSALGQWCLSTAMNSTGGAVGTTKHNQTIVLNDLLSRYTELFPQISEKFIDTSSQQTNFSVSVRRTYEETGYLLTDSDNHNRIASYGRTIRVGDKFLFFGLPGKPCEVNGLGLFANSTDYLVALKDFLIRDSLTSEAYFDSRFDPIDFYQRDIDLSELEFFNPKSNNVPSMSWTKKPETDCTVARKTETGPFYRIMKVTGEIQFADEPIELQTDSFTSYEYRRLYFALKTHYGNPLRATITKLDELYSKIRIGGHLPNREYYLLLLLSWPEHSAFDKVNFIIRNELIAGVTDTLVDIGIEIKGGQPNA

SEQ ID NO: 24032 - protein, 1740 aa, Desulfitobacterium hafniense DCB-2
MHNPNGVQAYYQAIRDRLKNYIKSDYLANSETLLRYVDDILGDLCSEYTNIAREPYIETAASYKKIQDGIRNSSQIEQGVKESLLKLVAKGLGIFSDPFEHQVKALEYFLAGRDLFVSTGTGSGKTECFLWPIIAKSFEEAKNHPATFKNEAVRTLIIYPMNALVSDQLARFRKIIGSSDFKDIFTRDTHATRIPHFGMYTGRTPYSGDAKKTSSKELAMTFRDNFLIDETADADTQRRQTNSIQGLKSINKYPARFGENGLRVFIENLEKNIHRPSPYDAEFITRFEMQNYPPDILITNYSMLEYMLMRQREANIWDKTKEWLEVSNKNKLLIVLDEAHMYRGSAGGEIALLLERLFYRLGIPVERVQFILTTASMPQNEQSAINDFYSGLTGKAASSCEFLFGSKEEIPDEQEIRTDIEALASIGSDQVQGDEITKRILDFASFVFNTTLPSDISQDSAQEWLYDNLPKYEAFVKLNRLCRDGAKSYSEIKEAVFGNVAASDKALDTLLVLVSLAAKGGNILFPVRLHMFLRGLQGLYACSNPKCTCAKYSESEGLPLGKVISIPKDKCECGGRIYELFNHIKCGALYIRAFVQKNEGQPYWYVFPQKGLDGDVNSLQELLLYVVPKQYQCGKNDKIGSLDPFTGKLYLTPQDDETLLDVVYYNKSEKGKKTDAKGMPFNFGVCPKCKKPMPLKKPVDLSTKGNIPFYNLTKAQFELQPPKSGLINQGKKVLLFSDSRQNAAKLALDLSKSSDADAFRQAIMLASLLLEIDGKEHSLADLYPAFLDVCNQNSLAFFSGTSKDKFDGDKRKFAKSKANAEKRGRTINYSSLLGDYGALPDNYYEQLLTFFTESPRSFKDIGIGFLAPLSTVLDLCMEYLEDDDISIDKTKLYQLLVLMFWDVMDDSAALGETIQDDVRKGLPGRSKNQTFGLSFDFSTSLDKGLLQRIQELLDLDSPTMVKIVDKVRDLFFASSSTNRYYIKLSAVKIELADDNFVWYRCVKCGKLSPFKIGDYCGACFDSTDLVPIDEKELSRFDFWRIPVLNALKKIENIHTIDTEEHTAQLSHKEIRSDTWSRTEKYEMRFQDINAGEHGEDAIDVLSCTTTMEVGIDIGSLTAVGLRNIPPMRENYQQRAGRAGRKNAGISTIVTYASGGTHDSHYFQHPDEMISGAPRKPWIDRDNLKIKQRHVNMLTLNGFMSTEAMRTQFDGIVDIGIIEFCELYGENFIEYVEKFSKNSGLSTAKTIEHFREICGLVLAEGKRDEYINNDKETPAFDVFYREGFIPSYSFPKNVVRFFVEKESERGKSAPRDIQYAPERDIAVALSEYAPGRFVTIDKKIFKSGGIYANPRPRGFETNQAEFYFKNTDYYKDIFICSECNWFGLQEDASLSQCPYCGSDIVKNKMLRPWGFSPVKGDEVKFEDEDEQYTYAEAPFYSYVPEDTRMDSFGQSKIRFANLPDRKVLTVNMGKSKNGFNVCKKCGGAEVTDAKGSARYLFSQPYHDNHPLCRHEGTVAHGIYLGYEFLTDMFMLDISYDSTRLVGNHSAEDKSILRAAVTTLHEALKKAVALVLDIDYNEISGGWRPRIKGDGNSHIEMFFYDNLTSGAGYSSLIGSILDKVLERARIILTECECSRSCKNCLDNYWNQRNHQMFDRYLGLQLLAYAQFGQLPDDYEVSEQDKYLRPLLKLITEDGGVPSAFEVIPALRKKPDNKQSKMYLNPYDLTDWLPNAFMTYRNLMSEG

SEQ ID NO: 24033 - protein, 480 aa, Desulfotomaculum acetoxidans DSM 771
MRKAYDTFLLSEVSAGLAAKAGSFEPYRYECAHCGEEVRLSAVDSTSMVPHFRHRSGNSDVECEYYLGQYGAFSTDARSRKSKNERAEFYFDSNTKMFYLGLRFSEDEISAYEQLSTIFELRVASQAQPFYILRINGRNFSIDTQRLIPLDKFSCNYFLSNTLNGIKRKYEVFNNVANNAATFFKMQVGDGGYRAKLVRSSVLYTNIPYFIVFQSQSPHWSPVDVCLPSEIKVENTFEFETMGRKFIGKVLTITAKTAQIDSLLSSWGYQLEAAETLTLLWPPAILSEDISLINADAAYLYSTFELQAHGNINVHSEDITRITDGVSKVAVNPRIKVYKKNAELMLETCEQETDAYINLPVARRAEKNYRVTDDASFMFNRSGVLPLNKGVTVQMTPDSEVRHYTNGYLDGIVAPLEQITMSGESLLRDALIHYKRTETLNWDDFKSLYLSQTAFHYIETCEKTGLINSAAKYFIEEGRI

SEQ ID NO: 24034 - protein, 338 aa, Desulfotomaculum acetoxidans DSM 771
MNDLLKTMANDMNIPRYHNESDESFVYRLCYSALGQWCLSTAMNTTGGAVGTTKHNQTIVLNNLLSRFTELFPYITDRFIDSSNQQISFLVSVRRAYEETGYLLTNSDNHNRIANYGRTIRVGDKFLFFGLPCEHCEVNGLGVFTNPTDYLVVLKDFLVRDSLPGEAYFNSRFDPIDFYQRDIDLSELEFFNPKSNNVPSMSWGKKPETDCTVARKTETGPFYRIMKVNDDIQFADEPVEQQSDVFTSYEYRRLYFALKFHYDNPLKATITKLDELYSKIHIAGHLPNREYYLLLLLSWPERNAFDKVNFIIRNDLLASVTDALADIGIEIKGGQPNA

SEQ ID NO: 24035 - protein, 1741 aa, Desulfotomaculum acetoxidans DSM 771
MHNPNGVQEYYQAIRDRLKNYIKSDYLANSETLLLYVDDLLGELCSEYTNIAREPYIETAASYKKIQDGIQNSSRIKQGVKESLFKLVAKGLGIFSDPFEHQVKALEYFLAGRDLFVSTGTGSGKTECFLWPIIAKCFDEAKNHPAIFKNEAVRTLIIYPMNSLVSDQLARFRKIIGSPDFKYIFTRDTHASRIPHFGMYTGRTPYSGDAKKASSQELAITFRENYLIDETADAYTQRRQTNNIKGLKSISKYPARFGEDGLRVFIENLEKNIHRPSPYDAEFITRFEMQNCPPDILITNYSMLEYMLMRQREANIWDKTKEWLETSDENKLLIVLDEAHMYRGSAGGEIALLLERLFYRLGISSEKVQFILTTASMPQNEQTAINGFYTGLTGKVASSCEFLFGSKEEIPDEQEIRTDIEALASIDSDQVQGEAITKRIAAFASSVFKTTLPSDISQDSAQEWLYDNLPKYEAFVKLNRLCRDGAKSYSEIKEVIFGNVATSEKALDALLVLVSLAAKGGNILFPVRLHMFLRGLQGLYTCSNPKCTRAKQSESEKLPLGKIISIPKDKCECGGKIYELFNHIKCGALYIRAFVQKNEGQPYWYVFPKKGLDGDVNSLQETLLYVVPKQYQCGKNDKIGSLDPFTGKLYLTLQDEETLLDVVYYNKSEKGKKTDAKGMPFNFGVCPKCKKPMPLKKPVDLSTKGNIPFYNLTKSQFELQPPKSGLINQGKKVLLFSDSRQNAAKLALDLSKSSDADAFRQAVMLASLLLEVDGKEHSLADLYPAFLDACNQNNLTFFSGTSKDKFDGDKRKFAKSKANAEKRGRTINYSSLLGDYGALPDNYYEQLLTFFTESPRSFKDIGIGFLAPLSTVLDLCMEYLEDDDISIDKAKLYQLLVLMFWEVMDDSAALGETIQDDVRKGLPGRSKSSNFGLSFDFLTALDKGLLQRIQEVLCHDAITTRKILDKVRDLFFASSSANRYYIKLSAVKIELASEDFVWYRCVKCGKLSPFKIGDYCGACFDSSDLVSIGEEELSRFDFWRIPVLNALKKIESIHTIDTEEHTAQLSHKEIRSDTWSRTEKYEMRFQDINAGEHGEDAIDVLSCTTTMEVGIDIGSLTAIGLRNIPPMRENYQQRAGRAGRKNAGISTIVTYASGGTHDSHYFQHPDEMISGAPRKPWIDRSNPKIKQRHVNMLTLNGFMSTEAMRTQFDGIVDTGIIKFCELYGENFIEFAEQFSKNSGLSTAKTIEHFQEICGLVLAEGKRDEYINNDKETPAFDIFYREGFIPSYSFPKNVVRFFVEKESERGKNSPRDIQYAPERDIAVALSEYAPGRFVTIDKKIFKSGGIYANPRPRGFETNHAEFYFKNTDYYKDIFICSECNWFGLQEDASLSQCPYCGSEIVKNKMLRPWGFSPVKGDEVKFEDEDEQYTYAEAPYYSYVPEDTRMDSFGQSKIRFANLPDRKVLTVNMGKSKNGFNICKKCGGAEVTDAKEGATYSFSQPYHDNHPLCRHEGTVAHGIYLGYEFLTDMFMLDISYDSTKLVGNRSAEEKSILRAAVTTLHEAVKKAVSLVLDIDYNEISGGWRPRIKGDGNSHMEMFFYDNLTSGAGYSSLIGSILDEVLERARIILTGCECSRSCKNCLDNYWNQRNHQLFDRHLGLQLLDYAQFGQLPDDYEVSEQNEYFQPLLKLITEDGGVPPLAFEVIPAMRKKPDSTRSKMYLNPYDLTDWLPNAFMTYRNLVSEG

SEQ ID NO: 24036 - protein, 481 aa, Erysipelothrix sp. LV19
MLKAFDSVLQISVFADSVEDNSDYEPLRYECLHCGEEVKIAAADSSSMVAHFRHRNGNNDIECEKYLGHLDNSKLVHLFPKKKKIKCDFYYNNFNKSFYFGVTFSDEEISKFEKERSHLIIYNHYNKSQKKKVAINHTFFSPNSVAKIEVDFFSNQYELSNPYYNYSDVKKIFNSNSRPTFFKMLGDEPKYKAKLVLSKTLYTNIPYFITYQELYSSPMDINYPQEIKTPMLPTYFRTLDRNFIGRVVRFTKRSQEVMNLIRSWGYELEDSETLTLLWPPAINQNNKYLVNTNFSYLYSSFDLKFRRNINIDEDNIRRHEKGITRVCFDSDLRINSKNIDVVLATHQDTSTDFDQITFSKHEASIFKVPSFTGSESYHLFNSSGVHKLNSGQKVILTKGSTIKCYSGNRLCGVVYPRQRLVNSKKLILADILKYYKRTECIRDGEFDGFEICEEAKKYVYGCYEKKQINTVVKQYILEGKL

SEQ ID NO: 24037 - protein, 341 aa, Erysipelothrix sp. LV19
MVFIMKDMIEKMGMSMDIPCYKNEGYDSYVFRVIYSALGQWCLTIAASKINEMDGVTKHHISIALNELIAKYIDLFPVLENILYSESSVKLSLHIQTVYLETGYLTLTNANLLQVSNFGDGLIFDNDFAIMLGLPNIRYEISGLGVLTTPKSIVLPVETKDFLIRDTLSPQEYCLCNFDSSDFSLKEIDINELEFFNPLSKKSPSSSWEKSPNTEFTIARRIKTRTYYRVINRNNDFYFAEMIEDERNGSLTAYEYRRDYFALKSLYDNPLRARVRRLDNNYSILSFEGHLPNREYYLLLLLAWPASNAFDKSSFIIINKALPFVGSVLNDIGIVIYEGEI

SEQ ID NO: 24038 - protein, 1739 aa, Erysipelothrix sp. LV19
MSNSVGVKEYYESIRLRLKDYIKSDYLANSETLLLYEEDLLGEFCSEHTSISQEPYIETSASYKKSYDGIRLSAALDNNIKSSLVKLIDANLGIYENPYEHQVKSLELFMEGKDLFVSTGTGSGKTECFLWPIISKSFYEAKNKPRSFERNAVRTLIIYPMNALVSDQLSRFRKNIGSEKFKEIFTEDTKAKRIPHFGMYTGRTPSPGKKTPQNSKELAEVFRKEYLLDDLRTSDREKKILDIEGLKSVNKYPARYGEDGLEKFVDNLTRNIHETDPFDAELITRFEMQACPPDILITNYSMLEFMLMRQREANIWDQTKDWLHESTDNKLLIVLDEAHMYRGSSGGEIALLLERLYSRLDISLSQVQYILTTASMPKEEFEAINAFYEGLTGKPANNCEFLYGTKKSISNSFEIQTNVDALVSIGFSQVHGNEISDRIKSFSKSVYNEELNEDMNQEELQTWLYDNLYRYEAFVKLNEICRDGAKSYSTIKQELFGNHPNSDKALDSLLVVASLATKNGNVLFPVRLHMFLRGLQGLYACTNPKCKYAKYSSEEKLPIGKVIAIPKEKCECNGKVYEILNHRKCGGLYLRVYIQKNEGESFWYTFPKRGLSGDVHSLNEMLLYIVPKGYHRRSKDNIGALDPYTGKLYLSPQDDDGLLTVIYTDDFDTKSKSYNFNVCPKCKKQMRLQKPSDLSTKGNIPFYNLTKAQFELQTPKSNLINQGKKVLLFSDSRQIAAKLALDLSKSSDADAFRKAILLASLRANTASYECSLAELYPAFLEVCADNKLSFFNGSSKLLFQDQKRKFSRRKARIENKGNVFNFLDVVSDFQELPDQYYEQLLTFFTESPRSFKDIGLGYLAPKSILLDECLEELEENDIIIDSDLFYQFLVTLFWDVMDGEAALGHTIDDDVRRGLPGRSMNNDFGLDFDFIKSLDKNLVDTSKSLFNISDNQTQELLDIIRDCFFDSSKKSKYYINLRKVRIEFTSEEFPWYKCMHCGKLSPFKLGDKCAACYQSVDLKIIGNDDLTRFDFWRKPIIRALETQEKIQTIETEEHTAQLSHKEPRSNSRSNTEKYELKFQDITAGENGEDSIDVLSCTTTMEVGIDIGSLTAVGLRNIPPMRENYQQRAGRAGRTNSGISTIVTFASGGTHDSHYFSNPEEMISGAPRKPWIDRMNHKIKQRHINMLVINSFMSSDGMRTKYDGIMDIGIITFCEKYGSLFIEYAKDFELKNSVSTVSTIKLFNEIYDTIILHNRREEFMNNDKETSVFDVFYKEGFIPSYSFPKNVVKFYVEKDLKNYKSANREIQYAPDRDISVALSEYAPGRFITIDKKIYKSGGIYSNPKPKGYEDNQAEYYFNNRDYFKNILVCSECNWFGLENESSSHPVCPYCGSEYTKNKMLRPWGFAPIKGQSVKFEDEDEQYTFTEAPFYSYVPSNTKMQRYKSSNIKFSNLPDRNVLTVNMGKQKNGFNVCKKCGGAEVSNDLVTNKFSVTQPYHGYSVCQHNGSVEANIFLGYEFLTDMFMLDISYDTKKLVGSGRIDEKTILKSAATSLHEVLKKSISIVLDIDYNEISGGWRPRIGKADDSSLEFFFYDNLSSGAGYSTLIGSILDQVLDQSRRILTECECSRACKNCLDNYWNQRNHDLFNRDLALQLLDYAQFDVYPQPYSESKQQDYLEPLLRLIEENSRIAKKEVLNNIEVIPALLKKSDNVSNMIFFNPLDLSDWLPNSYLEYCKLVEKRK

SEQ ID NO: 24039 - protein, 404 aa, Escherichia coli
MHKYPSIIVNINLREAKLKKKVREHLQSLGFTRSDSGALQAPGNTKDVIRALHSSQRAERIFANQKFITLRAAKLIKFFASGNEVIPDKISPVLERVKSGTWQGDLFRLAALTWSVPVSSGFGRRLRYLVWDESNGKLIGLIAIGDPVFNLAVRDNLIGWDTHARSSRLVNLMDAYVLGALPPYNALLGGKLIACLLRSRDLYDDFAKVYGDTVGVISQKKKQARLLAITTTSSMGRSSVYNRLKLDGIQYLKSIGYTGGWGHFHIPDSLFIELRDYLRDMDHAYADHYMFGNGPNWRLRTTKAALNALGFRDNLMKHGIQREVFISQLAENATSILQTGKGEPDLTSLLSAKEIAECAMARWMVPRSIRNPEYRLWKARDLFDFISNDSLNFPPFDEIAKTVV

SEQ ID NO: 24040 - protein, 548 aa, Escherichia coli
MNYAIDKFTGTLILAARATKYAQYVCPVCKKGVNLRKGKVIPPYFAHLPGHGTSDCENFVPGNSIIVETIKTISKRYMDLRLLIPVGSNSREWSLELVLPTCNLCRAKITLDVGGRSQTLDMRSMVKSRQIGAELSVKSYRIVSYSGEPDPKFVTEVERECPGLPSEGAAVFTALGRGASKGFPRAQELRCTETFAFLWRHPVAPDFPDELEIKSLASKQGWNLALVTIPEVPSVESISWLKSFTYLPVVPARTSITAIWPFLNQKTSINHVECVYSDTILLSTNMAPTSSENVGPTMYAQGSSLLLSAVGVETSPAFFILNPGENDFVGVSGSIEQDVNLFFSFYKKNVSVPRKYPSIDLVFTKRNKEKTIVSLHQRRCIEVMMEARMFGHKLEYMSMPSGVEGVARIQRQTESNVIKLVSNDDIAAHDKSMRLLSPVALSQLSDCLANLTCHVEIDFLGLGKIFLPGSSMLSLDDGKFIELSPNLRSRILSFILQMGHTLHGFSLNNDFLLVEKLVDLQPEPHLLPHYRALVKEVKTNGFECNRFR

SEQ ID NO: 24041 - protein, 627 aa, Escherichia coli
MSYQYSQEAKERISKLGQSEIVNFINEISPTLRRKAFGCLPKVPGFRAGHPTEIKEKQKRLIGYMFQSHPSSEERKAWKSFSLFWQFWAEEKIDKSFSMIDNLGLKENSGSIFIRELAKNFPKVARENIERLFIFSGFADDPDVINAFNLFPPAVVLARDIVIDTLPIRLDELEARISLIADNVEKKNNHIKELELKIDAFSEQFDNYFNNEKSSLKIINELQSLINSETKQSDIANKAIDELYHFNEKNKQLILSLQEKLDFNALAMNDISEHEKLIKSMANDISEFKNALTILCDNKIKNNELDYVNELKKLTERIDTLEINTSQASEVSVTNRFTKFHEIAHYENYEYLSSSEDISNRISLNLQAVGLTKNSAEKLARLTLATFVSGQIIQFSGSLADIIADAIAIAIGAPRYHIWRVPVGIISDMDAFDFIETIAESSRCLLLKGANLSAFEIYGAAIRDIVVQRQIHPTNYDHLALIATWKQGPATFPDGGMLAELGPVIDTDTLKMRGLSATLPQLKPGCLAKDKWTNIDGLHLDSVDDYVDELRALLDEAGFDGGTLWKRMIHIFYTSLIRIPNGNYIYDLYSVLSFYTLTWAKIKGGPVQKIEDIANRELKNYSAKISS

SEQ ID NO: 24042 - protein, 347 aa, Escherichia coli
MEWRAVSRDKALDMLSTALNCRFDDEGLRISAVSECLRSVLYQYSISETEEARQTVTSLRLTSAVRRKLVPLWPDIADIDNAIHPGIMSILNSLAELGDMIKLEGGNWLTAPPHAVRIDNKMAVFFGGEPSCTFSTGVVAKSAGRVRLVEEKVCTGSVEIWDANEWIGAPAEGNEEWSSRLLSGTISGFIDAPGNMSETTAYVRGKWLHLSELSFNKKQIYLCRMSVDNHFSYYLGEIEAGRLCRMNSLESSDDVRRLRFFLDTKDNCPLKVRIKISNGLARLRLTRRLPRRETKVLLLGWRESGFENEHSGITHHVFPEEILPIVRSAFEGLGIIWINEFTRRNEI

SEQ ID NO: 24043 - protein, 1836 aa, Escherichia coli
MINKNKVTERSGIHDTVKSLSENLRKYIEAQYHIRDEGLIAERRALLQQNETIAQAPYIEATPIYEPGAPYSELPIPEAASNVLTQLSELGIGLYQRPYKHQSQALESFLGENASDLVIATGTGSGKTESFLMPIIGKLAIESSERPKSASLPGCRAILLYPMNALVNDQLARIRRLFGDSEASKILRSGRCAPVRFGAYTGRTPYPGRRSSRRDELFIKPLFDEFYNKLANNAPVRAELNRIGRWPSKDLDAFYGQSASQAKTYVSGKKTGKQFVLNNWGERLITQPEDRELMTRHEIQNRCPELLITNYSMLEYMLMRPIERNIFEQTKEWLKADEMNELILVLDEAHMYRGAGGAEVALLIRRLCARLDIPRERMRCILTSASLGSIEDGERFAQDLTGLSPTSSRKFRIIEGTRESRPESQIVTSKEANALAEFDLNSFQCVAEDLESAYAAIESLAERMGWQKPMIKDHSTLRNWLFDNLTGFGPIETLIEIVSGKAVKLNILSENLFPDSPQQIAERATDALLALGCYAQRASDGRVLIPTRMHLFYRGLPGLYACIDPDCNQRLGNHSGPTILGRLYTKPLDQCKCASKGRVYELFTHRDCGAAFIRGYVSSEMDFVWHQPNGPLSEDEDIDLVPIDILVEETPHVHSDYQDRWLHIATGRLSKQCQDEDSGYRKVFIPDRVKSGSEITFDECPVCMRKTRSAQNEPSKIMDHVTKGEAPFTTLVRTQISHQPASRPIDGKHPNGGKKVLIFSDGRQKAARLARDIPRDIELDLFRQSIALACSKLKDINREPKPTSVLYLAFLSVLSEHDLLIFDGEDSRKVVMARDEFYRDYNSDLAQAFDDSFSPQESPSRYKIALLKLLCSNYYSLSGTTVGFVEPSQLKSKKMWEDVQSKKLNIESKDVHALAVAWIDTLLTEFAFDESIDSTLRIKAAGFYKPTWGSQGRFGKALRKTLIQYPAMGELYVEVLEEIFRTHLTLGKDGVYFLAPNALRLKIDLLHVWKQCNDCTALMPFALEHSTCLACGSNSVKTVEPSESSYINARKGFWRSPVEEVLVSNSRLLNLSVEEHTAQLSHRDRASVHATTELYELRFQDVLINDNDKPIDVLSCTTTMEVGVDIGSLVAVALRNVPPQRENYQQRAGRAGRRGASVSTVVTYSQNGPHDSYYFLNPERIVAGSPRTPEVKVNNPKIARRHVHSFLVQTFFHELMEQGIYNPAEKTAILEKALGTTRDFFHGAKDTGLNLDSFNNWVKNRILSTNGDLRTSVAAWLPPVLETGGLSASDWFAKVAEEFLNTLHGLAEIVPQTAVLVDEENEDDEQTSGGMKFAQEELLEFLFYHGLLPSYAFPTSLCSFLVEKIVKNIRGSFEVRTVQQPQQSISQALSEYAPGRLIVIDRKTYRSGGVFSNALKGELNRARKLFNNPKKFIHCDKCSFVRDPHNNQNSENTCPICGGILKVEIMIQPEVFGPENAKELNEDDREQEITYVTAAQYPQPVDPEDFKFNNGGAHIVFTHAIDQKLVTVNRGKNEGESSGFSVCCECGAASVYDSYSPAKGAHERPYKYIATKETPRLCSGEYKRVFLGHDFRTDLLLLRITVGSPLVTDTSNAIVLRMYEDALYTIAEALRLAASRHKQLDLDPAEFGSGFRILPTIEEDTQALDLFLYDTLSGGAGYAEVAAANLDDILTATLALLESCECDTSCTDCLNHFHNQHIQSRLDRKLGASLLRYALYGMVPRCASPDIQVEKLSQLRASLELDGFQCIIKGTQEAPMIVSLNDRSIAVGSYPGLIDRPDFQHDVYKSKHTNAHIAFNEYLLRSNLPQSHQNIRKMLR

SEQ ID NO: 24044 - protein, 404 aa, Escherichia coli
MHKDPSIIVNINLREAKLKKKVREHLQSLGFTRSDSGALQAPGNTKDVIRALHSSQRAERIFANQKFITLRAAKLIKFFASGNEVIPDKISPVLERVKSGTWQGDLFRLAALTWSVPVSSGFGRRLRYLVWDESNGKLIGLIAIGDPVFNLAVRDNLIGWDTHARSSRLVNLMDAYVLGALPPYNALLGGKLIACLLRSRDLYDDFAKVYGDTVGVISQKKKQARLLAITTTSSMGRSSVYNRLKLDGIQYLKSIGYTGGWGHFHIPDSLFIELRDYLRDMDHAYADHYMFGNGPNWRLRTTKAALNVLGFRDNLMKHGIQREVFISQLAENATSILQTGKGEPDLTSLLSAKEIAECAMARWMVPRSIRNPEYRLWKARDLFDFISNDSLKFPPSDEIAKTVV

SEQ ID NO: 24045 - protein, 548 aa, Escherichia coli
MNYAIDKFTGTLILAARATKYAQYVCPVCKKGVNLRKGKVIPPYFAHLPGHGTSDCENFVPGNSIIIETIKTISKRYMDLRLLIPVGSNSREWSLELVLPTCNLCRAKITLDVGGRSQTLDMRSMVKSRQIGAELSVKSYRIVSYSGEPDPKFVTEVERECPGLPSEGAAVFTALGRGASKGFPRAQELRCTETFAFLWRHPVAPDFPDELEIKSLASKQGWNLALVTIPEVPSVESISWLKSFTYLPVVPARTSITAIWPFLNQKTSINHVECVHSDTILLSANMAPTSSENVGPTMYAQGSSLLLSAVGVEKSPAFFILNPGENDFVGVSGSIEQDVNLFFSFYKKNVSVPRKYPSIDLVFTKRNKEKTIVSLHQRRCIEVMMEARMFGHKLEYMSMPSGVEGVARIQRQTESSVIKLVSNDDIAAHDKSMRLLSPVALSQLSDCLANLTCHVEIDFLGLGKIFLPSSSMLSLDDGEFIELSPNLRSRILSFILQMGHTLHGFSLNNDFLLVEKLVDLQPEPHLLPHYRALVKEVKTNGFECNRFR

SEQ ID NO: 24046 - protein, 627 aa, Escherichia coli
MSYQYSQEAKERISKLGQSEIVNFINEISPTLRRKAFGCLPKVPGFRAGHPTEIKEKQKRLIGYMFQSHPSSEERKAWKSFSLFWQFWAEEKIDKSFSMIDNLGLKENSGSIFIRELAKNFPKVARENIERLFIFSGFADDPDVINAFNLFPPAVVLARDIVVDTLPIRLDELEARISLIADNVEKKNNHIKELELKIDAFSERFDNYFNNEKSNLKIINELQSLINSETKQSDIANKSIDELYHFNEKNKQLILSLQEKLDFNALAMNDISEHEKLIKSMANEISELKNALTILCDNKRKNNELDYINELKKLTERIDTLEINTSQASKVSVTNRFTKFHEIAHYENYEYLSSSEDISNRISLNLQAVGLTKNSAETLARLTLATFVSGQIIQFSGSLADIIADAIAIAIGAPRYHIWRVPVGIISDMDSFDFIETIAESSRCLLLKGANLSAFEIYGAAIRDIVVQRQIHPTNYDHLALIATWKQGPATFPDGGMLAELGPVIDTDTLKMRGLSAILPQLKPGCLAKDKWTNIDGLQLDSVDDYVDELRALLDEAGFDGGTLWKRMVHIFYTSLIRVPNGNYIYDLYSVLSFYTLTWAKIKGGPVQKIEDIANRELKNYSAKISS

SEQ ID NO: 24047 - protein, 347 aa, Escherichia coli
MEWRAVSRDKALDMLSTALNCRFDDEGLRISAVSECLRSVLYQYSISETEEARQTVTSLRLTSAVRRKLVPLWPDIADIDNAIHPGIMSILNSLAELGDMIKLEGGNWLTAPPHAVRIDNKMAVFFGGEPSCTFSTGVVAKSAGRVRLVEEKVCTGSVEIWDANEWIGAPAEGNEEWSSRLLSGTISGFIDAPSNMSETTAYVRGKWLHLSELSFNKKQIYLCRMSVDNHFSYYLGEIEAGRLCRMNSLESSDDVRRLRFFLDTKDNCPLKIRIKISNGLARLRLTRRLPRRETKVLLLGWRESGFENEHSGITHHVFPEEILPIVRSAFEGLGIIWINEFTRRNEI

SEQ ID NO: 24048 - protein, 1836 aa, Escherichia coli
MINKNKVTERSGIHDTVKSLSENLRKYIEAQYHIRDEGLIAERRALLQQNETIAQAPYIEATPIYEPGAPYSELPIPEAASNVLTQLSELGIGLYQRPYKHQSQALESFLGEDASDLVIATGTGSGKTESFLMPIIGKLAIESSERPKSASLPGCRAILLYPMNALVNDQLARIRRLFGDSEASKILRSGRCAPVRFGAYTGRTPYPGRRSSRRDELFIKPLFDEFYNKLANNAPVRAELNRIGRWPSKDLDAFYGQSASQAKTYVSGKKTGKQFVLNNWGERLITQPEDRELMTRHEMQNRCPELLITNYSMLEYMLMRPIERNIFEQTKEWLKADEMNELILVLDEAHMYRGAGGAEVALLIRRLCARLDIPRERMRCILTSASLGSIEDGERFAQDLTGLSPTSSRKFRIIEGTRESRPESQIVTSKEANALAEFDLNSFQCVAEDLESAYAAIESLAERMGWQKPMIKDHSTLRNWLFDNLTGFGPIETLIEIVSGKAVKLNILSENLFPDSPQQIAERATDALLALGCYAQRASDGRVLIPTRMHLFYRGLPGLYACIDPDCNQRLGNHSGPTILGRLYTKPLDQCKCASKGRVYELFTHRDCGAAFIRGYVSSEMDFVWHQPNGPLSEDEDIDLVPIDILVEETPHVHSDYQDRWLHIATGRLSKQCQDEDSGYRKVFIPDRVKSGSEITFDECPVCMRKTRSAQNEPSKIMDHVTKGEAPFTTLVRTQISHQPASRPIDGKHPNGGKKVLIFSDGRQKAARLARDIPRDIELDLFRQSIALACSKLKDINREPKPTSVLYLAFLSVLSEHDLLIFDGEDSRKVVMARDEFYRDYNSDLAQAFDDNFSPQESPSRYKIALLKLLCSNYYSLSGTTVGFVEPSQLKSKKMWEDVQSKKLNIESKDVHALAVAWIDTLLTEFAFDESIDSTLRIKAAGFYKPTWGSQGRFGKALRKTLIQHPAMGELYVEVLEEIFRTHLTLGKDGVYFLAPNALRLKIDLLHVWKQCNDCTALMPFALEHSTCLACGSNSVKTVEPSESSYINARKGFWRSPVEEVLVSNSRLLNLSVEEHTAQLSHRDRASVHATTELYELRFQDVLINDNDKPIDVLSCTTTMEVGVDIGSLVAVALRNVPPQRENYQQRAGRAGRRGASVSTVVTYSQNGPHDSYYFLNPERIVAGSPRTPEVKVNNPKIARRHVHSFLVQTFFHELMEQGIYNPTEKTAILEKALGTTRDFFHGAKDTGLNLDSFNNWVKNRILSTNGDLRTSVAAWLPPVLETGGLSASDWFAKVAEEFLNTLHGLAEIVPQIAALVDEENEDDEQTSGGMKFAQEELLEFLFYHGLLPSYAFPTSLCSFLVEKIVKNIRGSFEVRTVQQPQQSISQALSEYAPGRLIVIDRKTYRSGGVFSNALKGELNRARKLFNNPKKFIHCDKCSFVRDPHNNQNSENTCPICGGILKVEIMIQPEVFGPENAKELNEDDREQEITYVTAAQYPQPVDPEDFKFNNGGAHIVFTHAIDQKLVTVNRGKNEGGSSGFSVCCECGAASVYDSYSPAKGAHERPYKYIATKETPRLCSGEYKRVFLGHDFRTDLLLLRITVGSPLVTDTSNAIVLRMYEDALYTIAEALRLAASRHKQLDLDPAEFGSGFRILPTIEEDTQALDLFLYDTLSGGAGYAEVAAANLDDILTATLALLEGCECDTSCTDCLNHFHNQHIQSRLDRKLGASLLRYALYGMVPRCASPDIQVEELSQLRASLELDGFQCLIKGTQEAPMIVSLNDRSVAVGSYPGLIDRPDFQHDVYKSKNTNAHIAFNEYLLRSNLPQAHQNIRKLLR

SEQ ID NO: 24049 - protein, 398 aa, Escherichia coli
TKQSDIANKSIDELYHFNEKNKQLILSLQEKLDFNALAMNDISEHEKLIKSMANEISELKNALTILCDNKRKNNELDYINELKKLTERIDTLEINTSQASKVSVTNRFTKFHEIAHYENYEYLSSSEDISNRISLNLQAVGLTKNSAETLARLTLATFVSGQIIQFSGSLADIIADAIAIAIGAPRYHIWRVPVGIISDMDSFDFIETIAESSRCLLLKGANLSAFEIYGAAIRDIVVQRQIHPTNYDHLALIATWKQGPATFPDGGMLAELGPVIDTDTLKMRGLSAILPQLKPGCLAKDKWTNIDGLQLDSVDDYVDELRALLDEAGFDGGTLWKRMVHIFYTSLIRVPNGNYIYDLYSVLSFYTLTWAKIKGGPVQKIEDIANRELKNYSAKISS

SEQ ID NO: 24050 - protein, 347 aa, Escherichia coli; identical to SEQ ID NO: 24047

SEQ ID NO: 24051 - protein, 1836 aa, Escherichia coli; identical to SEQ ID NO: 24048

SEQ ID NO: 24052 - protein, 404 aa, Escherichia coli; identical to SEQ ID NO: 24044

SEQ ID NO: 24053 - protein, 548 aa, Escherichia coli
MNYAIDKFTGTLILAARATKYAQYVCPVCKKGVNLRKGKVIPPYFAHLPGHGTSDCENFVPGNSIIIETIKTISKRYMDLRLLIPVGSNSREWSLELVLPTCNLCRAKITLDVGGRSQTLDMRSMVKSRQIGAELSVKSYRIVSYSGEPDPKFVTEVERECPGLPSEGAAVFTALGRGASKGFPRAQELRCTETFAFLWRHPVAPDFPDELEIKSLASKQGWNLALVTIPEVPSVESISWLKSFTYLPVVPARTSITAIWPFLNQKTSINHVECVHSDTILLSANMAPTSSENVGPTMYAQGSSLLLSAIGVEKSPAFFILNPGENDFVGVSGSIEQDVNLFFSFYKKNVSVPRKYPSIDLVFTKRNKEKTIVSLHQRRCIEVMMEARMFGHKLEYMSMPSGVEGVARIQRQTESSVIKLVSNDDIAAHDKSMRLLSPVALSQLSDCLANLTCHVEIDFLGLGKIFLPSSSMLSLDDGEFIELSPNLRSRILSFILQMGHTLHGFSLNNDFLLVEKLVDLQPEPHLLPHYRALVKEVKTNGFECNRFR

SEQ ID NO: 24054 - protein, 627 aa, Escherichia coli
MSYQYSQEAKERISKLGQSEIVNFINEISPTLRRKAFGCLPKVPGFRAGHPTEIKEKQKRLIGYMFQSHPSSEERKAWKSFSLFWQFWAEEKIDKSFSMINNLGLKENSGSIFIRELAKNFPKVARENIERLFIFSGFANDPDVINAFNLFPPAVVLARDIVVDTLPIRLDELEARISLIADNVEKKNNHIKELELKIDAFSERFDNYFNNEKSNLKIINELQSLINSETKQSDIANKSIDELYHFNEKNKQLILSLQEKLDFNALAMNDISEHEKLIKSMANEISELKNALTILCDNKRKNNELDYINELKKLTERIDTLEINTSQASKVSVTNRFTKFHEIAHYENYEYLSSSEDISNRISLNLQAVGLTKNSAETLARLTLATFVSGQIIQFSGSLADIIADAIAIAIGAPRYHIWRVPVGIISDMDSFDFIETIAESSRCLLLKGANLSAFEIYGAAIRDIVVQRQIHPTNYDHLALIATWKQGPATFPDGGMLAELGPVIDTDTLKMRGLSAILPQLKPGCLAKDKWTNIDGLQLDSVDDYVDELRALLDEAGFDGGTLWKRMVHIFYTSLIRVPNGNYIYDLYSVLSFYTLTWAKIKGGPVQKIEDIANRELKNYSAKISS

SEQ ID NO: 24055 - protein, 347 aa, Escherichia coli; identical to SEQ ID NO: 24047

SEQ ID NO: 24056 - protein, 1836 aa, Escherichia coli
MINKNKVTERSGIHDTVKSLSENLRKYIEAQYHIRDEGLIAERRALLQQNETIAQAPYIEATPIYEPGAPYSELPIPEAASNVLTQLSELGIGLYQRPYKHQSQALESFLGEDASDLVIATGTGSGKTESFLMPIIGKLAIESSERPKSASLPGCRAILLYPMNALVNDQLARIRRLFGDSEASKILRSGRCAPVRFGAYTGRTPYPGRRSSRRDELFIKPLFDEFYNKLANNAPVRAELNRIGRWPSKDLDAFYGQSASQAKTYVSGKKTGKQFVLNNWGERLITQPEDRELMTRHEMQNRCPELLITNYSMLEYMLMRPIERNIFEQTKEWLKADEMNELILVLDEAHMYRGAGGAEVALLIRRLCARLDIPRERMRCILTSASLGSIEDGERFAQDLTGLSPTSSRKFRIIEGTRESRPESQIVTSKEANALAEFDLNSFQCVAEDLESAYAAIESLAERMGWQKPMIKDHSTLRNWLFDNLTGFGPIETLIEIVSGKAVKLNILSENLFPDSPQQIAERATDALLALGCYAQRASDGRVLIPTRMHLFYRGLPGLYACIDPDCNQRLGNHSGPTILGRLYTKPLDQCKCASKGRVYELFTHRDCGAAFIRGYVSSEMDFVWHQPNGPLSEDEDIDLVPIDILVEETPHVHSDYQDRWLHIATGRLSKQCQDEDSGYRKVFIPDRVKSGSEITFDECPVCMRKTRSAQNEPSKIMDHVTKGEAPFTTLVRTQISHQPASRPIDGKHPNGGKKVLIFSDGRQKAARLARDIPRDIELDLFRQSIALACSKLKDINREPKPTSVLYLAFLSVLSEHDLLIFDGEDSRKVVMARDEFYRDYNSDLAQAFDDNFSPQESPSRYKIALLKLLCSNYYSLSGTTVGFVEPSQLKSKKMWEDVQSKKLNIESKDVHALAVAWIDTLLTEFAFDESIDSTLRIKAAGFYKPTWGSQGRFGKALRKTLIQHPAMGELYVEVLEEIFRTHLTLGKDGVYFLAPNALRLKIDLLHVWKQCNDCTALMPFALEHSTCLACGSNSVKTVEPSESSYINARKGFWRSPVEEVLVSNSRLLNLSVEEHTAQLSHRDRASVHATTELYELRFQDVLINDNDKPIDVLSCTTTMEVGVDIGSLVAVALRNVPPQRENYQQRAGRAGRRGASVSTVVTYSQNGPHDSYYFLNPERIVAGSPRTPEVKVNNPKIARRHVHSFLVQTFFHELMEQGIYNPTEKTAILEKALGTTRDFFHGAKDTGLNLDSFNNWVKNRILSTNGDLRTSVAAWLPPVLETGGLSASDWFAKVAEEFLNTLHGLAEIVPQIAVLVDEENEDDEQTSGGMKFAQEELLEFLFYHGLLPSYAFPTSLCSFLVEKIVKNIRGSFEVRTVQQPQQSISQALSEYAPGRLIVIDRKTYRSGGVFSNALKGELNRARKLFNNPKKFIHCDKCSFVRDPHNNQNSENTCPICGGILKVEIMIQPEVFGPENAKELNEDDREQEITYVTAAQYPQPVDPEDFKFNNGGAHIVFTHAIDQKLVTVNRGKNEGGSSGFSVCCECGAASVYDSYSPAKGAHERPYKYIATKETPRLCSGEYKRVFLGHDFRTDLLLLRITVGSPLVTDTSNAIVLRMYEDALYTIAEALRLAASRHKQLDLDPAEFGSGFRILPTIEEDTQALDLFLYDTLSGGAGYAEVAAANLDDILTATLALLEGCECDTSCTDCLNHFHNQHIQSRLDRKLGASLLRYALYGMVPRCASPDIQVEKLSQLRASLELDGFQCLIKGTQEAPMIVSLNDRSVAVGSYPGLIDRPDFQHDVYKSKNTNAHIAFNEYLLRSNLPQAHQNIRKLLR

SEQ ID NO: 24057 - protein, 404 aa, Escherichia coli; identical to SEQ ID NO: 24039

SEQ ID NO: 24058 - protein, 627 aa, Escherichia coli; identical to SEQ ID NO: 24041

SEQ ID NO: 24059 - protein, 347 aa, Escherichia coli
MEWRAVSRDKALDMLSTALNCRFDDEGLRISAVSECLRSVLYQYSISETEEARQTVTSLRLTSAVRRKLVPLWPDIADIDNAIHPGIMSILNSLAELGDMIKLEGGNWLTAPPHAVRIDNKMAVFFGGEPSCTFSTGVVAKSAGRVRLVEEKVCTGSVEIWDANEWIGAPAEGNEEWSSRLLSGTISGFIDAPGNMSETTAYVRGKWLHLSELSFNKKQIYLCRMSVDNHFSYYLGEIEAGRLCRMNSLESSDNVRRLRFFLDTKDNCPLKVRIKISNGLARLRLTRRLPRRETKVLLLGWRESGFENEHSGITHHVFPEEILPIVRSAFEGLGIIWINEFTRRNEI

SEQ ID NO: 24060 - protein, 1836 aa, Escherichia coli
MINKNKVTERSGIHDTVKSLSENLRKYIEAQYHIRDEGLIAERRALLQQNETIAQAPYIEATPIYEPGAPYSELPIPEAASNVLTQLSELGIGLYQRPYKHQSQALESFLGEDASDLVIATGTGSGKTESFLMPIIGKLAIESSERPKSASLPGCRAILLYPMNALVNDQLARIRRLFGDSEASKILRSGRCAPVRFGAYTGRTPYPGRRSSRRDELFIKPLFDEFYNKLANNAPVRAELNRIGRWPSKDLDAFYGQSASQAKTYVSGKKTGKQFVLNNWGERLITQPEDRELMTRHEIQNRCPELLITNYSMLEYMLMRPIERNIFEQTKEWLKADEMNELILVLDEAHMYRGAGGAEVALLIRRLCARLDIPRERMRCILTSASLGSIEDGERFAQDLTGLSPTSSRKFRIIEGTRESRPESQIVTSKEANALAEFDLNSFQCVAEDLESAYAAIESLAERMGWQKPMIKDHSTLRNWLFDNLTGFGPIETLIEIVSGKAVKLNILSENLFPDSPQQIAERATDALLALGCYAQRASDSRVLIPTRMHLFYRGLPGLYACIDPDCNQRLGNHSGPTILGRLYTKPLDQCKCASKGRVYELFTHRDCGAAFIRGYVSSEMDFVWHQPNGPLSEDEDIDLVPIDILVEETPHVHSDYQDRWLHIATGRLSKQCQDEDSGYRKVFIPDRVKSGSEITFDECPVCMRKTRSAQNEPSKIMDHVTKGEAPFTTLVRTQISHQPASRPIDGKHPNGGKKVLIFSDGRQKAARLARDIPRDIELDLFRQSIALACSKLKDINREPKPTSVLYLAFLSVLSEHDLLIFDGEDSRKVVMARDEFYRDYNSDLAQAFDDSFSPQESPSRYKIALLKLLCSNYYSLSGTTVGFVEPSQLKSKKMWEDVQSKKLNIESKDVHALAVAWIDTLLTEFAFDESIDSTLRIKAAGFYKPTWGSQGRFGKALRKTLIQHPAMGELYVEVLEEIFRTHLTLGKDGVYFLAPNALRLKIDLLHVWKQCNDCTALMPFALEHSTCLACGSNSVKTVEPSESSYINARKGFWRSPVEEVLVSNSRLLNLSVEEHTAQLSHRDRASVHATTELYELRFQDVLINDNDKPIDVLSCTTTMEVGVDIGSLVAVALRNVPPQRENYQQRAGRAGRRGASVSTVVTYSQNGPHDSYYFLNPERIVAGSPRTPEVKVNNPKIARRHVHSFLVQTFFHELMEQGIYNPAEKTAILEKALGTTRDFFHGAKDTGLNLDSFNNWVKNRILSTNGDLRTSVAAWLPPVLETGGLSASDWFAKVAEEFLNTLHGLAEIVPQTAVLVDEENEDDEQTSGGMKFAQEELLEFLFYHGLLPSYAFPTSLCSFLVEKIVKNIRGSFEVRTVQQPQQSISQALSEYAPGRLIVIDRKTYRSGGVFSNALKGELNRARKLFNNPKKFIHCDKCSFVRDPHNNQNSENTCPICGGILKVEIMIQPEVFGPENAKELNEDDREQEITYVTAAQYPQPVDPEDFKFNNGGAHIVFTHAIDQKLVTVNRGKNEGESSGFSVCCECGAASVYDSYSPAKGAHERPYKYIATKETPRLCSGEYKRVFLGHDFRTDLLLLRITVGSPLVTDTSNAIVLRMYEDALYTIAEALRLAASRHKQLDLDPAEFGSGFRILPTIEEDTQALDLFLYDTLSGGAGYAEVAAANLDDILTATLALLESCECDTSCTDCLNHFHNQHIQSRLDRKLGASLLRYALYGMVPRCASPDIQVEKLSQLRASLELDGFQCIIKGTQEAPMIVSLNDRSVAVGSYPGLIDRPDFQHDVYKSKHTNAHIAFNEYLLRSNLPQSHQNIRKILR

SEQ ID NO: 24061 - protein, 404 aa, Escherichia coli; identical to SEQ ID NO: 24039

SEQ ID NO: 24062 - protein, 548 aa, Escherichia coli; identical to SEQ ID NO: 24040

SEQ ID NO: 24063 - protein, 627 aa, Escherichia coli; identical to SEQ ID NO: 24041

SEQ ID NO: 24064 - protein, 347 aa, Escherichia coli; identical to SEQ ID NO: 24042

SEQ ID NO: 24065 - protein, 1836 aa, Escherichia coli
MINKNKVTERSGIHDTVKSLSENLRKYIEAQYHIRDEGLIAERRALLQQNETIAQAPYIEATPIYEPGAPYSELPIPEAASNVLTQLSELGIGLYQRPYKHQSQALESFLGENASDLVIATGTGSGKTESFLMPIIGKLAIESSERPKSASLPGCRAILLYPMNALVNDQLARIRRLFGDSEASKILRSGRCAPVRFGAYTGRTPYPGRRSSRRDELFIKPLFDEFYNKLANNAPVRAELNRIGRWPSKDLDAFYGQSASQAKTYVSGKKTGKQFVLNNWGERLITQPEDRELMTRHEIQNRCPELLITNYSMLEYMLMRPIERNIFEQTKEWLKADEMNELILVLDEAHMYRGAGGAEVALLIRRLCARLDIPRERMRCILTSASLGSIEDGERFAQDLTGLSPTSSRKFRIIEGTRESRPESQIVTSKEANALAEFDLNSFQCVAEDLESAYAAIESLAERMGWQKPMIKDHSTLRNWLFDNLTGFGPIETLIEIVSGKAVKLNILSENLFPDSPQQIAERATDALLALGCYAQRASDGRVLIPTRMHLFYRGLPGLYACIDPDCNQRLGNHSGPTILGRLYTKPLDQCKCSSKGRVYELFTHRDCGAAFIRGYVSSEMDFVWHQPNGPLSEDEDIDLVPIDILVEETPHVHSDYQDRWLHIATGRLSKQCQDEDSGYRKVFIPDRVKSGSEITFDECPVCMRKTRSAQNEPSKIMDHVTKGEAPFTTLVRTQISHQPASRPIDGKHPNGGKKVLIFSDGRQKAARLARDIPRDIELDLFRQSIALACSKLKDINREPKPTSVLYLAFLSVLSEHDLLIFDGEDSRKVVMARDEFYRDYNSDLAQAFDDSFSPQESPSRYKIALLKLLCSNYYSLSGTTVGFVEPSQLKSKKMWEDVQSKKLNIESKDVHALAVAWIDTLLTEFAFDESIDSTLRIKAAGFYKPTWGSQGRFGKALRKTLIQYPAMGELYVEVLEEIFRTHLTLGKDGVYFLAPNALRLKIDLLHVWKQCNDCTALMPFALEHSTCLACGSNSVKTVEPSESSYINARKGFWRSPVEEVLVSNSRLLNLSVEEHTAQLSHRDRASVHATTELYELRFQDVLINDNDKPIDVLSCTTTMEVGVDIGSLVAVALRNVPPQRENYQQRAGRAGRRGASVSTVVTYSQNGPHDSYYFLNPERIVAGSPRTPEVKVNNPKIARRHVHSFLVQTFFHELMEQGIYNPAEKTAILEKALGTTRDFFHGAKDTGLNLDSFNNWVKNRILSTNGDLRTSVAAWLPPVLETGGLSASDWFAKVAEEFLNTLHGLAEIVPQTAVLVDEENEDDEQTSGGMKFAQEELLEFLFYHGLLPSYAFPTSLCSFLVEKIVKNIRGSFEVRTVQQPQQSISQALSEYAPGRLIVIDRKTYRSGGVFSNALKGELNRARKLFNNPKKFIHCDKCSFVRDPHNNQNSENTCPICGGILKVEIMIQPEVFGPENAKELNEDDREQEITYVTAAQYPQPVDPEDFKFNNGGAHIVFTHAIDQKLVTVNRGKNEGESSGFSVCCECGAASVYDSYSPAKGAHERPYKYIATKETPRLCSGEYKRVFLGHDFRTDLLLLRITVGSPLVTDTSNAIVLRMYEDALYTIAEALRLAASRHKQLDLDPAEFGSGFRILPTIEEDTQALDLFLYDTLSGGAGYAEVAAANLDDILTATLALLESCECDTSCTDCLNHFHNQHIQSRLDRKLGASLLRYALYGMVPRCASPDIQVEKLSQLRASLELDGFQCIIKGTQEAPMIVSLNDRSIAVGSYPGLIDRPDFQHDVYKSKHTNAHIAFNEYLLRSNLPQSHQNIRKMLR

SEQ ID NO: 24066 - protein, 404 aa, Escherichia coli; identical to SEQ ID NO: 24039

SEQ ID NO: 24067 - protein, 548 aa, Escherichia coli; identical to SEQ ID NO: 24040

SEQ ID NO: 24068 - protein, 627 aa, Escherichia coli; identical to SEQ ID NO: 24041

SEQ ID NO: 24069 - protein, 347 aa, Escherichia coli; identical to SEQ ID NO: 24042

SEQ ID NO: 24070 - protein, 1836 aa, Escherichia coli
MINKNKVIERSGIHDTVKSLSENLRKYIEAQYHIRDEGLIAERRALLQQNETIAQAPYIEATPIYEPGAPYSELPIPEAASNVLTQLSELGIGLYQRPYKHQSQALESFLGENASDLVIATGTGSGKTESFLMPIIGKLAIESSERPKSASLPGCRAILLYPMNALVNDQLARIRRLFGDSEASKILRSGRCAPVRFGAYTGRTPYPGRRSSRRDELFIKPLFDEFYNKLANNAPVRAELNRIGRWPSKDLDAFYGQSASQAKTYVSGKKTGKQFVLNNWGERLITQPEDRELMTRHEIQNRCPELLITNYSMLEYMLMRPIERNIFEQTKEWLKADEMNELILVLDEAHMYRGAGGAEVALLIRRLCARLDIPRERMRCILTSASLGSIEDGERFAQDLTGLSPTSSRKFRIIEGTRESRPESQIVTSKEANALAEFDLNSFQCVAEDLESAYAAIESLAERMGWQKPMIKDHSTLRNWLFDNLTGFGPIETLIEIVSGKAVKLNILSENLFPDSPQQIAERATDALLALGCYAQRASDGRVLIPTRMHLFYRGLPGLYACIDPDCNQRLGNHSGPTILGRLYTKPLDQCKCASKGRVYELFTHRDCGAAFIRGYVSSEMDFVWHQPNGPLSEDEDIDLVPIDILVEETPHVHSDYQDRWLHIATGRLSKQCQDEDSGYRKVFIPDRVKSGSEITFDECPVCMRKTRSAQNEPSKIMDHVTKGEAPFTTLVRTQISHQPASRPIDGKHPNGGKKVLIFSDGRQKAARLARDIPRDIELDLFRQSIALACSKLKDINREPKPTSVLYLAFLSVLSEHDLLIFDGEDSRKVVMARDEFYRDYNSDLAQAFDDSFSPQESPSRYKIALLKLLCSNYYSLSGTTVGFVEPSQLKSKKMWEDVQSKKLNIESKDVHALAVAWIDTLLTEFAFDESIDSTLRIKAAGFYKPTWGSQGRFGKALRKTLIQYPAMGELYVEVLEEIFRTHLTLGKDGVYFLAPNALRLKIDLLHVWKQCNDCTALMPFALEHSTCLACGSNSVKTVEPSESSYINARKGFWRSPVEEVLVSNSRLLNLSVEEHTAQLSHRDRASVHATTELYELRFQDVLINDNDKPIDVLSCTTTMEVGVDIGSLVAVALRNVPPQRENYQQRAGRAGRRGASVSTVVTYSQNGPHDSYYFLNPERIVAGSPRTPEVKVNNPKIARRHVHSFLVQTFFHELMEQGIYNPAEKTAILEKALGTTRDFFHGAKDTGLNLDSFNNWVKNRILSTNGDLRTSVAAWLPPVLETGGLSASDWFAKVAEEFLNTLHGLAEIVPQTAVLVDEENEDDEQTSGGMKFAQEELLEFLFYHGLLPSYAFPTSLCSFLVEKIVKNIRGSFEVRTVQQPQQSISQALSEYAPGRLIVIDRKTYRSGGVFSNALKGELNRARKLFNNPKKFIHCDKCSFVRDPHNNQNSENTCPICGGILKVEIMIQPEVFGPENAKELNEDDREQEITYVTAAQYPQPVDPEDFKFNNGGAHIVFTHAIDQKLVTVNRGKNEGESSGFSVCCECGAASVYDSYSPAKGAHERPYKYIATKETPRLCSGEYKRVFLGHDFRTDLLLLRITVGSPLVTDTSNAIVLRMYEDALYTIAEALRLAASRHKQLDLDPAEFGSGFRILPTIEEDTQALDLFLYDTLSGGAGYAEVAAANLDDILTATLALLESCECDTSCTDCLNHFHNQHIQSRLDRKLGASLLRYALYGMVPRCASPDIQVEKLSQLRASLELDGFQCIIKGTQEAPMIVSLNDRSIAVGSYPGLIDRPDFQHDVYKSKHTNAHIAFNEYLLRSNLPQSHQNIRKMLR

SEQ ID NO: 24071 - protein, 404 aa, Escherichia coli; identical to SEQ ID NO: 24044

SEQ ID NO: 24072 - protein, 548 aa, Escherichia coli; identical to SEQ ID NO: 24045

SEQ ID NO: 24073 - protein, 627 aa, Escherichia coli
MSYQYSQEAKERISKLGQSEIVNFINEISPTLRRKAFGCLPKVPGFRAGHPTEIKEKQKRLIGYMFQSHPSSEERKAWKIFSLFWQFWAEEKIDKSFSMIDNLGLKENSGSIFIRELAKNFPKVARENIERLFIFSGFADDPDVINAFNLFPPAVVLARDIVVDTLPIRLDELEARISLIADNVEKKNNHIKELELKIDAFSERFDNYFNNEKSNLKIINELQSLINSETKQSDIANKSIDELYHFNEKNKQLILSLQEKLDFNALAMNDISEHEKLIKSMANEISELKNALTILCDNKRKNNELDYINELKKLTERIDTLEINTSQASKVSVTNRFTKFHEIAHYENYEYLSSSEDISNRISLNLQAVGLTKNSAETLARLTLATFVSGQIIQFSGSLADIIADAIAIAIGAPRYHIWRVPVGIISDMDSFDFIETIAESSRCLLLKGANLSAFEIYGAAIRDIVVQRQIHPTNYDHLALIATWKQGPATFPDGGMLAELGPVIDTDTLKMRGLSAILPQLKPGCLAKDKWTNIDGLQLDSVDDYVDELRALLDEAGFDGGTLWKRMVHIFYTSLIRVPNGNYIYDLYSVLSFYTLTWAKIKGGPVQKIEDIANRELKNYSAKISS

SEQ ID NO: 24074 - protein, 347 aa, Escherichia coli; identical to SEQ ID NO: 24047

SEQ ID NO: 24075 - protein, 1836 aa, Escherichia coli
MINKNKVTERSGIHDTVKSLSENLRKYIEAQYHIRDEGLIAERRALLQQNETIAQAPYIEATPIYEPGAPYSELPIPEAASNVLTQLSELGIGLYQRPYKHQSQALESFLGEDASDLVIATGTGSGKTESFLMPIIGKLAIESSERPKSASLPGCRAILLYPMNALVNDQLARIRRLFGDSEASKILRSGRCAPVRFGAYTGRTPYPGRRSSRRDELFIKPLFDEFYNKLANNAPVRAELNRIGRWPSKDLDAFYGQSASQAKTYVSGKKTGKQFVLNNWGERLITQPEDRELMTRHEMQNRCPELLITNYSMLEYMLMRPIERNIFEQTKEWLKADEMNELILVLDEAHMYRGAGGAEVALLIRRLCARLDIPRERMRCILTSASLGSIEDGERFAQDLTGLSPTSSRKFRIIEGTRESRPESQIVTSKEANALAEFDLNSFQCVAEDLESAYAAIESLAERMGWQKPMIKDHSTLRNWLFDNLTGFGPIETLIEIVSGKAVKLNILSENLFPDSPQQIAERATDALLALGCYAQRASDGRVLIPTRMHLFYRGLPGLYACIDPDCNQRLGNHSGPTILGRLYTKPLDQCKCASKGRVYELFTHRDCGAAFIRGYVSSEMDFVWHQPNGPLSEDEDIDLVPIDILVEETPHVHSDYQDRWLHIATGRLSKQCQDEDSGYRKVFIPDRVKSGSEITFDECPVCMRKTRSAQNEPSKIMDHVTKGEAPFTTLVRTQISHQPASRPIDGKHPNGGKKVLIFSDGRQKAARLARDIPRDIELDLFRQSIALACSKLKDINREPKPTSVLYLAFLSVLSEHDLLIFDGEDSRKVVMARDEFYRDYNSDLAQAFDDNFSPQESPSRYKIALLKLLCSNYYSLSGTTVGFVEPSQLKSKKMWEDVQSKKLNIESKDVHALAVAWIDTLLTEFAFDESIDSTLRIKAAGFYKPTWGSQGRFGKALRKTLIQHPAMGELYVEVLEEIFRTHLTLGKDGVYFLAPNALRLKIDLLHVWKQCNDCTALMPFALEHSTCLACGSNSVKTVEPSESSYINARKGFWRSPVEEVLVSNSRLLNLSVEEHTAQLSHRDRASVHATTELYELRFQDVLINDNDKPIDVLSCTTTMEVGVDIGSLVAVALRNVPPQRENYQQRAGRAGRRGASVSTVVTYSQNGPHDSYYFLNPERIVAGSPRTPEVKVNNPKIARRHVHSFLVQTFFHELMEQGIYNPTEKTAILEKALGTTRDFFHGAKDTGLNLDSFNNWVKNRILSTNGDLRTSVAAWLPPVLETGGLSASDWFAKVAEEFLNTLHGLAEIVPQIAALVDEENEDDEQTSGGMKFAQEELLEFLFYHGLLPSYAFPTSLCSFLVEKIVKNIRGSFEVRTVQQPQQSISQALSEYAPGRLIVIDRKTYRSGGVFSNALKGELNRARKLFNNPKKFIHCDKCSFVRDPHNNQNSENTCPICGGILKVEIMIQPEVFGPENAKELNEDDREQEITYVTAAQYPQPVDPEDFKFNNGGAHIVFTHAIDQKLVTVNRGKNEGGSSGFSVCCECGAASVYDSYSPAKGAHERPYKYIATKETPRLCSGEYKRVFLGHDFRTDLLLLRITVGSPLVTDTSNAIVLRMYEDALYTIAEALRLAASRHKQLDLDPAEFGSGFRILPTIEEDTQALDLFLYDTLSGGAGYAEVAAANLDDILTATLALLEGCECDTSCTDCLNHFHNQHIQSRLDRKLGASLLRYALYGMVPRCASPDIQVEKLSQLRASLELDGFQCLIKGTQEAPMIVSLNDRSVAVGSYPGLIDRPDFQHDVYKSKNTNAHIAFNEYLLRSNLPQAHQNIRKLLR

SEQ ID NO: 24076 - protein, 404 aa, Escherichia coli; identical to SEQ ID NO: 24044

SEQ ID NO: 24077 - protein, 548 aa, Escherichia coli; identical to SEQ ID NO: 24053

SEQ ID NO: 24078 - protein, 627 aa, Escherichia coli
MSYQYSQEAKERLSKLGQSEIVNFINEISPTLRRKAFGCLPKVPGFRAGHPTEIKEKQKRLIGYMFQSHPSSEERKAWKSFSLFWQFWAEEKIDKSFSMINNLGLKENSGSIFIRELAKNFPKVARENIERLFIFSGFANDPDVINAFNLFPPAVVLARDIVVDTLPIRLDELEARISLIADNVEKKNNHIKELELKIDAFSERFDNYFNNEKSNLKIINELQSLINSETKQSDIANKSIDELYHFNEKNKQLILSLQEKLDFNALAMNDISEHEKLIKSMANEISELKNALTILCDNKRKNNELDYINELKKLTERIDTLEINTSQASKVSVTNRFTKFHEIAHYENYEYLSSSEDISNRISLNLQAVGLTKNSAETLARLTLATFVSGQIIQFSGSLADIIADAIAIAIGAPRYHIWRVPVGIISDMDSFDFIETIAESSRCLLLKGANLSAFEIYGAAIRDIVVQRQIHPTNYDHLALIATWKQGPATFPDGGMLAELGPVIDTDTLKMRGLSAILPQLKPGCLAKDKWTNIDGLQLDSVDDYVDELRALLDEAGFDGGTLWKRMVHIFYTSLIRVPNGNYIYDLYSVLSFYTLTWAKIKGGPVQKIEDIANRELKNYSAKISS

SEQ ID NO: 24079 - protein, 347 aa, Escherichia coli; identical to SEQ ID NO: 24047

SEQ ID NO: 24080 - protein, 1836 aa, Escherichia coli; identical to SEQ ID NO: 24056

SEQ ID NO: 24081 - protein, 404 aa, Escherichia coli; identical to SEQ ID NO: 24039

SEQ ID NO: 24082 - protein, 548 aa, Escherichia coli; identical to SEQ ID NO: 24040

SEQ ID NO: 24083 - protein, 627 aa, Escherichia coli; identical to SEQ ID NO: 24041

SEQ ID NO: 24084 - protein, 347 aa, Escherichia coli; identical to SEQ ID NO: 24042

SEQ ID NO: 24085 - protein, 1836 aa, Escherichia coli; identical to SEQ ID NO: 24043

SEQ ID NO: 24086 - protein, 404 aa, Escherichia coli 97.0264; identical to SEQ ID NO: 24039

SEQ ID NO: 24087 - protein, 548 aa, Escherichia coli 97.0264; identical to SEQ ID NO: 24040

SEQ ID NO: 24088 - protein, 627 aa, Escherichia coli 97.0264
MSYQYSQEAKERISKLGQSEIVNFINEISPTLRRKAFGCLPKVPGFRAGHPTEIKEKQKRLIGYMFQSHPSSEERKAWKSFSLFWQFWAEEKIDKSFSMIDNLGLKENSGSIFIRELAKNFPKVARENIERLFIFSGFADDPDVINAFNLFPPAVVLARDIVIDTLPIRLDELEARISLIADNVEKKNNHIKELELKIDAFSEQFDNYFNNEKSSLKIINELQSLINSETKQSDIANKAIDELYHFNEKNKQLILSLQEKLDFNALAMNDISEHEKLIKSMANDISEFKNALTILCDNKIKNNELDYVNELKKITERIDTLEINTSQASEVSVTNRFTKFHEIAHYENYEYLSSSEDISNRISLNLQAVGLTKNSAEKLARLTLATFVSGQIIQFSGSLADIIADAIAIAIGAPRYHIWRVPVGIISDMDAFDFIETIAESSRCLLLKGANLSAFEIYGAAIRDIVVQRQIHPTNYDHLALIATWKQGPATFPDGGMLAELGPVIDTDTLKMRGLSATLPQLKPGCLAKDKWTNIDGLHLDSVDDYVDELRALLDEAGFDGGTLWKRMIHIFYTSLIRIPNGNYIYDLYSVLSFYTLTWAKIKGGPVQKIEDIANRELKNYSAKISS

SEQ ID NO: 24089 - protein, 347 aa, Escherichia coli 97.0264; identical to SEQ ID NO: 24042

SEQ ID NO: 24090 - protein, 1836 aa, Escherichia coli 97.0264; identical to SEQ ID NO: 24043

SEQ ID NO: 24091 - protein, 404 aa, Escherichia coli HVH 153 (3-9344314); identical to SEQ ID NO: 24039

SEQ ID NO: 24092 - protein, 548 aa, Escherichia coli HVH 153 (3-9344314); identical to SEQ ID NO: 24040

SEQ ID NO: 24093 - protein, 627 aa, Escherichia coli HVH 153 (3-9344314); identical to SEQ ID NO: 24041

SEQ ID NO: 24094 - protein, 347 aa, Escherichia coli HVH 153 (3-9344314); identical to SEQ ID NO: 24042

SEQ ID NO: 24095 - protein, 1836 aa, Escherichia coli HVH 153 (3-9344314); identical to SEQ ID NO: 24043

SEQ ID NO: 24096 - protein, 404 aa, Escherichia coli HVH 46 (4-2758776); identical to SEQ ID NO: 24039

SEQ ID NO: 24097 - protein, 548 aa, Escherichia coli HVH 46 (4-2758776); identical to SEQ ID NO: 24040

SEQ ID NO: 24098 - protein, 627 aa, Escherichia coli HVH 46 (4-2758776); identical to SEQ ID NO: 24041

SEQ ID NO: 24099 - protein, 347 aa, Escherichia coli HVH 46 (4-2758776); identical to SEQ ID NO: 24042

SEQ ID NO: 24100 - protein, 1836 aa, Escherichia coli HVH 46 (4-2758776); identical to SEQ ID NO: 24043

SEQ ID NO: 24101 - protein, 404 aa, Escherichia coli HVH 46 (4-2758776); identical to SEQ ID NO: 24039

SEQ ID NO: 24102 - protein, 548 aa, Escherichia coli HVH 46 (4-2758776); identical to SEQ ID NO: 24040

SEQ ID NO: 24103 - protein, 627 aa, Escherichia coli HVH 46 (4-2758776); identical to SEQ ID NO: 24041

SEQ ID NO: 24104 - protein, 347 aa, Escherichia coli HVH 46 (4-2758776); identical to SEQ ID NO: 24042

SEQ ID NO: 24105 - protein, 1836 aa, Escherichia coli HVH 46 (4-2758776); identical to SEQ ID NO: 24043

SEQ ID NO: 24106 - protein, 404 aa, Escherichia coli K02; identical to SEQ ID NO: 24044

SEQ ID NO: 24107 - protein, 548 aa, Escherichia coli K02
MNYAIDKFTGTLILAARATKYAQYVCPVCKKGVNLRKGKVIPPYFAHLPGHGTSDCENFVPGNSIIIETIKTISKRYMDLRLLIPVGSNSREWSLELVLPTCNLCRAKITLDVGGRSQTLDMRSMVKSRQIGAELSVKSYRIVSYSGEPDPKFVTEVERECPGLPSEGAAVFTALGRGASKGFPRAQELRCTETFAFLWRHPVAPDFPDELEIKSLASKQGWNLALVTIPEVPSVESISWLKSFTYLPVVPARTSITAIWPFLNQKTSINHVECVHSDTILLSANMAPTSSENVGPTMYAQGSSLLLSAVGVEKSPAFFILNPGENDFVGVSGSIEQDVNLFFSFYKKNVSVPRKYPSIDLVFTKGNKEKTIVSLHQRRCIEVMMEARMFGHKLEYMSMPSGVEGVARIQRQTESSVIKLVSNDDIAAHDKSMRLLSPVALSQLSDCLANLTCHVEIDFLGLGKIFLPSSSMLSLDDGEFIELSPNLRSRILSFILQMGHTLHGFSLNNDFLLVENLVDLQPEPHLLPHYRALVKEVKTNGFECNRFR

SEQ ID NO: 24108 - protein, 627 aa, Escherichia coli K02; identical to SEQ ID NO: 24046

SEQ ID NO: 24109 - protein, 347 aa, Escherichia coli K02; identical to SEQ ID NO: 24047

SEQ ID NO: 24110 - protein, 1836 aa, Escherichia coli K02; identical to SEQ ID NO: 24075

SEQ ID NO: 24111 - protein, 404 aa, Escherichia coli KOEGE 33 (68a); identical to SEQ ID NO: 24044

SEQ ID NO: 24112 - protein, 548 aa, Escherichia coli KOEGE 33 (68a); identical to SEQ ID NO: 24053

SEQ ID NO: 24113 - protein, 627 aa, Escherichia coli KOEGE 33 (68a); identical to SEQ ID NO: 24054

SEQ ID NO: 24114 - protein, 347 aa, Escherichia coli KOEGE 33 (68a); identical to SEQ ID NO: 24047

SEQ ID NO: 24115 - protein, 1836 aa, Escherichia coli KOEGE 33 (68a); identical to SEQ ID NO: 24056

SEQ ID NO: 24116 - protein, 404 aa, Escherichia coli KTE15; identical to SEQ ID NO: 24044

SEQ ID NO: 24117 - protein, 548 aa, Escherichia coli KTE15; identical to SEQ ID NO: 24107

SEQ ID NO: 24118 - protein, 627 aa, Escherichia coli KTE15; identical to SEQ ID NO: 24046

SEQ ID NO: 24119 - protein, 347 aa, Escherichia coli KTE15
MEWRAVSRDKALDMLSTALNCRFDDEGLRISAVSECLRSVLYQYSISETEEARQTVTSLRLTSAVRRKLVPLWPDIADIDNAIHPGIMSILNSLAELGDMIKLEGGNWLTAPPHAVRIDNKMAVFFGGEPSCTFSTGVVAKSAGRVRLVEEKVCTGSVEIWDANEWIGAPAEGNEEWSSRLLSGTISGFIDAPGNMSETTAYVRGKWLHLSELSFNKKQIYLCRMSVDNHFSYYLGEIEAGRLCRMNSLESSDDVRRLRFFLDTKDNCPLKIRIKISNGLARLRLTRRLPRRETKVLLLGWRESGFENEHSGITHHVFPEEILPIVRSAFEGLGIIWINEFTRRNEI

SEQ ID NO: 24120 - protein, 1836 aa, Escherichia coli KTE15; identical to SEQ ID NO: 24075

SEQ ID NO: 24121 - protein, 404 aa, Escherichia coli KTE183; identical to SEQ ID NO: 24044

SEQ ID NO: 24122 - protein, 548 aa, Escherichia coli KTE183; identical to SEQ ID NO: 24107

SEQ ID NO: 24123 - protein, 627 aa, Escherichia coli KTE183; identical to SEQ ID NO: 24046

SEQ ID NO: 24124 - protein, 347 aa, Escherichia coli KTE183; identical to SEQ ID NO: 24047

SEQ ID NO: 24125 - protein, 1836 aa, Escherichia coli KTE183; identical to SEQ ID NO: 24075

SEQ ID NO: 24126 - protein, 404 aa, Escherichia coli KTE34
MHKYPSIIVNINLREAKLKKKVREHLQSLGFTRSDSGALQAPGNTKDVIRALHSSQRAERIFANQKFITLRAAKLIKFFASGNEVIPDKISPVLERVKSGTWQGDLFRLAALTWSVPVSSGFGRRLRYLVWDESNGKLIGLIAIGDPVFNLAVRDNLIGWDTHARSSRLVNLMDAYVLGALPPYNALLGGKLIACLLRSRDLYDDFAKVYGDTVGVISQKKKQARLLAITTTSSMGRSSVYNRLKLDGIQYFKSIGYTGGWGHFHIPDSLFIELRDYLRDMDHAYADHYMFGNGPNWRLRTTKAALNALGFRDNLMKHGIQREVFISQLAENATSILQTGKGEPDLTSLLSAKEIAECAMARWMVPRSIRNPEYRLWKARDLFDFISNDSLNFPPFDEIAKTVV

SEQ ID NO: 24127 - protein, 548 aa, Escherichia coli KTE34; identical to SEQ ID NO: 24040

SEQ ID NO: 24128 - protein, 627 aa, Escherichia coli KTE34
MSYQYSQEAKERISKLGQSEIVNFINEISPTLRRKAFGCLPKVPGFRAGHPTEIKEKQKRLIGYMFQSHPSSEERKAWKSFSLFWQFWAEEKIDKSFSMIDNLGLKENSGSIFIRELAKNFPKVARENIERLFIFSGFADDPDVINAFNLFPPAVVLARDIVIDTLPIRLDELEARISLIADNVEKKNNHIKELELKIDAFSEQFDNYFNNEKSSLKIINELQSLINSETKQSDIANKAIDELYHFNEKNKQLILSLQEKLDFNALAMNDISEHEKLIKSMANDISEFKNALTILCDNKIKNNELDYVNELKKLTERIDTLEINTSQASEVSVTNRFTKFHEIAHYENYEYLSSSEDISNRISLNLQAVGLTKNSAEKLARLILATFVSGQIIQFSGSLADIIADAIAIAIGAPRYHIWRVPVGIISDMDAFDFIETIAESSRCLLLKGANLSAFEIYGAAIRDIVVQRQIHPTNYDHLALIATWKQGPATFPDGGMLAELGPVIDTDTLKMRGLSATLPQLKPGCLAKDKWTNIDGLHLDSVDDYVDELRALLDEAGFDGGTLWKRMIHIFYTSLIRIPNGNYIYDLYSVLSFYTLTWAKIKGGPVQKIEDIANRELKNYSAKISS

SEQ ID NO: 24129 - protein, 347 aa, Escherichia coli KTE34; identical to SEQ ID NO: 24042

SEQ ID NO: 24130 - protein, 1836 aa, Escherichia coli KTE34; identical to SEQ ID NO: 24043

SEQ ID NO: 24131 - protein, 404 aa, Escherichia coli KTE35; identical to SEQ ID NO: 24126

SEQ ID NO: 24132 - protein, 548 aa, Escherichia coli KTE35; identical to SEQ ID NO: 24040

SEQ ID NO: 24133 - protein, 627 aa, Escherichia coli KTE35; identical to SEQ ID NO: 24128

SEQ ID NO: 24134 - protein, 347 aa, Escherichia coli KTE35; identical to SEQ ID NO: 24042

SEQ ID NO: 24135 - protein, 1836 aa, Escherichia coli KTE35; identical to SEQ ID NO: 24043

SEQ ID NO: 24136 - protein, 404 aa, Escherichia coli KTE72; identical to SEQ ID NO: 24044

SEQ ID NO: 24137 - protein, 548 aa, Escherichia coli KTE72; identical to SEQ ID NO: 24107

SEQ ID NO: 24138 - protein, 627 aa, Escherichia coli KTE72; identical to SEQ ID NO: 24046

SEQ ID NO: 24139 - protein, 347 aa, Escherichia coli KTE72; identical to SEQ ID NO: 24047

SEQ ID NO: 24140 - protein, 1836 aa, Escherichia coli KTE72; identical to SEQ ID NO: 24075

SEQ ID NO: 24141 - protein, 404 aa, Escherichia coli KTE86; identical to SEQ ID NO: 24044

SEQ ID NO: 24142 - protein, 548 aa, Escherichia coli KTE86; identical to SEQ ID NO: 24107

SEQ ID NO: 24143 - protein, 627 aa, Escherichia coli KTE86; identical to SEQ ID NO: 24046

SEQ ID NO: 24144 - protein, 347 aa, Escherichia coli KTE86; identical to SEQ ID NO: 24047

SEQ ID NO: 24145 - protein, 1836 aa, Escherichia coli KTE86; identical to SEQ ID NO: 24075

SEQ ID NO: 24146 - protein, 404 aa, Escherichia coli KTE88; identical to SEQ ID NO: 24044

SEQ ID NO: 24147 - protein, 548 aa, Escherichia coli KTE88; identical to SEQ ID NO: 24107

SEQ ID NO: 24148 - protein, 627 aa, Escherichia coli KTE88; identical to SEQ ID NO: 24046

SEQ ID NO: 24149 - protein, 347 aa, Escherichia coli KTE88; identical to SEQ ID NO: 24047

SEQ ID NO: 24150 - protein, 1836 aa, Escherichia coli KTE88; identical to SEQ ID NO: 24075

SEQ ID NO: 24151 - protein, 404 aa, Escherichia coli KTE89; identical to SEQ ID NO: 24044

SEQ ID NO: 24152 - protein, 548 aa, Escherichia coli KTE89; identical to SEQ ID NO: 24107

SEQ ID NO: 24153 - protein, 627 aa, Escherichia coli KTE89; identical to SEQ ID NO: 24046

SEQ ID NO: 24154 - protein, 347 aa, Escherichia coli KTE89; identical to SEQ ID NO: 24047

SEQ ID NO: 24155 - protein, 1836 aa, Escherichia coli KTE89; identical to SEQ ID NO: 24075

SEQ ID NO: 24156 - protein, 404 aa, Escherichia coli KTE93; identical to SEQ ID NO: 24044

SEQ ID NO: 24157 - protein, 548 aa, Escherichia coli KTE93; identical to SEQ ID NO: 24107

SEQ ID NO: 24158 - protein, 627 aa, Escherichia coli KTE93; identical to SEQ ID NO: 24046

SEQ ID NO: 24159 - protein, 347 aa, Escherichia coli KTE93; identical to SEQ ID NO: 24047

SEQ ID NO: 24160 - protein, 1836 aa, Escherichia coli KTE93; identical to SEQ ID NO: 24075

SEQ ID NO: 24161 - protein, 404 aa, Escherichia coli MP1; identical to SEQ ID NO: 24044

SEQ ID NO: 24162 - protein, 548 aa, Escherichia coli MP1; identical to SEQ ID NO: 24107

SEQ ID NO: 24163 - protein, 627 aa, Escherichia coli MP1; identical to SEQ ID NO: 24046

SEQ ID NO: 24164 - protein, 347 aa, Escherichia coli MP1; identical to SEQ ID NO: 24047

SEQ ID NO: 24165 - protein, 1836 aa, Escherichia coli MP1; identical to SEQ ID NO: 24075

SEQ ID NO: 24166 - protein, 404 aa, Escherichia coli MS 107-1; identical to SEQ ID NO: 24044

SEQ ID NO: 24167 - protein, 251 aa, Escherichia coli MS 107-1
MYAQGSSLLLSAIGVEKSPAFFILNPGENDFVGVSGSIEQDVNLFFSFYKKNVSVPRKYPSIDLVFTKRNKEKTIVSLHQRRCIEVMMEARMFGHKLEYMSMPSGVEGVARIQRQTESSVIKLVSNDDIAAHDKSMRLLSPVALSQLSDCLANLTCHVEIDFLGLGKIFLPSSSMLSLDDGEFIELSPNLRSRILSFILQMGHTLHGFSLNNDFLLVEKLVDLQPEPHLLPHYRALVKEVKTNGFECNRFR

SEQ ID NO: 24168 - protein, 627 aa, Escherichia coli MS 107-1; identical to SEQ ID NO: 24054

SEQ ID NO: 24169 - protein, 260 aa, Escherichia coli MS 107-1
MSILNSLAELGDMIKLEGGNWLTAPPHAVRIDNKMAVFFGGEPSCTFSTGVVAKSAGRVRLVEEKVCTGSVEIWDANEWIGAPAEGNEEWSSRLLSGTISGFIDAPSNMSETTAYVRGKWLHLSELSFNKKQIYLCRMSVDNHFSYYLGEIEAGRLCRMNSLESSDDVRRLRFFLDTKDNCPLKIRIKISNGLARLRLTRRLPRRETKVLLLGWRESGFENEHSGITHHVFPEEILPIVRSAFEGLGIIWINEFTRRNEI

SEQ ID NO: 24170 - protein, 1836 aa, Escherichia coli MS 107-1
MINKNKVTERSGIHDTVKSLSENLRKYIEAQYHIRDEGLIAERRALLQQNETIAQAPYIEATPIYEPGAPYSELPIPEAASNVLTQLSELGIGLYQRPYKHQSQALESFLGEDASDLVIATGTGSGKTESFLMPIIGKLAIESSERPKSASLPGCRAILLYPMNALVNDQLARIRRLFGDSEASKILRSGRCAPVRFGAYTGRTPYPGRRSSRRDELFIKPLFDEFYNKLANNAPVRAELNRIGRWPSKDLDAFYGQSASQAKTYVSGKKTGKQFVLNNWGERLITQPEDRELMTRHEMQNRCPELLITNYSMLEYMLMRPIERNIFEQTKEWLKADEMNELILVLDEAHMYRGAGGAEVALLIRRLCARLDIPRERMRCILTSASLGSIEDGERFAQDLTGLSPTSSRKFRIIEGTRESRPESQIVTSKEANALAEFDLNSFQCVAEDLESAYAAIESLAERMGWQKPMIKDHSTLRNWLFDNLTGFGPIETLIEIVSGKAVKLNILSENLFPDSPQQIAERATDALLALGCYAQRASDGRVLIPTRMHLFYRGLPGLYACIDPDCNQRLGNHSGPTILGRLYTKPLDQCKCASKGRVYELFTHRDCGAAFIRGYVSSEMDFVWHQPNGPLSEDEDIDLVPIDILVEETPHVHSDYQDRWLHIATGRLSKQCQDEDSGYRKVFIPDRVKSGSEITFDECPVCMRKTRSAQNEPSKIMDHVTKGEAPFTTLVRTQISHQPASRPIDGKHPNGGKKVLIFSDGRQKAARLARDIPRDIELDLFRQSIALACSKLKDINREPKPTSVLYLAFLSVLSEHDLLIFDGEDSRKVVMARDEFYRDYNSDLAQAFDDNFSPQESPSRYKIALLKLLCSNYYSLSGTTVGFVEPSQLKSKKMWEDVQSKKLNIESKDVHALAVAWIDTLLTEFAFDESIDSPLRIKAAGFYKPTWGSQGRFGKALRKTLIQHPAMGELYVEVLEEIFRTHLTLGKDGVYFLAPNALRLKIDLLHVWKQCNDCTALMPFALEHSTCLACGSNSVKTVEPSESSYINARKGFWRSPVEEVLVSNSRLLNLSVEEHTAQLSHRDRASVHATTELYELRFQDVLINDNDKPIDVLSCTTTMEVGVDIGSLVAVALRNVPPQRENYQQRAGRAGRRGASVSTVVTYSQNGPHDSYYFLNPERIVAGSPRTPEVKVNNPKIARRHVHSFLVQTFFHELMEQGIYNPTEKTAILEKALGTTRDFFHGAKDTGLNLDSFNNWVKNRILSTNGDLRTSVAAWLPPVLETGGLSASDWFAKVAEEFLNTLHGLAEIVPQIAVLVDEENEDDEQTSGGMKFAQEELLEFLFYHGLLPSYAFPTSLCSFLVEKIVKNIRGSFEVRTVQQPQQSISQALSEYAPGRLIVIDRKTYRSGGVFSNALKGELNRARKLFNNPKKFIHCDKCSFVRDPHNNQNSENTCPICGGILKVEIMIQPEVFGPENAKELNEDDREQEITYVTAAQYPQPVDPEDFKFNNGGAHIVFTHAIDQKLVTVNRGKNEGGSSGFSVCCECGAASVYDSYSPAKGAHERPYKYIATKETPRLCSGEYKRVFLGHDFRTDLLLLRITVGSPLVTDTSNAIVLRMYEDALYTIAEALRLAASRHKQLDLDPAEFGSGFRILPTIEEDTQALDLFLYDTLSGGAGYAEVAAANLDDILTATLALLEGCECDTSCTDCLNHFHNQHIQSRLDRKLGASLLRYALYGMVPRCASPDIQVEKLSQLRASLELDGFQCLIKGTQEAPMIVSLNDRSVAVGSYPGLIDRPDFQHDVYKSKNTNAHIAFNEYLLRSNLPQAHQNIRKLLR

SEQ ID NO: 24171 - protein, 530 aa, Escherichia coli MS 79-10
SMINNLGLKENSGSIFIRELAKNFPKVARENIERLFIFSGFANDPDVINAFNLFPPAVVLARDIVVDTLPIRLDELEARISLIADNVEKKNNHIKELELKIDAFSERFDNYFNNEKSNLKIINELQSLINSETKQSDIANKSIDELYHFNEKNKQLILSLQEKLDFNALAMNDISEHEKLIKSMANEISELKNALTILCDNKRKNNELDYINELKKLTERIDTLEINTSQASKVSVTNRFTKFHEIAHYENYEYLSSSEDISNRISLNLQAVGLTKNSAETLARLTLATFVSGQIIQFSGSLADIIADAIAIAIGAPRYHIWRVPVGIISDMDSFDFIETIAESSRCLLLKGANLSAFEIYGAAIRDIVVQRQIHPTNYDHLALIATWKQGPATFPDGGMLAELGPVIDTDTLKMRGLSAILPQLKPGCLAKDKWTNIDGLQLDSVDDYVDELRALLDEAGFDGGTLWKRMVHIFYTSLIRVPNGNYIYDLYSVLSFYTLTWAKIKGGPVQKIEDIANRELKNYSAKISS

SEQ ID NO: 24172 - protein, 260 aa, Escherichia coli MS 79-10; identical to SEQ ID NO: 24169

SEQ ID NO: 24173 - protein, 1836 aa, Escherichia coli MS 79-10; identical to SEQ ID NO: 24170

SEQ ID NO: 24174 - protein, 404 aa, Escherichia coli SWW33; identical to SEQ ID NO: 24044

SEQ ID NO: 24175 - protein, 548 aa, Escherichia coli SWW33; identical to SEQ ID NO: 24045

SEQ ID NO: 24176 - protein, 627 aa, Escherichia coli SWW33; identical to SEQ ID NO: 24046

SEQ ID NO: 24177 - protein, 347 aa, Escherichia coli SWW33; identical to SEQ ID NO: 24047

SEQ ID NO: 24178 - protein, 1836 aa, Escherichia coli SWW33; identical to SEQ ID NO: 24075

SEQ ID NO: 24179 - protein, 548 aa, Escherichia coli TA271; identical to SEQ ID NO: 24040

SEQ ID NO: 24180 - protein, 403 aa, Escherichia coli TA271
MINSETKQSDIANKAIDELYHFNEKNKQLILSLQEKLDFNALAMNDISEHEKLIKSMANDISEFKNALTILCDNKIKNNELDYVNELKKLTERIDTLEINTSQASEVSVTNRFTKFHEIAHYENYEYLSSSEDISNRISLNLQAVGLTKNSAEKLARLTLATFVSGQIIQFSGSLADIIADAIAIAIGAPRYHIWRVPVGIISDMDAFDFIETIAESSRCLLLKGANLSAFEIYGAAIRDIVVQRQIHPTNYDHLALIATWKQGPATFPDGGMLAELGPVIDTDTLKMRGLSATLPQLKPGCLAKDKWTNIDGLHLDSVDDYVDELRALLDEAGFDGGTLWKRMIHIFYTSLIRIPNGNYIYDLYSVLSFYTLTWAKIKGGPVQKIEDIANRELKNYSAKISS

SEQ ID NO: 24181 - protein, 347 aa, Escherichia coli TA271; identical to SEQ ID NO: 24042

SEQ ID NO: 24182 - protein, 1836 aa, Escherichia coli TA271; identical to SEQ ID NO: 24043

SEQ ID NO: 24183 - protein, 404 aa, Escherichia coli UMEA 3163-1
MHKDPSIIVNINLREAKLKKKVREHLQSLGFTRSDSGALQAPGNTKDVIRALHSSQRAERIFANQKFITLRAAKLIKFFASGNEVIPDKISPVLERVKSGTWQGDLFRLAALTWSVPVSSGFGRRLRYLVWDESNGKLIGLIAIGDPVFNLAVRDNLIGWDTHARSSRLVNLMDAYVLGALPPYNALLGGKLIACLLRSRDLYDDFAKVYGDTVGVISQKKKQARLLAITTTSSMGRSSVYNRLKLDGIQYLKSIGYTGGWGHFHIPDSLFIELRDYLRDMDHAYADHYMFGNGPNWRLRTTKAALNVLGFRDNLMKHGIQREVFISQLAENATSILQTGKGEPDLTSLLSAKEIAECAMARWIVPRSIRNPEYRLWKARDLFDFISNDSLKFPPSDEIAKTVV

SEQ ID NO: 24184 - protein, 548 aa, Escherichia coli UMEA 3163-1; identical to SEQ ID NO: 24053

SEQ ID NO: 24185 - protein, 627 aa, Escherichia coli UMEA 3163-1; identical to SEQ ID NO: 24054

SEQ ID NO: 24186 - protein, 347 aa, Escherichia coli UMEA 3163-1; identical to SEQ ID NO: 24047

SEQ ID NO: 24187 - protein, 1836 aa, Escherichia coli UMEA 3163-1; identical to SEQ ID NO: 24056

SEQ ID NO: 24188 - protein, 404 aa, Escherichia coli UMEA 3391-1; identical to SEQ ID NO: 24044

SEQ ID NO: 24189 - protein, 548 aa, Escherichia coli UMEA 3391-1; identical to SEQ ID NO: 24107

SEQ ID NO: 24190 - protein, 627 aa, Escherichia coli UMEA 3391-1; identical to SEQ ID NO: 24046

SEQ ID NO: 24191 - protein, 347 aa, Escherichia coli UMEA 3391-1; identical to SEQ ID NO: 24047

SEQ ID NO: 24192 - protein, 1836 aa, Escherichia coli UMEA 3391-1
MINKNKVTERSGIHDTVKSLSENLRKYIEAQYHIRDEGLIAERRALLQQNETIAQAPYIEATPIYEPGAPYSELPIPEAASNVLTQLSELGIGLYQRPYKHQSQALESFLGEDASDLVIATGTGSGKTESFLMPIIGKLAIESSERPKSASLPGCRAILLYPMNALVNDQLARIRRLFGDSEASKILRSGRCAPVRFGAYTGRTPYPGRRSSRRDELFIKPLFDEFYNKLANNAPVRAELNRIGRWPSKDLDAFYGQSASQAKTYVSGKKTGKQFVLNNWGERLITQPEDRELMTRHEMQNRCPELLITNYSMLEYMLMRPIERNIFEQTKEWLKADEMNELILVLDEAHMYRGAGGAEVALLIRRLCARLDIPRERMRCILTSASLGSIEDGERFAQDLTGLSPTSSRKFRIIEGTRESRPESQIVTSKEANALAEFDLNSFQCVAEDLESAYAAIESLAERMGWQKPMIKDHSTLRNWLFDNLTGFGPIETLIEIVSGKAVKLNILSENLFPDSPQQIAERATDALLALGCYAQRASDGRVLIPTRMHLFYRGLPGLYACIDPDCNQRLGNHSGPTILGRLYTKPLDQCKCASKGRVYELFTHRDCGAAFIRGYVSSEMDFVWHQPNGPLSEDEDIDLVPIDILVEETPHVHSDYQDRWLHIATGRLSKQCQDEDSGYRKVFIPDRVKSGSEITFDECPVCMRKTRSAQNEPSKIMDHVTKGEAPFTTLVRTQISHQPASRPIDGKHPNGGKKVLIFSDGRQKAARLARDIPRDIELDLFRQSIALACSKLKDINREPKPTSVLYLAFLSVLSEHDLLIFDGEDSRKVVMARDEFYRDYNSDLAQAFDDNFSPQESPSRYKIALLKLLCSNYYSLSGTTVGFVEPSQLKSKKMWEDVQSKKLNIESKDVHALAVAWIDTLLTEFAFDESIDSTLRIKAAGFYKPTWGSQGRFGKALRKTLIQHPAMGELYVEVLEEIFRTHLTLGKDGVYFLAPNALRLKIDLLHVWKQCNDCTALMPFALEHSTCLACGSNSVKTVEPSESSYINARKGFWRSPVEEVLVSNSRLLNLSVEEHTAQLSHRDRASVHATTELYELRFQDVLINDNDKPIDVLSCTTTMEVGVDIGSLVAVALRNVPPQRENYQQRAGRAGRRGASVSTVVTYSQNGPHDSYYFLNPERIVAGSPRTPEVKVNNPKIARRHVHSFLVQTFFHELMEQGIYNPTEKTAILEKALGTTRDFFHGAKDTGLNLDSFNNWVKNRILSTNGDLRTSVAAWLPPVLETGGLSASDWFAKVAEEFLNTLHGLAEIVPQIAALVDEENEDDEQTSGGMKFAQEELLEFLFYHGLLPSYAFPTSLCSFLVEKIVKNIRGSFEVRTVQQPQQSISQALSEYAPGRLIVIDRKTYRSGGVFSNALKGELNRARKLFNNPKKFIHCDKCSFVRDPHNNQNSENTCPICGGILKVEIMIQPEVFGPENAKELNEDDREQEITYVTAAQYPQPVDPEDFKFNNGGAHIVFTHAIDQKLVTVNRGKNEGGASGFSVCCECGAASVYDSYSPAKGAHERPYKYIATKETPRLCSGEYKRVFLGHDFRTDLLLLRITVGSPLVTDTSNAIVLRMYEDALYTIAEALRLAASRHKQLDLDPAEFGSGFRILPTIEEDTQALDLFLYDTLSGGAGYAEVAAANLDDILTATLALLEGCECDTSCTDCLNHFHNQHIQSRLDRKLGASLLRYALYGMVPRCASPDIQVEKLSQLRASLELDGFQCLIKGTQEAPMIVSLNDRSVAVGSYPGLIDRPDFQHDVYKSKNTNAHIAFNEYLLRSNLPQAHQNIRKLLR

SEQ ID NO: 24193 - protein, 404 aa, Escherichia coli UMEA 4076-1; identical to SEQ ID NO: 24044

SEQ ID NO: 24194 - protein, 548 aa, Escherichia coli UMEA 4076-1; identical to SEQ ID NO: 24045

SEQ ID NO: 24195 - protein, 627 aa, Escherichia coli UMEA 4076-1; identical to SEQ ID NO: 24046

SEQ ID NO: 24196 - protein, 347 aa, Escherichia coli UMEA 4076-1; identical to SEQ ID NO: 24047

SEQ ID NO: 24197 - protein, 1836 aa, Escherichia coli UMEA 4076-1; identical to SEQ ID NO: 24075

SEQ ID NO: 24198 - protein, 479 aa, Firmicutes bacterium CAG:65
MYKAFDTVFQKVVDARIIAKTSYTMSDEGVRYQCLCCGEEVYLAAANSTEKTPHFRHRKGNNDIECERYLGQPGAIEEYAALRRENNKTHVAFFFNKNQMTFEIGLVLTDEEIDTYCQNQRKLCLYTKYCTLPFLNIPISRGVLRSNEMNYYTITEYSNDYYVSLEGDPLKFSYLEIIKKGYKINIYRINKQDEHYKKNMSGLIYTDVEYVAISESKMNVKELVGLYGIEVVKDESNFVTMGRTFYVVEFVVRKENYEIKRYFQKHGYKIETSESLEILWPPMYSTDTTLVTTADTIYVSSSFRLIPHGNINIVGDKIEEDGGVYKISIDTRTIINEKNIDVLIVKNNVLCHDYSGKEPELIYLNKFNVPNDYDYFLFSKDGCVRLISGSNVYLTQGDKIIGYKNGLIKVYINGVPDNVSSLEKRINDIVKYHPQSEPFVPDEFMNIEVNDIILNYLETCYRSGVINSTVKRYIEEKKI

SEQ ID NO: 24199 - protein, 635 aa, Firmicutes bacterium CAG:65
MNYIEELTQDELKYICKTIPFSAATGYFRRYPKEFTKIRPGFRVKSLTEEMVTKLLYDFRSREFIGNFITKTVNQWIKEIDEELEKILQEGKTHEAAYIEVLSRSFFVDNIPLYYKIIGEEKTEEYLAVMGEAVLYQADKNKNNHAEIEQIKKKEAESDKRIEELNQKIAEGEKKTDRLSKKVMDLNSILERKDAIIDDEKKKNDEMSITIASLEKKLTKAEEEDTKKAEEFVKKTALLINESEKYEKQIDELKSLLEDANNTINEYHQTIVSSKDGKDALSAANKVLESQVSDLKTKIHELEEEIITFKTDKNESEEKVNRLQNDKAAIDSYNEELQQTIRDLKETLETENDSTMNTDLYDKNDESLLQMTPFCPEDMDDFEEYFLYNFENIGICETDEGASSLIEYIKQIVFDGIPLLIKRGPGINLANCLVNTICGHSSAQIYSYENGIQLSDVDIMLGTSKERIVCLDGFVGNCNEIELLAILGKHRNKIIILTYMYDKTLKYIPSEILSSVWFISMDKFSAIMQIKDITEDSSEILEKTNFYQKICTDNRSRKIFMEIAQECGIDYGTACAISNSIKDEAAMNRILLFTLLPYVANVLGMNPYNCSKRLQKYAGETGKCLNREIIMRWFG

SEQ ID NO: 24200 - protein, 338 aa, Firmicutes bacterium CAG:65
MNKLMRIMSENMNISAYTGESEGAYEYRILYSALGLWCLTSALSEKEGKKEISKNAQTILLHSLLDRYLNVCPLAKQFLTGIRNVDIAVHIRNVYEQMGYLVTLEDNQNVLNQGGETIRITDKDSIFLGIPKEEYWMNGLGIHIKNSGREIPLTEYLVRDNLMPEEYLMSCFNICDFDEKDIDCLELEFFNPFYRGKISEAWKKYRNADMTIARKSPFGPFYRVMEDTDGRLVFAIENNNDYIDSKTGAEFRRIYIALREYYLNPMVVYVCPIDKEYSQIRILGQIPNREYYYMLLNAWPQKSFIDRKNFIIRNELTSQVVSLLTNIGFKAKEGEFYG

SEQ ID NO: 24201 - protein, 1732 aa, Firmicutes bacterium CAG:65
MDRKTNGVQQYYQEIRNRLKNYIKSDYLANSETLLLYAEDILGNDCNDDINIAKEPYIETSSSYKKVIDGIKIADIPENVREVLLKLVNANLGIYSTPFEHQVRALTGALDGKDLFVSTGTGSGKTECFLWPIIAREVKEALDRPKDFSLPAVRTLIIYPMNALVSDQLARFRKIMGSEEFINIFTTSLGTERIPHFGMYTGRTPYSGESKKQSNIQLAETFRAHYLIDENASPSEIEIQKRRIEGLKSINKYPVRYGGDAGLKIFIENLEKGIHNPGPLDAEYITRFEIQQNTPDILITNYSMLEYMLMRQLEAGIWDNTKKWLEKSEDNRLMVVLDEAHMYRGSSGGEIALLLDRLFSRLGITLDKVQFILTTASMPSSTTSDEAAIASFFEGLTGKEYDKCIPLFGKKEDIKKEFRVVTDAKALVAVGTSQVTAEEICDRIRSFAEKVFRVKLPDEFSTSDAQEWLFDNLPDYEAYVMLHKLCRDGAKPHSLLRKEIFGDSEYAADALDALLIVVSLAKKEGNILFPVRLHMFVRGLQGLYACSNPKCTCDGKKYSEKEKLPLGKVISIPRERCDCGARIYELVNHVKCGALYLKVYVQKMTGTGYWYAFPSRGLRGGANDLTEMLLYICPVDYELNIKEKLGYLDPVTGKLYLSYQSDETLLKVVYPEYDEKNDYYMFKTCPKCKKGMPLKKPTDFATKGNIPFYNLTKAQFELQPPRSDLINEGKKVLLFSDSRQNAAKLALDLSKSSDADGFRQCVLLATNKLQEDGREHSLQELYQAFLEVCIEQRLYFFTGNSREKFKEHLDTAMMKIRRKKSLSRVNFDPLPSDYYEQLLTFFTESPRSFKDIGLGFLAPMDSALEECLEELEDEDDVVINEKLLRSLLVILFWDVMDGNAALGNNIEDDIRRKLPGRSRNQAFGIDGDFICSIDKKYIAGVKTLTELDDRQIRKLLDKIKRSFFGTGAETDQKYYLKLDTVKIVITNDDFKWYRCEKCGKISPYMLGKKCGACFDSEKVHMLKSEELTRFDFWRKPVLAALNEGEKIHTINTEEHTAQLSHKEITSDILSRTEDYEIRFQDIDVGEAGEESIDVLSCTTTMEVGIDIGSLTAVGLRNIPPMRENYQQRAGRAGRKNAGISTIVTYAFGGVHDSHYFRHPEEMISGDPRKPWIDRDNPKIVQRHYNMKALNSFMSTEAMKGLYDSITKVGIVTFCEKLSDAFIDHVRTLDFPTDGTVEMFCQIREKVLSKGKRSEYFNGDKETSAFDVFYSEGFIPSYSFPKNVVRFFVEGKTENGRRLSSGIDYAPERDIAVAISEYAPGRFITIDKKIYKSGGLYANPRPKGFEGNQAEYYFTSKDYKKEIIVCTECNWFGDGKEAYAECPYCHSAVERHVMIKPWGFAPAKGDPVKFEDEEEQKTYAEAPYYSYVPKDTEMQSYRNSNICFANLENRHVLTVNMGKKKNGFNICTKCGGAEVAEAVSTGNYYFSQPYHDRYLCRHEGTVATNIYLGYEFLTDMFTLDIKYDTQKMVSNADSEEKNILRSAATTLHEALKKAVSLSLDIDYNEINGGWRTRFEENGEAHIEMFFYDNLTSGAGYSSLLGKTEVLDDVFKRAYQILTECTCSRACKNCLDNFYNQRNHDVFDRTLAAQLLEYALNNKYPEDYSLEEQKKYLVPIKKLIAEDNSTSNEFRFEVIPALRKRIRDEKGKMYLNPYNLSDWLPNAFIEYIRKVHEQ

SEQ ID NO: 24202 - protein, 432 aa, Geobacillus icigianus
MISRPFITFEPLERDWELFITFPYLTPSQVMQCDVHHLHFKIKCNEMNSFISSAQLWPNSSENKLWIVPKQSYSFSFATRKDEECYEKLRLFWPEYIKGFQNHTYLFRPINQSFCMIEPRELSLSDTFYMMSRKKIEFPREMDVTPLNQKYGWFAYKIRLPFLLAEPLIEWFRKFGYDLKPPYYYLDIVDPSVFGRKGEAMLIGTGKCRIQISFRDFQLQKYSLVHIQPDYTSREYPLSSSYVDIILHKKGFHTFYIKKHEGKMLYLFYDPNANPCFSERLESGVVVDQRTLALCEEKSILKYTTVSVTDPLLFPYWIKEKNRFARELSQGGEFFHPSVEKLFIPGVWAFDFSAQEMCDLAHPDWRKVLLAYMQLEQTKCCWISNEQYRFLEFWLQNVGDKILRAKLAYYVKTYRNKVPKIVKEFIDGGRSS

SEQ ID NO: 24203 - protein, 660 aa, Geobacillus icigianus
MKTIFGIVEKERKPNKKYVFVKVLAEYRDHQLIEVQEARLHYPSEGEVIWSPAPEDIHAGKVGFYTIEERNEEDYAGRLVYSKFIVKKELENLKYYEVFPIPFSLAQNHDIVYLIQNGVDAPQQFSSEILLLTNDDYLVGPYRVKQTKEQKWVIDSSDDKLLEIRKKGMHLVKYNDKNVGIERYFVSAMLASPVEDYLDCATNDRIMRYALKTLKDQQQVQEISRKVISQLSELVSDLPPQVRYERIMRAVELLDKYQITKEDIGQFEEELLQYPVIQREIEDKLEERLAAEKARIEDEHRKVLNETEQLRRKKEYLLVEMEEIERQIKEREERLKKADKALELKIKEMKDNIFHTLVDLLPFTNLGLNISVHNESDDRNHSQWVVKDVDETTVYYEDINHLMASIAENLCMIGMQENKAWLTAKTIIGAILFRKPVVVKGEFSFELSQAIGWAVSGNDHLTVFPDIKNFTNKTLINCFSHYTRPDCVKSLHLCQIENSPAELYLQSFLDHWRVSIDESLPELILISIKEESELTDSFIQKLSFSPVISANEMITTPDIRLLRRTHRLVFGSIPVPLLVEAKILKEKSSEFNNFVEIVQEVMSFTKQKEAFKKWFRLLEDERLEEEAVSVWVTKVLLEPYIAREHAKKILEEFDSENILI

SEQ ID NO: 24204 - protein, 317 aa, Geobacillus icigianus
MLTDAWRDTIIQFRQIKRHALSLVHFYAFEDYKMNAVHFQRLIPPLQRLIKGCFFEDLRNVMKEEGQTEAQSLLELLSGLGEILKLANGYYLPLPPRCVELPVSKSLVVLSNPEGKSDKYYGCGNGYMEEGSHVPTLMIDEWMPSPTVNEFIETLKLQNPVKLSDEPTELFLPQKRRKWHPFQMNLVSKSDCYIARYALKNSQPLYFWVENMGRGDARYYKIPEYYLETAKYALEYKAQVKTTIKCAKIREDVIYVRLFKKLPMFEQKMAMLFCFPLSFIKLVEWIVPLWHYSDFIWILRRLGIGEDSIRWEGVEME

SEQ ID NO: 24205 - protein, 1786 aa, Geobacillus icigianus
MMEFTINSVSARLHQKLREYIEAQYPISHPSLLLERRELLDSPGVISKEPYIEATPVYELGPTYEQMNLPAHCKEAMTYFSELFPSVGIYKRPYVHQQEALESFLVDGHDLVVATGTGSGKTESFLHPILNSLIDEGFNRREQFQTHAVRALILYPMNALVSDQITRLRQLFGDERVSKYFRDHFGRHPLFGMYTSRTPYPGERTKEKDDYQLKEIIDYYLDIEKNRPQLALEMKKRGKWIAKNLTNFCSGKRGDWKSRYLTSPDDRELFTRHEMQTIPPDILVTNYSMLEYMLMRPIERPIWEKTRQWLAEDEANTLILVLDEAHMYRGTSGAEVALLIRRLQARLGITRDRLRCILTSASLGAEDDDSAAIEFAEQLTGKLKKRSFKLIKGVKEKRKPGRIGTTEEAYAFALLDSEQFTNRIHQYDTLRSNLEAVAKRLGWGDVPHNLDELPSYLYKSLDGFGPLELIIEQISGNAKKFSDIAKLVFPSVDMKTAQKATSHLLMLANAAKDKERVLLPVRIHLFFKGVSGIYVCTNPKCEEKRVKGNNSILGKMYDSPKLQCTCSKEARVYELLTHRKCGTAFIRGYISKKDGNYLWAEKGKGIVGEELTEIHLLVEPPYEKIQKGERSVRPVWLDIRTGYLMKSPPEDPEGYLKLYLPHDETNKNKKKKQTITFQQCPCCMRKVQGTITDLKTKGEQPFANLVREQFLLQPPVKLNKQLPNEGRKVLLFSDGRQKAARLARDIPHEVELDSFRQSILLAAQKLIDQDIEPKLSGALYCSLLQVIDEHKLYFFEGQDRKSLAYHVQILHEDFDGDYEELIENGDIELLPRFKTELLRQLCHPLYSVYTTATGYVEPVKREMARVERKLKEILSKEDIYVLTMLFIQEMLDRVAIDSTIHFYERLKIRGFGGDDWGVEKGYIPKNLENIIHLYVQSEEHKKEIVDALFKLCTESEGRYYLSPRKLKLIPGIYTTWYKCNDCKEMNIVAAKNKCVNCLSENIEILNVNSKRLDSEKGFWRSPIQKILTNHEKISNITVEEHTAQLSQKDAKIAIATTEEYELRFQDIILDVLEGPVDILSCTTTMEVGVDIGSLTAVGLRNVPPQRENYQQRAGRAGRRGTALSTVVTYAQGGPHDYYYFQQPEKMISGSARKPIVYIDNKKITKRHLNAFLIQTYFHENVSTSAVASSILSSSLGDTKSFFEGTPPFNYEQFKKWLNDNIACRFRDYPVIFDLIPDEVVSTEGILGGDMVERKWYIVKEACNELVSELERNYEKVKHTIQPIDGDDIAEVNPNDKFLDFLFNHGLLPTYAFPQDLCSFYIEGKDERTGRIIVKQRPQLEINRALSEYAPGRQIVVDKKTYRIGGIYVPNPHDPLKPAKDLLLDSLPVITYCESCLFVSLDPIQTKKCSVCGGELKNSPLLRPTGFSPEKGMEVKEGDREQEFTYAVPPQLPIPVSGEKLSLKAYSGSERLQYANEMNKQLIVMNKGTDRQEGFEICTDCGAIWPAGESEHKLAHDVPYRLKTHLGQRDSRCRGSIMKVFLGNIFNSDLLLLRMSFDEKVDFHPNHQWVHDGLKTIGEALVLAASRVLDIDYNELLSGYRILPLETKSPQHLYQADVYLFDTLSGGAGYSHIAGEMLPDIIKMAREILHECENHCETSCYKCLRHYSNQFYHHQLNRFVALELLDYIVKGELKALTLTEQQKVLAPIKRMLEIHNEKFEEFEEGGQYLIKVKSKGNRLIGAKNNIERMLVCAYSHPAIAYVSAYEVLHDLPNVYLNVVERKQQLLV

SEQ ID NO: 24206 - protein, 506 aa, Geobacillus sp. B4113_201601
MERAFNPLGQLVHAKNAHKYGVVYTCPCCGARVFKAEGRVQSAHFRHERGQGSERCELYVQRLSGSSHLHDYSVMISRPFITFEPLERDWELFITFPYLTPSQVMQCDVHHLHFKIKCNEMNSFISSAQLWPNSSENKLWIVPKQSYSFSFATRKDEECYEKLRLFWPEYIKGFQNHTYLFRPINQSFCMIEPRELSLSDTFYMMSRKKIEFPREMDVTPLNQKYGWFAYKIRLPFLLAEPLIEWFRQFGYDLKPPYYYLDIVDPSVFGRKGEAMLIGTGKCRIQISFRDFQLQKYSLVHIQPDYTSREYPLSSSYVDIILHKKGFHTFYIKKHEGKMLYLFYDPNANPCFSERLESGVVVDQRTLALCEEKSILKYTTVSVTDPLLFPYWIKEKNRFARELSQGGEFFHPSVEKLFIPGVWAFDFSAQEMCDLAHPDWRKVLLAYMQLEQTKCCWISNEQYRFLEFWLQNVGDKILRAKLAYYVKTYRNKVPKIVKEFIDGGRSS

SEQ ID NO: 24207 - protein, 660 aa, Geobacillus sp. B4113_201601; identical to SEQ ID NO: 24203

SEQ ID NO: 24208 - protein, 317 aa, Geobacillus sp. B4113_201601; identical to SEQ ID NO: 24204

SEQ ID NO: 24209 - protein, 1786 aa, Geobacillus sp. B4113_201601
MMEFTINSVSARLHQKLREYIEAQYPISHPSLLLERRELLDSPGVISKEPYIEATPVYELGPTYEQMNLPAHCKEAMTYFSELFPSVGIYKRPYVHQQEALESFLVDGHDLVVATGTGSGKTESFLHPILNSLIDEGFNRREQFQTHAVRALILYPMNALVSDQITRLRQLFGDERVSKYFRDHFGRHPLFGMYTSRTPYPGERTKEKDDYQLKEIIDYYLDIEKNRPQLALEMKKRGKWIAKNLTNFCSGKRGDWKSRYLTSPDDRELFTRHEMQTIPPDILVTNYSMLEYMLMRPIERPIWEKTRQWLAEDEANTLILVLDEAHMYRGTSGAEVALLIRRLQARLGITRDRLRCILTSASLGAEDDDSAAIEFAEQLTGKLKKRSFKLIKGVKEKRKPGRIGTTEEAYAFALLDSEQFTNRIHQYDTLRSNLQAVAKRLGWGDVPHNLDELPSYLYKSLDGFGPLELIIEQISGNAKKFSDIAKLVFPSVDMKMAQKATSHLLMLANAAKNNERVLLPVRIHLFFKGVSGIYVCTNPKCEEKRVKGNDSILGKMYDSPKLQCTCSKEARVYELLTHRKCGTAFIRGYISKKDGNYLWAEKGKGIVGEELTEIHLLVEPPYEKIQKGERSVRPVWLDIRTGYLMKSPPEDPEGYLKLYLPHDEANKNKKKKQTITFQQCPCCMRKVQGTITDLKTKGEQPFANLVREQFLLQPPVKLNKQLPNEGRKVLLFSDGRQKAARLARDIPHEVELDSFRQSILLAAQKLIDQDIEPKLSGALYCSLLQVIDEHKLYFFEGQDRKSLAYHVQILHEDFDGDYEELIENGDIELLPRFKTELLRQLCHPLYSVYTTATGYVEPVKREMARVERKLKEILSKEDIYVLTMLFIQEMLDRVAIDSTIHFYERLKIRGFGGDDWGVEKGYIPKNLENIIHLYVQSEEHKKEIVDALFKLCTESEGRYYLSPRKLKLIPGIYTTWYKCNDCKEMNIVAAKNKCVNCLSENIEILNVNSKRLDSEKGFWRSPIQKILTNHEKISNITVEEHTAQLSQKDAKIAIATTEEYELRFQDIILDVLEGPVDILSCTTTMEVGVDIGSLTAVGLRNVPPQRENYQQRAGRAGRRGTALSTVVTYAQGGPHDYYYFQQPEKMISGSARKPIVYIDNKKITKRHLNAFLIQTYFHENVSTSAVASSILSSSLGDTKSFFEGTPPFNYEQFKKWLNDNIACRFRDYPVIFDLIPDEVVSTEGILGGDMVERKWYIVKEACNELVSELERNYEKVKHTIQPIDGDDIAEVNPNDKFLDFLFNHGLLPTYAFPQDLCSFYIEGKDERTGRIIVKQRPQLEINRALSEYAPGRQIVVDKKTYRIGGIYVPNPHDPLKPAKDLLLDSLPVITYCESCLFVSLDPIQTKKCSVCGGELKNSPLLRPTGFSPEKGMEVKEGDREQEFTYAVPPQLPIPVSGEKLSLKAYSGSERLQYANEMNKQLIVMNKGTDRQEGFEICTDCGAIWPAGESEHKLAHDVPYRLKTHLGQRDSRCRGSIMKVFLGNIFNSDLLLLRMSFDEKVDFHPNHQWVHDGLKTIGEALVLAASRVLDIDYNELLSGYRILPLETKSPQHLYQADVYLFDTLSGGAGYSHIAGEMLPDIIKMAREILHECENHCETSCYKCLRHYSNQFYHHQLNRFVALELLDYIVKGELKALTLTEQQKVLAPIKRMLEIHNEKFEEFEEGGQYLIKVKSKGNRLIGAKNNIERMLVCAYSHPAIAYVSAYEVLHDLPNVYLNVVERKQQLLV

SEQ ID NO: 24210 - protein, 182 aa, Geobacillus sp. T6
GFHTFYIKKHEGKMLHLFYDPNANPYFSERLESGVVVDQRTLALCEEKSILKYTTVSVTDPLLFPYWIKEKNRFARELSQGGEFFHPSVEKLFIPGVWAFDFSAQEMCDLAHPDWRKVLLAYMQLEQTKCCWISNEQYRFLEFLLQDVGDKMLRAKLAYYVKTYRNKVPKIVKEFIDGRRSS

SEQ ID NO: 24211 - protein, 317 aa, Geobacillus sp. T6
MLIDAWENIIIQFRQIKRHVLSLVHFYAFEDYKMNPVHFQRLIPPLQRLLKGRFFEDLRNVMKEEDQTEAQSLLELLSGLGEILKLANGYYLPLPPRCVELPVSKSLVVLSNPEGKSDRYYGCGNGYMEEGSHVPTLMIDEWMTSPTVNEFIETLKLQNPVKLNDEPTELFLPQKRRKWHPFQMNLASKSDCYIARYALKNSQPLYFWVENMGRGDARYYKIPEYYLETAKYALEYKAQVKTTIKCAKIREDIIYVRLFKKFPVFEQKMAMLFCFPLSFIKPIEWIVPLWHYSDFIWVLRRLGIDEDSIRWEGVEMG

SEQ ID NO: 24212 - protein, 1786 aa, Geobacillus sp. T6
MMEFTINSVSARLHQKLREYIEAQYPISHPSLLLERRELLDSPGVISKEPYIEATPVYELGPAYEQMNLPAHCKEAMTYFSELSPSVGIYKRPYVHQQEALESFLVDGHDLVVATGTGSGKTESFLHPILNSLIDEGFNRREQFQIHAVRALILYPMNALVSDQITRLRQLFGDERVSKYFRDHFGRHPLFGMYTSRTPYPGERTKEKDDYQLKEIIDYYLDIEKNRPQLALEMKKRGKWIAKNLTNFRSGKKGDWKSRYLTSPDDRELFTRHEMQTTPPDILVTNYSMLEYMLMRPIERPIWEKTRQWLAEDEANTLILVLDEAHMYRGTSGAEVALLIRRLQARLGITRDRLRCILTSASLGAEDDNSAAIEFAEQLTGKLKKRSFKLIKGVKEKRKSGRIGTTEEAYAFALLDSEQFTNRIHQYDTLRSNLQAVAKRLGWGDVPHNLDELPSYLYKSLDGFGPLELIIEQISGNAKKFSDIAKLVFPSVDMKMAQKATSHLLMLANAAKNNERVLLPVRIHLFFKGVSGIYVCTNPKCEEKRVKGNDSILGKMYDSPKLQCTCSKEARVYELLTHRKCGTAFIRGYISKKDGNYLWAEKGKGIVGEELTEIHLLVEPPHEKIQKGERSVRPVWLDIRTGYLMKSPPEDPEGYLKLYLPHDEANKNKKKKQTITFQKCPCCMRKVQGTITDLKTKGEQPFANLVREQFLLQPPVKLNKQLPNEGRKVLLFSDGRQKAARLARDIPHEVELDSFRQSILLAAQKLIDQDIEPKLSGALYCSLLQVIDEHKLYFFEGQDRKSLAYHVQILHEDFDGDYEELIENGDIELLPRFKTELLRQLCHPLYSVYTTATGYVEPVKREMARVERKLKEILSKEDIYVLTMLFIQEMLDRVAIDSTIHFYERLKIRGFGGDDWGVEKGYIPKNLENIIHLYVQSEEHKKEIVDALFKLCTESEGRYYLSPRKLKLIPGIYTTWYKCNDCKEMNIVAAKNKCVNCLSENIEILDVNSKRLDSEKGFWRSPIQKILTNHEKISNVTVEEHTAQLSQKDAKIAIATTEEYELRFQDIILDVLEGPVDILSCTTTMEVGVDIGSLTAVGLRNVPPQRENYQQRAGRAGRRGTALSTVVTYAQGGPHDYYYFQQPEKMISGSARKPIVYIDNKKITKRHLNAFLIQTYFHENVSTSAVASSILSSSLGDTKSFFEGAPPFNYEQFKKWLNDNIACRFRDYPVIFDLIPDEVVSTEGILGGDMVERKWYIVEEACNELVSELERNYEKVKHTIQPIDGDDIAEVNPNDKFLDFLFNHGLLPTYAFPQDLCSFYIEGKDERTGRIIVKQRPQLEINRALSEYAPGRQIVVDKKTYRIGGIYVPNPHDPLKPAKDLLLDSLPVITYCESCLFVSLDPIQTKKCSVCGGELKNSPLLRPTGFSPEKGMEVKEGDREQEFTYAVPPQLPIPVSGEKLSLKAYSGSERLQYANEMNKQLIVMNKGTDRQEGFEICTDCGAIWPAGESEHKLTHDVPYRLKTHLGQRDSRCRGSIMKVFLGNIFNSDLLLLRMSFDEKVDFHPNHQWVHDGLKTIGEALVLAASRVLDIDYNELLSGYRILPLETKSPQHLYQADVYLFDTLSGGAGYSHIAGEMLPDIIKMAREILYECENHCETSCYKCLRHYSNQFYHHQLNRFVALELLDYIVKGELKTLTLTEQQKVLAPIKRMLEIHNEKFEEFEEGGRYLIKVKSKGNRLIGAKNNIERMLVCAYSQPAIAYVSAYEVLHDLPNVYLNVVEGKQQLLV

SEQ ID NO: 24213 - protein, 432 aa, Geobacillus sp. Y412MC52
MISRPFITFEPLERDWELFITFPYLTPSQVMQCDVHHLHFKIKCNEMNSFISSAQLWPNSSENKLWIVPKQSYSFSFATRKDEECYEKLGLFWPEYIKGFQNHTYLFRPINQSFCMIEPRELSLSDTFYMMSRKKIEFPREMDVTPLNQKYGWFAYKIRLPFLLAEPLIEWFRQFGYDLKPPYYYLDIVVPSIFGRKGEAMLIGTGKCRIQISFRDFQPQKYSLVHIQPDYTSREYPLSSSYVDIILHKKGFHTFYIKKHEGKMLHLFYDPNANPYFSERLESGVVVDQRTLALCEEKSILKYTTVSVTDPLLFPYWIKEKNRFARELSQGGEFFHPSVEKLFIPGVWAFDFSAQEMCDLAHPDWRKVLLAYMQLEQTKCCWISNEQYRFLEFLLQDVGDKMLRAKLAYYVKTYRNKVPKIVKEFIDGRRSS

SEQ ID NO: 24214 - protein, 660 aa, Geobacillus sp. Y412MC52
MKTIFGIVEKERKPNKKYVFVKVLAEYRDHQLIEVQEARLHYPSEGEVIWSPAPEDIHAGKVGFYTVEERNEEEYTGRPVYSKFIVRKELENLKYYEVFPIPFSLAQNHDIVYLIQNGFDAPQQFSSEILLLTNDDYLVGPYRVKQTKEQKWVIDSSDDKLLEIRKKGMHLVKYNDKNVGIERYFVSAMLASPVEDYLDCATNARIMRYALKTLKDQQQVQEISRKVISQLSELVSDLPPQVRYERIMQAIELLDKYQITKEDIGQFEEELLQYPVIQRKIEVELEERFAAEKARIEDEHRKVLNETEQLRRKKEHLLVEMEEIERQIKEREERLKKADKALELKIKEMKDNIFQTLADLLPFMNLGLNVSVHNASDDRNHSEWVVKDVDETTVYYEDINHLMTSIAENLCMIGMQENKAWLTAKTIIGAILFRKPVVVKGEFSFELSQAIGWAVAGNDHLTVFPDIRNFTNKTLINSFSCYTRPDCVKSLHLCQIENSPAELYLQSFLDHWRVSIDESLPELILISIKEESELTDSFIQKLSFSPVISANEMITTPDIRLLRKTHRLVFGSIPARLLVEGKILKEKSSEFNNFVEIVQEVMSFTKQKEAFKKWFRLLEDERFEEEAVSVWVVKVLLQPYVAREQAKKILEEFDSENILI

SEQ ID NO: 24215 - protein, 317 aa, Geobacillus sp. Y412MC52
MLIDAWENIIIQFRQIKRHVLSLVHFYAFEDYKMNPVHFQRLIPPLQRLLKGRFFEDLRNVMKEEDQTEAQSLLELLSGLGEILKLANGYYLPLPPRCVELPVSKSLVVLSNPEGKSDKYYGCGNGYMEEGSHVPTLMIDEWMPSPTVNEFIETLKLQNPVKLNDEPTELFLPQKRRKWHPFQMNLASKSDCYIARYALKNSQPLYFWVENMGRGDARYYKIPEYYLETAKYALEYKAQVKTTIKCAKIREDVIYVRLFKKFPVFEQKMAMLFCFPLSFIKPIEWIVPLWHYSDFIWVLRRLGIDEDSIRWEGVEMG

SEQ ID NO: 24216 - protein, 1787 aa, Geobacillus sp. Y412MC52
MMEFTINSVSARLHQKLREYIEAQYPISHPSLLLERRELLDSPGVISKEPYIEATPVYELGPAYEQMNLPAHCKEAMTYFSELSPSVGIYKRPYVHQQEALESFLVDGHDLVVATGTGSGKTESFLHPILNSLIDEGFNRREQFQTHAVRALILYPMNALVSDQITRLRQLFGDERVSKYFRDHFGRHPLFGMYTSRTPYPGERTKEKDDYQLKEIIDYYLDIEKHRPQLALEMKKRGKWIAKNLTNFRSGKKGDWKSRYLTSPDDRELFTRHEMQTTPPDILVTNYSMLEYMLMRPIERPIWEKTRQWLAEDEANTLILVLDEAHMYRGTSGAEVALLIRRLQARLGITRDRLRCILTSASLGAEDDNSAAIEFAEQLTGKLKKRSFKLIKGVKEKRKPGRIGTTEEAYAFALLDSEQFTNRIHQYDTLRSNLQAVAKRLGWGDVPHNLDELPSYLYKSLDGFGPLELIIEQISGNAKKFSDIAKLVFPSVDMKVAQKATSHLLMLANAAKDNERVLLPVRIHLFFKGVSGIYVCTNPKCEEKRVKGNDSILGKMYDSPKLQCTCSKEARVYELLTHRKCGTAFIRGYISKKDGNYLWAEKGKGIVGEELTEIHLLVEPPHEKIQKGERSVRPVWLDIRTGYLMKSPPEDPEGYLKLYLPHDEANKNKKKKQTITFQQCPCCMRKVQGTITDLKTKGEQPFANLVREQFLLQPPVKLNKQLPNEGRKVLLFSDGRQKAARLARDIPHEVELDSFRQSILLAAQKLIDQDIEPKLSGALYCSLLQVIDEHKLYFFEGQDRKSLAYHVQILHEDFDGDYEELIENGDIELLPRFKTELLRQLCHPLYSVYTTATGYVEPVKREMARVERKLKEILSKEDIYVLTMLFIQEMLDRVAIDSTIHFYERLKIRGFGGDDWGVEKGYIPKNLENIIHLYVQSEEHKKEIVDALFKLCTESEGRYYLSPRKLKLIPGIYTTWYKCNDCKEMNIVAAKNKCVNCLSENIEILDVNSKRLDSEKGFWRSPIQKILTNHEKISNITVEEHTAQLSQKDAKIAIATTEEYELRFQDIILDVLEGPVDILSCTTTMEVGVDIGSLTAVGLRNVPPQRENYQQRAGRAGRRGTALSTVVTYAQGGPHDYYYFQQPEKMISGSARKPIVYIDNKKITKRHLNAFLIQTYFHENVSASAVASSILSSSLGDTKSFFEGTPPFNYEQFKKWLNDNIACRFRDYPVIFDLIPDEVVSTGGILGGGDMAERKWDIVKEACNELVSELERNYEKVKHTIQPIDGDDIAEVNPNDKFLDFLFNHGLLPTYAFPQDLCSFYIEGKDERTGRIIVKQRPQLEINRALSEYAPGRQIVVDKKTYRIGGIYVPNPHDPLKPAKDLLLDSLPVITYCESCLFVSLDPIQTKKCSVCGGELKNSPLLRPTGFSPEKGMEVKEGDREQEFTYAVPPQLPIPVSGEKLSLKAYSGSERLQYANEMNKQLIVMNKGTDRQEGFEICTDCGAIWPAGESEHKLAHDVPYRLKTHLGQRDSRCRGSIMKVFLGNIFNSDLLLLRMSFDEKVDFHPNHQWVHDGLKTIGEALVLAASRVLDIDYNELLSGYRILPLETKSSQHLYQADVYLFDTLSGGAGYSHIAGEMLPDIIKMAREILHECENHCETSCYKCLRHYSNQFYHHQLNRFVALELLDYIVKGELKVLTLTEQQKVLAPIKRMLEIHNEKFEEFEEGGRYLIKVKSKGNRLIGAKNNIERMLVCAYSQPAIAYVSAYEVLHDLPNVYLNVVEGKQQLLV

SEQ ID NO: 24217 - protein, 432 aa, Geobacillus sp. Y412MC61; identical to SEQ ID NO: 24213

SEQ ID NO: 24218 - protein, 660 aa, Geobacillus sp. Y412MC61; identical to SEQ ID NO: 24214

SEQ ID NO: 24219 - protein, 317 aa, Geobacillus sp. Y412MC61; identical to SEQ ID NO: 24215

SEQ ID NO: 24220 - protein, 1787 aa, Geobacillus sp. Y412MC61; identical to SEQ ID NO: 24216

SEQ ID NO: 24221 - protein, 253 aa, Geobacillus stearothermophilus
KPPYYYLDIVAPSVFGRKGEAMLIGTGKCRIQISFRDFQLQKYSLVHIQPDYTSREYPLSSSYVDIILHKKGFHTFYIKKHEGKMLHLFYDPNANPCFSERLESGVVVDQRTLALCEEKSILKYTTVSVTDPLLFPYWIKEKNRFARELSQGGEFFHPSVEKLFIPGVWAFDFSAQEMRDLAHPDWRKVLLAYMQLEQTKCCWISNEQYRFLEFLLQDIGDKMLRAKLAYYVKTYRNKVPKIVKEFIDGRRSS

SEQ ID NO: 24222 - protein, 660 aa, Geobacillus stearothermophilus
MKTVFGIVEKERKPNKKYVFVKVLAEYRDHQLIEVQEARLHYPSEGEVIWSPAPEDIHAGKVGFYTIEERNEEDYAGRLVYSKFIVRKELENLKYYEVFPIPFSLAQNHDIVYLIQNGFDAPQQFSSEILLLTNDDYLVGPYRVKQTKEQKWVIDSSDDKLLEIRKKGMHLVKYNDKNVGIERYFVSAMLASPVEDYLDCATNDRIMRYALKTLKDQQQVQEISRKVISQLSEWVSDLPPQVHYERIMRAIELLAKYQITKEDIGQFEEELLQYPAIQRKIEDKLEERFAAEKARIEDEHRKVLNETEQLRRKKEHLLVEMEEIERQIKETEERLKKADEALELKIKEMKDNIFRTLADLLPFANLGLNVSTHNESNDRNHSQWVVKDVDETTVYYEDINHLMTSIAENLCMIGMQENKAWLIAKTIIGAILFRKPVVVKGEFSFELSQAIGWAVAGNDHLTVFPDIKNFTNKTLINCFSRYTRPDCVKSLHLCQIENSPAELYLQSFLDYWRVSIDESLPELILISIKEESELTDSFIQKLSFSPVISADEMTTTPDILSLRKTHRLVFGSIPAHLLVEGKILKEKSSEFNNFLEIVQEVMSFTKQKEAFKKWFRLLEDERLEEEAVSVWVVKVLLQPYVAREQAKKILEEFDSENILI

SEQ ID NO: 24223 - protein, 317 aa, Geobacillus stearothermophilus
MLTDAWKNTIIQFRQIKRHVLSLVHFYAFEDYKMNPVHFQRLIPPLQRLLKGRFFEDLRNVMKEEDQTEAQSLLELLSGLGEILKLANGYYLPLPPRCVELPVSKSLVVLSNPEGKSDKYYGCGSGYMEEGSHVPTLMIDEWMPSPTVNEFIETLKLQNPVKLNDEPTELFLPQKRRKWHPFQMNLASKSDCYIARYALKNSQPLYFWVENMGRGDARYYKIPEYYLETAKYALEYKAQVKTTIKCAKIREDVIYVRLFKKFPVFEQKMAMLFCFPLSFIKPIEWIVPLWHYSDFIWVLRRLGIDEDSIRWEGVEMG

SEQ ID NO: 24224 - protein, 1786 aa, Geobacillus stearothermophilus
MMEFTINSVSARLHQKLREYIEAQYPISHPSLLLERRELLDSPGVISKEPYIEATPVYELGPAYEQMNLPAHCKEAMTYFSELSPSVGIYKRPYVHQQEALESFLVDGHDLVVATGTGSGKTESFLHPILNSLIDEGFNRREQFQTHAVRALILYPMNALVSDQITRLRQLFGDERVSKYFRDHFGRHPLFGMYTSRTPYPGERTKEKDDYQLKEIIDYYLDIEKNRPQLALEMKKRGKWIAKNLTNFRSGKRGDWKSRYLTSPDDRELFTRHEMQTTPPDILVTNYSMLEYMLMRPIERPIWEKTRQWLAEDEANTLILVLDEAHMYRGTSGAEVALLIRRLQARLGITRDRLRCILTSASLGAEDDDSAAIEFAEQLTGKLKKRSFKLIKGVKEKRKPGRIGTTEEAYAFALLDSEQFTNRIHQYDTLRSNLQAVAKRLGWGDVPHNLDELPSYLYKSLDGFGPLELIIEQISGNAKKFSDIAKLVFPSVDMKMAQKATSHLLMLANAAKNNERVLLPVRIHLFFKGVSGIYVCTNPKCEEKRVKGNDSILGKMYDSPKLQCTCSKEARVYELLTHRKCGTAFIRGYISKKDRNYLWAEKGKGIVGEELTEIHLLVEPPHEKIQKGERSVRPVWLDIRTGYLMKSPPEDPEGYLKLYLPHDEANKNKKKKQTITFQQCPCCMRKVQGTITDLKTKGEQPFANLVREQFLLQPPVKLNKQLPNEGRKVLLFSDGRQKAARLARDIPHEVELDSFRQSILLAAQKLIDQDIEPKLSGALYCSLLQVIDEHKLYFFEGQDRKSLAYHVQILHEDFDGDYEELIENGDIELLPRFKTELLRQLCHPLYSVYTTATGYVEPVKREMARVERKLKEILSKEDIYVLTMLFIQEMLDRVAVDSTIHFYERLKIRGFGGDDWGVEKGYIPKNLENIIHLYVQSEEHKKEIVDALFKLCTESEGRYYLSPRKLKLIPGIYTTWYKCNDCKEMNIVVAKNKCVNCLSENIEILDVNSKRLDSEKGFWRSPIQKILTNHEKISNITVEEHTAQLSQKDAKIAIATTEEYELRFQDIILDVLEGPVDILSCTTTMEVGVDIGSLTAVGLRNVPPQRENYQQRAGRAGRRGTALSTVVTYAQGGPHDYYYFQQPEKMISGSARKPIVYIDNKKITKRHLNAFLIQTYFHENVSTSAVASSILSSSLGDTKSFFEGTPPFNYEQFKKWLNDNIACRFRDYPVIFDLIPDEVVSTEGILGGDMVERKWYIVKEACNELVSELERNYEKVKHTIQPIDGDDIAEVNPNDKFLDFLFNHGLLPTYAFPQDLCSFYIEGKDERTGRIIVKQRPQLEINRALSEYAPGRQIVVDKKTYRIGGIYVPNPHDPLKPAKDLLLDSLPVITYCESCLFVSLDPIQTKKCSVCGGELKNSPLLRPTGFSPEKGMEVKEGDREQEFTYAVPPQLPIPVSGEKLSLKAYSGSERLQYANEMNKQLIVMNKGTDRQEGFEICTDCGAIWPAGESEHKLAHDVPYRLKTHLGQRDSRCRGSIMKVFLGNIFNSDLLLLRMSFDEKVDFHPNHQWVHDGLKTIGEALVLAASRVLDIDYNELLSGYRILPLETKSPQHLYQADVYLFDTLSGGAGYSHIAGEMLPDIIKMAREILYECENHCETSCYKCLRHYSNQFYHHQLNRFVALELLDYIVKGELKALTLTEQQKVLAPIKRMLEIHNEKFEEFEEGGRYLIKVKSKGNRLIGAKNNIERMLVCAYSQPAIAYVSAYEVLHDLPNVYLNVVEGKHQLLV

SEQ ID NO: 24225 - protein, 432 aa, Geobacillus stearothermophilus
MISRPFITFEPLERDWELFITFPYLTPSQAMQCDVHHLHFKIKCNEMNSFISSAQLCPNSSENKLWIVPKQSYSFSFATRKDEKCYEKLGLFWPEYIKGFQNHTYLFRPINQSFCMIEPRELSLSDTFYMMSRKKIEFPREMDVTPLNQKYGWFAYKIRLPFLLAEPLIEWFRQFGYDLKPPYYYLDIVAPSVFGRKGEAMLIGTGKCRIQISFRDFQLQKYSLVHIQPDYTSREYPLSSSYVDIILHKKGFHTFYIKKHEGKMLHLFYDPNANPCFSERLESGVVVDQRTLALCEEKSILKYTTVSVTDPLLFPYWIKEKNRFARELSQGGEFFHPSVEKLFIPGVWAFDFSAQEMRDLAHPDWRKVLLAYMQLEQTKCCWISNEQYRFLEFLLQDIGDKMLRAKLAYYVKTYRNKVPKIVKEFIDGRRSS

SEQ ID NO: 24226 - protein, 660 aa, Geobacillus stearothermophilus; identical to SEQ ID NO: 24222

SEQ ID NO: 24227 - protein, 317 aa, Geobacillus stearothermophilus; identical to SEQ ID NO: 24223

SEQ ID NO: 24228 - protein, 1786 aa, Geobacillus stearothermophilus; identical to SEQ ID NO: 24224

SEQ ID NO: 24229 - protein, 406 aa, Hoeflea phototrophica DFL-43
MNSVVTIKSREAILKRKLRRHLHSIGFAKTKNGELIFQGEGKETVRNLHRVQREDRIKDNKNFLEARAPRLFHHFADGKHVDPSRISPVIERVSTGTQQGDLFRLASLTWSVPVSNGFGRRLRYLVWDENSGKLMGLIAIGDPVFNLAVRDRLIGWTSKDRSARLVNIMDAYVLGAIPPYNQLLGGKLVACLLRSRELYEDFKAAYGDTTGIISGEGKKARLLAVTTSSSMGRSSVYNRVKLDGVQYLESIGFTGGWGHFHIPDCLFAELRDYLRDIDHRYADQHRFGQGPNWRMRTTRAALAELGFKEDMLRHGIKREVFISRLAANADAILKSGTGKPNTDALLSTKEIAGLATERWMQPRAKRRSEYQDWTVEDLMGLFGSQSRQMLSRLEQQGFHENSAAVM

SEQ ID NO: 24230 - protein, 365 aa, Hoeflea phototrophica DFL-43
MISVVTPKNILCYCRSLLELRGEDHGINDNFLAAMLRRTAGSLCPCSRAVLRAVLVESLGHLDDEPSTLPTRIEALIDDLIVVGDLLELTEVTTGEDEAKGTWVFAAPPSFVERKSGNIFLTGIVPDQDRWLPENIRSRIFLSRGIRSIRPDDGEDLAVRLAGEGLRRLPEKTWLRAPKTLPSEKALSKASQQLAKKQQCAPVHGLDIIDPKTKPTYYKGRWTSLKNHSGLFVARRPQEFGAPLWCLVEAESGMLKRVLDLPFRGYRWRACDAAWHLQMAIDCERGVPQRYKVDHCEDGMCRLSFYSPIPLWAERRLMIFGSKCRVEKTLFSYEIPVDEAVQEEEFLQENLWIVPIDTNSDMMSA

SEQ ID NO: 24231 - protein, 1848 aa, Hoeflea phototrophica DFL-43
MQTIKKTVESLHASLKEYIEATYHISAPSLIAQRQSLLDKDGVIHRVPFLESTPKYQSGNKFSAMAGLPTAALELLERLSTPEKDLQRLVYDPPYMHQGDSLKECLINGKSIVIMTGTGSGKTESFLLPILGKFAREAEAYPKVFAEQAAMRALVMYPMNALVNDQLGRLRAMLGDPRLVETFKGWCGRPPRFARYTSRTPYAGVRTASKDGQRLSSFGDFYVDVLQSAKSSDLEKSKEAGALLTALKERGKWPAKPDLEAWFGQKGSRWESKGSFARAVTLPDDSELLTRHEVQIAPPDLLVTNYSMLEYMLMRPIERPIFDKTKEWLEKNPGETFLVVLDEAHLYRGAAGAEVGLLLRRLRDRLGIPEERLQVICATASFDDPTYALEFGAQLSGVPASTFVAVTGTLDLKSDHDAGTDADATALAAIDLRAFYEAETDEARLRSVASLLAYRGVDTEEQTEKALYQALRDFGPLGRLVNATMKEAIPIAELGALIFPEGVSADVTDQAVTTLLALGSVARPSSGLPGLLPCRVHNFFRGLPGLWVCMDPDCTELANEERGGICGKMYSQPMDTCDCGARVLELFTCRNCGTAYGRAYTDDIDEPHDLWSEPGKPQRMASGESAPLEPIDLLLEESAREDVAEPADYDLETGQLNPNTIGPRTRTVFIRQGRLVDAASNDDDGGSAPEPPGKFVPCAVCGKTARFGRSYVQDHQTKGDQPFQALLTRQIQIQPPGPQEATRFAPLRGRKVLAFSDSRQVAARLAPNIQMYSERDSLRPLIISGFKWLQDQELLRRRLGLDDLFLGVLLASQRLNVRLRPELHGHENFDAEDIVAKAINEGNLDDPVALLDLLDDVHANSAPEALLGSMLTTLSDRFYGMEALALASLCEKDRHRKKILDLPPISNLAETDEAKLALARFWLRCWNGFSLAKMPGTWIDRPASDGYRVRSRKEKAKIEAINTVITEKAARKLFWDQWHPELISTFTKSKEGGNRYLNGSELSLQFEGDWVHCTSCKSVHRPIPGHDRCLDCGNLSVDALDPDSDRVFLARKGFYRKPVTEALQEPPRQPMALIAAEHTAQLNAPQNEDVFSKAEEHELLFQDIALVGSSLRSRSTAIDILSSTTTMEVGIDLGALTGVALRNMPPGRANYQQRAGRAGRRGNAVATVLAFGSADSHDEHYFSRPDEMIRGKVIDPKLTLDNPEIARRHIRAYLLQGYHQDRLPTVDASQPHDLFSVLGSVSAFRMPDSVLNRDDFASWLMENEESLRGRIASWLPTELSDADRTELLGEFVADCLKAVDDAISSDATNDDDKDGEGDGGDEEAPEEGEERPQQASQPNKLLDRLLYCGKLPRYAFPTDVATFHVFDRDRSSPFRHIMKFAPSQGLPIALSQYAPGKQVWIAGKCYTSGAIYSVMKNDLDEAWQARKLYMQCSECGYAKTYKQGEVVRRDTSDCEACGEPCSFGPARYWLRPLGFAHPVFEEEVTSPDEIPETSYATRAKLTMGTPPRDAAGWVHANDRIRGLSTREHLMVSNTGPEDEGYTYCVKCGRIESSTTPNPSLAGPHRKPFPTKDDDLTCNGLSPTRHLFLGTDFITDIGLFSMRVEKPIELRPAHDSTKVALRTVSEALAKAACQLLEIEPGELMAEFRPALTTKGKSGKEVEIFLYDTLPGGAGFASQMAERGLELFQKALSILKHCPENCDGSCYRCLRSFKNRLEHRLLDRHVGVELLEYLLSGQQPGFNPHRLKASTTLLLNDLKRRCDDDISFEAGASVTYGEGKTIEVPILAQSAGKSFVVALSGPLTSGHPTDANLADLRDNSTKYRVIVENELEVRGNLPWVSRKVLQQIRS

SEQ ID NO: 24232 - protein, 398 aa, Hydrogenophaga sp. Root209
MGGIARIFTPEAKLKKGIRAHFTRLGFTKADDGTLILPEGGKEVVRQLHAGQRAERLRDSREFLKRALPEALPHFASGAELDPSKIQLGLIRVHSGTKDADLFRVASFTWSVPVSAGFGRRMRYLVWDHHHGRLAGIIALGDPVYNLSVRDKLVGWSVEDRAKRLVNLLDAYVLGAVAPYNMLLTGKVVACLVRSREVFDDFKASYGSTVGIISNEAKRANLLAVTTTSSMGRSSIYNRLRLDGTTYFDAIGYTIGWGHFHITDDIFGKMRDYLRLSKHPYADKHNFGEGPNWRLRTIKVALKEIGINESVLRHGIQREVFISSFCKNSISILKKGKGKPNLDDLKTVDEISELAKNRWIVPRAERRDDYKQWDRSQIRTLIRGTVAAAEKPLSANAA

SEQ ID NO: 24233 - protein, 360 aa, Hydrogenophaga sp. Root209
MNVVILSRQQAVERVGYSLGLDGSGLNGELSPALVGQALRRATSILAPCARYELERSVRQTLQPLGSPGDVVGPMVQDVLESLIVYRDLLEMRSTADEVWASAEVTIRPAAPSFVKREDGSIAVLGTAGDVITPIPEDLPARLVHRGALRLLVPTSAEPLAPRLQEFGLVELSEKAWLRLPRVEPAGNYVEEWHRRLREAPIGNRPEGLLICKPTRRGTLYRDRWNPAEVGETGLFVARRPQRFGANLWCLVDLQPNSTARIVDLFSTGDTLRSCDVAWQIQMALDARAGLAQAFRCRPNGDRSTIDFFSPIPSWAERRLFLVGRRQAGTGCLYSYEMATTAADGERRFLRESLWLVEQN

SEQ ID NO: 24234 - protein, 1851 aa, Hydrogenophaga sp. Root209
MTATIQQTIDELRRTFTEYIEATYHIGHPQVVSQRRRLLEQVGGIFQIPYLESTPRYVAGQKYDALERLPEAAKEAFNRLSSPLAGGKQLIFNPPYIHQAQALEEVLGNKKNLMIMTGTGSGKTESFLLPILGKLAIEARDRPTDFAKYNAVRAIVLYPMNALVNDQLGRLRLLFGNPAVVAMFKEWAGRPAHFARYTSRTPYAGVRSPVKDGNRLSSIGDFFAEIESATRRHRAGRPHIAEEDARAAQLFESLSARGKWPAKQSVAAWFGQPHSQWQDRNGEYRRAVLGPDDAELLTRHEVQASPPDLLITNYSMLEYMMMRPIERPIFDRTREWLQACPDERILVVLDEAHLYRGAQGAEVGLLLRRLRERLGIGEERFQVICATASFSEQGQATAGNFGAQLTGVREDTFVPITGTLAERTPFARGTDADVSALCSVDLDGFYQDGQSAMVATRAFLDFRGAPHQADLGCALYRALEDYEPFNQLVNETMKAAIPLAELGPLAFQADAPRSHVDKAVSVLLALGSRARLAPEEPSLLPCRIHSFFRGLPGLWACMDPACSELDSTERHGPIGKLFGQPRDRCACGAPVLEYYTCRHCGTSYARAYTNDVANPQYIWANAGERLQTDAGLFEAFHPLDLLLEDPPSPERGRAATYDLQTGRLNAAHPSERARLVYLRPEAGALTEDADAHVGRAGPGEFVPCGCCGKRHGHGQSSVQDHLTKGDQPFQALLGTQIRVQPPGPRPATEFAPLRGRKVLIFSDSRQVAARLAPTLQNYSLRDAVRALLPVGFRLLADEPQIAASLVLNHAFLALVVAAHRFGVRVRPELDTGESMPIVRAAAGQMPTGVDLTELIAARCPANLMRAIVNTIKDNGLGLEPLAIASISENARISARIAGLPVLPGLAVDDSGKLAVARAWLRCWARGPGIWFGDMPPAWWSTEVTTHRGEFQPMDRVLVTREAKRTFKKEWLPRLMTFFTQSLQDGGVRLLANNLALEIGGQWVRCATCKSVHRPVGLLTTCIDCGSTNVNTFDPETDQVFVARRGFYREPVALAMTQREPTFMSLIAAEHTAQLNAAQPDDAFSQAENHEIRFQDIDLAWRDTDARAPAIDVLSSTTTMEVGIDIGELSGVALRNMPPGRANYQQRAGRAGRRGTAVATVVAFGSSDSHDDHYFTSPDEMIRGSVVDPRLTLENVDIARRHLRAYLLQRYHEARIPELDAHADPSLFSVLGSVRDFRDGRGALNREDFRVWLAGQAPDLEVAVNRWLPTQIPSEARSRLIADMAHDVATAVDEAIGFREPVPAETNEEQPTSETTAVDATAEAEAPAAAGADQETDFADPSADKLLDRLLYWGVLPRYAFPTDVAPFYVFNRALSTPFRPRMDFAPTQGLNVALSQYAPNKQIWIKGKQYTSKAIYSPFRDVRSDAWRKRKLYFECQVCGHAKTEPYVEERRSGRFRCEACQTPDSFGPGRSWFRPPGFAHPIDRDPVTAPDDPNETAYATRAKLIMQTPGPELGWIAIGDRIRAFPTRDHLLVSNSGPEGEGYNYCVSCGRIEAATDPEMNLYQPHSRPYPSNEPGPCPGTRVANRIVLGTDFRTDIALFSLPLDRPFRVRPGNDETDSALRTVCEAVAKAACQLLEIESGEVLAEYRPALTDAGAAGLEVELFVYDTLAGGAGFSPQLVARGDELFRKALSILADCPERCDASCYRCLRSFRNKIDHRLLDRVLGQQLLQHAMAGGYTAYPPERAEATSDLLYDDLRRQLSDDFAFERNAVRQPAGFGKVNVPIILTRRSTGAETWIAISSAIACDVPVDAQLRETLAPDDRGAVLCVDDLLVRRHLAAAVDRVRLSLN

SEQ ID NO: 24235 - protein, 419 aa, Hyphomicrobium denitrificans 1NES1
MRQPPPDKGKCTRTLRGDLLSKKATVVRVSTREAGLKRRLRRHLTSLGFQRTDEGDLAPPGTGKEAIRTVHGVQREDRLAANKQFLSDQFLKLAKHFASGNEVDPQKISPALERIETGTWQGDLFRLAALTWSVPVSNGFGRRLRYLVWDENNNKLMGIIAIGDPVFNLHVRDSLIDWTVKDRSKRLVNIMDAYVLGALPPYNMLLGGKLVACLLRTRDIYNDFAKAYGGTKGIISKQEKKARLLAITTSSSMGRSSVYNRLKLGGVEYFKSIGYTGGWGHFHIPDSLFLDLRDYLRHIDHSYADCNRFGQGPNWRLRTTRAALAALGFKEDMLRHGIQREVFFCQLASNAAKLLHSGEGRPNLTSLLTAEEVSKLAVERWIVPRALRRPEFKEWEAENIAVLLGDQRGKLLAKLARTG

SEQ ID NO: 24236 - protein, 370 aa, Hyphomicrobium denitrificans 1NES1
MVITELRPDDVLADCRRALHLAAAAGTLIDDGLLAALLRRSAGMRCPCSRAALRASLVESLQGLSQDVGQLADRIDEIIDALIVAGDLLELSDVVTDDPGAKGTWVYAAPPGFVARSSGSIFLIGVVPDQDTFLPEGLASRVTHEGFTRLIAQQPGEDLPAELREQGLQELSEHVWLKCPKMESAQEMLAALEYRLASQPPSGAIGDLQILDSAQPVTYYRGRWTAPKRQSGNFVARRPQEFGASLWCFVTLQDGVPARLLDFPLKKSRWRGCDAAWHVQMALDRRFGHPQLYRRRAANDGVRLDFFSPLPLWAERRLIIFGGPVAPEKCLMSYWLPSSEAKVEERFLQDRLWLSAADGASEGGSRANNP

SEQ ID NO: 24237 - protein, 1846 aa, Hyphomicrobium denitrificans 1NES1
MQTILETIENLHGSLRDYIEATYHISARSLIERRKELLDCPGVIHQVPYLESTPRYQTGEKFADMKGLPPAALQVYSLLTKADGDLPRLIYDPPYKHQSESIRGCLIDGKNLVVMTGTGSGKTESFLLPILGKLAREANAKPASFRDNPAMRALILYPMNALVNDQLGRLRSLFGDPRLVKLFKSWAGRPPRFARYTSRTPYAGIRTTKKDSVKLKSFGEFYADIERRAGGEESDDQKEAKRLLAALKERGKWPAKPYLTAWFGEKNSGWADRKTGEFVRAVTLPDDSELLTRHEVQAAPPDLLVTNYSMLEYMLMRPIERTIFDRTREWLEKNPIEKFLVVLDEAHLYRGAAGAEVGLLLRRLRDRLGASSERFQVICATASFKDHEYAPEFGAQISGLPPETFIPIRGSLDLRSHSATGSNHDAEVLASIDLKTFYDAVEDVGRLAAIKPLLEYRHVSGSHTAEAALYHALSEFGPMGLLVNATMQQALPVAELGRDLFPTSPPATADTAVTALMAFGSVARLDPKTPGLLPCRVHNFFRGLPGLWVCMDPNCSEIAEEDRDGICGKMYSQPLERCECGARVLELYTCRNCGTAHARAYTDDVDAPSALWSKPGRALRMAAGATTPLLPLDLLLEEPAIEDVAEPADYDLETGRLNPPNLGSRTRTVYVRSDRVCEAVDEDDDATAGFEARGQFVPCAVCGKTARFGRSYVQDHQTKGDQPFQALVARQLQIQPPAPVPPTRFAPLQGRKVLAFSDSRQVAARLAPNLQMYSVRDSLRPLISWGYRRLLGVPVLRSNLNLEDLYLAVLLASKELNVRLRPEMKPGESFGAEGIVERAVRAKETEDDAGLLNLCMELRNERPPEALLDNIITTIQDRFRGFEALALASIVERSKHTTALQQLPSIPGFAETPEAKVGLARAWLRCWQGHGFWLSAMPPVWWRRPRSEGTSIRGQKGKFNAMTRIINDKAALKIFWDKWSPALLALFTQDSDSGFKRLRGSELSLLFDGAWVHCDSCKSVHRPVPGLSHCLDCGSSQVKALDPDTDPVFLARNGFYRKPAIEAQNGRQPMALIAAEHTAQLNAPQNEDVFSKAEENELLFQDIALAGRNSNEAAIDVLSSTTTMEVGIDIGALSGVALRNMPPGRANYQQRSGRAGRRGNAVATVVAFGSADSHDEHYFSEPDGMIRGDVVDPKLTLDNAEIVRRHIRAFLLQNYHQDRLPQVDPNQRHDLFSVLGTVAEFRRNTSILNRDDFASWLKEHDEQLQKRVSSWIPTELKPEDRKELLEGVVADCLKAVDDAIRPGPGETNEATEADDDDDESEDAAEEGEERPRQTSRPGKLLDRLLYCGKLPRYAFPTDVATFHVFDRDRSSRFRPIMRFAPSQGLPIALTQYAPGKQVWISGKCYTSGAIYSVMSDDRFTAWESKRIYMECSECGFAKTFPIGEANRNEVRDCEACGGEDTFGPGRYWLRPPGFAHPVDAEEVTSPDDMPETSYATRAKLTMGTPDEGAGWLPVNDRIRVLPARDHLLVSNTGPNHDGYTYCVKCGRIESATDPGPKLLGPHRKPFPDDDDKQMCDGTSPTRHVVLGTDFITDIALFSMRVAAPLKLKPGHSSTAVALRTVSEALAKAACQLLEIESGELMAEFRPALTPGGTSGLEAEIFLYDTLPGGAGFSSQLSARGVELFQRALYLMKTCAANCDASCYRCLRSFKNKFEHGLLDRHVGAQLLEYLLNGEQPQFNADRLRTSTEFLFNDLLRQGVGGVQLELNAPFATPAGALTAPIMATTAAGQYIIALSGPLTTDHPADSEIARFRDNGGSIPVIVENELIVRGNLPWATRSVLQKIGGL

SEQ ID NO: 24238 - protein, 404 aa, Klebsiella oxytoca 10-5244
MHKDPSIIVNVNLREARLKKKVREHLQSLGFTKSDAGALQAPGNTKEVIRTLHSAQRAERLAANQNFITLKSSKLLKFFASGKDVIPDKISPVLERVSSGTWQGDLFRLAALTWSVPVSNGFGRRLRYLVWDESNGKLIGLIAIGDPVFNLAVRDRLIGWSTEDRSSRLVNVMDAYVLGALPPYNFLLGGKLVACLLRSRELYDDFARVYGNSVGVISQKKKRARLLAITTTSSMGRSSVYNRLKLDGIQYMEPIGYTGGWGHFHIPDSLFIELRDYLRDMDHRYADHHMFGNGPNWRLRTMKAALNALGFRDDMMKHGIQREVFISQLADNATNILQTGRGKPDLTSLLSAKDIAELAMERWMIPRSIRKTEYRSWNSDYLFDFIDNNWLSLEVETDKKKTIS

SEQ ID NO: 24239 - protein, 549 aa, Klebsiella oxytoca 10-5244
MDYAINEASGKLVSASQALRYSRYICPVCKKGVSLRRGKIIPPYFAHFRGYGTLDCENFVPAHLSFTTKENINDIVKRRMELRLLISTAKKIREWSLELALPTCNLCQAKVILDVGGRSQTIDMRGMVTRRQISAELSARPYRIVSFTGNPDPEFVREVERECPGLPSVGAAVFTAMGGGASNGFPLAQELRCTETFAFLWREPASPGFPDELDIDSLVSRQGWNLAIVTIPETLSPESISWLNSFTHLPIVPAKSSITAIWPFQTQDISINQVECIHSNFLLLSANMISTPPNETGPTMCAQGASSVLSAIGVEKSPAFFTLTPDNSDIVGVSASNDQDIKKYYSFFTNKIKNHKYPSVDLVYTKKNGVREIVSLHQRRCVELTMEARQLGYKLEYLSMPSGAEGTAKIQREIDISRINLFSSDHMAPHDSNMRLLRSDAFSKLSQCLSDVNYNLDIEFKGLGELHLAGFNKLGKDIVISNEISSSLRLRILSFILQMQSINNEVVMVNDSKLLEVLEKLNPKQHLLPHYRALVKEVIASGFEFNRFR

SEQ ID NO: 24240 - protein, 627 aa, Klebsiella oxytoca 10-5244
MSYQYSQEAKERVRKLGQSDIIDFIGEVPITLRRKVFSLMPKIPGFRVGQPLEIKEKQKRLIGYMFQTHSSPEEIYAWKSFALFWKLWAEEKIGKPFTICEEKGVEPGTGLIFIKELADTFPKASREDVERLYSFSGFTNDSKITAAFEFFRPARILARDNALDALPIRLDELEERIELAKYIIEDNESSIKSLKSATNSLATELKKYAKDNKLILKSLIDLKDIIEKEVKRTDKVNKVVDDLSISKKDIYLNLENITIKNNTYDSAIDEFYEYGKNLDCINKKIVEIQNSLEGIYEKESNDDVLNHNENYKLLAERIDILDSNFEKKSSGLIYSQCNEIHENKTIESVEHVSTHDEAFNIISSNLQAVGLNKESSKDVARLVLAAFISGQIVQLCGSLADIVADAIASAVGAPLYHEWRVPVGLISDATAFDFVQSAANSSHCLVLKGANLSAFEIYGTAIRDIVVQRQIYQTDYDHLALIATWKQGHAVFPDGGMLAELGPVIDTDTLKLRGVSVILPKLKLGVFSKRQWSEIEGMQSDVTREDISELRELLEESGFDGGNLWKRMISRFYISLMSIPDGNSTYDLYSVLFYYTLPWARVKNGPVEKIASIAERELTERGEQLSA

SEQ ID NO: 24241 - protein, 342 aa, Klebsiella oxytoca 10-5244
MEWTAVSREESLKIISAAIKCRLSNEGLRISIISECLRSVLYQYSVSDIKDTREAVASLRLTNAVRRKLAPLWPDVLDCSNVIYPGALAVLESMAELGDMIRLEGGKWLTAPLHAVRVDNKMAILLGGDPSYALPLDMDVKTIGRVRLVEQRVCKGIVELWDANEWIGAPVEGHEIWMSNLFSRTCSRLTDVPNNIGDVTVYVKGRWLKLSEIPSCEKNILLCRLAIGTSFSYFLGEFVDGELSRMSSLESSDDARRLRFYQDIREACSLKIKIKKDNGLIRMKLVRPLPRRESKVLMLGWRESGHKYEPSWIAHYIFPEEVLPIVRCTFEGLGIVLVNESK

SEQ ID NO: 24242 - protein, 1303 aa, Klebsiella oxytoca 10-5244
MIDKNKVSDRSGIHETVRSLTDNLRQYIEAQYHIRDEGLIDERRALLQKDETIAQVPYIEATPVYESGITYSELPIPKVASDILTQLSEMGVGLYPRPYQHQSQALTSFLGDEKSDLVIATGTGSGKTESFLMPIIGNLAIEATERPKSASMPGCRAILLYPMNALVNDQLARIRRLFGDSEASKVLMAGRDFPVRFGGYTGRTPYPGRRSSKRDEQYIKPLFEEFYNKIANNAPVREALEKIGRWPSKDLDAFYGSGLSQSKTYKSGKNKGKQYVSNNWGERLITQSGDRELMTRHEIQDRCPELLITNYSMLEYMLMRPIERNIFEQTRDWLKADDENELILVLDEAHMYRGAGGAEVALLIRRLCARLNIPRERMRCILTSASLGSIEEGEHFAQDLTGLSKTSSRKFRIIEGTREVRTPARMVSQKELKALAEFNLNSFQNVANNIQSALDEIDVLAEKIGWDKPIIKDHNTLRNWLFEKLTGFEPLETLIESVSGKAVRLDFLSEQVFPNFPQEMAIRALDSLLALGCYAQRSSDNRVLIPTRMHLFFRGLPGLYSCIDPECNQRLANHSKPTILGRLHTKPLDHCTCSSKGRIYELLTHRDCGAAFIRGYVDAEMNFVWHQPNGPLSEEGSIDLVSIEILVEENPHPNSEYQDRWLHIETGRLFKQCPDNSLGYRKVFIPDRFKPGTDITFDECPVCMRKTRGEPDEPSKIMDHVTKGEAPFTTLVRTQMSRQPDSRPTDIAHPNGGKKVLIFSDGRQKAARLARDIPRDIELDLFRQSIALACSKLKDITKEPRPTPILYLAFLSVLSEHDLLIFDGEDSRKVVMARTEFERDYGSDLAEAFDDDFRPQDPPSRYKMALLKLLCGNYYSLSGTTVGFVEPLPAKKERIWKEVQGKNIKIEKSDMNALAIAWIDTLLTEFSFDDSIDSALRCKAAGFYKPNWGSKGQFGKSLRKALKHHPAMDESAVNKLEEIFRNQLASEKDGTWYLSPNSLRLQIDLSHIWMQCPDCTALMPLVLGKSTCLACGSNNVKSVDPLESNYIKARKGFWRSPVEDALVSHSRLLNLNVEEHTAQLSHRDRASVHATTELYELRFQDVLINNSDRPIDVLSCTTTMEVGVDIGSLVAVALRNVPPQRENYQQRAGRAGRRGASVSTVVTYSQNGPHDSYYFLNPEYIVAGAPRTPEVKVNNPKIARRHVHSFLIQTFFHEKMEQGVNSPSEKTSILEKALGTTSDFFHGAKDTGLNLDCFDRWVEDRILSESGDLRASVERWLPSVLETNGLSLGEWFDLPPRLDTTLS

SEQ ID NO: 24243 - protein, 406 aa, Klebsiella pneumoniae MGH 32
MKSVKCKSNGEKAPVAQAFTPEASLKRKIRSHFTQLGFQKGPDGTLIRPDSGKESIRQLHSSQREERLRSSEQFISEFLPSAIPYFANGNEIDPTKIRLSLIKVSANSFESKLFRAASLTWSVPVSNGYGRRMRYLVWDRGHDRLAGIFALGDPVFNLSVRDNLIGWTSNDRSSRLVNILDAYVLGAVPPYNMLLGGKAIACLIRSREVYDDFLRNYGSTTGIISGKDKYAHLLAVTTSSSMGRSSLYNRLKLDSISYFEPIGYTVGWGHFHITDELFGEMREYLRLAEHPYADQHCFGEGSNWRLRTIKAALKQLGINQAVLRHGIQREVFFCQLAENAKEILATGKGTPDLSTLKTIDEISELARKRWIEPRALRQGYYKNWRRDDISLLIKGLKLDVITSKIA

SEQ ID NO: 24244 - protein, 903 aa, Klebsiella pneumoniae MGH 32
MDSKKNNSVQFTADNEMADLTDNTSNVTESEFLNKLQELMEREDSLTQKETVLAQKEQALQAAKDAMAQKEAELNDKYVHLQEMELQAKNGSLQFFEEKFAAFKKQLAQREAQCVSERETLEAEKEKLRQREVAVQKAEIQRDRGYADERARLDDELFSLRKVQEKDLESKRASALTALEEELTVERVSRIANLGKEIADRLSAHEAAIQQDKDELEQKRKAFLKNQAELDELRDELEYQKQRLRSNKDRLEERESDLNLEVDARVAQRKHSFESEKSVLNDEIARLRESLKTSIALISNFEVLKHKLGDEDPAAVLLKLKTYEEEINTLREDLATRPTQEMRDAFDRLTSEQNELKLACERFSEENEGLRSAARAQSDLEMQVAELTDKNKSLLRRFESVDADNNRLMEELKRLQSSYEREQDREARIRDIETPYVQKELPRAAENVEELQWLDGIRQSCIDYGLRFPRRILHAFHTALKTSEWSPVTVLAGVSGTGKSELPRLYSHFGGINFLSLAVQPNWDSQESMLGFFNSIDNKFDAQPVLRLLAQSQKAQAEGYPLGLKDAMNLILMDEMNLAHVELYFAEFLSKLELRRGMKKELPFLDVKLGAGIQPYQLPIGRNVLWAGTMNQDETTKSLSDKVLDRGIVINFPRPTTLERRRQLIPLGDQAPLLSRKLWESWWCRESKFSDDQILPFKGFIEDMNDALSKVGRALGHRVWQSIEYYMANYPDVLDAQRKNDDAGLVKAMKVAFEDQLVQKVMPKLRGIETRGKSRTDCLDRIRTQLVNDNYTIIEDFDLACEFGYGQFIWSSANYLKDDESLNGQTGNNASASDASMLSSDHAGLHHCSAAGASAIPAEISRYASNSTKELWQLTTNEIMTVLKCDAKEAKAIKYLCNATRES

SEQ ID NO: 24245 - protein, 354 aa, Klebsiella pneumoniae MGH 32
MNNIKILSRADCLKYSSRSLGLPDLQKLDNALIAQALRRTVFIEAPCSIRTVCSLVMNSLGPLTDEPENLKTLIYDIIDDLVNLGDLLEMRDEIAGETNLILRPAPPAFVLRRDGTFIIVGVAGDDVTPPQVNDFNLVYYPSGLRILTPSNTQSCRQTLIDLGLIELPMITWLRAPVSITADKLVKSWISRLPNDIYPEKIENFEIIDISKTTSYYKGRWQSLNEQHPGIYIARRPQRYGARLWCLAEIRDGLVQRFVDIHSGDARFRDCDEAWRLLAAMDALTGSPQQVRVVYEKEITVLSFTSPLPSWAIRRLSLVGERLKPHRALLQFSLPLHNSEEELHWLEESLWLTRD

SEQ ID NO: 24246 - protein, 1846 aa, Klebsiella pneumoniae MGH 32
MKTATIQQTIDELRQSLTHYIEATYHIGHPSIVKQRRELLNQIGGIYQAPYLESTPRYKSASPYNEIDSLPPAALEALRVLSDTKSGKPVIYPSPYTHQLEALQEILNNNRNLMIMTGTGSGKTESFLLPILGKFAIEACENPERFKKYNAVRALVLYPMNALVNDQLSRLRTMFGSPQTVALFEKWAKRPVLFARYTSRTPYAGLRTPNKDSKRLASIGEFFGEIEDAKRRYEHSPSDGEEYRAAKLFDTLKVRGKWPSKESVSDWLGKAPVPWAKRAICRPHDSELITRHEVHASPPDLLITNYSMLEYMMMRPIERGIFDATKEWLDACPDEKFLIVLDEAHLYRGAQGAEVGLLIRRLRERLGIPAERFQVICSTASFSDEGKKNAGVFGAQLSGVSAESFVSIVGELQLRSPEDRGSMVDISTLAAVNLKQFYSADHSQQLSAIENFLKFRGVSVKDVSDVDAKLYLALYDYAPFNRLVNETMTAAVSLSKLPEIIFDDTIPSNLLEKATTVLLAFGSRAKKTPNEASLLPCRIHSFFRGLPGLWICMDPNCPDALGDRRSPAGRLFSQPHERCSCGAPVLEYYTCRHCGTSYARAYTNDVAQPRYLWSKEGERIETASGLIEALHPLDLLIEEPPSDDKAKAAYYDLVSGQLNPDVLGEKYRTVFLAPAKPVTDSSKDTTRGAGPGQFAPCACCNQMAGHGQSSVQDHQTKGDQPFQALLGSQLRIQPPGPQQQTSFAPLRGRKVLIFSDSRQVAARLAGTLQNYSLRDAVRALLPLGYKILSRDPDFSKTLVLNHAYLSVLVAAHKLGVRLRPQLGDAETLSEVEGPSPGPSPAGIQLFQLLSSLSRCPQRLMQAISDTFKHTNMGLDLEALAIATIGEPPQISSKIVKLPDLPGVAETEEAKLTVCRAWLRCWTLDPGIWFSDMPDSWWNERVRSHQGVFTAMNRVLVSKQSKSIFKKNWLPTLLTIFTEQTMGGGHRLVASKLSLHLNGQWQRCNSCKSVHRPVGTLSRCIDCESSDVSNFDPALDEVYKARRGFYRDPIASALDVEDPQLMTIIAAEHTAQLGAAQPDEAFSHSERHEIRFQDIDVAWRDKDRPGEPAIDVLSSTTTMEVGIDIGDLSGVALRNMPPTRANYQQRAGRAGRRANAVATVVAFGSSDSHDDHYFTDPEEMIRGNVIDPRLTLENPEITRRHLRAYLLQRYHEDRIPGLIPGADPNLFSVLGKVGDFKTRGPLLNRYDFAKWLEDNAQDLANAADRWLPTELSPDDRHRLIAEMMVDATDTIDEAIDFIQSENQDVNAALEKSKDDSGDQTENEIMTESEDNVHIVDPATDKLLDRLLYRGVVPRYAFPTDVVAFHVFNQERSTPFTSVIDYAPAQGLALALSQYAPNKQLWINGKQYTSKAIYSPYPAERRDAWGKRKLYFECSTCSHARTDDYLKERENTTETCPACNTPNSFGPARVWFRPVGFAHPIDTPPETEPDSPNETARATRAKLVMQTPNPDKSWIQVSERVRAFKAREFLLVSNTGVDKDGYDYCLACGRIESSAAPEELLSQPHATPFRSEEGSICPGGAAKRHVILGTDFKTDIALFSFPLTEPFQLLPGSIEADSVLRTLCEAMAKAACQTLDIEPGEVLAEYRPALTEKGASGNEVEIFLYDTLAGGAGFSTELVNRARELFEHTRNLLASCPENCDTSCYRCLQSFRNRMDHSLLDRKLGIQFIEHAFDGGYPPYPAERTQRSLDLLARDLIRQYGTEFSFSREVQRYDNEAGAIVIPIVATRLATGAETWISLSSPLAPAIPTDHKLQKLSPQGSEKMECADDLIIRRHLPEASLQLRGKLR

SEQ ID NO: 24247 - protein, 648 aa, Lachnoclostridium phytofermentans ISDg
MRNTNTDLIDELTDDDIKILIKSDDLGNLLEPIKRNTKHYAKYKAMLGNMDKKSILVEKFLPKVVFELYKKKDFNYYKYLNDLACKKKYVFKSMIEEVFGNNFKITEVEKFTLNDYSIVFKHILKDKNSKLDFDLLYLQMKLFNITIADNLKNAIEMEWNRLSILQETKKEVAVTLAMEFEQKQEEVLEQFKREKDVLKNRINILTTQCKELQEELHKKENIIISLNKQNDLDQTKISLLEDNIQIKENEKGLLNKKILDKQEKLEQLEQVLKKKTEDFYNDINKLWKQENEQLVRDGKNLENEISIYRTQIEQLDSEIKTREEKIIEWDKYVNTYVEHLEQKLLEKKLESILFHQSMINDKDKLSEKYIPDVYDEVFVIEGSIDKELEPCKDYYDYVQIVETNLSNAGEKMGIGLVSDIFNAAINTGLSPLICGFNARRIALALTAARYGEKSEIIAIPVGFNKTKALLEQIEQAQTHSVIIEDAFGTLNEKMLLPILRCSIDKVLIFTAENNVCLQYVPRYFYNYMQLISIDRQENINININVDIYAKANHLFKSIQYTGIENGHKLARYIFGDISLDNAYVMRRGNLFTELEQAYMENSEEDVLKKYFIAEAKWLLSEEEKERINNIIDNNTERFSNKLVELLRR

SEQ ID NO: 24248 - protein, 351 aa, Lachnoclostridium phytofermentans ISDg
MKNQLLRQIERDLKLKRFINEAECDYNQRIIYSVGAAWVQTLLFGSSYKDIQRKDEYQSVDIMYVQSYLAKVLEAYLQCFDINLDWLDEDYEFDIVKKARILSSEIIQATLYNENLAEIQSRRLVPLVPRYIKYGEGLYLFKGDRDAERNLCAVGASLWKVDEVIKYEIEYRPINENAFEYYRSIVTKFPWRQKKITGEYLMFHLGNKTALLNSWKPVDIEKLPPGIHLLKLASEYNGGYLLVKKDEDVYSIVDLDPWYIENGEIYRIMYALNAWYKSPTVFKYDHKGEYIILKSHKPLPKSEKKMLMAASWPYRTYKDQYYRIVPEFLWEIITKRLNELGIILIKQGEST

SEQ ID NO: 24249 - protein, 1759 aa, Lachnoclostridium phytofermentans ISDg
MREIGIRKTHDRLTNKLVDYIKAQYFAENDLLTDAADELLFNEDTIFQEPFIEVTKNYKMSQDGFNSSRLDLERKNILNQLTNAELGVFVTPFNHQIKAIEQYYSSHDVMVTTGTGSGKTECFLWPILTDLIYEARTNEASWEQEGIRALVLYPMNALVSDQLGRMRNIIGRKKDDAYHKILCNGKYKRRARFGMYTGRTPYAGNDNADKNKDLGKVIEKNYLKSEVYEELLKVGRIPSKDLTKFAEHLSRGVQVTGKLDSELYTRGEMQKICPDILITNYSMLEYMLMRPIEEELWSKTIKWLNASEDNKLLLVIDEAHMYRGASGGEVALLIRRLMNKLNISSNKMKCILTSASVPYDKNDELQKFACGLTGRVYQENQFSIVREEIKAIKNAKRGTYEQAQSYAGLSLESLQSEVALRKGEYEKISRMNQWSKIPKDEIEISRWLYDNLSCDSLMKQIITICEKGAKPLSKIAKEVFEDNVPKQLAEQALERLLQLGITAKSSTNKVLLGSKVHMMFKGLQGIYVCTNPNCKKLHSGMGIYLGYISSKYTETCPECNGRMYELMMDRRCGTLYIRAFDDQNIENYDGLEFLWSRNNQIMKEPKEIHLWIMPEGRIDFFKLGKKTGKAKKNSTVGYLDSKTGLLFRDESHAGDEGYLKVLISSTFNEDVLAFTFNTCPNCGRDHNKITPFLTRGNEPFANIVKEQFEVQPDIKSELKNGGKKVLLFSDSRQRAATLARDMTIASDGDSGRQAIFMAQKLLDDSSGESTIDLLYYAFLKVVYDNKLSFFYGKEKEMFKRQLKKYEELYSSRTIRKFDRLKSNIGNPPDMFYQLLLKNISDSYRSLNNLGLAQVVLADQGDAGEEIEYQILEKVENLTGISGTDVYSIYNTWIQYLIVNKIAIFPEIGDDVRDSILAYERGRFGIDEIAKFPEFLNDIIKEKYDESVIQALIDRFDDITQILQSPGRNHNRRYLFGTRLILKAAENSEWIKCDRCAGISTYTLWGHCIYCGSTEYVRKVDDEHFKRYLLWRKPVIDALNRERIHNIITEEHTAQLSYKDNKKDVWGTTEKYELAFRNITLNEDEEPIDVLSCTTTMEVGIDIGSLTSVGLRNVPPMRENYQQRAGRAGRAGAAVSSIVTYTENGPHDSWYFKHPEQIISGIPRTPWIDDKNTKLIRRHINLIFLQEFFYTIRSGLDVIRTLDFFSYEDKYNYIEFLRWLKERIPMSYERQRVLIPTGDFNWKGYYKEISKTLENIADKVDEAPFIFEQTSRSDENESDSVRLIDVLFSEGVLPNYSFPRNIVHFWIEDLYGNVKESPERSVDIALSEYAPGRSLVVNKQTYISGGIYDHYTKYHREYKYKAAEPWLELDEYKKVVSCCTNPLCGWFGVNETYDECPLCKNTLEKHTMIKPWGFTAREGKSIPETHESQELSYVSVPSYSSMPSGIVMSKVGSAGYAEIENRENQKLVIVNRGPEDKGFEMCSICGAIEPSIGQPSDRNNRKRPYRNLYIKDDTMRCHHNYSNIFLGYEFNTDMMVLVIKLDSNKVDLSTGFNIWLIPALTTFAEALVLAASRELDVEFSDVKSGYRIRMVGSDIYADIYLYDGLSSGAGYAVKVSEVIESVLNRMKEIFEGCNCSASCPNCLEHYWNQRNKGKLDRFLGKDFLEFITSGKLRTEVTSQEKKYYIDQINHIAQLQGYGIIFFNRNGKYIINSRQGEKEVIIYPSMCNSEIFEGTDKLFLSDRLCRYAMPEIWNKVRNEVW

SEQ ID NO: 24250 - protein, 479 aa, Lachnospiraceae bacterium 3-2
MDKAFDVVLQSEVDATVIAKNSYRFSGERFRYQCLCCGEEVYLAAADSSERSPHFRHWRGNNDIECERYLGQPGAVEHFAFLRKNKQEHIEFCFNRDRMTFEICASFTEKELQIYEEEEKWMTVSSKYHTVPFLSIPFNKEIFVPDRKNYFTITKFSTEYFVSFDSGINCYTYHDIMRTVEKINIFRVRIQDEHCRHQASPLIYTDTEYMGISENREAIQELADLEYVVSEKEPFSFNTENRVFYGLQFSIKQAEFSILHFFQKHDYQMETSEEFSILWPPVYTKDSRFICDGDTTYVHSSFALIPHGNMNVDNTFVGEISGDILKLHINNEVIIHEKNIDICIQREEELGKEIVLEEPATTYSDRYVVPNQYDYFLFDQNGCTRLVPESTVYLSESDRIIGYKNGHIKAFVYACPKEKIDTRQFIDDILRYHPQSELFDPDDFMDNITDETVLAYLENCYRSGRINTVVKRYIKEEQI

SEQ ID NO: 24251 - protein, 636 aa, Lachnospiraceae bacterium 3-2
MSYLINLTNEEIKYVCKVIPFKEASAYFKSYPKEFNKLKPGFRVKSLNEDTIVRTLYGFRNRDFIASFLNKNIERWIKEIDEEIIKALEDGLEQDTAYIDVLARSFFSGNIALFFKIKAEEKSEDYLKVMSSAVVYQSAHQKAYEEEMEPLKKRQAELECIQEEMKNRIFDEKKNSEKLRRKEAELKEKLEEKTEWFEREQKENFRLSERADKLEAELKRTQDDEVWRTAEMQQKIDTLTSRLEEQVEKATGYENLISEYTSRLSCAEDDIETWKNKVRSREKQLFTYKAERATLLTERESDQKQIRELKEALDKALSVEKAYKERLFLLSTEKESYQQKNRELEETLEGQKNIETAVEIVSKRYSYIDRKMPLCPEDMDDFEEYFNYNLENIGFDKNVDGSSDFINYLKKTVFCGNPVLIKRGPGINLANCLANTLYGVPVAAHLSYSKNTDVQIISDFLTDTPDRVVCIDSFIGNCNEMEFIPVLEQHRNKIIIITYMYDKTLSFIPNELLSSVHFISADAFSPILRIRDITEDPSEVKEISFTYKSNARADSRSQKIFREIACECGLGKDIACTMADMVEDENHLNEMLMFTLLPYVSKVLGKNPYNCSKRLQRYAGETGRCLRKDILMRWFG

SEQ ID NO: 24252 - protein, 338 aa, Lachnospiraceae bacterium 3-2
MNELISIMANDMNIPSYINEPDEFFGYRVIYSALGLWCLKSALSEKENKMGISKNAQSILLHDLSKKYIELCPFAKHFVYTSRNADIAVFIRNIYEQTGYLLTLDNNYNILNNGGETVKFSDTDYLYLGLPTTDHIINGLGIHCKGGKHEVKLNDFLIRDSLTPEEYLKVKFDECDFDMCDIGVEELEFFNPFYYGNVSSSWHGHMKSDMTMARKGIVGPYYRVIRKKDGTLLYTDDNSEDGLDALTGAEFRRLYVALKYHYDNPMQLLICPIDEKYSYIRILGQLPNREYFYLLMNAWPRYSFSDRNNFIIRNELTVQTAEVLGAIGFTARKGEFYG

SEQ ID NO: 24253 - protein, 1728 aa, Lachnospiraceae bacterium 3-2
MDRNTNGVQQYYQTIRNRLVNYIKSDYLANSETLLLYTEEILGEGCPDDINIAREPYIETSASYRKVNDGIRTADIEDNVKEVLLKLVDAELGIYSTPFTHQVKALTSALKGKDLFVSTGTGSGKTECFLWPIIARAIEESLNRPEDFKMSAVRTLIIYPMNALVADQLARFRKIMGSKEFKDIFISSSGVGRIPHFGMYTGRTPYSGKSKRQSNIELAERYREQYLVDECATEEERKEQLRRISGFKSINKYPARYGGVEGMKDFINNLEKNIHMPGPYDAEYITRFEIQKNTPDILITNYSMLEYMLMRQMESGIWDDTREWLNKSEENRLLIVLDEAHMYRGSSGGEIALLLDRLFSRLDIPLEKAQFILTTASMPTEDERAISDFFNGLTGKKYSECVSLFGDKEDISTGFKVMTDAMALASIGTSQVTEAEISGRVRTFAQNVFQIELPLDISVLDAQEWLFENLPDYQAFVKLHELCRDGAKSYTKLKEKIFGNSEYASDALDALLVIASLAKKDDEILFPVRLHMFVRGIQGLYACSNPKCTCGAQRSKEEKLPLGKIISIPRERCGCGGRIYELVNHIKCGALYFKVYVQKMPGTGYWYVFPNKGLSGGTNDLMEMLLYICPEEYEPKEKDKVGYLDPVTGKLYLDYQNDYGLLKVLYPEYDEKHNCFMFNKCPKCKKNMPLKKPTNLTTKGNIPFYNLTKAQFELQPPAKPELINEGKKVLLFSDSRRNAAKLALDLSKSSDTDSFCQTVMLAAKKLSEDGREHSLKELYNVFLAVCVEQRLEFFSGESAEIFKDHLEKIRKKLKKRRDISKENFDPLPYDYYEQLLNFFTESPRSFKDIGLGFLGPLDEILEECIYELEDDYNIEIDDEILRSILVLLFWDVMDGSAALGNVIEDEIRRNLPGRSKNQFFGLEGDFTVSVDKNFIRIVKDMTGLNERKMGEFLNCIKSYFFGPGTNQRYYLKLDAVKIVITDENFNWYRCERCGKISPYKLGDYCGSCFESKNLHIITNKDLSRFDFWRKPVLTAINGEEKIHTINTEEHTAQLSHKETTSDILSKTEDYEIRFQDIDVGEFGENSIDVLSCTTTMEVGIDIGSLTAVGLRNIPPMRENYQQRAGRAGRKNSGISTIVTYSSGGVHDSHYFRHPDEMISGDPRKPWIDRDNPKIKQRHYNMKTLNSFMSTELMRSKFDSIVEVGIVTFCEKYADAFIEHAQFLDFPTDNTVEKFCKIRDMVLSEGKRNEYFNGDKETPAFDVFYSEGYIPSYSFPKNVVRFCVEKDFEHGRRVPKDIRYAPERDIAVAISEYAPGRFITIDKKIYRSGGLYSNPRPRGYEHNQAEYYFMSKDYRKDIIVCTECNWFGDEQEEDTEYCPYCHARVEKRSMIKPWGFAPVKGKPVKYEDEEEEKTYAEAPYYSYVPKDTEMQNYKHTYIRFANLQDHHVLTVNMGKKRNGFNICTKCGGAEIAEPLQTGDFRVCKPYYDRYQCSHDRIETNIYLGYEFLTDMFMLDIRYDNQRLVSNYDNEEKSILRFAATTLHEAIKKAVSLSLDIDYNEINGGWRTRLEENGEVHIEMFFYDNLTSGAGYSSLIGKDGILDDVLSKTREILTECTCSRSCRNCLDNFYNQRNHDIFDRTLAIQLLEYALDGKYPDDYSQEEQKAYLVPLKKLIKESKGVSVKDDIAFEVIPSLRKRRRNEKGKLYLNPYNLSDWLPNTFREYLGKINE

SEQ ID NO: 24254 - protein, 513 aa, Lentisphaera araneosa HTCC2155
MKYALDRRGQEISADDGVDGTNYTCPVCSERTAFQTNKFGTHYFKHWPGSNSEDCENYRGGQVYYSDRSKEVNRWLGLDKLLEDIPEDLLIDNGSIDETDEFLSWLDAVFPGKDVVDFAWEMKIEEFISQCLTTNQPDPELNVLNHTDLSFTEKSKLLWRLAHYLGIVHHYHLKGVEVPDKHRLVAEKFKTSAVLIKKAYTSKKYDQLIFEIKEEPLRLECAADISGEIQKICFPELMQTGCGNIDPVIKNRIINEGILLCKLEDESTYISRRHVEIGDEVLLLGNDSGRLENYIKNILREELSCLNIDGISPGWKIYQFQVPERYNELMPSWIRYKTLCLEGGLKIAGSKYLKGAVPNILLRTKITDLNKFTLKCDGDQIDFVSQELESGLIRIQSKLEWNEGQYLGCFSVDKKEIKFEVVNPPMVSIAYDEQSKGGWGFTKNMWPELRRQSIDTDVVHLRGPIQMGEFTKGSSNTSREQWFKLIRNKKESSKISNPRLRLVTNRKVFKEKS

SEQ ID NO: 24255 - protein, 674 aa, Lentisphaera araneosa HTCC2155
MEYYLGKLEIKSYKNNQGYITVINSLKLIDGVWTINQFGDLSKFGYRKRVFVLNHKDLTLEDQCYVRFTCEANPTYDGDPQLDEYMVKPDDHNYNHTLERQPLLRLISESDLDGHWLSKAKFTKDLNTTSQKVLLKLKIDHKDCVVEGLTLKNESGEVRLCPPSNKSVVNCWKMSDIDQSLILNMGYASYLLAEPDHGLIHKEIDVQTEAQLSNWFKKQLKELTVFNSLNAKEQTEFSKILKTLIKDKEFRGNKRNVEQQRWSRVVEDLKVYQFSINEIKSLVKLPQWQKAFSSSIEANVSSFKEEIHSQLKGLEDELVNKQEEYKEFEKSFDSSKKNREADLDKAIHSKKLIFEKEEKARLKQISVLEKDLKELEDDLLKRETQLVTYQKRFDSASERFKSTRQELVEDLSLFQNVLGFEAHKARVNEFNDDTEIVQLPLLEVEDTKHEVMVDRLKEEFSIWLPNTPKGYSKLLYLAIGGSKAIIVPDETYSCAFQAGQGERCRLSFIVVDPSWTRFKEAWEEMSIVWSHALNNPTYQFLLHIQDFDMALAEVWARPLLNILAGFSQKLQVGPDCFSWPDNLKLIISPSIDKENSFGLSPEVCAHFTAINPNAEGEEIGDWPNAKLSKSFSEARFRLNEFALEMGEDVERTENYVQKLKYIYPMSFVNDLRDE

SEQ ID NO: 24256 - protein, 1813 aa, Lentisphaera araneosa HTCC2155
MNDAVTIANNLKDMYLRFLDSAMPLRYEELMAERRALLSEKGMISQDPLFEAVPRYEEYKTLYEASKDLDLDKDFASFVETGLFTKIHGQSMKMYKHQFQSLKAVCKSNKNLIVTTGTGSGKTECFLLPMIHNIIKESRTWGEDKPKAVRALLLYPLNALAEDQMIRLRKSLDGVSTEENEGPRKWLDEHRNGHRITFGRYTGKTPISGVRSSSAEQKLKNEKWAMERIYKEVKDNEDLRYFYKSFDEDSAEVWDRWSMQEEPPDLLITNYSMLNIMLMRSLEENIFEQTRKWLADDPWLKGEANEPTRIFHFIVDELHTYRGTSGTEVAYLVRLMLNRLGLNADSPQLRFLASSASLPSSAETRKYILEFLGSSDDFKDDETFNKKYSIIEGSPLRYIPSHEKIFKNKQKVFSDFFESWKRAPKGKKQGPVYELAQHLRVDLKGEEEVKASLGIICQEAEIIKSYHENIPQQAESLEDISQRVFGVVDQIATQGLITILTESRVSNLPGAAAPQPLRMHAFFRNTLGLWACSNKNCTEVSDPDGTRNLPVGKLYTQPKLVCNCGARVLDLLLCKSCGDIFLGGYRSKLNEKKVEYLVHGQPNLEQIPATMTAKELYGEYAVLWLGKPGENKPIDNAWTETSGEVNKLNCTWKEANYNAFKGRVEPGKIGANSYLFSITSNKTKKYDYNCQAMPNKCPQCDSDGRRKDGKSFPPVGLHRTAVQRVNQLLLDALFREFDDEQAKKLVVFTDSRQDAAKLAAGIELDHYRDLVRQSLMQGFDKLGGDKGIALKYLEAGSPKDFTEEEKEQFKDFRARDSKLFNAIRDFLDEMASEEELKQIEQLKDKKSGPYPMGRVTNLVWEDLLSLGVNPAGPNPSRQTKKVKLDADGGYVTTSWRELIDWEGRKPENKDAFDLLPQAKTLKNELDQAAADECVFTMFAHKRKSVEALALGTLTFKPSDIEFDTDGLLSWKEFSNIANIVIRVLGEKRRISGNNYFNNASLPKELKSLLKKKFPGDENSILNLLKDFLLSKGVLESEENLVIKPSGLWFSPCKMGDKIWRCKQCSSVHLNNEIHLCWNCRSPLDPKDFRLKSNSDSEQDYYAYLASSKAETFRLHCEELTGQTSHENAVKRQRLFQDIISGDKEVSLIDCIDVLSVTTTMEAGVDIGSLMAVMMGNVPPKRFNYQQRVGRAGRRGAGLSIALTVARGRSHDETHFCDPQRMISSNPTPPYLDLKRQAVLNRMVSKELLRQAFRVCGVKAKADSVHGEFGDCETWAMSERLIKLWFTKNDQVITDTCDFLTSSEDMKEEAIRYAKEELLVSVDKISKDTKYHQKSLSERLANAGVLPMFGFPTRSRNLYSNIPKSRNSENVINRDLDIAISQFAPGAESVKDKAVITSVGIVDYVYEKGRAKEADGRGAIRQLGSCKNCGALICDDVPENKCSLCGSESDYMKLTTWEPKGFTTEHYQEKDFEGSFEWTARASMARLANEPVMFEPIEGINLECSNEEKMITSINDNDGKLFQFNEHESKPGLWLESTCLPFEGWWKDQLNTDRCEKVGLSSSKYTDVLLLRLSKVSPNIDLSPFGDNSLYARAAYYSWGGLIRKAACISLDIEPGELDMNIRPVKDAENEFCEVFLADHLENGAGYCRYLRDNMYESIIKLLDTDGELNLHLNAEAHSTCDSSCYDCLRDYHNSDFHAILDWRLGVDLMNLCKDATYMPSLKSGHWQSIKDIAVKSLCSINKSLVVKHVSNIDCMYDGEKVVAVLIHPLWASNHEGLVELAIDLNINVDELPVCNIFDVMRRPGWCLSKLNLS

SEQ ID NO: 24257 - protein, 676 aa, Mesorhizobium sp. LNJC391B00
MSEREDHFGPGRFRAFSPFLAPDERKELHLLLNFAEGSPPSFADALRSLARRYVDDGSSAKLRAVCLLVADLFEQGWRIAVDEDQILFEPPGIARTDSQTVDEVKARVRAALQIARQRQLREPAVATFLRHMERRTVRPPGVRSSVLDLIDEGAVLAKELRRVSKLPEADRVAALASVVDPVVEICHSGARCSDTGLPLIDIWRYFRHTWAHEYRAIPGRQLLILVRNAARRNRPVIGIAMLASPVMRVSVRDKWIGWLRDEAETRLNDGRWEPSALAAALLARLEESIAAIRWDDLATAAEMVEPTESTVLRLEQKASGAAFARELELRAHYEIEREVGEKIRPMRGALKHAGHEPDWLGASEDLLFVRKRAEVLSHLLFAKQMFRAAGLTSNPSAALEQLLAARSGQRAIDIVLTEFRKAGLSSRVADVSVCGAIHPYNEILGGKLVALLLASREVHEAYSERYSSQVSVIASQMAGRPILKPADLRVLTTTSLYGIGSSQYNRLSLKAAHHPGLSTDVRWNAIGKSLTGGFGTLHLGSETAQALRIMAETRHVSRRVNNRFGEGTSPRLRQIREGLDALGLESDTILHHATPRLFYACELGPDSRDALFGMEAADFRPETSAAIGEAWRQRWLSGRSQREKTLEAMADLGPASVQASLRPPSNADLLDSVAAG

SEQ ID NO: 24258 - protein, 356 aa, Mesorhizobium sp. LNJC391B00
MISVVTDADVLATARKSLGLPTSGEIDDIYIAASLRRLAGFMCPCSPKTLIGSMVDSHRFIKQIDNGLLDRIESVLESLVAIGDLLELSDVTTLDETVKSTWVFTAPPSFVPHPAGSAFLLGVSADEATPLPVELRIRIKYRGVARSIDPTPLEALETTLRGMGLRELSMESWLRHPKVQSETTVLRDLDAKLSAQGPCGEIVDLRILDHTRNARRYRDRWGAPISQSGRFIVRRAQAYGADLWGYAELREGKPAKLIDFPPPGLRWRGCDMAWRVQMAIDSLAGNAQRFSVEVSKEVARIDFFSPIPDWARRRLSTIGEQAEPRACLLSFLLPEKDLNSEEQFLRDHLFLDRADA

SEQ ID NO: 24259 - protein, 1853 aa, Mesorhizobium sp. LNJC391B00
MTRTIQETIDHLHASLKEYIEATYHIGDATLIGHRRALLNRVGVTHQVPFLESTPKYQQGQRFKEMQGLSAAALSVYEALSKAQDGQPRLLFDPPYRHQGDAIRHALIDGKNLVIMTGTGSGKTESFLLPILGKFAREASERPQAFGQQRAMRALLLYPMNALVNDQLGRLRAIFGDPRLADHFNGWAARTPTFARYTSRTPYAGVRTAKKDGKKLASFESFYVEIERQASGPPSEEQVKAQELLGQLKSRGKWPAKPDLEKWFGAKGSPWIDRKTGEFLRAVTLPEDAELITRHEVQDAAPDLLVTNYSMLEYMLMRPIERSIFDGTRAWLTANPDEKMTVVLDEAHLYRGAAGAEVGLLLRRLRDRLGIPTERFQIICATASFSDPEYAKEFGSQLSGVQAANFEPITGDLDLCAHAAAGNSADASVLASIDLANFYSPDEDERIAAIAPLLQHRGVEGGAGAEKDLFDALETFAPLGLMVNTTMKAARPVASLGIELFPDSLEIADAAVTALLALGSVARASPDASGLLPCRVHNFYRGLPGLWVCMDQDCAEITEAERSGICGRMYSQPREVCGCGARVLQLYTCRNCGAAHARAHSDDVDSPNALWSEPGRRLRMPGGETAPLLDLDLLLEEPRISELAEVADYDLQTGRLNPQVLGPRTRSVHIRRDRITPAVDDDGEADTRAEVRGQFTPCAVCGESATFGRTSIQDHQTKGDQPFQALVSRQIQVQPPGPQAQSSFAPLRGRKVLVFSDSRQVAARLAPNLQMYSVRDSLRSLIVWGFDKLHQQSMIRTMLNLEDLYLAVLLASKGLGVRLRPELKAGETFAAETTVEHAVAQGALADDTALQLLWMEVRSDTPPESLLDDIVKTVKDRYLGLEALALASLCESANKVKDIHALPSIPGVAETNEDKIALARAWLRCWRSAGFWLNSMPTSWYKRKGRGTSVRAQKGSFQAMRKVLPDSLAYKAFDKTWQPALMTIFTAEMESGFKRLSGKNLSLQLTGDWMRCGACRSVHRPVPTLPHCLDCGSHLVAKLDPVDDAVFVARKGYYRAPVVAALMDPTRAPMALIAAEHTAQLNAPQSEDVFSKAEENELLFQDVELTWGAGAKRATAIDVLSSTTTMEVGIDIGALSGVALRNMPPGRANYQQRAGRAGRRGNAVATVVAFGSADSHDEHYFSEPEAMIAGPVVDPKLTLDNADIVQRHVRAYLLQGYHQEKIPAFDPSANPDLFSVLGSVEDFQTATAVLNRDDFATWLHANATVLRKRVSSWIPHQLSDADRKMLLDEMVVDCLNAVDSALGATSLAGQKFAQETEDADGESASGEEVPPEEGEESPPQKALTGKLLDRLLYKGVLPRYAFPTDVATFNVFDIDRSTSYRPIMKFAPSQGLPIALSQYAPGKQVWISGKCYTSGAIYSPMADDRFDAWQNRRLYRECSECSFAETVPIDSSLQQGAVHDCHACGAEGSFGPTHYWLRPPGFAHPIYEEELTSPDDMPETAYATRAKLTMPTPSDEEKWIAVNDRVRVMPDRTHLLVSNTGPKKDGYNYCTKCGRIEASAEGSAAMMGQHPKPYPDEKEPNCAGSGTTRHLVLGTDFITDIALFSLRVAAPLKLKPGFYPTDVALRTVSEAVAKAACHMLEIEAGELMAEYRPALTPAGRNGLEAEIFLYDTLPGGAGFSGQLADKGDELLQRALSLMKTCPEACDGSCYRCLRSFKNKFEHGLLDRHVGAELLEYLITGEMQPFNRRRIKASTELLKQDLERQSDGTIFELNKNVSVPELGDVSIPILATLPGGRRFAIALSGALTTDHPADPAIAKLWETWDGIEVIPINELLVRGNLPAATRSVQSQIGT

SEQ ID NO: 24260 - protein, 537 aa, Methanocalculus sp. 52_23
MEYAIRKTYFGPEELVYAIDLANDPHVHQHLNSKFICPECKEPVRFINGEERTYFRHLPNNPKTQNCPNYYSDNNYAAQYLSQQERYKSRRQSKRLYILKRGESFGLFLGFPPLEEETVVAARNENLVVQINNPNNAELKENRLFLNQVTPGEITYVWLKWIYDYYSFKYSECSVNDDIEEIWEKDQSGLPEKGALFRYSNNYARCISDNGEVTTDKYYYFATASKLSEITKDFLEYEFVGKLEGRSFGYESKWKIYRVQFTKATENALEFADNLGVNLIEWHPPLIPLWPPHVQLGDRQIYSKSTKVLTLAQKTDTSSYHQEIEGQYHRSIPKTRIKTGWLLYHSAEGSMCIKSSDGGYEAHLTCGFSDKISHYLPPEITLEYDKKPLENGDCFPLKDKANLSLKSDSKCNIYHYSEKQLKSVYWSEQAILTLLNLSEGDRICVRHGMDVVYRVSVQKCIQTVVRNSIQSDEKMYQELALTGGIFISTPVKVKYILNRLGKCPKVSGYLRNALKSGKIPQKAYCHLISELDQEIRE

SEQ ID NO: 24261 - protein, 831 aa, Methanocalculus sp. 52_23
MTTPKKHHNLRCCLGIPVKFSDLDVKILRIADISTADWTKNRVNTIGVIYTNPDGGPMLLPVKQENNPIQLEHDTIGIWTWKEGANSEEYDIIPYLSLPKPPHCKYNYYELIFLQNSESSPESQDSLRFAIGSDDELVRILETGIAVPSTFSENLLVVYDYDEEFYFCVEITKATSCLRNDQLLFVTDKKSLVRYKIERKDVIDSFDPQYKNLLPENNAHLTRRLIYKKMRIATQDKLDTLDLHSDSVLFARYFYRIATRLNYSNDEKKLLNSVVIEALSNPKAQQVVTLSSENKQWVESRTEIIRSYLNTDAEVEEFVRGVIEHVPNINEEYIDKIQHVAIQGLFEKKENLESEILDLKSKRDDITGDILAITGKQTAAMEALRSLNKTVESESKRIKADQESRIKQELKTFESDRKKIAIEEIAAFKKEQLQAIAKEGELFRAEQKNAIQNDLQSLCEEVNRLQNDIATLEASRDQLDNDISDRQRIQEELSQLEQDKQTLEETNEQLKTYCEQKLKDIQHNLGNTLGDLALFKGLMLDGGSEKPSFAAVPNSNLLIRPAEDYGLDPIEIADIENLVYDLKENLQNIGVDQEYAESLAELVAGAYLTRTPLLLTGCTASLMANAISVTLCSQTPEIISVPTGYNDYFSLLNTVRNTSGDVVLLQNVIGSIDEGCYMHLAKDIADEKPGKYILYSLDFAETMRILPPSVLGYMVLINSEDVITSVETEDLNAGDCTIVAPVERKANTKGLYQNIVQLSRGMGTTNGYNLTRSTILSTIAAKDEKNVDDIILLELATYCKLLGTTNELNQRLGYLGRDDLKKIVEKLLGGE

SEQ ID NO: 24262 - protein, 346 aa, Methanocalculus sp. 52_23
MGLEPHEVIAQGLGISRFFCEDENAYIARILYSAISEWTKTAVLDKTLEVESESLDTSYTQYTKHHVTRKCNIILSTYLDLYPNVRTWFYPEDKQGIQPTKVIQERLEHSGSLVSGPDNTIQLPPDKYMKIANDLYLLRGTSFGTEGKIHGMGWYVNKISESDVYSLEELFLIPQIDAKDTVLEYSRIAERAYTPNTTISDARRYFDPFSRRIFSESWEESLHHPWELTVYRNNRDDYGFVKQEDGMIYTLAFPDHIIKIQEVRRFMYGLRYLSHNPERATISIYNDAIKIKLHSTLPGREEMLFHMIAWPARNILDRTEFITSPIFLPIVTKILKNLNIQVMQNG

SEQ ID NO: 24263 - protein, 1774 aa, Methanocalculus sp. 52_23
MAEYSVQHIHRELVGKLKDYIQAQYFGENDLLLSASKDLLDKENSIYRDPYIESNQTYQVLKDGLPDANIPKNIKDFLCRMCERDLGVFKEPYSHQIKALEDFYQGKDILVTTGTGSGKTECFMWPLVANLATEAKTRPNSWNKRGVRALLLYPMNALVADQIGRLRKIIGDYGGEFHTLFTEYTEGANNRVPQFGMYTGRTPYPGEPVKEKDAKLAKTLKRDLINRSPELITELKSLGKYPSKYNLEAYTASLNKGFHQPNLCDAELITRKEMQDYCPDILVTNYSMLQYMLIRQIEQPFWSNTQDWLNESPENKLLIVIDEAHMYRGSAGGEVALLIRRLMYKLGITRDKVRFILTSASIPVDNEETRSKLNEFLREITSCEKDTFSIIAGTNKKIHSQNPIDFSAKQIYDFPLDNFQCDDTTKAQAVRRFFQELDGTRPHYGTIEELEAWLFETLPKYGPVQRIINQTAGNATDITKLAEIAFPNDDIETAFSATQVLLSLLPLAKKDRQVLFPARLHMFFRGLQGLYACTNPNCPKKHTGDGITLGEIYSDSEQDICPHCDGKIYELINDRRCGALFLKGYLLNAENFEDKKYFWHVPGEIFAKELREVHLYIIPKNHPVNRRDICCGWLDAKTGFIHFDNIHAEEDGFLQVCYSLKQVKGKPEQLTFYYCPKCEKQLNNYSFSDFSTKGNEPFYNIVSSQLSVQPPAIFDEEKLKQQPNAGRKVLIFSDSRQRAAVLAKDMTRTADDQAARAVLVLAAARLQEWAEKAEESVTLDMLYPAFLEIAYHNHLRLFYGGDKGRFNDDLETIKGIIEKAERRNKPLKYDRLTRDFKNKPGLFSEQLLKNLCSPFRSLTDLGLGWMEPCEEDDIKDCLELFNDHGVKMSEEDFIALFTAWAHHHCTDSFAIGNQISDQIRFNIALRKFGRFGIQEKDLQKLPSKFKKILSEKYNQEQINWIACVLSETFLSRGSGEEEGRYFLILDKIALKFKDEHKWHRCRTCSDIFPYTLFGKCAYCGSFDVYEMSDKDLERYKFWREPVLGAIAEGSGKLIRTINTEEHTAQLSYKDQRNDIWSTTENYEMRFQNLLLDDELPIDVLSCTTTMEVGIDIGSLTAISLRNVPPMRENYQQRAGRAGRRGTSISTIATYAQNGPHDGWYFHHPEKIISGDASNPWIDVNNVTLLQRHVNLLISSEFLSEKGTDLYECPVLSFFENYYREFIEFLKKFRFSPELEATVLSTKKTDESSHQQFVQGLTIELERIRDDVLNNRGLYEVKTESERQVSLLDHFSFEGILPTYSFPQNVVGFFIENKYGTKIIQKPDRSLDIAISEYAPGKVIVVNKETYKVGGIYSFHSKFRRENRRENQARPYFENPNYLSDLYLCPNPDCGWTDTDNPRDGVCPFCGEPISENSKRKMLRPWGFAPVDGKPIPEAHAEVEQSYAEEPCYFATPDRNDMENIGCQHIMAALRSDKIRIINKGLKGRGFNVCQNCGAAEVAEQSNGDDHESRPLKDVNRPYNFPGMVSKCFHSPINVYLGHTFATDMVVFEFELDKSLINTEYSGMWISSAATTLTEAFLLAASRTLDVDFNDIKGGHRVHETEDTTFVDIYIYDSLSSGAGYTTGLWDIIDPLLQNVQDVLNCDKSCATACHSCLKHYWNQRLHRKLDRFAALDLLKWGRSGDLSKPLSVDKQDEIITPLKRLLIDAHPEIQFHPTQVSISIILPKKSAELVIYPAMWAIPAKTDSTLYLSDKLVKNALPKAFDDADKFIKRLLME

SEQ ID NO: 24264 - protein, 540 aa, Methanoplanus limicola DSM 2279
MEFAYDNKEPGNQVKVYAKELKKIRTESSSEKSKQYTCPYCGEYVKYYHGKIQEAHFRHIRGSLIAKTCDKYVSGNGIGTSKDRYLLDQKLLGFPLYIRKLGENFRLFIGLSPVPESTINDDIESSQEIIIKDPNYVQFDQIYLEDLIVDEITYKPLDYLYETYHIEYRHNPNPLTSKYGCFKEIYGIEPKGALFFCSDMFSRRIAFNGKITTDTYYYLVIPSAEILSNKKFLSIESCNILAVKSDLPEEWFVYKIKFTEITNESSEFARDLNLTLVEKPQKLTPLWPPHVQYGNQHIYKKDCHAHYLLESQKSVEKDKSSKEILQHKILIKIITLNAHLDILNVEVNKNETKIPLEEDNTQFNPVTSCKPSLNIPPYSPPTIAIQYGKKELQNHEELQTTKNSTISCKSNYKCSFCHIRNNYLKTLITNKLTIPQISDIKPGDTFLVLHGLDIISRIHFPQKNEKQSNEIKKSDNQMYQTLIQLKGQQITTPIILKYALQDPDEYPKVKSYILNSLRIGEIPKPAYDYIINNIKGGIFK

SEQ ID NO: 24265 - protein, 721 aa, Methanoplanus limicola DSM 2279
MNNENYSLCLTIIEQNNYSQLLRLADPIGKDGQTLWKLDGKSHKLDLPNIKTISMDRYQAKNNDLAIWKWELNPEDQKKQLSNRTNEKFYELIFLDDENIDSKDEIKTRKLEDLIDILISGFKIPEFITDNLLLVFDKSKRDGYICFDLKKSDYSIENNTMKIKEGTTLEIHKIREELCIDTDNYIKNATIKNYYAQRRIIYRERKLKKPDGQLKIKSFISLFKSYFEEITEKMNYDDEQRNIIKKTISNALDNREDIEAFFKLTGSDNEEFIFTHNTTSKFEETAQIIKKYASDKGMKNFLESVIENTPEFKEYYLDILKEDYLTDEKEKAEQELKILEEKKTDLQNIFNKKEKDLNNELKSLELKKAEITNEYRKKEEKITEYNNKISNLENRNEQLNKYCEEKVESIKENTGALLGEIAVLKGITQNSATPIQDYNLTKNCSKSFEGDNIYSITNKEDLIGGLEKNLDSILIPDEYNSGELARFIIGSYLSKTPVLLIGNTSQLLAETISITFCGRTSEIIFVPTGFRNYDELLNSVRSSESNVVFIKNAVGFCDEYIYLNLIKDNPDKFLLFSAEFQDTIRILPAGILGYMSLIDCEKIILPFNLNEIYDDLTPAKIEEMSNAEYNKNQYMKLYKEICELSEESGLKNGYNLLRAKILSTLLGPEKEENKSLINILLPELVTYNQIQENTDNYLDYLQTLDKTEYYKIAEKLSGGER

SEQ ID NO: 24266 - protein, 343 aa, Methanoplanus limicola DSM 2279
MKTGIHSKMAEEMKIIPFPEENEDRFIARVIYSALSEWIKASTFDRKIDDQEGVTEDGCTKHHITRKCGDILKGFLEIYPQIEDYFYPEDEKDPKPIQEIQKRLFSAGVLVSGINNTVQLSQKKYGFVTDNLYFERGNFPETGNQISGLGSYINRVPENSSTQQLEELFFIPDENAESTFYNFNKRMKGKYTPLSEIPENWRFFDFNSKKSFYKSWIPYFDETNKITAYKNSNNILDYGIIKNNNGTLSSITFPNHIVDTKEVRRFLYGIRSAEGNPCKAKLTLMGKSVNIEFYTSLPQREQTLLNMIAWPVRSMYDRTQYTAPIVFLPIIKKMFKNLNVDIG

SEQ ID NO: 24267 - protein, 1763 aa, Methanoplanus limicola DSM 2279
MTDAYGIQNTHKELVNKLKNYIQSQYFGLNNLLLEAGDELLERDNTIYQDPYIESNPSYQIIRNGLLSAKIPENIRDILHRMSEQNLGVFDSPYAHQIEALESFFQGKDVMVTTGTGSGKTECFMWPILASLADEAKKNPQSWEKRGIRALLLYPMNALVSDQIGRLRKMIGDQDGKFHSIFSEYTNNPDIRYPQFGMYTGRTPYPGDLVKSKDKDLAKTMEKDLLNPETDFINELKKIGRYPAKRDLEGFIDNLKQGIHSTEPEDAELITRWEMQNNCPDILVTNYTMLQFMLIRDIEKPIWERTREWLNASPENKLLIVIDEAHMYHGSPGGEVALLLRRLMYKLGIKRDKIRFVLTSASIPVKSSEDKGAIQNFINDLTVNSPENENYSVITGKHKEISLEGTAKFKANKISDISVDNFLKDEETRISEIKKYFKALNKNIPDFTYNELENYLFEKLPEFAPVQRLIKSTSGKATNVKELAKIVFPDDPEDTANYAIQVLLAIMPLAKSKEGQVLFPARLHMFFRGLDGLFACTNPDCPNKHSGDGITLGQLYTDSSREVCSCGGKIYELVNDRRCGAIFIKGYMSNNVSADGNDIWRYPGEKYYHDMKEVHFYIVPEKYRLKSNKLSKGWLNSKTGVFTSSNPNNENGFLKVLYSHTEIKNKPGQLTFTTCPKCNKLLGSRSLSDFSTKGNEPFYNIVASQLHIQPPTIFDREKLERQPNEGRKVLLFSDSRQKAAVLAKDMTRSADDEAARSAIVLAGYNLQKWSEKYNEKITLEMLYPAFLEIAGINHLRLFYGGDRDKFNRDIENIKKDINQAKRRNKTLKYHNLAEKLRNPPGLYSEQLLKNLCSSYRSLVDLGLCWLIPSNLEDIEDSIDELAEESINISEEDFTALFSAWAYYLCTDKYALGESISNKVRDNVFLYSYGRFGVENKDINKMPPFLKKILNSQGYNEEKILLIQKNLHHNFLRTGSEEQESNFLLLNKISLKFDDNHEWFRCKKCSGIFPYTLWGHCARCGEKSIEKIADFERYRFWREPILKALDEGTGREIKTINSEEHTAQLSHKDQRQKTWSKTENYEMRFQNILFEEEFPIDVLSCTTTMEVGIDIGSLTAISLRNVPPMRENYQQRAGRAGRRGSSVSTIVTYAQNGPHDGWYFNNPEEIISGKTRLPWIDVNNKKLNKRHLNLVILNDFLSLQETNLAECDTAEFYNNYYNAFLDYLNNYRFRQDFIDTMLSENYNNNAPIDEFRRDLIDNLKEIRKSVLKNPERYTSNESEKFTLLDHLNSEGILPTYSFPQNVVGFYIEDKNGEIDQKPERSLDIAISEYAPGKILVVDKKTYKVGGIYSHHSKFKEGFYEKQAKPYFEDPNYLFELYQCENSECGWTSIEIPPNNQCPFCKSKIISDHKMLRPWGFAPVNGTSIPESWAEVEYSYAEEPCYFAEPVHNDLKNTGFPHIQAANRSDKITIINKGIKGLGFNVCRECGAAEVAQTSEPSLKGIGRPYVPRSKNRYPCYHYNSSNIENVFLGHTFNTDMVIFEFDLDKNKINTDYNGLWIKNAAVTLTEAMLMAASRSLDIEYSELKAGYRIHSNNENVFVDIYIYDSLSSGAGYSSELLNITELIFENTKETLNCPSNCESACHNCLKHYWNKYRQDKLDRYAALDLLNWGMYNKLPEDITKEEQIKILKPLEERLKSFDSAIHLINDKNEIFISNASIKKKIIVYPAMYNLPNRRDTIYLSDKMVKRALPVAYKIIKKYFSNNNP

SEQ ID NO: 24268 - protein, 529 aa, Methanosarcina mazei
MDCAYNNSKPGVQIKVQASDISGYHMGQYSCILCGEPVKFYRGEIQKSHFRHERGSIIAQTCEFYTTNMSEFSEEELRKKITGLPFYLKQIDTSFKLYIGFWPVDDLTLTEEKRIGQKITIKNDRKLQIEAIDLEKIHANKTYRLPISLVYNSYKLKYKISGTPISEIWGEKTSRIFSNGLFFRIGSIYSRSINLNGIITTDTSYYLLSQSSVTNKSYFKVEESYSLLNKGKEKWKIYKIRFTKITRESSKYARDLHVQLLEKPPEIIPLWPPSIQKDRKYIHQETGISTYCLSSSNKYGKWEVAILNKHKKQSYRFEIFLQDPIFSIDVDNHIKYLSFFDTDNDFEVAMVARDKKKNIQCRQPSLELKWMKKEIIPGSELKAIKNADLSIKSDMKCDITRMRNHIPYEIFRNELSVLSFPDLSNGDTIIIRHGLDILATLYFRRTKKITHDIYSNNLKDNLKDEALYQKLLQQRGTFTAAPIQFKYIAARLENYPKTREYLKKALKTGRISKQAVDHFLKNTDKENSI

SEQ ID NO: 24269 - protein, 719 aa, Methanosarcina mazei
MNTEEFYYSLCVTICYKNGYTELLRLADIIISKENSGKTGRRLLPFDNTSDLPYVKKISMDKNQANPNELCIWEWYPQQQNPDKQQSYRSRSHKTFYEFIFLNNLDLSNGLTINPLPVWDLFDTLLDGFIVPLQCSKSFLLVINQTETEYICLDIEESSYSCDGNKIKIRENTLLKEYKIPKLDVIDTNEYVPNLGDFKYSIEPAFQRRIIYKRRDIWIDPIATLPLKRFNTHLAGYLEQVGTRLPCRTEDKTVIEAFIKSVTEDVKPNSDLMTFFENYYSQPKEDSLVLILEKYNKLELIFTSYLKRKSTDEIFLKFIVEHLPSLREKYIQILTEGYLDEEKQKILDQLAPLQMQIEKLNNDINEKNALKEELDAKITSLTNSLMELIVQIKESERYRQELDELLNGNRTGLLQELINLKKVLQLSETTYETSPQNTNASVLTLRYGYSLEYEEATEITDLSCMYSLLQDNLPEQGVNTPDLSDLSKFISALYLCHFPLLCVGTSACDVARIISISLNNQLPDTICVPTGYNDYSSLLSTIKSLKSDIVILENVVGYCDEYCYTHLAEDIPEKYIIFLVEYEETLKLLPKGIYAHMGLINCDELFIAQLMNEESPYPGKITCSISLSPNIATRRELFSKISKLTRHSPVSTGYINSRVKVLQTITHEDNIAEVLKTIYTELKSIIGIYGLSEEYRDELLSSPDPIVKNFKMVLGVETE

SEQ ID NO: 24270 - protein, 347 aa, Methanosarcina mazei
MSNTPLYIRMATDMEIALPFDEHINTTKSRIIYSAIGEWIKASAYDTDIKEDDCEVTDEIRATKNHITRKCGKILAAYLDLYPDIKDWYYPTLVNETFNPVTEIRNRQLAAGVLVSGVENSLQFPQEKCTKIADNLYLYRGDTFHKRSQVIGLGNYIYTPDQVPIISIEDMYLIPSISAKEYVERYVQKVWNKFIKSENTPDTRKYFDYLSTRAFSESWVSSYPKNGKLTVYKDNELDYGLARIDMGELYTLAFPQAVIETQDVRRFIYGIRKIEQNPAQATIKDMGSMVQLTLPSYLPDFEQNFLYMLAWPKRNILDRIEYISEKILLPVIKKLLENLNIKVKTND

SEQ ID NO: 24271 - protein, 1775 aa, Methanosarcina mazei
MTDIYGVQHIHDTLLEKLKAYIRAQYFGENNLLLDRSEELLNQHHILSQDPFIESNTPYLTCENGLESANLPQNIRKILTALSRENIGVFENPYTHQVEALEAFYRGDDVLVTTGTGSGKTECFMWPLVANLVYEAQTSPKTWKMHGVRTLLLYPMNALVADQIGRLRKMIGDSENRFYHQFQKFAAESAISRRPQFGMYTGRTPYPGQAEKKKDRELAVALRKDILEKGEDFIRELQCLGRYPSKKDLNTYVSYLEKGEHLTDLEDAELITRKEMQNISPDILVTNYTMLQYMLIRDIEQPIWNSTRDWLHASQENKLLIVIDEAHMYHGSAGGEVSLLIRRLMYRLGITRDKVRFILTSASIPTDSEKKIESLKRFLREITALDNGPDFSIITGKQKEISTYISLEISPEAISKLSIDAFQGDTLQKVEAIATFCQILGLSNLQENTLEAYSHYLYEKLPLYAPVQRLIDRTSGDATDIHTLAKVVFPGVSDDLSLRAVQVLLAVLPIAKNIEGQVLFPARLHMLFRGLEGLYACANPDCPHKNTGDGITLGKLFTNSKQETCDCGGQIYELINDRRCGALFLKAYMVYETQSELNIDLWQTPGDSFGKNMREVHLYIIPTTGIYQEKKNGPEEGWINPYTGVLHRDPSYSGKSEYLHVAYSTHEVPKKPGQFTFKSCPKCGKTLDKTVLSDFATKGNEPFYNIVSSQLESQPPMIFDERKLERQPNAGRKVLLFSDSRQRAATLAKDMTRSADDEAARALLVIAASYLQDWSKKTGINPTLNMLYPVFLEITYNNHIILFYGSNKEEFKQGWKTVADSIKRAKRRSGPLPYNKLEANFSNKPGLFSEQLLKNICSPYRSLTDLGLCWLVPSDKEDIESCLDDLDEEDIIMTYDEFECLFSTWASHYCTSDYAIGESIDDEVRRNITRYSFGRFGIEQTKLGKMPIHIQKILKNSGYSDDQIEKIQHILLKTYFQKGLGEKGTFYLSLNKIALKFDDKHEWYRCSKCSKIFPFAPWGHCSHCGDKHIEIIRSNDLDRYKFWREPVLKVIAEGSGKEIKTINTEEHTAQLSYKDQRDNTWSTTENYEMRFQNLLSEEEEPIDVLSCTTTMEVGIDIGSLTAISLRNVPPRRENYQQRAGRAGRRGTSLSTIVTYAQDGPHDGWYFNHPQTIISGEGRLPWIDAHNEKLICRHLNLLLLNEYLNNLNTNLYDCDVLDFFEKLYDGFSDYAASFVFSHDAERVIVPPQKENLATTQTFVEKLIPKLKEIQNEVLQNSERYISDHKNPLLDLLSNEGVLPTYSFPQDVVGFYIEDQRGSLSQKPERALSIAVSEYAPGKVLVVDKKTYKVGGIYNPSSLATSRENPAMRYFNDTKYYSELYLCSDPYCGWTSTQRPKDDVCPFCHFQLASLKKMLKPWGFAPLNHTNIPEAWAEVEYSYAEEPCYFAEPTQHDMKDISCAHLKVAKRPDKITIINKGIRGQGFYVCKKCGAAEVIQPKSENENKDNKPSIPLKNVFRPYSAKGLPICQHFSEEVYLGHTFATDMIVFEFELDPTLINITYEGLWIKSAAVTLTEAFLLAASRTLDIEFTDLNGGHRIHRADDKVYVDIYLYDSLSSGAGYSSGLLDMTHDVLSETQRLLQECTCDSACHDCLKHYWNQRVQNTLNRHNALWLLNWGIHGNLPTELKLDEQVHLIGPLQNRLKLEGDDIRIVCDTTGILIESLFKTQKLVVYPAIRNQKRIELDVMYVSDLELRKALPTVFAEIKSYMNKVPLYQRLK

SEQ ID NO: 24272 - protein, 662 aa, Microbacterium maritypicum MF109
MTAADDSTFLNISLPTGTPKAERVAFLRLCTALATASLDPADAIDRNLWFAEAGLGDLYNKPTLAAAANTLIDLVEQGWTLSTAYKHGPLLAPPPSNADPVVEKARVRRQEHLRRDPQLRKASVRRFVEGMEKPREFKGKLVTVFNLMRDGRELADSLTTAPDPGSVIRPYIQIVDGSRCERTGYLLHDIWRYFRHTWSNAYSTVPGRSMPILIRDAATPHHAVIGLAAISSPVVQIAERDEWIGWGTDTFLEEVRKAPSDEIAAWLAGRIDAQLGEIYLEDLLADNVLQPTDLHHPTNEAIAMLRADAERHRQKHHRTPLSEVRQIEQDPWVQRATSHLFRSKRAAMLADTLEASRTLRPFFSPKPAADGLCQALSDTKAKVQLRRLIRRARGERVGTVIADLTVCGAVAPYNALAAGKLVGALAVSPKVIAAYRAKYSRPSDIASSMAGRPIERESRLSFISTTSLYGSGSSQYNRLRWPAAVMGGPNDKWISFTELGRSRSFGTSHFTDETVDALVRLSRVKGAVVRVNSVFGEGVSPRLRKVRLGLAALGWPSSELLKHGRERIVYGIKLVENLRDYSLGIDPAPEYLLDPEQADETSVGVWWFERWGQRRAVQPAVLESMRRHRLVRPISHGARVPLPTDETDTTPTESMFFSADSS

SEQ ID NO: 24273 - protein, 362 aa, Microbacterium maritypicum MF109
MGIATRTVDEVAMISVRALGLDEECFGLDYPEAVAASVRRAASFLCPTTPRALTDAVLEALTPVLPEPPTRDDLMALIDQLVSGGDLLEMADATSDRKIRLLYLGPPSFVPKSANRFLLTGIRPHGAALVPADVAVKAEAHIRAVLLDGDDAEGRLRAAGLHKISVQHWIGQPAIVAAQDFIDQFRQRLANSPAAGFVDGLTIINPGSRPTYYKGRWRAPASGDNGDYVGRRPQAYGADRWCVVRLVDGAPEKLLDLPLDNAVSPARDDAWRLQAAIDAARHTPLGYRVQPIPGTTPITEYIVDFFSPLPSWVERYLELAGISVDRSRGALFSYRIPASALAELQSVVTGTLWMTTTQGDNQ

SEQ ID NO: 24274 - protein, 1857 aa, Microbacterium maritypicum MF109
MTAEAPTIAETITKIQSALRDYIEATYHIGHPTLIEQRREILDQEGVISQAPFIESTPRYQTGRRFSDLELDPSAQKLFASIASNVGGSRLLYDPPYTHQAKALEWTMRDGLSLAVTTGTGSGKTESFLLPMLAKLAREAANSPQSFARPAVRALVLYPMNALVNDQLGRLRLLLGDNRVTNQFQSWAGRPARFARYTSRTLYPGVRKTERDQTRLKSVEDFYIDLLDRQDDPNARHHEAASKLVGQLRQRGKWPAKPDLRTWYGTKGSRWKNSSGEFVRAIVQPDDSELLTRHEVLAAPPDVLITNYSMLEYMLMRPLERPVFDATRAWLADNPNEKFLLIVDEAHLYRGAAGAEVALLLRRLRARLGVPADRLQVIATSASFNDQAYASAFAAQLSGKDPAEFRTVTGELNLRSTAAPGTMSDASLLAGLPLDDFYDGNTDPERVAAVQELLDARCISASPDDGVGVLLHRALSDYEPMGLLVNETMQEAQPVGELGGKIFPDADRETADRAVTALVALGSVARLSADDAGLLPCRVHAFYRGLPGLWACADADCTAVDRDTAGPVGKLYGQPRETCECGARVFELYTCRHCGSAYLRAYTDDPASPKSLWHEPGNSFQTATGLVPQLQPLDLLVEEPDPDQAAEIADLDLITGRLNPVKLGSRTRSVYLPGKRNGEVVDTDDDDEDDGDSKTTGSGEFKPCGVCRKLAGFGRSSVQDHQTKGDQPFQALIARQIEVQPPSSPYSDFAPLRGRKVLAFSDSRQVAARLAPNLQSYALRDVIRPLVIRGWGEIARLPGMDKQIGLHQLVLATLVGAKKLKVRLRPELRQGESMAVLRDVGRLIDAGALSGDIAAQMELVSLAVYPPESLMKAIYSTLIDRYYGIAALGLASLRERETDRAGLLADLTNLPGVADTDEKKLALVRVWLAQWATPSYGIWFPNMTMDWRGKKEGVRPHAGKFRPFERWLDSSILVRQFNKEWLPVLQQRFCEVAGGNKHYLLAGKVALELEGEWGYCERCRFTQRPFPGSSKCVSCGDDQVQVIDPDSDPVFSARKGYYRASTVRALRDNPETPMSIIAAEHTAQLNAAQSEAVFSKAEEHELLFQDIDIELPNAGAQERAAIDVLSCTTTMEVGIDIGALSGVALRNMPPSRANYQQRAGRAGRRGNAVATVVAFGSSDTHDDHYFREPAEMIRGKVVDPVLTMDNDEIAKRHVIAYLLQRYHQDKLPTFDPDTQKSQLFEVLGTVPEFVGTASLLNRTDLEKWLNQNEASLRADIDDWLPSELPSASRQQVLDGIVSNTLVAIDSALDLTDAGTLPPPEAGDSMPEAEEAEAEGPAEDGAEEPSPMRSQTNLLDRLLYKGVLPRYAFPTDVATFHVFDVDRSEPFRVAYRYAPSQGLPVALSQYAPGKDVWIDNKEWHSGAIYSPVKAERYKAWQEHKLYFECRVCHYAKYYDQEEAHPGEIRECEACGTEGSFGEAMAWMRPPGFAHPADETEGTSPDDAPARSYATRAKLVAPGPDDESAWDEVTDRIRQTYHRETLIVTNTGPGNEGYTYCFKCGKIEPTALPTGTVVGQHKKPFPDPNEQDCSGNSAWRGLALGTDFITDVLLVRLKVASPVRLAPQFLSTQVALRTIAEAMTIAATQLLDIEATELQAEFRPALTPGGAAGLEAEIYLYDTLAGGAGFTRRVEELGIQVLEETLKRLENCPAACDQSCYRCIRSFRNRFEHGLLDRKVGAGLLRYLLYGTAPTLDESRLELSIGRLYGDLKGRGISGVEFERDVEVSIPGIGTVTAPILATKGDRRFIFGVHSPLTPHLASDDLLNDAKENQAVIPVRLVDDIEISRSLPNASLAVEKILL

SEQ ID NO: 24275 - protein, 661 aa, Microbacterium sp. No. 7
MTDEDETKYVNISLPAGTSRTEREGFLRLCKVLSTAPLDPRRRVVRERVFAEAEITDLYNRPTLGAAAHTLIDLAEQGWTLKLYRHGPLLMPPPSHPDPETEKARIRRQEHLRRDPQLRQPSVRRFIERMEKPREHAGGLVSIFNLMRDGRELADALETADNPSAVIQPYVQVVDSGKCEHTGLALHDIWRYFRHTWSNAYFTVPGRSMPILVRDAATAHHAVIGLAAISSPVVQIAERDQWMGWDTDTFLESIRETPTQKVAQWLSARIDTQLHEIYVEDLLNDDVLQPTALQQPTLDAVALLRADAERHRQKHHRTPLREVRQIERDDWAERARTPLFRSKRATALADTLETALVLNPYLQPTPTAEGLAAALKDSKARTQVRRLVRRARGERVGTVIADLTVCGAVAPYNALAAGKLVGALAVSPKVISAYRTKYARPSEIASAMAGRGIERESRLAFISTTSLYGSGSSQYNRLRWPAEVMGGPSDQQISFHQLGRSRSFGTSQFTDDTVDALVRLSRLQGATVRVNSLFGEGVSPRLRKVRLGLAALGWSSNELLKHGRERIVYGVRLVENLRDYSLGIDPDPSYLVDPEQVEGEAAVAQWWFERWGHRRARQAAVAESMRTHRLVRPLRHGARVSLPDVEDAPSEQTPPATAQQA

SEQ ID NO: 24276 - protein, 363 aa, Microbacterium sp. No. 7
MQISQLTAETAAVAAIRTLGLDPDIIDLTSFEALAAALRRAASFLCPTSPGRLADAVYGAVQPLAGAGAVTRSGIGEILDELVASGDLLELRRDNGQSARLLYLAPPSFIERHPGRYLLTGIRPFGVPLILDDLAQTINYEGPTRSISLDAEDGPTQLRDRGLRCVARERWLARPAIETPTAFLDHFRVRLDTAALAGHLKDIQILDPASSVRYYAGRWRPPAASDTGDFIARRPQAYGADLWCLARCERGVPSRLLEWPVDNPVLPGRDEAWRYQAAVDAARGVPQRFRRRAGDVAGGDVVFDFFSPLPGFAERYLQFVGLPLGKTRGALFSFRVPAAAADGVGTFLIDMLWMTQEEAPHGV

SEQ ID NO: 24277 - protein, 1858 aa, Microbacterium sp. No. 7
MASDAPTIAETIDDIQSALREYIEATYHVGHPTIIEQRRQLLLTEGVLFKAPFIESTPRYQTNRTFAELDVDGAVHDLFTPLTQKVGALDRLLHDPPYTHQAEAIEWAARDGNSLAITTGTGSGKTESFLLPMLAKLATEAKHRPGSFAAPAVRALILYPMNALVNDQLGRLRLLLGDPRLTTQFHAWAGRPARFARYTSRTLYPGVRTVKKDQKRLGSIEDFYLLLIDKAADPKAPGHAQAKKLKEKLEARGKWPAKPDLKAWFGPKGSKWKDAKSGRFVRAVMGPDDPELLTRHEVLAAPPDVLITNYSMLEYMLMRPLERPVFDHTRQWLADNPEEKFLLIVDEAHLYRGAAGAEVALLLRRLRSRLGITPDRVQVITTSASFSTPEYARAFAAQLTGKDEADFRTVTSKPALRSNAAQGTAAAATLLAGLPLTDFYNAETEPARMVAVADLLTDRGVDDRDRPVAALLHDALTGYEPMNLLINETMQKAQPLHELGTAVFPGVATEVADKAVTALVALGSAARPAPEEAGLLPCRVHAFFRGLPGLWACIDPECGAVDRDDLPPGVGPIGKLYPQPQATCDCGARVFEFYTCRHCGSAYARGYTDDLQHPTFLWHESGGAFQTTAGAVPELFPLDLLLEEPQAGEVQVAEIDLVTGRLDPDKPPVRGRVVFLPKLRSGEKVTSDDDGDDGDDHAEADGEFKPCGVCGQLAGFFGRSSVQDHQTKGDQPFQALVTRQIEVQPPSAPYSTFAPLRGRKVLAFSDSRQVAARLAPNLQAYSMRDVIRPLILKGWEELSAQPGIGKHLSLERLYLAVMVGAKQLEVRLRPELREAESLHVLKAVGKALDNGALTGNEEARGELLMLTSPPPQALLRAIYLALTDKHYGLVSLGLASIREKASLRDDLLADLPAIDGVATTDEQRLALVRLWLAQWATPTRGIWFPTMTSEWWRQKGGVKPHTGRFQAVDRWLGTLAAKKKFKEEWLPVLLPAFCELEGAKYRLLAGTVALESGGLWGYCERCRFTQRPFPGATRCVNCNQNQVRTLDPTTDEVFQARKGYYRQSAERALQSPHRPILSIIAAEHTAQLNAAQSDAVFSRAEEYELLFQDIDVGLPRPGEQERAAIDVLSCTTTMEVGIDIGSLSGVALRNMPPSRANYQQRAGRAGRRGNAVATVVAFGSADTHDDHYFRNPHLMIRGDVDDPVLTLDNDEIARRHVIAYLLQRYNQDRLPEIDPEDQPQLFEVLGTVRGFVGTTSPLNRTDFEGWLTEHETVLRDDIASWLPAELTATDRSRLLDGLITATLDAIDDALDLQADGKLPEPEDGDAAPQEVVVEDGDAGEDGAEVPTEQRSQSNLLDRLLYKGVLPRYAFPTDVVAFHVFDRAKSERFHTEFRYAPSQGLPVALTQYAPGKVVWIDNKEWTSGAIYAPMHKERAQAWRDKMLYFECQVCHYAKHVPADQAQRGEERDCDACGAPGKFGKAMNWMRPPGFAHRANDDPGTSPDDAPANSYATRAKLVAEGPEREEAWDHVTPRLEQTYRRDTLLVTNTGPRGEGYTYCTKCGLIEPTHGATGIVAGPHTKPFPDEREQECQGSGSTKGLVLGTDFISDVLLVRLRVEKPLTLRPELLSTQVALRTVAEALTIAATGELDVDASELQAEYRPALTPGGNHGQEAEIYLYDTLAGGAGFTRRVHGYGESIFRKALDRLEHCPADCDASCYRCLRSFRNRFEHSLLDRQIGAALLRYVLDGTSPVLNEVRMSQSIDKLLADLQSRDIAGIEFLKNEPALIPGIGSVTAPILARGNGGDRIFYIQSPLTRDTPPTQELWDAKELGGVPIHPIDDIVVTRNLPVASQQVLRWLS

SEQ ID NO: 24278 - protein, 661 aa, Microbacterium sp. TS-1
MTDEDETEYVNISLPAGTSRTEREGFLRLCKVLSTAPLDPRRRVVRERVFAEAEIADLYNRPTLGAAAHTLIDLAEQGWTLKLYRHGPLLMPPPSHPDPETEKARIRRQEHLRRDPQLRQPSVRRFIERMEKPREHAGGLVSIVNLMRDGRELADALESADNPSAVIQPYVQIVDSGKCEHTGLALHDIWRYFRHTWSNAYFTVPGRSMPILVRDAATPHHAVVGLAAISSPVVQIAERDQWMGWDTDTFLESIRETPTRKVAQWLSARIDAQLHEIYVEDLLNDDVLQPAALQQPTLEAVALLRADAERHRQKHHRTPLREVRQIERDDWAQRARTPLFRSKRATALADTLETALVLNPYLQPTPTAEGLAAALKDSKARTQVRRLVRRARGERVGTVIADLTVCGAVAPYNALAAGKLVGALAVSPKVISAYRAKYARPSEIASAMAGRGIERESRLSFISTTSLYGSGSSQYNRLRWPAEVMGGSGDQQISFHQLGRSRSFGTSQFTDDTVDALVRLSRLKGATVRVNSLFGEGVSPRLRKVRLGLAALGWSSNELLKHGRERIVYGVKLVENLRDYSLGIDPDPRYLVDPEQVDGEAAVAQWWFERWGHRRARQATVAESVRTHRLVRPLRHGARVSLPDVEDVPSEQTPPATAQQA

SEQ ID NO: 24279 - protein, 363 aa, Microbacterium sp. TS-1
MQISQLTAETAAVAAIRTLGLDSDIIDLTSFEALAAALRRAASFLCPTSPGRLADAVYGAVQPLAGAGAVTRSGIGEILDELVASGDLLELRRDNGQSARLLYLAPPSFIERHPGRYLLTGIRPFGVPLILDDLAQTIDYEGPTRSISLDAEDGPTQLRDRGLRCVARERWLARPAIETPTAFLDHFRARLDTAALAGHLEDIQILDPASSVRYYAGRWRPPAASDTGDFIARRPQAYGADLWCLARCERGVPSRLLEWPVDNPVLPGRDEAWRYQAAVDAARGVPQRFRRRAGDVAGGDVVFDFFSPLPGFAERYLQFVGLPLGKTTGALFSFRVPAAAADGVETFLIDMLWMTQEEAPHGV

SEQ ID NO: 24280 - protein, 1858 aa, Microbacterium sp. TS-1
MASDAPTIAETIDDIQSALREYIEATYHVGHPTIIEQRRQLLLTEGVLFKAPFIESTPRYQTNRTFAELDVDGAVHDLFTPLTQKVGALDRLLHDPPYTHQAEAIEWAARDGNSLAITTGTGSGKTESFLLPMLAKLATEAKHRPESFAAPAVRALILYPMNALVNDQLGRLRLLLGDPRLTTQFHAWAGRPARFARYTSRTLYPGVRTAKKDQKRLGSIEDFYLLLIDKAADPKAPGHAQAKKLKEKLEARGKWPAKPDLKAWFGPKGSKWKDAKSGRFVRAVMGRDDPELLTRHEVLAAPPDVLITNYSMLEYMLMRPLERPVFDHTRQWLAENPEEKFLLIVDEAHLYRGAAGAEVALLLRRLRSRLGITPDRVQVITTSASFSTPEYARAFAAQLTGKDEADFRTVTSKPALRSNAAQGTPAAATLLAGLPLTDFYNAETEPARTVAVADLLIDRGVDDRDRPVAALLYDALTGYEPMNLLINETMQKAQPLHELGTAVFPGVATEVADKAVTALVALGSAARCTPEEAGLLPCRVHAFFRGLPGLWACIDPECGAVDRDDLPAGVGPIGKLYPQPQATCDCGARVFEFYTCRHCGSAYARGYTDDLQHPTFLWHESGGAFQTTAGAVPELFPLDLLLEEPQAGEVQVAEIDLVTGRLDPDKPPVRGRVVFLPKLRSGEKVTSDDDGDDGDDHAEADGEFKPCGVCGQLAGFFGRSSVQDHQTKGDQPFQALVTRQIEVQPPSAPYSTFAPLRGRKVLAFSDSRQVAARLAPNLQAYSMRDVIRPLILKGWEELSAQPGIGKHLSLERLYLAVMVGAKQLEVRLRPELREAESLHVLKAVGKALDNGALTGNEEARGELLMLTSPPPQALLRAIYLALTDKHYGLVSLGLASIREKASLRDDLLADLPAIDGVATTDEQRLALVRLWLAQWATPTRGIWFPTMTSEWWRQKGGVKPHTGRFQAVDRWLGTPAAKKRFKEEWLPVLLPAFCELEGAKYRLLAGTVALESGGLWGYCERCRFTQRPFPGSTRCVNCNQNQVRTLDPTTDEVFQARKGYYRQSAERALRSPHRPILSIIAAEHTAQLNAAQSDAVFSRAEEYELLFQDIDVGLPRPGEQERAAIDVLSCTTTMEVGIDIGSLSGVALRNMPPSRANYQQRAGRAGRRGNAVATVVAFGSADTHDDHYFRNPHLMIRGDVDDPVLTLDNDEIARRHVIAYLLQRYNQDRLPEIDPEDQPQLFEVLGTVRGFVGTTSPLNRTDFEGWLTEHETVLRNDIASWLPAELTATDRSRLLDGLVTATLDAIDDALDLQADGKLPEPEDGDAAPQEVVVEDGDAGEDGAEVPTEQRSQSNLLDRLLYKGVLPRYAFPTDVVAFHVFDRAKSERFHTEFRYAPSQGLPVALTQYAPGKVVWIDNKEWTSGAIYAPMHKERAQAWRDKMLYFECQVCHYAKHVPADQAQRGEERDCDACGAPGKFGKAMNWMRPPGFAHRANDDPGTSPDDAPANSYATRAKLVAEGPEREEAWDHVTPRLEQTYRRDTLLVTNTGPRGEGYTYCTKCGLIEPTHGATGTVAGPHTKPFPDEREQECQGSGSTKGLVLGTDFISDVLLVRLSVEKPLTLRPELLSTQVALRTVAEALTIAATGELDVDASELQAEYRPALTPGGNHGQEAEIYLYDTLAGGAGFTRRVHGYGESIFRKALDRLEHCPADCDASCYRCLRSFRNRFEHSLLDRQIGAALLRYVLDGTSPVLNEARMNQSIDKLLADLQSRDIVGIEFLKNEPVLIPGIGSVTAPILARGNGADRIFYIQSPLTRDTPPTQELWDAKELGGVPIHPIDDIVVTRNLPVASQQVLRWLN

SEQ ID NO: 24281 - protein, 432 aa, Nitrosococcus watsonii C-113
MSGLTCRLNAKSPDSEQGENRKMKKSSRAVVSTTPREANLKRKLRAHLQSLGFTKSEDGALQVPGNDKGIIRTLHRAQREERLRANHEFISLKGEKLMRFFALGKEVNPERISPILERVSAGTLHGDLFRLASLTWSVPVSNGFGRRLRYLVWDENNRKLMGLIAIGDPVFNLSVRDKLIGWNTHDRSARLVNLMDAYVLGALPPYNALLGGKLIACLLRSRDLYDDFANAYGSTTGIISQEEKKARLLAITTSSSMGRSSVYNRLKLAGIQYLKSIGYTGGWGHFHIPDRLFAELRDYLRNIDHTYADQHRFGQGPNWRLRTTRVALSALGFKEDMLRHGIQREVFFCQLAANAAKILQTGKGQPDLRSLLSAKEIAELALDRWMIPRSKRRPGYRDWVSSDLVGLFGNQARMLRTQIKKAEMAKRGIAGA

SEQ ID NO: 24282 - protein, 360 aa, Nitrosococcus watsonii C-113
MITELTPQDVVTYCRNVVGANVERGGIDDILLVGLLRRSAGIICPCSRVALRASVTESLSYLHSDDDDLSGRLDNLIEVLIVTGDLLELSDVVVDDPDVKETWVFAAPPSFVVRQNGIAFLAGIVPDQDSFLSSDLDSRIVYSSSARFIEPKPGENLEEELKAEGIHQIEEATWLRSPRSQPPKHLIDRYKQQLALESICGPVNGLKILDSSIKSTYYKGRWVELLNQTGAFIARRPQEFGAPLWCFVEVAGGQLQRVIDLPPQNYRWRGCDAAWHLQMAIDSYQRMPQRYRLSRIEESVRFDFFSPLPLWAQRRLMVVGREVPREGSLLSYEIPASEADEEEGFLQQNLWLEPVEKENR

SEQ ID NO: 24283 - protein, 1849 aa, Nitrosococcus watsonii C-113
MQTIKETIENLHGSLRDYIEATYHISAPSLISQRKVLLDTDGVIHRTPYLESTPKYQTGNAFASIDGLPSAAQKLFLRLSAPEGDLPRLIYDPPYKHQAESLQYSLIDRKNLVIMTGTGSGKTESFLLPILGKFAMEAKTRPAVFTEQPAMRALVMYPMNALVNDQLGRLRALLGDPRLVQMFKEWCGRPPRFARYTSRTPYAGVRTSKKDSARLQSFDSFYVDVLRRVESDDPEEKEQAVKLLDALKERGKWPAKPDLKAWFGEKGSAWQDRKTGEFVRAVTLPDDSELLTRHEVQLAPPDLLVTNYSMLEYMLMRPIERPIFDRTREWLAKNPDESFLVVLDEAHLYRGAAGAEIGLLLRRLRDRLGVPEERFRVICATASFKDAAYAPEFGAQLSGITPDTFVPIEGTLDLKEEVGVGTNRDAEVLSGIDLRTFYEVNTDKARMATIKSLLDYRGVTGAETTESALFDALGSLGPMGALINATMKEARPIAELGSFLFADDVPAHMVDKAVTVLMTLGSVARPEPKLPGLLPCRVHNFFRGLPGLWVCMDPECSELAEDQRSSICGKMYSQPMDECSCGARVLELFTCRNCGTAYARAYTDDVDTPRALWPEPGEQLRMASGETNPLLALDLLLEQPAHDDAAEPADYDLETGQLNPATTGPRTRTVYIRQERLANAADDKNDNDPSFESRGQFKPCAVCGKMARSGRSYVQDHQTKGDQPFQALLARQIQIQPPGPQEATRFAPLRGRKVLAFSDSRQVAARLAPNIQMYSERDSLRPLIISGFAWLQEQDVLKNHLSLDDLYFGALIASKRLNVRLRPEMHDHESFDAEVIVERAIKSGDLNNPMSLLDLLLDLRSHHPPHSLLSSMLTTLTDRFWGMEPLALATLREKNRRSSKILGLPPIPDIAETDKTKLALARFWLRCWAGFRIAQMPDDWVDRPTSEGFRAQSRKPKSKIKAVNSVISDKLARKIFWEKWSPELLACFTRSKAGGNAYLNGSELSLEFDGDWMHCPSCKSVHRPIPGIERCLDCGSDAVSALAPDTDPVFLARKGFYRKPVTEALEEPPREPMALIAAEHTAQLNAPQNEDVFSKAELNELLFQDIKLAGNGIGSRPTAIDILSSTTTMEVGIDLGALSGVALRNMPPGRANYQQRAGRAGRRGNTVATVVAFGSADSHDEHYFTEPDEMIRGDVVDPKLALDNPEIVRRHIRAFLLQNYHQDRLPVVDPDQPHDLFSVLGSVAGFRRTDSVLNRDDFAEWLARNENVLRTRIAKWIPAELLEEDRVELINGFVTDCLKAVDEAIAPDPGEEVEDDEEDSRGDEEVAEEGEERPQQGSNLGKLLDRLLYCGKLPRYAFPTDVATFHVFDRDRSSRFRHIMKFAPSQGLPIALSQYAPDKQVWISGKCYTSGAIYSVMKDDRFHAWESKRLYMECSDCGFSRTFDIGEATRDETRNCDACGGEDTFGPARYWMRPPGFAHPISVEEVTSPDEIPETSYATRAKLTMGTPGDDEDWTEANERVRSLKTRRHLLVSNTGPQHEGYTYCVKCGRIEASNTPNPILAAPHRKPFPDDDDKQMCDGTSPTRHLVLGTDFITDIALFSMRVAAPLKLKPGHYSTDVALRTVSEALAKAACQLLEIEPGELMAEYRPALTPAGKNGLEAEIFLYDTLPGGAGFASQFATRGLELFQRAFYLLKTCPEDCDASCYRCLRSFKNKFEHRLLDRHVGVELLEYLLAGQHPGFNTQRLKNSIELLLNDLLRRNEGVVTFHENAEIKYGVGKTAKAPILAEYEGKKFVIALSRPLTAGHPSDPLIADLRDSSTEYQVIVENELVVRGNLPTATRTVYQQITE

SEQ ID NO: 24284 - protein, 402 aa, Nitrospina sp. SCGC_AAA799_C22
MAKYIPLLTLESRIKRKLRDHIREMGFNRTSQGMLEPSSNSKKVFRALHLKQRIERLKLEKPFIDKNIHLKDYFASGSEINPEEISPRLQLVKSGSLEERIFRLASLTWSIPVSRGYGRRMRFIIWDDHNNKIMGIIALGDPVFNLKARDDLIGWKSNQRKDNLVNVMDAYVLGALPPYNMLLCGKLAACLIRTREMQEMFSKKYGDTKGIISGKRKRAKLLIVTTSSALGRSSVYNRLKLQNIKYFQSIGYTKGWGHFHITNGLYEDMKLFLKQKKHRYEKGYQFGDGPSWKLRVVRTTLDLMGMNSDLLRHGIFREVFMCKLASNAERILRGEVKRSYCKNLLSTKEVAELALNRWVIPRSERMDDFKKWNKNQIADLLNPNKSSEITLSKRKKKRGLKQ

SEQ ID NO: 24285 - protein, 308 aa, Nitrospina sp. SCGC_AAA799_C22
MAGVLIDAFKFVIDINDDFISKVDEMIEALISHGDLLEISDATTIDPNQKGTWIFATPPAYVPRNNGLIYLLGISPEQISPLPDELEERIEYIEHLRLIRQCDGENLSDVLKELGMTELSEKAWLKSPGHETPESFFESMCKKLESTNTCGELPDLIILDPDKPVDYYPGRWTTVDKKSGYFVAKRARAYGNDIWGFTKLDNGNPKIFLDFPLPNSRYRGCDFAWRLQTAIDRCSKHPQVFRIQDDSDSEDSRIDFFSPVPLWVRRRLDAFGKPCPPSKCLFSYRIPRDSIGDEIHYLENEIWLSRLP

SEQ ID NO: 24286 - protein, 1844 aa, Nitrospina sp. SCGC_AAA799_C22
MEKTLLETTAQLHHALRDYIEATYHISNPRLIQQRRKLLNQPEVIKQIPYLESTLRYKTDISFSQIKDLEPSVLELFLELSTDSRGPVLIHDPPYRHQAEAIKKSLIENKNLVVMTGTGSGKTESFLLPILGSLATEASKFPSTFAECNAVRAFVLYPMNALVNDQLGRLRLLFGDNRLRQKFMDWAGRAPRFARYTSRTPYAGVRDAKKDQQKLKSLGEYHVKIEDEAFDPSSPEHEKANELFLELKRRGKWPAKPNLRAWYGTPNSRWKNSRTGEFKRAVTLADDSELITRHEVHESPPDILVTNYSMLEYMLMRPIERPIFDQTKVWLDAHPENKIFLVLDEAHLYRGAAGAEVGLLIRRLRERLQITSDQMQVICSTASFSDSNYASQFGGQLTGCDFKTFVPITGEIQYRQEARSGTDEEAKALSKISLFEFYQAEDEENRILVINEFLKYRNTKPNGELEQVLYHALHEFPPMNLLINKTMEGACRFDTLGKVIFPDTDLDIANSALTNLMAFGSIARQKPTEPGLLPCRVHNFFRGLAGIWACLDQDCSELSSNEKNGPTGKIYSQPRDLCACGARVLELYTCRNCGAAYARAYTDDIDDPRFLWSEPGHKLRLLSGDVTELLPIDLLLENPVVAGIVEPIDYDLETGRLNMSGNRVRPLYVRKREMTGGDDGENESNNGREFKPCGICGTTAAFGRTSVQDHQTKGDQPFQALISKQIQVQPPELVKATKFAPLRGRKVLAFSDSRQVAARLAPNLQMYSIQDSIRPLMVWGFRRFLEYESLKEDISLEDLYLSILIAANVLGVRLRPELRPEESFTAERIVEEKIGKGVLDNEVELLRLINRFKSESPPEFLMGCFHKTIFDRHLGLEPLALGSIVERGEHTEFFENLNDITGIAETPKSKVGLARAWLRCWKENIWLSRMPHAWWQNRVKGHSGDFKPFNRILGNSQAKSQFRRDWLPQLLSRLTEQPARNVNRLKGSELSISFDNNWVSCQICRSVHRPIQGLDFCIDCQSPNPKIIDPETDEVFVARKGYYRAGTMAVLSDDIESPMALIAAEHTAQLNAPQNEDVFSKAEENELLFQDVDLTWKHMDSSSSAIDILSSTTTMEVGIDIGTLSGVALRNMPPGRANYQQRSGRAGRRGKAVATVVGFCSSDSHDEHYFNSPDQMIRGQVLDPKLTLDNPDIAGRHLTAFLLQSYHQERLPDISPDEQPQLFAVLGKVSDFLKRQSILNRYDFENWLQSNEEILRERASGWIPKELSEENKNLLINNLVSNTLSHIDKSIGFNAQNPQSSGEEGQDEQASESDIPETQETQAESGEEIPDQDQLHENLLNRLLYNGVLPRYAFPTDVASFHVFDRNRSTAYRPIFQFAPSQGLPIALTQYAPGKEVWISGKCYRSGSIYSPMASDRYDAWSNKRFYYECSECGFAKTYLISEGEKEEYLDCSACGGNATFGPGRYWLRPPGFAHPINQDEIVSPDDTPETSYATRAKLTIPTPSESPNWIRINDQIRVLNIREHLLVSNSGPRKEGYAYCTLCGLIEPTASPNLTVFAPHPKPFPDREPDCSGSRASRGIILGTDFITDVLLISLKVIPPLNLRPGYYSTNVALRTLSEALAKSASEFLELESGELMAEFRPALTPTGWRGLEAEIFLYDTLPGGAGFSRQISEYKDTVFQSALKILQNCPGDCDRSCYRCLRSFKNKFEHQLLDRHIAANLLNYLLMGEMPNFDSERINQSTKILYQDLLRMAGDNLNIQEQATIAISGLGNFEVPILVEKPSQEQFVVYLHGPLTVDYPPNEEIRTLQEYSSLTVLPVDELLVRENLPQATSQLLQELGVS

SEQ ID NO: 24287 - protein, 677 aa, Nitrospirillum amazonense Y2
MVRGVPMNKIDDKLRNPRPFEPFLNPSEREELHGLLDFSGPTPPRFADSLRNLARSYVDDGDSTKLRAVCLLVADLFDQGWRVSLHKGALLCEPPSIDRHNDQTAEDVKLRIRAALQASRRRQLEEPSVARFIQRMERPTLRPQGRTSVLDLIDSGDHLADALERISLLPDQDREAAFGRVIDPVIEICHSGSRCAYTGLPLNDIWRYFRHTWAHEYRPIPGRQLLVLVRNAARPNRPVIGIAMLASPVMRLSARDNWIGWLRGAMEANLNSGIWDAPALAQAMAERLEASIADVRWDDLVTADEIASPVENTVLRLEQKASGAAFARELELRAHYEASMEQDGRVPPFRGAVKAASAGTNWRAASEDPLFVRKRAELLSQLLSAKQIFRAAGLLDRPKEALSQLLSAKSGQRAIDVVLTEFRKAGLSSRIVDVSICGAIAPYNELLGGKLVALLLASREVRDHYAERYGKQVSVIASQMAGRAVSKPADLRVLTTTSLYGVGSSQYNRLALRAVEHPGLDHDLRWDSIGKSRTGGFGTLHLGADTAHALRQMAQSAHASRRINNRFGEGTSPRLRQIREGLDAIGIDSDAILHHNTPRLFYACELGSGSRDSLMGMAGDEFHASPASTIAAAWRRRWLDGRVRRPETISALRTLGPATIQRSLHATEADLVSELID

SEQ ID NO: 24288 - protein, 354 aa, Nitrospirillum amazonense Y2
MVTADVVAGLARASLGLPPTPADLNEPYIAAALRRLAGFLCPESPRTLLRAMVDSHRGLVNNEDAFAEQVEEVIETLVAIGDLLELGDVALEGEKVRSTWLVAAPPAFVARESGSVFVLGLSTDEQTPLPTEMRSRVTVDRVIRLIEPQHAEDLGAALRELGLRELSSAGWLRTPRHVDAAGLLASYGAKLAACSRSGEVPDLLVLDGGRNIRSYRRRWTLPGSLTGCFVVRRPQTFGADLWGYAELRDGNAQKLLDLPLSGERWRGCDAAWRIQMAIDAFTGRPQEYRLGAADGGSRFDFFSPIPSWARRRLAVIGREIEPAGCLLSFLVPTCEVAAEEAFLNELLYLARVVE

SEQ ID NO: 24289 - protein, 1849 aa, Nitrospirillum amazonense Y2
MARTIQETIDRLHSSLKEYIEATYHIGDAALIEQRRTLLDRIGVTHQEPFLETTPRYQTGAKFRDMVGLPTSARTIYAMLSGIRKDRARLLFDPPYRHQADAVGHALVEGRNLVIMTGTGSGKTESFLLPILGKFAREAAERSASFGQPAMRALLLYPMNALVNDQLGRLRAIFGDPDLVAQFTKWAGRPPRFARYTSRTPYAGVRSGKKDGRKLSSFEDFYVEIERHALAPASNKQKAAARLREQLQERGKWPAKPDLDKWYGAKGSRWVDPKTGNFLRAVTLDEDSELITRHEVQETCPDLMVTNYSMLEYMMMRPIERPIFDTTRGWLAANPNEKFTVVLDEAHLYRGAAGAEVGLLLRRLRDRLDIPADRFQVICATASFEDKVYATAFGAQLSGVPADSFVAVTGVLDMRSHAAPGTKADAEALAGLDLELFYSADETDRSASIANFLAHRGVAQSAGVERDLFEALKTFPPLDLLVNETMGAAQPVAELGSRLFPDTPDIADSAVTALLAVGSVAREQPDASGPLPCRVHNFYRGLPGLWVCMDPNCTELAEEDRSGICGMMYGQPHEVCNCGSRVLELFTCRSCGSAYARAYSDDLDSPDVLWSEPGRRLRMPNVETLPLLDLDLLLETPKKTDLAELAEYDLDTGRLSAGQRTRTVYIRKDRITPALYDDDDEGGKADDNADGRGRFVPCAVCGETASGRTTVQDHQTKGDQPFQALVARQLAVQQPGKQAPSAFAPLRGRKVLVFSDSRQVAARLAPNLQMYSVRDALRSLIMWGYGRLSQSSMIQPLLSLDELYLSVLLASKVLGVRLRPELKSGENFSTAEDAVEKAVAEKAETDDARLAQLWMETKTEVPPAALLDDIAKTVQDRYLGLEALALASIRERANKTKDLHALPDIPGIAENDEDKVALARAWLRCWRPVGFWLNSMPSTWYKRPRGRGTSVGSRKGTFKAMDIVLKDPAARKAFKNWTKPLLDIFTQDQGGGARRLMGQNLSLDLDGDWRRCANCKSIHRPVRTIPHCLDCGSDAVVELNPLDDSVFVARKGYYRSPVLGALSTPREAPMTLIAAEHTAQLNAPQSDDVFSKAEENELLFQDVELDWGPSGGQNTAIDVLSSTTTMEVGIDIGALSGVALRNMPPGRANYQQRAGRAGRRGNTVATVVAFGSADSHDEHYFSEPKEMISGKVIDPKLTLDNPDIVKRHIRAYLLQAYHQVRIPVFDPSANPDLFSVLGSVEDFKTPGATLNAADFKTWLSENETELRDRVASWIPEELVGQVREALLDEMVNDCSAEVDKAIANDSVGGERFEKEDDDANEEGAEMPEEVGEEAPPVKALTGKLLDRLLYKGVLPRYAFPTDVATFSVFDKERSTPYRHVMKFAPSQGLPVALSQYAPGKQVWISGKCYTSGAIYSQMPEDRFDAWQNRRFYRECTECGFAETVKIDRGLGHNHVSDCYACGSLETFGPTRHWLRPPGFAHPLELEEVTSPDDMPETSYATRAKLVMPTPADDDKWIWANDRIRAMPNRQYLLVSNTGPKQEGYNYCTLCGLIESSAEGSASIFSTHLKPFPHKEPTCPGSRTSRHVVLGTDFITDIALFSIRVEAPLKLKPGYFPTDVALRTVSEALTKAACAMLEVEPGELMAEYRPALTQAGKVGLESEIFLYDTLPGGAGFSRQLADRGLELFQRALTIMKTCPEDCDSSCYRCLRSFKNKFEHGQLDRHIGAELIEFLLTDHMQPFSPERIDASTKVLMLDLERNADSGITYQRDAAVSVPDMGDVTVPILATRSDGVQMVIALAGPLTEEHPSDPRIAEMREKWNGEVVPINELLVRGNLPTATRTVEERILA

SEQ ID NO: 24290 - protein, 473 aa, Paenibacillus alvei TS-15
MRSNSHFFKSIFERLGLPVYLRKDGDDRFDLYIGFYSLDESLFSNAEKDKLKITINPYQKDSLFKNSISFMIDRNNFLVGTTTLLKIDYISPRYSITCSLSQYEGMIYERWGNYVEGILKEGALFSHNDQGGRKIRINDEITTDTEYLYLCTNEQLLDRHKDIQRTYCGMISLLHSDRENFYNVYKIVFKPQSDQRFKELFKFCRDYFKVSLLSKPVRFDALWPPTIQRDNQLSCINSKDNLFLLKSDDTELLRAYSHNGLQHEELQGMVLNNKTKLLAINISDGEAAITIAEKYTSIHSVVQKFNKVIKSYRNSMCITDIKGIQIKGGTTQVLPYKGILKVSSESRSSILRIRNNNICQYNIKASNISIDNLSFGDELVAVINGQFISLINFARNHPINSVLSDEEIFRQLIKFKGPFIKPPSWVKRILILLRDQPRTRKIIKSYVNKNEMPIKAHNILLELLLFLKEGERN

SEQ ID NO: 24291 - protein, 646 aa, Paenibacillus alvei TS-15
MINKETKDLFDKFTRGYSKEEFEFLISLFPYAKVTEIISKNEKKFRKYLQGYRPQKLPTKKLQEIYVESIFVTRNELIVKHVEYMFISYLKRFDEIITEYIGPVCLVREKIEQDQMEYFEKLVDLLIDHRFDELQKVIVYFKMIDYELLESQRNYLFNDLEKKVYYKKVKEEVTKTLSLSYEKSLRELSEEYETELKKYDVMINEYKQLSLHTDKKHKEVLILKENELLNVENKFKTATERIVELEKQVNEIIYVKNECEQIIHELSSAVNMKYDEYCATVEEKWMKSNVQLVQNKNDIQNTIDELLISKGDLLSEIVALNKQKSELENMISLLNDSGKGIVHNMQDFLCKIGFKHEVSAQVSRLYIIPSKSTELEEIEVINDKSFFIDDLAENLKICGISSEYANDLAIYLYASIVKKLSLLLIGYNSRKTANALSYLISGSTAEIITLPPGYDDCNEMISLVHSSTSKVILIENAIENISESVYLPLLKQNSDHILLFSIDSSEHIELLPSSLLNYMMLIDIDSLMGLTISNEEMLLAQSNPSIFSEAVVQYRNLESNFKHLRKLSSIYPLSQSAKVKIAEVMCVIDEQNSPNALYDIILFSLNLLCRCKGRSEELIEFVDHCDFSPMILKMLHAVIEEGQYYE

SEQ ID NO: 24292 - protein, 349 aa, Paenibacillus alvei TS-15
MNNTVIKRIAADLRVRRVPDEKQEYFYSRIVYSALSMWIRYSTLDEDIFDHSVGKIGMSKRYILNKCQTFVDNMIELYPCIESWFYPEKQDTNPTEIVRNRLHQCGELVDVGFFTDVALPDYEECSINEKVRIIRGIPSEGLYRMTGLAQLKVSEKENHNSVHLFDFYGLRDKSAISLLDEYLKLAKWNKRTTINGHIFNKYSMKSFSNSWESSCILKEHDISIYRNPMYQKGNRDYGFMKKVNNCIYVSQINEYLINQYEIRRFMYGLKGKANNPVRATYKRYDDKKIVELNLFNGLPTREESILFLLGWPMNNINDKNNLLFNNDVWEFVRKMLSNLNIKLEEIANG

SEQ ID NO: 24293 - protein, 1746 aa, Paenibacillus alvei TS-15
MDKYSVYETHYSLRKKLIDYIRAQYLGENKLLLNACNDVLEKQGVLFQEPYIEANPAYKVVENGFASSDIPPNIKNILVEMSNRNLGVFRHPFKHQVDALESFYRGKDLFITTGTGSGKTECFMWPMVSSIVNEAASTPKSWQQRGVRALMLYPMNALVSDQLGRLRRMIGDVNGGFKEVFYNNVNSSSRFPQFGMYTGRTPYPGDKDELQDKELAKTLAENLLNRSDEIKQKLIDIGKYPAKYSLEQFVNSLNQGKHVTDDNDAELMTRQEMQQLCPDILITNYSMLEYMLIRPIERTIWDNTRTWLNLSEDNKLLIIIDEAHMYRGSSGGEVALLLRRLMHKLGVTREKVRFILTSASVPADGEPSIRAFSNNLTAQDHEHFTFDIIYGKQQELSTTEAIDVAADLLANIDIVQFLGDENIKRKAIEGFAALIAGAKKTQFTNYFEAQQWLYSFLNKFKPMINIMKVCRGNAITYHELAKRTFPSDDVNIARRATETLLAIAPLAKNKENQILFPARLHMMFRGLQGIYVCSNPDCEDASSYEGLRLGKIYFGVRRDTCECCGSKIYELINDRRCGALFLKGYIYQNSKARDFVWNTIGELYDDTFKEVHLYIVPSNGIHKKTNESKIGWLNAVTGKFFDNDNYIGQKGFLHVAYNNKEFKGKPGKLTYHYCPKCEKAHFNPSDFVTKGNESFFNLVSEQLHIQPPTIFNEELVRKLPNAGRKVLLFSDSRQRAAGLAKDLTRAADDEAVRKVMVLSAQKLKEWAVTHNKYPTMNLLYMAFLEVAVTHNLQLFYGDQKNSFVGDLTKIKDKLKRAARRNKKLDYESIKTDFNSTPGLYDEQLLKLMCSSYRSLSDIGLCYVQPCNQDKLEEVEEEMYDSNINITSEEFEHLFASWANIVMKDSYALGDTISDEVRENARATSYDRFGIDATKIPTVIKHVLSQKGYSEKDIDVIHKCLLKYTATPQGGENKYLNLNVISLVYNADQEWYHCQKCSGVFALTLWGMCAHCGSKHVQVMSNEDLRRFEFWRKPVLDTLESIDSTAITSINTEEHTAQLSHKDQRQKMWSTTEDYEMRFQDVQINDDAPVDILSCTTTMEVGIDIGSLTAVGLRNIPPMRENYQQRAGRAGRRSAAISTIVTYTDDGPHDSYYFLHPKEIISGDVRKPWIDVNNPKLIARHMNMIILTEFMSRINEGMDKLGVEKYFKQYHHNFCDFLISYHRTNRELTVVIPGSELINISDLKQSLKEKLDNICKKIKMNASDYVTETGEQKSLLDVLYEESVLPTYSFPKNVVGFYIEDKEGKEIEQKPERSLDMAISEYAPGRIIVVNKKTYKSGGIYNHHSKFKQNFYEKPARSYFENGEYFRELYYCKNDFCGWFGIAAPGNNECPFCKGHEIAIQYILKPWGFSPINGRSIPESEAENELSYAEAPCYSATPAQDDMTDTSYKYIKVAKRADQTLIVLNKGPKSKGFKVCKDCGAAVTGDEEFSKQIGKPFNHPRSSKKCNHYDIERVLLGHNFNTDMVVLEIAIDNTKINTDLNDLWIKTAALTLSEAIVLAAGRLLDVEFNEIKSGYRLRYSPDIMYVDIYLFDSLSSGAGYSSEVANKINELLSVTEKILTECKCTSSCHECLNHFWNQRVQNKLDRRIAMQLLKWGQYGDIAKEYSLQEQLNLFKPLKELLELDGSEVKLNNNVLVIANDQVKKNVYVYPTMWNKANKVIPDNVIAISDRLITNALPEAYYQLINNR

SEQ ID NO: 24294 - protein, 545 aa, Paenibacillus sp. Y412MC10
METAIDYYEIGKVRTITASYAKILFHTSIGTGTERFVCPECGEYVAFVRGNNVKPHFKHAKQNETTKDCERRVNSQSSYTSIHEKLGLPMYLRTYSENQYELCIGFYKLGYTLLHNIEKEHAKINIRQFEMVHGIKRENNYLIDQSNFLPESTTLLKVDFIATKYTIQCSNLKYESQLKEQWGGFVEGILSDGALFTYNEYGGRKIRVNDEITTGTEYLYLCKNEHLLLGNESISHFFCGTIIIFNGAKLEELNIYKINFTPQNDQQFWRLIKLCRVRFKVSLVSKSASIVPIWPPTVLNDNHIGCLRNYNNFFLLKDSKNDTVVSSYFGATSTRLSSKVIYENTQLLEIHVPSSGLALAIHENYTMLQKNSGNIKSYRNSIRVHDHNNKDLDVQKNRILPVEKTIRIFSESRCSILHSHGGIFTQYKLNDSTPLVINNLAQNDEIIEISGGRHHKLLRFNKTSDSNKTLVDERIIHNMLTRLNGPYVSPPYWIKKLTIQLQPNSKLRGLLKYYLMLNRIPVEGLRVLKVMSNQMKDGIDDEFIS

SEQ ID NO: 24295 - protein, 656 aa, Paenibacillus sp. Y412MC10
MSLSANDQLEVVNELKSKYSKEEFDFIVSLFPTSKLSEEIRSNEKKFRKYLKGFRPDKLPLKRFQEIYYKSIFIENNLALALHLNSLLKNYMLKMDRIISRRIEPAKSLREKIQNNDIDGFINLVDILVNNNYEKVEHIIVYFKFFNITLTREQLQYVDNELQFLVQRKELRIEIENESVERYEQEIKELKSSFKGELKEKEMKIKELVEQIEHNKKEYDEILYVNSVQVDAMEFKYKRHMEDMIKEKKNLTNFISELESKITQMEVQNKSDKRKVSELTLLVNQKEEEFLPLIESKWNASNAALFEKKVAIQHSIDSLIRDREILRLEIEKFILQKNDLEKIIESLQMKGGTLFSDFKDLLYKIGVQSVEAVPSNQSVYYLFGNQMDADEETVERLDFIEDLSDNLSISGVQNLYAKDFSRYLYAIVVCGMSPLFIGFNGRKIANALSQLLAGATPDIISLPPGYVDSNELIHLVKSSSNRVILIENVIDNVSELVYLPLLKQNNDRLILFSMESSEPITLLPSSILNYLVPIDVDSIIQYVKKPGELIRTNVVEAVFKKSFEESSVEANLKTLKKFNSVYSLPLSTRIKWAEIMSVIDSLESPQALYNMLVFSLSMLCSRTGRTTELNQYVEQQGFSAETYKILCSHIEENYSE

SEQ ID NO: 24296 - protein, 352 aa, Paenibacillus sp. Y412MC10
MSSYPIINHIARDLKIIRFNNEPDYQFISRIIYSGLGIWVRYSTVDENILNPDKSKIGVSKIHILNRCRPFLDEMLGIYPAARTWFYPSDTESHPVETVRDRLCMSGELVEVGYNTDLSLPHFEICPINKNNSLIRGIQNQELLTAIGLAQMKTSYSRGALSNQDLFQFYGLQSSTASVIMNEIISALKWTKWNDESPFQIYNKHSSMSFSNSWDYKFIGNGLELSLYRHPMYSKGNKNFGFIKCVDGEMYISQVSEYLVDGFEVRRYMYALRYEASNPVKAAFIRYRQENFVELHLYNALPSQEENLLMLLGWPVRHIHDKYRLLFHGSVWGFIAQVLRNLNIKLEEKIHG

SEQ ID NO: 24297 - protein, 1759 aa, Paenibacillus sp. Y412MC10
MDKYSVYETHNALKKKFIDYIRAQYLGENKFLLQACNEIIEKEGVLFQKPYIEANPAYKVVENGIKNSKVIPDKVKHFLDEMSKKKLGVFPHPFLHQVKALESFYNGRDLFITTGTGSGKTECFMWPMISKIVNEAATSPETWQHRGVRALMLYPMNALVSDQVGRLRRMIGDERGCFREVFYQETGNRGLRIPQFGMYTGRTPYPGNINEDEDKELASTLFQSLLNKDEETKQKLSKIGKYPAKYNLEEYINGLRQGKHITHDYDAELITRQEMQQLCPDILITNYSMLEYMLIRPIEQSIWTQTSNWLNEADDNQLLIVIDEAHMYRGASGGEVALLIRRLLHKLGVTRNKVRFILTSASVPSEGEKFILEFSNSLTAQDTANSTFDIIYGEQQEVDRFGTIDLDPEKLAQIDTAPFLGDQDSKQLAVNQFAEAFAKTGRVKINSYEDAQQWLYTFLGRCRPMISILDASRGKAISYEELSKITYPGINEETARKCTETLLAVAPLAKNKEGQVLFPARLHMMFRGLQGIYACSNPDCSGAHPNDEFRIGKLYFGSVRDTCDSCGSKVYELLNDRRCGALFLKGYMYQEPFNAREFVWNSIGELYDENCKEVHFYIISEENYKKTTKETKVGWLHAPTGRLFIDDSYANKQGFLHVAYNPKELKGKPGKLTFDSCPKCSKAKLNPSDFVTKGNESFYNLVSEQLSIQPPTIFDNDLIRKLPNAGRKVLLFSDSRQRAAGLAKDLTRAADDVAARKAMVIAVQNLEKWAAAQNRQPTMNILYVAFLEVAVTHNLHLFYGDQKKSLVNDMNKVREQLRRNERRNKAMNYETLKADFNTTPGLYDEQLLKLMCSSYRSLSDIGLCYIKPCSEDKIDEVLDELDDNNINLSVDEFESIFASWANFVMKDSYALGDTISDEVRENARPTSYGRFGIPANGKLSGGILRVLIEQGYSPEEINTIYKCLLKYTATPQGSENSYLNMNMLTLTYNNSHEWYHCKKCAGVFARTLWGKCAHCGDSQVAQMTKEDFRRFDFWRKPVIEIIESSTPQPITSINTEEHTAQLSHKDQRQKMWSTTEDYEMRFQDVQVNDDTPVDILSCTTTMEVGIDIGSLTAVGLRNIPPMRENYQQRAGRAGRRSSAISTIVTYTDNGPHDTFYFNHPEEIIAGEVRKPWIDVKNPKLIFRHINMIILTEYTSQIHESMDKVGIETFYNQYYSDFCMFLEGYNKKENEVNVILPDRKLINLVDIKSSLKQHMDAIYIKVQHKVVDYVNEKGDQKSLLDVMYEESVLPTYSFPKNVVGFYIEDKEGKNIDQKPERALDMAISEYAPGRTLVVNKKTYKSGGIYNFHSKFQVGKYDKPARSYFENAEYFKHLYYCKNESCGWFGINRPEGNECPFCRQHEIDVQHMLKPWGFAPVNARSIPESEAENEVSYAEAPCYSATPTQDDMHTTDNRYIKVARRADQTLIVLNKGPKGKGFRVCKDCGAAVSGEEDMKQISRPYQHPRSRKRCYHNDIEQVVLGHNFNTDMVVFEFTLDNRKINTNIDDLWIKTAAMTLAEALVLAAGRLLDVEFNEIKSGYRLRYSPETTYVDIYLFDSLSSGAGYSSELANNVNDLLNYAEGILECSCNSSCHQCLNHFWNQRIQNRLDRQVALQLLRYGEFGKVENGYSIMKQIDIFKPLKELIELNGSKAEILQNTIVIKSGDISKRVYVYPAMWPNNYKEIPEDAVALSDRLINRALPEAYYRLMSSNKVLETMKTKKA

SEQ ID NO: 24298 - protein, 404 aa, Pectobacterium carotovorum subsp. actinidiae
MPKGTATIVSVNPREAKLKRKLREHLQSLGFTKSDAGELQAPGNTKDVIRSLHSAQRADRLSANQDFISLKSVKLMKFFASGKEIDPENISPVLERVSSGTWQGDLFRLAALSWSVPVSNGFGRRLRYLVWDENNGKLMGLIAIGDPVFNLAVRDKLVGWDSHDRSSRLVNVMDAYVLGALPPYNFLLGGKLIACLLRSRDLYDDFARVYGNTVGVISQKKKKARLLAITTTSSMGRSSVYNRLKLGGIQYLKSIGYTGGWGHFHIPDSLFIELRDYLRDMDHTYADHYAFGNGPNWRLRTTKAALSALGFRDNLMKHGVQREVFISQLAENATSILQTGKGKPDLTSLLSAKEIAERAIERWMVPRSIRNSEYRDWESSNLFDLLSINTLNLDQILERTKTVG

SEQ ID NO: 24299 - protein, 537 aa, Pectobacterium carotovorum subsp. actinidiae
MAIRASKYGQYTCPVCKKGVILRRGKVRVPYFAHLPGYGTLECENFILGHSSLPVKEKLNVTVKRRMELRLLISTGRENQRWSLELALPTCNLCRARISLDVGGRSQTLDMMSMVKRRQIGAELSVRPYRIISFSGEPDPEFVAQVEMECQGLPSVGAAVFTALGRGTSGGFPLAQELRYTDTFAFLWQQPAQPDFPDELEVERLVSRQGWNLALVTIPEILSQENIAWLKCFTSLPVVPARSSVTAIWPFLTQNTSVNQIECFHSNTVLLSANRVLTTSREDGPTMHAQGASSILSAVGVEKSPAFFTLNPGDSELVGVSCASDLDVKIFLAFSSHVECFNKYPSVDLVFTKQKGEQEIVSLHQRRCAVVTTEARLLGYKLEYLSMPPGVEGIAKIEGLTENNNIKLFSGNSVAPHDKNMCLLHADALSKLALYLADTECYLEIEFGGLGRLSLSGFSRLASTVGTNKKLSPVLRYRLFSFILQMRLVTPDFTVNSDDSSLIEALANLQPEPHLLPHYRALVKEVITSGFEFNRLR

SEQ ID NO: 24300 - protein, 627 aa, Pectobacterium carotovorum subsp. actinidiae
MSYHYSQEAKERISKLGQSAVIDFIGEVSPVLRRKVYTLMPKVQGFRVGSPAELKEKQKRLIGYMFQTHSSPEEIYAWKSFSLFWKFWAEEHIGKPFPMYDDLEPTANSGLTFIRELADSFPKVAREDIERLFIFSGFVDDSNITAAFGLFRPATVLARDNLVDTLPIRLDELEERIDFAEMMVKDSANSIKRLESTTGSFASELKKSVRDISHNLKIITEIQNLLNVQTKRSDTIMKAIEELYAFNKEISCTIESIDSKIDSYSLAVGELSLREKVLNNMTEEISELQTSFNTLCEKENKLTDSGSENSYRDLSERIDYLEKNISKNGSDSVMNQCVKFYENKLPEPYGNILSYDCAFNMIASNLQAVGLIKGSSFTVARLTLAAFISGQIVQFCGSLADIVADAIATAVGAPTYHEWRIPVGLISDTAAFDFIESTADSSRCLVLKGANLSAFEIYGTAIRDIVVQRQLYPTSYDHLALIATWKHGPAVFPDGGTLAELGPVIDTDTLKTRGISARLPGLNSGGLAKDKWDEIEGLKSDGAGEYMDELRDLLDETGFNGGNLWRRMVNHFYSSLMKMPDGNHIYDLHSVLSFYTLPWARIKGGPVNEIADIAARELKEHSEKISA

SEQ ID NO: 24301 - protein, 347 aa, Pectobacterium carotovorum subsp. actinidiae
MEWRAVSREKSLEIVSAAINCRFSGEGVRISTVSECLRSVLHQYSVSDIKEARQAVASLRLTSAVRRKLSPLWPDITDTGDAIHPGIMAILDSLAELGDVIRLQGGKWLTAPLHAVRTNNKMAILLGGDPTYALSTGMVTRAVSRVRLVEQEVCEGMAELWDANEWIGAPVEGNEIWSLKLLDKTISRFTDAPNDVGEATAYVRGKWIPLPELLSHEKKILLCRTFISTGFSYFLGEFVAGRLWKMSSIESSDDVRRLRFYLDIKENCPLKVKIKISHGLARLRLARRLPGRESKALLLGWRDSGPEGEHSWITHHVFPEEVLPIVRCAFEGLGIILINESTRRHEI

SEQ ID NO: 24302 - protein, 1836 aa, Pectobacterium carotovorum subsp. actinidiae
MINKNKVSERSGIHETAKSLADNLRQYIEAQYHIRDEGLIDERRALLQQAETIAQIPYIEATPVYEPGIPYSELPIPKAASNVLAQLSEMGVGLYPLPYEHQSQALASFLGDEASDLVIATGTGSGKTESFLMPIIGNLAIEAAERPESASLPGCRAILLYPMNALVNDQLARIRRLFGDSEASKVLMAGRYSPVRFGGYTGRTPYPGRRSSKRDEQFIKPLFDEFYSKLADNDSVRTELERIGRWPSKDLDAFYGQGASQTKTYISGKKVGKQFVANNWGERLVTQAEDRELMTRHEIQHSCPELLITNYSMLEYMLMRPIERNIFEQTKDWLRADSRNELILVLDEAHMYRGAGGAEVALLIRRLCARLDIPRERMRCILTSASLGSVADGERFARDLTGLSETSPRKFRIIEGTRESRPLSRVVTNREAEALADFDLNSFQCVADDLESAFVAIDTLAARIGWQKPTIKNRSALRHWLFDNLTGFGPLETLIEIVSGKAVRLDVLSKKLFPNSPQEIAVRATDSLLALGCYAQRNSDNRVLIPTRMHLFHRGLPGLYACIDPECNQRLGNHSGPTILGRLHTKPLDHCTCASKGRVYELLTHRDCGAAFIRGYVSSEMDFVWHQPNGPLSEGGNIDLVPVEILVEETPHPHSDYQDRWLHITTGRLFKQCPEDDSGYRKVFIPDRVKSDSEITFDECPVCMRRTRNDQDEPSKIMDHVTKGEAPFTTLVRTQMSRQPASRSTDVRHPNGGKKVLIFSDGRQKAARLARDIPRDIELDLFRQSIALACSKLEKITRDPRPTAVLYLAFLSVLSEHDLLIFDGEDSRRVITAREEFDRDCDSDLEQAFDDNFSPQEPPSRYKMALLKLLCSNYYSLSGTTIGFVEPSPLKRKKLWEAVQAKKINIESKDVHALAVAWIDTLLTEFAFDESIGSTLRSKAAGFYKPNWGSKGQFGKALRKALMLHPGMGEFSVEALEDIFRTQLTSGKDGAKFLSPNSLRLHVNLLHIWKQCPDCTALMPFALEHSICLVCGSNNVKTVDPSESSYINARKGFWRSPVEEAFVSNSRLLNLSVEEHTAQLSHRDRASVHATTELYELRFQDVLINDTDRPIDVLSCTTTMEVGVDIGSLVAVALRNVPPQRENYQQRAGRAGRRGASVSTVVTYSQNGPHDSYYFLNPERIVAGPPRTPEVKVNNPKIARRHVHSFLVQTFFHELMDQGAYSSGEKTSMLEKALGTTREFFHGAKDTGLNLEGFNYWVTDRVLSTNGDLRTSVAAWLPSVLETGGLTPGDWFAKVAEEFLNRLHNLAENVPLPVVFAGEEDESDDENIIGAKFEQEELLEFLFYHGLLPSYAFPTSLCSFLVEKVERNSRGTFEVRTVQQPQQSISQALSEYAPGRLIVIDRKTYRSGGVFSNALKGEINRARVLFNNPKKFVHCDKCSFVRDPHKYQSDDSICPICGGMLKEEIMIQPEVFGAENARELNEDDREQEITYATVAQYPQPVDPEDFEFKAGGAHILFTHATDQKLVTVNRGKNEGQSSGFSVCTECGAAFVFDSYSPAKGAHERPYKYISTKDTPRLCSGEYKRVFLGHDFRTDLLLLRLTVASPLVTDTSNAVVLRMYEDALHSIAEALRLAASRHKQLDLDPAEFGSGFRILPAIGEDAQTLDLFLYDTLSGGAGYAEVAATNLDDILTATLELLEGCECDTSCTDCLNHFHNQHIQSRLDRKLGASLLRYAMYGEVPCCSSPAVQVDKLSQLRASLELDGFQSSEGGTQEAPMIVGLNGHSVTLGCYPGLIDRPDFMHDVCKARNVGEYLALNEYLLRSNLPEAHQKVRNLLR

SEQ ID NO: 24303 - protein, 406 aa, Pectobacterium carotovorum subsp. odoriferum
MKSAKCKNNGEKAPVAHVFTKEASLKRKIRSHFTLLGFRKGPDGTLVRPDSGKESIRQLHRAQREERLHSSEHFISEFLPSALPYFANGSEIDPTKIRLSLIKVSANSFESKLFRAASLTWSVPVSNGYGRRMRYLVWDKGHDRIAGIFALGDPVFNLSVRDNLIGWTSNDRSSRLVNILDAYVLGAVPPYNMLLGGKAIACLIRSQEVYDDFLRNYGSTTGIISGKDKYAHLLAVTTSSSMGRSSLYNRLKLDNVRYFEPIGYTVGWGHFHITDELFGEMREYLRLADHPYADQHCFGEGPNWRLRTIKAALKQLGINQAVLRHGIQREVYFCQFAENAKEILATGKGVPDLSTLKTIDEISELARKRWIEPRALRQDDYKNWSRDNISLLIKGSKLDVIISKIA

SEQ ID NO: 24304 - protein, 354 aa, Pectobacterium carotovorum subsp. odoriferum
MNDIKILNRVDCLKYSSRSLGLPDLTRLDNALIAQALRRSVFIAAPCSMRTVCSLVMNSLGPLSDEPEKLKILIDDVIDDLVNMGDVLEMRYEIAGEPNFILRPAPPAFVLRRDGTFIIVGVAGDEITPPQANDYNLVYRLSGLRTLTPSNVQSCRQTLIDLGLIELPMNVWLHAPVSITADKFVRSWVSRLPNDIHPEKIENLEMIDISKATSYYKGRWQSLNEQHAGIYIARRSQRYGAKLWCFAEIRDGLVQRFVDIHSRDARVRDCDEAWRLLAALDALSGSPQQVRVVYEKEMAVLSFTSPLPSWAVRRLSLVGERLKPHRALLEFSLPLQNSEEELHWLEETLWLTRN

SEQ ID NO: 24305 - protein, 1848 aa, Pectobacterium carotovorum subsp. odoriferum
MKTKTATIQQTIDELRQSLTHYIEATYHIGHPSIVKQRRELLNQIGGIYQAPYLESTPRYKSASPYALIDSLPPAALEALRVLSDTSSGKPVIYSSPYTHQLEALHETLNNNRNLMIMTGTGSGKTESFLLPILGKFAIEAREHPERFKKYNAVRALVLYPMNALVNDQLSRLRTMFGAPQTINLFEKWAKRPALFARYTSRTPYAGLRTPSKDSKRLASIGEFFGEIEDAKRRYEQLPSDEEERRASELFGTLKIRGKWPAKESISDWLGKAPVPWARRAICRPHDAELITRHEVHATPPDLLITNYSMLEYMMMRPIERGIFDATKEWLNACPDEKFLVVLDEAHLYRGAQGAEVGLLIRRLRERLGIPAERFQVICSTASFSEEGKKNAGVFGAQLSGVPAESFVSIVGELQLRSPENHGSMVDVSTLATVNLEQFYSEDRSQQLAAIENFLKFRGVSVQDERDVDAKLYLALCEYAPFNRLVNETMTAAVSLSKLPEIIFGDIISSDLLEKATTVLLAFGSRAKKTPAEASLLPCRIHSFFRGLPGLWICMDPNCPDAPSGKRSPAGRLFSQPHERCSCGAPVLEYYTCRHCGTSYARAYTNDVTQPRYLWSKEGERIETASGLLEALHPLDLLIEEPSSDDKAKAAYYDLVSGQLNPDVLGEKYRTVFLAPAKPVSDSSKNTTRGARPGQFAPCACCNQMAGHGQSSVQDHQTKGDQPFQALLGSQLRIQPPGPQQQTSFAPLRGRKVLIFSDSRQVAARLAGTLQNYSLRDAVRALLPLGYKILSSDPDFSKTLVLNHAYLSVLVAAHKLGVRLRPQLGDAETLSEVEGLSPGPSPTGMQLFQLFTSLSRCPQRLIQAISDTVKHTNMGLDLEALAIATIGESPHTSSKIVKFPDLPGVAESDEAKLTVCRAWLRCWTLDPGIWFSDMPDTWWNVRVKSHQGVFTAMNRVLVSKQSKSIFKKHWLPTLLTIFTEQTMGGGHRLLASKLSLHLNGQWRRCNSCKSVHRPVGTISTCIDCESSDVSNFDPTSDEVYKARRGFYRDPIASALDVEDPQLMTIIAAEHTAQLGAAQPDEAFSHAERHEIRFQDIDVAWRDKNRPGEPAIDVLSSTTTMEVGIDIGDLSGVALRNMPPTRANYQQRAGRAGRRANAVATVVAFGSADSHDEHYFTDPEEMIRGNVIDPRLTLENPEITRRHLRAYLLQRYHEDRIPGLIPGADPNLFSVLGNVGDFKTRGPLLNRYDFAKWLEDNIQDLASAADRWLPTELSPEDRHRLINEMMVDAKATIDEAIDFIQPEDEVVNATLEKSKNDFGDQTENEMMNESDDNTRIVDPATDKLLDRLLYRGVVPRYAFPTDVVAFHVFNQQRSTPFKSVIDYAPTQGLALALSQYAPNKQLWINGKQYTSKAIYSPYPADRRNAWGKRKLYFECSTCSHARTDDYLKERENTTETCPACSTPNSFGPARVWFRPVGFAHPIETPPETEPDSPNETARATRAKLVMQTPKPDKGWIQVSERVRAFKAKEFLLVSNTGIDKDGYDYCLACGRIESSAAPEELLSQPHATPFRSEEGRPCQGGAAKRHVILGTDFKTDIALFSFPLIEPFRLLPGSIEADSVLRTLCEALAKAACQTLDIEPGEVLAEYRPALTEKGAIGNEVEIFLYDTLAGGAGFSTELVNRARELFEHARNLLASCPENCDTSCYRCLQSFRNRMDHALLDRKLGIQFIEHAFDGGYPSYPAERTRRSLDLLAYDLIRQYGNDFSFSREVQKYDTEAGSIVIPIVATRLATGAETWISLSSPLAPAIPTEHKLQKLSVEGAAKMECADDLVIRRHLPEASLQLRGKLR

SEQ ID NO: 24306 - protein, 477 aa, Pelosinus fermentans JBW45
MRKAYDTILQSEVAAVLAAKSGGCEPYRYECANCGEEVYVAARYSTNMVPHFRHLSGNNDVACENYLGQYGAISIDSRSRKSNRERVEFHFENNNKKFYLELRFSADEIQYYGQENVDFEIRMNASGPPFYILPINNIHFAPDAPTPISLYNFSFCYYLSNTLTDTRRKYDFLKSGNTPSFFKLQGNDSDFKAKLVRGTVLFTNVQYFVVFQSKYSTPQGIRFPDAIQVNETFRFETMGLNFLGMTLSIQKKTADIDELLKTWGYILEESEMLTLLWPPAPVIDDVSVVTSNEAFVFTSFELQAHGNINVHSTDILRVNHGISRVLVKQKTKIFKKNAEIVIDKFKSPIDAYNLITLFEFAAVSFSIPNYGTWFLFNHSGVSPLKTGQVVYLTPESVIKQYEHNYLTQIIYPCRQKELVNEKLLDDILMHCKRTETLEFNQFMSLELSNTTSQYIDKCSVSGSINSVAKQFIVEGLL

SEQ ID NO: 24307 - protein, 527 aa, Pelosinus fermentans JBW45
MKYLSQLTEDEVRYICLVVPYQHTKDYFSKNPEEFAKIHPGFRGNKISEATARKLLFDFSSKRFISYFIEKHISDWLSQIKKHYNNRIETGESKDVAFLNTLPFCFFTENVGLYFKLINEEYSEEYIALMGAAIKSIKEATDEQDRLSKELKARDSDIRNLHTEFDSINLDLDRTKAKLNKRLSEIDAFKIKLIDIEELRIAASRDKQKIDSLENQIIAYEEAIKGLKIELDESKVSSSQLEEQIREELERQQTVKWNEQQSIKASKCPSDIDEFKDYLGYNLKDIGVPNDAYCTLLKEHLSKILFQGIPILVNRSTGNNIMKCVANTLIGQPTIKTLIFNKDISTEEVSHFLSLGARIVCLDNFLGNFNETELLPLFEKYRDKIIFLTVAYDRTINYISKEFLRYCHYLNVNRIKALTANAHLTEDPSTIVEVDFDPQWAGVENRYSNLLREVLRELGFPQSLIEKKCTTVFNEQDLCQLLVFDVLPYCADVLQIAPYNTSERLLKYAGDDGRCPCKKLLKEWFAL

SEQ ID NO: 24308 - protein, 339 aa, Pelosinus fermentans JBW45
MNDFLIAMSTDMDISRYQSESDDSFIFRLCYSALGQWCLRTAQNLSGGIAGTTKHNQTIVLNELLQRYSELFPRVANRFIDANNQQASLPVHIRRVYEETGYLLTDDNNRNQLANFERSITIGNTSLFFGVLNMAFTMNGFGVFSTPTLYKFTAQEFLIRDTLTCEEYFQSRFDVIDFYERDINIDELEFFNPLSNNVPSLSWSKKIETDCSVARKSEMGPFYRVMRESDATLLFAEEPIEPQNDSLISHEYRRLYYALKAHYGNPLTARVVKKDIKYSEIKIHGHLPNREYYYLLLLSWPVNHAFDKVNFLVKNCFVAEIIATLKNIGIDVKGGNANA

SEQ ID NO: 24309 - protein, 1735 aa, Pelosinus fermentans JBW45
MRNLNGVQQYYQAIRDRLKNYIKSDYLANSETLLLYVDDLLGELCSEHTNIAREPYIETSASYKKVHNGIKNSQHIEQGVKESLLKLVKENLGIFSDPFEHQVKALEYFSSGRDLFVSTGTGSGKTECFLWPIIAKCFDEAKNRPAGFKNEAVRTLIIYPMNALVSDQLARFRKIIGNDKFREIFTTDTHATRIPHFGMYTGRTPYSGDAKPASSRELANTFRENYLIDETADSETKRRQTNNVNGLKSINKYPARFGENGLQVFIENLEKNIHKPTPYDAELITRFEMQECPPDILITNYSMLEYMLMRQREANIWDKTKQWLDESNDNKLLIVLDEAHMYRGSAGGEIALLLERLFYRVGITIDRVQFILTTASMPLNEQKAIDAFYSGLTGKEPTSCEFLFGAKEAVPDELEVNTDIDALASIGSDQVQGEGIAVRIKDFAKAVFHCSLPNDISQSEAQEWLYDNLPKYQAFVLLNKLCRDGAKSYSEIKETLFGDSVNAEKALDALLALVSLAAKNGNILFPVRLHMFLRGLQGLYACSNPKCTCGKYSESEKLPLGKVISIPKYKCECGGRIYELVNHIKCGALYLKVYLQKNDGQPYWYVFPERGLNGDANSLKEMLLYVVPNNYQKGKNDKMGALDPLTGKLYTSPQNDESLLTVIYNDKFDGKKQSYTFSVCPKCKKPMPLKKPVDLATKGNIPFYNLTKAQFELQPAKSELINQGKKVLLFSDSRQNAAKLALDLSKSSDADAFRQAVMLASLLLQVDGKEHSLFDLYSAFLDVCIQNNLAFFSGRSKVKFENDKRLFKYKKGTTERRGRTIDYTEIAAEYQPLPDDYYEQLLTFFTESPRSFKDIGIGFLAPVSSALDDCVYDLEDDGLIVDKDIIYQLLVLLFWDVMDESAALGETIQDDIRKGLPGRSKSQAFGLNFNFSNELDKGFIQRIQELLKLDSISIAKIVDRVRDLFFASSSNNRYYIKLSSVKIEFADKDFTWYRCVKCGKLSPYKIGDYCGVCFDSTELVLIDESDLSRFEFWRIPVLNALNKLETIHTIDTEEHTAQLSHKETRSDTWSRTEKYEMRFQDINAGENGEESIDVLSCTTTMEVGIDIGSLTAVGLRNIPPMRENYQQRAGRAGRKNAGISTIVTYASGGTHDSHYFLHPDEMISGSPRKPWINRYNRKIRQRHINMLALNGFMSTPDMKTQFDGIADIGIISFCEKFGENFIAYAKSIDVSTDVTIFQFREICQSVLVEGKRNEFINNDKETSAFDVFYREGFIPSYSFPKNVVRFFVEKESERGKNAPRDINYAPERDIAIALSEYAPGRFVTIDKKIYKSGGIYANPRPRGFEKNQAEYYFENKDYHNDIHICSECNWFGIDQEEFPNMQCPYCSAPIENKKMLRPWGFSSVRGDEVKFEDEDEQYTYAEAPYYSYVPADTEMVQFGHSNIRYANLSDKKVLTVNMGKSKNGFNVCKKCGGAEVADDKNTGRFSFSQPYHDNYLCRHEGTVSTNICLGYEFLTDMFMLDISYDFAKLVGNKNAEEKSILRAAVTTLHEALKKAVSLVLDIDYNEISGGWRPRITIDGDSHIEMFFYDNLTSGAGYSSLIGSILDKVLERARIILSECECSRTCKNCLDNFWNQRNHQLFDRHLGLQLLNYVQFGQLPDEYDKGEQQALLAPLQKLISEDSETLQPTSKIGFEVMPAILKKPENTSTRIFLNPYDLSCWLPNAFMTYRNLISKR

SEQ ID NO: 24310 - protein, 476 aa, Propionispora sp. Iso2/2
MRIAYDTVLQSEVSALAAKSGGFEPYRYECACCGEEVHVAAPNSTSRVPHFKHRNGNNDVACENYLGQYGAISIDSRSRKSNRERVEFYYKNSNKTFCLGLCFSAVGIQHYEQQNVDFEIRTDESEPPFYTIPINTLYFAPDVPTMISLNKFSFCYYLANTLNGTKRKYDFFRFGNTPTFFKVQGNDSDFKAKLVRSTVLFNNVQYFVIFQNKDLTPQISRFPDEMQVNETFCFETMGLKFLGMTLSIPKKTDEIDRLLNNWGYQLEASETITPLWPPAPVIDDVSMVTSNKVFLFTSFALQAHGNINVHSTDILEVNYDISRVLVKKRTKICKKNAEIVIDKGESPIYAYNQISTSETAKVSFTIPDNGSWFLFNRSGVGSLKNGQVVYLTPESVIKRYESNYPTRIIYLCRQKELVNEKLLEDILMHCKRTEKLDLNQFMLLALNNTASQYIDKCSVSGYINSVAKQFIMEELL

SEQ ID NO: 24311 - protein, 527 aa, Propionispora sp. Iso2/2
MNYLSQLTEDELRYICLVVPYQDTIAYFSKKPKEFAKIRPGFRVKTISKDVASELLFDFSSKPFISYFIEKHISDWLSQIKDHYNNRIKDGDTKDVAFLNTLPSSFFSENVGLYFKLINEEYSEEYISLMSAAIKSIKEVTDEQDRLSKELKAKDSDIRNLHTELNSAKLDLDRTKAKLNMRLSEIDALKIKLTDLEGLRIAATKDKQKIESLENEIITYEKAIKGLRIELDETKGSCNQLEEQIREELERQQTAKLNEQQSIKAPKCPSDIEEFKEYLGYNLKSIGASDVAYYALLNAHLSKILFQGVPILINRLTGINVMNCVANTLIGQITVKTLVFNKDISNEEVSRFLSLGGRIVCLDNFLGNFNETELLPLFEKHKDKIIFLTVAYDRTIHYISKEFLCYCYYFNVNRIKALTVNAVLTEDPSTIVEVDFEPQWSSEENWHSNLLREVLRELDFPQSLVEQKCAAVFDEQDLCRLLAFDVLPYCADVLQIAPYNTSERLLKYAGDTGRCKYKKLFMEWFAL

SEQ ID NO: 24312 - protein, 352 aa, Propionispora sp. Iso2/2
MQIQKTVYGVVCAMNEFLTAMSTDMGISRYQNESDDSFIFRLCYSALGQWCLRTAQNLSGGIVGTTKHNQTIVLNELLQRYSELFPSVANRFISANNQQANLAVHIRRVYEETGYLLTDDNNRNRLANFGRSITIGDTSLFFGVPNMAFTVNGLGVFSTPTLYKFTAREFLIRDTLTYEEYFQSQFDIIDFYERDINIDELEFFNPLSNNVPSLSWSKKMETDCSMARKSEMGPFYRVMRESDTLLLFAEEPIGPQNDSLISYEYRRLYYALKAHYGNPLKAKVVKKDSKYSEIKIDGHLPNREYYYLLLLSWPVNHAIDKVNFLVKNCFVAEVTATLRNIGIDVKGGNANA

SEQ ID NO: 24313 - protein, 1734 aa, Propionispora sp. Iso2/2
MRNLNGVQQYYQAIRDRLKNYIKSDYLANSETLLLYVDDILGERCSEYTNIAREPYIETSASYKKISDGIKNSQHIEQSIKESLLKLVQEKLGIFSDPFEHQVKSLEYFLSGRDLFVSTGTGSGKTECFLWPIIAKCFDEAKNRPTDFKNEAVRTLIIYPMNALVSDQLARFRKIIGSDNFREIFTTDTHATRIPHFGMYTGRTPYSGDAKPASSRELANTFRENYLIDENADPKTKQRQSNNVKGLKKINKYPARFGENGLQVFIENLGKNIHKPTPYDAELITRFEMQECPPDILITNYSMLEYMLMRQREANIWDKTKQWLNESGANKLLIVLDEAHMYRGSAGGEIALLLVRLFHRLGITANRVQFILTTASMPPDEKKAIDDFYSGLTGKEPTCCEFLFGTKEESPDELEVKTDIDALASIGSDQVQGDGVTARIKDFAKAVFRYSLPNDISKAQAQEWLYDNLPKYQAFVLLNKLCRDGAKSYSEIKKTLFGDSANAEKALDALLALVSLAAKNGNILFPVRLHMFLRGLQGLYACSNPKCTCAKYSESEKLPLGKVISIPKYKCECGGRIYELVNHIKCGALYLKVYLQKNDGQPYWYVFPERGLNGDANSLNEMLLYVVPKNYHKGKNDKIGALDPLTGKLYTSPQNDENLLTVIYNDNFDGKKQSYTFSVCPKCKKPMPLKKPVDLATKGNIPFYNLTKTQFELQPAKSELINQGKKVLLFSDSRQNAAKLALDLSKSSDADAFRQTVMLASLLLQVDGREHSLSDLYPAFLDVCIQNNLAFFSGKSKEKFENDKRLFKDKKGRAERRGRTIDYTTIAAEYQTLPDDYYEQLLTFFTESPRSFKDIGIGFVAPVSSVLDDCVYDLEDDGLIVDKDVLYQLLVLLFWDVMDESAALGETIPDDVRKGLPGRSKSPTFGLDFNFSNKLDKGLIQRIQGLLNLDNIAKILDKVRDLFFASSSSNRYYIKLAAVKIEFTDKDFTWYRCVKCGKLSPYKIGDYCGACFDSTDLVPIDETDLSRFDFWRIPVINALKKLETIHTIDTEEHTAQLSHKETKSDTWSRTEKYEMRFQDINAGEIGEESIDVLSCTTTMEVGIDIGSLTAVGLRNIPPMRENYQQRAGRAGRKNAGISTIVTYASGGTHDSHYFLHPDEMISGSPRKPWIDRDNSKIRQRHINMLALNGFMSTPDMKTQFDGIVDIGIISFCEKFGENFVVYAESMDLPTDITISQFREISQSVLAEGKRNEFINNDKETSAFDVFYREGFIPSYSFPKNVVRFFVEKESERGKNAPRDIEYAPERDLAVALSEYAPGRFVTIDKKIYKCGGIYANPRPRGFEKNQAEYYFKNKDYYNDIYICSECNWFGIGQEDFSTMQCPYCGAPIDHKKMLRPWGFSPVRGDAVKFEDEDEQYTYAEAPYYSYVPEDTKMDKFGHSNIRYVNLSDRKVLTVNMGKSKNGFNICKKCGGAEVADDKNNGDFSFSQPYHDNNLLCRHEGMVDTNIFLGYEFLTDMFMLDISYDSAILVGNKNAEEKSILRAAVTTLHEAIKKAVSLVLDIDYNEISGGWRPRIKFDGDSHIEMFFYDNLTSGAGYSSLIGSIFDKVLERARIILSECECSRTCKNCLDNFWNQRNHLLFDRHLGLQLLNYAQFGQLPDEYDNGEQQALLGPLQKLISEDRDTPQPNLQIGFEVIPAILKKPENTSTRIFLNPYDLSDWLPNAFMTYRNLISER

SEQ ID NO: 24314 - protein, 406 aa, Pseudomonas aeruginosa
MPIGRAIIIGVNPREANLKRKVREHLHQLGFTRTQEGALCPPGNGKEAIRTLHGGQREERLSASTRFIERSGAKLMQYFADGREIIPEKISPVLERVSSGTWQSDLFRLASLSWSVPVSNGFGRRLRYLVWDQANGKLMGLIAIGDPVFNLGVRDKFIGWDTADRAARLVNLMDAYVLGAVPPYSALLGGKLVACLLRSRDIYDDFASVYGSSTGIISQAEKNARLLAVVTTSSMGRSAVYNRLKLDGTEYLKSIGFTGGWGHFHIPDWLFIELRDYLRELDHHYADQHAFGQGPNWRLRTTRAALKALGFKDDLMRHGIQREVFICQLADNATKLLHSGSGKPDTKSLLSVGKIGELALNRWMIPRSRNRPEFRDWKPTDLIHLYGSQACHFSALSHLAPRRVAF

SEQ ID NO: 24315 - protein, 425 aa, Pseudomonas aeruginosa
MRGMGSGFRVMAEPTANDYRIMSFEGEPDPSFVVEVARTCPGLPAWGAAAFTAIGRGAESGFPRAQALNRCETYALLWSAPVTPEFPEELLVDRLKSRQGWNLALVTVPEAPSDICISWLEDFTQLSVMPAAPAITTIWPFLSRNASINTVEYIESDAVILAAHRMPGGPHDGGPTLQAVNQHDCISATAPDRSPALFTVIRAGSDEFRIGKSGLPDVDKFFFKSTSLGRSFKYPTVDLVFIDERNERFVAPLHSRQSQSYVMATRAGELHFDSLTMPRGAKGRLEVVSPNGHKQYRRLASSEVSADHSPQACQLPSAMNSLLKEYLTDPQYQFYLDFGGLGRLSIGAMQQLATHTPAFLSLERSLRLRLQSFLSQLHVGGVTALSGSDQALVSAFGASVPRPELLPHYRQLAAAVRACGFDVRY

SEQ ID NO: 24316 - protein, 630 aa, Pseudomonas aeruginosa
MSYLYSQEARERISALGITMITEFIEEVPHVFRKSFFDRQASIPGFRRGSPPEVKEKQRRLIGHLVHPQPGQKGEADWQAFASLWVAWAKSRLDCAFPAADKFPQSADTGADFFKRLAELYPDAPRETVERLAVYSGFAEDPAMQAVLNSFHPASTLARNRMIDGLPGRLDKIESYFELAETATEETAEHIDQLEVTVTATAEAVKQLTGSFASVDHDVEALRTALHGITERLQQLSELAQSTARAQQEVSQAIARSDLRGEHMSTALDSLSVQVTDLVAERAQVLAFEEALTTLGARIPDWELTAATIAALRERLDDHDFRVAKPRDETSGHTRVRLIENEATGPFVEVSSVDVAWKVIANNLQACGVVKNDANRCAGHILAAVISGQLIQFKGSTADLIADAVAAAVGGAIFHEWRVPVGLLSEDAAADCLEVVYESSGCLLLKGANRSAFEVYGSAIRDLVARRQFTLAVDARLVLIASWTHGPAAFPDGGTLSELGPVFDTDELSMRGLSAQLPLMQFGHLAVDDWRVLHSPAENTQLALPSTLRERLAQVDFVPGNLWLRVADRAYAQLRLLSPGPAERTLHAVLKQWALPWAQSLGGPVEALTRSIIELQSEIDTQAVHAEHVE

SEQ ID NO: 24317 - protein, 1840 aa, Pseudomonas aeruginosa
MAGIAMNEASGVHETAKNLAESLRQYIEAQYHIRDEGLVRERHALLLRPETIAQAPYVEATAVYKVGDPFDQLTIPKVAAHTLTQLSHLGLGLYPRPYEHQSQALTAFLGAESADLVVATGTGSGKTESFLMPIIGQLAIEGQERPESAQLPGCRALLLYPMNALVNDQLARIRRLIGDAEASSILTQSRSQPIRFGSYTGRTPYPGERSKERDERFIEPLFEEFYNKVAMKPTVKDELVRIGRWPSKDLEGFYGASTIEAKTYSSGKKKGENFTKKHWAGRLQTQPSDREMMTRHEMQTRCPELLITNYSMLEYMLMRPIERKMFDQTKAWLKADSRNEFILVLDEAHMYRGAGGAEVALLIRRLCARLDIPRERMRCIMTSASLGPADTAAVEGERFLRDLTGLADTSPRRVRVIQGTPEQRYEAQAVPIVHLEALADFNLADFQRAAEDLDAATEAAAHLAHRLSWSQPPRGEHAAFRNWLFDQLTGFEPLENLITAVSGHAVRLDYLRDRLFGDHPSVDAEKATDTLLALGSYAQRSRDGRVLLPTRLHLFHRGLPGLFACVNPNCSKRLGHHDGPTILGRLLTKPSAQCGCEVNGRVYELLTHRDCGAAFLRGFVNKDMDFVWHQPSGLLSDGTVPTLMPIELCVEDAVHPRSRHIEKWLHMATGKLSSEQPSDEAGFRRIRVPDKAADAGDMTFDHCPVCTRKIKNAKDAPSKIMDHLTKGEAPFTALVRTQMAKQPASRTKDKRHPNAGRKVLIFSDGRQKAARLARDIPRDIELDVFRQAVALACHKLRGLGKTAKPTALLYLAFLSVLTDHDLPMFDGGDSRRVENARKLFDDNYNSDLVEAIEAHFTPQEIPARYQIALLKLLCGNYYSLTGTMVGFVEPTPPKLRKLGQHLSTAGFTISETNLRELAVGWINSMLQEYAFDKSIESVYRWKAAGYTNSVWGSTGQFGKALKESLANHFGWSSNAVKSVEAIFRDQLAEEFEGAWFLVPDSLAVVVDLAHCWAQCADCTALTPFALAGKVCLACGSNAASPLDPKNSDYVTARKDFWRLPVARALTPGAELSNMSVEEHTAQLSNRDRSRVHATTELYEMRFQDVLIEDRDRPIDVLSCTTTMEVGVDIGSLVAVALRNVPPQRENYQQRAGRAGRRGSSVSTVVTYSQNGPHDSHYFLNPERIVAGPPRTPEVKIDNAKIARRHIHAYLIQTFFHEIMAQCADSVTENNSSLLKALGPTEDFFCRIEQTGPTLNSFEAWVTRRVLACNGDLRESIVAWLPPGLDTRGLSLMEWLAETSKGLLVELKQLGITVEAARKPDVLIEQEIEDGDDPRPSIEQAELLEFLFFHGLLPSYAFPTSLCSFLVEKLSKNSRDRWEVRTVQRPQQSIIKALSEYAPGRLIVIDKKTYRSGGVFADLPAGVVNRASLLFKNKKPHTHCKACSFVRDPNRSAKDQMTCPVCGQQLVTEQMIVPQVFGPEGAADLPENDREQEITYATMAQLPQPVDPEIFSFSACGPYASFTHAVDRTLVTVNRGKEGTGEGGFSVCMDCGNASVFDQEAKAGAHDRPYRQLGPKGTSEKCSGQFARVLLGHHFNTDLLLLRLRIAEPIVTDTINRVVLHILEDALHSLAEALRLAASRHRQLDLDPAEFGSGFRIEPALQDETRILDIFLYDTLSGGAGYAEIVARHMVEILDATLELLESCTCETSCTECLNHFHNQHLQHRLDRHLAAMLLRYAVRGEVPTCSSATGQLVKLAPLRASLELAGYVCRVGSIPSAPLLVEQQGKAVAVGCYPGLIDSLERQQPSTRTAGVNAIIGLNEYLLRSDLASAQLKVQALFKV

SEQ ID NO: 24318 - protein, 116 aa, Pseudomonas aeruginosa
MRGVSAKLPELKFGHLVRNSWDQIDGFDDDSPRALVSELKELIEESSFVPGNLWTRMADRAYSRLRTIPGGSSEEDLHSVLTLWALPWAKATAGPVEDIARIAGRMLAELQAEAET

SEQ ID NO: 24319 - protein, 346 aa, Pseudomonas aeruginosa
MKWQAISREGAQKILAASIRCRVGGEGLRIAAIAECLRAASYLASAPVAGNGTWEPAASLNLTSMVRRRLSPLWPDLAEDKDARPGVLSVLNSLGELGDLVRLRGGSWLTPPAHAIKAANDSAVIIGGGPLETLPHSIQTQAAGRVRLVDLVACNDWIDVWDAREWVGAPVEGLEAWSVRLIATMKSRFTDVPSDLGEIAIYDKGRWGALAELPNAGGVFLSKCQTGPVALHFIGDYFRGRIRKMASLDFQDARRLRFHLDAQAGRPMRVKAMTSQGFVKLRLERRLPPQEARVLLLGWQIPTPEGEHPGVTYHVLPIEMLSIVRAALDGLGVILDERCGAEGGNQ

SEQ ID NO: 24320 - protein, 1841 aa, Pseudomonas aeruginosa
MSVKSTLTEAAGVHETASSLADSLRQYIEAQYHILDEGLVRERRALLQANETIAQTPYVESTPVYKLGTPYEDLPIPQAASDALTKLSVMGLGLYPLPYEHQSQALISFLGDEAADLVVATGTGSGKTESFLMPVIGKLAVEGAERPESAALPGCRAMLLYPMNALVNDQLARIRRILGNPEAAKLLLNSRKTPIRFGSYTGRTPYPGQRSSTRDEQFIKPLFEEFYKKVAKIPAIQKDLARIGRWPSKDLDAFYADDAVETKTYSSGKKIGNQFVSKNWKGRLLTQPGDRELMTRHEMQVRCPELLVTNYSMLEYMLMRPIERGIFEQTRDWLKEDIRNEFILVLDEAHMYRGAGGAEVALLIRRLCARLEIPRERMRCILTSASLGAGETAVADGERFARDLTGLLESSSRKVRVLQGTNEQRSSVHTVTREQIDALAGFDLDAFQEAANDLPSAQKAAAALAGQLGWEAPNASDHSAFRDWLFRSLTDFGPLEKLITLVSGKAVKLGTLSQTLFEGCPLETAEKATDALLALGSHAQRSSDGRVLLPTRLHLFHRGLPGLYACVDPNCSKRLGEHGGPTILGRFHTKPLSHCGCESNGRVYELLTHRDCGAAFIRGYVSAEMDFVWHQPNGPLSEGGTLDLMPVEIFVEETAHPRSRHKDMWLHISTGILSATCPAEGTGFRKVRVADKVAIGPDVTFDNCPVCIRRTRNSKDEPSKIMDHVTKGEAPFTTLVRTQMARQAASRANDARHPNGGRKVLIFSDGRQKAARLARDIPRDIELDVFRQAIALACGQLDEQRLEPRPTPTLYLAFLSILTGHDLAIFDGIDAKKIEDARSVFERDYDSDLGQALEDRFNPQEAPSRYRIALLKLLCGSYYSLSGTTVGFVAPARAKLKKLKEVLSNEGVSVGEEDLLALAVGWIDSMLQDFAFDATIDQVYRYKAAGYYKPAWGSKGQFDKALREALTSRWGWDTSTYEVVEDAFRGQLADEVDGAWFLAPNSLRLVIDLSHVWTQCPDCTALMPFALGGNICLSCGSEGAVPIDPSTSDYVTARKGFWRLPVKEALEPGARLSNLSVEEHTAQLSNRDRSKVHATTELYELRFQDVLVGAKDRPIDVLSCTTTMEVGVDIGSLVAVALRNVPPQRENYQQRAGRAGRRGSSVSTVVTYSQNGPHDSHYFLNPEHIVAGPPRTPEVKVDNAKIARRHVHAYLVQTFFHEVMAEGTNPPAEKTSLLLKALGLTQDFFYGADDTGLNLASFENWVSRRVLASDADLKASVLAWLPPNLDTRGSTLGEWLVETVEGLLSTLHELASDVAQPIAADEISEEEAEVDENPGAGVEQKELLEFLFFHGLLPSYAFPTSLSSFLVEELKKNPNGNWEIRTLQRPQQAISKALSEYAPGRLIVIDKKTYRSGGVFADMPAGEVNRARPLFKNSKKHVHCEACSFVRDPNKPGGDGEICPVCGGELKEETMILPEVFGPENAQDLPEDDREQDITFATMAQFPQPVDPEVFTFTECGPNASFTHATDRTLVTVNRGKEGSQLGGFSVCVDCGYAIVFDQYAPQAGVHDRPYRQLGPKGTPPRCSGAFRRVLLGHDFSTDLLLLRLKIAEPLVTNTVEVVVLQMLEDALHSIAEALRLAASRHPQLDLDPAEFGSGFRIEPALKDNARMLDIFLYDTLSGGAGYAEVAARNLPEILESTLALLEGCTCETSCTECLNHFHNQHLQKRLDRKLGALLLRYAVLGEKPSCSSPDEQVATLSQLRSSLELDGFRCTPVGTPEIPLLVERDGRRVAIGCYPGLIGTSEFVHPVRHAADVSDSLELNEYLLRSNLPDAHQRVRAIFQ

SEQ ID NO: 24321 - protein, 406 aa, Pseudomonas aeruginosa; identical to SEQ ID NO: 24314

SEQ ID NO: 24322 - protein, 425 aa, Pseudomonas aeruginosa; identical to SEQ ID NO: 24315

SEQ ID NO: 24323 - protein, 630 aa, Pseudomonas aeruginosa; identical to SEQ ID NO: 24316

SEQ ID NO: 24324 - protein, 1840 aa, Pseudomonas aeruginosa; identical to SEQ ID NO: 24317

SEQ ID NO: 24325 - protein, 409 aa, Pseudomonas aeruginosa
MPNGDTTSIDVDSREEDLKEKLREHLHSLGFTKAEKGVLQAPGNTKEAIRSLHSAQREERLSANEKFVSLTGRKLMKFFASGADIDPEKISPVLERVSSGTQQGELFRLASLSWSVPVSNGFGRRLRYLVWDENNGKLIGLIAIGDPVFNLAVRDRFIDWNTHDRSARLVNLMDAYVLGALPPYNILLGGKLIACLLRSRDLYDDFSTVYGGMTGIISGEVKKARLLAITTSSSMGRSSVYNRLKLDGIKYLESIGYTDGWGHFHIPDQLFSELRSYLRDIDHTYADQHAFGQGPNWRLRTMKAALSALGFKQNLMRHGIQREVFICQLANNATEILRTGRGQPDLTSLLSAKDVAEQAVSRWMIPRSRRRPEYRDWMPGSLIDMFGNQARNLRAQIEKIEKHRNIDRL

SEQ ID NO: 24326 - protein, 556 aa, Pseudomonas aeruginosa
MEYAFNKITGRLESAAKVSFSWVYICPVCKARVSHRSGVRRKPHFAHWPGMGSPECEMFVPGLQGQYIHGQASATMEKQRMELRLVIPPIGADRAGWSLELVLPPCRECPAILSLDVGGRVQTLNMRGMQERRRVTVELSTAPYSIVEFSGKPDPSFVLSVDRECRGLPAVGAAAFTASGRSEPRGFPRTQELRASETFALLWREPAKPDFPDELVIDRFPGRQGWNLALATFPDELSPGCADWLHSFTGLPIAPPVPAITAVWPFFTRNASVNVVESVRTSVLLLAAKMMPLEQSDQGPTMQVQSGSSKYSVLGKERSPAFFALKTDGAQTVKVSDANNPGIEEFVSFTLNPVLSQWLPSVELGFTTPMGVRHVVPLHQRRCTDMVTEARTHGRGPDYLSMPPGATGVLRIDGPIGRFITALSSGSDSSPHSRHMRLPPPDVLTKITSALADPACHVEIEFGGFGRLRVAGTWACSSVGLRSKELTPALRSRLLSFMFQLQIASPTTVCSDDNSLVGVFAAARPEASLIPHYRSLVKEILACGFEIKRLGEGASS

SEQ ID NO: 24327 - protein, 625 aa, Pseudomonas aeruginosa
MSYQYSQEAKQRISALGQTVVAEFIEEIPHGLRKTIYNRLPRIQGFRPGTPPEFKERQKRLIGHLIHPQTSLKDAFDWSIFTQLWEAWGRGRLGGSIPQGDNSEPTSDAGPSFLRELAERFPRAAKEDVERLFIFSCFPDHPDVAMALACFRSASTLARDQMIDGLPTRIEDMEQRFAVAEVAAAGQANRIGQLEITAASLVRGIEDFAKDVSQSSNAVSDLRMSLDAEFTRSEKTEKFIDSLSVAAKQNADAIAAVGIKADVLEEGVRALAVRGERWDEVATDIAALRVAVESLSASEADQAETAETVGILLGRVAALESILVGSGADSGTRQRVRLLENKPEGAFVAILSIQNACDLVASNLQATGIARGAAIAAARQIVAAVVAGQMVQFSGSLADLVADSVAAAIGGPIFHEWRVPVGLISDEVASDCVEIVADSSSCLLLKGANLSAFEVYGAAVRDIVVRRQFTGSSYGGFALIASWAQGPAAFPDGGTLAELGPVFDTDALPMRGISAKLPQLKYGRLAKEAWPQVDGLETSETTPVTSQLGELLKEAGFEGGSLWRRVSSRAYAALRAIPGGKAEDDLNSLLVSWAAPWARATGGPVKEIIQIAERELANGRADMTV

SEQ ID NO: 24328 - protein, 353 aa, Pseudomonas aeruginosa
MEWQAVSLEGARRGVGAGIGCRRGGECLRISAVSECLRAVSHLCSAPKGSQGAWEPAASVRLSGMVRRKLVSLWPNLAADGVDTQPGVIGILNSLADLGDMVRLEGGKWLAAPAHTVRAGDGLAVLLGGGPKEILPQAVRASAKAEGRVRLVETAACEGWADMWEAEEWIGAPAEGLEAWSARLLAEATSRLTDAPDDMGEVSVYLPREWVRLTDLPAGEGSILLCRVRSSGVAGPMFSYFIGEFVRGRLRRLSGIDSKDARRFRFHLDARAGRSIRVVASVSQGSVKLRLGRRLPEREARVLLLGWQVPAPDGGHPGVTHHMFPVETLPILRKAFEGLRIVLDERLDAGREN

SEQ ID NO: 24329 - protein, 1844 aa, Pseudomonas aeruginosa
MTVVSKTVEATGVHEAARSLAESLRQYIEAQYHIRDEGLIKERHALLRRDATIAQVPYVEATPVYKVGDPYDSLPIPNAAIDALTQLAGMGVGLYPHPYEHQSEALVSFLGDEATDLVVATGTGSGKTETFLMPVIGKLAIEGEERPASAELPGCRAMLLYPMNALVNDQLARIRRMLGNPEAAKVLSKGRPRPIRFGSYTGRTPYPGRRSSGRDERFIKPLFEEFYRKVAEKSAVQMELERIGRWPSKDLDAFYGRELAQTKTYVSGKKAGKQYIANNWGHRLVTQPGDRELMTRDEMQQRCPELLITNYSMLEYMLMRPIERGIFEQTRDWLKADPRNEFVLVLDEAHMYRGAGGAEVALLIRRLCARLEIPRERMRCILTSASLGSGPTAVEDGERFARDLTGLPVGSSRRVRVIQGTSEPRSLPRPATREEAEALAEFDLGAFQNAANDLGAAQMAAMELAARLNWQVPTAGDHASFRDWLFENMTDFGPLETLIATVSGKAVRLDTLSEALFGEFPSDTAARAADALLALGSYARRRSDGRVLIPTRLHLFHRGLPGLHACVDPECSQRLGGHAGPTILGRLHTKPLDRCYCTSKGRVYELLTHRDCGAAFIRGYVSSDMDFVWHQPSGPLSEGGTIELIPIEILVEENVHPRSRHKDMWLHVPTGKLFPICPSDTSGYRKVKVPDKVAAGQVEISFDECPVCMRRTRSSKNEPSKVMDHVTKGEAPFTALVRTQMARQPASRTIDAKHPNGGRKVLIFSDGRQKAARLARDIPRDIELDVFRQAVALACARLEAIPQEPRPNLSLYLAFLSVLSEHDLLIFDGQDAKKIAAARAEFERDCEGDLRQALDDDFEPSETPPARYRIALLKLFCSNYYSLSGTTVGFVEPARAKLRKLKDDIKAAGIALGGEDVRALAVAWIDALLREFAFDPSLDPVLRCKAAGYFKPDWGSKGQFDRAFAEALARRPGWGKLAVEAIEAAFRSQLASEKDKVWFLTPNTLRLRVDLSHVWAQCPDCTALMPLALGGTICLACGSEGVRLVDPLVSNYVAARKGFWRLPVQEALASGARLSNLSVEEHTAQLSNRDRSSVHATTELYELRFQDVLIEDSDRPIDVLSCTTTMEVGVDIGSLVAVALRNVPPQRENYQQRAGRAGRRGASVSTVVTYSQTGPHDSHYFLNPEHIVAGAPRTPEVKVDNPKIARRHVHAYLVQTFFHELMGQGGYGPAEKTSMLEKSLGPTRQFFHGARDTGLNLEGFGDWVSHRVLSAEGDLRASVAAWLPPSLDTGGRPLEEWLAEVAEELLTTLRRLSADVPSPAVSEDDGENKEVEDNENAGPNLEQEEFLEFLFFHGLLPSYAFPTSLCSFLVEKREKNLKGILEVRTVQRPQQSISQALSEYAPGRLIVIDKKTYRSGGVFADLPAGEVSRARPLFATAKKLVHCEACSFVRDPHTAQGNDSTCPVCGGALKEETMIQPEVFGPECARELPEDDREQEITFATMAQFPQPVDPEVFTFRPCGPNASFTHATDRRLVAVNRGKEGGQANGFSVCVECGAASVFDQFSPASGPHERPYRYLGPQGTPQLCSGEFRRVLLGHDFTTDLLLVRLKVAAPLVTDTSDIVTLRMLEDALHTIAEALRLAASRHRQLDLDPAEFGSGFRVVPVLQNEARMLDIFLYDTLSGGAGYAEVAARNLPDILADTLVLLENCTCDTSCTECLDHFHNQHIQDRLDRKLGAALLRYGIFGEEPRCSPPNVQEVTLSQLCASLELEGFRCLPGGMPEAPMLVERGGYRMALGAFPGLIGRPEFAHAVNSAQNVHGYLALNEYLLRSNLPDSHQRVRSFFR

SEQ ID NO: 24330 - protein, 343 aa, Pseudomonas aeruginosa 148
MRSGAKLMQYFADGREVVPEKISPVLERVSSGTWQSELFRLASLSWSVPVSNGFGRRLRYLVWDQANGKLMGLIAIGDPVFNLGVRDKFIGWNTNDRAARLVNLMDAYVLGAIPPYNALLGGKLIACLLRSRDIYDDFASAYGGSTGIISQAEKNARLLAVVTTSSMGRSAVYNRLKLGGTQYLKSIGFTGGWGHFHIPDWLFVELRDYLRDLDHQYADQHAFGQGPNWRLRTTRAALKALGFKDDLMRHGIQREVFICQLATNAAKLLHSGSGKPDTQSLLSVREIGELALNRWLIPRSMNRPDFRCWKSTDLIHLYGHQARLFAAHGHLATEPRRIISLRG

SEQ ID NO: 24331 - protein, 630 aa, Pseudomonas aeruginosa 148
MSYLYSQEARERISALGTMMITEFIEEVPHAFRKSFFDRQASIPGFRRGSPPEFKEKQRRLIGHLAHPQPGHKSEADWQAFASLWVAWAKSRLDSAFPTADTSPQLADAGAGFFKRLAELYPDASRETVERLATYSGFAEDPAMQAALNSFHPASTLARDRMIDGLPGRLDKIEGYFDLAETAAEEIAERIDQLELTATVTTEAVEQMTANLSGVHKDIAEWRTALQSVDLRLEQVSELAQSTGSAQQEASTALADSDVRGELISERVSALAAQVENLVAERARVLVLEEALAILNARGLDWDAAAANLASLHARVNTQESRVVGPSHEVGGQSRVRLIENEATGPFVEINSIEVACQVIANNLQASGVVKREANSYARHILAAIICGQLIQFKGSTADLIADAVAAAVGGAIFHEWRVPVGLVSEDAATDCLEVVAESSGCLLLKGANRSAFEVYGSAIRDVVARRQFATSVNSRLVLIASWTHGPAAFPDGGTLSELGPVFDTDEFAMRGLSAQMPLMQFGQLTVDDWKALHNQAENTPLALLSTLRERLGQVDFAPGNLWLRIADRAYAQLRLVLQGPSERALHTVMKQWALPWAQSLGGPVEALTRSTTELLSDIDADAVHAESVE

SEQ ID NO: 24332 - protein, 289 aa, Pseudomonas aeruginosa 148
MPATTLSLTSIVRQRLTPLWPTLDDEHAAEPGIKAILYSLGDLGDLVRLDGGRWLTPSPQAVRLGDKQAVIIGGGPAQTFPWPIAMRGAGRVRLVNVDACAERIDLWEPNEWIGSPIEGLQAWSTQLLTSAKEQLAPATTELADISIRTSGKWIALSACATAEGLFLARCRTGLRFEYFVVQVSRGCLRQLTGLRPQQARRLQFYFDVQAGHPMKVEAHVSQVHVRLRLHRYLPREETKALLLGWQLPSLGGGVGTTDYVIPRELFPLVRQALAGLSVEVAERQFAEGS

SEQ ID NO: 24333 - protein, 1802 aa, Pseudomonas aeruginosa 148
MRERHALLLSSETIVQTPYVEATSVYKIGDPFNRLPIPKVAADMLTQLSLMGLGLYPRPYEHQSQALTAFLGDEAADLVVATGTGSGKTESFLMPIIGQLAIEGQERPDSAQLPGCRALLLYPMNALVNDQLARIRRLVGNTDASSILTQTRSHPIRFGSYTGRTPYPGERSKERDERFIEPLFEEFYNKVAEKPAVKGELVRIGRWPSKDLVGFYGAAAIETKTYGSGKKKGDNFTKKNWTGRLQTQPGDREMMTRHEMQARCPELLITNYSMLEYMLMRPIERDIFDQTKAWLKADSRNEFILVLDEAHMYRGAGGAEVALLIRRLCARLDIPRERMRCIMTSASLGPAETAAVDGERFARDLTGLADTSPRRVRVIQGTPEERSASQAAPAEQLNALADFNLADFQRSADDLVAATEAAAQLARRLGWSQPPSQDHAAFRNWLFERLTGFEPLENLITAVSGRAVRLDELSDLLFGNYPAVDAQKATDTLLALGSYAQRSTDGRVLLPTRLHLFHRGLPGLFACVNPTCSKRLGDHDGPTILGRLYTKPSTQCGCKSNGRVYELLTHRDCGAAFLRGFVNEEQNFVWHQPSGPFSDGAISALMPIELCVEDATHPRSRHIDKWLHMASGILTDDQPRDETGFRRVRVPDKAADAGDLTFDHCPVCTRKIRNTKDDPSKIMDHLTKGEAPFTALVRTQMAKQPASRAKDARHPNAGRKVLIFSDGRQKAARLARDIPRDIELDVFRQAVALACQKLKDLDKPAKPAGLLYLAFLSVLTKHDLPMFDGGDSRRVESARKLFDDNYDSDLAEAIEANFSLQEIPARYQIALLKLLCGNYYSLSGTMVGFVEPTPLKLRKLRQHLVNAELAISEANVRELAVGWIDSMLQEYAFDRSIESAYRYKAAGYSKPAWGSNGQFGKSLKESLINHFGWSSEVVQRVEAIFRDQLAEEDDGHWFLVPDSLAIVVDLAHCWAQCADCTALMPFALAGKVCLACGSDAASSIDPINSDYVTARKEFWRLPVARALTPGAELSNMSVEEHTAQLSNRDRSRVHATTELYEMRFQDVLIEDRDRPIDVLSCTTTMEVGVDIGSLVAVALRNVPPQRENYQQRAGRAGRRGSSVSTVVTYSQNGPHDSHYFLNPARIVAGPPRTPEVKIDNAKIARRHLHAYLIQTFFHEIMAQGTGASTEKTSSLLKALGPTEDFFCSSDQSGPNLKSFEAWVTRRVLASDGDLRESIVAWLPPGLDTRGLSLMEWLAATSQRLLVELKKLGSTIQVNATHEEIAGQEAQDIENPSSSIEQAELLEFLFYHGLLPSYAFPTSLCSFLVEKLTKNARDRWDVRTVQRPQQSIIKALSEYAPGRLIVIDKKTYRSGGVFADLPPGVVNRAGPLFENAKPHTHCKACSFVRDPNRSAKEQTGCPVCGQQLITELMIVPEVFGPESAADLPDNDREQEITYATMAQLPQPVDPEIFSFSACGPYASFTHAVDRTLVTVNRGKEGTGEGGFSVCMECGNASVFDQEANAGAHERPYKQLGPKGTPPKCSGKFARVLLGHDFDTDLLLLRLKIASPIVTDTVNGVVLRILEDALHSLAEALRLAASRHRQLDLDPAEFGSGFRIEPALLDEARILDVFLYDTLSGGAGYAEIAARHMEEVLDATLELLENCTCESSCTECLNHFHNQHLQHRLDRHLASMLLRYAIRGEEPACLPATGQMVKLAQLRASLELAGYACRVGSIPSAPLLVDREGKTVAVGCYPGLIDSLERQQPIGGTAGVHAVIGLNEYLLRSDLANAQLKVQSLFKS

SEQ ID NO: 24334 - protein, 409 aa, Pseudomonas aeruginosa B136-33; identical to SEQ ID NO: 24325

SEQ ID NO: 24335 - protein, 464 aa, Pseudomonas aeruginosa B136-33
MIDGLPTRIEDMEQRFAVAEVAAAGQANRIGQLEITAASLVRGIEDFAKDVSQSSNAVSDLRMSLDAEFTRSEKTEKFIDSLSVAAKQNADAIAAVGIKADVLEEGVRALAVRGERWDEVATDIAALRVAVESLSASEADQAETAETVGILLGRVAALESILVGSGADSGTRQRVRLLENKPEGAFVAILSIQNACDLVASNLQATGIARGAAIAAARQIVAAVVAGQMVQFSGSLADLVADSVAAAIGGPIFHEWRVPVGLISDEVASDCVEIVADSSSCLLLKGANLSAFEVYGAAVRDIVVRRQFTGSSYGGFALIASWAQGPAAFPDGGTLAELGPVFDTDALPMRGISAKLPQLKYGRLAKEAWPQVDGLETSETTPVTSQLGELLKEAGFEGGSLWRRVSSRAYAALRAIPGGKAEDDLNSLLVSWAAPWARATGGPVKEIIQIAERELANGRADMTV

SEQ ID NO: 24336 - protein, 1844 aa, Pseudomonas aeruginosa B136-33
MTVVSKTVEATGVHEAARSLAESLRQYIEAQYHIRDEGLIKERHALLRRDATIAQVPYVEATPVYKVGDPYDSLPIPNAAIDALTQLAGMGVGLYPHPYEHQSEALVSFLGDEATDLVVATGTGSGKTETFLMPVIGKLAIEGEERPASAELPGCRAMLLYPMNALVNDQLARIRRMLGNPETAKVLSKGRPRPIRFGSYTGRTPYPGRRSSGRDERFIKPLFEEFYRKVAEKSAVQMELERIGRWPSKDLDAFYGRELAQTKTYVSGKKAGKQYIANNWGHRLVTQPGDRELMTRDEMQQRCPELLITNYSMLEYMLMRPIERGIFEQTRDWLKADPRNEFVLVLDEAHMYRGAGGAEVALLIRRLCARLEIPRERMRCILTSASLGSGPTAVEDGERFARDLTGLPVGSSRRVRVIQGTSEPRSLPRPATREEAEALAEFDLGAFQNAANDLGAAQMAAMELAARLNWQVPTAGDHASFRDWLFENMTDFGPLETLIATVSGKAVRLDTLSEALFGEFPSDTAARAADALLALGSYARRRSDGRVLIPTRLHLFHRGLPGLHACVDPECSQRLGGHAGPTILGRLHTKPLDRCYCTSKGRVYELLTHRDCGAAFIRGYVSSDMDFVWHQPSGPLSEGGTIELIPIEILVEENVHPRSRHKDMWLHVPTGKLFPICPSDTSGYRKVKVPDKVAAGQVEISFDECPVCMRRTRSSKNEPSKVMDHVTKGEAPFTALVRTQMARQPASRTIDAKHPNGGRKVLIFSDGRQKAARLARDIPRDIELDVFRQAVALACARLEAIPQEPRPNLSLYLAFLSVLSEHDLLIFDGQDAKKIAAARAEFERDCEGDLRQALDDDFEPSETPPARYRIALLKLFCSNYYSLSGTTVGFVEPARAKLRKLKDDIKAAGIALGGEDVRALAVAWIDALLREFAFDPSLDPVLRCKAAGYFKPDWGSKGQFDRAFAEALARRPGWGKLAVEAIEAAFRSQLASEKDKVWFLTPNTLRLRVDLSHVWAQCPDCTALMPLALGGTICLACGSEGVRLVDPLVSNYVAARKGFWRLPVQEALASGARLSNLSVEEHTAQLSNRDRSSVHATTELYELRFQDVLIEDSDRPIDVLSCTTTMEVGVDIGSLVAVALRNVPPQRENYQQRAGRAGRRGASVSTVVTYSQTGPHDSHYFLNPEHIVAGAPRTPEVKVDNPKIARRHVHAYLVQTFFHELMGQGGYGPGEKTSMLEKSLGPTRQFFHGARDTGLNLEGFGDWVSHRVLSAEGDLRASVAAWLPPSLDTGGRPLEEWLAEVAEELLTTLRRLSADVPSPAVSEDDGENKEVEDNENAGPNLEQEEFLEFLFFHGLLPSYAFPTSLCSFLVEKREKNLKGILEVRTVQRPQQSISQALSEYAPGRLIVIDKKTYRSGGVFADLPAGEVSRARPLFATAKKLVHCEACSFVRDPHTAQGNDSTCPVCGGALKEETMIQPEVFGPECARELPEDDREQEITFATMAQFPQPVDPEVFTFRPCGPNASFTHATDRRLVAVNRGKEGGQANGFSVCVECGAASVFDQFSPASGPHERPYRYLGPQGTPQLCSGEFRRVLLGHDFTTDLLLVRLKVAAPLVTDTSDIVTLRMLEDALHTIAEALRLAASRHRQLDLDPAEFGSGFRVVPVLQNEARMLDIFLYDTLSGGAGYAEVAARNLPDILADTLVLLENCTCDTSCTECLDHFHNQHIQDRLDRKLGAALLRYGIFGEEPRCSPPNVQEVTLSQLCASLELEGFRCLPGGMPEAPMLVERGGYRMALGAFPGLIGRPEFAHAVNSAQNVHGYLALNEYLLRSNLPDSHQRVRSFFR

SEQ ID NO: 24337 - protein, 411 aa, Pseudomonas aeruginosa BL12
MPTGSAIIIGVNPREANLKRKVREHLHQLGFTKTQEGALCPPGNGKEAIRALHGAQREERLSASEAFVVRSGAKLMQYFADGREVVPEKISPVLERVSSGTWQSELFRLASLSWSVPVSNGFGRRLRYLVWDQANGKLMGLIAIGDPVFNLGVRDKFIGWNTNDRAARLVNLMDAYVLGAIPPYNALLGGKLIACLLRSRDIYDDFASAYGGSTGIISQAEKNARLLAVVTTSSMGRSAVYNRLKLGGTQYLKSIGFTGGWGHFHIPDWLFVELRDYLRDLDHQYADQHAFGQGPNWRLRTTRAALKALGFKDDLMRHGIQREVFICQLATNAAKLLHSGSGKPDTQSLLSVREIGELALNRWLIPRSMNRPDFRCWKSTDLIHLYGHQARLFAAHGHLATEPRRIISLRG

SEQ ID NO: 24338 - protein, 555 aa, Pseudomonas aeruginosa BL12
MDYAIDRVTNKPVTADLATRSGYYICSFCRMRVGLRSGPSRKNYFAHWRGVSSSSCAYFMSGPLSHVNSDKAQPASMRQMDLRLMIKKGENAGAWWIELVLPPCRTCHAYINLDVGGRVQKLNMRGMGSGFRVTAEPTANDYKIISFEGKPDPLFVSGVARTCPGLSAVGAAVFTAIGRDGDSGFPRAQVLSRSETYALLWSVPATPVFPEELLVDRFKSRHGWQLALVTVPDTPSEACIKWLEEFTQLSVMPATPSITTIWPFLTRYSSINTVEYIESEAVILAAHRMPGGAHDGGPTLQAVNQNDRISVTAPDRSPALFTVIREGSDDFRIGKTGHPDVDKYFSKNNSLARSYKHPTVDLVFIDDKGERVVAPLHRRGCQTYVMATRAQELCFDSLAMPMGTRGRLEAISPNGHRESRHLVSSDVTDDHTSQKCQLSPALNSLLKLYITDPKYQIYLDFGGFGRLSIGATQPMDNPTTVLLSLGRSLRLRLRCFLSQLHAGGAIALSGSDQGLVNAFLAARPNPGLVPNYRQLAADVRARGFDIRSSGDGVSR

SEQ ID NO: 24339 - protein, 630 aa, Pseudomonas aeruginosa BL12
MSYLYSQEARERISALGTMMITEFIEEVPHAFRKSFFDRQASIPGFRRGSPPEFKEKQRRLIGHLAHPQPGHKSEADWQAFASLWVAWAKSRLDSAFPTADTSPQLADAGAGFFKRLAELYPDASRETVERLATYSGFAEDPAMQAALNSFHPASTLARDRMIDGLPGRLDKIEGYFDLAETAAEEIAERIDQLELTATVTTEAVEQMTANLSGVHKDIAEWRTALQSVDLRLEQVSELAQSTGSAQQEASTALADSDVRGELISERVSALAAQVENLVAERARVLVLEEALAILNARGLDWDAAAANLASLHARVNTQESRVVGPSHEVGGQSRVRLIENEATGPFVEINSIEVACQVIANNLQASGVVKREANSYARHILAAIICGQLIQFKGSTADLIADAVAAAVGGAIFHEWRVPVGLVSEDAATDCLEVVAESSGCLLLKGANRSAFEVYGSAIRDVVARRQFATSVNSRLVLIASWTHGPAAFPDGGTLSELGPVFDTDEFAMRGLSAQMPLMQFGQLTVDDWKALHNQAENTPLALLSTLRERLGQVDFAPGNLWLRIADRAYAQLRLVLQGPSERALHTVMKQWALPWAQSLGGPVEALTRSTTELLSDINADAVHAESVE

SEQ ID NO: 24340 - protein, 343 aa, Pseudomonas aeruginosa BL12
MKWVGVNRDATRKTLAAALGCRNDGEGLRVAAVAECLRAASYLCSAPRNDREAWVPATTLSLTSIVRQRLTPLWPTLDDEHAAEPGIKAILYSLGDLGDLVRLDGGRWLTPSPQAVRLGDKQAVIIGGGPAQTFPWPIAMRGAGRVRLVNVDACAERIDLWEPNEWIGSPIEGLQAWSTQLLTSAKEQLAPATTELADISIRTSGKWIALSACATAEGLFLARCRTGLRFEYFVVQVSRGCLRQLTGLRPQQARRLQFYFDVQAGHPMKVEAHVSQVHVRLRLHRYLPREETKALLLGWQLPSLGGGVGTTDYVIPRELFPLVRQALAGLSVEVAERQFAEGS

SEQ ID NO: 24341 - protein, 1840 aa, Pseudomonas aeruginosa BL12
MGGISMNEASGVHETAKSLADSLRQYIEAQYHIRDEGLVRERHALLLSSETIVQTPYVEATSVYKIGDPFNRLPIPKVAADMLTQLSLMGLGLYPRPYEHQSQALTAFLGDEAADLVVATGTGSGKTESFLMPIIGQLAIEGQERPDSAQLPGCRALLLYPMNALVNDQLARIRRLVGNTDASSILTQTRSHPIRFGSYTGRTPYPGERSKERDERFIEPLFEEFYNKVAEKPAVKGELVRIGRWPSKDLVGFYGAAAIETKTYGSGKKKGDNFTKKNWTGRLQTQPGDREMMTRHEMQARCPELLITNYSMLEYMLMRPIERDIFDQTKAWLKADSRNEFILVLDEAHMYRGAGGAEVALLIRRLCARLDIPRERMRCIMTSASLGPAETAAVDGERFARDLTGLADTSPRRVRVIQGTPEERSASQAAPAEQLNALADFNLADFQRSADDLVAATEAAAQLARRLGWSQPPSQDHAAFRNWLFERLTGFEPLENLITAVSGRAVRLDELSDLLFGNYPAVDAQKATDTLLALGSYAQRSTDGRVLLPTRLHLFHRGLPGLFACVNPTCSKRLGDHDGPTILGRLYTKPSTQCGCKSNGRVYELLTHRDCGAAFLRGFVNEEQNFVWHQPSGPFSDGAISALMPIELCVEDATHPRSRHIDKWLHMASGILTDDQPRDETGFRRVRVPDKAADAGDLTFDHCPVCTRKIRNTKDDPSKIMDHLTKGEAPFTALVRTQMAKQPASRAKDARHPNAGRKVLIFSDGRQKAARLARDIPRDIELDVFRQAVALACQKLKDLDKPAKPAGLLYLAFLSVLTKHDLPMFDGGDSRRVESARKLFDDNYDSDLAEAIEANFSLQEIPARYQIALLKLLCGNYYSLSGTMVGFVEPTPLKLRKLRQHLVNAELAISEANVRELAVGWIDSMLQEYAFDRSIESAYRYKAAGYSKPAWGSNGQFGKSLKESLINHFGWSSEVVQRVEAIFRDQLAEEDDGHWFLVPDSLAIVVDLAHCWAQCADCTALMPFALAGKVCLACGSDAASSIDPINSDYVTARKEFWRLPVARALTPGAELSNMSVEEHTAQLSNRDRSRVHATTELYEMRFQDVLIEDRDRPIDVLSCTTTMEVGVDIGSLVAVALRNVPPQRENYQQRAGRAGRRGSSVSTVVTYSQNGPHDSHYFLNPARIVAGPPRTPEVKIDNAKIARRHLHAYLIQTFFHEIMAQGTGASTEKTSSLLKALGPTEDFFCSSDQSGPNLKSFEAWVTRRVLASDGDLRESIVAWLPPGLDTRGLSLMEWLAATSQRLLVELKKLGSTIQVNATHEEIAGQEAQDIENPSSSIEQAELLEFLFYHGLLPSYAFPTSLCSFLVEKLTKNARDRWDVRTVQRPQQSIIKALSEYAPGRLIVIDKKTYRSGGVFADLPPGVVNRAGPLFENAKPHTHCKACSFVRDPNRSAKEQTGCPVCGQQLITELMIVPEVFGPESAADLPDNDREQEITYATMAQLPQPVDPEIFSFSACGPYASFTHAVDRTLVTVNRGKEGTGEGGFSVCMECGNASVFDQEANAGAHERPYKQLGPKGTPPKCSGKFARVLLGHDFDTDLLLLRLKIASPIVTDTVNGVVLRILEDALHSLAEALRLAASRHRQLDLDPAEFGSGFRIEPALLDEARILDVFLYDTLSGGAGYAEIAARHMEEVLDATLELLENCTCESSCTECLNHFHNQHLQHRLDRHLASMLLRYAIRGEEPACLPATGQMVKLAQLRASLELAGYACRVGSIPSAPLLVDREGKTVAVGCYPGLIDSLERQQPIGGTAGVHAVIGLNEYLLRSDLANAQLKVQSLFKS

SEQ ID NO: 24342 - protein, 409 aa, Pseudomonas aeruginosa BWH049; identical to SEQ ID NO: 24325

SEQ ID NO: 24343 - protein, 476 aa, Pseudomonas aeruginosa BWH049
MELRLVIPPIGADRAGWSLELVLPPCRECPAILSLDVGGRVQTLNMRGMQERRRVTVELSTAPYSIVEFSGKPDPSFVLSVDRECRGLPAVGAAAFTASGRSEPRGFPRTQELRASETFALLWREPAKPDFPDELVIDRFPGRQGWNLALATFPDELSPGCADWLHSFTGLPIAPPVPAITAVWPFFTRNASVNVVESVRTSVLLLAAKMMPLEQSDQGPTMQVQSGSSKYSVLGKERSPAFFALKTDGAQTVKVSDANNPGIEEFVSFTLNPVLSQWLPSVELGFTTPMGVRHVVPLHQRRCTDMVTEARTHGRGPDYLSMPPGATGVLRIDGPIGRFITALSSGSDSSPHSRHMRLPPPDVLTKITSALADPACHVEIEFGGFGRLRVAGTWACSSVGLRSKELTPALRSRLLSFMFQLQIASPTTVCSDDNSLVGVFAAARPEASLIPHYRSLVKEILACGFEIKRLGEGASS

SEQ ID NO: 24344 - protein, 625 aa, Pseudomonas aeruginosa BWH049; identical to SEQ ID NO: 24327

SEQ ID NO: 24345 - protein, 353 aa, Pseudomonas aeruginosa BWH049; identical to SEQ ID NO: 24328

SEQ ID NO: 24346 - protein, 1844 aa, Pseudomonas aeruginosa BWH049; identical to SEQ ID NO: 24336

SEQ ID NO: 24347 - protein, 406 aa, Pseudomonas aeruginosa BWHPSA028; identical to SEQ ID NO: 24314

SEQ ID NO: 24348 - protein, 548 aa, Pseudomonas aeruginosa BWHPSA028
MDCAIDPVENKLVTADIASRTGYYICSYCRKRVGLRSGPSRKNYFAHWRGVSSSSCPYFISGSLGHVSHDKVQPLPTRQMDLRLLIKKGENAGAWWIEIVLPPCRACHAFVKLDVGGRVQKLDMRGMGSGFRVMAEPTANDYRIMSFEGEPDPSFVVEVARTCPGLPAWGAAAFTAIGRGAESGFPRAQALNRCETYALLWSAPVTPEFPEELLVDRLKSRQGWNLALVTVPEAPSDICISWLEDFTQLSVMPAAPAITTIWPFLSRNASINTVEYIESDAVILAAHRMPGGPHDGGPTLQAVNQHDCISATAPDRSPALFTVIRAGSDEFRIGKSGLPDVDKFFFKSTSLGRSFKYPTVDLVFIDERNERFVAPLHSRQSQSYVMATRAGELHFDSLTMPRGAKGRLEVVSPNGHKQYRRLASSEVSADHSPQACQLPSAMNSLLKEYLTDPQYQFYLDFGGLGRLSIGAMQQLATHTPAFLSLERSLRLRLQSFLSQLHVGGVTALSGSDQALVSAFGASVPRPELLPHYRQLAAAVRACGFDVRY

SEQ ID NO: 24349 - protein, 611 aa, Pseudomonas aeruginosa BWHPSA028
MITEFIEEVPHVFRKSFFDRQASIPGFRRGSPPEVKEKQRRLIGHLVHPQPGQKGEADWQAFASLWVAWAKSRLDCAFPAADKFPQSADTGADFFKRLAELYPDAPRETVERLAVYSGFAEDPAMQAVLNSFHPASTLARNRMIDGLPGRLDKIESYFELAETATEETAEHIDQLEVTVTATAEAVKQLTGSFASVDHDVEALRTALHGITERLQQLSELAQSTARAQQEVSQAIARSDLRGEHMSTALDSLSVQVTDLVAERAQVLAFEEALTTLGARIPDWELTAATIAALRERLDDHDFRVAKPRDETSGHTRVRLIENEATGPFVEVSSVDVAWKVIANNLQACGVVKNDANRCAGHILAAVISGQLIQFKGSTADLIADAVAAAVGGAIFHEWRVPVGLLSEDAAADCLEVVYESSGCLLLKGANRSAFEVYGSAIRDLVARRQFTLAVDARLVLIASWTHGPAAFPDGGTLSELGPVFDTDELSMRGLSAQLPLMQFGHLAVDDWRVLHSPAENTQLALPSTLRERLAQVDFVPGNLWLRVADRAYAQLRLLSPGPAERTLHAVLKQWALPWAQSLGGPVEALTRSIIELQSEIDTQAVHAEHVE

SEQ ID NO: 24350 - protein, 345 aa, Pseudomonas aeruginosa BWHPSA028
MKWLGSDRDAARKILATGMGCRSGDEGLRIAAVAECLRAASYLSSVPSTDREDWVPASTLSLTSQVRRRLLPLWPTLDDEQAAEPGVKAILESLGELGDLVRLDGGRWLTPPPQAIRTEGSLAVVTGGGPAQTFPWPITMRGAGRLRLIDVNACAGRIDLWEPQEWIGAPLEGLQEWSIQLLTNAKEQLKPALDELADVSLRSNGKWMALSACGTAEGLFLAKCLTGPRYEYFVVLMSRGHLRQMSGLRREQARRLLFYLDAQAGHPLKVQAQVSQSLVRLRLNRHLPREEARALLLGWQSPPHIGGGTTATHYVIPREMFPIVRQALTGLSVNLTEREISEERV

SEQ ID NO: 24351 - protein, 1840 aa, Pseudomonas aeruginosa BWHPSA028; identical to SEQ ID NO: 24317

SEQ ID NO: 24352 - protein, 268 aa, Pseudomonas aeruginosa WC55
MGLIAIGDPVFNLGVRDKFIGWDTADRAARLVNLMDAYVLGAVPPYSALLGGKLVACLLRSRDIYDDFASVYGSSTGIISQAEKNARLLAVVTTSSMGRSAVYNRLKLDGTEYLKSIGFTGGWGHFHIPDWLFIELRDYLRELDHHYADQHAFGQGPNWRLRTTRAALKALGFKDDLMRHGIQREVFICQLADNATKLLHSGSGKPDTKSLLSVGKIGELALNRWMIPRSRNRPEFRDWKPTDLIHLYGSQACHFSALSHLAPRRVAF

SEQ ID NO: 24353 - protein, 425 aa, Pseudomonas aeruginosa WC55; identical to SEQ ID NO: 24315

SEQ ID NO: 24354 - protein, 630 aa, Pseudomonas aeruginosa WC55; identical to SEQ ID NO: 24316

SEQ ID NO: 24355 - protein, 1840 aa, Pseudomonas aeruginosa WC55; identical to SEQ ID NO: 24317

SEQ ID NO: 24356 - protein, 409 aa, Pseudomonas fluorescens
MSQGNIIISGVNPREANLKRKVREHLHSLGFTRTDEGALRAPGSDKEAIRVLHGAQREERLIASGNFVARAGVKLMQYFASGTEVIPKKISPVLERVSSGTWQSDLFRLASLSWSVPVSSGFGRRLRYLVWDQSNGKLMGLIAVGDPVFNLGVRDKFIGWNSHDRGARLVNIMDAYVLGALPPYNTLLCGKLIACLLRSRDLYNDFAHAYGASTGIISQEEKRARLMAIITTSSMGRSSVYNRLKLQGTEYLKSVGYTGGWGHFHIPDWLFMELRDYLRHIDHTYADHHAYGQGPNWRLRTTRAALKALGFKDDLMRHGIKREVFICQLAANATKILQTGKGKPDIRSLQTVKQIAGLALERWVIPRAASVPDYRRWRASNLIGLYGSQAHLLRPEIQLDQGPISAFGY

SEQ ID NO: 24357 - protein, 555 aa, Pseudomonas fluorescens
MHFAVNTITNQIETAEHATGRRNYVCPICRAKVLLRAGLKQKRCFAHWPGFGSARCENFVPGLHGQYGAGLALAARPMRSMELRLKIERGKNRAAWCLELTLPSCRFCKATVTLDVGNGILQEIDMGGMSTGRRVTAELSQESFRIVSFQGKPDQNFVEGVERACQGLPTFGAAVFTASGGDGAAGFPRAHELKKSGTYALLWKAPDALKFPEELVPDNFISRQDWNLALVTVPAAPSTACTEWLESLTGLTLSGSTPNISIAWPFLARNTSLNSAECTTSAALIVAARGMPIGQSDTGPIMLMRGGQQRLLATGVERDTALFALIPDNFQQFFVAKAGTEEIEKLLSTTFQVDAVADFPVVEMAFTNPAGVRLVVPFDRARCKDYIDLARLNQMTLEYLAVPPGTRGWFYVVRASVGIRYELLASDLRAPHSPYQRLIAPEPLANLIDCLTDAACHVDLDLGGFGKLRMNGSELLAPNVATPTLGTAMRLRVRSFISQLRGCTPIRVDADDAQLVCAVGAINPQPALIPHYRALIRDVIACGFEVKRKGKSVSL

SEQ ID NO: 24358 - protein, 629 aa, Pseudomonas fluorescens
MSYYYSQEARVRISAFEQQYLTDFIEEVPHSYRKSAYNRLSAIDGFRSGSPADFKAKQKRLISHLLHPQGGAKGEADWKTFANFWVAWARHHLDSDFPAGDKLLPANDAGPLFLTGLAERFPDAPRETVERLIVFSGFADHDESQTVLGKFRPASTVARDRLLDALPKRVDTIEDSIKILQADTEQAAETIESLRSKIENLMQDVGDVSERAAQSTNDLFELHAMADHLLAADERLVSTLRALQENAQRADAAAEAADGNARSLREAVEVLAGRADGWDEAAAHLGAIEDQLGAITAREKTWLGTTEAVAGLSDRLEALQSNLGRVRNSTAPTSQVRLFEAEAQGPVVEIRSVETACELISINLQACGIVKGAAQTVARQALAALAAGQLIQFSGSLADMATDAAAAAVGGLIYHEWRVPVGLVSDEAAAECLDMVGDTSGCLALKGANRSAFEVYGYAVRDAITRRQLGMPAYPRLALIASWAQGPAAFPDGGTLAELGPVFDTDALPMRGVTSRTLSLKYGHLTCDAWDQLEGFASDISGSLVSELKALFEEAHFQPGNLWTRCAERAYLRLRASLGASETEDLHAMLKHWALPWAKATGCPIDDLTRVAEQVMSQHQVETSGFEGA

SEQ ID NO: 24359 - protein, 344 aa, Pseudomonas fluorescens
MKWQAISQYDAQRIVAIGLGCTSQGEGLRIAAIAECLRSACLLCAIPTDGQGAWAPAASLSLTSVARKHLTPIWPDMLEDSDSKPGVLSVLESLGQIGDLVRVEKGWLPPPPRAIRSLEGNAVVLGGGPSPCFPRGIKTRTFGRVRVVTASLCEGWIDVSDPGDWIGAPIEGLANWSSRFVLQAAGRFTQCPKVLEPVSVYLQGRWAELACHPHASGQLLGKCQTGTTVNYFIGRFQSGRLQQLASIEASDVRRLRFQLDLEAGCPCTMETQTSPRFVTLRSYRRLPPEQEKALLLGWELPKAEGEHPGLKTHVIPVETFPIVRCALEGLGIVLVERKRAQGGI

SEQ ID NO: 24360 - protein, 1848 aa, Pseudomonas fluorescens
MSNTSMTAEATGVHETAKSLAESLRQYIEAQYHIRDEGLVRERHALLQSNETIAQTPYVEATQVYKTGETYDNLAIPPAAASALSNLSAMGLGLYPRPYEHQSQALTAFLGQDAADLVIATGTGSGKTESFLMPIIGSLAVEGAERPTSAAMPGCRAMLLYPMNALVNDQLARIRRIFGDTDAAGILQQDRALPIRFGSYTGRTPYPGKRDSGRDERFIKPLFEQFYQKVAKVPAVQGELARIGRWPSKDLVGFYADDSVQTKTWTSGKRQGKQFISKNWKGRLLTQPGDRELMTRDEMQVRCPELLITNYSMLEYMLMRPIERDIFEQTKDWLKSDVRNEFILVLDEAHMYRGAGGAEVALLIRRLCARLDIPRERMRCILTSASLGGEDAAAANGDRFARDLTGLLEGSPRSLRVIQGTHEPRSADRSITDSQMHALASLDLPAFQRVANDLPAATQALNNLAQELGWPSFQGLAHTALRDWLFENLTGFGPLEKLIELVSGKAEKLDDLGKKLFADAPGATAEKATDALLALGSHAQRRSDGRVLLPTRLHLFHRGLPGLYACVNPHCTSRQGDHQGPTILGRLHTKPSTQCNCESKGRVFEFLTHRDCGAAFVRGYVNEDMDFVWHQPNGPFAETSTAALMPVDIFVEETTHPRSRHRDKWLHMSTGIMSSTNKDGVEGFRRVRVPDKPPAGEAITFDNCPVCTRKIRNGKDEPSKIMDHVTKGEAPFTTLVRTQMAKQAESRVVDSRHPNGGRKVLIFSDGRQKAARLARDIPRDIELDVFRQAIALACQKLRDISREPRPTQVLYTGFLAVLTEFDLPLFDGNDARKVADAITVYKRDCDSDLEEALQQNGLPPELPPRYRIALLKLLCSSYYSLTGTTIGYVEPVESKRKKIKQDLGAAGVSLGDQDLRALAIGWIETLLQDFAFDKTIDRYLRYKAAGYVKSPWGSNGMFDKPLREALAAQLPGSLTTLEAIETTFRNHLADEENGTWFLSPNSVSLVVDLGHVWAQCGQCTAVTPLALAGKICLACGSDRATLVDPATSPYLSARKGLWREPVREALQPGARLTNLNVEEHTAQLSNRDRSKVHATTELYELRFQDVLIDPTDRPIDVLSCTTTMEVGVDIGSLVAVALRNVPPQRENYQQRAGRAGRRGSSVSTVVTYSQNGPHDSHYFLNPRHIVAGSPRTPEIKVDNEKIARRHVHAYLFQTFFHEVMAQNPLLSKPKTALLEKALGATHDFFFAGIDSGLNLEQFKSWVSGKLLHDEAPLKNSVLAWLPPNLDTQGLTLAEWLEDTARRLIHRLHELAAELPQQAVNQDDESEADDANDDESNASTAEIEQKELLEFLFHHSLLPTYAFPTDLCSFLIENIAKVNGMAEIQTVQRPQQSISKALSEYAPGRLIVIDRHTYRSGGVFADLPGNVVNRAAPLFKKAKRHVHCKTCSFVRNPNSPVGNHGPCPVCGGELATETMILPEVFGPEKAEDLPENDREQEITFATMAQFPQPVNPDELTFQICGPKASFTHATNQTLVTVNRGIEGAEFGGFSVCVECGHASVFDHNVHLGPHERPYKLLNPKGGPTLCSGRFDRVLLGHDFKTDLLLLRLKVEAPLVSNTAEVVVLQILEDALHSIAEALRLAASRHQQLDLDPSEFGSGFRIDPGVQGEARILEVFLYDTLSGGAGYAEIAARNIKEILESTLVLLENCDCESSCTECLNHFHNQHLQHRLDRRLGATLLKYAVDGVVPGCAPLDEQWQTLSHLRASLELEGFDCSFNTVKAVPMLVQRNGRSLAVGCFPGLIHTPDFVHGVATADNVDGHLALNEYLLRSDMPGAHQRVKALFEGFTER

SEQ ID NO: 24361 - protein, 409 aa, Pseudomonas putida S610
MSQGNIIIAGVNPREANLKRKLREHLHTLGFTRTDEGALRAPGNDKDAIRVLHGAQREERLIASSNFVARAGAKLMQYFASGTEVIPKKISPALERVSSGTWQSDLFRLASLSWSVPVSSGFGRRLRYLVWDQSNGKLMGIIAVGDPVFNLGVRDKFIGWNSHDRGARLVNIMDAYVLGALPPYNSLLCGKLIACLLRSRDLYNDFAHAYGATTGIISQEEKRARLMAVITTSSMGRSSVYNRLKINGTEYLKSIGYTGGWGHFHIPDWLFLELRDYLRHIDHTYADHHAYGQGPNWRLRTTRAALKALGFKDDLMRHGIQREVFICQLATNATKILQTGKGKPDIRSLQTVKQIADQALDRWVIQRAANVPDYRRWRSSDLISLFGSQAQLLRPEFQLNNEKAKAFGH

SEQ ID NO: 24362 - protein, 555 aa, Pseudomonas putida S610
MDYAVNTLTNQVESAEQATRKGRYVCPICRAKVLHRAGIKQKKCFAHWPGFGSAQCDNFVPGLHGQHGAGLALSGRPMRSMELRLKIERGRNRAAWYLELTLPSCRPCDASFTLDVGNGILQEIDMRGMPNGRRVTAELSQESFRIVSFQGTPDRHFTDGVERTCHGLPTFGAAVFTALAGDRTPGFPRAQELRTDGSYALLWKAPENLNFPEELVPDKFHSREGWNLALITVPTSPSDACAEWLESLTGLTINGAVPSISIAWPFLTQSSSLNSAECVASTAIILTARGMPVGQTANGPTMLLLSGQNRLSATGVDRDPALFALIPDSRQQFHVANAGTSEIEKYVSTTFNVDAAIDLPGVEVAFTNTAGVRLVVPFEGARCKECIALARLNQMRLEYLSIPPGASGSVYLERAATGLKYELAASDLSAPHNQHQRLFTPELQAIVIDGLIDAACHVDLDLGGFGRLRLRGSAQCPSDIAVPCLGPSIRLRLRSFMTQLQCSAPAHIDADDVQLVYAFGALQPQPPLIPHYRALIKDVIACGFEVKSSGKSVSP

SEQ ID NO: 24363 - protein, 629 aa, Pseudomonas putida S610
MSYYYSQEARVRISAFDQQSLTEFIEEVPHSYRKSCYDRMTAIDGFRSGTPTDFKAKQKRLISHLLHPLGGQKSEADWKAFANFWVEWARNHLHKDFPAGDKLPPANDAGPLFLAKLVERFPDAPRETVERLIAFSGFADHADTQTELSKFRTAAIVARDRLFEALPDRVGTLEDSVESLEATDDAFVEQLNALRLKDDNLAGELRDIRERATESTRDLAELRALTERLLAADEQLVSTVRALEENAMRAGASDEATQDDIRSLSEAVKVLSERSGAWDEMTAHLSAIESRLKPITARETAWVETTEAVARLSERLETLQSSVGTVRSESPPTSQVRLFEAEPQGPLVEILSVETACDLISTNLQACGFVKGTALTVARQIIAALAAGQLIQFTGSLADVVADALAAAVGGSSYHEWRIPVGLVSDEAAAECLEIVGETSGCLALKGANRSAFEVYGSAIREVITRRQLAMSVYPRLALVASWAQGPAAFPGGGTLAELGPVFDTDVLPMRGVTSRLINVKYGHLAQESWDQLEGFDSGMSGALVAELEELLKEAGFQPGNLWRRCAERAYLRLRTAAGSSEEGDLYALLTAWALPWAKSTGGPVDDLARLAEQVMAQHQAETSHLEGA

SEQ ID NO: 24364 - protein, 344 aa, Pseudomonas putida S610
MRWQALSRHEAQSILANGLSCTTQGEGLRIAAIAECLRAACFLRAMPTENRGAWTPVASLSLTSLTRKHLGPIWPGMLDDTEAKPGVLSILDSLEQIGDLVRVEKGWLPPPPRAIRSQDGYAVVLGGGPSPRFPRSVKARALGRVRVIPTSLCAGWLDMGDPSDWIGAPLEGLATWSSNFLMQASRRFTSCPTDVAPVSVYVQGRWSELVSQPSNSGHFLAKCRTENIVSYFIGKFHCGRLEQLASIEASDARRLRFYLDLEAGRPCKMQIESSPRFVTLRSYRRLPPEQEKALLLGWELPRTESDHAGLKIHVIPVETFPIVRCALEGLGIVLVERGGAQGRI

SEQ ID NO: 24365 - protein, 1845 aa, Pseudomonas putida S610
MNNTSMAEAVGVHETAKSLTESLRQYIEAQYHIRDEGLVRERHALLQANATIAQTPYVEATQVYKTGEAYQHLAIPPAAASVLNDLSGMGLGLYPRPYEHQAQALSAFLGDESADLVIATGTGSGKTESFLMPVIGSLAIEGAERPKSASMPGCRAMLLYPMNALVNDQLARIRRIFGNADAAGILQQGRTLPIRFGSYTGRTPYPGKRESSRDERFIKPLFEQFYKRVANVPAVQGELARIGRWPSKDLVGFYADDSVQTKTYSSGKRQGKQFISKNWKGRLLTQPGDRELMTRDEMQVRCPELLITNYSMLEYMLMRPIERDIFEQTKDWLKSDFRNEFILVLDEAHMYRGAGGAEVALLIRRLCARLDIPRERMRCILTSASLGSEEAAAYNGERFARDLTGLLESSPRRLRVIQGTHELRPGDRSITDAQMQALASLDLPAFQRAANDLSSAMRALNDLARALGWDSFQGSDHAGLRNWLFENLTGFGPLERLIELVSGKAEKLDDLGEKLFGRTQDNTPEKATDALLALGSYAQRRADGRVLLPTRLHLFHRGLPGLYACIDPDCSSRHGKHEGSTVLGSLRTKPSTQCNCESKGRVFEFLTHRDCGAAFVRGYVNTAMDFVWHQPNGPFSEAGTAALMPVDIFVEETTHPRSRHRDKWLHISTGIMSSTSQEGVEGFRRVRVPDKTPMGEPITFDNCPVCTRRIRNGKDEPSKIMDHVTKGEAPFTTLVRTQMARQPESRVVDARHPNGGRKVLIFSDGRQKAARLARDIPRDIELDVFRQAIALACQKLRDISREPRPTQVLYTGFLAVLTEFDLPLFDGVDARKVADAIALYKRDCDSDLEEALQQNGLPPELPARYRIALLKLLCSSYYSLTGTTIGYVEPVTTKLRKIKQDLVAAGVTIADQDLRALAIGWIEMLLQDFAFDKSIDRILRIKAAGYGKPSWSSNGKFDKALREALATHLPGHLATLEVIEATLRNHLADEENGGWFLSPNSLNLVVNLDHVWAQCGQCTAVTPLALSGKICLACGSDRATLVDPAMSEYLTARKGLWREPVWEALQPGARLSNLNVEEHTAQLSNRDRNKVHATTELYELRFQDVLIDASDRPIDVLSCTTTMEVGVDIGSLVAVALRNVPPQRENYQQRAGRAGRRGASVSTVVTYSQNGPHDSHYFLNPRYIVAGPPRTPEIKVDNAKIARRHVHAYLFQTFFHEVMAKNPVLPSSKTALLQKALGATHDFFFGGNDSGLNLEQFKAWITSNVLQDNGPLKRSVLAWLPPSLDTQGVTLMEWLEETVHGLMQRLHELAAQLPQQALSQADESEVQEVDEVNDDDSNASDAEIEQKELLEFLFHHGLLPTYAFPTNLCSFLVESMAKVNGRLEIQTVQRPQQSISKALSEYAPGRLIVIDRHTYRSGGVFADLPGNVVNRAAPLFKNAKRHVHCKTCTFVRNPNMPSDPKDPCPVCGGVLATEMMILPEVFGPEKAEDLPENDREQEITFATMAQFPQPVNPDELFFHPCGPKASFTHAVDQTLVTVNRGIEGAESSGFLVCVECGHASVSDRNAHLGAHDRPYKLLAPKGTPAQCSGRFEQVLLGHDFKTDLLLLRLKIEAPLVTNTAEVVVLQILEDALHSIAEALRLAASRHQQLDLDPSEFGSGFRIDPGVQGEARVLEVFLYDTLSGGAGYAEIAARHIVEILEATRQLLENCDCETSCTECLNHFHNQHLQSRLNRHLGATLLKYAVDGVEPGCASLEEQWQTLSQLRASLVLDGYQCRFDAVGSVPMMVQRNGRSLAVGCFPGLIHTPDFVHGVASAKGVDGHLALNEYLLRSDMSGAHQRIKELFE

SEQ ID NO: 24366 - protein, 411 aa, Pseudomonas putida TRO1; identical to SEQ ID NO: 24337

SEQ ID NO: 24367 - protein, 479 aa, Pseudomonas putida TRO1
MRQMDLRLMIKKGENAGAWWIELVLPPCRTCHAYINLDVGGRVQKLNMRGMGSGFRVTAEPTANDYKIISFEGKPDPLFVSGVARTCPGLSAVGAAVFTAIGRDGDSGFPRAQVLSRSETYALLWSVPATPVFPEELLVDRFKSRHGWQLALVTVPDTPSEACIKWLEEFTQLSVMPATPSITTIWPFLTRYSSINTVEYIESEAVILAAHRMPGGAHDGGPTLQAVNQNDRISVTAPDRSPALFTVIREGSDDFRIGKTGHPDVDKYFSKNNSLARSYKHPTVDLVFIDDKGERVVAPLHRRGCQTYVMATRAQELCFDSLAMPMGTRGRLEAISPNGHRESRHLVSSDVTDDHTSQKCQLSPALNSLLKLYITDPKYQIYLDFGGFGRLSIGATQPMDNPTTVLLSLGRSLRLRLRCFLSQLHAGGAIALSGSDQGLVNAFLAARPNPGLVPNYRQLAADVRARGFDIRSSGDGVSR

SEQ ID NO: 24368 - protein, 630 aa, Pseudomonas putida TRO1; identical to SEQ ID NO: 24331

SEQ ID NO: 24369 - protein, 343 aa, Pseudomonas putida TRO1; identical to SEQ ID NO: 24340

SEQ ID NO: 24370 - protein, 1840 aa, Pseudomonas putida TRO1; identical to SEQ ID NO: 24341

SEQ ID NO: 24371 - protein, 409 aa, Pseudomonas sp. PI1
MPNGDTTSIDVDSREEDLKEKLREHLHSLGFTKAEKGVLQAPGNTKEAIRSLHSAQREEKLSANEKFVSLTGRKLMKFFASGADIDPEKISPVLERVSSGTQQGELFRLASLLWSVPVSNGFGRRLRYLVWDENNGKLIGLIAIGDPVFNLAVRDRFIDWNIHDRSARLVNLMDAYVLGALPPYNILLGGKLIACLLRSRELYDDFSTVYGGMTGIISGEVKKARLLAITTSSSMGRSSVYNRLKLDGIKYLESIGYTDGWGHFHIPDQLFSELRSYLRDIDHTYADQHAFGQGPNWRLRTMKAALSALGFKQNLMRHGIRREVFICQLANNATEILRTGRGQPDLTSLLSAKDVAEQAVSRWMIPRSRRRPEYRDWMPGNLIDMFGNQARNLRAQIEEIEKHRNIDWL

SEQ ID NO: 24372 - protein, 353 aa, Pseudomonas sp. PI1
MEWQAVSLEGARRGVAAGIGCRRGGECLRISAVSECLRAVSHLCSAPKGSQGEWEPAASVRLSGMVRRKLVSLWPDLAADGVDTQPGVIGILNSLADLGDMVRLEGGRWLAAPAHTVRAGDGLAVLLGGGPKEILPQAVRASAKTEGRVRLVETAACEGWADMWEAEEWIGAPAEGLEAWSARLLAEATTRLTDAPDDMGEVSVYLTREWVRLTDLPAGEGPILLCRVRSSGAAGPMFSYFIGEFVRSRLRRLSGIDSQDARRFRFHLDARAGRSIRIVASVSQGSVKLRLGRRLPEREARVLLLGWQVPAPDGGHPGVTHHMFPVETLPILRKAFEGLRIVLDERLGAGREN

SEQ ID NO: 24373 - protein, 1844 aa, Pseudomonas sp. PI1
MTVMSKTVEATGVHEAARSLAESLRQYIEAQYHIRDEGLIKERHALLRRDATVAQVPYVEATPVYKVGDPYDSLPIPNAAVDALTQLAGMGVGLYPHPYEHQSEALVSFLGNEAADLVVATGTGSGKTESFLMPVIGKLAIEGEERPASAELPGCRAMLLYPMNALVNDQLARIRRMLGNPEAAKVLSKGRARPIRFGSYTGRTPYPGRRSSVRDERFIKPLFEEFYRKVAEKSAVRMELERIGRWPSKDLDAFYGRELAQTKTYVSGKKAGKQYIANNWGHRLVTQPGDRELMTRNEMQQRCPELLITNYSMLEYMLMRPIERGIFEQTRDWLKADPRNEFILVLDEAHMYRGAGGAEVALLIRRLCARLEIPRERMRCILTSASLGSGPTAVEDGERFARDLTGLPDGSSRRIRVIQGTPEPRSLPRPATREEAEALAEFDLGAFQNAANDLGAAQMAAMELAARLNWQVPTAGDHASFRDWLFENMTDFGPLETLIATVSGKAVRLDTLSEALFGESPPDTAARAADALLALGSYARRRSDGRVLIPTRLHLFHRGLPGLHACVDPECSQRLGGHAGPTILGRLHTKPLDRCYCTSKGRVYELLTHRDCGAAFVRGYVSSDMDFVWHQPSGPLSEGGTIELIPIEILVEENVHPRSRHKDMWLHVPTGKLFPICPSDTSGYRKVKVPDKVAAGQVEIAFDECPVCMRRTRSSKSEPSKVMDHVTKGEAPFTALVRTQMARQPASRTIDAKHPNGGRKVLIFSDGRQKAARLARDIPRDIELDVFRQAVALACARLEAISQEPRPNRNFYLAFLSILSEHDLLIFDGQDAKKIAAARAEFERDCEGDLRQALDDDFEPSETPPARYRIALLKLFCSNYYSLSGTTVGFVEPARAKLRKLKDDIKAAGIALGDEDVRALAVAWIDALLREFAFDPSLDSVLRCKAAGYFKPDWGSKGQFDRAFAEALARRPGWGKLAVEAIEAAFRSQLASEKDKVWFLTPNTLRLRVDLSHVWAQCPDCTALMPLALGGTICLACGGEGVRLVDPLVSNYVAARKGFWRLPVQEALASGARLSNLSVEEHTAQLSNRDRSSVHATTELYELRFQDVLIEDSDRPIDVLSCTTTMEVGVDIGSLVAVALRNVPPQRENYQQRAGRAGRRGASVSTVVTYSQTGPHDSHYFLNPEHIVAGSPRTPEVKVDNPKIARRHVHAYLVQTFFHELMGQRGYGPDEKTSMLEKSLGPTRQFFHGARDTGLNLEGFGDWVSHRVLAAEGDLRASIAAWLPPSLDTGGRPIEEWLAEVAEELLTTLRRLSADVPSPAVSEDDGENKEVEDNENAGPNLEQEELLEFLFFHGLLPSYAFPTSLCSFLVEKREKNLKGIWEVRTVQRPQQSISQALSEYAPGRLIVIDKKTYRSGGVFADLPTGEVSRARPLFATAKKLVHCEACSFVRDPHTAQGNDSTCPVCGGALKEETMIQPEVFGPECAKELPEDDREQDITFATMAQFPQPVDPEVFTFRPCGPNASFTHATDRRLVTVNRGKEGGQANGFSVCVECGAASVFDQFSPAGGPHERPYRYLGPQGTPQLCSGEFRRVLLGHDFTTDLLLVRLKVAAPLVTDTSDIVTLRMLEDALHTIAEALRLAASRHRQLDLDPAEFGSGFRVVPVLQNEARMLDIFLYDTLSGGAGYAEVAARNLPEILVDTLILLESCTCDTSCTECLDHFHNQHIQDRLDRKLGAALLRYGIFGEEPRCSPPNVQEVTLSQLCASLELDGFRCLPGGMPEAPMLVEHGGHRMALGSFPGLIGRPEFVHAVNNAQNVHGYLALNEYLLRSNLPDAHQRVRSFFR

SEQ ID NO: 24374 - protein, 409 aa, Pseudomonas syringae
MPKGDAVIIGVNLREANLKRKLREHLHSLGFTKTDGGALRPPGNGKEAIRTLHSAQREERLIASESFVLRAGGKLMHHFASGSDVNPEKISPVLERVSSGTWQSDLFRLASLSWSVPVSNGFGRRLRYLVWDQSNGKLMGIIAIGDPVFNLGVRDKFIGWNSHDRGARLVNIMDAYVLGAIPPYNSLLGGKLVACLLRSRDLYDDFAATYGSSKGIISQQEKKARLLAIVTTSSMGRSSVYNRLKLHGTEYLKSIGYTGGWGHFHIPDWLFTELRDYLRYKDHTYADQHAFGQGPNWRLRTTRAALTALGFKDDLMRHGIQREVFISQLASNATKILHSGKGKPDVSSLQSVNQIADMALERWVLPRAIHMTNFKYWKSGDLIDLFGNHAQLLRAQVEQEKLLDATQRN

SEQ ID NO: 24375 - protein, 554 aa, Pseudomonas syringae
MDYAINKVTNKIESAEKAFGGGFYVCPICRARVSHCAGLKRKKYFAHYPGTGTFECENFALGQYGQGTFSGPLAGLTKRRMDLRLKIERGQNRAAWYLELTLPSSRACNATVTIDVGGRLQNIDMRGMVNGFRVMAELSTDDFRIVSFEGTPDRFFVESVERECRGLPSLGATVFTASGRGGNIGFPRAHELRGAETYAVLWKEPAFPGFPNELVPERFQSRQGWTLALITIPEAPSEECIEWLQAFTGLMVNPSVPSISTVWPFLARNASVNAVECTNSSSVVLAASMMPVSPGDAGPNMLVFGGDNRISAMGVERSPALFALTPGGQTHFRVAKSERSETEKLFLRTLAVRPVSDLPGLEMGFSTSEGVHLVVPFGTSKCKALVDSARQGQATLEYLAIPPGITGRLHAETRSTFVTVQLAASDIPAHHCAHQRLLSPPIQTIVIDYLSDSSSHIDLEFGGFGRMRLTGSPLVVQVKRADLVLDHLVRSRLRSFLVQLQAGSTVGLFASDSSLVRAFCALRPPPELLPNYRVLASELLACGFEIKHSKGVSL

SEQ ID NO: 24376 - protein, 630 aa, Pseudomonas syringae
MSYQYGQEARERISAFGQHKIAEFIEEVPHDYRKGYCDRQPAISGFRRGSPPEFKEKQRRLIGHIVHPQGGQKGDADWKTFANFWVAWAKHRLGVEFPPGDSSTPENDAGPIFLEMIAGKFPDAPREVVERLIAFSCFPDHSDTQTALERFRPASTLARDRMIDALPGRLDKIEGYFEIAETAAEEVAEQFELLESKVSVLADSVDDVKAWIQRSTSDADDLRSRVDEAYKRTEQLIQTVQALDEMGRNTSEALAASDEKTELIGQKMSALSVRAEAWDQTSDQVSDLKALVEQIKSQAQEWGKTAEAVGVLSDRIEDLQANLDQLGTGPGLRSPQYRLLEIDALGPLVEIHSVENAQDLISCNLQACGIVKGAAISTARLILAGLAAGQLVQFSGSLADFIADAVAAAIGGPTFHEWRVPVGLMSEEAASDCLEAVADNSGCLVLKGANRSAFEIYGNAIRDIVIRRQLSVATHHKLALVCSWVQGPAAFPDGGTLAELGPVFDTDSLPLRGVSSRTPILKYGHLARNTWQLIDGFDDETPSTLITDLRELLAESGFRPGNLWTRSADRAYLQLRATPGGNEDGDLHAILTYWAGPWARASGGPFDAVATIAERIVVQRQAESSHFEGV

SEQ ID NO: 24377 - protein, 344 aa, Pseudomonas syringae
MRWQAVSGDEAKRVIAAGIGCKVSGEGLRISAISECLRAASYLCSVPLTTDGPWEPAVSLSLTSLVRKRLSPIWENLTEDTDARPGVLSVLESLGELGDLVRGERGWLTPRPRAISAACGNAVIIGGGPSQAFPLGVQTRACGRARLVTMSMCDGWLDIDDPRDWIGAPMEGLETWSNRLLREASQRFGPPPDNLGDVMIYLNLKWVGLTDMPSIEGTHLAKYQAGAMTCYFLGAFYRGRLQRMTSIPSQDARRLRFHFDQQIGRPTTVEAETFQRFVKLRLYRRLPAEEAKTLLIGWEMSVPPGSHPGLRQYVLPIEALPIVRSALNGLGIVLFERLGAEGGI

SEQ ID NO: 24378 - protein, 1851 aa, Pseudomonas syringae
MSGTSTTADSTGVHETAKGLADSLRQYIEAQYHIRDEGLVRERHALLQADETIAQKPYVEATQVYKVGDSYEALPIPQAASAALSKLSVMGLGLYPRPYEHQSQALAAFLGKEAADLVIATGTGSGKTESFLMPVIGTLAVEGEERPESAALPGCRAMLLYPMNALVNDQMARIRRILGNPDAANLLKQSRKTPIRFGSYTGRTPYPGRRSAERDERFIKPLFEQFYKKVAGVPAVQRDLARIGRWPSKDLVGFYGDDAVQTKTYASGKRAGKEFVSKNWKGRLKTQPGDRELMTRDEMQTRCPELLVTNYSMLEYMLMRPIERDIFEQTKDWLKCDVRNEFILVLDEAHMYRGAGGAEVALLIRRLCARLDIPRERMRCILTSASLGSGETAALDGERFALDLTGLLEESERRFKVILGTHEPRSSERSVTADQIDALASFDLDAFQTITNDFPTAAKAAMALGSQLGWETFIDNDHPALRNWLYENLSGFGPLEKLIELVSGKAEQLSTLSRKLFGETPVRQAERATDTLLALASHAQRVSDGRVLLPTRLHLFFRGLPGLYACVDPNCSRRLADHHGPTTLGRFQTKPSTQCACESKSRVFEFLTHRDCGAAFVRGYVSEDMKFVWHQPSGPLSDGGTTALMPIDIFVEETAHPRSRHKEMWLHMATGNLTDVCPVPQVGFRKVRVPDKPVVGDDITFDNCPVCTRRIRNARGEPSKIMDHVTKGEAPFTTLVRTQMARQPASRVADARHPNAGRKVLIFSDGRQKAARLARDIPRDIELDVFRQAIALACSKLSNLPKEPRPSSVLYMAFLAVLTEFDLPIFDGADARKVEDAIALFKRDCDSELAEAFEQNSLPQELPSRYKVALLKLLCSSYYSFTGTTVGFVEPATQKLKKIRQELSAAGVLLSDNDLRALSVSWIESLLQEFAFDKTIDPAYRYKAAGYPKQPWGSTGKFDKPLRAPLVAHLGVTETVLDSIEATFRKHLAEEESGVWFLSPNSLSLVVDLDHVWAQCSQCTALTPFSLAGKICLACGSDSALPVDPATSAYVNARKGFWRQPVWEALQPGARLSNLSVEEHTAQLSNRDRNKVHATTELYELRFQDVLIDAKDRPIDVLSCTTTMEVGVDIGSLVAVALRNVPPQRENYQQRAGRAGRRGASVSTVVTYSQNGPHDSHYFLHPSRIVAGPPRTPEIKVDNAKIARRHVHAYLFQTFFHEIMAQTPNISVEKTSLLQKALGTTQDFFFGNGDIGLNLDSFESWVSRKVTDEEAPLKSSILAWLPPSLDTRGFTSIEWLVDIAVTLIKRLRELAGELPREMSATVGVEIDDVEDSDENETDGVMPEPVIEQKELLEFLFFHGLLPSYAFPTSLCSFLVEKLSKVNGMWEVQTLQRPQQSIAKALSEYAPGRLIVIDRKTYRSGGVFADLPAHAVNRAAPLFESAKPHVHCKSCSFVRNPNKTGAGGNGGICPVCRGELTEERMILPQVFGPERADDLPEDDREQEITFATMAQFPQAVDPENFSFLDLGPNASYTHATDQTLVTVNRGREGAEQGGFSVCVECGHASVYDQQSSVGIHDRPYKLLGPKGTPLTCSGQFAKVLLGHDFKTDLLLLRLRIGEPLATNTVDIVVLQMLEDALHTIAEALRLAASRHRQLDLDPAEFGSGFRIEPALQDEARMLEVFLYDTLAGGAGYAEIAARHLPEILEASIELLEGCSCETSCTECLNHFHNQHLQKRLDRHLGAMLLRYAVLGQEPVCSSPGKQAVTLFQLRASLELDGYRCTALDDDSMPLLVERDGRRVAVGCFPGLINTPEFLHPVASAVGVNGHVALNEYLLRSDLPGAHLKVRQGFFGS

SEQ ID NO: 24379 - protein, 413 aa, Ralstonia solanacearum
MPSGGATVVGVNPREANLKRKLRAHLRSLGFTRSEAGVLQAPDTGKGAIRSLHRAQRQERLSANQAFIARRGASLMRYFASGSEVEPQRISPVLERVSSGSQHGDLFRLAALSWSVPVSNGFGRRLRYLVWDQHNGKLIGLIAIGDPVFNLAVRDKFIGWDTHDRSARLVNVMDAYVLGALPPYNALLGGKLVACLLRSRDLYDDFARVYGSTTGVISQEEKKARLLAITTTSSMGRSSVYNRLKLDGIPYLEPIGYTGGWGHFHIPDRLFGELRDYLREIDHTYADQHAFGQGPNWRLRTTRAALAALGFKDDLLKHGIQREVFISRLARNATGILQTGKGRPDVAGLLSAREIAGLALERWMMPRATRMPAYRDWTTEHLIDLFGSQARLLRTQVNASYLASRPLRSAVGF

SEQ ID NO: 24380 - protein, 477 aa, Ralstonia solanacearum
MELRLWIPREADRAAWQLELILPAARECQATVTLDVGGRFQTLSMRGMGQPRRVGAEPSVGPYRIVDFEGKPDPAFLNGVERECPGLPAMGAAAFSASGTGELKGFPRTNVLRGGETFALLWRAPETPDFPDELVIEKLRGRKEWNLALVGILDEPTEPCIAWLQTFTGLPMAAPVPSTLPVWPFLTRHASINGIDCIRSDRLLLSAARMPTARCGLGPTMQAQSGEVKLAAVGVEPSPALFALRPGGADLVRVTEATDPDSEAFFSFSLHVDRAVPPATVELAFRTEQGDRQVVALHETRCGGVTTEFRRTGTFPEYLSMPAGTTGTLRIEGRDGSSMVALHSGSDAAPHNHRLCLAQPDALAALVAAWGDFACQVELDFAGFGRLRLARFASVPATSAAPRGLPPALRARMRAFLAQLQSPTSMAVDDVALIGAMIAAQRRQTFRPSLIPHYRSLVKALRASGFEIERLEKGVKV

SEQ ID NO: 24381 - protein, 623 aa, Ralstonia solanacearum
MSFQYSKEARERICSLGPAVIAEFVDEIPQGVRKPLYDRYPRAQGFRPGRAEFKERQKRLIALLTHPQASPKGAPEWRHFAYLWEAWGRHRLGQSLPREDDTAPAADAGVTFLKALAERSPDVAREDVERLFQFSGFPDHPDVGSMLARFRLSSVLARDRMIDGMPARLANIEARLKDIDSETKATTRRAIQLETTCAGLARSAPESDRGVDERAAELSGLREALENESLRGGERDKTIEALGAAGGQLIAAVKATNDRLATLEKSLSASKARHDELAGIFAEVGELRKIVDGLAVQIDGWAGWANSMADVTRRFEAQEASPTFQQTVSESGLRARLVVRRPNEAFIDLHRVEDACELIASNLQATGVTRGAAIGMARQMAAALTAGQLIQLTGSLADLMAESVAAAIGGPVHHEWCVPVGLVSDDPAADCVRSLTGNSGCLLMKGANRSAFEVYGNAIRDIVVRRQFGATDQGSLALIATWAQGPATFPDGGTLAELGPVFDTDTLAMRSAFARLPEKRYGRLAADDWAQLEGLDAELPAPGELVELLDEAGFDGGALCKRVMHRGYAMLRCMPQGTQDADLHALLMTWAVPWAKATGGPAEGIRQLAERQFAERRTEEDAA

SEQ ID NO: 24382 - protein, 371 aa, Ralstonia solanacearum
MGRVMQWQATSRDQARQIIAAGMRCALTGEGLRLSAISECLRAMSYLCAAPTDSVGLWEPAASVRLTGMVRRRLVPLWPELAGEGEETQPSVMAVLNSLAALGDMVRLDGGRWLASPPHAVRAGDDVAVLLGGGPLEALPLSLGSHAMVAGRIRFTKLSAHEGKDGAVPLWEAKEWIGAPADGLQVWCQRLLAESAARLTDAPSDIGEVFVYRRTEWIPLADPSFDSSSRLSSDSTSLPERRGLMLCRTPIGQSVSYFLGRLAKGRLVRLVTVTAPDARRLRFGLDASDSLPLRVQAVARQGLMQLRLPRRLPERESKALLLGWRIPAEARERPGIEHHVFPASVFPIVRKALEGLHIVVEERVDERKGQE

SEQ ID NO: 24383 - protein, 1853 aa, Ralstonia solanacearum
MSMTTKPIEAAGVHETARSLAESLRRYIEAQYHIRDEGLIRERHALLAQDATVAQIPYVEATAVYKVGDSYDHLPIPRAAIDVLTELSGMDVGLYPRPYEHQSQALTSFLGEEAADLVVATGTGSGKTESFLMPIIGQLAIEGAQRPESAALHGCRAMLLYPMNALVNDQLARIRRLLGNAQAAEVLGRGRTRPVRFGSYTGRTPYPGRRSATRDERFIKPLFEEFYCKVAGKPKIREELERIGRWPSKDLEAFYGQELVKSRTVASGRKAGQTRTANHWDSRLVTQHGDRELMTRDEMQERCPELLITNYSMLEYMLMRPIERNIFAQTRDWLRADPRNEFTLVLDEAHMYRGAGGAEVALLVRRLCARLGIPRERMRCILTSASLGNGLTAQADGERFARDLTGLAPTSSRRVRVIRGTPEPRSASRAATEEEAQALAAFDLQAFENAAADLGAARQAATDLAACLGWQAPVEGDHASFRDWLFHTLTDFGPLESLIAAVSGNAVRLDALSQTLFPGCPSATAEQAADALLALGSHARRQADGRVLIPTRLHLFHRGLPGLYACVDPQCSAKLVGGDSPTILGRLHTKPLGRCSCTSQGRVYELYTHRDCGAAFVRGYVTAEMDFVWHQPSGPLSGGQTVDLIPVEMLVEERVHPRSRYKDMWLHVPTGRLSALCPPNATGYRCVRVPDMAAAPGADMLFDECPVCMRSTRGGRDEPSKVMDHVTKGEAPFTTLVRTQMDRQPVSRPIETAHPNGGRKVLIFSDGRQKAARLARDIPRDIELDVFRRAIARACRRLEKYQEPRPTQNLYIAFLSVLCEDDLPMFDGEDAMKVAASRAEFMRDCEGDLSQAFEGFSLTEPVPSRYRTALLKLLGSTYYSLSGTTVGFVEPAKVKLGKLRESIKLIGLSESDEDMRALAVAWIDGLLQEFAFDSSLDPTPRSKAAGYYKPIWGSKGQFRLILREALARRPQWSKQSVEAVEATFREQLATEKDGAWFLAPNALRLRIDLDHVWVQCQDCTVLTPLVFGQSTCLACGGDSVRLVDPATSDYIAARKNFWRQPVRETLDGGRLLNLSVEEHTAQLSNRDRSSVHATTERYELRFQDVLIEETDRPIDVLSCTTTMEVGVDIGSLVAVALRNVPPQRENYQQRAGRAGRRGASVSTVVTYSQTGPHDSHYFLNPAYIVAGEPRTPEVKIDNPKIARRHVHAYLIQTFFHERMAQGDNGPSTHTSRLEKALGPTRVFFHGAHDTGLTLKEFDAWVSRRVLATDGDLRASVAAWLPPALDTGGDPIEQWLATTAEAFLATLRTLGKKVPRPAVVQDSATGQQPDSTVGEESMDATANGTIANSQLEQEELLEFLFFHGLLPSYAFPISLCSFLVEQIGRNGNGMREVRTVQRPQQSISQALSEYAPGRLIVIDKKTYRSAGVFADVPVSEMSRARPLFANPKRLVHCEACSFVRDPHATQAGGDACPVCDATLMEETMIEPEVFGPENARELPEDDREQEITFATMAQFPQPVDPEAFTFVKCGPNASYTHATDRRLVVVNRGKEGSQVGGFSVCVECGKASVFDAYHPAGGPHERPYKMLDARGTDQQCKGEFRRVFLGHDFSTDLMLLRLRLAAPLVTDTADIVVLRMLEGALHTIAEALRLAASRHRQLDIDPAEFGSGFRIVPALQEGARMVDMFLYDTLSGGAGYAEVAARNLPDILDATLTLLEGCSCDTSCTECLNHFHNQHIQERLDRKLGASLLRYAIRGEEPHCGSPAAQAATLSQLRASLELDGYCCTEGGAPNMPLVVEREGRRLALGCYPGLLGRPDFVHAVKVAGGVHEHLALNEFLLRSNLPDAHQMVRNKFR

SEQ ID NO: 24384 - protein, 652 aa, Rathayibacter sp. Leaf296
MTESKYLPLSLPAGSSRAERAKYLRLCRLLAESPAPGSTHAQWLERAGLGDTYAQPALAAAAHTAIDLVDQGWAVQVDRLGPLFSPPAAHGDRDAEKSRIRAQEHLRRDEQLQRPSVRRFVQGMEKPHEFRDSLVSIFDLMRDGRDLVDALDRDPTGRSAIRPYVQVVDDSICSLTGFRLHDIWRYFRHTWSNAYATVPGRSMPILVRDAATPHHSVIGLAAISSPVVQIAERDSWMGWETDEFLHSIQNEPTDELAIWVSRRIASQIDAIYVEDLLRGGVLQPTDIVKPTQELVARLKADAERYRQRHHRSTTIREVRNIQRDAWVARAETDLFRSKRSAALAEALDIHMALGSYLRPHPSAEGLVAALADRRAYAQLRRLIRRARGERVGTVIADLTVCGAVAPYNGLTAGKLVGALAVSQTVLAAYKEKYNRPSEIASAMAGRPIVREARLSLISTTSLYGTGSSQYNRLFWSADVVGGDEGTRMGFHELGRSRSFGTSHFTDETVEALLRLSSLRDSSVRVNSLFGEGVSPRLRKVRLGFAALGWPSNELLKHGRQRILYGVPLVRNLRDYSLGIDDDPEYLLSPFLPDGDQRIAEWWLDRWALRRAERPEIRDAMVRHRLTRPVTHGARVQLPSEDGDWPKLAANAH

SEQ ID NO: 24385 - protein, 361 aa, Rathayibacter sp. Leaf296
MSMQRLTQTDLEATAVKLLGLDHEAIGLLSIEGLCTSIRRAASLLCPATPRQLVDAVLEVLRPLSPDLKRDLVAEALDLVVSVGDLLELRSVESGVRQLYLAPPSYVTVRPSRHLLLGVRPNASPIVDESIVGAPVEYEAHTRFLMLETDNAAASLVAAGLHRLTTEQWARVPREEPASSLIERTARLLGQHQMPGEIQGLEIIDPTTQVQYYVGRWRELTSHDEGMLVGRRPQAYGAPVWCVLYVAGGIPRAVLDFPVDSSVMPGWDEARHLQAAIDHHRGQPQVFRIRSAGLPDGSRLLDLFAPLPSWAERYITLVGIPMSRSKGALLTYRVPLDAEDSLTGLLSKSLWMTRIKEVQGR

SEQ ID NO: 24386 - protein, 1860 aa, Rathayibacter sp. Leaf296
MTGRSLTIAQTADEIRNALREYIEATYHVGHPSLIRQRRVLLDQHGNTFQTPFLESTPRYTPGRQFADLTLDKAVLDLLARLTSTEHNHAPLLFDPPYTHQASALEAAASGRSLVVTTGTGSGKTETFLLPMLAKLAKEAANRPKSFAAPGVRALVLYPMNALVNDQLGRLRLLLGDGRVTSQFTTWADRPARFARYTSRTLYPGVRTAAKDRTRLKSLEKYYIALLDEAAKPASPRQKRAAQLVGELKARGKWPAKPDLKAWYGSSGQHWVDSKTGAFQRAVMLPGDAELLTRHEVLAWPPDVLITNYSMLEYMLMRPLERPIFDATRQWLRDNPEEKFLLIVDEAHLYRGAAGAEVALLMRRLRARLDIPADRLQVIATSASFSGAEKAQAFAAQLTGKDVSDFDAVTGTLDLRNSAEPGSLEDAEVLASVPMDAYYNAETDEARTQALAPLLKYREVAHDAETSSSALLFRALNGYAPLSLLINKTMKQALPVHTLGAHAFPGIDPTQAERAASTLIALASAARLKSDDAGLLPCRVHAFFRGLPGIWVCLDEDCSVDRGGIPKGPVGAMYGQPRSTCDCGARVFALFTCRECGATYARAYTDDVANPSFLWQEPGSAFQTASGPIAALEPIDLLLEEPSDDVGNAVLKELDLVTGRLNPHDLGDRWRRVWVRLQQDDGHQPDADPAGGQKQPGEFNPCGVCGDHALFGRTSVQDHQTKGDEPFRALVSRQIEVQPPGPKPADDFAPLRGRKVLAFSDSRQVAARLAPNVQEYSLRDAVRPIILKGWSELSKHPVAPTISLEDLYLVAMVGAKLLGVRLRPELTGTENFEAFTQVSESLERGALSDPAEFMQLYAIKDPPPQSLLRSLVPALTSRYYGFTSLGLASLRERGNLKNSVLAELVDIPGVATTEDEKLALVRMWLSLWIRPGIWFSAMSADWKGTKVQAVSGKFTKLTTWLGTREARRIFDAEWLPVLQSKFCQKVGDKYQLAARTVALDLDTVWGYCERCRSTQRHFPGRITCISCGADKVRSLDAETDEVFQARKGYYRASSRRALAMPPGEVMSVVAAEHTAQLNSSQSDDVFSKAEMYELLFQDVNIVVPAPGEQPEVAIDLLSCTTTMEVGIDIGSLSGVALRNMPPSRANYQQRAGRAGRRGNAVATVIAFGSADTHDDHYFREPAEMVSGEVADPVLTIDNVEIAKRHITAFLLQRYHQDRVPHIDPTTMPANLFEVLGSVGDFLSSSATLNRTDFESWLVSNAATLRAEVDDWLPSEISGDHRDEVLASLVTTTLHGIDDALDIRTAPTIAEPAPDQTPPADDKTSDEGTGAAGADSADEADVAEDSGEELSSQRARDKLLDRLLYKGVLPRYAFPTDVVSFHVFDEDRSTPYRPAFQYAPSQGLTVALSQYAPGKVVWVDKREWTSGALYSPMRKELSEAWNDRRIYFECQDCHYAIHTPWEQADRGRTDVCPACMGDRFGPGMNWLRPPGFAHRIGQPPGTSPDDAPAVSYATRAKLIADGPGNAQLWEQVNDRIQLNFDHQKLLVSNTGPNNEGYTFCTWCGLIEPTAMPTPLLAGTHAKPFPDKDPMCPGGRASRGLVLGTDFFSDVLLIRLTVSDPVTLRPSYLSSQVALRTAAEAITIAAAKHLQIEASELQAEFRPALTQWGGHGREAEIYLYDTLSGGAGFTQQVSQLGRKIFELALERLVECPAECEESCYRCLRSFRNRFEHTQLDRHVGASLLRYLLEGTLPELSPARVDRSVQRLFEDLDRSGADDVHFERDAQIHVTGIGQVVVPILATKSSGERALIGVHGPLTPKVAPTPELHRVAEETSERVKFVDDLIIARSLPNASREVLEFLK

SEQ ID NO: 24387 - protein, 679 aa, Rhizobium sp. Leaf383
MTSVKPDELAQKSRDPGPVRSFSPFLAPDEKKQLHSLLLVSDREPPTFAEALRDLARQYIDDGSSQKLRTICLLVADLVEQGWRVTIQDSDILFEPPGIARSTTQTVDDVKARVRLALQTARQRQLKEPSVVEFIRRMESRLSRSRGAKSSVLDLIDNGMELSKALADLQESEVSSRQEVLATIIDPVIEICEPGARCQHTGIKLIDIWRYFRHTWAHEYRPIPGRQLLILIRNAARPRHPVMGIAMLASPVMRVNVRDRWIGWLRDEAKLRLDKGNFDPVQLARSLQAQLEQSISSIRWDDLVREEEIAEPTEAAVLRLEQKAAGAAYAREIELRAHFDAQQDQDQPVTPFRGGVKSSTVLDADWLALSEDLLFVRKRAEVLAQLLFARQMFRAARLDQEPAAALEQLLAGRSGQRAIDIVLTECRKAGLSSRIADVSVCGAVAPYNELLGGKLVALLLASEEVRSAYERRYSNQVSVIASQMAGRPISKPADLRILTTTSLYGIGSSQYNRLSVQTKHSPHLKADIAWKPIGSSLTGGYGTLHLGADTANALRSVAQSRHFSRRINNRFGEGTSPRLRQMREGLNALGLDSDTILHHATPRLFYACELGAGAREALLGLSTLHVESEPAAAIADAWRRRWLDQRSRRPETLDKLRELGPQSVHASLRPVDSFDLLDR

SEQ ID NO: 24388 - protein, 356 aa, Rhizobium sp. Leaf383
MISFVSSADILTLSHRFLSVADDGTISTEYLAAAVRRLAGATCPCSPKTLMKVMVDSHRGLFSEMDVFADRVESVIDDLVSVGDLLELSDVSTVDERIMGTWLFAAPPGFVIHHGGVAHIIGISSDEQTPLPAAIRERVIVEGVTRRIAPNPPEDLGSLLSALGLREIPSAVWLSHPRRCSARDLIVRADGRLSSSTRMGEENGVRVFDHRMNSRSYRRCWEPLASQHGKFIIRRPQAYGADRWGYAEIADGGVANVFEFPDPGDRARGCDIAWRMMAALKTLQGEPIRYRSMESGDMSAFDFFFPVPDWARRTLRFSGREVVSRDCLLSFDVPVGSANAIHRFLNDMLFFEQQSD

SEQ ID NO: 24389 - protein, 1849 aa, Rhizobium sp. Leaf383
MSKTIQETIDSLHQSLKDYIEATYHISNVQLIAQRRNLLDKVGVTHQVPYLESTPRYQTGKRFEDIEDLPKAALAVYTALSSKKGILPILLHNPAYTHQADAIRHALVEKKNLLIMTGTGSGKTESFLMPILGKLAQEASERPESFKNRRAMRALLLYPMNALVNDQLGRMRAIFGDSRLTDLFRSMAGRPATFARYTSRTPYAGMRSRKKDPGKLGSFEQFFVEIERQAADPDAENYEQARILKGQLKQRGKWPAKPDLAAWFGEKGDDWIDRKTREFLRAVTLADDAELITRHEVQENCPDLLVTNYSMLEYMLMRPIERSIFDDTKAWLAENPDEKLTVVLDEAHLYRGAAGAEVGLLLRRLRDRLGISPERFQVIAATASFSDETRADEFGAALAGVPKELFAVVTGQHKKKPNEQVATPAECEVLASLDLVSFYDADPAKRAAAIKPFLTSRGIEPTGVVEKDLFDALDEFPPIALLINNTMKAAQPLAALGPRLFPGQHDADRALTSLLALGSVARETPDAAGLLPCRVHNFYRGLPGLWVCMDAACPEVDEADRSGICGKMYGQPNEQCGCGARVLQFYTCRNCGAAHARAHTDDVDNPKSLWSEPGQNLKMQGGEARELLDLDLLLEEPRHHGMAEVADYDLLTGQLNPDILGSKTRSVYIRKDRTTPATDDDGHVDTRFEVRGQFTPCAVCGEGASFGRTSVQDHQTKGDQPFQALVSRQIQVQPPGVMEPTGFAPLRGRKVLVFSDSRQVAARLAPNLQMYSTRDALRSLIVWGFGRLHEAAVLRQNLSLEDLYLAVMLASRALGVRLRPEMGNGETFAENEVDDAIADGAFGDDMRLAQLRMDFAYQAPPLSLLDDIVKTVRDKHLGLEALALASVRETVQKQKDILALPVIPGFAETGEEKIALARAWLRCWQREGFWLSKMPMSWYNRRSRGTSIRSRKSPFEAMKRLINDKNAAKIWTKDWEPRLRQAFTEDIDNGFRRLLGRTIALELEGDWVRCEACRSVHRPVPRIPRCLDCGSSEIKALDPETDPVFVARKGYYRAPVATVLRDPTDPPMAIIAAEHTAQLNAPQSEDVFSKAEENELLFQDVELTWIDRPKKVTAIDVLSSTTTMEVGIDIGALSGVALRNMPPGRANYQQRAGRAGRRGNAVATVVAFGSADSHDEHYFTEPSAMIAGPVVDPKLTLNNTDIVKRHIRAFIIQSYLQDRIPTVDPTANPDLFSVLGSVQAFQSGAGTLNRLDFGNWLAGNIVALRLRAESWIPAELDTSSRERLLSQMDVDCLSAIDDAVSYSPEAGQETTVGDDEVDEVPEVASEEGEETSPQMRPDGKLLDRLLYKGVLPRYAFPTDVATFNVFDRERSKSYRPIMKFAPSQGLPVALSQYAPGKQVWISGKCYTSGAVYSPMAQDRFDAWSNRRLYLECSECSFAETRPLDSGLKPGVKLDCEACGCDETFGPAHFWLRPPGFAHPYDSDEVTSPDDMPETAYATRAKLTMAFAGHDERWQKVNDRVRVMPDRTHLLVSNTGPKSQGYDYCTLCGRIESHLEATGLLRAPHLKPFPDEKDQTCAGAGTSTGLVLGTDFITDIALFSLRVVAPLKLKPARFETDVALRTVSEALAKAACNMLEIETGELMAEYRPALTPGGRSGLEAEIFLYDTLPGGAGFAAQIAGRSVELFERALSLMRGCPEGCDASCYRCLRSFKNKFEHRYLDRHVGIELLEYLVQGVCKPFDTTRVRNSTKVLADDLARHCPEYDVDLFEIIEVPGHGQVEIPVLVSDKNGRRWAVALSGPLTERRAADPLIAQMQVDPDAMAVEVVNELLVRGNIADATRRLRAQLEGAQ

SEQ ID NO: 24390 - protein, 679 aa, Rhizobium sp. Leaf384; identical to SEQ ID NO: 24387

SEQ ID NO: 24391 - protein, 356 aa, Rhizobium sp. Leaf384; identical to SEQ ID NO: 24388

SEQ ID NO: 24392 - protein, 1849 aa, Rhizobium sp. Leaf384; identical to SEQ ID NO: 24389

SEQ ID NO: 24393 - protein, 712 aa, Rhodococcus aetherivorans
MAIIPGTWVIGKVDFRTEQFAVVAPVYENDGTGWRPADPNDYPTRGRIFWWNPRIDVRSGSVIGFELAEGRGEPDRFQVTNADYLCPVFDYRALPYDEALERLTTGNLRVSDEIAAGKDVFVRCKDDLLLGPLAPKVGREHFFVPPDSLRLERVPYRENEDAVFSLSDGRCYCAPTSPVTGHLDCRPDAAVLRTAIRDAVTIAEKSSTGIPDFFATKALMQSAADLLREGERLDDRQYKYDRIVRALKICTDSDEVRTLAEEVAELLLDHPSIKARIDSVSAKRIDNAVAAARTQVAKDIEKERADLALLRDQHSTIEAEIAEKRAELDRAKRELGKATASLSQQLESLENSVTDRVAGLVDDATDLLTESVLLRALGVGSAPSDGPVRPPYSTADPFSGRRARSAPEEVPPTQVLHAAAESVGVNPTVLVRVHAAFRAGLIPIMTGNGGLAALSAYATFACGLRLARLPIAHDFLHPVDLLGIRASNPGTTRMHTGLLLGADAGVREGGAGVLVLESFNQAPTESYLMPWLQAPDRTIAVPDVAQSLLGVLHVTPDPDLLVAATATAGTTTAPLSPDIWGFAVAIDVPSAVPGSSPRVRPTVLERTPLPSSPRIEKMIAEMETALSSYCEVDDGVVGSARRLASGLAGFQSDGGTLSSIVECVLIPALASSLSGSDLAAGVDTAAKFDGSKSPDRRRALHHLARRLQRRFA

SEQ ID NO: 24394 - protein, 345 aa, Rhodococcus aetherivorans
MRTALGLAPGTPSAELSYELLRAVAWASTGGRAPVSTRTLLDRAVGLDAALHDGDVDATARRHLLRDRLEDLAAVGDLAPLPRGQWLAVPGCIVQLDAADPDGRLLVSGMPVRHLDTRLRNAVAPDGARRVLNRRISAADVGMPVVGFEDWARRPRRSLRDWTESVLADGLGAIPEDVEVSALRFYVPAHAHPRARQSERWFGADPRLEGRYLARADALGGWTQFFVAELRAGTVGGVREQDPHDVRRLMYGMDIRAGNPTAARWVEAKHEVQLRPTSPLPYAETRVLTALADSRTDRGWVLTRHVGTVRRVLTELGVTLQTGPVQGAGSARRPRPTTRATPRRS

SEQ ID NO: 24395 - protein, 2149 aa, Rhodococcus aetherivorans
MGALLPTLQAEHLREGLTDYLATTFALTDPDARGALTDFIGDPDNGMFKGPYVRLRLPFAPAGGNWGMHLDWWPTGFTPYGHQARAFERLSTKFQDRPQPTMVTTGTGSGKTEAFLLPILDHVLRAKRAGVTGMKALILYPMNALANDQAERLARLITTNSELGGVTAGLYTGEHSTGGRTRVSEDGLITDRALMRDAPPDILLTNYKMLDQLLLRPADARLWALSADSLQYLVLDEFHTYDGAQGTDVAMLLRRLGLALKSYWTNSSKVTDSDRARPLGKLTPVATSATLGSRTDPTAMLGFAHTVFGERFDEAAVIGETRVGVEQWLADRRTDPLYRPIDPVIADAVDRIHAAAAADHAGRDANAVLARAVLAELFERTDDIATDRSLTEADLKIVSAPSEVLDLLKGHPLVAAVLTHSTDATSLADLAARVFPAAPLERDARRTTALRQRFLDHLLALLSHVRAEVGRAALDVHVHLWIRELSRIDRAVSPTTSYAWSDDGDTEGGRELYLPAIFCRHCGRSGWGARLGPTGNSLDVTDDAIRADHAAGLARFRALISAPTEAQLDRDVEGLRWFHIDQRDILAAAPDPDSDEMLEGRVLPILTLTGPDSDEKSTKDVCPACGADDGIRFLGSAVATQLSVTLSNLFGDRNLDAGEKKALMFTDSVQDAAHRAGFIQARSHSLSLRSALRGAVAAGPLDLTELCQSVVSRAGDDPVRRYQLLAPDVVDRDEFSPFWKPGAHHSSRRAAERKAKRRLQFDIDLEFGLQSRTGRTLELTGSVVAEVYLGPPGRAATLGRLAAAQTEQLQLRLTDGFGAPAQSAMFDDPRGGDQLSFADDPDLPAADSRALARWVRGTVERIRTQGGIHHEWLRRYLEKNANRYHVWGGRPRGEGMPAFPKGRSAPAFPASGSGSRSLPEGFDTVTSPSSWYARWASRCLDVSPYDGAFLAKALFAVLTEQRVLETVTTDTGTTVYGLQPTTVQVSAPNLEDLEARRHLLVCEVCQTPAPGSATVVGEMEGAPCLLVRCPGTLRRAPRHENFYRRLYDSSEMKRVVAREHTSLLPTATRLEYETAFKTAGTDPQAPNVLVATPTLEMGIDIGDLSTVMLGSLPRSVASYLQRVGRAGRLTGNSLVLAYVRGRGEHLPKLFDPLSVIQGDVRPPATFLNAEEILQRQYVAHIVDRFARDPERTAPRDARAALAGFDDGTWMADLIAYAEAHATALSSAFLDQFGGLLSKDAEAALTGWISPGEDEQPSGLARHLRDTVHRWNRDLAELTSRRSAVEDRIPELEQKASSPAATDDDRRALRTAHGSRKLLGAQIRSITDSYWISVLEAYGVLPNYTLLDDSVTLDVGVSWIDPDSSAYMGESMSYQRGSRVALTELAPGATFYAQGLAVKIDAVDLGTGESNVQTWQVCPQCGWVAVTPAGAQPKPVSTCLRCHNAAIADVSQLLHVVEMQRVSAEVRRDEATINDSRDDRHREQFTVAVAADVDPAHVGRAWFAQGRDFGVEYLRRLDIRWLNLGKRASQGRKRVVAGQESATGLFRVCASCGQLDTAAGRNNAHEHRTWCRLRTADTEDVREIALARTLRTQGVLLHLPPALEYDNFAHPSLSAAILLGLRHVIGGSPEHLDVATISDALHAPDRRALLIHDTVPGGTGYLAEFADPGKVWEMLAAARKVVRECPCREEERLACHRCLLPFAPPHELDKVSRTTALKILNDILDAGAHSEPDLDDWTAAIVEDAPPTPPGSDESFLEKDFYTAFVGRLRGMGAAVVEKPGTYGPSATITLPGKKVRRWSLLPQVLVNNVKPDFVVQTTDSAIPPIAVFADGRAFHASPECNRVADDARKREGLRESGYLVWSFGHEDLQRFKNGDEQNPPWFDESASRVVTTNFHVRPGLLKLLVKDPVTQLLEFMVEPDVDGWEAFSRAMPYLFVRRDNRAKSVAETVLESALAALDGSPPFARAGSDVCWSLVDGPLVVTAAVTSPADRSVTAVLAVDDRDEALDSTDGRAWKEWLRLSNWLGIAGRHRITTRTLLAEAATAPAGPAAPTGGQPLAPQWQALLDDTVSEAERTLVQALAAEPNLPVPRLGYETDDGDVLDFAWESARVGVVLDVTETETHTMADTGWTLCSPDVTEIVAALRKNGVL

SEQ ID NO: 24396 - protein, 608 aa, Rhodococcus qingshengii BKS 20-40
MILGPFHVKIHGDQSTLEATQPERVRYWPAESNVVALPDGTVYVDNLLQSASIGHADCRSDHDVLRQALREAVGLVGDAIEDRQYATSKKALEEAARRLRSGENTAERELVVQRLTRALDICEDSATLRALAQQLAEQLLIHPQIAEELAVRKAQVEAEVRTKAKEEASAAARHEIDLAFASQRAVLEEAQTQATRTRAELEQVRVEVQKAESRRAELQTEIDAAELELTEAKASAHGQLHELEDSVRHQVDEILEGTSSALAQSVVLRALGAGEWHTKKQLSGTTTVRLPQSAAENPYSETVSEYSTVADESLGRHLSRAARSWGLSRLVLERIHASVRAGLVPVLTGNGGMTALRAYAAAVFAGRIAVLPVAHDFLHPVDLLGVQASEPSIFRPHSGLLEAAIEATSGKSGMLVLESLNRAPTESYLLPWLQNQPQQINGPFGSSVELHRGLAVAATAASGATTAPLSPDIWGHAVAIDVPNYPRTGVVSNIAGLAEPTALPRDAVREAKTQLTDLVDGLDENWPIDPGVFDTANRFAAGLAEMQSTDEIAISVVACVLLPALSTVLSGDDLDAAAEQIIERLDNLEDGHARKLRTLTLRLHGRFA

SEQ ID NO: 24397 - protein, 347 aa, Rhodococcus qingshengii BKS 20-40
MSGIPLHVHSADPASARAAIYASLSLPLSIGDAELGYETLRAVAWSSTQGRTPVHVRTLLDRAMDAHMALTLGIQGREDETVREDLRSKLVELSRLGDIAELDNGRWISVPGVLVHVPGNEPDLLISGIPLCRLAPHTRRAVECQGAARFVQDAAAEDAPNLPRVRLEDWSRRPLGKLEDWTRAMLATPALPTGTILKAGMELYVPSQARPGAYQAERWAAPGRVPDGTYLARRTLAKHWRSYSLAGVESENITGVWEIDPLLARRLMYGIDQLDHNPTVAQWDENDQGVALRLRNPLPAPEARALLALARPHSADQPGSWQIDVHRSAVRQLLDDLAITLTSGRRK

SEQ ID NO: 24398 - protein, 1805 aa, Rhodococcus qingshengii BKS 20-40
MTDIDLGASHKARSIRDSFQRALEATYPIRDELIAAQRRELLEQPGVMAQNPYLEITPTYRVGTPFADLKIPPVAREILGRVQGLSGGVGVYPPYLHQSDALERFFAPGGGDDLIVATGTGSGKTETFLYTILSSLAIEAAERPQSIAQNAVRAVLLYPLNALVSDQTARLRKLFGDPRVAQMFTELGGRNPLFGMYTSRAPYPGPRTAKRDANQIQLLVSYYEQLQRSGSTLMDELRERGRFPAKDIAGFAAPGPGQYTTQPGDRELLTRHEMQTIAPDLLVTNYSMLEYMLLRPIESSIFDSTSQWLASDERNELLLVLDEAHMYRGAAGAEVGLLLRRLAARLGIGRDRVRCVLTSASLGSGNGDEETVAFAQALTGTATRRRFTVVRGAREEISGTRPATRDEAETLANVDTAALAAAHDTPTALKALDRATHIVCPNAHADMTAAELRCLMGAGLANFGPAMLLVDTCSGNATELAALAAELFPQTDVTTAERALDGLLALGAFARRPEPGRSQQPMLPARVHAMFRGLPPVYACIDPQCTNRVFPDPSQSSGRSDSEPILGTLYDSPRTQCDCGARVFELITHRECGAAYLRAYSIDRNEPRFLWHEPGGLIGLTAPLAEIVVFIDKPHPKRMHHMQPLHLDIATGRVLPGELADSQTTRVVWRPKPGKSQDRDDARFTKCPACLGAAERKNYSLISGLATTGEKPFAELVRHQFVSQHATLTPSDENPNGGRKVLVFSDGRQKAARLARDLPREVADATMRDALVLATHLASSINSGKPSSLRRLYKAFVAVCAQHHLTFFDGKDQENLIDQCKKYLDRYEGDFEYACDEDWSPVPLISYRAALHRQLCDPASSLTAAAAVVLAPTPAARKQLVKKLSQANIGIPDEELDGIASAWLTLMLADGAIDPQLSNEVRRKTLPYFAAVNHTEAHPTFFTELATRLQIPQSETLELRAALFDALAGPVTADGTPGQVLDLAHLSIRLAMEDYWWHCQDCGRLTLLKLAGGCPNLACGGKQLELRAPDHPTFRSMKDHLRAPLREVLSGHRKPMHINAEEHTAQLSQRDNRDVHATTEKFELRFQNVRIDDAPVVDVLSCTTTMEVGIDIGSLTAVALRTMPPMRENYQQRAGRAGRRGSAVSTVLTYSDGGPHDSYYFHNPHPMISGPTSKLRVKDDNPKLARRHIHAFLLQTYFHTYIGSLMPGAVSGGIMSSLGAADDFFSDQSQAPTFRSFTSWVSTQYGSSTAPGVVSVAAWLPSRLFGDCTSTEQLEGYVAEVAANFCDRLEDLSKPDRRRGDQTALGELQLLDLLFDEGLLPSYAFPTNVCSFFIQDNTGGKVVSVERPQLSKQQALSEFAPGRTLVVNKKTYRSGGIFFPSDKPGSNRTPAAEHFTKPLSVYTGCTRCPYVRMDDSLPPEGTSQDCPVCTAPLVAQEFIDPPGFYPQGATDLSEDDVEQVYTQAGTAQMPEFADRGALEWFDGPGVSMRHAFHQDCRLVVVNRGKNAAGFGVCEQCGAAWPDDDIPGRHDRPFRLDNFQRRGSTGCSGHVRGSLFLAHEFLTDVLLLQLHVVPPMGLDPRMPWTNDALTTLAEAIALGASIHLDIDHNEISAGYRLTTPDTPGAAATVEIFLYDTASGGAGFSADTGRDLRAVLQRVRDLLAHCPSNCSRSCTRCLRHYRNRFLHTLLDRHLALVLLDHALEGAVPAMPDQAPLLRPLARYLELEGWQLRHDSFPDQALMVQKENVRRTVVVYPALLDESHVRTISHIDTRSDERITFIPDYAAARDLPAVYRNVAHGTPWGVLH

SEQ ID NO: 24399 - protein, 515 aa, Rhodococcus ruber
MKHAFDLALERLVSAADAGRRRAYVCPCCCGQVHLRSGTTKIAHFAHNPGEGTPLCEQYHPGSGNYGSPGGFYGEAGTPLFLHLHEDGTGWTLFFDLEPLSLAESRRSLPSVLAFEGLELHRPGSRPRKLRAESLWPGAGRTTVKVEPSRQHTTVNTVGQWPSGIRPNRWRSTLTGLSPNGVLFVPYRGGTFRRYDWATPVHWGDRVVLVGPAHCAPPGALDVVSLSTTSTAEGTWHAWLVRLPRSFDLTAYRWLSKFGITIGQRREKTRIVSPPIEYGAGGVPRFLLGDPIVVAPSPPAGVLAAESYATMNAKSLGRRRVAGSAPAYAVTAVESGALRIRTDAERDVARVDIVTEGDIELDISAAVWCVRHADGVLLPYTSHRFATRDVAPVLHSDIPALRYTVTAKLPDDRTESVRSVGSSAATDWIRQRVATATGIEIEAGNLGFLRLELPRSGRSRPAEPPPVHARRSNWPAAYALSLDTESNPVVPHWQIGTGRAAATRIRRLPNVGPWQ

SEQ ID NO: 24400 - protein, 713 aa, Rhodococcus ruber
MAVISGTRVVGQVDFRNDRFAVVTPVHDDNGTGWKAADPDHYPTRGKVFWRQPWPDIHTGAVVLFELAEGKGEPDHFAVSRAEFLCPVLDYGLFSYDEAIERLTSDRQEVSEEIRAGKDVYAWCRDELLVGPLTPRIDGARFFVPPDSVRLERVPYREEESAIFSMPNGRYYCAPTSPVTGHLDCRSDAEILRTAVRDAVAVAEKSSIGIPGFLATKALMQKAADALREGDRLDDRQYKLDRITRALKICRESDVVRSKAKDIAATLREHPEVKPELDRQIAEVREKAIEAAQHEIGKELEAERQALNQLREEVSALHKQRTELRSEVEQTKRQLAESEDAVSRQLESLEDSVTDRIAVLVDGATDLLSDSILFRALGVGSSGGGKDEKPTYSTANPFAGRRARPVPHGKPVTPVFQAAADAAGVGLSALIRLHAAMRAGLMPIATGNGGPAALSAYATAAFGARVATLPVAHDFLHPVDLVGVRASNPAVTRMHTGLLVGADAGVRDEGAGVLVLESFNQAPTESYLLPWLQTPDRAIVVPEAARRIVGTSRVTPHSDLFVAATAAAGTTTAPLSPDIWGFAVAIDVPRAVPDSSRRVAPTVIERMPLPSLSSRVASTISKMEAALGDYCEIDEGVLGTARKFAAGLAEFQNDGGVVSSLVECVMIPALASSLSGPELTEAVDIALEFDGSKDPKRRRAVHHLAQRFQRRFA

SEQ ID NO: 24401 - protein, 364 aa, Rhodococcus ruber
MITGAPRIEELPPGSAAQHVRTALGLPPVTPSAELSYELLRAVAWASTGGRVPVSTRTLLDRAVGLDAALHDGDVDATARRHLLRDRLEDLAAVGDLAPLPRGQWLAVPGCIVQLDAADPDGRLLVSGVPVRHLDTRLRNAVALDGARRVLNRRIRAADVGMPVLGFEDWARRPRRSLRDWTESLLADSLGAIPEDVEVSALRFYVPAHAHPGARQSERWFGTDPRLEGRYLARADALGGWTQFFVVELRAGTVAGMREQDPHDVRRLMYGLDRNAGNPTVVRWVEAKHEVHLRPTSPLPYAETRVLTALADSRTDRGWVLTRHAGTIRRVLTELGVTLQTGPVQGAGSARRPRHTTRATPRRS

SEQ ID NO: 24402 - protein, 2149 aa, Rhodococcus ruber
MGALLPTLQAEHLREGLTDYLATTFALTDPDAQGALTDFIGDPDNGMFKGPYVRLRLPFAPAGGNWGMHLDWWPTGFTPYGHQARAFERLSTKFQDRPQPTMVTTGTGSGKTEAFLVPILDHVLRAKKAGVTGMKALILYPMNALANDQAERLARLITTNSELGGVTAGLYTGEHSTSGRTRVSEDGLITDRALMRDAPPDILLTNYKMLDQLLLRPADAPLWELSADSLQYLVLDEFHTYDGAQGTDVAMLLRRLGLAVKSYWTASSKITDSDRARPLGKLTPVATSATLGSKTDPTAMLGFAHTVFGERFDEAAVIGETRVGVEQWLADRRTDRLYRPIDPVIADAVDRIHAAAAADHSARDANIVLARAVLAELFERTDDIATDRSLTEADLKVVSAPSEVLDLLKGHPLVAAVLTHATDATSLADLAARVFPAAPVERDARRTTALHQRFLDHLLALLSHVRAEVGRAALDVHVHLWIRELSRIDRAVSPTTCYAWSDDGDTEGDHELYLPAIFCRHCGRSGWGARLGPTGNALDVTDDAIRADHAAGLARFRALISAPTEAQLDRDVEGLRWFHIDQRDILAAAPDPDSDEMLEGRVLPILTLTGPDSDEKSTKDVCPACGADDGIRFLGSAVATQLSVTLSNLFGDKNLDAGEKKALMFTDSVQDAAHRAGFVQARSHSLSLRSALRGAVAAGPLDLTELCQAVVSRAGDDPVRRYQLLAPDVVDRDEFSPFWKPGAHHSSRRAAERKAKRRLQFDIDLEFGLQSRTGRTLELTGSVVAEVYLGPPGRAATLGRLAAAQTEHLQLRLTDSFGAPAQSAMFDDPRGGDQLSFADDPDLPAVDSRALARWVRGTVERIRTQGGIHHEWLRRYLEKNANRYHVWGGRPRGEGMPAFPKGRSAPAFPASGSGSRSLPEGFDTVTSPSSWYARWASRCLDVSPYDGAFLTKALFAVLTEQRVLETVTTETGTTVYGLQPTTVQVSAPNLEDLEARRHLLVCEVCQTPVPGSATVVGEMEGAPCLLVRCPGTLRRAPRHENFYRRLYDSSEMKRVVAREHTSLLPTETRLKYETAFKTAGTDPQAPNVLVATPTLEMGIDIGDLSTVMLGSLPRSVASYLQRVGRAGRLTGNSLVLAYVRGRGEHLPKLFDPLSVIQGDMRPPATFLNAEEILQRQYVAHIVDRFARDPERTAPRDARAALAGFDDGTWMADLIAYADAHATALSSAFLDQFGGLLSKDAEAALTGWVSPGEDEQPSGLARHLRDTVHRWNRDLAELTSRRSAVEDRIPELEQKASSPAATDDDRRALRTAHGSRKLLGAQIRSITDSYWISVLEAYGVLPNYTLLDDSVTLDVGVSWIDPDSSAYMGESMSYQRGSRVALTELAPGATFYAQGLAVKIDAVDLGTGESNVQTWQVCPQCGWVAVTPAGAQPKPVSTCLRCHNAAIADVSQLLHVVEMQRVSAEVRRDEATINDSRDDRHREQFTVAVAADVDPAHVGRAWFAQGRDFGVEYLRRLDIRWLNLGKRASQGRKRVVAGQESATGLFRVCASCGQLDTAAGHNNAHEHRTWCRLRTADAEDVREIALARTLRTQGVLLHLPPALEYDNFAHPSLSAAILLGLRQVIGGSPEHLDVATISDALHAPDRRALLIHDTVPGGTGYLAEFADPGKVWEMLAAARKVVRECPCREEERLACHRCLLPFAPPHELDKVSRTTALKILNDILDAGAHSEPDLDDWTAAIVEDAPPPPPGSDESFLEKDFYTAFVGRLRGMGAAVVEKPGTYGPSATITLPGKKVRRWSLLPQVLVNNVKPDFVVQTTDSAIPPIAVFADGRAFHASPECNRVADDARKREGLRESGYLVWSFGHEDLQRFKNGDEQNPPWFDESASRVVTTNFHVRPGLLKLLVKDPVTQLLEFMVEPDVDGWEAFSRAMPYLFVRRDNRAKSVAETVLESALAALDGSPPFARAGSDVCWSLVDGPLVVTAAVTSPADRSATAVLAVDDRDEALDSPDGRAWKEWLRLSNWLGIAGRHRITTRTLLAEAATAPAGPIAPKAEQPLAPQWQAVLDDTVSDAERTLVQALAAEPNLPVPRLGYETDDGDVLDFAWESARVGVVLDVTETEAHTMADRGWTLCPPDVTEIVAALRKNGVL

SEQ ID NO: 24403 - protein, 661 aa, Sphingobium sp. C100
MRTVSPFLRIDQKREFRSLLTFEGAPQPSFAEELRTLARRYIDDGESRKLRTVCLLVADLFEQGWRVAVEDDHILFEAPGITRQSEQSVDDVKRRVRDALQAARQRQLREPSVEAFLRRMERRTLRAPGVRSCVLDLVDNGSDLATEFRRIASLPTDQQEAALADVVDPVVEICRARDRCSATGLPLNDIWRYFRHTWAHEYRPIPGRQLLVLIRNAARPNRPVMGIAMLASPVMRVTARDRWIGWLRESMEARFLAGEWAPEDIAKAFLDRIDASIANLRWDDLASKSEIRSPVETTILRLEQKASGAAYSRELQLRAHYEDNRAADGSVRPMRGNVKDAQGDTDWRAASEDLLFVRKRAELLAQLLFAKQTFRAAGLAKKPRAAIEQLLAAKTGQRAIDITLTEFRKAGLSSQVADVSICGAIHPYNELLGGKLVALLLASREIHDYYAERYGSQISVIASQMAGRAISKPADLRILTTTSLYGVGSSQYNRLVLRASDHPDLGHDVHWDAIGKSLTGGYGTLHLGKETAHALRQMAQARHDSRRVNNRFGEGTSPRLRQIREGLDALGIDSDAILHHANPRLFYACELGSASRDTLLGMHTEPPSLSSAASISAAWRRRWLLARSRRSQTLAAIEKLGPQSVHAALISPASDPSLLPI

SEQ ID NO: 24404 - protein, 355 aa, Sphingobium sp. C100
MIEIVKKGEIIASARHDLGLPEGAEMDSAYWFAGLRRLAGQLCPCSPRTLVSSMAGSHRALALDGVDLADQLEDCVDALVAVGDLLEFHDVTTLDEKVKATWVFAAPPSFVMHPSGAAYILGMAPDDALPLPITWRTRVVTRGPARVLEPLPGEDLEGSLKTSGFRPLSLNAWMRSPKPESAASIIAGLDTKLAALGPAGHVPDLKIFDWTKDTRSYRARWVAPSGHDGSYIVRRPQAYGADLWGYASLERGELRKLVDFPVPGSRYRGCDVAWRAQLAIDALLNRPQRYRVLALDGGKRFDMFFPLPDWARRRLSTIGHEIASDKCLMSFSIPLNAVLAEQAFLKEYLFLECEE

SEQ ID NO: 24405 - protein, 1847 aa, Sphingobium sp. C100
MAATIQETIEQLHTSLRDYIEATYHIGDATLIGQRQTLLKRTGVTHQIPYLESTPKYQLGQNFGKLEGLPPAALAVYSALAKADGKQPRLLFDPPYRHQADAIRHSLIDGRNLVIMTGTGSGKTESFLLPILGKFAREAATKPKAFGSQHGVRALLLYPMNALVNDQLGRLRAIFGDPRLASMFTEWAGRPPTFARYTSRTPYAGIRSSKRDSKKFASFESFYVEIERQAAGPQSEDQQRASKLRSELKARGKWPAKPNLEEWFGAKGSRWADPKTGEPLRAVTLPEDSELITRHEAQDAAPDLLVTNYSMLEYMLMRPIERTIFDQTAAWLAANPDEKFTVVLDEAHLYRGAAGAEVGLLMRRLRARLGIPVKRFQVICATASFNEKEHAGDFGSQLTGVDADSFVAVTGDLDLRPHAATGSSADADLLAGIDLSGFYDSDEDKRRAAIAPVLHHRAIAPTGDIGRDLYAALETFPPLGLLVNTTMKAARPVASLGSELFPDTPDQADHAVTALLALGSVARENPEAAGLLPCRIHNFYRGLPGLWICMDPDCTELGADEHSGICGKMYSQPREICGCGARVLEFYTCRNCGAAHVRAHSDDVDTPNALWSEPGRRLKMPGMETAPLLDLDLLLEEPRHPDLAEIAEYDLETGRINPLNQSPRTRTVYLRKDRVTPPADDEGNQDSRLEVRGQFTPCAVCGDTAAFGRTSVQDHQTKGDQPFQALVARQIQVQPPGPQAASSFAPLRGRKVLVFSDSRQVAARLAPNLQLYSVRDALRTLIVWGFDRLRQHPMITSMLSLDDLYFAALLASKGLGVRLRPELKVGENFAADAAIELGVQAGALDDPTQFMMLWMKTRGDRPPEGLLDDIVKTVRDRHLGLEALALASLCESADKAAAVHGLPAIPGIADTNEDKIALARAWLRCWRPKAFWLNAMPSTWYKRGGGSGTSVRSQKGSFKAMRRVLPDKTAHSLFDKQWQPALMQIFAEEMESGFKRLAGKNLSLLMDGEWVRCGACRSVHRPVPKLPHCLDCGSGEIVPLDPATDAVFVARKGYYRAPVVAALHDPEHRPMALIAAEHTAQLNAPQSEDVFSRAEENELLFQDVALDWGAAANRSTAIDILSSTTTMEVGIDIGALSGVALRNMPPGRANYQQRAGRAGRRGNAVATVVAFGSADSHDEHYFSDPEAMIAGPVVDPKLTLNNPDIVRRHVRAYLLQRYHQDRIPGFDPDADPNLFSVLGTVPGFQSGAEVLNRADFEAWLKKNAKSLRDSVADWIPSQLSPEDRQELLDDMAADCLKAIDDALKGKVLGGEKVFEEPDGEGVEVQEEEGEEVPPEKAQTGKLLDRLLYSGVLPRYAFPTDVAPFNVFDIDRSTDFRPVMKFAPSQSLPVALSQYAPGKTVWISGKCYTSGAIYSPMWEDRVEAWQNRRLYRECSDCHFAQTVPLDEGLKPGVIDDCHACGGESTFGPTHYWLRPPGFAHPVYVDEMTSPDDMPETAYATRAKLTMPTPADTEKWIAINDRIRGMPDRKHLLVSNTGPKQEGYNYCTKCGVIEASAESTAMLGGPHKKPFPDEKEPMCEGAGTTRHLVLGTDFITDIALFSLRVAAPLKLKPGFYPTDVALRTVSEAIAKAASSMLEIEPGELMAEYRPAVTPAGISGLEAEIFLYDTLPGGAGFSGQLAHRGEELFQRALTLMKTCPENCDASCYRCLRSFKNKFEHGLLDRHVGAELLAYLISGEMQPFDPLRIKASTLLLHQDLERQTDGVQFGLDVDVDVPGMGSVTIPILATRSDGQRFAIALAGGLTGDHPADPRIVEMRENWPDLLVIPVNELLVRGNLPAASLSVLSEIA

SEQ ID NO: 24406 - protein, 677 aa, Streptomyces himastatinicus ATCC 53653
MRRSPASMEQNLRTDAPEVMNEEAKPVVLSLPADASRQERQAFNRLCALLAEGPAGSADVNGHDQWINAAKIKKLYEQPLLAAAAHTAIDLVDQGWTIQTQKSGHIFTPPLASHDREEEKARIRRQEHLRRDEQLRQSSVRRFVESMERTHQHGDQLVSIFNLMRDGRELADALQRTGACTDVINPYVQVVDSSTCELTGFKLHDIWRYFRHTWSNAYATVPGRSMPILIRDAATEFHAVIGLAAISSPVVQIAERDHWMGWDTDQFLEQVRADPTADIASWLAQRINTQQEEIYVDDLLRDGILQPTDLTSPTPEVISRLRADAERHRQRHHQASTIGEVRNIDRDAWVNRATTDLFRSKRSLALSETLEIATLLGAYLSPPTAEGLAKAFSDSKARTQMRRVVRRARGERVGTVIADLTVCGAVAPYNTLTAGKLVGALAVSPRVLTAYRQKYARPSEIASAMAGRPILREPRLSFIGTTSLYGTGSSQYNRLFWPAEVMGGKSDARMGFHELGRSRSFGTSHFSSETVDTLVRLSTLRGSRVRVNNLFGEGVSPRLRKVRLGIAALGWPANELLRHGRERILYGVPLVENLRNYSLGIDEEPEYLLDPDLPEADARVGNWWLERWCRPRAARQDVLESMRVHRLVRPVQHGARVPLPVGDGMPPIGEEMLPINT

SEQ ID NO: 24407 - protein, 363 aa, Streptomyces himastatinicus ATCC 53653
MKVTALSIQEVAERAVHALCLDETTTDLFSAEALSASLRRSASFLCPASPRRLVDAVLEALCPLDELSLMARHHISAQLDLLLSVGDLIELPSHGDGKGRQIYLAPPSYVEKAPGRYLLLGVRPNGAPLVDEALGAEVHHEGHTRFLELDVEDAPTRLQAAHLHKIPRDHWLQRPGEQHATAVVALMRQRLDGAGESGQVDGLKIIDPEASVLYYRGRWRPIVSGDSGDFVARRPQAYGADLWCFVRVEHGVPRALVDLPIDDLATAGCDEAWRTQAAIDASRGTPQAMHVHLTPGRADDLRLDLFSPVPGWAQRYLELVGTPVSRARGALVSYRVPMSAIGQLSVFFTDMLWMHVSEEGGVA

SEQ ID NO: 24408 - protein, 1860 aa, Streptomyces himastatinicus ATCC 53653
MDARQRRGRGGVTLEAPTIAGTISKIQAALRDYIEATYHVGHPTVVDQRRAVLEQEGVLFQAPFIESTPRYQPGQRFGDLELDDAVQDLFGSLSTQTGGLKPLLYDPPYTHQAEALEWTARDGRSLAVTTGTGSGKTESFLLPMLAKLATEAAHRPTSFTVPAVRSLILYPMNALVNDQLGRLRLLLSDPRVTAKFSEWAGRPARFARYTSRTLYPGVRQVKKDQTRLRSIEDFYINLIDLKNESSTPGHDEASALIKELEARGKWPAKPDLKAWYGKSGARWKNNADEFVRAVLRPEDPELLTRHEVLEEPPDALITNYSMLEYMLMRPLERPVFDATRAWLADNPDEKFLLIIDEAHMYRGAAGAEVALLLRRLRARLGIPAERLQVICTSASFKSPEYARQFAAQLSGKSEADFKSVQGKLQLRESASAGSLHDAHALAAVPLHDFYEGESDGARIAAVRGLLNYCAVDGAGSTTAGELLHDALNAFGPMNLLINETMKQAQPVNELGALIFPTAPTELADRAVSALVALGSAARRSADSAGLLPCRVHAFFRGLPGLWACLDPECSEVDREAYPQPGPVGQLYAQPRAACTCGTRVFELYTCRHCGSSYARAYTDDLASPSYLWHEPGGAFQSAYGSIPELHALDLLLEDRYEDNVEIADLDLVTGRLNPEKIGPRIRSVFIPRFRSGEAVKGDDDHEAEANGEFKPCGVCGKTANFGRSSVQDHQTKGDQPFQALVTRQIEVQPPSSKPNTDFAPLRGRKVLVFSDSRQVAARIAPNLQNYSMRDVMRPLILRGWQELDKPPLNRQLSLGRLYLAAMVGARLLSVRLRPELRPAESLEALDNVTKAIDNGALDGNYGELMDLFGITDPPPHSLMRTMYATLTDKYRGLTPLGLASLREPPAKSAELLAALPDIEGIATGESSKLALVRLWLMQWMNPGIWFSSMADGEWLQTEGGIHPHSGKFQPFDRWLHSRESKKKFNDSWLPTLLRHFCERVGGKFRLSASKIYLDLSEEWGYCERCRFTQRPIPGTTRCVSCRAPRVRVLDPKTDSVFQARMGYYRASAARALRDPAELPMSIIAAEHTAQLNAAQSDAVFSKAEEHELLFQDVNLGLPGSGDQQKRAAIDVLSCTTTMEVGIDIGNLSGVALRNMPPSRANYQQRAGRAGRRGNAVATVLAFGSADTHDDHYFRQPDLMIRGDVDDPVLTMNNDEITRRHVIAYLLQRYHQDRLPQIKPEDQPQLFAVLGRVSDFTGTTSPLNRTDLEEWLKANEDSLRDEVSGWLPEELSQESRGALLQGIVTRTLAEIDEALDIDLDEETATSSEVDASTETEEDDVEEISDAAEEPNVRRGQKNLLDRLLYKGVLPRYAFPTDVVAFYVFDLHRSTPFRPAFDYAPSQGLAAALSQYAPGKVVWIDSKEWTSGAIYAPVQETRHQAWRDRVLYFECKVCRYANYFSYQEAKRGETRDCPACRTENSFGEAKNWMRPPGFAHPARKDPGTSPDKPPARSYATRAKLMAPGPTEESAWQQVTERLAQHYRRETLLVTNTGPRSEGYTYCVSCGLIEPTATPSGVVGGTHKKPYPDEKEPDCPGGRSTRGLVLGTDFISDVLLVRLKVESPVTLKPAYLSTHIALRTIAEALTIAATRKLGIEAAELQAEYRPALNTRGGEGLEAEIYLYDTLAGGAGFTRRVHDHGMEIFEQTLELLENCPEDCDESCYRCLRSFRNRFEHNLLDRRVGAGLLRYLINETPPTLDSERLARSADKLYEDLASRDIDGVSFEPHKEVDVAGVGVVTAPILATRGDQQWLFGVHSPLTPDVASTERLQDAKDSGGAVRLIDDLVISRNLPFATQLVLQALQ

SEQ ID NO: 24409 - protein, 486 aa, Thermobacillus composti KWC4
MRKGTQNTIRKAYDRKLQMVVTAKEAAINQGFEPNRYVCVVCEEEVYVAAAYSTERSVHFRHHRGNNNVECEYYLGQLTGNTDRLSFKRESREVGEIYFDNKNRNFCLGLRFSVDEIEDCEKNNVFIELNTEDKNRTLLKIKINRENFAPDTVTLFPLARFSSSYYLSFSSEEETSKRLFFSRSNTPIFFRMMGHDQAGRCKYVRGGVLYTNIKYVVVFPLKKSSLKNQFLLNEFDVEDTFEFKTMDMRFIGMVLSIKYLSKNLVSLLKSWNYKAETSEALTILWPPTYLTDNKCNVNADYIYVYSSFNLIPKGNTNVPRENIRLVTSNVSRINLLPQSIIFKKNAEIIIEKKDSITFNKKHIQSYARKANVFKVPEDGLSYFMFNCYGVSQLTVNQTVYMTPDSLIIGYKHNYPVTYIVQDEHHVKCGNELLNDILAHYKKTENFDESKIDQNRLSTLALQYIKKCEIDGKINTVVRHYIEEGLL

SEQ ID NO: 24410 - protein, 332 aa, Thermobacillus composti KWC4
MNELLISMSNDMRINRYFGESENSFTYRLLYSSLGLWCLWTANNGEYGSTKHNQTLVINELMQRYNELFPGIIDKFIDSNNPNLRFPVHMRRVYEETGYLITNENNRNQTAYFGRSLNIGNTSLYFGIPNKLYTVNGLGLFTSPTEYSVTTRELLIRDELSVTDYVHAKYNIAEFYEADIRIEELQFFNPLSKKAISHSWSGNIVTDYSVARTVEHNSYYRVVREPTGAILFANEVGEMKGDSLSSFEYRRLYYALKAYYSNPSIAKLIDKDDSYVVLKLNGHLPNREYFFLLLMSWPYNNAFNKTNFLFKKEFIADITALLSNLGIKVIGG

SEQ ID NO: 24411 - protein, 1735 aa, Thermobacillus composti KWC4
MHNSNGVQFYYQAIRDRLRNYIKSDYLANSETLLLYENDLLGEKCNNYSNIAREPFIETSASYKKLPDGIKNSHSIEPGVKEAFIKLADANLGVYPDPFVHQVKALESFLSGKDLFVSTGTGSGKTECFLWPILAKAFEEAKKRPNTFKMDAVRTLVIYPMNALVSDQLSRIRKILGNEKFKDIFTTETNAERIPHFGMYTGRTPYSGESKTSSNRELAQTFRANYLVDKSADEAIQEKQRNNIKGLQSIHKYPARYGGEKGVEKFINNLENNIQNPDPFDAELITRFEMQVFPPDILITNYSMLEFMLMRQRESNIWEKTRQWLEASRENKLLVVLDEAHMYRGSSGGEIALLLERLFNRLNITIERVQFILTTASMPENDHDAINAFYTGLTGKEHTGCMFLFGEKEDIPDKYEVITDVELLASIGSEQAYGEGIAKKIKTFAKTVFNQTLPENIDNEQAQAWLYENLPKYEAFVKLKKLCRDGANSYSFLREQLFGDHRHAGNALDALLALVPLAQKNDNILFPVRLHMFLRGLQGIYACSNPKCKNAYYSESEKLPLGKVISIPKEKCECGGRVYELVNHIKCGALYFRVFFKKEDGQPYWYVFPRPGLVGDEDSLNAMLLYIVPSNHKRRKDEKLGYLDPLTGKLYLTPQNDDSLLKVIYNDTEDKKTKAYTFNKCPKCCKNMTLKKPIDLATKGNIPFYNLTKVQFELQPPQKRNLINQGKKVLLFSDSRQNAAKLARDLSKSSDADAFRQAVILASQLMQNSEKEYSLSELYPAFLEICNYHRLSFFNAGDKQIFEEHKQKFEKRKNRILGRGGKIDFEEMAREFQSLPEEYYEHLLMFFTESPRSFKDIGLGFLAPTNKQFNYLIEDIEDEGIEIDKELLYQTMVLLFWDVMDEAAAIGEMIPDEVRKQLPGRSKSREFGLNSAFISDIDGELLSRIQEVLDIDLPKMKKTIELIRDNFFARSSRNNRYYIKLSSVKIVSTDENFSWYRCIKCGKISPFKIGEYCGACFVSTEVVAITAEDLSRFDFWRIPILNALSEGFQIQKIRTEEHTAQLTHKETRSDTWSRTEKYEMQFQDICAGESGEDSIDVLSCTTTMEVGIDIGALTSVGLRNIPPMRENYQQRAGRAGRRNAGVSTVVTYALGGPHDHHYFIHPNEMISGPPRKPWIDRNNPKIKQRHYNMMALNGFMSTEEMRTQFDSIADIGIISFCKDYGEKYIQYVKSTSATQPYMDESIRKFKEIKENVLDENKISEYEEASAFDVFYREGYIPSYSFPKNVVKFYVEKGSSHGRNNREIQYAPERDIALALSEYAPGRFVTIDKKIYKSGGIYANPRPRGYETNQAEFYFTNSDYYHDIIICSECNWFGVDKEDYARSSCPYCHASIERKKMLRPWGFAPERGDAVRYEDESEEYSFTEMPYYAYVPEDEKLEQFGESKISYAKLSNRKVLTVNMGNNKHGFNICKKCGGAEISDPSNPGRTLVSQPYHDSRVCNHDEVANNVFLGFEFLTDMFMLDISYDTKKLVSNSSAEEKSIFSSAVTTLHEALKKAVSIVLDIDYNEISGGWRPRIKDDGNSHIEMYFYDNLSSGAGYSSMIGQHLGDILETAQNILSKCDCSRSCKNCLDNFWNQRSHRYFNRELGLQLLNYAKNGTLPYGYSIKEQKEWLVPLEKLISEDPDLSQMGKIEFEVIPPILKKPISSTNKMYLNPIDLSDWLPNTFLDYRNLIMRGK

SEQ ID NO: 24412 - protein, 397 aa, Vibrio cholerae CT 5369-93
MSNNVVSVNLKEAQLKRKLREHLHSLGFTKSENGSLLAPGNSKEVIRSLHQAQRKERLAASDHFIGKNHDKLFKYFASGSEIIPERISPVLERVDSRTWSGDLFRLASLTWSVPVSSGFGRRLRYLVWDESNGKLMGLIAIGDPVFNLAVRDNYIGWNASDRSDRLVNVMDAYVLGAIPPYNSLLCGKLIASLLRTQEIYDDFSRKYGSTTGLISKSEKKASLLAVTTSSSMGRSSVYNRVRLNNMDYLKSLGYTGGWGHFHIPEWLFKELREYLRAKDHRYADQYSFGQGPNWRLRTTKAALSALGFKADLLKHGIQREVFISLLAQNSVDILQTGQGVPDISNLKSSKAVADLALQRWVIPRSEWDNSYLNWRASSVTELLGFKCNQLIVNKNMA

SEQ ID NO: 24413 - protein, 556 aa, Vibrio cholerae CT 5369-93
MEYAVNKHTGKVEFAERANVFGKYICHECRKPVNLRSGRKRKAYFAHWPGYGTLECEKFVPGGVSLSVAEDEFCAISTMARMELRLKIPSEKHSSWYLELTVPPCRESHATVIIDVGGRFQTLDMRGMSKPRKLTAEPTTENYRIVSFTGRPDPQFVNGVVRECNALRPSGATVFSSTLSSERQGFSVSKEIRLNSSFAMLWTSPSSVIFPEEIIVDSLTTRGQWHLAMITVPSHLSIEATLWFENFTGLEVSRPTPSINVIWPFVTRRSNLDEVVVERAKEVLLGIDHLPDDHQCARTKLKATGEEEELSVPSLIGSEKFFLLESYHSKFIALFFDDDSNTHRYLSIEKNNNLAVQYQHQPTVDIALTNDEQDIQIFSLHIAECESLISNLLKHGYRFSYISMPKGVEGLVKVYPSEKTEKILVAGSEPAPHDHKALLLEADVNNHISSLISDQFVSIEVDFGGYGNLYLTSSRDCDNECRGDETIDLPPCLRGRLLFFLSQMSSAPVNNFLTDEELIRVFESTKPKLGLVPHYRSIKNEILRCGSNVTIGNNSK

SEQ ID NO: 24414 - protein, 629 aa, Vibrio cholerae CT 5369-93
MNYEFSNAAKERIGSIAQAEITSFIEELPQSILRTVFKALPKVDGFRRNSIAEFKEKQKRLIMHLSLNGRSKVNPEWTVFSKIWELWAKENLGIDLPEVDEKLDDYQKALSFFNKLSESYPNLSQEDADKLYKFSGFVTHEQVNSLITSFKKKADIKRDQMVMELPQRLQELENKVKKIESSCREFEALYLESEVEFDSVENKLNQVKALSEQTTEGLSVVSLMLSEHERSLREVEGRLGSVGTLQSTLEKDVSVLSEMNTRLEQWLKNIDGELKRQSQNIPEMDTLFGIIQNLESRIDNLVQTDELVSSRLDEISSKISYIDSLCDGEYSPDASRKTIISGMKLKEPEDETVYLSSISEASEALATNLQVIGFTKSETNSLSRKILAGVLSGQVLQFSGSLADLACDAVSAAIGGSRVLEWTIPVGLIDSISSEEFISSSASNKTCCAVMKGVNLSAFEVYGAPIREEVIRRQCFLPCFSQAIFLATIKQGPAVFPNGGSIAEIGPLFDTDELRMRLSPPKSNKFVFGKLDYESMLNEIDRNVSANQEDLDEVLEDACFHGGNLWSRCVSRAYKALRSVPGGDEVTDLHAILSNWALPWAIVSGTKTDGIERVLEKESSTKGHESMVR

SEQ ID NO: 24415 - protein, 343 aa, Vibrio cholerae CT 5369-93
MKLSSLSKNATLDFLARQINCPLDDRGRDISIVSECLRTMLFLHSLGSEDDYYKGPISTIQLTRAVKEKLQVLFEYGQANNNNQIDVFKLANCLHRLGDFHKSSGGQWTIPPIHAIRCGDECALLLGGGPTSILPESLSSLVSTVGNLRLIDQRECENLIELWDIDKWIQFKHQNLNDWANSLKHKASKNLVESVFDLGQVQVYLKGRWIKFDDLPTGINDFPICRFHGSAQFSYFFGELISSRLERICSITSQEARRYRFYRDAEDGRPVCVNAKYISKNLIRMQIVRPLPIEESIIQNLGWQVPVEEGEYNKATYYEFPIEVVPILREVLDRLRIVLALVE

SEQ ID NO: 24416 - protein, 1831 aa, Vibrio cholerae CT 5369-93
MDSSTNQKVASGVHETVANLKRSLKQYIEAQYHIRNESLVEERSLLLDKEPTIVQSPYVEATQVYKVGKSYSELDIPFAVSETLIKLSQIGVGLYPQPYEHQSQALTSFFRKDGADIVVATGTGSGKTESFLMPVIGNLALEGEERPESANLPGCRAMLLYPMNALVNDQLSRIRRMFGDPRASEILKNKRTKPIRFGSYTGRTPYPGSRTAAKDEQFIKPLFENFYNKIGGESTIRAQLEKIGRWPSKDLSGFYGAELIEQKTYESGAKQGKLYSKKNWNERLITQSSDRELMTRHEIQTECPELLITNYSMLEYMLMRPIERDIFEQTRLWLKNDLRNEFILVIDEAHMYRGTGGAEVALLIRRLCARLDIPRERMRCILTSASLGSVEDGVQFACDLTGLSSNSSRKFEIIQGTPEERTVTQVCDSSIASVLAKFDLDAFQNIANDLNNALIALTNLAVNLGWSTPPGDCPEKIKDWLFSNLTGFGSLESLVSIVSGKAVRLDELSEQLFRDVPKEISSGATDTLLALGCYAKRLSDGRVLIPTRLHLFHRGLPGLHACVDPDCSTRLGTQESPILGRLHTKPRRQCDCLGKSRVYELFTHRDCGAAFLRGYVSSDLNFIWHEANGPLTENGSLDLVPIDILVEDKVHPRGRYREMWLHMSSGKLIDTCPLDSNGYRKVFIPDRLATGEPLLFDECPVCMRNTSLSNGESSKIMDHVTKGEAPFTALVRTQMSNQAPNRSADAKHPNGGRKVLIFSDGRQKAARLARDIPRDIELDVYRQAIALACVRLRECSKEPRPNNSLYLAFLSVLSEHDLQMFDGPDALKLIAARNEFSRDYGGDLEEALEDNFEPSEPPPSRYKVALLKLLCGTYYSLIGTTVGFVEPSKAKFKRLVNNFKSKGLGLSDSDVSALSVAWIDSQLRAFSFDSSIDLHLRYKAASYYKPTWGSRGRFERAFRDSLTQRLFWSDNTIEEVESVFREQLTLEQDNTFFLSPNSLVINIDLNHIWYQCSDCTSLMPIVLKEDICVSCGSNTAIALDPRSDTYINARKGFWRAPVEDALVNRTRLSTLSVEEHTAQLSNRDRSSVHSTTELYELRFQDVLIDSDSRPIDVLSCTTTMEVGVDIGSLTAVSLRNVPPQRENYQQRAGRAGRRGSSVSTVITYCQNGPHDSHYFLNPHNIVAGPPRTPEVKVDNARIATRHVHSYLIQTFFHENIDFSHKRPSDETSVLEKALGKTRDFFFGSMDSGLSLLAFEQWVSVKVLNEDGDLRKSILNWLPASLSTGSHNLEQWLLNTVTAFIEKLKYLGKEIPQAIDVDKDEIATDNEIVDELEQEELLDFLFFHDLLPSYAFPTSLSSFLVEVLEKQKGTWKVKTVQKPQQAISKALSEYAPGRLIVIDKKTYRSGGVFADMPPYEVNRARPLFEEAKTLVYCEDCSFVRDPYITQDTQLICPVCSGNLREETMIQPEVFGPEKARYLPEEDREQEITFATMAQFPQPVNEQDFVFKPCGPNASYTHEIGQRLVTVNRGKNDNELGGFSVCEDCGAASVFDERSNLSGEHERPYKALHSKATPQKCAGEFKRVFLGHNFTTDLLLIRFKISAPLITDTSDSVSLHILEDSMHTIAEALRLAASRHKQLDVDPAEFGAGFRVVPALQGEDRLVDLFLYDTLSGGAGYAEIAANNLDEILSTTLELLEGCECDSSCTDCLNHFHNQHLQTRLDRYLGASLLRYAIYGEIPQSAHFSEQARQLSQLCSLLELDGYKCTMGNTEKSPVIVSYDNQKLSLGCFPGLIDRAFLSHACQVEPDSMLINEYLLKSNQPEMHLRVSSRFTR

SEQ ID NO: 24417 - protein, 397 aa, Vibrio vulnificus
MSNNVVSVNLKEAQLKRKLREHLHSLGFTKSENGSLLAPGNSKEVIRSLHQAQRKERLAASDHFIGKNHDKLFKYFASGSEIIPERISPVLERVDSRTWSGDLFRLASLTWSVPVSSGFGRRLRYLVWDESNGKLMGLIAIGDPVFNLAVRDNYIGWNASDRSDRLVNVMDAYVLGAIPPYNSLLCGKLIASLLRTQEIYDDFSRKYGSTTGLISKSEKKASLLAVTTSSSMGRSSVYNRVRLNNMDYLKSLGYTGGWGHFHIPEWLFKELREYLREKDHRYADQYSFGQGPNWRLRTTKAALSALGFKADLLKHGIQREVFISLLAQNSVDILQTGQGVPDISNLKSSKAVADLALQRWVIPRSEWDNSYLNWRASSVTELLGFKCNQLIVNKNMA

SEQ ID NO: 24418 - protein, 556 aa, Vibrio vulnificus
MEYAVNKHTGKVEFAERANVFGKYICHECRKPVNLRSGRKRKAYFAHWPGYGTLECEKFVPGGVSLSVTEDEFCAISTMARMELRLKIPTEKHSSWYLELTVPPCRESHATVIIDVGGRFQTLDMRGMSKPRKLTAEPTTENYRIVSFTGRPDPQFVNGVVRECNALRPSGATVFSSTLSSERQGFSVSKEIRLNSSFAMLWTSPSSVIFPEEITVDSLTTRGQWHLAMITVPSHLSIEATLWFENFTGLEVSRPTPSINVIWPFVTRRSNLDEVVVERAKEVLLGIDHLPDDHQCARTKLKATGEEKELSVPSLIGSEKFFLLESYHSKFIALFFDDDSNTHRYLSIEKNNNLAVQYQHQSTVDIALTNDEQDIQIFSLHIAECESLISNLLKHGYRFSYISMPKGVEGLVKVYPSGKTEKILVAGSEPAPHDHKALLLEADVNNHISSLISDQLVSIEVDFGGYGNLYLTSSRDCDNECRGDETIDLPPCLRGRLLFFLSQMSSAPVNNFLTDEELIRVFESTKPKLGLVPHYRSIKNEILRCGSNVTIGNNSK

SEQ ID NO: 24419 - protein, 629 aa, Vibrio vulnificus
MNYEFSNAAKERIGSIAQAEITSFIEELPQSILRTVFKALPKVDGFRRNSIAEFKEKQKRLIMHLSLNGRSKVNPEWTVFSKIWELWAKENLGIDLPEVDEKLDDYQKALSFFNKLSESYPNLSQEDADKLYKFSGFVTHEQVNSLITSFKKKADIKRDQMVMELPQRLQELENKVKKIESSCREFEALYLESEVEFDSVENKLNQVKALSEQTTEGLSVVSLMLSEHERSLREVEGRLGSVGTLQSTLEKDVSVLSEMNTRLEQWLKNIDGELKRQSQNIPEMDTLFGIIQNLESRIDNLVQTDELVSSRLDEISSKISYIDSLCDGEYSPDASRKTIISGMKLKEPEDETVYLSSISEASEALATNLQVIGFTKSETNSLSRKILAGVLSGQVLQFSGSLADLACDAVSAAIGGSRVLEWTIPVGLIDSISSEEFISSSASNKTCCAVMKGVNLSAFEVYGAPIREEVIRRQCFLPCFSQAIFLATIKQGPAVFPNGGSIAEIGPLFDTDELRMRLSPPKSNKFVFGKLDYESMLNEVDRNVSANQEDLDEVLEDACFHGGNLWSRCVSRAYKALRSVPGGDEVTDLHAILSNWALPWAIVSGTKTDGIERVLEKESSTKGHESMVR

SEQ ID NO: 24420 - protein, 304 aa, Vibrio vulnificus
MLFLHSLGSEDDYYKGPISTIQLTRAVKEKLQVLFEYGQANNSNQIDVFKLANCLHRLGDFHKSSGGQWTIPPIHAIRCGDECALLLGGGPTSILPESLSSLVSTVGNLRLIDQRECENLIELWDIDKWIQFKHQNLNDWANSLKHKASKNLVESVFDLRQVQVYLKGRWIKFDDLPTGINDFPICRFHGSAQFSYFFGELISSRLERICSITSQEARRYRFYRDAEDGRPVCVNAKYISKNLIRMQIVRPLPIEESIIQNLGWQVPVEEGEYNKATYYEFPIEVVPILREVLDRLRIVLALVE

SEQ ID NO: 24421 - protein, 1831 aa, Vibrio vulnificus
MDSSTNQKVASGVHETVANLKRSLKQYIEAQYHIRNESLVEERSLLLDKEPTIVQSPYVEATQVYKVGKSYSELDIPFAVSETLIKLSQIGVGLYPQPYEHQSQALTSFFRKDGADIVVATGTGSGKTESFLMPVIGNLALEGEERPESANLPGCRAMLLYPMNALVNDQLSRIRRMFGDPRASEILKNKRTKPIRFGSYTGRTPYPGSRTAAKDEQFIKPLFENFYNKIGGESTIRAQLEKIGRWPSKDLSGFYGAELIEQKTYESGAKQGKLYSKKNWNERLITQSSDRELMTRHEIQTECPELLITNYSMLEYMLMRPIERDIFEQTRLWLKNDLRNEFILVIDEAHMYRGTGGAEVALLIRRLCARLDIPRERMRCILTSASLGSVEDGVQFACDLTGLSSNSSRKFEIIQGTPEERAVTQVCDSSIASVLAKFDLDAFQNIANDLNNALIALTNLAVNLGWSTPPGDCPEKIKDWLFSNLTGFGSLESLVSIVSGKAVRLDELSEQLFRDVPKEISSGATDTLLALGCYAKRLSDGRVLIPTRLHLFHRGLPGLHACVDPDCSTRLGTQESPILGRLHTKPRRQCDCLGKSRVYELFTHRDCGAAFLRGYVSSDLNFIWHEANGPLTENGSLDLVPIDILVEDKVHPRGRYREMWLHMSSGKLIDTCPLDSNGYRKVFIPDRLATGEPLLFDECPVCMRNTSLSNGESSKIMDHVTKGEAPFTALVRTQMSNQAPNRSADAKHPNGGRKVLIFSDGRQKAARLARDIPRDIELDVYRQAIALACVRLRECSKEPRPNNSLYLAFLSVLSEHDLQMFDGPDALKLIAARNEFSRDYGGDLEEALEDNFEPSEPPPSRYKVALLKLLCGTYYSLIGTTVGFVEPSKAKFKRLVNNFKSKGLGLSDSDVSALSVAWIDSQLRAFSFDSSIDLHLRYKAASYYKPTWGSRGRFERAFRDSLTQRLFWSDNTIEEVESVFREQLTLEQDNTFFLSPNSLVINIDLNHIWYQCSDCTSLMPIVLKEDICVSCGSNTAIALDPRSDTYINARKGFWRAPVEDALVNRTRLSTLSVEEHTAQLSNRDRSSVHSTTELYELRFQDVLIDSDSRPIDVLSCTTTMEVGVDIGSLTAVSLRNVPPQRENYQQRAGRAGRRGSSVSTVITYCQNGPHDSHYFLNPHNIVAGPPRTPEVKVDNARIATRHVHSYLIQTFFHENIDFSHKRPSDETSVLEKALGKTRDFFFGSMDSGLSLLAFEQWVSVKVLNEDGDLRKSILNWLPASLSTGSHNLEQWLLNTVTAFIEKLKYLGKEIPQAIDVDKDEIATDNEIVDELEQEELLDFLFFHDLLPSYAFPTSLSSFLVEVLEKQKGTWKVKTVQKPQQAISKALSEYAPGRLIVIDKKTYRSGGVFADMPPYEVNRARPLFEEAKTLVYCEDCSFVRDPYITQDTQLICPVCSGNLREETMIQPEVFGPEKARYLPEEDREQEITFATMAQFPQPVNEQDFVFKPCGPNASYTHEIGQRLVTVNRGKNDNELGGFSVCEDCGAASVFDERSNLSGEHERPYKALHSKATPQKCAGEFKRVFLGHNFTTDLLLIRFKISAPLITDTSDSVSLHILEDSMHTIAEALRLAASRHKQLDVDPAEFGAGFRVVPALQGEDRLVDLFLYDTLSGGAGYAEIAANNLDEILSTTLELLEGCECDSSCTDCLNHFHNQHLQTRLDRYLGASLLRYAIYGEIPQSAHFSEQARQLSQLCSLLELDGYKCTMGNTEKSPVIVSYDNQKLSLGCFPGLIDRAFLSHACQVEPDSMLINEYLLKSNQPEMHLRVSSRFTR

SEQ ID NO: 24422 - protein, 404 aa, Yersinia intermedia
MHKDPSIVINVNPREAKLKKKLREHLQSLGFTKSDAGALQAPGNTKDIIRTLHSGQRSERLFASQNFISLKSTKLMKFFASGKDVDPQKISPVLERVSSGTWQGDLFRLAALSWSVPVSSGFGRRLRYLVWDENNGKLMGLIAIGDPVFNLAVRDKLIGWDAHDRSSRLVNVMDAYVLGALPPYNSLLGGKLIACLLRSRDLYDDFARVYDNTVGVISQKKKKARLLAITTTSSMGRSSVYNRLKLGGVQYLKSIGYTGGWGHFHIPDSLFIELRDYLRDIDHTYADHYAFGNGPNWRLRTTKAALSALGFRDDLMKHGVQREVFISQLAENATSILQTGKGKPELTSLLSVKEIAECAMERWMVPRSLRNSEYRHWEASDLADLLSNRALNLNQISEKIKIVS

SEQ ID NO: 24423 - protein, 465 aa, Yersinia intermedia
MISTERKIRGWSLELVLPTCNLCRAKITLDVGGRNQTIDMSGMVKRRQIGAELSVQPYRIISFSGDPDPAFISEVEMECQGLPSVGGAVFTALGSGASGGFPLAQELRCTDTYAFLWQQPVQPDFPDELVIERLVCRQGWHLALVIIPEIPSSECALWLHFFTRLPIVPARSSITAIWPFLTKNSSVNQIECLQSNTVLLSANMVSSTQGVGPTIYAQGSSSILSAVGIEKSPAFFTLNPGHSELVGISDTSNQDIKLFLSFSSNVECINKYPSVDLVFTKQDGEKEIVSLHERRCALVTTEARFLGHKLEYLSMPLGAEGLAKIESLTGSSCIKLVSSENIAPHDKSMRLLQPDSFFKLAICFADPTYHLEIEFSGLGTLYLSALSQLASTVGTNKELSPILRSRLFSFLFQMRIITPNLVLNSDDFSLVEALKRLQPETHLLPHYRALVKEVITSGFEFNRLR

SEQ ID NO: 24424 - protein, 627 aa, Yersinia intermedia
MTYKYSQEAKERISRLGQSAVIEFIEEVFPASRRSVYSIMPRVQGFRSGHAAEFKEKQKRLIGQMFQTNSSPEEVNAWKGFSLLWKFWAEEHIGKPFPSSSDSKTLTDSGTAFFGKLADTFPKVAREDIERLFIFSGFADDSKITEAFGLFRPATLLARDNVVDALPIRLGELAERIDAVGMTVVDTGKSIKRLESTTSLLSVELNKSIRDTSLNLNLITELQNLLSVQTKRSDTLMTAINELYVFRKGSNGIIDALKSKIDVCELGINEFSLRDKILNNLAEEVSELQGALHAICVKENEKANLIDENGHNELVEKINYLESRIIENDSSQTTGKYTGFYENKSLFPCEKILSHDDAFNMIASNLQAVGLTKSSSFIVARLTLAAFISGQIVQFCGSLADIVADAVATAVGYSNYHEWRVPVGLVSDEIAFDFIESKAKSSHCLVLRGANLSAFEIYGTAIRDIVVQRQLYKTSYDHLALIATWKQGPAVFPDGGMLTELGPVINTDTLKMRGVSANLPVLNYGCLAQGKWAEIEGLKSDIIGENMDELKYLLDETGFDGGILWRRMINNFYTSLMKIPGGNYIYDLHSVLFFYTLPWAKAKGGPVKEIADIAARELKEFSDKMSV

SEQ ID NO: 24425 - protein, 347 aa, Yersinia intermedia
MYWRAVSQEEALKIVSAAINCQFTDEGLRISTLSECLRSVLHQYSVSDTGEGRQSVASLRLSSAVRRKLVPLWPELTDTGDAIHPGIMAILDSLAELGDMIRLEGGKWLTAPPYAIRTDNNMAILIGGDPTGSLSPDVVAKAMVRLRLVDQVACEGKAELWDANEWIGAPMEGNEMWSLKLLDKTISRFTDAPNDVGEATAYVRHQWINLSELPSQEKGMYLCRIFIGTGISYFLGEFITGRLCRMSAIESSDDVRRLRFHLDMKESYPLKVRVNIFHGLARIRLVRRLPRKESKVLLLGWRESGPEGEHSGITYHVFPEEVLPIVRSAFEGLGIIWVNESMRRNEK

SEQ ID NO: 24426 - protein, 1835 aa, Yersinia intermedia
MINKNKLTERSGIHETAKSLADSLRQYIEAQYHIRDEGLIGERRALLQQDETIAQVPYIESTPVYEPGMPYSKLPIPQAASNVLTQLSKMGVGLYPQPYEHQSQALESFLGNDASDLIIATGTGSGKTESFLMPIIGNLAIEATERPQSVSLPGCRAILLYPMNALVNDQLARIRRLFGDSEASKVLMAGRCSPVRFGGYTGRTPYPGRRSSKRDELFIKPLFDEFYSKLADNIPVRAELERIGRWPSKDLDAFYGQGASQTKTYISGKKAGKQFVANNWGERLVTQPGDRELMTRHEIQHRCPELLITNYSMLEYMLMRPIERNIFEQTRDWLRADSRNELILVLDEAHMYRGAGGAEVALLIRRLCARLDIPRERMRCILTSASLGSISDGERFAQDLTGLSETSSRKFRVIEGTRESRPVARVATNKEAEVLADFDLNSFQCVADDLESAFVAIDTFAAQIGWQKPTIKDHITLRNWLFDNLTGFAPLETLIEIVSGKAVRLDVLSQKLFPNSPQEIAVRATDSLLALGCYAQRNSDNRVLIPTRMHLFYRGLPGLYACIDPECNQRLANHGGPTILGRLHTKPLNHCTCASKGRIYELLTHRDCGAAFIRGYVDSEMEFVWHKPNGPLSEKGDIDLVPIEILVEKKPHPLSDYQDRWLHIATGRLFKQCPENSSGYRKVFVPDRVKSDSEITFDECPVCMRKTRSDQDEPSKIMDHVTKGDAPFTTLVRTQMSRQPASRPTDVRHPNGGKKVLIFSDGRQKAARLARDIPRDIELDLFRQSIALACSKLKMITREPRPAGVLYLAFLSVLSEHDLLIFDGEDSRKVVAARTEFDRDYDSDLEQAFDDDFRPQDPPPSRYKMALLKLLCSNYYSLSGTTIGFVEPLPAKKEKLWKAVQAKNINIENKDVHALAVAWIETLLTEFAFDESIDSALRSKAAGFYKPNWGSKGQFGKTLRKTLMLRPAMGEFSVKALEEIFRTQLASEKDGVWFLSPNSLRLQVDLSHIWKQCPDCTALMPFTLEHSICLACGSGNVKSVAPLESNYINARKGFWRSPVKDALVSNSRLLNLSVEEHTAQLSHRDRSSVHATTELYELRFQDVLIKDSDRPIDVLSCTTTMEVGVDIGSLVAVALRNVPPQRENYQQRAGRAGRRGSSVSTVVTYSQNGPHDSYYFLNPEHIVAGPPRTPEVKVNNPKIARRHVHSFLVQTFFHELMEQGVYNPGEKTSMLEKALGTTREFFHGAKDTGLNLDGFDNWVKKRVVSMNGDLRSSVAAWLPSVLETDGLSLGEWFAKVSKELLNRLHELADHVPLPVVLAGEENDNENIIGVNFEQDELLEFLFYHGLLPSYAFPTSLCSFLVEKVEKNFRGTYEVRTVQQPQQSISQALSEYAPGRLIVIDRKTYRSGGVFSNALKGEINRARMLFNKPKKFVHCDKCSFVRDPYKYQSDNNICPICDGILKEEIMIQPEVFGAENARELNEDDREQEITYATVAQYPQPVDPEDFKFMVIGKHILFTHAIDQKLVTVNRGKNEGQSSGFSVCTECGAASVFDSYFPAKGAHKRPYKYIETKEASQLCSGEYKRVFLGHDFRTDLLLLRLTVASPLVTDTSSAIVLRMYEDALYSVAEALRLAASRHKQLDLDPAEFGSGFRILPAVGDDAQTLDIFLYDTLSGGAGYAEVAATNLDDILTATLELLEGCECDTSCTDCLNHFHNQHIQSRLDRNLGASLLRYALYDEVPCCSSSILQVDKLSQLRASLELDGFNSSAEGGQDAPLIVGLNGRTIALGCYPGLIDRPDFKHNVCNAKNVDEHLALNEYLLRSNLPEAHQTVRKLLR

SEQ ID NO: 24427 - protein, 1891 aa, Achromobacter sp. 2789STDY5608612
MLENGPLEPLSFEGRRAFAELALSGLFEGRPADGEIQRRSEYPPYQHQVQMLNRGIRPGKPAIVTSGTGSGKTESFMLPVLAAISNEAVKWPKPDGNYLGEDGQWWRKNETDWRAMRAGEQRRPAVRALILYPMNALVEDQMVRLRKTLDSDEARSVMDERFSGNRVFFGQYTSAVPVTGYQKHPRLADDPDEKKRRKRRLEKLRVALRRAEENQAAAREHDAQKAASEKTRFIFPAMDGGEMLSRWDMQDAPPDIMITNASMLGAMLSREVEDPIFKRTREWLAENDDSYFYLVFDELHLVRGSAGTEVAFLTKTLIDRLGLADPGHRHKLRILASSASMPMEGQDGQRSRQYLRDMFAPYGTSTGPGDRGTDSADFWSECVIKGVPNIPIWDRGRIDPTPFESLLKAALDARSDFVPQVKRSAALTTAVEAAAAALSVGGTSEDERVSNLAEAAAAALTGACREGESVRATAISELGVRIFREGATDLAAALRGLTLARALPESRVWNTRIKPATPSFRVHTFIRNIEGLFGAPRPTFGGATFDDLTTERGLSHAPSSAGDKRGRRLFELLYCEACGDLLIGGQRGERKLNSNSTEMLPSSGNLENLPERAASEYYDQMSFEEFAVFWPRRRQPMLPDRDYDHWELAYLDPHSGVVTCGSDVPDGHVGGYLYFQKDEAVSGKGNRLKGGTKRSKTAQPFCCPKCGIDYSRRPASNRLHSPIRAFRTGVSKASQLVATELFELLHAIGAEPKGICFSDSRQDAANQALAIETMHLRDLRREVLVAAARARIETRQKEWLSEKQFNEMIGRLSQDGKTTEVTKLVQRYSAQTAGGSVQYGDRKVALCEVLQDMEGGGRVGDLVSEFVKMGIHPFDQNGRATFEGKPWHALFERSNNSVEYAGTLNGAEKASLTAIILRQQYELIDDVIFANTFFALEETGLAYPSLAGAAHDDENIMDAWLRVFAGAYRVRNNRYFNEDEVREWAIGTDVPRTSRVRKIADKAYVGGDATAKLTDVIRRFSELGHRGGMLDIAKLYLKVADKNDRYWRCRNCERVHLHSGLGLCTRCGEMLDKNSSGTVEELWHGNFLGKRIVRGAADGVPRFRLRVEELTGQTDDFADRLRKFKGIFVNGESETEQRASQIDMLSVTTTMEVGIDIGALQSVYQANMPPQRFNYQQRVGRAGRRGQAFSFVATFCRGRSHDAYYFAHPRAITGDAPPPPFLAVEHDPIPMRLLRKCWLRAAFQRLRDECYASGQKYPGDLLVPPDVHGEYVTTQDYYYNAGAGWRERLKGALEATVHERDRFVDMAVEGEQQTRLLTGSTSDKLMAEIESLHAHAPNAPIGMARFLAEWGLLPMYGMPTRVRNLYLGIRDASGERGEYSWSTMDRDLDMAVFEFAPGNVLVKDKERHRIVGFTGNLSDPIRMAGGWKARAVSGWRETHSYVALCAACGSAKFQEALPTDGSFCDDCKKPIPVDSFNPYVTPVAFRTDFTPSSGDEETVRMSQRTVATVLEMGVPVEQGNMIVRSGAGAIILQLNDGPPDHEGNGSLFVLDEVADVRVPLGATGKYLSQVSEQAIEASVRQKGGNRWPLDVSGSIGSKFGLVSRKKTDAVYLELQQFDSRLTLDRVARRGEFCDIAARAAAVSATQILVQRAALELDVSAEEFEALEPRLRDGRPMLQIADALINGSGLCRRLGEPNVPGGPSYITEIVDAILSRTNQWPLSDFLASYGDGGSHQGQCKTSCYRCIQRFSNRAYHGLLDWRLGLSYLRALADPEYGCGLNSGDDQLPELAGWRERAHTLAEDIVSMRPSSLSHERLSRSGLSCIIERSSGDVWRYVVLHPLWRKDPETLGGILGTDFVPGMLAVDTYNLERRPLQELARLRHERGFGRSNS

SEQ ID NO: 24428 - protein, 382 aa, Achromobacter sp. 2789STDY5608612
MRALYEFFCGGGMVRAAMREEWNCLFANDISETKAAAYKVNWGGEHLKVRDIAHIKPSDLPGRADLAWASLPCQDLSLAGNGVGLNGERSGTFWTFWKLMMALKKEGRNPSLIALENVYGTLTSHEGKDFESIAKAIVTGGYRLGAMVIDAARFLPHSRPRLFIVAVDASVALPGHLLANGPSKVWHPSGIVNAFERMPQRLQSQWIWWNLPLPANKPKGLKDIIEDSPKDVQWHSKEETSRLRGMMTPINRLKVEGAIELACQTGERVVGTIYRRMRQGLQRAEARFDGVAGCLRTPSGGSSLQTVIVINKKNVRSRLLSRREAARLMGLDDDYKLPERYSEAYHLTGDGVAVPVVNHLAQHIFNPIIDEIKAFELAGEAA

SEQ ID NO: 24429 - protein, 659 aa, Achromobacter sp. 2789STDY5608612
MCLNADLDNPVTVIQAAAQLEGRKSISVGLKEAYDDFVQSYYSQRRAIADHRFWHLVSQARNVGAGSRQTTALDIALTADDESEFRVKRLLTEEIHVHWSLSAALRDKTLTASKNLGSAVGRGLLFFRQVGLGRWTAEPDLAKCRDRVLVAFDDRFANLIRERLGEVHRDAQWRLTSDPLDAIRVATELRTCGVMVDASVQLFRPLASDGVRVHGAWLGLPGFLPSIDTDTDELRVIPEGRNAAEVRITMAGSIRLASQTSVAGSYLVEPCLLPRESRPPWRLRLQFVDRAAPHMKLGGSRQNLPLLEDWYAAGPARIASHLPSNLGWARSRSAMEWLLEALYASGSNGWDESDLVNLVRRADRETDLAPWRTLRMLQDGGVIEPRLRQGWKGRVWTLVSPRIVVSWTDGTPLVLAEGAMCLHTLEAFQLAITGMGGTPFRIPGTARWSVPVTGAVSIDPNVLACRLGWDLVEQTEAPSSAPLALVETDRIAEHYRVASVWCWLERRFKAFGAAEGGARLTQLSHPAAKDHDVYRVERDGKCWHFLSRQAAIVAAHSVARVPLFAFVDDRIEVGARDGGLPDKLATALRRRRLASSGFTHDFYGYPATAEDAAWLAALLPGCVVGAPLCTEPSTGELLSRSRRSGGALPVQWREGRLTL

SEQ ID NO: 24430 - protein, 699 aa, Achromobacter sp. 2789STDY5608612
MASNLIWYAGRCIKRAEKGAASHLEAVAHLVNGGWRLIEDPKILFRGMNDVELRAADVRQMRVSDWVAFTIGNKGRRTKSWPAIAHRRLYWYVDLSALGGAEQTQRQLVVEGVQTRHPSGTWIVRCAKEEVLQVELRQHEGVAHLALGDGRVSAYSFDPESVTRMPTLDGEVELYDLKGVAPARSYDWTPDDSFALRVVRAAVDAGDSHARSFVAWLESHGKQSEGLLPVKSSDMAAANEALRSGKLAKRLAADQELLRSFLDALVNDERIGSLIKEGVERVAEQERTVARARAEAEAKREMEASRKQQLAALKQELENAAKEGRTSVEEELAKLRADGEAELRQRVSARIDEMEKRAAELDARCKALVIEAGHAREAIGEERQKAESIRSEIAEAQASLSAIHDSTAMAAAELAAEQTRLTSARMKCPVVSSPGPAKVLTLESVGAEIEKSQLLSSTGKTLMAHFLALTLAGEVPALCGPGVDDFLLVAEIMFGGGSSVRMEGDPTILTFEDLWIRAGTDLRTGFGQALAIASGIEGKPRTTLAALERAERSGARFWYPALADRAQRGMLPRSLLICVTIADQECEEALEVLSRAVRLDLNDVLQADSSLPLAMIAASAGNVAELDIGSKRANVALGAAAVASDAAQLGAARSLRAMRAVAEAARLSSAARLPELVQLFLGTGGQPARANKPQGVTHA

SEQ ID NO: 24431 - protein, 1778 aa, Actinoplanes awajinensis subsp. mycoplanecinus
MNSPALTLDGLQNYLEDAFLRYYETAYELRDSALEKERRRLLSQRGTVFVDPYVELMPSYPSSRSTTGEIFFDLGMPEAASLVQAGLLPHPRPYAHQEQSLRESLKGRNVIVGTGTGSGKTESFLLPVVAGLVKESKSWATPADAPAATPWWRAGGAFQPQRDKEQGRLPGIRALLLYPMNALVEDQLVRLRTALDSPAARAWLDKNRPGHRFYFGRYTGRTPLPGTRETATPDKVKRLAKLMRTAEQRQQRLAEGIAEGSIDDKWRYFLPSLDGAEMRSRWDMQHAVPDILITNYSMLSIALSRSDEAPMIEATRRWLEASPSNKFNLVVDELHMYRGTSGTEVAYLLRRLMSALGLDQRPDQLKIIGTSASIQDDAEGRAFLSELFGRKDSSSFTFIKAKEEEPEGADDLRELTAPLLEEQLTAESLPTDGTLPRAMLRAMTEDGELRPRALSTVAGKLFPGVGNEQARKAFDNLTKLLEMQDSPAVRLRGHLFARTLQGLWACADPECSQVAADEQSPQRRIGKLYATQRFTCDCGARVLELLYCQSCGESMLGGYVARNAGKEFLVSAIGTLDKLPDRAPAGRDAHDYRVYWPTDREPVVKGKWRRTGTRTSKDAKPPAYEMEFVKARFSPGTGQLERRFTKPRTGFIFSLTAGGAEDRMPAFPTRCPSCKDDRERPTKSDRVEDQRRSGSPIRTQGVGFERANQVLTGALKRRLKSRLVTFSDSRQGAARVSANLELAHYLDLIRALLVKSVKAKTGDGVLLQKLLDGDRSPEAKEALGRLKAVNREAFMAISTKMNGFDLDSADERALAGALESLSGRPSLVDMVNELQPRLLELGVNPGGPGPTLNKVRDGLSWTRLFDWDVSPVRDRGTSLDADDRELLAEIQRALGAQVVKTVFAGGDRDMEALGLGHVVPGAPMTLGSLDPAAANEFACSALRILGRRRRTPWTSEYAEKDWPRQLRDFADKVVERHPSCGLDGEGLIEAFGRKLNAGEQSGHRVDPAEMRVALVDKPAFWRCGTCRTKHLHRSAGICITCFARLPEEPETAESVAQDYYAWLIDEDGGFRLHCEELTGQTDPLESQARQARFQDVFLGDTEVPRVDGIDILSVTTTMEAGVDIGALSGVVMANMPPQRFNYQQRVGRAGRRSEHLAIALTVCRGARSHDEHYFANPAAITGDKPPQPFLDMRSEPILKRAFAAEVLTRAFRSVSKRVTFAVGRSVHGEFGSTDDWINLPELSSAVRDTLAIGHATWLSVANGLLTATNMDPKVADQLADWAATQLADAITDAARTARTQSLAETLAQAGLLPMFGFPTQVRVLYTEKPRGVGEPNTLDRDSSIALSEFAPGAEVVKDKSIHVAVGVVDYRQAGNGTWIQSGEDPLGPRDKAGVCQQCLGITLAETETCPDCGAGAPSFAQVTVAQPLGYRTSFVARDYEQLGEPTARAAQPRLVMGVWTEKHHANARVRSTTGKIMSVNDNDNELYQFTAATFKNSSRQADGLIELSLLTEKERQKRAKLSNQVPEGTPREPVALAAQRHTDVLVVGLSSTPPGLTIDPQEPAGRGAWASLGYLLRDAAVKWLDIGPAEIQVGVHPRQHEGRLTAELFIADSLENGAGYATRLADKFEDLVGEAEAFAHGLSKHNSGAPCDSSCHSCLRDYGNRAWHPLLDWRLATDLLGLLQGWPLDVDRQRERDVRAARRFAQDFNCSVVEDEILIIDKPGAGRLAILHPFEDRSGTSANARVTSLRNRDSEVKLVTSYDLIRRPGALMAELAAR

SEQ ID NO: 24432 - protein, 427 aa, Actinoplanes awajinensis subsp. mycoplanecinus
MFERRFTVQGHQGSVLSLFTGAGGLDLGLEAAGFETRACLEIDPFCAETLQNNRPEWEQLKCRDVTVAAETVKPKDLGLKVGDLDLIAGGPPCQPFSMAAQWANTGRRGMDDDRAQTVVAMLDLVEVFQPRALLIENVAGFLRGEISASPFIRERLAEINAKHGTAYSLHAQIIDSAAYGVPQRRNRVIGIATRDGKLMELPVPTHADAPIRAWDAIGDLAEADLPVPQGNWAGLLPSIPEGSNYQYLTARGGGEELFGYRTRYWSFLLKLARDQPAWTLAASPGPSTGPFHWDNRPLTARESLRLQSFPDSWNLAGPFRQQIKQAGNATPPLLAEVFGRALLTHLNGVPADVQEQVRPTLLLGQLEGPLRKPAEVLPVPERYHDKKGAKKAHPGTGKGPKPREVAPSQSRAGLVSSSDAVQQELAW

SEQ ID NO: 24433 - protein, 1018 aa, Actinoplanes awajinensis subsp. mycoplanecinus
MNYLEWNSSLLTYVIDRGDPTRDLYLYVDRDLLAKLSGLSPEQAVEDFSRAFQVGMGSKPFHRGMQTATKWRLSGFPGAPQFVIHLAMTVLAVTEDPIDGSVYKRQNALLGLPSLKSPPLGYDTDVPLLWRAWNMWLKGPGAIHGRPTARSHDLWSLQGWARSQALIRYHDRLLIEEYLAAGDPSFDSFRTWLALHRPHVWDRFREQPAMDILRAVFEEEEARFGVHEPRSRPATGPSQQQGLLSYDPMTGAFSGIVLIDEEWVGRTVDLGQGEKHTVDGYDPVLQIQPDVSELEMLTTGVQHRLADDLVMRFGGESLYALRDDARVDAQLQVRSVDHPAVVDLLVRADQVARVTSILQTAGLEPRQTPAGIGDWARFRDVSLTPAQPALLTGLGLGRAARAEQQCTFFGGLRVRTGLYLVGGEPDVHLTGDEPVTEVIVDGVPHPVLADDRRLALSDLALSPGQHRIESPCGTRTLRTEDYVHERPVHSEIARPIVLLPHGYAVKPTEVRTSAAATLAGAALDGVQVYDPVIIGKRPGTDTLMITYSGDVSEVFPTTPVWVSEAGMQPSTIDVLATVRDNSAPVACVLVRSRANERVQAIAVPSEAPRFEGKAPSRPRPDLMTSLVLSFRKWSWVGQRHPRVDKIMSTALRATERASSTAPFVQPSPGPEVSRVTVAERLVAENPYDDVLTWLSERENGMASISELADTWSWLCRRYGLTDLAFRWRGALKVLEDLGHIERHYDSARVGVAPSTFVALPASAGLYALAGARPQQLLERLNNPDDPDAVVAEAALYWQVHHRTPVDVQGRPSGPQAIYLESDPAQRDVVQRGLQGLGVKMRGLVADALLALQPAITDLDAVGTRQTMSPGTEIHRRTNLNGVYDWKPVRDDARPGLYSYRLRSGRAFAWRQSPGDSLVEVEFGVGEWLLRAAEGETSLLHADQGTRRRLAVPEAVQLPRMISRALVLRSGLPPRVSRIGPGPALYLVYENVDSSTTRNVAQLLAQEPVAGTIMTARQG

SEQ ID NO: 24434 - protein, 1783 aa, Actinoplanes sp. N902-109
MSHLAASALTLDNLQSYLEDTFLRYYRTAYELRDPHVEEERRRLLSQRGSIFIDPYVELMPAYPSSASSMNEIMASLGLPEAADLIHAGLLPHAAPWSHQEQALRASLAGDDVIVGTGTGSGKTESFLLPVLTRLVAESRAWEPQATPSAATPWWRGTGAFTPQRSGETARLPGIRALLLYPMNALVEDQMVRLRSALDSPSARRWLTQNRPGHRFYFGRYTGRTPLPGTRHTANPDKVKRLARLLREAEARHQRLLQGISDGEIQESWRYFLPALDGAEMRSRWDMQAAVPDILITNYSMLSIALSRSDEAPMIETTRRWLEASPEHHFSLVIDELHMYRGTSGTEVAYLLRRLMTALGLDERSEQLRVIGTSASIQDDAEGRTFLSEFFARHDPSRFTFVKAQHQIPQGADNLQDLAASLLSGALHADGLPADDTVKRAFTLAMTDPQSGEFRPRSIDTVAGRLFPESEPEQARAALNSLTALLEQQAFPAARLRGHLFARTLQGLWACADPACPKVPEGLRDPKRRVGVLYATQRFTCECGSRVLELLYCQSCGETMLGGYVARASGREFLVSSIASLNELPDRAATGSNADNYRVYWPTDRAPVGKIQWQRTGTRTSADAKAPQYQMRFTKARLSPGTGQLERNPRQGMTGYVYTLTANGAEDRMPAYPTKCPSCGDDREWRQKSTRVEDRQRSRSSIRTQGVGFDRANQVLTGALKRRLDSHLVTFSDSRQGAARVAANLELAHYLDLIRALLLKTLREKAEDGALLQDLLDGNNSPQASAFLERLQVADPHAAMAAIKKANSFPLTTADERALQGATESLGGKPSLVDLVNQLQPLLLDLGVNPGGPGPSLNKLPSGLPWTSLFDWDVRPIRDRGAFLDSDAVGLLTKIQRELSEQVVKTVFAGGDRDAESLGLAHVVPATTVSLGPLSSDTAYEFACSALRILGRRRRVMWTTDAEKGWPSQLKQYAEAVANAHPCGFDGEGLADALGQRVKAGQESGFRVDPSEMRIALIDKPQVWRCTVCRTKHLHPSAGVCITCYQMLPTEPEEPEAVPQDYYAWLADQDGGAYRFHCEELTGQTDPLEAQARQARFQGVFLAGTEVKEVEEIDILSVTTTMEAGVDIGALRGVVMANMPPQRFNYQQRVGRAGRRSEHLAVALTVCRGARSHDEHYFANPAAITGDEPPQPFLDMRSEPILTRAFTAEVLTRAFRHTVTQIDFGVGRSVHGEFGSTTDWLNHASLATVVRNTLTTKREDWKKIARSLLTGTRIAATTADILADWAATKLADSITTAAQQARVPALAEALAQAGMLPMFGFPTQVRVLYADWPRGWEEPNSLDRDTAIAISEFAPGSEVVKDKAIHTAVGVVDYIQRPDGSWGQSNDDPLGPLSAAGICHSCLGIAKVAGDACPHCGAGAPAYAQVQLAEPLGYRTSYWPRDYEQLGDPAARATQPRLALDDAPDAKHENALVQSANGEILAVNDNNGNLYEFVPSTKTTKKGARLADGLIDQRLLDDKDRKDQAKLWGHTAAGPAREPVALAARRRTDVLVIGLDQLPSGLRIDPQQPAGRGAWASLGYLLRDTAAKWLDIGSDEIQIGVHPRKRAELVGELFIADTLENGAGYATRLANKIETLFDEADAYAETLGRHGAGQPCDSSCHSCLRDYNNRPWHPLLDWRLAIDLLGLLRGRPLDVDRQRDRDFNAARKLADDFGFDLIENGFPIIAKAGGGALAIMHPFEDRAPTSANQRVAEIRKDQANVTLATSYELIRRPGALIADLMAS

SEQ ID NO: 24435 - protein, 354 aa, Actinoplanes sp. N902-109
MAQSCAMAGVAISLFSGAGGLDLGVERAGFEVRAALERNPDACDTMEKNFPHLASPVIRRDILDTPTGEILNAAGLKRGQQPELLVGGPPCTPFSKSGFWLDYKRAGLDPDASLLQAYTRVLAEARPRYFILENVYALTYNNKASRPAFERLLKEITAAGYTFDHQVLHAANYGVPQARPRLFILGARAGEPTPKLPDPKHGGRWERRATGNADIPHVTAGEVLAGLVTDPEPEEIVAGKYGHLLPEVPPGDNYLHFTAERNYPDPQFAWRSKYWSFLLKLDPNKPSPTIQAQPGPYIGPFHWENRRLRVAEMKRLFTFPDEFELVGRRSSIQAQLGNSVPPLLAEMVARALPA

SEQ ID NO: 24436 - protein, 1021 aa, Actinoplanes sp. N902-109
MDLAEWNTQLFSDVCARGRKDQRLYLYVDRDLLGKLANSAPQAAVEDFSRAFRASMGVEPFSRGAQAATAWRRHGFEGPPPFVAHLAMSVLAVTEQPIGGSHGVYARQNRLLGLPETPTSPPGYALHVPLLWGVWNSWLDGPGALYGLPTAKAHPHWSLQGWARSQGLVRFTDRLQLEEYFSTATGQASFDAFFTWLRLHRHDLAQRFQEQPALEILEDVFREEATRWMQEGPRPVSRPGRQGLLQYDPWTRSFSGAVPVDEALIGERVDLGDGEQRVVEESDSLLTVTPPVADDALLRDGFEHELNPDIVKRFGGEAIYVMRDEPAANGLLQVRSLSRPEVVKILLRRHQLQRVSETLRSAGIGVNVGPAAWAGWLWINTFQVSPSQRPILECLHLTHVATAAPQPAHLHGGLRLLASTYLVGGEPDLLTTPGMLKDVKLNGKSVRTSPLAHRLPLVDQFLGPGAHLLEFPEGRLSFRTLEYVHEAPKAGGILRPIQQRGSRYVIGAAGDAEDVSMSLSGAALHQVAVPVPYVIRRSPSSEVMYLTQCGEVNEIRPDTPMWLRSLDLEPTAVDVMAAIRTTPSTVACLVVRNTRTGSTQAIAVPSDAPRMDGHAETHPRPDAFSALAVSVGSWSWVGAPHPRIRRILSQAIQANNSRTPHRPQPRAWSRRPKATVRGDVAAVVVPNNPFDDVLSWLSERERGRASLQAFISTWEWACARYGFAALAYQWRRALRILEELGHIERDYETGQIGVTPAELVALPASSGLHVLTGSRPIRLVERINDPDDDDPVVSDAVSAWEIHIRTLIDAHGFPAGPQAIYVEWDSARRESVGKGLQRLGVDLTGSVAEALLDMQPGIHQLDLAGMPLTMSPSREMLKRRRNASGAYEWAATPSDTAAGLYCYQLRHRRVYAWRSEPTAPLVQVEFAIGEWLLQAATGNTNCLLADAGAARLLAVPASLPLPRLLARSLVLRSGLPPRTTSARTDGTTYLVYDNIDARTIQHVARLLAQEPVHTSITRKLA

SEQ ID NO: 24437 - protein, 1957 aa, Agrobacterium tumefaciens F2
MFDPIGGFNRMIEQFLSYLDTAYRIDNQNVSAMRRELLSTPGELALDPIFEAVPRYETAGYGLEALIEDKDGKLPGFLKAERQAFVELAVSGLFDRDTKSAEIKGAYQPYLHQVQMLSKGVQDGTPGIVTSGTGSGKTESFMLPILAQLAKEATSWPAPLRPVDDDWLEDGKSFQIHRRNEHPDRPKAVRAMILYPLNALVEDQMVRLRKALDSPAAQAVMQKHFRGNRLFFGRYTGKSPVTGFLDHPRRSKDKTWKKRNSRARRDLKVELQRYQSIHSRLDADADPDLHYIFPTTDGSELISRWDMQKTPPDILVTNQSILNAMLVREVEDCILKETREWLIGNEDARFYLVLDELHLVRGSSGAEMAGLLKVFLERIGLADPAHAHKLRILSSSASLPMDEKNASASIEYLRNMFGAAGTAGASDVDAAWKASVVTGKPIVVERPERTPSRDSLVALAKALDDLDYRKQPEKLRQRFFEAALSLPGAAGQDLRSVMLHATAAAAAMLDFAMQDRDKPGAKTPRSIAQIGEVLFDEADREAVRGLLALRAIPDLPDDVLADDLRPSRGDIASLPGFRMHSFVRNIEGLFASVGRDDSGSVAWGCPSIERGQDYDEKAASEGRRRMFEMLYCEACGDLYLGGKRGENDPGSSRRVSLLPAPQELEKLPESASSLRFEDASFREFALFWPQGRTPEREIRVDNTPYEWIVGYLNPRTGVVGEEESEESVKGYLLRWRGDDKFHKRTIEDDGTAVPYCCAKCGTDYSGRYRQANSKRREGRLSPIRSFRTGFGKTSQLLATELVAALKSQGGDGKLVAFSDSREDAATLVLDVEVQHQRDLRREILIAAATRLAADLTYTDEDKVELADLNAEIAALMGEGHEFDHLMPRQRVLNRKRNADGKEPSVPLSDLFEFARQNVRYDTRPILNELMKLGSTPVEGADTYKNRVSNKSWYEFFDRDDSGDITWKREELNEKVDLLARARKKVQDEQPPDATDLLFSKTYFALEETGLGWPSFYGSEEYTPEKSKDDAMLRIFADAYRITPNPYMDEVKTVWSTAHEMLGRGDNRMRRLMSKLFPLQTEAECNLFLEKLRTKLRQTRLAGSIDISLLFFRAAKPTGAAWRCDRCGRVHLHEGFGKCTRCGEELKRPDDLTAEVIAKGNFLGRRVKRTIEADEPLFRLKCEELTGQTSDPAERLQQFKGVFVKGAKENDADFAWRKLFDTVDLLSVTTTMEVGVDIGSLQAVYQANMPPQRFNYQQRVGRAGRRGQAFSTVLTVCRSKSHDIHYFHNPIEITGSAPPPPFITTGLTDIPSRLLRKFWLVKAFGLMREKADQDWPGDDMVPGDIHGEFLYCSEYFRTDRNWSRKLAEALDETDDQRRKLAQVLADVSKCDVDRILSAVTAEKVLEAIDGLFDELGLQPIGIASALAERGLLPLYGMPTRTRNLYVDLAKAKAKEDFDADWDTIDRDQDMAIFDFAPGSVRTREKLRHRCIGFTGTLPKPNEHITDFGTPIKPFGEWWKDDFQLRFCGTCGAWSRGCNETSECPACGAATTDPGIRCITPAGYRTEFRPTDENLASKVGQRMTLASIGKVDKEKTEANLQVNFAEQSEIFLVNPGQRDETDFTGFQLQEAVDQDAKRISWWASTKPVVKLANQAISAEVVAEDQGVRYRADETVIKAWLASTKITNSLQISPIRMNPNLRLLDMDVGLSMGRREPTRTSVRAAAISATEILVQRAALDLDIAPEEFDALAPNIMVTAMGERLPYLQISDALPNGSGFCRHLLGDSTIPVSGLIKSILDDTEEWPRQDVAVEAHRKSCGSSCYRCLQRYNNRNFHGLLDWRLGLAYLRAIADPSYQAGVDGDFGCFEVSDWKASAADLAEQTKTFIPGNTVAHAKDRPDIPTFSLDDSGSRWGVVVHPLWDARKLFDRIGLDRSHIAIDSFELARRPLHVLQRARAAVR

SEQ ID NO: 24438 - protein, 614 aa, Agrobacterium tumefaciens F2
MLKCMGKTMGQVAIDLYSGCGGMSAGAAAAVPDLQVKWALDIDVNATKTFANAHPEAVVDCCDVSLVSAAEVVERAGIEKIDWFFAGPTCQAVSTMGVFHLDDPRNALFVHFIRLLDGFTAAGRKPRHVVMENVPGVVYGQNLVIVKELFKIFKERGYYVFADVVNMADYGLPQLRNRFILIATVNEVPPTFPRHTHAPVKKGELREYVSVSEAIADLAVGQADDKAVVKLAYRGRPTRFQSYVRDGNGFAPNHHGNHLSEVNRKRVATVPQGGCWKDIPPELLPDRFRRVRLTDYATLYGRLHEASPSYTISAGFNNVTSGCFTHPIHDRALTVREGARLQGFRDSFEFLGPKEAQYRQVGNAVPPFFMMQLVQHLMSGEKGVPARITAAALEGGKKLPSMVKRFTAKRNDSERSRDGYGGGTYWPAGWGEPIAADAVAANGYRLKEDMPLRYRRRDEWRANRDRFVDQDIVKVYDAQRQQHVAAGSVAFPLVKQDDVDAIDRAIVQILAVVGTRPGSLEVDAPVRYLRARTKLLHEQLREKQAADLPAMEIADDEEVIRFGKSDALSQFARLAFEDSDLADTDAVRGPHLVLHWRHMEADAIRIGQDLHAEQ

SEQ ID NO: 24439 - protein, 822 aa, Agrobacterium tumefaciens F2
MGTRRGRGILASFEEECIERYFLAPGNAGPIGSVYLSDEDLLEILGVNDIEEARRRFIKLLPAGSNLRDYLSGELQPTRASVPSYIRLLMFLCWMQTTETRWGGTRQFHEIFEGHIGFRPWSMSGLNGLWEHFRDFLKKEHGVILVLPDIHRVYTQIGRTLQLAFPTWRDREALRKLKRQVSEQHLLDPLVVANTVRTSRGSLGETMQSFVYNFEEFDQARKRGFREFEKTPFWKAWYAIVATQAAAEYIEVIESDFGVYELYRVPPVGDRVLISAPEEALRLVPKPIAKLISKGLVCLESLGYGRYRAQAKATSNVLLMHATKFAQCDRSNIRSSASINSKWVVATLRGKLGETEISASGQREFGWHDGIRVGAGAYLGRSPLTPTVSGPVPEAIKVEVGGKSVGLIRVADDMALPPGVYTGAAVARSLGASHEVLLVARANEVSPVRRMPVELAKDIPEDDFHYGTAPSVALDTEVWSGVRMAPGDELLTIGEALYERTARGLPLSEAVDIVRRGISLLEDRPSEWDIVRLFADAGWLEPTFLRHFPARRLLQLQLSAYPVDETTVVICGPTPLAVVDRLTVAARAAGGAIETRNGASSWSLPRYVFRAQSSGGVQEFLRRAELGLAPKSAPAVADRADHGDPHGFRVVGKLSLDRGFFATAFDKEMTNGLYRIERPEGRMHFYYRSVIPGKPDQNYVSPSVALLSHHLRLGGEVFEFKDGIVFARAARVKLPSSWARWASDLSLCNPGLSNASGFWRYEYPVGEAAVAAISKLVPVSMDTGLTKSWRDGFVLSASNRDRKIYDNRSRLVRSAARMRGKK

SEQ ID NO: 24440 - protein, 639 aa, Agrobacterium tumefaciens F2
MVLDGVGSLWLVTGEKDEPKHVLEDLEELPDFSVPMVSTLSSTIRASSEFELPATVEAFNLPGHFKTTTFVTVTRILAAYSARDIDFEEVVRRLREGRFEIPSREIIAIEVSKGDWLTSHFIRLPSGSYGLSPDADPRALPVKTIENKPDSMKLPSGLLIFLSEPRWSLATEKDVRPEHEVLESAERWLGRSTLAVESAPGDANAVDLLRHHVATTVNDDEKADIAAAARLLAGRQSILDIMPQILAKDPAFQKRVQEFELQEQERLKERLRSKVESEIEAEKARLGEIRAEIAEADARLAVAGQRELLLRNEAEKHDEVMKARIEEAAKQLQGGAIEQTDHLRRELDELRDLVLQMPSHPTTVVVSAAEEIPEPQRPDVNGTAVGPKADEGARKSILAGLASATGISQAHLMAILLKSTDEVPLLVGERASGVAADIVAAIGGEDSAVAFCDPSRISWQDLMHDETSGLAAAVAKAKANPDILVPIAICGITNGPCEYWLPQFVESRRIGRLPRNLAIVASAGIDGSRVSIPDSVLRFLMPVEVPNSAKPVRRLFAGSWPAEFDANRSNLADAIDVLTQSEAFENGSLQRAAKTLSRTPQGMAMAEVAQPLVRQAQWLASVSGGGQYEFKNRFKNIEG

SEQ ID NO: 24441 - protein, 1903 aa, Alkaliphilus oremlandii OhILAs
MRNPIGVFDEIKNNSISYIKTAFGTQFPSIEEERELLLKKEGVFSRDPWIEVIPRYKSSGKTINDLEIEDTPGLDKEQLLLFKNLVSRGLVGKFPLYKHQAEMLKTALDKKNCVITSGTGSGKTESFLLPLFAQLAKEMKHWSKPNAAHAHQNDWWKNIEWKDECKKNKTSCRVPQRKDHETRQAAVRALILYPMNALVDDQMVRLRKALDSNDVREWFHEYLSGNRVYLGRYNGNTPVAGHEFDNDGKLNKNKVAKLIKELEEIDATAKEVANYIQHEVEDEGEKKEVLASFQRLDGAEMRSRWDMQETPPDILISNFSMLSIMLMREEDNDIFENTRKWLNCEDLPESHREAEKENRIFHLIIDELHLYRGTAGTEVAYLLRLLLLRLGLNPKHPQLRILASSASLEPGDDKSQKFLNNFFGCDDFEIITGEYDEGTTELPEQTLPIEPFITLADNAQNLSDEIFSQVAKELGSKKKFLSGKMELIDILISPRYNLQRILLDTFKNEEGKYKPISLQEFSEKIFGSNIDNWRKAAQGICIARSLFEEEKIEDHNLPSFRLHCFFRNIPGLWASTKPLGKVEDGRPIGKLHSKPDIIDKDDKSRVLEVLYCEHCGTVFYGGTRLVDKQEANTYEMHITTPNLEGIPDKQLSVMVEQRKYDEYMVFWPFPREDLHKDSEKWKHEFSAPNGRGTVTAQWSQYKLNIYSGRVKSSKVNQTETDSWINGQLYITKKKENEQFIDALPNRCPSCATDYSKRNRISPIRGFRTGFSKISQIFTKELFQQIPEDTDRKLVIFTDSREDAAQVANGVERNHYSDLLREVMIKTIKDEVTLAPEILEAIESGREYTQEEQDRIKNNKVIKEDLLKKLGKINAYKSLPPEHRMALESELEQLEREIEEIKENGKSRIISFSQLVSNDYKQCGKLIQELISLGINPCGNDLDKQKFYWNNAEHDWIELFDFETKSWKNNLPVDADEAKKIINNTLSYNFGRLFFGTLYFGLESSGLGIIKIAYNNEQLKPFADRLGMSLQTFEQICDSYLRILGERYRYLPQKPVFNRWKKIWQDQFVVDDFPDYTSISASLKTYIRKVAENYNIHEEYLGETLINALRAFGHNNVKINIPNINIKLAIKEDPIWQCSKCKKYHLHFSAGVCTKCGNDLDEKATGICEEIWSNNYITQAVLSDRESIRLHCEELTAQTDNQSERQRFFKGMILDEDRLYKKVNNIDVLSVTTTMEVGVDIGNLQTVMLANMPPMRFNYQQRVGRAGRRGQAFSMVLTLCRGRSHDEHYFAHPEKITGDPAPVPFLTMDQDRIKNRLLVKECLRNAFKYAGVRWFHSPTPPDTHGEFGLASDWCRNKDKVIEWLNNMIDQQKEIMIALFGSIDNNMLNYLKEELPNQIDNTLDNKEITGDGLAEKLAEAAILPMYGMPSRTRVLYHGVNPKDMEFLTIDRDLEMAITEFAPESEKTKDKAIHTAIGFTAPFIFKGRSFEAISADPLPFRRLMGRCRACGYLKSIPTSNEFCPHCGISKGDEEGYREFNIAIPRAFRTNLGSGKDAKSDDFKVSRRISLLAQSEDIDRTKVHSTNTNIYLSDNSRVWRINDNSGELFEGGIKTQTKIPNQWIASKFINDEEKGEVELEKIAIAAGKHTEVLRIQPNQIPDGLNLSLHYSDSAIKAAAFTAAFIIQRVVAEELDIDPDEIEISQLQKYVSNDEDGIIEIIMSDRLANGAGFVQYIHNNYVDLLTKTCNPSGNSFAASIISPEHAEDCKSACYECLQVFSNMPYHGLLDWRLGLSYLRVLLDPNYKAGLDGDFDFIDLKGWKDEAEELIKRNFVDIFGFKYEEYGQLPGAKMGKYNIIVVHPFWNTEEHRAKGILADAIYQAGENPLFVDTFNLLRRPGWCYQKLMK

SEQ ID NO: 24442 - protein, 329 aa, Alkaliphilus oremlandii OhILAs
MKLISLFSGAGGMDLGFEKAGFKVIAANEYDKTIWETYEKNHNAPLIKGDIREIASGDFPDDCDGIIGGPPCQSWSEAGALRGIEDSRGQLFYEYIRLLRDKQPKFFVAENVSGMMAKRHSEAVQNIISHFAGAGRGYNVFIQTLNANDFQVPQDRKRVFYIGFRKDLGIADFKFPKPIEPRLTLKDAIWDLRETAIPALDKNKTNGDQCIVLNHEYFIGSYSTIYMSRNRVRSWDEPSFTIQASGRQAPQHPQAPKMEKVETNKQIFIPGSEQLYRRLSVRECARVQTFPDDFKFYYTGLQDAYKMIGNAVPVELAYHVANQIMTYLK

SEQ ID NO: 24443 - protein, 683 aa, Alkaliphilus oremlandii OhILAs
MNYLEWNEAIARHYFNESMAGREVILFMDENLINSLGERKNSDIEDFFEAIKEGSRWCRGDTVCEKAYTTYSWGKIRNEPGFPPYIAYLAFFVLAAGLDEDFATHAYYPKLSTLLDKLDEGTNGRRPKDFDKMEELWYDLQEWSIDKEQEKLGKFIARSMINWKHVGLPMAQVLITQDERSRLPNFFKESSFDPVFPPTLDAISSAIYRSGIFSQKTKRLASTTDKNKAPFREALLQLIKQDLLEWDGTIEVSNEAIQERQKSNKQSINVTLRICIDGFDRFTSSIKTSLRFKTAKDFPDDEMTFESLFSKVTFTCEEEELGWSTQLLDEIEQELLCVSALDLLNGDQFEDKEYGWSASLKPSKLRIFERDEDRNLTGWIEVDSIKSNTEYYILCHDRIKNSIEEWGYKYCTDFKIENASNLPNGWYLYKTTEINHSHPDEDILKLPLNYSFRLDGGIKASKGNTYFKFCPPRVHLEGGKLEQLSIQVSPENQDIQEYEKGRWKFVNGCVNNDVVDLSLYIGEEMIIHKKINFQSSMLMNNYYLPRMNRFGHLLEEKDDNGYIQGVHITEKELQKLPTYTPEIPTYSSDTIIFLGRVPGQIISWPKEDLNIEWEPIWALSKIKRDYWKVHFIGSNIDERMRLSKEYPKWKKWRQEFIQKNVELPKIKIIRELWLSYKKEARKL

SEQ ID NO: 24444 - protein, 2026 aa, bacterium L21-Spi-D4
MKDPIGSFETIKENFVRYVKTAFKTKFDSLEDEREALLNEDKVLYRQPWIEPLPEYKSSGKTINDLSSEDLPGLNEAQQDTFKGLVSQGLIPGYQLHAHQAQMLKEALSGKNCIITSGTGSGKTESFLLPLFAQISKEFSSWSATGQKEQYADSWWRGTLSAREIVDTENGFVLSNEVRQRAHETRPQAMRAMILYPMNALVEDQMTRLRIALDSSPVRQWLNENTGGNTISFGRYNGSTPIAGKLERLNEDGIPGINTTKVNSLMRELQAIERNQQKVEEYIRQERQKGNEVDEKELKSFFQRLDGAEMRCRFDMQVAPPDIMITNFSMLSIMLMRDIDGPVFEKTRQWLACEDLPEDKRDQEKQNRIFHLVIDELHLYRGTQGTEIAYLLKLVMKRLGLHPGHPQLRILASSASLEPNDEKSLEYVGDFFGFRKEDVKDKFEIVTGELSPVDPLPEEDAPLPTNPFIEVCKAYTSTRHQVDDPAFSEACVSAGNTLRQVFGIDDNVSSIQDFLQLLLHPEIKLRERFFDACSVVHDGKKVPRPVCTFRKPGDGNPPDLPYFFEALFGQVNEEKLRHAARGLLIARSLFDEPQYKNLFQQAGRSLQRFRFHYFFRNIEGMWASTSSENPEDSRTSGKLYPVPRIKSEDGHRVLELLYCDNCGTTLFGGKRGAPGDTNAFCELLPVSPNIEGIPEKTPAKLVEKRTYQEYGVFWPQGDQEFIAHERTRGEWDHPHDAWWRQLTVEGATSTEYTAQWVEAYLNKHSGDVVPYSIEVEEKPGNWVKGYFFRVLRDSDNSGVADTRLQANKDEFGNMIDTHKALPCTCPGCGVNEQYRAKGSSIRGFRTGFAKTTQLFAKELVYQLPESAKQRKLVVFSDSREDAAQIANGIERNHFTDLLRENLIKELHDTIITRARIIERYNSGEDLDELRTTYQEKIDEVEEVIENSEISQDTPNQRKQEKRRNAIQQIQEIKNRIIKVRDLVRSVDPDKCAPLIKRFIQLGVNPGGPSINLQEIQDGDTAKEWYKLFDFTKGTEKWIDDESNFRGQIERGTFVQLASLFFGNLFYSLEASGLGYLTVNTTAEPLTHNAANAGLIRDRFLEVINSSIRILGHKYKYMPNDFDNPRILDVTDYNSFPSLFKKYIRKVAELNSIEETDLGEAVLNALTALDVLTGQGINTQELYIKVATGDDPVWESPRGSRPHLHKSAGVCTQFPEGPPIPENSTSICKNFWNNNYLSYHSAVENRNPIRLHCEELTGQTDNQFERQRHFRDIILQDDGQPLAKSIDLLSVTTTLEVGVDIGSLQAVMLANMPPQRFNYQQRVGRAGRRGQAFSVILTFCRGRSHDEFYFNHTHKITGDPPPPPFLTMGQDRIIKRLLSKEVLRQAFIPLMADIREDILTLSRNERQTSVHGEFGKTDHWQNYRESVQEWINRNRAEIERTVEALKPGIDPGKKQELADWIISNSDDGFMVKVNQVIENDEISTIDISEKLAEGGVLPMFGMPTSVRNLYHEIAYDGRDYNLKSIDRNTDLAIYEFAPGAQKTKDKAIHTSIGFTDDFITRNGRWGDPVIVNGSPFYNERWMVKCKTCNFIATQREEPEQNICEYCGETERVDIFPIKSPVAYRTNLSGGNDSKENSEITLSRPPILAESNDEESLVQEASGNNFLAKLADRDITWRVNTNGDLLFEGKQVRTGNLFPFNRNQWVNFSNQWILRGIEDNSESGYRFNVHDNEDAYEKIALAAHKNTEILRIHPIHISPALTLDMFNQVSSLNYAGIRSAFYSAAFLLQRVIADKLDVDPVEIEIADIRKISSENGRDMAEIILTDELPNGSGFVRHLFNNINETIQEAITPQEGITYLGNIHSESHRQSCKDACYDCLKVFRNMNYHGLLDWRLGIALMRVMTSRNYLAGADGQFNGFLELEGWPEDATRLRDSFAESFEFDVLEGFELPAVLVSKTRIYYVIIIHPLWNCKINESGIPDVPDNTWLAERVFEVYQKAQENNGVIRFVDTFNLHRRPGWCYQKLFTE

SEQ ID NO: 24445 - protein, 390 aa, bacterium L21-Spi-D4
MKHNNQENKIPLLSFFSGGGFLDMGFEKAGFEVAFSNEIDEDFARFYNEGMSSWSGEKREVSAICDIDEASTKEIEGRLKGRFGIIGGPPCQDFSIQGSKNGFDGLRGTLTYHYYERIMDLQPDFFLMENVPGLVLLKKTKKAFNAILDLFREEYLISTERLNALHYGVPQNRERLFVFGVKKSLVKDTSLYTLNDLWFNWPVPSYPKAETSYNWGEPKGRGLEIKGKKLPEPPLELCIGDLLISNNEKRTIPNANEFFKLKKLSKIRKIVEGDTYRPSFKRLHRKKYSPTACYGNNEVHLHPVYNRRLSVREALRIQGVPDSYIISTQGKLSKKFKMIGNGVPVPLAHQIALSIKKFLSELEHYKPKMNGHLVKGKTKPSDVKNSVEEH

SEQ ID NO: 24446 - protein, 948 aa, bacterium L21-Spi-D4
MNYLEWNNAIGKWFFNEEKAEQEVQLFISKHDLVKIGREKELDGDTEKIFLDFIEAIRKGIPGQSLNGNILEHALYAYNKWQESPAKIDGIPVEYPLYLGYLTIFVLPLTESNQPDLRVDAYYPRVRTFLKKYELPTMPTQNEYYNWNSLWDDLFNWSFEEKNTELGYFEVHPFKNERWVYVGKPLSQSIFPIHALRQLPQFFETSGLVPGEEIEDNTFRKLLLANGERGLGLSERVLNAIRQSSNELGQSIISIVKKNYLEWTGNTDQYDSETETIKKGNTVAQLRLCIEGDKARGYKTYYRLYTKLDFPEDLTFLHDEREHKCQQFGKGWSKPLFLPFSEGMELQDDLNKWKAKFPEKDVRLLIEGKNFHLSGWVEVPYMVTSRMLLLVKEEQSPSIEEWGDCFSKGDFKKIPATGIPDSHVLYEICNPPINHPDIPVLQFKSEKRVMITGGLKTRARTWLNDLLPDVELENGRGKETVYLVYEDSDEKIPLKRKDIDQPVWTLPPDIKINRGFHVKVEGSKVKGEQLRNFIEGSQGKVELLNEGMLPARNQFGQIISSEESNSYVIGSKLLTEDERKLWLRQALYSREFRPQITKGKYLSSVENDFTGYNNLLVSFLTVKGESSSKDYFEAFESVYQEKFGPEEIESHPIELSRLKRWSLNYLDYMGILDYEYSTKKIVVNPPQFLLIPTCSGRKVLLIGGRTPELMQKVKAETEKEGLHLNLEPQDISLSPFILPPTVSVTGFDENDGNRIERKLRKVAEACSISFDPNKLPQFRLAEFSGNIDDYKSQLTPDERFDDSGWPARVFDVDQLHFIPIETRRIDKGFSLVEYRLTEYSFKHRLWMNDHPYDVNKNWGRFMILNRYRKEVIINDRKKNIVAIPAALPLPRLISEAMTLFSGKAPKRLFLEIEGINTWFNIYENIPPIFASNYFRKVGQTKKELTINL

SEQ ID NO: 24447 - protein, 1953 aa, Bradyrhizobium sp. WSM1253
MLDPIGGFERIKDFFISYVETAFRISNEETANGRRELLETDGALATAPFIEPVLRYQQYKDPLEKLVSDARLSHLSEDGRSAFVELALSGLFDGEPAQGSIKRKSAYNPYTHQVEMLFRGARRGKPGIVTSGTGSGKTESFMLPVLAALANEAVNWPAPRTGFLQDNWWAGGDPFVHMRRHEDPGRPKALRAIILYPMNALVDDQMVRLRRTLDSEEARAVMDERFSGNRIFFGQYTSSTPVTGYEIHPRRSKDKGERSRRTRRGNVLREEMRRFESDQDAARQHDAAARQAAAAAGEKAEPTRFIFPSVDGGEMVSRWDMHRAPPDILVTNASMLGTMLSREVEDKVFESTRDWLASDPESYLFLIIDELHLVRGSAGTEVSFLIKSLLQRLGLDKPELIHKLRILASSASLPLDGENEEHSLRYLRDLFAPYGTSEGPNDPGTKKLDFWRDCVVPGTPHLDRVALSKLPTEPFTDLVAAADPKGEGLVRDVPKSKPVELALGKIAVAFGLNPQDAAFVQSLSRRAAEVLTTACFDGENVRATSIDRLAQVIFGSADATRALRGLMLARALPESAGHKASTPQGLPSFRFHGFIRNVEGLFGSVDVGNDGIRIGDLTIERGTSHGKRTGDSARGRRLFELLYCEACGEILLGGQRGSGAGTTNVTELLPSAADLEGIPEKAGSEYYDKMTWQQFAVFWPRSAAPRMSERNYDRWTKSSLDPTTGAVTERDEVPAGHIGGHLYFQTDDAIQNQRGQQVRLRMAQPFCCPKCGTDYSFRPRTGRASSPIRAFRTGVGKASQMVATELFELLHAIGAQAKSIVFSDSRQDAANQSLEIERLHLRDLRREILVTAARECLADAQARHLSQEERARILAGLGGDMNAVVAQVTAWNKMDGELKGIDIESKKIRLDYLLQYGSSGRALSRITSEFVGLGIHPYDEVGRAKFDDKPWWDAFVRTQGVNQFSPQLPADRQLDLERRIMTNQYELVEDVIFANTFFALEETGLAYPSLSADATDEIRKLDAWLRVFASASRVREGKYFDRNNFVTWDRPQAVPRNNRVRRFADKAFGAGVDNGLKGVLDALAVIGHNGGVVEVGKLHLRVAEAGDHYWRCESCERVHLHRGEQICTRCYNPLPDNPTGVVEELWSRNFLGRRIVRGHDQGIKRFRLKCEELSGQTEDFSDRLRRFKDIFVGQTNEVGRLAEEIDMLSVTTTMEVGIDIGSLQTVYQANMPPQRFNYQQRVGRAGRRGQAFSFVATFCRGRSHDAFYFRHPESITGDAPPPPFLAVDHDPIPLRLLRKVWLRSAFAVVRDKCIGRGDIYPGDDLMPPDVHGEYVPTGDFYDTGSPWPDRLLAALKQTQSVRDAFVASAVLDEEQQARLLAASAPEMLLGEIMERRDAAPRDNAGLAQFLAEQGLLPMYGMPTRVRNMYLGMDRTGRGSDEELSWLSMDRDLEMAIFEFAPGSLLVKDKEKHKAIGFTGRLLDPERRGKNILVQPPMSNWISEYGFVGWCDACGAAKHERERPGGGVRCDDCRADMQAAEFRHYISPAAFRTDFRPEDGDLDEVGVMSTRTVATVAREGKAEDVGSIRIHAGAGTTIMQLNDGRPDDLGEQQLFEVEMMTDQDVATFPRGVQLADQAIDTEVSIKDKAKRFQRTGDGIGKFGLFARKATDAVFVEAIRFNERLNIDLVAKSGERTHIAARAAAISATHLLVQKAALELDVAPDEFEALEPRLRHDRPMLQIADTLINGSGLCRRLCQPGTDGRPDIARLIEEILTAYDKWPLLDFVDEEHESKCSTSCYMCIQQYQNRRYHPLLDWRLGLAYLRSMIDPSFQCGLDGDFDSFPELRGWLAKAHALAEEVASMRPRFWRTERVGSMGLPCLVETDGQQRVSRKLVVIHPLWRADGTLLSDLGASNQGARTIPIDTFDLERRPLRALEVAGDRALAPVFRVTAAD

SEQ ID NO: 24448 - protein, 409 aa, Bradyrhizobium sp. WSM1253
MPSYLEFFAGGGMVRAGLGGRWKCHFANDFDPLKVQVYAENWGEEEILEDDIHKLEAEDLGKRADLAWASFPCQDLSTAGNGLGIGQSSGSNRTRSGTFWAFIDLMKDLKAKGRLPRIVVLENVVGLLTINGGEEFKAVVAALDRLGMRAGAVVVDARHFVPQSRQRVFIVAVSKSAKIATELIREEPHTTWHPDPLVKAVEKLSPQCREQWMWFNLGAAPELKKTLNKIVKDKPVGVDWHTPAETRRLIGMMSAIHKQKLSEAKKSGKRIVGTLSLRMRPSNGKTVQRTEICFRGLAGCLRTPKGGGSRPRIIVVNGSDVRTRLLSPAEAASLMGLKASYKLPEVYEFAFRVIGDGVAVPVVSFLRGKLLTPLLRSIKKSRGTAASRPKRSAGGSAERSRRGQLELRM

SEQ ID NO: 24449 - protein, 852 aa, Bradyrhizobium sp. WSM1253
MRAELPTNLPQWEEALTRRFLTAAGEGVGPIRSFDISPETLAMAAGSDAFAGAQAVSSFKKALLTNKWTLYSALEDGSFNRKLAPDCPGCFAYLALTIFVDSQRDGDGASDQFRPKLASFLGVDRSFSKLAGIATMWRSLRDWLLRQAKAGKPFRRLVLPDDDGWNQIGHTVRLSFPSRRDRTFLGHFFDQHAGIASDEKTLLATLRNLVDRSNASKGLHDAFDEFYAAYQSEQRALAEHRFWKFVLSVAEARNVEMSSDVALEVYPDEDGLLHFKIDVANKSDRASVHSTLQSAVAAVGRLGPSNLRKVTEAGYIVFKRVGTSRWSAVPRFSDCRGEVKVGLSNRLTAAVGTKLGRLRLSGDWSLTNDPVSIARAEDALRRLLAKGEPTLTISGVTVTGGVRTDHHWLGRRSVLPRIETDLGLPTIVAEGDNHAPALGCKEIEPNLYAIRSRRPVAGVFELRSSASTGARLHFVADAFVRDGQRPANLVDAPEWNDTVRMLSRTAEPPQGWDAVPEALDDLLEAIYAGGRRGWSEADLIPLLERVLPGEISPWDFLRSLQDATVLTPLLRARHRGRTWILGHVALVPLRSRAQDLILVDGSVPALQRRDFEQAVKALGGSAFRRLALPWSVPLTGATGVAIEKLQERLGWLTKSPTIPGRRAAAFDDDPQRRLEAYRREYVWSWDAGRFTFDGSPSRVCLTRWIHLGERDHDVYVVSGAGPERMFVSRCSAIAEAHMQAGRAMYRFEADRLVRIGRDGFLPDRIAHWLRYENLANPQLLPSGGYGYQASRDQATTVARLLPRAIEAGVTLRASWDAVASARRSGFAERLVFTGGRIVSGRAPLDATQRSNS

SEQ ID NO: 24450 - protein, 696 aa, Bradyrhizobium sp. WSM1253
MSAINTFVIGQCTRVKDSVFMKARAQSVDGVMRDLTHTSQTEFPPEGEIELRGARAFLKQDDWAIAKPVLDGPPRRQRWVSPTAKKLLPFEDLSGLSGSEAARRLLVETGLQDTYVGEKVCRIGLDEMIVVKMAKSEDGRSRATAADMARLPVFSFDATKILAIPTPGGSISLMEKNHQSPEIKLANWTSDAKYVEQIVRAALAGEDDEQKARAAMAATLLAHAGRLEGLLSGAGEPDLNIAQEISRSRRLGEIVTSRPALVTDFMQALRRDPAIAARIEQEIARLTADAVEAKRAALTAELTTSMEAEFATVRRARGEKLKAELDDLETSSLQDLQAKLDAEENAALSAIEVRKSGLEKAVEELQKSRDALKESNRAKAGEIEALDADITRLSLEAVDRKADVDRLLGMEQVLQDAGDRAKTSQASPLMPLANPSPSASPLPIGEISDWLKASQLLTEAGRRGVARVATLVLSGGVPIIEGPEADDVLDVLSSMLAGGAITTLDCDPTIISYDDLWRRPGHGEPTALGLALADVQDRSIVRLCAIRRADLAPSQFWIDTLARAGKQRSLPREFLLCVTRGGEGDGEATSSPSTFRAEGWIERTAGVAALASIGNDTLQRVVELSSVGSDPAAALALIGSARLPITDARWLATFAPTAKAVLKGEAGGFSKEVLDSISGDAKPNLKLIDNGGPSRA

SEQ ID NO: 24451 - protein, 1954 aa, Brevundimonas subvibrioides ATCC 15264
MYDPIGAFERMRDFFVAYLDTAFKIRSPAVADARRELLSTAGRMCAEAMIEPVLRYRSSPQRLEDLIEAPGALDPLSREARIAFTELAGSGLFEGEDVSGKPWRRRPAFAPYEHQARMLERGLRPGTPGIVTSGTGSGKTESFLLPILAQISSEAVGWPAPSAPLGAEDWWESDSADFRPARRAESPHRPKAVRALILYPMNALVEDQLTRLRKTLDSKEARQTCRDRFNGNLIYFGRYNSQTPSTGFNRHPYRAGDTSEQRARQRRLKRNREHLRAIAEGQALAETYDREQAAKLGRDVEEETRFLFPAIDGAELNTRWDIQATPPDVLVTNSSMLNAMMAREVEEPILEQTRSWLRANDDAYFYLVIDELHLVRGSSGSEVAGLLRMLINRLGLDDPAHRHKLRILASSASLPIDGVGGEASLKYLWDFFGENGTFSAAGVGAEGPAFWSNCVVPGEPEAGVERSAILDPAPFSGLLADACGEAAAVLRAPSLDALDSGITRALAAVGGAAPELDQRARDLAEAAAAVLLSACRREDGLRARAASELAVRIFGGPDLRPLRGLLIARALGDVLASEPGRKARVSATTPSFRVHFFFRALEGLFATISRGEDGEVAYSSLSIERGSGLARTGTDGPPRRLIETLYCEACGELFVGGMRSANGAGGAIDLLPSSANLEALPFGASGTEFEDLSHQEYAIFWPTSRAGAETPETMSGRDASRPRWDEAYLDPFGARIWRDRLNEDVVRGLVFNRSTQASHKDARDRAFGDRGSATPAACPACGTSYVLRSQGRSSPLRNFRTGFAKTSQLLATELFEVLHAPRPAVSPKAIVFSDSRQDAARAAVELEADHFRALIRDVIVRLTRERIDADYRAEDRATVEEAMRAAAAEMDYTEAARLKAILTQKESLAIETEPLTALAQDPDDTAYLATTPAADPPMAQLISRLVRLGIHPSDSSVASDDEWWRLFTMDGENLKWARPSGALDANAIQGKRREIAEEQREALHDTLFNKTYFSFEEAGLGYPTFFTRGEYSAERDELDALLRVLADTYRVDGSRFVDVSQIKQWSSAADVPVGNRVRRFCEAASPGNGDQYLNTALDRLRQADLGHNGGVVRLFSLGVRLARADTPFWRCTRCDRAHLHRGAQVCTRCGDPLPATAAGVAKDLWRHNFLAHRVDRAGTGAEEPFRLRSEELTGQTRNGAERLRRFRGILVEEGAGQAARLPKLGKEIDLLSVTTTMEVGIDIGPLQAVYQANMPPQRFNYQQRVGRAGRRGQAFSIVVTVCRSRSHDLHYFRHPERITGDAPPPPFLAAGYEDIPLRVVRKAWLQAAFKYLRLKHQGRYRGYDVQPPDIHGEFVLVADYKDNASPWRDELRDALGATVAARDAAVVLVAGDLPPALIAKMEDALEVNVLMAAISDVIAREGRWDIGVAHALAEGGLLPMYGMPTRVRPLYLGLHSSGPDDLDWDTTDRDSDLAIYEFSPGASLVRDKRVHTAVGLTSSLPKPQKRGAWVMPGQDQRSAHDDEWWMARCDGCGGWTRADQPDDMTCVACGAAIVRDAFKHCISPAAYRTDFKPKRTGEEELRIVRSRIVCAEASDVRPVRAEGSNLAVSLERTAKIVRLNPGYDPNPLQSAGFSFEQGRQRAAPKPSAWMTFSNQALETEYASTLRSPDWTPDAEPVSGWLASRKTTDSLFLTPAVMHPLLDISRVAGADERVAVRAAALTSCFLLVDRAALELDVDPGEFDILPPRLYQPDGVKRPMLQIADTLVNGSGLSRRLAQTPERPWAIDLLSSIVGDGASWPLGEFMTTAHRQSCDQACYECLQRYGNRSYHGLLDWRLGLSFARALVDPGYTAGAEGDFSAPELVDWRSMADDALERVARGTSDLEVISSGPLPALRLRRTGGDAVIAIHHPLWRVEGVISPLIDQMHRLHPGPVRLIDSFELARRPFQKIAGLSF

SEQ ID NO: 24452 - protein, 377 aa, Brevundimonas subvibrioides ATCC 15264
MRSVELFAGAGGLGIGVARAGFEPAAVVEWDRWACETLLENKPWPVHRGDVREFSYDHLANIELVSGGPPCQPFSMGGKHNAFLDRRDMFPEAIRAVRELQPKAFIFENVKGLTRQAFANYLEYIRLQLRHPEMEARAGEPWLDHLARLERHETSGSHAGLHYNVVLRLLNAANHGVPQKRERVFIVGFRSDLSTEWNFPAETHSARALAWAQGPEGDYWDQHKVARNNRPLLVVPPKERPESQPWLTVRDALVGLPDPQTRPEAAKAFPDHRFIPGARSYPGHTGSPLDQPSKTLKAGVHGVPGGENMLRRPDGSVRYFSVRESARLQTFPDDFLFHGAWGETMRQLGNAVPVRLAEIVAQSVRAQLDGVEARGSV

SEQ ID NO: 24453 - protein, 718 aa, Brevundimonas subvibrioides ATCC 15264
MDCAALPTLWRRLESSCAAAPPDRRLRPLVLPDPRHRTQIGHAIELTFPSRQDGRRLKRDLEQGGLADPNHPVAVMRWLGGRVDRYSPTFRETFTDFQIAWRSGARALTDHRFWSGWRMVVETWRPTDVPEAFRVVSDEWGKYQLIAMDGEPTTLSRVEAASPPGLRHLLTNGSPVLLREIDWGQWTWVGRGRSAGREAQAALIREKTHSASLLAQLDRAVVSEAPGWAFTTAVDLVAGTAVRDAVSDDDLIDVRFAGVPRIDGGRLSRPSFPIRLLTTGPVESVTLSGAVAEQLELQRSGPREWLITPTVPVEGHAQVSVKATCGDIVRSLSLRRSALAPVLGKELPDRFLIDEEASGFAPTRAEAVATRFEDHESAATACPQQGLLDLVEYLAARPWVMPLSGLLELVDTLPKADAAGKWSILRALLEAGVIEPLRVRGWRGGAAIARSARAVLVPQQDVCRLRLDGVINEVLASRVQGIADRLGLGVSIGPGVGDWSLPLLSVEGDREALLALAAEVGVTCEYISPDLAGHVRPRDAVPNADGSTHGARQLVRMADTRLADRGIQLSLCRREAEDAPPVWLVQASEGEPRYWTHRHLALLDACGLAGVAPFDIRDGLLTANVPGVFLPLPVARWLRLATGVPPGPFDGGYAYKTTPCVEAMIREFMGMDRPDSSRFQRPRPAGRGRGPGMAFASGSSVEVLPIWRWARVNRGASR

SEQ ID NO: 24454 - protein, 689 aa, Brevundimonas subvibrioides ATCC 15264
MSKSKLEYTRFHFVGQVDYAQHNFARLKPLLYSETGRRWDGVVDRTWFPNEGLVFTVQADLRYAANGSLWIFRVAPNARGEAVDKDVYSAIQSKPAVELIVGMEPLEIEQLRQLVTEEGFVGATAGKAGAAVPELNDRWVVLNELERDEEGRFRPAPSLNLKHLKVLIGTPEELCGIPAPGGQFVLPPIHPASGETRNWLPPTLFLETLAADLKRWIPHGPQRPKAQAAAQALRALAPEMPGVSALRADDAKVAMARATNLAESAETITGAAATILELIVEQEPFRTEIDRRRAAITTELESEALAAVEQLEGAARDRLRVEQASLQEEIEGAKARREALRAEIEELGAEADLLRSARADNVGALEAQVDAVIQRAASEPARLLADWIGVSGFVVGGMSRESEAPIASNVDQRSPEPTIALPAARPISAADLGPLLFAAGPAINPGHPRLLIIDAALRARELPVLIGPFAREFAEAWLAVAGGEMPLSVMTDPTLLSITDLTPRGARGDKAPLQEAFERARSRPDPVVVLLDDLDPASAGFWLPELARSQRQPQRYGFPPNLLFIAVVEADASQMNLTQLRAGELFPLVFDDCEVIDTSPSRPPSPLTLIPEIMNGPATSTSWTARVSALESSLSVTFKADDAKSIAGELSDFLRCCKGRGALAPTDGSLANLLLKSASRLRHGGAGES

SEQ ID NO: 24455 - protein, 1968 aa, Burkholderia multivorans CGD1
MFTTRLFSSRQTVPLTLSGLPIMLDPLGATHRIREFFLSYLETAFRIRDKEVQLARRALLNEPGTLTTEEFLEPVPRYEQVPHTLQELVDLDTDSPLEEFDRDARRAFVELALSGLFPGTDSDSEDIRRQSTVQPYEHQWEMLRRGVRAGHPGIVTTGTGSGKTESFMLPILATMAKEAVRWPATSRPTRQSPWYGDASSEFVPQREHESVDRPKAIRALILYPMNALVEDQMTRLRRALDSDEAAAVMSERFHGNRIYFGRYTGDTPVTGHLNHPRRANTPEEKRKRKRRMDQLRTKLNELAQTQAMARTHDANERDAAERAGEHKPEPTRFLFPSVDGGEMVNRWDMQTTPPDVLITNISMLATMLVREVDAPIFDATREWLAKERDAYFFLVLDELHLIRGSAGMEVVGLLRSLFARLGLDRPENRHKLRILASSASLPDEGIDATTSLKYLFDFFGSFGTSSFDGDNGFNSPGQWRTAIVRGRQIQHKFDSRLPLETAPFQRLVELLAVSEGGFASAPKKRSQALDSALLTAATALGVKPNASDVSATLAEAIAAASAAISSACRSNADGVLRATSVTEMSSRLFGSDASAPEALRGLCILRGLADYAGDSGLYGAKASDRLPSIRMHAFFRSIEGMFAAPYRDSTGKLRFEGLTVERGRAHASCNDGETRRLFELIYCEACGELFVGGRRNSDEDSVTTELLSTAPNLEQLPESAANTNYETLSYSQFAIFWPCRNEPKDGETDGEAWNPATLDTRNAVVTRAERHETTSLPGRLFYINPGTGSVHQPGSASPRCCPACGTDYSRRKPNMGAQSPLRSFRTGFAKSSQLLATELFSALRVSGGAAKSIVFSDSRQDAARAALDIERRHHQDTRRQLLVESLRAVAAARPSSQQLRDMEVQLQQAVEARNFAEAGRLGQDIARAQQAVDASRVALSEVIEPIVSAGGNELRSYLRRHVELGIHPTDAAGIELIAQEPWYKWIVPSGASGKPEWPAHSESGAAGQARAYIRDEQRPLVYEILFSKTYFALEETGIGYPSMTATQTPESDRLDAYLRVFADAYRVAGNKWFRDPANIDTAHQFPKKGRIYRFAKASASSNPIEELDEILKRFGAHAHAHGIVELSGLYVRMSSSGDPYYRCDNCGRVHLHRGTAFCTRCFEPLPVQKQGIVDDLWKANFLARRTMRSGWGQESAFRLHCEELTGQTGSPAERLRSFKGIFVNGGTSDAFELYRRAEEIDLLSVTTTMEVGIDIGALQAVYQANMPPQRFNYQQRVGRAGRRGQAFSVVLTLCRSRSHDLHYFRNPERITGDVPPPPFLTTGHLAIACRIVRKAWLAAAFSVLRNEDGINYLGDDIVDTHGDFPRAGEIYASNSQWRYRLANALEATIETRDSVLTALFDGAPRDCEAVKAALTCDALIEEMWACSEEGASSALPFGQFLAEHGLLPMYGMPTRVRDLYIGVEQDGDDKDFATIDRDLDIAVYEFAPGRSLVRDKRKHESIGFSPALRRPVGTTNRAFSFGSWRSETRYIAFCSCCGAVASCHEEPLQDVACVDCGEQVPSPSFVCYVSPVAFTTDFKAKSVEESEDSPVFKRVTTTEASTITMRDIANTNTSIGSATDARVLRLNDGRVDDSGTVQPFRVVPVAEHRVPSPPGRGRWSLPGQYLTADSFVSLSASGLASRNSDLLEEDVRLMARKKTDAIYIAPTKISNSLDIARVGREFFHTATRAALVSATHLLIQRAALEMDIAPEEFEALEPRLRDGKPLLQIADFLVNGAGFANRLESGQTPLVVELARSMVESPLADPLVASFFFDRHREDCSQACYECLQRYGNRSYHGLLDWRLGISMLRVFLDSTWVAGLDGDWQRAPETADWPRAAKRCAEAIVSLTPDRYKLATAGALELPSIESLKGGRRFVMVHPFWAQAAVAPLVSDGFDGTTLFIDTFQAERRPQRVLNAAAEYAKQQGLI

SEQ ID NO: 24456 - protein, 927 aa, Burkholderia multivorans CGD1
MLAVTGRDKKPLRQHQYRKQRERPTGIEMETPCSLAEQQRVESALVKHYLRSDGPFGAGVLRSIDASAPQLAAALEVDEERDPVRVLARACGGALAMQRVLASGMPRRIASDDTPGFFRYLVMTCAIVAIADRNEVTQDFGVNLALAFDSPNIFSKREALPRLWASLQRWCNSRRDAGEPIRSVVLPPPGAWKHIGITHAITFPGWRDAVRLKALVERHRRDVVIDGPAAAAKVLCPQVRYSPRFTPAMHDACEEYEKLYFAKATLLALHRFWLAVRHALEVERDTAKVPVFSTQFRLWFGSDIEDVELQADVIDANGMLVESKKLDDCVDNVLRDFPEWLVEHGLSDAGAPLRTASRAGFVPFTEEGFGLWTSALSLPDFPSRCVVLIAKDKGHLAQRWGTNAVSIGENWLLMGPLPGRHTASIYQYLGANVGISHELPSPQLRVRGGVRTGGGYLGRPSFLPTIVAPGPGELSLRGGPSACPLPQLVPQDAVSWRFESSRALDGRYTVVLEENVLQDAEPLAVEKSILFVPDALEHDRLPDIDDTRWRVIPEECFEGGGAVVPAAVLSTRDAEQAVQDEIAGQFNDFLEALYAGGRSGWTTQDLLCLMRDVLGSSAPSPWDILRGLVEAEWLIETSNVSWRARRWWLREPTVAKLALTDGTFALLLRGSTPTAVRRRFTDTVTASGCTLHVRHGVGSYSPLSMLATGGQLDSVEKELNWPVATAGSVSVAVAPLCWPSESVDESRHRLAGKWRWERGAFEQSVLPANDDVVLERYTRERGDREDLFVVSERVNATRYVTPSRVAAITEAYRRMKAPFFRYKEGLMLRVPRDGYLVRGMASEAIRRAARNSGPAFIDGQWVYAYPADSYVVQKVKKVFGAPFITSGLADTDENKLETSPGSLGMLRHRNIFRADTRGTVLKRAAGR

SEQ ID NO: 24457 - protein, 700 aa, Burkholderia multivorans CGD1
MEDVLYLGKVLYAADRVARLEPLAAKSDGRWVAIEDKLALFPPEGKIFCPRPLRGALKDDVWTFRRRANEKIEPGKDHFLVIDEREAIPVIDLSMLSIEQARQRLFNQGVALESPYETFYAVVVLTDALFCELKFNLSAHGLWKAEPVFELVPLMSLPREWAGLQTEGEGTLQYLPAESVPRTSVVKFVNWCSDQEFVERVLEHIRKHTQDIVETKYGRLTRESVQQIARALSRTGLLPESEDDAELNLERLKADWPILEARFAATERLAELVLASTAAKDALSQAVLDAEKRTEEVVRPAIEERVRREIETGLTDVVAQREVVIADIESLTQRRTSIERELSEIEERCTRGRQEQQSLSENLRLVTRRLRAAFQNMPLPEQPFAQAVVGRIEQAIGECTDQIPSLVPSNVAPWAVPIELPETSKIDETRLLVRFGIEARAHAVTANDLSLIDVFARGGELLLLLGPQAELALTAYARCVSGGAITSLYVDPSTIGLEDLWRVPGTQQPTAMAHAWNAAEAERDRLHIICIRNVNAAPFHLWAASLNAVLLSPLRPRNLLFFATTTPFQPEQTALTGASKDAYRQWLVPIEARVHEDGPIAVLGSVVPPFPPASALELGDCDISEVATSAEWLKRIAGLNAGPDTVARVARTTGVAHQSCNETLLPQVFGWAEFLCSSAGSDTLPECLRLGYSALDKLFH

SEQ ID NO: 24458 - protein, 1948 aa, Burkholderia pseudomultivorans
MLDPIGATHRIREFFLSYLETAFRIRDQSVSAARRQLLTRHGTLTTEPFLEPVPRYEQVTHFLQDLVLLDSGNPLRSFSSVARRAFVELALSGLFPGEASGRDDVRRTSNVRPYLHQWQMLERGVGRGTPGIVTSGTGSGKTESFMLPIFATIAQEAVRWPAPYGEKLSNEWYKEAGQEFVAQRSKESPGRPKAVRALLIYPMNALVEDQMTRLRRALDSDEATSVMDERFSGNRIFFGRYTGAAPVTGHLNHPRRANTAQEKRKRARRMETMRSRMSDLAATQKLAREHDARELADAHAAGRDAPEPTRFLFPSLDGAEMVTRWDMQATPPDILITNTSMLATMLVREVDEPIFTSTRKWLEENDDAYFFLVMDELHLVRGSAGMEVVGLLRSLFAKLGLDRPEHRHKVRILASSASLPDEGPDSDVSLQYLFDFFGSFGSAREPGDAGFGTPADWRDAIVRGRQLTQRFDGTLPLATEPFVELAAVLDVNGADFAPQVTARTSALDVALARVARSLGIDATPTDVAAALPKVIAAASSAIVHACTTDDGTAAVLRATAVSEIAQRLFGSDSVDAERAVRGLCILRGLADTVSTPELYDIAVPDGLPSVRLHSFFRSIEGMFAAPYRDSSGKLHFDGLSVERGHTHALCDDGSTRRLFELVYCEACGELFVGGRRNADDHLGATELLTTAPNLEQLPEAAAITNYENLSYNEYAIFWPRRDEPKDGETRHEHWPDASLDTRNAMVTPVASSDNSRLAGRLFRMNQADDLVRKPGSASPRCCPACGTDYSRRRPGMGAMSPLRSFRTGFAKTSQLLATELFSALRVSGRTPKSVVFSDSRQDAARAALDIERRHHQDTRRQMLIEALKSAVAERPNGEAREEKKKQADEALKRGDFLELKRLSDELARLQLATDPSRVALAEVIEPVLLTSNELRSYLRRHVELGIHPTDAAGIGYIRNEPWNHWVVPAGASGKPEWPAHSDSGEAGEARAEIREDQRPLTYEVLFAKTYFALEETGIGYPSMTASQTTDSNRLDAYLRVFADAYRVAGNRWSEDAAHVDHAQEFSPQHQIFKFARASVPTAPVVELDDVLEKFRALEHAHGIVELSKLYVRLSQRGDPYYRCSNCGRVHLHRGTGICTRCRDPLPTEREGNVEQLWDSNFLARRTTRSEQGKESAFRLHCEELTGQTGSPAARLRAFKGIFVGEKQSPEFELFKRINEIDLLSVTTTMEVGIDIGALQAVYQANMPPQRFNYQQRVGRAGRRGQAFSMVVTLCRSRSHDLHYFRNPKRITGDVPPPPFLTTGHVVIVERIVRKAWLAAAFARLRDEDGPAYPGDDLTDTHGEFPPASSFYAATGNWRSRLEGALASTLATRNRVIDALSDKDTTQARTMKDAMTPQHLTHQIWSLAGEGAGSPLPLAQFLAEQGLLPMYGMPTRVRDLYVGIENNEEKTPEFSTIDRDLDIAVYEFAPGRSLVRDKRKHESIGFSPALREPDVQPNRATSFGSWKAEIRYIAFCESCGAVSSLADLPVEQVRCVDCESNIPSERFARYTSPVAFTTDFRPKSVEEGELAPVFRRVTTTEASNVSLDSVPDSNMLVGTTADARVLRLNEGKLDDSGAAQPFAMVPTKDHRVPAPGNRKWSLDGQLLSEEKFAELDLRGAVRRNTDLTDEGVRLMARKKTDAVYLTPVRVTEGLDIGRVGRDFGDTSVRAALISATHLLMQRASLELDIAPDEFEALEPRLRNGKPLLQIADFLVNGAGFSNRLANGNPPLVVRLAKSMVDAPQSDSLVAPYFHETHRGTCSQACYECMQRYGNRAYHGLLDWRLGLSMLRVFLDASSMTGLDGNWAASPELSDWPDLAWRSAEEIAGLSPDLYDLKRVGSLRLPSIEERNTPRRYVVVHPFWSRKAVLEKCIDGFSGTTLLIDTFQAARRPQRVLFAAREHAQKHGFM

SEQ ID NO: 24459 - protein, 391 aa, Burkholderia pseudomultivorans
MRFAGLFAGIGGFELGLARAGHTTELLCDVNVAAEAVLKRHFADVPYHADITTLRSLPSSIDAICAGFPCQDLSQAGRGAGLDGQKSGLIAEVFRLLSRRRIPTVVIENVPFMLQLSGGAAMRAITDEFERRGYRWAYRVVDTFAFGLPQRRERVFMVASREIDPAEVVLADENVLPRPTTDVGRIAHGFYWTEGLTGLGWAVDSVPTLKNGSTIGIPSPPAVLLPDGQIVKPSIRDAERLQGFAPGWTEPAEKVVRRSFRWSLVGSAVSVPVAQWLGQRLANPGDYDKQLDREFPTAGRIPRAARFDGRHRYQVEIGVDPLGHRPPSLSDFLQDEGDPLSLKAALGFLTRTRRAKLKFDNAFIAAVERHVELLGGEIPPRLVRQLELLPA

SEQ ID NO: 24460 - protein, 892 aa, Burkholderia pseudomultivorans
MAARCSAADQLRVEAALTAYYLHSDGAFGAGPLRYIDASEPQLRVALKIAHDADPLRLLAAACGGPAAMTDALANGVVPFKPRPGLPGFFRFLVMTCAIVATADNNDSTQEFGENLARAFGTQSPFNNRSSLPGLWLRLQDWCDKARAAGEAVRQVILPPPGTGKHLGLTNAITFPSWRDVRRLRQLLDRRAEYRSIVDPVGAAIQLAPLVENDASFSSAMRQASAEYRQLYLRKASLLGLHRFWVALTGLLTERHSPTAEQFFVPRLELRFGATLDDVELRVVLADMKGNVDPLQVLENFPDLVLAQTAPWASQRVGKNASDALVSAISRGSVPFVESRFGVWHSTLLQPSVPTRCLLLLSKKNRDVARKWGVSTEPIGDEWRLAGPIPARDCRSVYQYLGGSIGLARPPSQAMMLVGGHRTGSGLLGRDALLPQIRIAGPGALTLRPVQENGVKCQLRRDSDDLHSIIACTPLDGTYKLRLDENMIPSAEPLAIETSVVFFPDALEHAELGDIEEATWRRREEARVRPTGGPIVLADITDDHPPVDSERSARFQDCLEAVYAGGRAGWSEQELVSTMRTVLGDNAPPVWDILRGLMECGWLRPTSNLRWRARRWWLTPPSLIRVRNREGIEGLLLVGSAPTNIRRRFEQTAQAAGCTVMERPGASEYTACMQLARGPALGEVAEELAWAVAERPICAPMAAPDCWPPENVDESRHRRVGRWNWAKGGFRSPDTTNPGPVNLERFRRERGDRDDIFVVTGPGPARYVTTSRAAAIVEAYRRARIAMFRWDGAHLVRNSEDGHLVEPLANLAMLSSCRSPGPALVDGRWTYVYDMTADCVGWIRSVFGQAFVDDMSALDAKLSSLSAEALGWSRNRNVFRVQELMPPLVGRQ

SEQ ID NO: 24461 - protein, 707 aa, Burkholderia pseudomultivorans
MSGASENEGYGVVMDDELFLGKVFRNEVNWARMEPLAVRVAGQWKRIDNTVEMFPKEGKIFSRRGLLNAPTDSLWTFTRRPNEQRDLHGPDLLLAEDIVRATPILDLSSISLEMARRRLFNEGVHLPLEFSSVTAVALLSDDLFCDVTLTRSADGFWRSNSLSRPVQLKEMPNGWKSSPDFNGLRVIPAQTIPHAAVIRTVNWCSDQDFIERVIDRFRKFMQGVGDTPYARPSRDAVKYISRALRQADLMPGEDNGIVLDMERLRTDWPILEARLEASEELASLILDLKSTKDKVAAATELAIRHALEEARPSLERQVREETEASFTEVRRQRDELSAEVLNLEQRRARASSDLAELERLCNERREQQKAMSDGLSAVASELRTSLAQSPVQGHPALSFIAERLEGMLTQHDYHGPSLIPPAMPPWGTGMPSCACDEIGYGSLTAVISEEAKRHGIDENALRLTDIFARAGEFVLLCGPQAELTLRAYARCISAGVYRTMALDPSIIGLDDLWRAPGTQTPTAFAHAWQAALGAPDCFHILCMRDIDAAPYRLWLASFQTVLQSASRPTNLLVFATTTGRSDAQADVGSPDDSRSGYLVPVFPGVHEAGAVAALASAVAPVPPPSRLSVAPDTVPTGSAAGDWLTRVVTFDLPPGVLARLARFRNQFIGDDAEHLMTAVQKWGQFLGSRDATSLPSALRDGYTSMTN

SEQ ID NO: 24462 - protein, 1956 aa, Burkholderia sp. Leaf177
MLDPIGGFARIKNFFISYVETNFRISDADAADHRRTLLETVNVLATEPYLEPVLRYESHEEKLEEMAARADGPLAPLSGEGRCAFAELALSGLFEGEDQDGPIRRRSNYAPYRHQVEMLARGLQSGRPGIVTSGTGSGKTESFMLPVLAALANEAVNWKAPHDKYLQDDWWKKPGSKWSGRRAGETRPAAIRALVLYPMNALVEDQMVRLRRTLDSEDARHVMADRFLGNKIFFGQYTSATPVTGHETHPRLASDKKEKERRSRRGTKLRAAMHEIERNQSAARTHDERQRIQSQESGDRRPDLTRYIFPSADGGEMSSRWDMQEAPPDILVTNASMLGAMLSREVEDPIFAKTRDWLLSGDQSYFYLVFDELHLVRGSSGTEVAFLIKALIERLGLDAPEHRYKLRILASSASLPMDGDRGTQSRTYLRDLFAPFGTSRNALDAGSTSPDFWADCVVRGVASVPEWSKGKLDASPFAKLYESAAIGADGFVGRIKDSQQLDQPIRDAARAVGIVSETIEDVVKELAVVAATVLTQACRDGAGVRATATDIIAKSIFGDEVGERATALRGLMLARALPESDLWSARISAETPAFRVHTFIRNIEGLFASPQEVGGKVEFINLTVERGISHAARSDDTKRGKRLFELLYCEACGDLFIGGQRGQKSASTAATELLPASADLENLPEKAASEYYDSMKLDEFAVFWPRRSDWAPSEKDFDKWEMAHLHPETGVVRRGIPIPEGNIGGYLYFQNDSAVTEKGKVVRRPSAQPFCCPKCGTDYSNRPASSRSRSPIRAFRTGVTKASQLVATELFELLHAIGAEPKGIVFSDSRQDAANQALEVERLHLRDLRREVLVSVAREAVRRNADEWMTAEEFTARFQQFAIANKQKEMGELAGQFAKQGGGSSRHSSKVRLNQLLQNDDGSQRVGDLVGEFIRMGIHPFDEAGLENFERKPWHRLFEKNENGYSFSGTLSHASRATLNGKLLEKQYELTDDVIFANTFFALEETGLAYPSSSSESGNEIDELDAWLRLFASATRVRNNKFVDHDRLVEWTSGNDVKHKRTIRFAQKIFGNLDYVDGLSSVLQRLSDKGHKSGLFEIGDLYLKVAKENDPFWRCQNCGRVHMHLGLRRCTRCAEDLVSEPSGTVQELWKTNFLARRIVRSDDENVGRFRLRVEELTGQTNDFAARLRRFKGIFVDGESDIQRLASEIDMLSVTTTMEVGIDIGALQSVYQGNMPPQRFNYQQRVGRAGRRGQAFSFVVTFCRGRSHDAYYFAHPSAITGDAPPPPFLAVSHDPIPLRLLRKVWLRAAFSELREECKAKGLLYPGDLLVPPDVHGEYVTTGDYYFDLSGNWPARLRNALENTIGHRDNYLQTATFNSHQRERLLSRTSVDEILREIDLLKPQAPSAPFGLARFFAEQGLLPMYGMPTRVRELYLGLRSDDDGSSSDYEWSTMDRDLDLAVFEFAPGSILVKDKLKHRVVGFTGALTEPQRRKGGAAEVRTVSYWKESENYVAVCRMCGSAKHTDHMPPAALTCDDCGEQIEADHFQLYVTPAAFRTDFHPKSDFEDGGRMAVRTVATVLHEGERIDWGGITIRRGADATIMQLNDGVLGEDEVGLRFDIDIAEDNAVPTPFGTRPITISGDQAIDTAFLEKQRNGRWAVQPNSRERFGLVSKKKTEALYLELREFDQRLTLDMVARLGPLSHLPTRAAAISATQILVQKAALELDVSAEEFEALEPRLRSGRPMLQMADALINGSGLCRRLGESVSTGRPPQIVEMLSAILANESAWPLQDFLKIDHDGAHAERCRSSCYRCIQRYGNRRYHGLLDWRLGLSYLRAMTLPSYSCGLDASDRDYPEIKGWMNWAHEIAQTVTDMRKGALAYESLTRSGLPCLIESDLQGNETARIVVVHPLWRIDEANMKALLADDWSCTFKYVDTFNLERRPLRALAKISNNASSV

SEQ ID NO: 24463 - protein, 382 aa, Burkholderia sp. Leaf177
MASFYEFFAGAGMARAGLGTNWSCLFANDFDHKKAMTYQANWGTSGELKIGDIKEIKTADIPGDGDLIWGSFPCQDLSLAGGGAGLKGERSGTFYPFWDVINGLIADKRAPKIIALENVCGALTSHGGQDFAAICDTFAKAGYRFGAMVIDAALFVPQSRPRLFFIGVRKDIEIDPALISPGPIEPFHTRGLRNAFDCISAKTQKKWLWWNVPTPAHRNSTFADLIEERPASVVWHTAAETSQLIGMMAPIHRAKLEAAKRSGRRMVGCVYRRTRVEGGVKFQRAEIRFDDVAGCLRTPSGGSSRQVIVVVDGNRVRSRLISARETARLMGLDESYKLPKNYNEAYHLTGDGVAVPVVRHLSHHIFESLLGVSVEVQQQAAA

SEQ ID NO: 24464 - protein, 844 aa, Burkholderia sp. Leaf177
MTWQPPITFDAWEKHLVERFLKVDDSGDSTDIRSFEVTATTLADALGAPPNSEAAVVDAFQKLLHRDPLLVTSLSTQSQRVSNANVPCCFVYLAATLFVDSMLDGEDLGVGAFREKLAKWLDIDNSFPQLKGIASMWEMLRDWINLRLSLGEPYRRVVLPDPGAWTHIGYTRRLSFPNRSDARALRQFIADHPTVRDRPLATINLFDNYRLNKHISWGLNRAFEDFRDAYFKQRRALADHRFWRLMCRVSNNGDAKQGVAVEIDMLFEEDGSRLFVSPDQGVKDGRAYQNLTDALVGEKAAQSINLSTGVKKGILFFRASGLGRWSIETDPRESYTGIYVALALSHEAKIGTRLGPLRSEKKWLVTSDPISVRKAVDALISARLLTSSNDHVFRTSASDGIRVGGAWLGRPRFLPRLDSDTERFAVTSNDRESELRVSADGQFSSEGSLNGSFTIRPALVHGESQPQWSLRLAFTSKATPHAKADGARYRLDLLKDWPSESKALRSIGINHPLTWEEGEIECGDLIEALYADGASGWEEAALIQLLVRACDSLDGWSLLRILHDAGLVEPRLRGGWRGRNWTLIAPHLLVVPSDAGTLIVIEGAVCESLVDSFRSIVDAEGGTCFRRLGVGPWSPPTFGAVDVSAERIAERLDWPIVTRPAFASAYPLGFEKTERLALAYEPADFWDWRAKRFLSRPIEPGTTTLSRLVHVSRRDHDLFKVASDNRTVLYLSRTAAIVAAHAAAGIPLFRQRGEVLVRIANDGGLPDALANDLRRRQMRTAGIVEGVYAYPSANEDVQLLRRLLPRCIESIETVSEISATRLLGASRRSEGRTRPVWRNGKIIL

SEQ ID NO: 24465 - protein, 716 aa, Burkholderia sp. Leaf177
MIDNRLNRPTDSSLQVYAGRCTNRHDIIANIAITVRRTDSVWTAIDNPQKLFPKSGEVEIRGAETKSIRLHDWVALQVSKIGLGGRAQWRGIHHWRLFPIVDLSHLSSLDDVRRVLVVDGLPISGNTGSWIVRTREDAVTKVELVRAGNVMRLAANTVALTVFAFDAECQIQMPDVGTEVSLYGIAPDAPSIAVYDWTPDNGHVSRIVQALSGANDVRIDEIIKWLELYSDRRNGRLSVNGSDLAEAHEALRSGELAKQLLANKQLLRAYANALRATPSVAFLIDEEIAAIADEERSLIRARAEKELAAELTNARKARLVDLGKELATYEEEAKAALEAKHEAAIGEVEKEIAEMRAAKEKLIDKDLRAVKKSLGQDIEAMSQQSSLLKEGIDRLTLEERNIEEQLRALTDLHAIASTRLQEALMAEGAIKALTKVAKPTGYVTANLPHRANPVAGSQIRDVIDACVLLTDAGKTLMAHFVALIMAGDVPILTGPEAKDFIRIAEALISSGRSARLVADPTMICFEDLWTRAGLHVSTTLGQALEMSSGENPVTVLAVIENAEASGARFWYPALADNARGGKLPRHFFVCITVGDSACEEAKVIGDEGVQLDIRKAIVPNAAAISPALLGPALFREVRPAEWIVDIAPGVGAIGSITAHLDIDTAIRAARAALEAMRLTSSSAAESAAKSVVALFAQEESRGNSSLSLLSRGNTGA

SEQ ID NO: 24466 - protein, 1947 aa, Burkholderia ubonensis
MLDPIGGFARIRNFFISYVETNFRIADPTTAEQRRKLLEAVNVLATEPYIEPVLRYEAHDEKIEDLANRNDGPLAPLSKAGRVAFAELALSGLFEGKPHCGPIRRESSYAPYRHQVEMLRRGLLPGHPGIVTSGTGSGKTESFMLPVLAALANEAVNWPAPSLNYLQSDWWKVPNSRWVSRRAGESRPAAVRALVLYPMNALVEDQMVRLRRTLDSEDARKVMDERFSGNRLFFGQYTSASPVTGHETHPRLAAEKQERERRSRRGTKLRAAMQAIERNQNAARLHDDKQKELAKANGTRVPDLTRYIFPSADGGEMSSRWDMQAAPPDILVTNASMLGAMLSREVEDPIFEQTKTWLQSSEDAFFYLVFDELHLIRGSAGTEVAFLIKALIERLGLDAPEHRHKLRILASSASLPMDGDPGIQSRTYLRDLFAPFGTSCGPSDAGSTSPDFWAECVVRGVAAIPKGAPAKIDPEPFTALFREAIDPASGFIARLKENAALDDRIKLAGRALGVDAGSMEECVKRLAESAAAILTNACRDGDGVRAFSVIHVAQRIFGNQTQNGEEALRGLMLARALPESGLWPVRVHPDTPAFRMHSFIRNIEGLFAAPYLVGKETQFRHLTVERGLTHAAPSAERKRGSRLFELLYCEACGDLFVGGQRGQKSSLTPATELLPASADLEHLPERAASEYYDRMTLDEFAVFWPRREECAKSEKDYDRWEHAHLHVDTGVVTRGRDVPSGNIGGYLYFQNPPAVSGKGKTAGKATAQPFCCPNCGTDYSNRPATSRSRSPIRAFRTGVTKASQLVATELFELLHAVGAEPKGIVFSDSRQDAANQALEVERLHLRDLRREVLVTVAERAVENLRKDWMTQEQFSQRVQQLLTENKSDELVALTRKYQQQGGDARDRSKVKVSQLLQSNDESQSLGELVKEFIKLGIHPFDEVGLKRFDKLPWYRLFEKDGESYTFSHQLSHASKASLNGEILEEQYELVDDVIFANTFFALEETGLAYPTVSGTSGSDVDELDAWLRVFASAWRVRNNRFVNADSLNEWVSGGDVKHKRTVKFAEKVFGSSGFVDGLSRVLQNLSDKGHRSGIFEIGNLYLKVAEETDPYWRCGNCGRVHLHLGLKRCTRCATALSTEHTGKVSELWASNFLARRIVRGANDDVSRFRLRVEELTGQTDDFAARLRSFKGIFVGNETEIERRATEIDMLSVTTTMEVGIDIGALQSVYQGNMPPQRFNYQQRVGRAGRRGQAFSFVVTFCRGRSHDAYYFAHPSAITGDAPPPPFLAVTHDPIPLRLMRKVWLRAAFAVLRDNCAEHGREYPGDLLVPPDVHGEYVTTDDYYFDETLNWPDKLRYALSQTIAVRDKYLETASFDPLQRERLRASATVDGLLEEIASLKAQAPAASFGLARFLAEQGLLPMYGMPTRVRDLYLGLRDRKDNALEDAEWSTMDRDLDLAVFEYAPGSILVKDKLKHTVIGFTGALSDPQPRRGVGLEARMVSNWKESTSYIAFCRECGSAKHSDHMPASTVACDDCHREIDADDFHTYVTPAAFRTDFKPKSEVDDVGRMAVRTVATVLHEGERVDCGGISVRRGADATIMQLNNGVAGDDDEGQRFTVALAQSNSPAGGVSIVGDQAIEVSYLDRQRGLWNVDASSRQQFGLVAKKKTEALYLELREFDRRLTLDRVARIGDSSHLATRAAAISATQILVQKAALELDVSADEFDALEPRLRSGLPMLQMADSLINGSGLCRRLGESVSQGRPPKIVEILHSILDNAAAWPLLDILSVDREGAHAERCRSSCYRCIQRYGNRRYHGLLDWRLGLAYLRAMSNPKYACGLEKGDDVFPEIDGWKDWAHELAQSVADMRKGTLRYQSLPHSGLPCLTVTNLEGVTVSRIAVVHPLWRLDEDYAKAILGKDWSEELDYVDTFVLERRPLREIAKRTSDQA

SEQ ID NO: 24467 - protein, 385 aa, Burkholderia ubonensis
MGRFYEFFAGGGMARAGLGEGWQCLFANDFDHKKGVTYRQNWGEGELLTGDVRQVKPENLPDRANLIWGSFPCQDLSLAGAGAGLKGDRSGTFWPFFDVVKGLIADNRAPDIIALENVVGTLHSHEGKDFAAICTALDRAGYRFGAMVIDAALFVPQSRPRLFVIGIRKDLPIPDALVRQDASPLFHPKALLTALDKLTAKARQNWVWWHLPTPDRREQVFADLIEESPTGVKWHTTAETQRLLALMSDVNLAKVEKAKIVSKASGRRMVGAIYRRTRRDEEGNKVQRAEVRFDDVAGCLRTPSGGSSRQLIMVIDGSRVRSRLISSRETARLMGLRDEYVLPENYNEAYHLTGDGVAVPVVRHIAANLFEPILAVQPPLARVAA

SEQ ID NO: 24468 - protein, 541 aa, Burkholderia ubonensis
MPEAESRIQLYDLSPEAAPTAVYDWTPDEDYITRVLKSLPGAYDARVDALVKSLLGHAETHENRIAVNPSDVLSAYEALRSGELAKALLANRDRIRELAEALQSSPVISRLIEKEITDIAEHERAAIQARLQRELHQDMGALRDKRLAEINQELQTSENEWKSKLDLRIREDELAQQRAFAKRRTDEEQKLKQELGDLRAKREVEIVREVEDRKDQAQGVVNELSQQRDSLSKSIAVLENEKTSLEGTISTLTEKVSVAERQLEDIESRKGKVSAVTSATLSRFILPVAAPNRAEPLLCKDVHDVIQKCALLTPSGKKLMEHFVTLMLAADVPILKGPQVDDFLRVAEVMFSSGARTSLVADPTIICVEDLWVRAGLRIPTSLGLAMDAHADDSAPTTLAIVDGAENSAARYWYPALAEQARRGNLPRKMLFCVTIGDGDNDEAHAMQNSGVTLDVNNAIDGGSPALAAVLLSPKLCRDLRPDPWISDLSVGASLMITSIDGLTIDSAMRATRACLEASRLSQHASASVSSVASLFKTSKN

SEQ ID NO: 24469 - protein, 1947 aa, Burkholderia ubonensis; identical to SEQ ID NO: 24466

SEQ ID NO: 24470 - protein, 385 aa, Burkholderia ubonensis; identical to SEQ ID NO: 24467

SEQ ID NO: 24471 - protein, 541 aa, Burkholderia ubonensis; identical to SEQ ID NO: 24468

SEQ ID NO: 24472 - protein, 1948 aa, Burkholderia ubonensis
MLDPIGATHRIREFFLSYLETAFRIRDQSVSAARRQLLTRHGTLTTEPFLEPVPRYERVTHFLQDLVLLDSGNPLRSFSSVARRAFVELALSGLFPGEASGRDDVRRTSNVRPYLHQWQMLERGVGRGMPGIVTSGTGSGKTESFMLPIFATIAQEAVRWPAPHGEKLSNEWYKEAGQEFVAQRSKESPGRPKAVRALLIYPMNALVEDQMTRLRRALDSDEATSVMDDRFSGNRIFFGRYTGAAPVTGHLNHPRRANTAQEKRKRARRMETMRSRMSDLAATQTLAREHDARELADAHAAGREAPEPTRFLFPSLDGAEMVTRWDMQATPPDILITNTSMLATMLVREVDEPIFTSTRKWLEENDDAYFFLVMDELHLVRGSAGMEVVGLLRSLFAKLGLDRPEHRHKVRILASSASLPDEGPDSEVSLQYLFDFFGSFGSAREPGDAGFDTPADWRHAIVRGRQLTQRFDGTLPLATEPFVELAAVLDVNGADFTPQVTARNSALDVALARVARSLGIDATSTDVAAALPKVIAAASSAIVHACTTDDGTSAVLRATAVSEIAQRLFGSDGVDAERAVRGLCILRGLADTVSTPELYGIAVPDGLPSVRLHSFFRSIEGMFAAPYRDSGGKLHFDGLSVERGHTHALCDDGSTRRLFELVYCEACGELFVGGRRNADDNLGATELLTTAPNLEQLPEAAAITNYENLSYNEYAIFWPRRDEPKDGETTHEHWPDASLDTRNAMVTPVAASDNSRLAGRLFHMNQADDLARKPGSASPRCCPACGTDYSRRRPGMGAMSPLRSFRTGFAKTSQLLATELFSALRVSGRTPKSVVFSDSRQDAARAALDIERRHHQDTRRQMLIEALKSVVAERPNGEAREEKKKQADEALKRGDFLELKRLSDELVKLQLATDPSRVALAEVIEPVLLTSNELRSYLRRHVELGIHPTDAAGIGYIRNEPWNHWVVPAGASGKPEWPAHSDSGEAGEARAEIREDQRPLTYEVLFAKTYFALEETGIGYPSMTASQTTDSNRLDAYLRVFADAYRVAGNRWSEDAAHVDHAQEFGPRHRIFKFARASVPSAPVVELDDVLEKFRALEHAHGIVELSKLYVRLSQRGDPYYRCSNCGRVHLHRGTGICTRCLDPLPTEREGNVEQLWDSNFLARRTTRSEQGNESAFRLHCEELTGQTGSPAARLRAFKGIFVGEKQSPEFELFKRINEIDLLSVTTTMEVGIDIGALQAVYQANMPPQRFNYQQRVGRAGRRGQAFSMVVTLCRSRSHDLHYFRNPKRITGDVPPPPFLTTGHVVIVERIVRKAWLAAAFARLRDEDGPAYPGDDLTDTHGEFPPASSFYAATGNWRSRLEGALATTLATRDRVIDALADKDTTQARTMKDAMTPQHLTHQVWSLAGEGAGSPLPLAQFLAEQGLLPMYGMPTRVRDLYVGIENNEEKTPEFATVDRDLDIAVYEFAPGRSLVRDKRKHESIGFSPALREPDVQPNRATSFGSWKAEIRYIAFCESCGAVSSLADLPAEQVQCVDCECDIPSERFARYTSPVAFTTDFRPKSVEEGELAPVFRRVTTTEASNVSLDSVPGSNMSVGTTADARVLRLNEGKLDDSGAAQPFAMVPTKDHRVPAPGNRRWSLDGQLITEEKFAELDMRGAARRNTDLTDEAVRLMARKKTDAVYLTPVRVPEGLDIGRVGRDFGDTSVRAALISATHLLMQRASLELDIAPDEFEALEPRLRNGKPLLQIADFLVNGAGFSNRLATGNPPLVVRLAKSMVDAPLSDSLVAPYFHETHRGTCSQACYECMQRYGNRAYHGLLDWRLGLSMLRVFLDASSMTGLDGNWAASPELSDWPDLAWRSAEEIAGLSPDLYDLKHVGPLRLPSIEERNTPRRYVVVHPFWSRKAVLEKCVDGFSGTTLLIDTFQAARRPQRVLFAAREHAQKHGLM

SEQ ID NO: 24473 - protein, 391 aa, Burkholderia ubonensis
MRFAGLFAGIGGFELGLARAGHTTELLCDVNVAAEAVLKRHFADVPYHADITTLRSLPSDIDAICAGFPCQDLSQAGRGAGLDGQKSGLIAEVFRLLSRRRIPTVVIENVPFMLQLSGGAAMRAITDEFERRGYRWAYRVVDTFAFGLPQRRERVFMVASREIDPAEVVLADENVLPRPTTDVGRIAHGFYWTEGLTGLGWAVDSVPTLKNGSTIGIPSPPAVLLPDGQIVKPSIRDAERLQGFAPGWTEPAEKVVRRSFRWSLVGSAVSVPVAQWLGQRLANPGAYDKQLDREFPTAGRIPRAARFDGRHRYQVEIGVDPLGHRPPSLSDFLQDEGDPLSLKAALGFLTRTRRAKLKFDNAFIAAVERHVELLGGEIPPRLVRQLELLPA

SEQ ID NO: 24474 - protein, 892 aa, Burkholderia ubonensis
MADRCSAADQLRVEAALTAYYLHSDGAFGAGPLRYIDASEPQLRVALKIAHDADPLRLLAAACGGPAAMTDALANGVVPFKPRPGLPGFFRFLVMTCAIVATADNNDSTQEFGENLARAFGTQSPFNNRSSLPDLWLRLQDWCDEAHAAGEAVRQVMLPPPGTGKHLGLTNAITFPSWRDVRRLRQLLDRRTEYRSIVDPVGAAIQLAPLVENDASFSSAMRQASAEYRQLYLRKASLLGLHRFWVALAGLLTERHSPTAERFFVPRLELRFGATLDDVELRVVLADMKGNVDPLQVLEDFPDLVLAQTASWASQRVGKNASEALVSAISRGGVPFVESRFGVWHSTLLQPSVPTRCLLLLSKKNRDVALKWGVSTEPIGDEWRLAGPIPARDCRSVYQYLGGSIEPAGPPPQAMMLVGGHRTGSGLLGRDALLPQIRIAGPGAVTLRPVQENGVKCQLRRDSDDLYSIIACTPLEGTYKLRLDENMIPSAEPLAIETSVVFFPDALEHAELGDTEEATWRRREEARVRSTCGPIVLTDTTDDHPPVDSERSARFQDCLEAVYAGGRAGWSEQELVSTMRAVLGDNAPPVWDILRGLMECGWLRPTSNLRWRARRWWLTPPSLIRVRNREGIEGLLLVGSAPANIRRRFQQTAQAAGCTVMERPGASEYTACMQLARGPALGEVAEELAWAVAERPICTPMAAPDCWPPENVDESRHRRVGRWNWAKGGFRSPDTTNPGPVNLERFRRERGDRDDIFVVTGPGPARYVTTSRTSAIVEAYRRARIAMFRWDGAHLVRNSEDGHLVEPLANLAMLSSCRSPGPALVDGRWTYVYDMTADCVGWIRSVFGQAFVDDRSALDAKLSSLSAEALGWSRNRNVFRVQELMPPPVGRQ

SEQ ID NO: 24475 - protein, 655 aa, Burkholderia ubonensis
MFPKEGKIFSRRGLLNAPTDSLWTFTRRPNEQRDLHGPDLLLAEDIVRATPIVDLSSISLEMARRRLFNEGVHLPLEFSSVTAVALLSDDLFCDVTLTRSADGFWRSNSLSRPVQLKEMPNGWKSSLDFNGLRVIPAQTIPHAAVIRTVNWCSDQDFIERVIDRFRKFMQGVGDTPYARPSRDAVKYISRALRQADLMPGEDNGIVLDMERLQTDWPILEARLEASEELASLILDLKSTKDKVAAATELATRHALEEARPSLERQVREETEASLTEARRQRDELSAEVLNLEQRRARASSDLAELERLCNERREQQKAMSDGLSAVASELRTSLAQSPVQGHPALSFIAERLEGMLTQHDYHGPSLIPPAMPPWGTGMPSGACDEIGYGSLTAVISEEAKRHGIDENALRLTDIFVRAGELVLLCGPQAELTLRAYARCISAGVYRTMALDPSIIGLDDLWRAPGTQIPTAFAHAWQAALGAPDCLHILCMRDIDAAPYRLWLASLQTVLQSASRPTNLLLFATTTGRSDTQAGVGSPDDSRSGYLVPVFPGVHEAGAVAALASAVAPVPPPSRLSVAPDTVPTGSAAGDWLTRVVTFDLPPGVLARLARFRNQFIGDDAEHLMTAVQKWGQFLCSRDATSLPSTLRDGYTSMTN

SEQ ID NO: 24476 - protein, 1948 aa, Burkholderia ubonensis; identical to SEQ ID NO: 24472

SEQ ID NO: 24477 - protein, 391 aa, Burkholderia ubonensis; identical to SEQ ID NO: 24473

SEQ ID NO: 24478 - protein, 892 aa, Burkholderia ubonensis; identical to SEQ ID NO: 24474

SEQ ID NO: 24479 - protein, 655 aa, Burkholderia ubonensis; identical to SEQ ID NO: 24475

SEQ ID NO: 24480 - protein, 1947 aa, Burkholderia ubonensis
MLDPIGGFARIRNFFISYVETNFRIADPTTAEQRRKLLEAVNVLATEPYIEPVLRYEAHDEKIEDLANRNDGPLAPLSKAGRVAFAELALSGLFEGKPHCGPIRRESSYAPYRHQVEMLRRGLLPGHPGIVTSGTGSGKTESFMLPVLAALANEAVNWPAPSLNYLQSDWWKVPNSRWVSRRAGESRPAAVRALVLYPMNALVEDQMVRLRRTLDSEDARKVMDERFSGNRLFFGQYTSASPVTGHETHPRLAAEKQERERRSRRGTKLRAAMQAIERNQNAARLHDDKQKELAKANGTRVPDLTRYIFPSADGGEMSSRWDMQAAPPDILVTNASMLGAMLSREVEDPIFEQTKTWLQSSEDAFFYLVFDELHLIRGSAGTEVAFLIKALIERLGLDAPEHRHKLRILASSASLPMDGDPGIQSRTYLRDLFAPFGTSCGPSDAGSTSPDFWAECVVRGVAAIPKGAPAKIDPEPFTTLFREAIDPASGFIARLKENAALDDRIKLAGRALGVDAGSMEECVKRLAESAAAILTNACRDGDGVRAFSVIHVAQRIFGNQTQNGEEALRGLMLARALPESGLWPVRVHPDTPAFRMHSFIRNIEGLFAAPYLVGKETQFRHLTVERGLTHAAPSAERKRGSRLFELLYCEACGDLFVGGQRGQKSSLTPATELLPASADLEHLPERAASEYYDRMTLDEFAVFWPRREECAKSEKDYDRWEHAHLHVDTGVVTRGRDVPSGNIGGYLYFQNPPAASGIGKTAGKATAQPFCCPNCGTDYSNRPATSRSRSPIRAFRTGVTKASQLVATELFELLHAVGAEPKGIVFSDSRQDAANQALEVERLHLRDLRREVLVTVAERAVENLRKDWMTQEQFSQRVQQLLTENKSDELVALTRKYQQQGGDARDRSKVKLSQLLQSNDESQSLGELVKEFIKLGIHPFDEVGLKRFDKLPWYRLFEKDGESYTFSHQLSHASKASLNGEILEEQYELVDDVIFANTFFALEETGLAYPTVSGTSGSDVDELDAWLRVFASAWRVRNNRFVNADSLNEWVSGGDVKHKRTVKFAEKVFGSSGFVDGLSRVLQNLSDKGHRSGIFEIGNLYLKVAEETDPYWRCGNCGRVHLHLGLKRCTRCATALSTEHTGKVSELWASNFLARRIVRGANDDVSRFRLRVEELTGQTDDFAARLRSFKGIFVGNETEIERRATEIDMLSVTTTMEVGIDIGALQSVYQGNMPPQRFNYQQRVGRAGRRGQAFSFVVTFCRGRSHDAYYFAHPSAITGDAPPPPFLAVTHDPIPLRLMRKVWLRAAFAVLRDDCAEHGREYPGDLLVPPDVHGEYVTTDDYYFDETLNWPDKLRYALSQTIAVRDKYLETASFDPLQRERLRASATVDGLLEEIASLKAQAPAASFGLARFLAEQGLLPMYGMPTRVRDLYLGLRDRKDNALEDAEWSTMDRDLDLAVFEYAPGSILVKDKLKHTVIGFTGALSDPQPRRGVGLEARMVSNWKESTSYIAFCRECGSAKHSDHMPASTVACDDCHREIDADDFHTYVTPAAFRTDFKPKSEVDDVGRMAVRTVATVLHEGERVDCGGISVRRGADATIMQLNNGVAGDDDEGQRFTVALAQSNSPAGGVSIVGDQAIEVSYLDRQRGLWNVDASSRQQFGLVAKKKTEALYLELREFDRRLTLDRVARIGDSSHLATRAAAISATQILVQKAALELDVSADEFDALEPRLRSGLPMLQMADSLINGSGLCRRLGESVSQGRPPKIVEILHSILDNAAAWPLLDILSVDREGAHAERCRSSCYRCIQRYGNRRYHGLLDWRLGLAYLRAMSNPKYACGLEKGDDVFPEIDGWKDWAHELAQSVADMRKGTLRYQSLPHSGLPCLTVTNLEGVTVSRIAVVHPLWRLDEDYAKAILGKDWSEELDYVDTFVLERRPLREIAKRTSDQA

SEQ ID NO: 24481 - protein, 385 aa, Burkholderia ubonensis; identical to SEQ ID NO: 24467

SEQ ID NO: 24482 - protein, 541 aa, Burkholderia ubonensis
MPEAESRIQLYDLSPEAAPTAVYDWTPDEDYITRVLKSLPGAYDARVDALVKSLLGHAETHENRIAVNPSDVLSAYEALRSGELAKALLANRDRIRELAEALQSSPVISRLIEKEITDIAEHERAAIQARLQRELHQDMGALRDKRLAEINQELQTSENEWKSKLDLRIREDELAQQRAFAKRRTDEEQKLKQELGDLRAKREVEIVREVEDRKDQAQGVVNELSQQRDSLSKSIAVLENEKTSLEGTISTLTEKVSVAERQLEDIESRKGKVSAVTSATLSRFILPVAAPNRAEPLLCKDVHDVIQKCALLTPSGKKLMEHFVTLMLAADVPILKGPQVDDFLRVAEVMFSSGARTSLVADPTIICVEDLWVRAGLRIPTSLGLAMDAHADDSAPTTLAIVDGAENSAARYWYPALAEQARRGNLPRKMLFCVTIGDGDNDEAHAMQNSGVTLDVNNAIDGGAPALAAVLLSPKLCRDLRPDPWISDLSVGASLMITSIDGLTIDSAMRATRACLEASRLSQHASASVSSVASLFKTSKN

SEQ ID NO: 24483 - protein, 1833 aa, Cellulomonas sp. Root137
MTAAPTGPEVEGSRRLDPLATFERLREAYFRYYNTPFGLADERLERERQAALDRDGGVFRFPLLELRPEYVSAQRSLAESVKAAGATPELAAFAAAGLIPPGRDLYLHQEQALTAANSMPGHMAITAGTGSGKTESFLLPLLSTLLEESKGWGGKPADAPNWWTKDGAKFVPQREGETGHDQAVRALILYPMNALVDDQLVRLRRALDSDAVRTWLDSNRSGHRFYFGRYTGATPVTGSPTNNLAVSELRRYLRETDRRGKRARQLSAAQGGDPDTQYFVPRLDGAEMRSRWDMLAAPPDILITNYSMLNVMLLRQRDDSFFVPTREWLKNPKNRFTLVVDELHMYRGTAGTEVAYLLRSLRHRLGLDDRPDQFRVLAASASLDPARDRPYLSQFFDVDASDFVFVDGTHTQPSKPVLGSGTDAEQILAAPTPQAAVEYARAHGLTDGLRESFVDQANTARRTTIAKSGKQLSEALFPGVNEGTAERALSALLSGLTSSSADGDPKLRAHMFFRNVPGVWACCDPTCAAVPVEDRVNRTVGKLYVEPATRCECGARVLELLYCQNCGDVMLGGFVPEGQTQGKAVDTMLLADVPELAKLPDQVNLERTAANYLVYWPSKDMTLSKLDKPEWEYEGGTVKFSFRRSRLNPASGHLKNKEADHTGWSFHVNVDKKAKRESTELGPFPTQCPACGDDWEIKYGPKLLPITDPRRQRSPIRTMRTGFEKINQVLITELAGDMRPEDRKVIVFTDSRQDAAKLSSGMALRHYQDLLRLLVVEQLAAAEDPHADLALAVEHVKNHVTSSESFAAIKRLRPRDTVAFDQLRAIWEGDPDADPNDEAALSKRLTRFRTIAQLSSAVTTELLKLGVNPGGPHARLQSTDGKDSRPWTTLYDWGVKPPTLRSNPTTEQSALAGRINESLVKEMLDGLFSGAGRDFESLGFGWLALADDDEPAEAEPGSANAHTRAALRVLADQRRFSGLREGRSDPTARLKALWHAVEHSTGPAFDDIREAVLGRAGAALKEYVLDPDHVSLRPGAGSAWVCPKCFRQHLTRGCGLCTKCHTPLPSIGVAIDKREDYYAWKASKRDGRFRLNAAELTGQTDRVDAQSRQSRFQGVFLDETEVELADGVDLLSVTTTMEAGVDIGALSAVVLGNMPPTRFNYQQRVGRAGRRNSPVAVALTVCRGRSHDEYYFDRPEAITNDPTPKPYLALDQEPIYMRSLRAEVLRVAMRSVGGTLTADPSLDFELTSNVHGAFGRTRDWPVLKPALQEWLNKNRVTVELSATALARTTPFASDVAALAGRLAGQLISEIDAAVAGKGHEDLSQRLAEHGILPMFGFPSSVRYLHLSRPRRSYPWPPKGVIDRDLAMAVSAFSPMSEVVRDGKVHTVVGITAFKPVGTGAEPLAEPLGTERDIAVCRSCSFLQENEEATEDVDSEVCPRCGAGPEAYAIIPMREPMGFRAGKARDFDGNFSWSARAMAARAHTDLSLLPSFESGKAHIYAGPGRRFVLNDNGGRLFDLIPASAPSDGWPAWGGYISGEAVRRELLHPKDGDGEPFSVAFGAIQPTDFLFYGPAQPTDSESGLRLNLSLGARQPSGARDTTEGRRAAWYSLAFLLRTVASSYLDVQPLELNAGIYSGLVGDEPALFAFIADTLENGAGFSTRLGSPEVHPEFRDRLDAYLLELARADHAAECTASCYRCLRDYGNMAYHALLDWRLARDLHKVLQGGALDIDAAAEGNAISRWAKSFGATVVDGFPAATARFHGLDGNFAVVAKHPLEASEQVLISPRLADCQAQVEVAMEGLDGVVFVDTFTLDRDPRRVLDMCREASDGGVG

SEQ ID NO: 24484 - protein, 436 aa, Cellulomonas sp. Root137
MRPRECREIRTVAFEVVEICAGAGGQALGLERAGFAHALAVELDKYPVQTLRENRSQWKVAHGDVADPDVWRPRDYAGVDLFAGGVPCPPFSIAGKQLGANDERDLFAWAVEQVVEMKPRAVLLENVRGLSMPRFAAYRQAVLDRLADSGYVGDWKLLQASDYGVPQLRPRFVLVALRETDAPFFQWPAPVAAEDRRTVGQTLLKLMYAGKWRRAAAWAKAVDKVSPIAPTIVGGSKKHGGADLGPTRAKQAWRAMHVDAMGLANAAPDRDWGDFRVRPPKLTVEMVSRLQGWDPEWEWNFAGGKTAQYRQVGNAFPPPLAQAVGESIRKALDHESEESGARTLVQRSVHDDVYRTLREADGFVTLDQLAERLASKYSVAELHERVTGLERDFEIIRRRKRSGEAVMLGHFKAFIGQEDHHRHAAFAEAAARSRIS

SEQ ID NO: 24485 - protein, 692 aa, Cellulomonas sp. Root137
MDISDHEDPNYVDWQRRLETAFFSDPDGLVVMFVDDDVLARIAPDFPDASLDLAAAVMANSGQRRSADLFPHLSALHDTWASTGRVGLPPTLPLLALSVLAASRMRRDQNVAANNYYLRLAELIHEVQPEHGIEETRVALSSSFRSVARMWISLDRLLDETKSFGASTIRDHPKYTLIGYPLSQALIRGADRAHLTRFFSRLDLEHDGVPAEAALLKYLKIWAERPRGLSPAFTNAIGNAELSALIGPLIHRLAETWDGRVATVEGKWELPLRIALDLEEFRTHWIVDLTPGLDGEVLTGATSAGSVSVTIDTSHGLSYYSFDDDLPLAGRDCTRGLELSGTRALARFRGTEVLLFSKSPATGTWLSCDAIVPFEEHVLAATGQSVEAVRALLADAGDTGWRPLAQQRGGAALLDGYTVFIRATFSDEDTLERALRGSIGLKAPTLRPEPTTRPRFSNGLPIARNLSRNHYLVGGAPDLLIPASETAQTVTANLDGAESRLRARGFPVPLRGLSDLGPGQHRVEVDGDALRFTLLDGDPDAAAPSGTGSLAWSLSAQLGAAEEASLACGGIIARVDILEPLLARRGQDTTLVVHTDGTIQRVDEPAAPAFLGAESHIATSQYFEVSAGNAVAWLLQCRKGRWTIRTVSNERPSFERRNLSGEVTKLWDSLEAIDAGDDPRWQQYLRAAGVAT

SEQ ID NO: 24486 - protein, 1887 aa, Chlorobium phaeovibrioides DSM 265
MKDLVGSYERLKLIYRMYIESAFPFKNEGMRDERRKLLDESALLAQEPLVEPSPQYLSSGKTLSQVVAELDKEYDGLKDLGGPIMGGFELYEHQRESLLATLRDHQDIIVTTGTGSGKTECFLLPLLGELVKESRAWPESPNWPDRRDWWNDRPLAWRPQWAHSGRIATGSHAMRAMILYPLNALVEDQLRRLRLALDSEDSHTWMDRACGGNRVLFGRYTGSAPVSGPMPDGNGRAPGVKKLADLMKRAQHEDARVREAVHIDPQVRYHFPNLDGGEMWSRWDMQATPPDIMITNYSMLNIMLMRETEDMIFQQTRSWLASDTSHVFSLIVDELHSYRGTSGSEVAYILRLFLERIGLDPDSPQLRIMATSASMDEGAGGNFLQEFFGRGRDRFRVISGGPPESPKAVPQNLSPHASLFAGFSAQTHEAVLDGLAPVDQKVLDEASRAFLQQVGIDGQNQGLAPSMGIGMGKIGVVDALRNACSGDDGLPRATRLGLIDKRLFPDAQVPVGRAASDELRGLLLALSCATTPHGISALPLRSHLFFHNLQNLWVCSNPACNHNGVEANGRNVGALHGYHRVNCSCGGKVLDLLVCSVCGEVFLGGYKYGMEGGHGRRYLTSDMPAIEKMPDAATARLVHGEYAIFYPKKGNPIGARGRNDGTRYEWRRGGQTVRCGWRNAWLEVYTGSLADYATQEGQEVEGWLYTVDNPESQALPPVCPSCGTDQRKASSFPTPLRSHRTGFQRASQVLASTLVREIGPVGDAAKGKLVLFSDSRQDAAKLSAGMELDHYRDMVRVAMIDAHSDFITQFAATLRYWINIHNRRSGEFRSLVNGLNDGFPLEEDTTSIATDDEELAYMFRDMHSSYYDALMDMAAGASGRVDPETQSDIRWIIGQYPHEVPFRSLCDAIFVRLASVGICPGGPRYEYSRYPRERMDHEWWECFSWDVPGRIRENATPEQREHILKLKDSLLRELTLTLFSNSVRTFESLGLGYATFRPVGEPDDKLVQCTNAIIRNTCLKRNFHLWPYFQRDGGELELWPRHIPYCDLSGVEPNEVLRQLRESCVGLRGEHANLGIDPEHLWLHLSDQDLSPRSGFKCLKCGAYYMNYAGGYCIDCINEPLVQAPLDAHMDYYRYLTGASGGAFRLHCEELTGQTDMSDKSSRQRWFQGIFLDGEAKEPQGIDILSVTTTMEAGVDIGSLVAVEMANMPPRRFNYQQRVGRAGRRGAPLSIALTFCRGRSHDDFYYQRPEEITGDPSPAPYLDMTRKEIVKRVVAKEVLRRAFSASFPEGIPDVAGENGRERIRESVHGAFGTVGGWRDARKHIAEYLAAMQVKDINGIAGCLSKGTEFHDDSFFYEWLNGYVKETLIAEIDRVVGGAIGQLPLSELLASKGLLPMFGFPTNTRLMFTERPMRGNPWPPEHGTVDRQLDIAISQFAPGSETVKDKRVHKAFGVVDFVPAGNVVSIRSGFRPSIVEGNEKFARCSNCMAVLPRTEPEGAIPAGEMLEEEECPICGANSLRLVDARVPTGFISDFDPKAFEGSFEFTPYASRPSIYIDQIELNEVPGTNIKTAGDSIDLASVNDNGGKGGFDFIEYNIPRMNGQGAFRVKNISQDEVEGGYRIALLSKKTTDVFLMDIQHWPVGVFADPREIEGRAAWFSFSFMLRVAAAKQLDIDQQELSAGFRTVMGENGWPTAQGFLSDALENGAGYCRWIGEEANIKQVLRLCDPTAESSIGTHWLASGHAEVCDTSCNRCLREYYNLPYHGLLDWRLALDMVRMAVDPAATIDLHSPWAVNANPWKNVFYGDDCLAGKILSEFGFIRDEASSSLPLFVSQGRGKILLPSHPLWDINSNQSYLAARAEAIEKYGINNVSPVNPFRLLRRPVDLLH

SEQ ID NO: 24487 - protein, 467 aa, Chlorobium phaeovibrioides DSM 265
MPIPNKEAISHPQHSAPTKRFYSAMDLFAGCGGLSLGLENAGFTPIFVNELNEDALATYLMNRHHTLGGLKFSDNANLRCNDAHELDNNRLARLKSDLENIPEANISFNNPKTPKNGGGGTLDIIAGGPPCQGFSGIGHRRSYSVDKEQLPSNLLYARMAEIIRNLRPRIFLFENVRGLLNSKWTKCGNVRVWPDVLNAFRRIPGYEVRWKLVYAKDYGIPQNRPRVLLVGLRKDIIKNNPKLDPKADRDDAVRCGFLPQGKNTPPPDLVDLLGDLVDPSIMEYLRSGNYPAGVFASNEYSKAPETEVQKALRRPAPFMLPDAIVGLTEQQYSKHNPLVVEKFRHMIETKGEIPIQFKTKKFAQRALPERWGPLGPTITATSMPDDYVHYSQPRVLTVREWARLQLFPDWYAFSGKRTTGGIRRAGNPVAGIYEREVPKYTQIGNAVPVGLAEYIGLHFKSILDAAI

SEQ ID NO: 24488 - protein, 581 aa, Chlorobium phaeovibrioides DSM 265
MADYAQWNDAIIGFHTRNVPKGDPVYLTVNESAIGMVGKAMLGISGNDAAYADFIAAVRQRCTTWPQERRSVLIDGLEGIDEDTGLPKGVAFLSAMVLAAHKMASKEGADNNNYFVRLRQVLGLNDTAPGRPEGLDPGVEEPCWKSWGMWLDSNGWLNTAETVGDGPMRYISYPIGQALLRDDDVVYLRRLFKEKIGHPSLDEAQLAGWLLRQGFSRSHLRSGFESPDPGRASAFFDEAYKVYQGVDWSQDGASVVAGQSRPNKIVAGILCQHSMNGGEVFRLLPRIPMHWQGDELVAKGPNGDDAALVPYRPGLFRPLWQVNPFQEDALSFRVEGSDSIEEIVMPSRDYWILTPDPPDDPHGALATWDKYPALMGVKFRLMVKGAQDGRLAQEVVRFKDYRLGGQDAGLIGWDSGPIDVSGWTEFHGCMVLSAAWDSIIPHEDAAELFEALKPSLRATIALSGGLRDSSKGAWIEGCPPSAKIYGFDDEFGFRIVKDGAILHESRYTAQAPFQLDECKKPGLYRLEALWDKRVVAGKALRVIPWDLLEVDPIDGAKWVDIGSESFISGPRRIASKGVRDA

SEQ ID NO: 24489 - protein, 2009 aa, Chryseobacterium kwangjuense
MKDPIGSFETIKENFIRYVKTAFGTKFEGVEKERYDLLNYDKVLYRKPWVEPLPDYVSSGKKINDLTAEDLGNALNEAETNTFKGLVNTGLVGNFPLHSHQAEMLKQALLGNNCIITSGTGSGKTESFLLPLFAQLSKELANWTAPNQQSTSINTWWRENGGFSARQIVNTSNFTLSNDVRQRNHEARKAGVRALILYPMNALVEDQMSRLRKALDSDDTRNWLSENTNGNKIYFGRYNGSSPVAGELKKIKDDGSFAINTNKVNQLKEQLQQIETDSNRVAQYIQQTGKTESEAKDLKSFFQRLDGAEMRSRFDMQVAPPDIMITNYSMLSIMLMRDIDKGIFDETKQWLEENPNNIFHLIIDELHLYRGTQGTEVAYLLKLVLNRLGLHPQHPQLRILASSASLEAGDEESKNFVCDFFGVNHEHFNQKFKIIEGKNNPITAFPENGRKLPINPFKEIAEKFSEVKENIADESFISTCEASATQLATAFNLSQYENGISKLLSVIINPSFQLKERLFSPCQDYKAVCSSQAIGDDDNGKYFAEAIFETTSNKEDLENALRGLLIARAMLDEKEFEDIAKTIPDDRKLPRFRFHYFFRNIEGIWASVKPDEVDEKYSDVKRTVGKLYSTTRINSEKGNRVLELLYCDNCGTTLFGGSRLVTRNESGNNSFEMLPISPNIEGIPEKTPAKLVERRSYQEYAVFWACGNQQYTSHDAEAGIPQVGWRQPTMNGFNQTDFLADWIPASLNCISGDIDNSHNKADDKPEQWIKGYYFIITNNSNRDIALPDANGNISTIETHKALPSVCPGCGVNHQKRRQDWNKNKTSSIRGFRTGFAKTTQMFAKELMYQLPSNEAERKLVVFSDSREDAAQIANGIERNHFSDLMREILVKELHSNLMFRFQIVDAFDKGNTTRQQVLKEQSQAIFDEIEFLVENSAYIGTNANRIREKQEAEIKLNEIRSLTLNVRSLVHITNSLNLAPLIKHFVELGINPGGNDISLQTRLLNNNFVPWYDLIDFTNFQWADGANQDYIDALKEGSFDGLATMFFGSLFYSFESSALGYVSINPELQVIADQARTVGISKNDFFQIVNSTIRILGDKYKHNKVEDASPFNFTQYNDFPGQVKKYIRAVETRYSKNPNEIGEAVFNTLSTSSLLRGDTGIQIENLFIKVARPTDSIWTSQRGSRPHLHFSGGICTHSVTALQQQPDRICDDVWKENYLSYNAIKQQREPIRLHCEELTGQTDDQFERQRHFRNIILPDEGNRQVKTIDLLSVTTTLEVGVDIGALQAVMLGNMPPQRFNYQQRVGRAGRRGQAYSVILTFCRGRSHDEFYFANPQKITGDAPPTPFLTMGQERIFRRLLAKEILRRAYVEKEIDITSDDKSSVHGEFGSVDSWTIYKLEIANWINENKKAIEQTVDALLTPQLQNKRAEFINWVSDVTTENGLIEKAQSIISNEEIASNDISEKFAEGGILPMFGMPTTVKNLYHGINRRLEPLSIDRAQAMAIYEFAPGAQKTKDKAIHQVIGFTSDFINVHNGIKNADSANQLPFSLNRWFVRCRACGFFETYSEERKSELESQSQFDVCPNCGEDNPNKYQPPFKLKSPRAYRTNLSTGSDTKDDSEFLLSRPPIFAEKIGLANIEAISNATISISDNDVTWRVNTNSDRFFTGRLYNTNNRFPFNANGYWFNNQWLLNDFATNVPDENGYSMTIQQITASADEQIALASNKNTEIFRIAPTNVPYELDLNMFFSETDLAHVKAQSNGVRSGYYSAAFLLQRILADKLDVDPTEIEIADISMKVLDDGTNRRIAEIILTDELPNGSGFVRYLYNNLSNILSESINPSNANSYLGKIHSPTHQEKCDDACYDCLKVFRNMNYHSLLDWRLGLSMLRVMNDSTFVCGADGNFNFVELRDWLAFATELRNGFIQSFGFSHTAEIKGLPIIKFGKNQKHIIMIVHPFWNMRNFTEANWLAEIYNEIKEHTEGNGGKISIIDTFNLHRRPGWCYEKLIER

SEQ ID NO: 24490 - protein, 377 aa, Chryseobacterium kwangjuense
MFKEITKIPVLSFYSGGGFLDMGFEQAGFEIVWSNEFDDIFAKLHAAGITSWRKSNGNDIKAEIFNTKSITEISSEQIISEAFPNGKPEHFGMIGGPPCQDFTLNGNLQGFNGERGKLTVVYFDKILELKPTFFVMENVTGLMKRKETKEYLQKLLKRVEKEYYVDHEKLNSLNHGVPQHRERVFFVGIRKDCLSKKAILQTPFGKWFPFPVNEKYHNAATKYNWGKQVPFGKSLKKPENVPFELCVESCLVPKQKLNRIPNANEIFTLYKPLNDLEQIEEGETSRPSFKRLHRFRYSPTACYGNNEVHLHPYIHRRLSVREALRIQGVPDTYILPVELPLSKKFKMIGNGVPVPLAKAIAIGLYNFIVKNKVILVE

SEQ ID NO: 24491 - protein, 948 aa, Chryseobacterium kwangjuense
MMKYLQWNNAISEYLFNPANSGRDVYLYLTKPDIILIGSIYFDIETEEEIWKDFINSIKRGFPGSNGNIIAKAKYAHSKNNLVGKNRSDGTPATIEDIPVLYPPFISYLIFLILPLVEDIDDTNLRADAYYGRLNAFLQSHLINENIGSADFRNNQINCLWEDLANWANVKNNGDFGLFNVIPFTNENWIYVGKVFSQCLVPPKFLNRLPELFQVIGLVPDTFYEDRFLQEKIKNSRTDLIPKSTLDFLKKDDELSNSIIQTIQRQYKKWTGETHEEIEEGTTTRKKRNYTVANLFLQFRVNTNDELISFSYRMYSSNDYPEDLKFGEHENLYEINGWSKTLLLEFNEGLELKDSFNKWIAKFPNRDVRLFVSAGIFQLSNDFWIETDFLSKTDRMYLLCKNEKQELIKDWGKTFGNGNFKQEDFEGLPENYSLFWFRNPKQSLAGLSILTLYTEKRIELVGGLKINFRTYSNEFLPEVEIVNSDGNENVYLQYKDTDEKIFLSKKTSLNNRWLLTEKTAINTDFHIKVEDETFSGNALAYNLVSSDNTAIKVDGSNLPKRDAFGRNVTTDAEQFCLGSNIVNPNKSSQRYFSTYGSLFTSTIQDTLTNITTAIFNNHNGNNLCNFLSLKSELTTEDFFKAFEFFYSKEFPEYQASTNYNLTKLKKVSLNFYDFTGILDYDYETKKIVLNPPQFIFIPAEKGRKVLLIGARDTALIEKIITTAPKYNLQVEITKQFSSNERLLLPDVITIRAFQQVDDSYGENSIKAFANELNIKFTTDYYPQVALQDFSATIADYEETLQETNENDYDWARYIFNPETLDFDKNETPTFDKSFSLVRYKLNEYTYEFKLWKNNKCYKVDMNWGRFIALKHFQKEVILFDNSSNKVAIPIATPLPRLLSEAIMLLSGKAPDFKEINGKKYRVYENVVGIFTQNLFRLKLGQTAINTTL

SEQ ID NO: 24492 - protein, 1982 aa, Citrobacter freundii
MNNPLETFESIRDFYISYLETAFRIDSSDIQSERRALLEQQGTLCADLFLEPMPRYQHYGLTISELRNDAYGQTWLPGFNAQQRAAFIDLCLGGLLPHNKTDSTKGRFNLYTHQLDMLKRGVQPGKPGIVTSGTGSGKTESFLLPVLAQIAKEATGWPQSPALKCWQPWWHKVADKQPSFMREHEAAARPKAVRALILYPMNALVEDQLVRMRRALDSSEAHDVMDTHFGGNRIFFGRYTSATKVTGWLKHPRLSEEKNEKKRVAKKITELREYMQLTEETHQEAVRQAQQDKDNELSFNFPRTAGGEVLSRWEMQKTPPDILITNTSMLSTMLVREVDDPIFEQTRQWIERDPDAYFYLILDELHLQRGTAGTEVSYLLKHLINRLGLDQEKHRHKLRILASSASLPVEGAEGDQSVEYLWGMFGQRGLPAGASSNDWRECIIKGDPLPPGNMSLFQGDREAFYHAVLQLQQAPLTSLQHWQNVARSMEMTASEASTEQLAQRVVLQAGNLLESGCYTDDLSPRATSIKMLSSRLFNAQPHSDKALQALIWLRSTEGDWPQWFSHAFPDDIGAPRFRAHAFLRALEGLYVAPLPVPSAASAQEINQRYFGDLTVESGLRYGKDKKSRRVELLYCECCGNLFWGGKPSVFSGSESRIELLPNDPDTEQLPEHAKSVMVERRSAEEYALFMPVVERFWPKGNEELNSDNDNTFGTWVKASYDPFTATIQHPVSLLKPLPENHIAGWFYYVKPGEFASSERGQSSRQSPGTALPFQCPACGTSYKYGKGKLSPIRSFRVGFSKTTQLLASSLMAELQRSGNREQLVTFSDSRQDAARAALDLESGHHDDVRREIVVHSLQTIAADKPSHNQLKIRQAEIENRNKTLVNLSVRSDEEEDELDQLADERKKIRGLLSKPESDSIPLREILEPESPDAGQPLGPLLRAQVDAGIHPSDRTGIAPVPDPEKHEEGTLTFAWQQLFEKNTQGEWCWKALPSYEDNLLVARQEISRDLKRLVGESVFSKTYFALEESGWGYPCLPITGNDSREHLAIYDAMFRVLADAYRVTPSQYTKPETPWSSARDVNRRNRLYRFTQEICQCSGGEPLSLIDSFLRRLELAGHQGGIIDIGKMHFRLAEPTDRVWRCSRCGRIHMHTGAGICTRCYSPLPETPCSEAKTLQMQHYLGKRLSHSSGIHRMRSEELTGMTENPAARLRRFKGILIADDDDILPEGMKDFAPDRDLDRAARVVDVLSVTTTMEVGVDIGDLRAVFQANMPPQRFNYQQRVGRAGRRGQAFSFVLTACRSKSHDLFYFRHPEKITGDLPPPPFLTTNLEMICQRLVRKIWLVSAFKWLRQQTEKADHPWPVDDYAHVPDNHGEFFPVHWLKENQTDWLPKIRQAIEATILARDEFARTSTQQNPYLFQKIIQPLTPEQLIQDINAVLNDSAMEAKGLAEALAEHGKFPMYGMPTRSRLLLTRPVSTGEKEIEFASMDRDLDIAIQEFAPGKILVQDKRRYFTAGYSGLLKQSRKNPRSFYSNACEPGELRTMTACPVCNIWAPANSLATECTICGAVMDKAERYQCYVPYGFITTLEPKSAKEDFDQILTTASRVSIAEAYTFSATPEPDVNVAIQLQPQTCLHRLNRGIYTDKTWRGFSATQGSLTVPFRKQGTYQPLWANRVWIDSQIIEADLLVKNRFNDRGETRNTFYLAAPKVTDLLALMVAQTPPGLRLQYSTLTPAFRAAALSASFIIVNYASKELLDIDPEEIEILEPRVQMLKNGKSVPVLQMADRLVNGSGLCERLQQKDASGSLIILEVMKKILNNKTAYPLAEFLQSDHRERCFQGCYHCLHRYGNQPYHGLLDWRLGLDVIQLLLDQTYNAGLNGDFTSPGVSDWPENALRLAKEAASLYSDSDVKVMGNIPVIRTGDGRWAAVLHPFWDPDAAFAANPELEAFSYEVDVDATNTFALSRRMGTEMAKLRTQASSSLE

SEQ ID NO: 24493 - protein, 361 aa, Citrobacter freundii
MNSVFERENDNIRVLSLFSGCGGMDFGITSAGGDIVFANDVIENACKTLGNYFPDTDIRHSDISQIQSFPDVDIVVGGYPCQSFSMAGNRKPNNDDRTNLYKHFLRVLETVRPKYFVAENVSGLKHLGAGSFLEQQLTAYKAAGYQVSYHMVNARAYGVPQSRKRLFIIGVRNDLGQYFEFPAETHGKATKKNPHLKPYVSHGEAIRDLPLWPEGEFYERPHDPEGHFSWYFMSRNRKALWDSPAYTVVANWRHVTLHPASPVMKLTWSNLEDGWKQRWDFSDEYEHLIVDTSRPKLEQARRLSWRECARIQTFPQGFEPVGDVESKFTQIGNAVPPLLAEVLFRHLFSGTGLKMMTANGN

SEQ ID NO: 24494 - protein, 921 aa, Citrobacter freundii
MDDSFPVTLEEWNAELVKIVFLESSHTGSTLSRIDTTGRIFEQLAGPRSKEDAKRSFLISFGKKASKIQDALRDESRLDILAQIKGYPTYFAVLYLTLLAASADDETHDEGDFRVRFSVLLGFDKNKKFVFTELPNLWERLERWSSKRQNCTRLILPRPSKHERLIGYSKRIAFPCYKDEVFLRNILIDNKLDNYSTFESVNKVVHQYISYFSEFFNQEFIEFRTLLSKAAMQQAYDSPFWGAVRDITVHTEREQLKENGKYCIHMEFNDSGNPEIYLLMDDAAATASEIQHYDSLPNEIENYNNIYYERDIGTTLNSLDLLLKKRKGYFYKSRVGVALRSGCLPLFRDDFCHISSEGECYEDSPTYLILHHTYADSVFTVLKKVGERVQRRDIKSTKWSIVSSDKVGRQTLDKIARLLPEEARRFLIQGWQPARPRMSGAARFGQAILLNPASTPIIHMPEVLRGCYVISNKDGEELTHGSLSQGAEGLFIPPEALMEISGQAFCRYELTLAHSDIPVNFDVHVLDHAPYATYCKISEPHDWLTDGPSGVLMALGDTAVIPPLKREEITPLSGAQMLWQYENGFPVTCQYTELHNIPAAFDWIAEALALRFQRRSTLPFGELKKHIEPVSQVTRIPEWQLRRMLFAAGWLCVVQRRHAPYSLVSLAERTISVDVTEQGIVARILGMFTRSERNLLQEALNNGERIGRRLVEDNGCSMGCIELHLSARERVHAFIEQFGLRLVNHDDFPVNALSGVLLPMSQMQFTPALPPDLHVSLWQAEKYQWSEEQRITQTANNLLIRCQEKQRYRYFIRQNAGYWQTDSFSWALMAQMICSGETVGVQKGDSGWCWSTKIIALPPSVLQWWIHVAHGCLSITDNGGYLFAGGKVPLWDNVMTFPSCQRALARRNRALTTRKLRKTLQ

SEQ ID NO: 24495 - protein, 926 aa, Citrobacter freundii
MAKKKNIISDRLGQMYYFGTESHELIRCLQECKQRLTRNGAKADNLPKGPEKRLHFLRTLPPKAKPVVSDWLRENLTFSEQNDPQIVLRDLLEAESNAEDIELCKPLWRTILGFYISSDCPEIITKFLNGEEIDLPQHGVSDSLTINFTDEDIEQCALISQGKEISMPERTIPLFVGGLVDALRGTRIADNRWRTKLSEHSLPLARKLGELIDQFEASHDLKKMDGTSVIQAPPVVSKEIDSSMDEVMFIGKVLALTASGAFFVTPISLLINGNLRDLPEELVKDLFPHGGEAIGFENHFSKKFTRGEIAIWKARYQPSDKPAQYVITDYLSRVYPVVALPHASDEPDTVREWLLTSYQPQNDTSVIFQLSDGVSLRLPGDLSDPKKYDFDMPLESYRQVPQTLLGSHALTVITELPQVSEKYDCAEAATWIKRLLKRTDSAKDFPQFSKGQLQNLTHFIAEHESDNEASYLRAVSHLEQIADTRSFLNDTTQQLLALPEVEAQINIEKQEILTRYEDEQYQIKQSIMVLSEKKIQLENEIADQKKKLKKETDRINKALRQQENELEQRIKKTFEAASQAGVETLAQTALLRAIIKNETAQEQPVQQRITPEPVAESVNSNFPLAEVSILTRKHQLSLAIEKQAQATGLSESLLSSLIATASITPAIGLMGKQTKQTIASLANLLAGNVWGEVSVHSDHFSFSDLMNSPTLIRLSGDTHTMTLGDFLTQQQEAGLASIIELRGFNRTPPETLLPELHECLFRTPHPAACSWTDRRQALRHLPIRHPILFLLTFTTGKSTFPLQAPLAYQLPLFLAENIWSDERPFEQNTDITPSRIAPELWQTIYVDNHQPEHPACAPWEALKAALLSLLPDEQAQAVARLAYGLGRSTTQDIATTIDILAPELGPYVQEMTSGESASVLEHLFQL

SEQ ID NO: 24496 - protein, 1947 aa, Citrobacter sp. 30_2
MLDPIGGFRRIQDFFISYIETNFRIADPSVAISRRNLLNSSGEFAAEPYIEPVLRYESSGKMLEDLVDIDGGPLNSLSPKGRKAFVELALSGLFDSKPGDEVWPRRSVHAPYSHQTQMLERGIRPGCPGIVTSGTGSGKTESFMLPILAAVSNEAVNWPAPCDGYLQNQWWNGEKTNWVSRREGERRPAAVRAMVLYPMNALVEDQMARLRKTLDSDDAREVMEQRFAGNKIFFGQYTSATSITGYASHPRLSGISSEKSRRARNLEKLRKAMKRIDSDQQAARAFDEKENASEKTRYIFPSTDGGEMMSRWDMQAAPPDVLVTNASMLGAMLSREVEDGIFDATREWLMNNNDAYFYLVFDELHLMRGSAGTETAMLIKLLIIRLGLDDPKHRYKLRLLASSASLPMDGADGEQSRKYLRDLFAPFGTCRNSLDPGSDKPDFWRNCVIQGKPYIPLKPEGKIAVRPFAALMRVALENQGNVIRNLKMTDALSQALSDVFLAMGVKAQNDMQGIKQAAEKAAALLTNACIEEGGELPRAMPPGFIIDKIFLKEGSDKPDELELALRGLMLMRALPESGVACEKPANVTPAFRVHTFVRNIEGFFASVSPGEQKAKFADFCLERGLSHAPSTPDGKRGRRLFEMLYCEACGDLLLGGQKGQNEGLTIELLPSATNLENLPERPGSEYYDDMTLDEFAVFWPVDRVDKNPAVCEKGWDAWEKAALNPVTGIVTVGQDTSAANADSVRGYLYFQKTAPSKKGEPAKKPSAQPFCCPNCGIDYSSRPVSNRSRTPIRAFRTGVTKSSQLVATELFELLHAIGAEAKSIVFSDSRQDAASMALEIERLHLRDLRREILVATAREMIQEAENEYISEDSIDEQMDLALQVKDMKEYVRLHELKQNQAGIADLCKYRRVEIDKLLEPEGGSIGKVSSELAGLGISPYKYRSSADGDGSDIWHTNFIKDKNIVKYHEKLSLSARLDLKKKIFDTQSELVDDVIFANTFFALEETGLAYPCISNKEDTDTAKLDAWLRIFAGVYRVKENKYFDPEHAVEWNAGKDVTKEKVKRVAKAVFGEDNYQDNLTQILDEFANRGHSGGLFNIGKLYLKVAKPGDPYWQCSNCERIHLHFGFKRCTRCAKPLDIKPRGVVETLWADNFLGKRIVRGERDGVKRFRLNVEELTGQTDDFSDRLRKFKGIFVDEMSELEKLDAEIDMLAVTTTMEVGIDIGSLQSVYQANMPPQRFNYQQRVGRAGRRGQAFSFVITFCRGRTHDAYYFAHPHAITGDAPPPPFLAVDHDAIPQRLLRKIWLKSAFNDLREECHKNKTTFPGDKLIPPDIHGEYISTHDYYYDDKADWAKRLYSALKKNQNIRERFIEAATFAPDQRRRLYSTINAERIIEEIEKLRPSAPDDNTGLARFLAERGLLPMYGMPTRVRNLYLGLRKTKGVNGQTEYEWSTMDRDLDLAVFEYAPGSVLIKDKKKHQVIGFTGNYREPQVRDNRVSDLSTVCSWKESSHYVAICQSCGSAKLEQNQPVNNINCEDCDTPIGPDEFELYITPAAFRTDFEPKDDMDSFTRMSLKTTATVLHKGIPEDCGPFNVRRGGVTILRLNDGPISEKEGERFTVDLATDQKVPIPLATYSSPIKGTQAIDSNWAGLHNNFRWRCTGEKQNFGLVSSKETESLHLELMQYDARLNLNMIARYGEFMNLPTRAAAISATQILTHKAALYLDVSPDEFETLEPRLHHEKPILQIADALINGSGLCRRLAEPVVVGGLPLIVTLLHEILEDKHVWPMVDFLKKNHPAQCQTACYKCIQRYGNRRYHGLLDWRLGMAYLRAMITPEFACGLNDGDWIHPEMIGWRDRAFELAEDVEALRPGTIKLSKEYSLPVLTEIQDGKELWRAVVTHPLWQWREPERNALIDSLGIDDGGPSLRFIDTFELERRPLRALANLKQS

SEQ ID NO: 24497 - protein, 411 aa, Citrobacter sp. 30_2
MSGKAIKDGDRSTEPHDTEFSFYEFFAGGGMARAGLGNPWRCLFANDMDPIKASTYIDNWGGEHFDTRDVREIPSNDLPRHADLTWASFPCQDLSLAGNGLGIGDRDSSADEITRSGAVWPFLDLIGKLSEENRKPPLLVLENVLGLLTLDQGRHFAAICHQLSKTGYRYGAIIVDAKHFLPQSRPRVFIVAVSRHISIPTNLVSEKTLPEWHSSSLIRACDALAEEVHDDWVWWSPGITPEAKMKELTDIIDCNDTNALWHSADETQRLIRMMAPANQARLAKAQESGETMIGSLYLRMRKEKGVNQQRAEITFSTVLGCLRTPKGGASRPRIIVVNGNQVKTRLLSVKEAAALMGLPDDFILPAAYQSAFKVIGDGLAVPAVRFLAERILEPLAIAVRNDERRREDKHK

SEQ ID NO: 24498 - protein, 854 aa, Citrobacter sp. 30_2
MKWTPPVTPDGWESKLIDYFLRFGTDGDAQDIRWFEVTPSTLAAAFADSGVGADEIEKAFQACMSRIPDLPLRLESGMMERSNDKSPGYFTYLVMTLLISSQFDAPEESNDFRLKLQNWLQTGHSYQNLAGVNAMWEALAGWLEQRIQKEESYRRLILPEIPPSWSHIGYTLRLAFPGKTDLRLMTRVLMNHQQAVSSPRLLIDYFQFAIQKENTSYAMSQAFNEFKNAWFAGRRTLADMPFWRLRQRAMAQISDVEMRKAIIDMRVDFDDSRCYFSSSDENNDSVFAPSLSEALISASAGHSENLGKAVQIGLIFFHQVGHGRWRAIAVPDKCSSQFYIALSCKHSTRISKYLDDAVIEGDWILTRRPQSHHLAMDILRVMKASSDSPDEQITRPLIYDGIRVPGGWLGLPAFLPFIKSDARNYRVYALGKNCAKIDVKKIDGQLISSMPLNGEFIIEPELEADKKMPLWRRRVRFFDRAVPHPALGESAKYHLERLTEWKISQLKTPVFCANAPLLMEDGDVRCEHLLEAIYATGASGWEEVELVSLLQRVADGISIWHLLRCLHDAGLIEPRLRQSWKGRVWTLVKPSLFHIRYGKSSLVIVEGAICSRLIDDFQKAVSELGGKYFRRGGVSVWSPPVFGAEIDDPVTLSRIMEWPLVEAPSKSDMMPLAFMSTLRTAELHVQAATWDWNSGRFLPHVDSDGETTRLTRHVHPGGRDHDVYRVVTHRKTEFFLSRTAAIIAANVDARRPTFRKIADNRFICITNDCGLPDALATGLRRNLLRNGGPTEAGYAYPLDDISFRWLNQLLPGCFYSLSSDDDNSVSQLVSAARHSGGKMRLQWRNGLLALWTGK

SEQ ID NO: 24499 - protein, 696 aa, Citrobacter sp. 30_2
MKDIPWYIGQYDRRNYQSYFKVVAQETLDGWSVIDNPKKKFPRTGEVEFHGTDILQFRPQEWAAFQVGPGPRNKTQAKHTRRIYPYYDLSSGQSLLEARRRLSFDGITADGEPGLWAIRFGPDGFILANLAESKSGCLMLSRNQSVHEYAFNENGVISVSDTSECGKAFYMSDTDASPARVHDWTPDKQYIENVIQLFSCAGSTTELASWLRVHSDEKSGKLNSGVNDLLATAQSLRSGELAKKLEDEDCLARQLTESLLSDGRIADLLERQIQRIAEEEQATLRAEQKKALEDEFSAERQQRRDVLDAEMATFLATQKNEIEHQIAQLRQRDEEKLQADFTEKQAKIELTLKHEKSRLEREIDRLKDVITDLCAQNEHQRQTLASLTSEREALVASLADVKEHSAQAQAELGHMNAAIAEKARRMAYSAIPEVRLPPEAKIVSCNEFGGCVRENKLLTSDGKILMMQFLALMLAGECPLLYGPETQDFLAIAESLISSGRSIRQIADPTLISCEDLWVRAGNNMATPLYQGLLLSEASRPRTILAVIEHVECSAARFWLPALKDRLHSGDLPRRFLICGTIENEDCEEAEKIKEQHLRLQMENVVIQNAIALSPLHLSPENHSELDPGAAPLSEIPDKLIIANKMSAGRLNLANTLRAMRTAHEAGLLDDDNKVMLQKQLVDLYADLQNNELYAQ

SEQ ID NO: 24500 - protein, 1946 aa, Citrobacter werkmanii NBRC 105721
MLDPIGGFRRIQDFFISYIETSFRIADPFVAASRRELLNSSGEFAAEPYIEPVLRYESSDKTLEDLADMENGPLKSLSQEGRKAFVELALSGLFDSKSGDASWRRRSVHAPYIHQVKMLERGIRAGRPGIVTSGTGSGKTESFMLPILAALSNEAIGWPAPRDSYLQNRWWHNAEANWVSRRKGEKRPAAIRALVLYPMNALVEDQMARLRKTLDSDEARQTMEHRFAGNRIFFGQYTSATPVTGYASHPRLSGDRTEKSRRARNLEKLRKALNRIDCDQQAARAFDKEKEKSSEKTRYIFPSTDGGEMVTRWDMQAAPPDVLVTNASMLGAMLSREVEDAIFDMTREWLMSNEDAYFYLVFDELHLMRGSAGTETAMLIKSLIIRLGLDDPKHRYKLRLLASSASLPMEGADGEQSRKYLRDLFAPFGTCRDPRDEGSDSPEFWRNCVVEGTPFIPEPESKVDARPFAALMRMALTGQGDVVRRVKMTDEFERALVNAFQALGVKERNIRQGVKLAAETAAALLTHACIEKKGDKPRATSPKHIIDKIFLAESLEGEKESELALRGLMLLRALPDSVLDCDKPDAATPAFRVHTFVRNIEGFFASVSPGERKAKFADFCLERGLSHAPSTSQEKRGRRLFEMLYCEACGDLLLGGQRGQNCGGATVELLPSTTNLENLPERPGAEYYDDMALDEFAVFWPVEKTPAASEASEKRWDVWQEATLNPVTGIATVGQETSPLNPEAIRGYLYFQNPPPAKKGEPVKPPSAQPFCCPNCGIDYSSRPATNRARTPIRAFRTGVTKSSQLVATELFELLHAIGADAKSIVFSDSRQDAASMALEIERLHLRDLRREILVAAARTMISEAEKEYIPEKEFKEKRDKAIQAGDDDELDRLYELKTRQKDIASLCKFRRVKIDSLLESEGDSIGKISSELAGLGISPYKYRPSADGNDKVVWYENFVKDKNIVRYHEKLSLSDRLAIKQRIIDDQSELIDDVIFANTFFALEETGLAYPCVSDNENTPELDAWLRVFAGVYRVKENKYVDPEQSDGWYVGEDIKKAKVKRVARAVFSDDKYLDNLTLVLNQFADREHTAGLFNIGKLFLKVAKSGDPYWQCGNCGRIHLHLGFKRCTRCAEPLDITPKDSVETLWEQNFLGKRIVRGERDGVKRFRLNVEELTGQTDDFSDRLRKFKGIFVDKMSELEKLDAEIDMLAVTTTMEVGIDIGSLQSVYQANMPPQRFNYQQRVGRAGRRGQAYSFVITFCRGRTHDAYYFAHPHAITGDPPPPPFLAVDHDAIPLRLLRKVWLRSAFNLLREEDRENGIDFPGDKLVPPDVHGEYVSTHDYYYDDNANWAERLQGALEATQSIRERFIEASTFDPEQRQNLHSALNAKKIIDEIADLNAYAPDDNVGLARFLAECGKLPMYGMPTRVRNLYLGLREKKGLNNQTEYEWSTMDRDLDLAVFEYAPGSVLIKDKKKHKVIGFTGNYREPHNRNNRVSDLSTVGSWLESSSHVAFCPACGSAKLELRQPDNEIQCKDCGAPINPDEFKLYITPAAFRTDFEPKDDLDSFTRMSLKTTATVLNEETPTHCDPLIIRRGEVTILRLNDGPINGEKEGERFTVDLTSDQKAPVPFVAYRSPIKGEQAIDSNWLKEQDNSRWRRKGESRNFGLVSSKETESLHLELTRFDPRLNLNMVARYGEHMHLPTRAAAISAIQILTHKAALYLDVSPDEFETLEPRLHFGKPILQIADALINGSGLCRRLAEPAVAGSSPLIIKLLHEILTDERGWPMVDFLKKDHPVQCRTACYKCIQRYGNRQYHGLLDWRLGIAYLRAMVMPEFACGLNVEDWNHPEMKGWKERAFELAEDVEALRPGTIKLLKEHSLPVLEINDGKDLWRAAVTHPLWQCRDAERDALIGSFGLDNIGAPLRFIDTFELERRPLRALAKLNRG

SEQ ID NO: 24501 - protein, 395 aa, Citrobacter werkmanii NBRC 105721
MREAEFGFYEFFAGGGMARAGLGKKWRCLFANDMDPIKTASYIENWGAEHFDGRDVREIKPDDLTGSADLVWASFPCQDLSLAGNGLGIGEIDASEDETTRSGAIWPFLDLVDKLEEGNRKPPILILENVLGLLTLDQGRHFAAICRQLSKMGYRYGAMIIDAKLFLPQSRPRVFIVAISRQFSVPASLLSKEPLTQWHSSSLLRACEALPAETLGDWIWWTPGDAPGSRTKELTDLIDCEDQNTLWHSADETQRLIDMMAPAHLTRLAKARESGETTIGSLYLRMRREKGVNRQRAEITFSPVIGCLRTPKGGASRARIIVADKGEVKTRLLSVKEAAALMGLPEDFILPTAYQSAFKIIGDGLAVPSVRFLAERILEPLAASVRNDSHQTENR

SEQ ID NO: 24502 - protein, 852 aa, Citrobacter werkmanii NBRC 105721
MNWTLPVTPDGWESKLVDYFLRFGADGDAQDIRWFEVTPSTLSAAFAGSGVGADEIEEAFRTCMSNIPDLPQRLESGMMERSNDKSPGYFTYLVMTLLISSQFDAQEGHNDFRLKLQNWLRTGHSYQNLAGVNAMWEALAGWLERRVQKGEPYRRLCLPEIPPSWSHIGYTLRLAFPGKADVRLMRRVLTSHPQTISSPRLLISYFQVAIQKENASHAHALKQAFSEFKDAWFSGRRALADMPFWRLRQRAIALISDVETRKAFIDMRVDFDGSRCYFSAASENDESVFAPSLSDALLSASAGNSYNLGIATQSGLLFFHQVGHGCWRAIAAPDAFSFKFHIALSCKYAARARQYFDDAVTENDWILTSRPQSRHAAMEIFRALKTSSTTLDEQISRLQLSGGIRVPGGWLGLPAFLPTVHSDTQNYRIYSPQGNGAKVSVREEDGRLTSSMPLNGEFIIEPELEIGEKTPPWRQRARFFERAVPRPAQEDSARYRLELLTDWKTSPLTTPAFHIELPLTTENNDERLEHLLEAIYASGASGWEEIELVALLERAADSVNVWHLIRCLHDAGLIEPRLRQGWKGRVWTLVKPSLFRIRNGDNSMIVVEGATCASLMDDFQKAVSGLGGKCFRRSGVSVWSPPVCGAEIDDPVELSRVMEWPLIDISSTPDMTPLALTSTCRTAEFHLQAAVWDWRSGRFSPHAASNNASTLLTRHVHPGGRDHDVYKVVSRRKMAFFLSRTAAIIAANVSARRPTFRRVGNHRFICLVDDCGLPDALAMGLRRSVLRNGGPTEAGYAYPIDDVAFRWLNRLLPGCFAPFPPDDGDDANRLVAAARHSGGKTRLRWQNGHLAL

SEQ ID NO: 24503 - protein, 698 aa, Citrobacter werkmanii NBRC 105721
MKDLPWYIGRYDRRNDRFSYFKVVAQQTENGWHAIDSPKKMFPRTGEVELTGFDASQLRPNDWIVFQVDTNTRSKLTRAKHPRRIYPYYDLSSAQSLQKARHRLSLEGIETCGEPGQWTIRFETGGAILANLTESKPGFFILSRNQYVAEYAFNDSGIISVSGLSENNKIFYMPDADASPTRRHDWTPDKHYIENAVQLIAGTDSSTQIASWLRKHVDEQNGKLKSGVDDLLAAAQILRSGELAKKIEEEDALARELSQAVLNDERIAAQLERQIQSIAEEERDRLRAEQQKALNEAFCAERLLRSEAIEAEMTVFQTERKSEIEQQIAQLRLDEEEKLQKEFEEKQLSIEKTLKHEKDALESEINRLKNAAADLCRQNESQRRTLSSLEIKREASSGALREVEERVALARIELEKINAAIAEKARRMAHSAIPAICLPAEAKTVSRAELGRIISENKLLTHEGKILMEQFLALTLAGECPLLYGSETQDFLAIAASLISSGRAIRQIADPTMISYEDLWIRAGNNLATPLYQGLLLSDAHRPRTILAVIERVECSAVRFWLPALKEGLRNGDLPRRFLVCGTITNEDNEEAEKIKEEHLFLPVENIVVRNAITRAPLYLSTRHHSELTPEAAPPESLEEKLAIADEMSGERLNVVNTLRATKAALEVGLAVDEDKTAHQKRLVDLFANLQNSEICAP

SEQ ID NO: 24504 - protein, 1914 aa, Clostridia bacterium BRH_c25
MIDPIRSYEAVRDNFILYVKTAFGTRFQSIEEEREKLLHKDKVMSQEPWIEPLPKYKSSGKSIDDVTGSDLPSLTSNEVLTFKEMVKCGLFSPEFPLYSHQYKMLRKALEGFNCVITSGTGSGKTESFLLPLLAQLAKEYSSWSTAGPMHPNLNDWWKNKQWKDSCKTNGRLTKSYRVSQRQHETRPAAVRALILYPVNALVEDQLTRLRKALDSDKARQWFAENGKGNRIYLGRYNGSTPVPGHELKRNGNPDTNKINGLAEKLKEMDDTSQIARMYANDPNNNDPDKRDVIAFFPQMDGAEMRSRWDMQDSPPDILITNFSMLSIMLMREADKDIFEKTRSWIACEDLPECKREEAKNTRVFHLIVDELHLYRGTAGAEVAYLLRLLLLRLGLHPDHPQLRILASSASLGADDPKSHEFLRDFFGSNTFEIIEGSLAPMPEVKENNYLPYNPFRIISENSSNLTDDVFYQVLQNMGVEYHGSEPCKALLQTLESPEFKVDAHMVCACNVEGKLRAVSLTDFGKKIFGDIPLDEIHKATQGLLILRSLYDEMGMRTSLPSFRMHFFFRNIEGLWASTKPLSGSTDGRPVGPLYASSKIIGDKNIGDEKYRVLELLYCEHCGTVFFGGSRLNNLENGITEMLATDPEIEGIPDRSPARFVERRTYNEFAVFWPQGEQEFKTDASRWYQPRIDAPDQSSSNHFSDQARWEEACLNNRTGYMVLTHEKYDEDPDQWVKGYLFSIIPDNDEDLENHRALPCLCPSCAADHTRRLRKSPIRGFRTGFTRVSQIFTKELFYQLPEIPQRKLVVFSDSREDAAQISNGVERSHYSDLVRDIAIDELQIQALGEPSVLDDIENNRNYSDFAQRYLEINPNAADEMQNLLGLTKSSIPPGLPPAFQQVLEAQVKEANEKLDSIRKRGRTRIVSVATILPPVDNLSSCGRLIERLIKLGVNPSGNEIRLQNFKWDDVWHHWTGLFDLESNKWKQDLPQTSQFARDRIHDRLLRSIAELFFGRLYFGIESSGLGWPTLTLQDDLLQIYASSSGVHVDIFRQICDSFIRILGDKYRYEPSEHIPIDYPDYSSLTAPLKRYIRAITSKYNIDEETLGQNVIQALQNGGHSGAKINTRLLHVHVSQADDTVWTCPICSRYHLHASTGICTNCCTDLNPDPDEICREIWNQNYIAKPASEKRKPIRLHCEELTAQSDDQAERQRHFRGMIVNFNGQQRVYHRIVDEIDVLSVTTTMEVGVDIGSLQAVMMANMPPMRFNYQQRVGRAGRRGQAFAFVLTLCRGRSHDEYYFANPEKITGDPPPVPFITMGQSRIVKRLLAKECLRRAFWSAGVRWWDSPVPPDSHGEFGLAVDPDNQRGWVQNENSVVPWLNSQKSDQAEIIRALINKDDDSLLDWVSNELPALISSSVNKPELSGDGLAERLAEGAILPMYGMPSRTRNLYHYAKGQVIKAIDRDLELSITEFAPGAQKTKDKAIHTSIGFTPPLVNHGYRWMPATNNPLPYRRWMQRCKRCNNIDTSDLPLTDKSCTYCGQPEDEDRNFFQFEIAVPQAYRTDFSPGEDAKEDTDILTGAPSLLAESNTAIIESKQVGNCDLSVSDNGRVWRINDNAGRLFEGSIITYDGMEHQWISSKYGGSPIESIALAAGKTTEVLRLQPASIPFGLNIDPLYSYGAVNGAVKGAIYSAAFLLRRVLASELDIDPDEIEIANFTRKGDTGELAYADIVMSDRLPNGAGFVKYLYDNFERIIKETCEPVPGSKTYAETIISPAHRSCDSACYDCLKVYRNMTYHGLLDWRLAISYLRILSDASYLSGVDGNFDYPELDNWMDTAVILRDNFISYFDSYQPKTWGVLPGFKAGRRQYIIVHPLWDRNNPQGILAKAIAAMDAEPGFIDTFNLLRRPGWCHRNQLR

SEQ ID NO: 24505 - protein, 378 aa, Clostridia bacterium BRH_c25
MAISLFSFFSGTGLLDLGFEDNDLDYDIVFVNEYKQAFLDAYMFSRQNHNIGLPRYGYHCCNINDFLNINLAGILQGYLQEQRNLNNITGFIGGPPCPDFSVGGKNLGRNGENGILAHSYVNLIIAQRPDFFIFENVRGLVKTAKHREYFDELKLALRNAGYVISDILLNSLSFGVPQDRDRVIMIGVLNNQGLDLPINDDGVLDFPWLQYAMAGADADVIKQLPWPTEQPYEENSRRDFQYHVQENLTVQYWFTKNNVRNHPNSGDIFQVRAGRTKMLQIPEGDTSRKSFKRLHRWRYSPTAAYGNNEVHLHPYETRRLSVSEAMAIQSLPAWFCLPEHMTLTDKFKVIGNGVPYLMALGIARAVNEFLNQIFDEVN

SEQ ID NO: 24506 - protein, 675 aa, Clostridia bacterium BRH_c25
MDYLDWNRLISQHFFNEEMAGRDVILYVDSSLLDKLGESYGVGVEDFIEAVVDGPSQAYEKGFSNKALWALGRSRVGGSCRNGYPLYIAYLAFFVFAVDTEGDFSDHAYYPRLNTLLGKYGEKVQPGSFMELDELWFDLQIWSIEIKNEKLGRFTTKPVGSWRHVGLPISQTLLTSEEREKLPIFFIQNGFDPMLLPDYNTLSKTICESPYFKNRTKKLILSDDNEHKHLMVALLVLVQTALVEWDGVAPDIEDSDIQQNGWINSMLRLCIELDNFAMLIKASVRFKSNCEFPDDEFEFIRQRDASLWKSKGSIRNWSKALVGYYQKNTTDATLLCWSEEEVFIDNQLRWRVKLKPSLVRIFISGKYEGLNGWIEINRIEPGIDCLIACHESHAESITSWGMNSCAGFSNLDYEGIPPLWRLYMVKNIRKPHPEIDTLKFPLSYSIRFEGGVKSGKGNSYFRLAPPRICIDGIHGNETVAVNSGKITNHLDNIWLLPENVEVNSPLKIELFDGSTCVMSRILILEEGCMGSRYSSPIRDKYGDITTQQQIFSVSGANVFGVSLKYIPAYKEHPPTYMSHRIIFIGNHPDLYCEWPDENLPDNWDAVWAIAKVKRDRWKAYFVGRDLSQCTLTEINKSWPLWKKWKKVLVNLSIEPPKIQKLYDLWKIYKKGAQKL

SEQ ID NO: 24507 - protein, 1971 aa, Collimonas pratensis
MLDPIGGFGRIRDFFISYVETSFRISDPDVSKIRRKLLESYDTLATEPFLEPVLRYTGHPKLLEDLAMDDNGPLGNLSIAGRRAFVELALSGLFDGDIADSEIKRKSRYAPYQHQISMLERGIKPGHPGIVTSGTGSGKTESFMLPILAAIANEAVQWKKPDASFLQNRWWESDDASWRAMRQGERRPAAMRALILYPMNALVEDQMVRLRKTLDSEEARTVMDERFDGNRVFFAQYTSATPVTGYETHPRMADDTDEKKRRSRGLRKLRSALKRAEQDQQAARKHDANAAAEAALSGEKIPDLTRYIFPSMDGGEMLSRWDIQAAPPDLMVTNASMLGAMLSREVEEKIFDTTRNWLISNDDAYFYLVFDELHLIRGSAGTEIAFLIKTLIQRLGLDQPQHRYKLRILASSASLPMIGDDGEQSRTYLRDLFAPFGTSKTANDPGSTDSTFWKGCVVEGVPSIPIWNLEAIDPAPFVKLMQIALAGGADFVAKMKFSDELLLAVKSAASALGIAGQSEEDTVKNLAEAAAAAMTSGCRDGKGVRATRLTEVANRIFADGGPDHELALRGLMLARALPESGLWDKNRAGVALTTPAFRVHTFIRNIEGLFAAPSPTADGVEFSNLTIERGLSHARPDANTKRGKRLFELLYCEACGDLLIGGQRGDKTLTATATELLPSSGNLENLPEGAANEYYDSMKLEEFAVFWPRRTPPLLPERDYDDWQLAHLDPHSGVVFTRLDAEVPDGHVGGHLYRQKENAVRNVKGRVTGPRSAQPFCCPKCGTDYSRRPVTNRSRSPIRAFRTGVSKASQLVATELFELLLAIGAEPKGICFSDSRQDAANQALEIENMHLLDVRREILVATARSYVAKQRAEWISPEEFEKQTTALMNEKKFAEVAAYGARYNAQGSEGEKPPAEGRIVPLAKLLQHKEGHGHVGELVAEFVRMGVHPFDKAGRQKFRGHEWHELFVPAGTNGNDIAYHEELTGADRLNLAGLILSQQYELVDDVIFANTFFALEETGLAYPCVSDRDIAGKDELDAWLRVFAGAYRIRDNQYFDEDAKKEWVLGFDITNNRVKKVAQKVFGDTSVVEKLSSVLGRLSAIGHKSGWFDIGNLHLRVAEGGDPYWRCKTCERVHMHYGIRHCTRCGDPLALGASGKVEDLWQENFLGKRIVRGAKDEVPRFRLRVEELTGQTDNFSDRLRKFKGIFVDGQSETKKRATEIDMLSVTTTMEVGIDIGSLQSVYQANMPPQRFNYQQRVGRAGRRGQAFSFVATFCRGRTHDAYYFAHPKAITGDAPPPPFLAINHEPIPLRLLRKSWLRAAFKMLRQECHQNSKPYPGDLLLPPDIHGEYVTMADYYFDDAAGWPQRLRDALHSTISVRDEFLQAATFSVDQQTALATHATVEQLMSEINGLKPNEPTGTGFGLARFLAEQGLLPMYGMPTRVRNLYLGLREDDGKGSDEYEWSTISRDLDLAVFEFAPGSVLVKDKQKHKVIGFTGNLSDPVKRAGGIAVQAVSDWWESETFVAICDACGSAKHYETLPTTELECDDCREQISIANFAEYKTPTAFRTDFNPQDSGDVVGRMNQRTVATVLKVGEPIVHRNIVVRRGAGATIMQLNDGVANSDEVAQQFRVDEVSDLRLPLPGASKWLKLTRSQAIETSIREKSQASRWELNGNLGMKFGLISRKKTDAVYLELRKFDSRLNLNHVARKGEFFNIATRAAAVSATQILVQKAALMLDVSAEEFEALEPRLRGGLPMLQIADSLVNGSGLCKRLGDPDVSGGVPYIAKLLEEILENEIVWPLQDFLGTDGDGAHAEQCKTSCYRCIQRFGNRRYHGLLDWRLGIAYLRAMIQDNYSAGIDTNDRNFPEIAEWHEYAHSLAESVVAMRPGTMSYVVLAASKLPCIIARSLAGDELFRTVVVHPLWRKDESVMSKILGTDWANGLTFTDTFNLERRPLRTLAEMHNKQANIESK

SEQ ID NO: 24508 - protein, 379 aa, Collimonas pratensis
MRVVDLFAGCGGLSKGFEQAGFELTLAVEHWAPAREVYKANFDHIVKDLDLGRVTDATRLIRPERPDLIMGGPPCQEFSVAGGRVESDRAELTLKFAKIISAVRPRWFMLENVPGARKSVAWQSGRSVLEKAGYGITECILNAAYFGAPQNRKRFFAIGCIGEEHDFLFDEIQMGSSENPLSIRNFVGDEFGIDFYYRHPRNWGRRGVFSLDEPSPTIRSTNRPVPPGYKPHPDDAGPCKEARPLSSWERARIQTFPENFQFSGTMTNQSTMIANAVPASLAEHVAAAISRYEEQRSMFSDPNFREWLSSTQEYTPRTISNVISRINRASRILHARQLSNDPLDIIHALERKGEFAELSSSVRSQIKKAIRLRAEFQGR

SEQ ID NO: 24509 - protein, 860 aa, Collimonas pratensis
MRITEPPSTLDGWERLLVKYFLAVGGDGDSSDLHAFEVSTGTLAIACGLDTQEIEVEKAFHEVLVKDPSLENVLQVGAHPRAASEVPGFFVYLVLTLFIDGLLDEHQSISGAFRKKLASWLGIDRSFNDLQGIATMWKALEAWLAQRVAAGEPFRRLVLPDPGGWHQIGHTRRLSFPTRHDFRIVENFVSENSIGLDSPTALFIAFQPLVNDVSDGLKDAFEDFRRSYYLHRRALADHRFWRLITRVRSSANNEPRQQAILQMTFNDYGESEFRRSIYQSSEMQSYVTLGAALADTGIASSSNFVTAINQGYLFFRQIGMGLWQAEANLTRCNERVFVALSTKIQSVMGMRLGSLLGDSTWRMTTEAKSINAVETAFAQVRLLVDAGDSIFRPTVFNGIRVYGRWLGLPGFLPSIETDSSQITLAAEVNDAPVIDCNGVGNIVRLVAEEPLNGTYSVEPELRRGEYFSPWRLRLQFISHALPHSSLSRTRQRLQQLKDWDGVVKVSAKYDADESPVREFGSSAMKWLLEAVYADGCSGWDEADLVSLVRRTAVDFEADPWMMLHLLQDAGIIEPRLRQGWKGRVWTLVPPHIVRAHRGENEVALVEGALCFRQIEDFNLAVEGLGGSMFRHQDDTRWSAPVIGASNLSSAILAERLGWPLALEVDSASKSPLALASTERQAEYYRISSVWCWNAKRFVSSGAVEDSVRLTRRSHRNGTDHDVFCVEHIGCSFNYLSRCAAITHAHALAKVPLFRFHDDRIERIAQDGALPDILASALRRRRLRAAGMTGGVYSYPATESDARWILSLLPGCIAGIKVGESQSAGSIMAAVRRSKGRLRAGWKDNQLVIQMNKSTRGFNGS

SEQ ID NO: 24510 - protein, 695 aa, Collimonas pratensis
MVASSGRPWYAGHCVSRHEHDKLVNIEVIARLDETGWIPLENARHLFGGVQEVELHCSHAKTIKIGEWEMFQLSKKGKKFWIVGEHKKLHHFADLSNLGNASQIQRYIASNELKTTEASGSWILRSRDTEILQVELRQIQGVGHLATASGKIPAFPFDPDCIARIPLGGKEIELYEFRHRGDPTAIYDWSSDEAYAARVIRSIANASDPRVKATIGWLEEHGRTKQSLESLDAVDIAAANDALRSDKLAKRLSSDQALLSSLVNAMINDSRILGLIKSKTDLIAEEERTALRIRAETLLQEELITLRQERIASLDLEIESLRLDRIKKIDDRYAELERDLAARKENGLIEINRDLGDLVIALQLQADEFTDRRSRVKDELVELDQKSDTLNGQLQLLRDQERDVLINIDRLVAITSLAKSQVNTASEKILALHSPLERGVPLMSSDVKEFVESSQLLSEKGKEIMLQFLALLLAGEVPVLTGPDVDDFLLVAESMFANGTSTRLEGDPTIINFEDLWLRPGTNVQTALGVALTGTNSDEIDESTRLVVINRAERSGARFWFPALAAHARRGELSRRLLACVTIQDTESEEAEAVLSDATRLDIRHALTAEAAIVAIASGIELRRDLDPAERPTDLAEAVPVLAPHLQRLTFARAQRAARAIVEAKNLGIPTQPLVELFIVASGTTNIAVVAQLRS

SEQ ID NO: 24511 - protein, 1809 aa, Dermacoccus nishinomiyaensis
MTDSSRHLDAIQTFEHLRDAYFRYYDTPFGLADERLQAERRALLDRDGGAYRKPLLELRPEYESSGRSLAESAAAAGADPDLADFISTGLLPGVPSLYRHQEEALTAGVQPGQHMVITAGTGSGKTESFLMPVLSSLLSESRTWTGHGASPDDWWTSEGNPYHPQRDGETGREAAVRTIVLYPMNALVDDQLIRLRRALDNDDIRAWLDANRNGHRFYFGRYTGATPVTGIRSNNLALGELRRYLRQTDQRGTRARQIATQKADEDLRYFVPRLDGAEMRSRWDMLDYPPDILITNYSMLNVMLLRERDGHFFDSTRRWLDNPANVFTLVVDELHTYRGTAGTEVAYLLRTLKRRLGLDARPEQFRVLAASASLDSERDSDYLHQFFDVDQGTFSFITGSSITPAEYQVPPAADPADLATADAVTAAADGRAGGVVNALRGALHGNGTGGAKTLTQIAQEVFPATPDELSEQAIANVLAGLAQDPQTGDPKLRAHLFFRNVVGMWACCDPSCSAVTDPQAARTVGKLYAEPATRCECGARVLELLYCQNCGDVLLGGFAPEGELQKQAVKTMLLADVPELAKLPDQVTLQRTPDNYLVYWPRPKTTLTNLDSATWNRDNSAVSYAFRPSKLNPASGEISNIAEGFTGWSFHARIARNNATGELRRAPETVSPFPTQCPNCGDDWEIQYGRNGRLPATDPATQRSPIRQMRTGFEKINQVLTTELANDLRDADRKLIVFTDSRQDAAKLSAGLGLRHYQDLLRQLLYARLAGSGSAVLDLVLAEGHVVRNEKTVESFAALARLRQRNAPLLDELRDIWDGKPETGPGDAERLKAALSAPPSLRELAAEVSADLLGLGMNPGGPHARLRETSEDHAVTWSELYDWRLTPPAPKPGLTDPQRSLLNDIGRSLEEELLEGLFSGGGRDFESLGLGWLALASDTAPADAPADPATGQARAALRILADQRRFFGLRGARDDPTPKLRKFWADVASAERSTADSLRDDALNRAGSAVVEYLIDPSAVVLRMGEGRAWTCTRCSRQHLTTGNGYCTKCAKPLPADTVPVDLDQDYYAWKATRDDGRFRLNTAELTGQTDRIDAQSRQSRFQDVFLGSGENELTDAIDVLSVTTTMEAGVDIGALSAVVLGNMPPTRFNYQQRVGRAGRRNSPVAVALTVCRGRSHDEYYFERPDRITNEPTPKPYLALNRPEIFTRSLRSEVLRQAFSELISATDGEDASSNVHGAFGKTSDWHTFLRPRLEGWLADHPGVVRETARSLARSTAFQGTADEEAERCISALLDDIDHSVLAQRHDDLSQQLAEDGLLPMFGFPTSVRYLYLKRPQRSYPWPPAGVIDRDLSMAVSQFAPMSEVVRDGTVYPVVGVTAFKPSGPRPQPEPEPLGIESPLSICRACSYLGEQQDLGTCPRCGAGPTFYTTVPLREPLGFRSGTGTDFDGNFSWSPRAMAARAMTDMDALARQAPGNSLILSGPGSRYVINDNGGQLFTLRRAAPGGPEWGGYVSTRAIDAGLLHPSFATGDPISVALGAIQHTDFLFAGAGAPTNLDTGLRLNLVSGIRQPYGAQEVTDSRRAAWYSLAFLLRTVASAALDIQPLELAAGIYSGVTGSEPATYAFLADTLENGAGFSTQLGSRRFLPEFLDAVVSYLAELEDPSHTKVCSSSCYRCLRDYGNMAYHALLDWRLARDLFRLLQGLPLTIDDAAETAAIDRWAHAYNAAPISSEVPAARYDSPSVGSFAVIARHPFEASEDTLIAPRLAEAMAEIEASEEDLDGVVFVDSFTLDRDPRRVLKLISDSELAGA

SEQ ID NO: 24512 - protein, 331 aa, Dermacoccus nishinomiyaensis
MTSAPELSVLEICAGAGGQSSGLEMAGFGHSLAVEIDRDAAATLRLNRPEWDVHEGDVRDINGRDYKGIDLLSGGVPCPPFSIAGKQLGADDERDLFPEAIRLVREARPTAVMLENVKGLASVRFAPYRQSILDALDEMGYDADWQLFNSSEFGVPQLRPRFILVAMKRRNFRKFTWPRAVGTPPTVGRVLAPLMGSRGWEGAAEWAKRANNIAPTLVGGSKKHGGADLGPTRAKQAWLQLGVDGKGIADEAPAPDAPLDYVPRLTNDMAARIQGFDSEWHFSGRKTSVYRQIANAFPPPVAKAIGESIAEAMGAVVSRTTRTGTSLRAVS

SEQ ID NO: 24513 - protein, 683 aa, Dermacoccus nishinomiyaensis
MAGGYEDWQRVLSAAFLIPHQGPTVLFLDDGALARFRPEAENAGDDLAEAVRSRLRLGDGRSMFAPIMASFRQWQRSSRLDPPPVLPVIALTVLAATRMRSDADARSTNYYLRLAQALCPGADVEAIGALRNDLREGGAFLDVVEMWRGLHGWIEAQDGAIGASTIRDHPHLQRIGYPLSQALVRQSDRMALTRFFQALDVSPGAVPDSRVIASALDIWTAAAQNRLSEAFMRALGDADLRPLLAIVVEAHAQAWDGRVLASEGKQRIEIRLSIDLDAWKARWLFPIPPGGPDTLAVLAPGSDREVSLTTLAGLDYYSVQGSPAVTPELLSSGFRLRGNEFTAESPPSPVLFLSPDAQTGAWTSAPGMLPFEEHLVAISAPHVTEFRQVLSQAAVDGWRLLSQRGSVLLSGYALFQGVRFTNGEMLEEALAGLPGLRRLGVTPAAIPRARLVRGLPLATSISGTHYLIGGEPDLLLPTGPDSRTATVTLDGRREQLQANGFPLELRRFISDTGRHIVDADGQELSFTTLEEGPDPSQPSGTASLGWTQDAQMSAQGHLFAVTGACVSGPSDSYPILVRRGRDESWLLHADGRTELLAETETPAFLLSIDIELHLPCFEISAASTARWLAQRRGTRWRLTEIGSSKRNEYDLDIDVLDAWKRACRDTNGAQLWKAQLSMAGGAT

SEQ ID NO: 24514 - protein, 1948 aa, Dickeya chrysanthemi Ech1591
MLDPIGGFRRIQDFFISYIETNFRIADPFVTASRRNLLNSSGEFAAEPYIEPVLRYESSDKTLEALAEMDGGPLNSLSRKGRKAFAELALSGLFDSKPGDEVWPRRSVHAPYSHQTEMLKRGIRPGSPGIVTSGTGSGKTESFMLPILAALSNEAVSWAAPCDGYLQNRWWNSEKTSWISRREGEKRQAAVRALVLYPMNALVEDQMARLRKTLDSDDARQVMEHRFAGNRIFFGQYTSATPITGYASHPRLSGLKSEKSRRARNLEKLRKALKRIDSDQQAARAFDEKENPSEKTRYIFPSTDGGEMMSRWDMQAAPPDVLVTNASMLGAMLSREVEDGIFDATREWLMNNNDAYFYLVFDELHLMRGSAGTETAMLIKSLIIRLGLDDPKHRYKLRLLASSASLPMDGADGEQSRKYLRDLFAPFGTCCDSLDPGTDKPDFWRNCVIQGKPYIPPKPEGKITVRPFAALMRVALEGQGNVVRNLNMTDALSKALSNVFQALGVKAQNGMQGIKQAAEKAAALLTNACIEEGSKSPRAMPPGLIIDKIFLKEDSDKQDELELALRGLMLVRALPESGMDYEKPANVTPAFRVHTFVRNIEGFFASVSPGEQKAKFADFCLERGLSHAPSAPGGERGRRLFEMLYCEACGDLLLGGQKGQNHGKTIELLPSATNLENLPERPGAEYYDDMTLEEFAVFWPVDIAGRPPVGCEKGWDVWEKAALNPVTGIVTIAQETSTTNTDAVRGYLYFQNPIKPKKGEPAKTPSAQPFCCPNCGIDYSSRPASNRSRTPIRAFRTGVTKSSQLVATELFELLHAIGAEAKSIVFSDSRQDAASMALEIERLHLRDLRREILVAASRAMIKEAESGYISDEDIEDRKAKAKQSGDYDEYIRLHDLQKSQSGITELCKYRRIKIDKLLESEGDSIGRITSELVGLGISPYKYRSNSDENDSAVWHTNFIKEGGTIRFSERLPSHERMKIKTKISYDQSELIDDVIFANTFFALEETGLAYPCISDKDDMPEIDAWLRVFSGAYRVKENKYFDASRTRDWYVGKDVEKEKVKRVARVLFGDSGYQDGLTRILNQLSLLEHKAGLINIGKLFLKISKPGDHYWQCGKCGRIHLHLGFKYCTRCVNALDLEPSGIVEDLWEENFLGKRIVRGERDGVKRFRLNVEELTGQTDDFSDRLRKFKGIFVDKMSELEKLDSEIDMLAVTTTMEVGIDIGSLQSVYQANMPPQRFNYQQRVGRAGRRGQAFSFVITFCRGRTHDAYYFAHPHAITGDPPPPPFLAVNHNSIPLRLMRKVWLRAAFNLLREEDHKNGTTFPGDKLVPPDIHGEYVSTHDYYHSDETNWAERLLGALKATQNIHDRFIEAATFDDVQKQRLYSALNAEAIIDEIAELNAYVPEENMGLARFLAEHGKLPMYGMPTRVRNLYLGLRKTKGLNAQEEYEWSTMDRDLDLAVFEYAPGSVLIKDKKKHEVIGFTGNYQEPQVQNNRISDLSTVGSWQESCSHVAICPACGSAKLELHKPDNDINCEDCRTPIGSDEFRLYITPAAFRTDFKPKDDMDSFIRMSLKTTATVLHEGVPTKFDSFTVQRGEVTILRLNDGPINGEKEGERFTVDLVNDQKAPMPFSTYCPSVKGEQAIDSGWLKSHNNPRWQCSGKKKNFGLVSSKETESLHIELTKFDARLNLNMVARYGEYMNLPTRAAAISATQILTHKAALYLDVSPDEFETLEPRLHHEKPILQIADALINGSGLCRRLAEPAVVGDPPLIVILLNEILEDKRVWPMVDFLKKDHPAQCQTACYKCIQRYSNRQYHGLLDWRLGMAYLRAMVIPEFACGLNDDDWSHPEMIGWRDRAFELAEDVAELRPETIKLSKEYSLPILIEIQDGKELWRAAVTHPLWQWRDAERDALIDSFGLTDGESPLLFIDTFELERRPLRALANLNRVKI

SEQ ID NO: 24515 - protein, 411 aa, Dickeya chrysanthemi Ech1591
MSVKAVTSDNHLMEPHEAGFSFYEFFAGGGMARAGLGKQWQCLFANDMDPIKASTYIDNWGDEHFDIRDVREVAPDELPLHADLSWASFPCQDLSLAGNGLGIGERDSSADETTRSGAVWPFLDLISRLGEENRKPPILVLENVLGLLTLNQGSHFAAICHQLSKTGYRYGAIIIDAKHFLPQSRPRVFLVAISRHVSIPECLVSEEPLSQWHSPSLLRACDALAKDARNDWIWWSPGNMPDARTKELDDLIDFEDENALWHSVDETQRLISMMTPANLARLANAQASGATITGSLYLRMRKEKGVNRQRTEITFSAVLGCLRTPKGGASRPRIIVVKGNQVKTRLLSVKEAAALMGLPDDFILPAAYQSAFKVIGDGLAVPSVRFLAERILEPLAMAVRINTHRTEDIRE

SEQ ID NO: 24516 - protein, 853 aa, Dickeya chrysanthemi Ech1591
MNWTSPVTPDGWESKLIDYFLRFGADGDAQDIRWFEVTPETLAAAFADSGVSADEIEEAFQTCMSKIRDLPQRLEGGMMEKSTRRSPGYFTYLVMTLLISSQFDAQEERNDFRLKLQSWLRTGHSFQNLSGVNAMWEALAEWLNQRIQEGEPYRRLVLPPRDGWVQIGHTLRLAFPNKADLRLMSECLESYPQAADNPRQLIEYFQIVIQRQGVSHAMKEAFAEFRDAWLLGRRALSDMPFWRLRQRAVGISSCITKHQTIIDMYVDFDGSRCYFSNAGERDESVFHPTLSKALNARDAGSSENLGKATQGGLLFFYEIGHGRWRAKPSPDVYSQRFHIALSSKHSVQMSKRLNGYIAEDDWILTAQPLNQVSAMDIFRSLRSSLGIQNDDVTRPQLYGGIRVPGGWLGLPAFLPSVESDTRRYKIYSSRNDGAGSNVSIIDSRLISSVSLSGEFFIEPMLEVGEKTPPWRRRARFFTRAIPHPTLGESARYRFEPLCDWSTPSLKAPMFNFEELLQWEDSEACCDHLLEAIYASGASGWEEAELFALLRHVAGSISVWHLIRCLHHAGLIQPLLRPGWKGRVWTLVKPSLLHICNRENSLVIVEGAVCASLMDNFQKAVTGLGGESFRRRGVSLWSPPVFGAVLANPVALSQRLGWPLIEAPSSSATIPLSLVTTERTAELYEPAAVWNWRSGRFQPHSPTDKDVALLSLHIHPGGRDHDIYRVVSGRKTTHYLSRTAAIIVAGAKNREPVFERVAKNHLLCLINDCGLPDALAAGIRRHTLRNGGPVDSGYAYPVDDVSFRWLESLLPGCFYSLYPDGEGDINRLVSASRHSGGKIRPIWRNGRLTLTQGL

SEQ ID NO: 24517 - protein, 695 aa, Dickeya chrysanthemi Ech1591
MSKIPWYLGQFDRRNYQSFLKAIAQETPDGWRTIENPKKLFPHTGEVEFNETDALPLRKGEWAAFHVGPGIRNRAQAKHARRIYPYYDLSSGQSLLEVRRQLNFDGITTDGEPGLWAIRFGPDALILANLAESKSGCLILSKSQNVYEYDFHEGGVISVSGISESGKSFYMPDVDASPARIHDWTPDKQYIENVIQLLSCADSTAAIASWLRVHTNEQNGKLTSGVDALLAAAQTLRAGELAKKLEEEDSLTRQFTEAMLKDQHIARLLDHQIQNIAEEERVALRAEQHKSLDKEFSAERLRRWESIEAEMAVFEKTRKSEIEEEIAQLRQLEEEKLHSDFAEKKTGIEQTLKQEKAYLESEISYLKDANADLCAQNENERQILAALTCEREAFLAFLTDAEERTAQAQIELKKMDIAIAEKARRMAYSAIPEVRLPAQARVVSCEEFGHTVRENKLLTPNGKILMTQFLALMLAGECPLLSGPETQDFLAVAESLISSGRSIRQIADPTMISCEDLWVRAGNNMATPLYQGLLLSEASCPRTILAVIERVECSAARFWLPALKDRLHGGDLPRRFLICGTIENEDCEEAEKMKEQHLRLRMENVVIRNAIALSPLHLSLENHSELDPGPASQGSLPDKLAIADEMSAGRLDLVNTLRAMRTAHEAVPFDDENKAHQKYLVDLYADLQNNDLCAH

SEQ ID NO: 24518 - protein, 1982 aa, Enterobacter aerogenes
MNNPLETFESIRDFYISYLETAFRIGSSDIQTERRALLEQQGTLCADLFLEPMSRYQNYGLTISALRNDAHGQTWLPGFNAQQRAAFIDLCLGGLLPRNKTDSTKGRFNLYTHQLDMLKRGVQPGKPGIVTSGTGSGKTESFLLPVLAQIAKEATGWPQSSALKRWQPWWHKVADKQPSFMREHEAAARPKAVRALILYPMNALVEDQLVRMRRALDSSEAHDVMDTYFGGNRIFFGRYTSATKVTGWLKHPRLSEEKNEKKRVAKKITELREYMQLTEETHQEAVRQAQQDKDNELSFNFPRTAGGEVLSRWEMQKTPPDILITNTSMLSTMLVREVDDPIFEQTRQWIERDPDAYFYLILDELHLQRGTAGTEVSYLLKHLINRLGLDQEKHRHKLRILASSASLPVEGAEGDQSVEYLWGMFGQRGLPAGASSNDWRECIIKGATLPPGNMSLFQGDLEAFYHAVLQLQQAPLTSLQHWQNVARSMGMIVSEASTEQLAQRVVLQAGNLLESGCYTEDHSPRATSIKMLSSRLFNAQPLSDKALQALIWLRSTEGDWPQWFSQAFPDDIGAPRFRAHAFLRALEGLYVAPLPVPSAASAQDINHRYFGDLTVESGLRYGKDKKSRRVELLYCECCGNLFWGGKPSVFSGSESRIELLPNDPDTEQLPEHAKSVMVERRSAEEYALFMPVVERFWPKGNEELNSDNDNTFGTWVKASYDPFTATIQHPVSLLKPLPENHIAGWFYYVKPGEFASSERGQSSSQSPGTALPFQCPACGTSYKYGKGKLSPIRSFRVGFSKTTQLLASSLMAELQRSGNREQLVTFSDSRQDAARAALDLESGHHDDVRREIVVHSLQTIAADKPSHNQLKIRQAEIENRNKTLVNLSVRSDEEEDELDQLADERKKIRGLLSKPESDSIPLREILEPESPDAGQPLGPLLRAQVDAGIHPSDRTGIAPVPDPEKHEEGTLTFAWQQLFEKNTQGEWCWKALPSYEDNLLVARQEISRDLKRLVGESVFSKTYFALEESGWGYPCLPITGNDSREHLAIYDAMFRVLADAYRVTPSQYTKPETPWSSARDVNRRNRLYRFTQEICQCSGGEPLSLIDSFLRRLELAGHQGGIIDIGKMHFRLAEPTDRVWRCSRCGRIHMHTGAGICTRCYSPLPETPCSEAKTLQMQHYLGKRLSHSSGIHRMRSEELTGMTENPAARLRRFKGILIADDDDILPEGMKNFEPDRDLDRAARVVDVLSVTTTMEVGVDIGDLRAVFQANMPPQRFNYQQRVGRAGRRGQAFSFVLTACRSKSHDLFYFRYPEKITGDLPPPPFLTTKLEMICQRLVRKIWLVSAFKWLRQQTEKADHPWPVDDYAHVPDNHGEFFPVHWLKENQTDWLPKIRQAIEATILARDEFAQTSTQQNPHLFQKIIQPLTPEQLIQDINAVLNDSAMEAKGLAEALAEHGKFPMYGMPTRSRLLLTRPVSTGGKEIEFASMDRDLDIAIQEFAPGKILVQDKRRYFTAGYSGLLKQSRKNPRSFYSNACEPGELRTMTACPVCNIWAPANSLATECTICGAVMDKAERYQCYVPYGFITTLEPKSAKEDFDQILTTASRVSIAEAYAFSATPEPDVNVAIQLQPQTCLHRLNRGIYTNKTWRGFSATQGSLSVPFRKQGTYQPLWANRVWMDSQIIEADLLVKNRFTDRGETRNTFYLAAPKVTDLLALMVAQIPPGLRLQYSTLTPAFRAAALSASSIIVNYASKELLDIDPEEIEILEPRVQMLKNGKSVPVLQMADRLVNGSGLCERLQQKGASGSLIILEVMKNILNNKTAYPLAEFLQPDHRERCFQGCYHCLHRYGNQPYHGLLDWRLGLDVIQLLLDQTYNAGLNGDFTSPGVADWSENALRLAKEAASLYSDSAAEMMGNIPVIRTGAGRWAAVLHPFWDPDAAFAANPELEAFSYEVDVDATNTFALSRRMGTEMAKLRTQASSAQE

SEQ ID NO: 24519 - protein, 361 aa, Enterobacter aerogenes
MSSVFERENDNIRVLSLFSGCGGMDFGITSAGGDIVFANDVAENACKTLGNYFPDSDIRHSDISQILSFPDVDIVVGGYPCQSFSMAGNRKPNNDDRTNLYKHFLRVLETVQPKYFVAENVSGLKHLGAGSFLEQQLTAYKAAGYQVSYHMVNARAYGVPQSRKRLFIIGVRNDLGQYFEFPAETHGKATKKNPHLKPYVSHGEAIRDLPLWPEGEFYERPHDPDGHFSWYFMSRNRKALWDSPAYTVVANWRHVTLHPASPVMKLTWSNLEDGWKQRWDFSDEYEHLVVDTSRPKLEQARRLSWRECARIQTFPHGFEPVGDVESKFTQIGNAVPPLLAEVLFRHLFSGAGLKKMTANGN

SEQ ID NO: 24520 - protein, 921 aa, Enterobacter aerogenes
MDDFFPVTLEEWNAELVKIVFLESSHTGSTLSRIDTTGRIFEQLAGPRSKEDAKRSFLISFGKKASKIQDALRDESRLDILAQIKGYPTYFAVLYLTLLAASADDETHDEGDFRVRFSVLLGFDKNKKFVFTELPNLWERLERWSSKRQNCTRLILPRPSKHERLIGYSKRIAFPCYKDEVFLRNVLIDNKLDNYSTFESVNKVVHQYISCFSEVFNQEFIEFRTLLSKAAMQQAYDSPFWGAVRDITVHTEREQLKENGKYCIHMEFNDSDNPEIYLLMDDAAATDSEIQRYYSLPNEIESYNNIYYERDIGTTLNFLDFLLKKRKGHFYKSRVGVALRSGCLPLFRDDFCHISSEGEYYENSPIYLILHHTYADSIFTVLKKVGERVQRRDIKSTKWSIVSSDKVGRQTLDKIARLLPEEARRFLIQGWQPARPRMSGAARFGQAILLNPASTPIIHMPEVLRGCYVISNKDGEELIHGSLSQGAEGLFIPPEELMEISGQAFCRYELTLAHSDIPVNFDVHVLDHAPYATYCKITEPHDWLIDGPSGVLMALGDTAVIRPLKREKITPLSGAQMLWQYENCLPVTCQYTELHNIPAAFDWLAEALALRFQRRSTLSFGELKQHIDPVSQVTRIPEWQLRRMLFAAGWLCVVQRRHAPYSLVSLAERTISVDVTEQGIVARILGMFTRSERNLLQEALNDGERIGRRLVEDKGCSMGCIELHLSARERIHAFIEQFGLRLVSHDDFPVNALSGVLLPLSQMQFIPALPPELYVSLWQAEKYQWSEEQRLTQTANNLLIRCQEKQSYRYFIRQNTGYWQTDSFSWALMAQMICTGETVGVQKGDTDWCWSKKIFALPPSVLQWWIHVAHGCLSITDNGGYLFAGGKFPLWDNVMVSPSCQRALERRNRALTTCKLRRTLQ

SEQ ID NO: 24521 - protein, 926 aa, Enterobacter aerogenes
MAKKQSIISDRLGQMYSFGTESHELIRCLQECKQRLTRNGAKADNLPKGPEKRLHFLRTLPPKAKLVVSDWLRENLTFSEQNDPENVLRDLLEAESNAENIELCKPLWRTILGFYISSDCPEIITKFLNGEEIDLPQHGVSDSSTINFMDEDIEHCALISQGREIPKPERTIPLFVGGLVDALRGTRTADNRWRTKLSEHSLPMARKLGELIDQFEASYDLKTIDGTSVIQAPPVVSKEIDSSMDEVMFIGKVLALTATGAFFVMPISLLINGNLRDLPEELVKDFFPHGGEAIGFESYFSKKFTRGEIAIWKARYQPSDKPAQYVITDYMSRVYPVVALPHASDEPDAVREWLLTRYQPQNDTAVIFHLSDGVSLRIPGDLSDPKKYDFDMPLESYRQVSQTLLGSHALRVITELPQVSKKYDCAEASTWIKRLLKRTDSAKDFPQFSKGQLQNLTHFIAEHESDNQASYLRAVSHLEQIADTRSFLNDTTQQLLALPEVEAQINIEKQEILTRYEEEQYQIKQSIKVLSEKKIQLENEIDDQKKKLKKETDRINKALRQQENELEQRIKKTFEAASQAGIETLAQTALLRAIIKNETVQEQSAQRQIAPEPVAESVNSNFPLAEANALTRKHQLSSAIEKQALATGLSESLLSSMIAAASVTPAVGLMGKQTKETIASLANLLAGNVWGEVSVHSDHFSFSDLMNSPTLIRLSGDTNTMTLGDFLTHQQEAGLVSIVELRGFNRTPPETLLPELQECLFRTRHPAACSWTDRRQALRHLPIRHPILFLLTFTTGKSTFPLQAPLAYQLPLFLAENIWSDERPFEQNTDITPSRITLELWQTIYVDNPQPEYQACAPREVLEAALLSLLPDEQAQAVARLAYSLGRSTAQDIATTIDALAPQLGPYVQEMTTGESASVLETLFQL

SEQ ID NO: 24522 - protein, 1982 aa, Enterobacter aerogenes; identical to SEQ ID NO: 24518

SEQ ID NO: 24523 - protein, 361 aa, Enterobacter aerogenes; identical to SEQ ID NO: 24519

SEQ ID NO: 24524 - protein, 921 aa, Enterobacter aerogenes; identical to SEQ ID NO: 24520

SEQ ID NO: 24525 - protein, 926 aa, Enterobacter aerogenes; identical to SEQ ID NO: 24521

SEQ ID NO: 24526 - protein, 1982 aa, Enterobacter aerogenes; identical to SEQ ID NO: 24518

SEQ ID NO: 24527 - protein, 361 aa, Enterobacter aerogenes; identical to SEQ ID NO: 24519

SEQ ID NO: 24528 - protein, 921 aa, Enterobacter aerogenes; identical to SEQ ID NO: 24520

SEQ ID NO: 24529 - protein, 926 aa, Enterobacter aerogenes; identical to SEQ ID NO: 24521

SEQ ID NO: 24530 - protein, 1980 aa, Enterobacter asburiae
MNNPLETFESIRDFYISYLETAFRIDSSGIQSGRRALLEQQGTLCADLFLEPMPRYQHYGLTISELRNDAHGQTWLPGFNAQQRTAFIDLCLGGLLPRNKTDPTVGRFNLYTHQLDMLKRGVQPGKPGIVTSGTGSGKTESFLLPVLAQIAKEATGWPKSPALKYWQPWWHKVADKQPSFMREHEAAGRPKAVRALILYPMNALVEDQLVRMRRALDSSEAHDVMDAHFGGNRIFFGRYTSATKVTGWLKHPRLSEEKNEKKRVAKKITELREYMQLTEETHQEAVRQAQQGKDNELSFNFPRTAGGEVLSRWEMQKTPPDILITNTSMLSTMLVREVDDPIFEQTRQWIERDPDAYFYLILDELHLQRGTAGTEVSYLLKHLISRLGLDQEKHRHKLRILASSASLPVEGPEGEQSVEYLWGMFGQRGLPSGATSNDWRECIIKGDTLPPGNMSLFLGDLDAFYHAVLQLQQAPLTSLQHWQNVARSMGMTTSEASTEQLAQRVVLQAANLLESGCYTDDHSLRATPIKMLSSRLFNAQPHSEEALRALIWLRSTEGDWPQWFSHDFPDDIGAPRFRAHAFLRALEGLYAAPLPASSVASSQEINHRYFGDLTVESGLRYGKDKTSRRVELLYCECCGNLFLGGKPSVFSGSESRIELLPNDPDTEQLPEHAKSVMVERRSAEEYALFMPVVERFWPKGNEMLNDDDAFGTWGEASYDPFTATIQHPVSLLKPLPENHIAGWFYYVKPGEFASPERGQSSSQSPGTALPFQCPACGTSYKYGKGKLSPIRSFRVGFSKTTQLLASSLMAELQRSGNREQLVTFSDSRQDAARAALDLESGHHDDVRREIVVHSLQSIAADKPSHNQLKVRQAEIENRNKTLINLNVRSDEEEDELDQLADERKKIRRLLSKPEADSIPLREILEPESPDAGQPLGLLLRAQVDAGIHPSDRTGIAPVPDPEKYGEGTLTFAWQQLFEKNAQGAWCWKALPSYEDNLLVARQEVSRDLKRLVGESIFSKTYFALEESGWGYPCLPITGNDSREHLAIYDAMFRVLADAYRVTPSQYTKPETPWSSARDVNRRNRLYRFTQEICQHSGGEPLTLIDSFLQRLELAGHQGGIIDIGKMHFRLAEPTDRVWRCSRCGRIHMHTGAGICTRCYSPLSETPCSDAKTLQMQHYLGKRLSHSSGIHRMRSEELTGMTENPAARLRRFKGILIADDDDILPEGMKDFAPDRDLDRAARVVDVLSVTTTMEVGVDIGDLRAVFQANMPPQRFNYQQRVGRAGRRGQAFSFVLTACRSKSHDLFYFRHPEKITGDLPPPPFLTTKLEMICQRLVRKIWLVSAFKWLRQQAEKADHPWPVDDYAHVPDNHGEFFPVHWLKENQTDWLPKIRQAIEATILARDEFTRTCTQQDHYLFQKIIQPLTPEQLIQDINAVLNDSAMEAKGLAEALAEHGKFPMYGMPTRTRLLLTRPVSSGEKEIEFASMDRDLDIAIQEFAPGKILVQDKRRYFTAGYSGMLKQSRKNPRSFYSNTCEPGELRTMTACPVCNIWAPANSLTTECTICGAVMDKAERYQCYVPYGFITTLEPKSAKEDFDQILTTASRVSIAEAYTFSAIPEPDVNVAIQLQPQTCLHRLNRGIYTDKTWRGFSATQGSLSVPFRKQGSYQPLWANRIWMDSQIIEADLLVKNRFTDRGETRNTFYLAAPKVTDLLALMVAQTPPGLRLQYSTLTPAFRAAALSASFIIVNYASKELLDIDPEEIEILEPRVQILKNGKSVPVLQMADRLVNGSGLCERLQQKDASGSLIILEVMKKILNNKTAYPLAEFLQSDHRERCFQGCYHCLHRYGNQPYHGLLDWRLGLDVVQLLLDQTYNAGLNGDFTSPGVADWPENALRLAKEAASLYSDSDVKVMGNIPVIRTGDERWAAVLHPFWDPDAAFAASPELEAFSYEVGIDATNTFALSRRMGTEMAKLRTQASTSQE

SEQ ID NO: 24531 - protein, 361 aa, Enterobacter asburiae
MNSIFERESDNIRVLSLFSGCGGMDFGITSAGGDIVFANDVKEHACKTLGNYFPDTDIRHSDISQIQSFPDVDIVVGGYPCQSFSMAGNRKPNNDDRTNLYKHFLRVLETVRPKYFVAENVSGLKHLGAGSFLEQQLTAYKAAGYQVNHHMVNARAYGVPQSRKRLFIIGARNDLGQYFEFPAETHGKATKKNPHLKPYVSHGETIRDLPLWPEGEFYERPHDPEGHFSWYFMSRNRKALWDSPAYTVVANWRHVTLHPASPVMKLTWSNLEDGWKQRWDFSDEYEHLTADTSRPKLEQARRLSWRECARIQTFPQGFEPVGDVESKFTQIGNAVPPLLAEVLFRHLFSGDGLKKMTAKGN

SEQ ID NO: 24532 - protein, 926 aa, Enterobacter asburiae
MAKKKSIISDRLGQMYYLGTESHELSRCLQECKQRLTRNGAKADNLPKGPEKRLHFLRTLPPKAKPIVSDWLRENLTFSEQNDPQTVLRDLLEAESNEGDIELCKPLWRSILEFYISSDCPEIITKFLNGEQIDLSQNGVSDSLTINVTDEDIEQCALISQGKEIPMPERTIPLFVGGLVDALQGTRTADNQWRTKLSEHSLPLARKLGELIEQFEASNDIKTMDGTSVIQAPPVVSKEIDGAMDEVMFIGKVLALTASGAFFVTPVSLLINGNLRDLPEELVKDIFPHGGEAIGFESYFSKKITRGEIAIWKARYQPSDKPAQYVITDYLSRVYPVVALPHASDEPDAVREWLLTNYQPQNDTPVIFQLSDGVSLRLPGDLPDPKKYDFDMPLESYRQIPQTLLDSHSLTVITELPQISEKYDCAEASTWIKRLLKRTDSAKYFPQFSKGQLQNLTHFIAEHESDNEASYLRAVSHLEQIADMRSFLNNTTQQLLALPEVETQINIEKQEILARYEDELHQIKQSITVLSEKKIQLENEIADQKKNLKKETDRINKALRQQENELEQRIKKTFEAASQAGVETLAQTALLRAIIKNETTQEQPAQQRITSEPIAESANSNFPLAETNALTRKHQLISAIEKEALATGLSESFLSSLISTASITPAVGLMGKQTKQAIASLANLLAGNVWGEVSVHSDHFSFSDLMNSPTLIRLSGNTLTMTLGDFLTQQQEAGLASIVELRGFNRTPPETLLPELQECLFRTPHPAACSWTDRQQSLRHLPIRHPILFLLTFTTGKSTFPLQAPLAYQLPLFLAENIWSDERPFEQNTGITPSRITPELWQAIFVDNHRPEYQACAPWEVLKAALLSLLPDEQAQAVARLAYGLGRSTTLDIAATIDVLAPEFGPYVQEMTSGDSASVLEHLFQL

SEQ ID NO: 24533 - protein, 1998 aa, Enterobacter cloacae
MNNPLESFESIRDFYITYLETAFRIGSPDIQAYRRSLLEQQGTLCADLFLEPMPRYQDYGLTISDLRNVAEGEEWLPGFTEQQRDAFIDLCLGGLLPRDKSDSSKGRFKLYTHQLDMLKRGVQPAMPGIVTSGTGSGKTESFLLPVLAQIVKEASGWPKSPSLKCWQPWWHNGVNTQPTFMREAEASARPKAVRALILYPMNALVEDQMVRMRRALDSREAHEAMDLHLGGNRIFFGRYTGATKVTGWLNHPRPGSEEKEKKEKKRVAGKITELREYLQSVEDTHREAVRQGIRDHDDNLQFNFPGVSGGEMLSRWEMQKSPPDILITNTSMLSTMLVREIDDPIFDQTREWIEHDPDAYFYLVLDELHLQRGTAGTEVSYLLKHLINRLGLDQEQHRHKLRILASSASLPVDGPEGKKSVEYLWGMFGQRGLPVSAAAKDWADCVVNGAMVAPAQDNTLHFHGDLNHFCNTVKQLQGSSLPSLQHWSNVARSMGGYHDEQCMEKLAQWVVVQAACMLEKGCYTCEKSLRATSINALAARIFPSHSTGREGIRALIWLRAATDSWPEWFSHPFPDDIPLPRFRAHAFLRALEGLYAAPLPSPSNASTEEREQHFFADLTVESGLRYGERHYDNKKSRRVELLYCECCATLFFGGKPSSFSATDSRVELLPNDPDIDQLPEHAKSVMVERRSAEEYALFMPTVDRFWPRGEGTPADEDSFGKWIKAGYDPFTAAIQHTLSPIRSIEQTHIAGWFYYVPSGDFSSRKRGQSSSQSPGSALPFQCPACGTSYKYGKGKLSPIRSFRVGFAKTTQLLASTLMAELQRSGDRERLVTFSDSRQDAANAALDLESGHHDDVRREIVVRSLKELSASQCSHKEVTIQLEQLNKRRKELISKEIKEGQLSADEDKELGQLFGEKQRLSDLLLLPQADSVSLSSILEPEAPIAGNVLNPLLATLVEAGIHPTDRTGISPVPEPSKQKHDEETITFAWQQLFEKNKQTKWCWKKHPSYEDNLDVARKEISRDLKQLVGESVFSKTYFALEEAGWGYPCLPLANSCTREQLAVYDAMLRVLADAYRVAPSQYTTTETRWHVADDVKPKNRLRRFSDELCNHSRAKTLLLIGDFLVHLKRSGHQGGIIDIGKVHFRLVEATAPFWRCSHCGRVHLHKGAKLCTRCYAPLPETSSGNAGELQTQNYLGKRISYASRISRMRSEELTGMTGNPAARLRRFKSILIADDDDILPKGLEDFEPHPELDRAAREVDVLSVTTTMEVGVDIGDLRAVFQANMPPQRFNYQQRVGRAGRRGQAFAFVLTACRSKSHDLFYFRNPEKITGDLPPPPFLTTKLEMICQRLVRKIWLVAAFKWLREHVVDSGQSWPVDGDKHKPDNHGEFFQVHWLKENQANWLPRIRNALKETINARDEFAQACMQQDEIFYRTIIHPLTPECVIQDIKSVLDDDAMAGKGLAEALAEQGKFPMYGMPTRTRLLLTRPVSTDEHDVQFASMDRDLDIAIQEFAPGKYLVQDKRRYFTAGYAGMLKQSYKNPAEFFTEADEPGECRAMTVCPVCKVWVLVGSMTVVCSACGGVMDGAEQYSCYVPNGFITTLEDKSAKEDFDQTLTVASRVSIAEAYSIENAVSVPDSNVAIQLKSQTCLNRLNRGVYADKKWSGFNAIQGNLRVPFRKAGVYQPLWANHVWIDNNLLEADLSLKNRFTPMQESRKSFYLSAPKVTDLLALMLVDTPADLQLQYLQGALTPAFRAAALSASFIIVNYASKELLDTDPEEIEILEPRVQILKNGISAPILQMADRLVNGSGLCERLQQIGSSGSPIVLEVMNEIINDEGSYPLKEFLEPQHRDVCFQACYYCLHRYGNQAYHGLLDWRLGLDVIQLLLDKTYDAGLRGDFSSPGIIDWTVNAKRLAEEASSLFKGSEVKIVGNIPLIGISPQRWAAVLHPFWSYDGVFKANPELEVLSLEEDIVFTNTFELSRRMGTVMAKLCTTPRSSEK

SEQ ID NO: 24534 - protein, 361 aa, Enterobacter cloacae
MNSIFAREGDEIRVLSLFSGCGGMDFGIESAGGKIVFANDIVENACKTLAKYFPDTDVKHGDISQIQTFPSVDVVVGGYPCQSFSMAGNRKPSDDARTNLYKQFLRVLNIVRPKYFVAENVSGLQQLGAGSFLEQQVNAYRDAGYQVSHHLVNAKSYGVPQSRKRLFIIGVRNDLGQYFEFPAATHGKATLKNPHLKPYVSHGEAIRDLPLWPEGEFYERPHDPEGHFSWYFMSRNRKAKWDSPAYTVVANWRHVTLHPASPMMKLTWSNLEDGWKQRWDFSEEYEHVAIDSTRPKLEQARRLSWRECARIQTFRHDFEPIGDIESRFTQIGNAVPPLLAEIIFQHLFSGDGLKMNLRKGE

SEQ ID NO: 24535 - protein, 925 aa, Enterobacter cloacae
MSISFPISLEEWNAALVNAVFFEPSRADVFLSRIDTTGRIFEQLAGSRSKEEAKQSFLDSFGKDERKIQRYLRDDSTLDSLTRIKGIPPHFSILYLTLLAASADNETHDEGDFRVRFSVLLGLNRNKKFIFRDLPSLWRRVEQWSQSKQGCSRLFLPDPQNEKLIGYSKRLSFPCYRDEVRLRAILVRNNLDSHSTFESVNKVIHQRIDGFSEVFVSEFNEFYTLLSTAAMQQAYSSPFWGAVRDITRHEENQQARENGLFCIHLDATDPQLPEIYLLMDDVGAQTLDTVKTESLPEKLESYSSIYYQTNVNATLTSLLSFLQKRKKGLIGSRVGMALHAGCLPLFRDDSGFISSDGHYFDDGLVCLIIRREYAVHIRTRFEHTGLTVMTLGKNTDSEDWEVLVFDTMSRQELTELAKLLPGAARRFMVQSWIPARPYITGAARFGQSILLNPASTPVIHMVGAIGGEYVIRDSNHIELVSGILTPTQGGEGLFISPEKLTSLSGQAFCRYRLTLEKHVEPLVFDIHVLDHAPDAPYRKVAEQHDWLIDGQRGTLVPLNNVESMECLKNQKTTSLGGSWSLWRRDERVPVESKQFDLHMLPAAFDWLAEALALRFQKRSTLPFDELNTHITPVSLATGIPAWRLRRLLFASGWLCVIERRHAPYPVVSLAKRTLSVCETVQGLTARVSGMLTKSERHHLQGLLKESERVRRWSTVDNNFALGSIELILSGADRVKDLLERFNWQLLVRKDFSVGPLSGVLLSMTQIKQVPALPPDIYVAFWQTKKNQWSEEIQPTNSDLLMRCREKQRNRYFIRADTGYWQTDSFAWALMAHIMRSEKTLGTQSHYGDLFWSKSLITLPISVTQWWLHFAGGCCTVSDDGRIIFAGRGDELWGGVECDDNAVFPVNRAVTRRARALALRRISSIN

SEQ ID NO: 24536 - protein, 937 aa, Enterobacter cloacae
MSKKQHIIKERLRQMYLFGAEPFELMNCLKESQQKLIMAGAKADNLPKVPNKILHFLSALPPKAHSIVLTWFRTHVQFPEQGDPQKIIHEILLAENNDKDISSPKPLWRAILGFYVTQPCPDIVAQFLRGEEITLLHNDDPDGSSDSLPEQSTISVTDEDIEQCLFVSQGRDISPSDRIIPAFVAGLVAMLKGETEVADQWVSQLSNHPLPLGQKFGRLISTFGVVRPQEEADNGIVLLAEPVAPDEINGDIDGVSFVGKVTKVLPSGVFFVSPVGLFIDDELRDLSDAHSHMLYPDRGEVIGFLNHFTNNVTHGELGIWQARHKPSDKTAQCALTDYQSRVYSVVKIPYDSSEPDAIREWLLTCYQPQDKSPTIFFLTDGLALRLPGDILDPKKYDFDVPLDSYRELSCVELRSQSITIVPQLPGLSEKYDCAPAITWIKRLLKLDYSSTDFPVFSKSHLQRLAHFMAEYESDNRSAYLRALTQLEKVAVSREFLDGSIQQLLTLPTIKTQICAEKQVILAQYESEQEQLRQTIASLMDKKAQLDAEINRQEKTLKSETNRIKKALRQQEAELDSRIRQTFEQASQAGIETLAQTALLRTMIAGSATPTPVIPSERITEPASSLPLPQSLLPPEVNEINSKRVLQAAIEEQAAITGLSENLLFSLIAAANVVSVVGLTGKYAQKTVVSLANILSGSIWGEVSIHGDLFSISDLMKSPVLIRSTNSTSSMTLGDFLEHQQSSGLMTIVKLRGFNRMPPETLLPELNECLFSSEYSAGLCWKDQNHTLRHLSFSYPVLFVLTFAVGKSTFPLQGPVAHQLPVFMAEYSSTQVEQTEYSPAEYTSDIAPACVASKLWSSLYADAHPKDNQQQTMRAVLNALGYSDEKSQALAMLAFTIGRSTTEKITAEIEPLAPALIPYVQEITHGASVTVLDHLFQL

SEQ ID NO: 24537 - protein, 1998 aa, Enterobacter cloacae; identical to SEQ ID NO: 24533

SEQ ID NO: 24538 - protein, 361 aa, Enterobacter cloacae; identical to SEQ ID NO: 24534

SEQ ID NO: 24539 - protein, 925 aa, Enterobacter cloacae; identical to SEQ ID NO: 24535

SEQ ID NO: 24540 - protein, 937 aa, Enterobacter cloacae; identical to SEQ ID NO: 24536

SEQ ID NO: 24541 - protein, 1998 aa, Enterobacter cloacae
MNNPLESFESIRDFYITYLETAFRIGSPDIQAYRRSLLEQQGTLCADLFLEPMPRYQDYGLTISDLRNVAEGEEWLPGFTEQQRDAFIDLCLGGLLPRDKSDSSKGRFKLYTHQLDMLKRGVQPAMPGIVTSGTGSGKTESFLLPVLAQIVKEASGWPKSPSLKCWQPWWHNGVNTQPTFMREAEASARPKAVRALILYPMNALVEDQMVRMRRALDSREAHEAMDLHLGGNRIFFGRYTGATKVTGWLNHPRPGSEEKEKKEKKRVAGKITELREYLQSVEDTHREAVRQGIRDHDDNLQFNFPGVSGGEMLSRWEMQKSPPDILITNTSMLSTMLVREIDDPIFDQTREWIEHDPDAYFYLVLDELHLQRGTAGTEVSYLLKHLINRLGLDQEQHRHKLRILASSASLPVDGPEGKKSVEYLWGMFGQRGLPVSAAAKDWADCVVNGAMVAPAQDNTLHFHGDLNHFCNTVKQLQGSSLPSLQHWSNVARSMGGYHDEQCMEKLAQWVVVQAACMLEKGCYTCEKSLRATSINALAARIFPSHSTGREGIRALIWLRAATDSWPEWFSHPFPDDIPLPRFRAHAFLRALEGLYAAPLPSPSNASTEEREQHFFADLTVESGLRYGERHYDNKKSRRVELLYCECCATLFFGGKPSSFSATDSRVELLPNDPDIDQLPEHAKSVMVERRSAEEYALFMPTVDRFWPRGEGTPADEDSFGKWIKAGYDPFTAAIQHTLSPIRSIEQTHIAGWFYYVPSGDFSSRKRGQSSSQSPGSALPFQCPACGTSYKYGKGKLSPIRSFRVGFAKTTQLLASTLMAELQRSGDRERLVTFSDSRQDAANAALDLESGHHDDVRREIVVRSLKELSASQCSHKEVTIQLEQLNKRRKELISKEIKEGQLSADEDKELGQLFGEKQRLSDLLLLPQADSVSLSSILVPEAPIAGNVLNPLLATLVEAGIHPTDRTGISPVPEPSKQKHDEETITFAWQQLFEKNKQTKWCWKKHPSYEDNLDVARKEISRDLKQLVGESVFSKTYFALEEAGWGYPCLPLANSCTREQLAVYDAMLRVLADAYRVAPSQYTTTETRWHVADDVKPKNRLRRFSDELCNHSRAKTLLLIGDFLVHLKRSGHQGGIIDIGKVHFRLVEATAPFWRCSHCGRVHLHKGAKLCTRCYAPLPETSSGNAGELQTQNYLGKRISYASRISRMRSEELTGMTGNPAARLRRFKSILIADDDDILPKGLEDFEPHPELDRAAREVDVLSVTTTMEVGVDIGDLRAVFQANMPPQRFNYQQRVGRAGRRGQAFAFVLTACRSKSHDLFYFRNPEKITGDLPPPPFLTTKLEMICQRLVRKIWLVAAFKWLREHVVDSGQSWPVDGDKHKPDNHGEFFQVHWLKENQANWLPRIRNALKETINARDEFAQACMQQDEIFYRTIIHPLTPECVIQDIKSVLDDDAMAGKGLAEALAEQGKFPMYGMPTRTRLLLTRPVSTDEHDVQFASMDRDLDIAIQEFAPGKYLVQDKRRYFTAGYAGMLKQSYKNPAEFFTEADEPGECRAMTVCPVCKVWVLVGSMTVVCSACGGVMDGAEQYSCYVPNGFITTLEDKSAKEDFDQTLTVASRVSIAEAYSIENAVSVPDSNVAIQLKSQTCLNRLNRGVYADKKWSGFNAIQGNLRVPFRKAGVYQPLWANHVWIDNNLLEADLSLKNRFTPMQESRKSFYLSAPKVTDLLALMLVDTPADLQLQYLQGALTPAFRAAALSASFIIVNYASKELLDTDPEEIEILEPRVQILKNGISAPILQMADRLVNGSGLCERLQQIGSSGSPIVLEVMNEIINDEGSYPLKEFLEPQHRDVCFQACYYCLHRYGNQAYHGLLDWRLGLDVIQLLLDKTYDAGLRGDFSSPGIIDWTVNAKRLAEEASSLFKGSEVKIVGNIPLIGISPQRWAAVLHPFWSYDGVFKANPELEVLSLEEDIVFTNTFELSRRMGTVMAKLCTTPRSSEK

SEQ ID NO: 24542 - protein, 361 aa, Enterobacter cloacae; identical to SEQ ID NO: 24534

SEQ ID NO: 24543 - protein, 925 aa, Enterobacter cloacae; identical to SEQ ID NO: 24535

SEQ ID NO: 24544 - protein, 937 aa, Enterobacter cloacae; identical to SEQ ID NO: 24536

SEQ ID NO: 24545 - protein, 1998 aa, Enterobacter cloacae; identical to SEQ ID NO: 24533

SEQ ID NO: 24546 - protein, 361 aa, Enterobacter cloacae; identical to SEQ ID NO: 24534

SEQ ID NO: 24547 - protein, 925 aa, Enterobacter cloacae; identical to SEQ ID NO: 24535

SEQ ID NO: 24548 - protein, 937 aa, Enterobacter cloacae; identical to SEQ ID NO: 24536

SEQ ID NO: 24549 - protein, 1998 aa, Enterobacter cloacae; identical to SEQ ID NO: 24533

SEQ ID NO: 24550 - protein, 361 aa, Enterobacter cloacae; identical to SEQ ID NO: 24534

SEQ ID NO: 24551 - protein, 925 aa, Enterobacter cloacae; identical to SEQ ID NO: 24535

SEQ ID NO: 24552 - protein, 937 aa, Enterobacter cloacae; identical to SEQ ID NO: 24536

SEQ ID NO: 24553 - protein, 1998 aa, Enterobacter cloacae; identical to SEQ ID NO: 24533

SEQ ID NO: 24554 - protein, 361 aa, Enterobacter cloacae; identical to SEQ ID NO: 24534

SEQ ID NO: 24555 - protein, 925 aa, Enterobacter cloacae; identical to SEQ ID NO: 24535

SEQ ID NO: 24556 - protein, 937 aa, Enterobacter cloacae; identical to SEQ ID NO: 24536

SEQ ID NO: 24557 - protein, 1998 aa, Enterobacter cloacae; identical to SEQ ID NO: 24533

SEQ ID NO: 24558 - protein, 361 aa, Enterobacter cloacae; identical to SEQ ID NO: 24534

SEQ ID NO: 24559 - protein, 925 aa, Enterobacter cloacae; identical to SEQ ID NO: 24535

SEQ ID NO: 24560 - protein, 937 aa, Enterobacter cloacae; identical to SEQ ID NO: 24536

SEQ ID NO: 24561 - protein, 1998 aa, Enterobacter cloacae; identical to SEQ ID NO: 24533

SEQ ID NO: 24562 - protein, 361 aa, Enterobacter cloacae; identical to SEQ ID NO: 24534

SEQ ID NO: 24563 - protein, 925 aa, Enterobacter cloacae; identical to SEQ ID NO: 24535

SEQ ID NO: 24564 - protein, 937 aa, Enterobacter cloacae; identical to SEQ ID NO: 24536

SEQ ID NO: 24565 - protein, 1998 aa, Enterobacter cloacae; identical to SEQ ID NO: 24533

SEQ ID NO: 24566 - protein, 361 aa, Enterobacter cloacae; identical to SEQ ID NO: 24534

SEQ ID NO: 24567 - protein, 925 aa, Enterobacter cloacae; identical to SEQ ID NO: 24535

SEQ ID NO: 24568 - protein, 937 aa, Enterobacter cloacae; identical to SEQ ID NO: 24536

SEQ ID NO: 24569 - protein, 1998 aa, Enterobacter cloacae; identical to SEQ ID NO: 24533

SEQ ID NO: 24570 - protein, 361 aa, Enterobacter cloacae; identical to SEQ ID NO: 24534

SEQ ID NO: 24571 - protein, 925 aa, Enterobacter cloacae; identical to SEQ ID NO: 24535

SEQ ID NO: 24572 - protein, 937 aa, Enterobacter cloacae; identical to SEQ ID NO: 24536

SEQ ID NO: 24573 - protein, 1998 aa, Enterobacter cloacae; identical to SEQ ID NO: 24533

SEQ ID NO: 24574 - protein, 361 aa, Enterobacter cloacae; identical to SEQ ID NO: 24534

SEQ ID NO: 24575 - protein, 925 aa, Enterobacter cloacae; identical to SEQ ID NO: 24535

SEQ ID NO: 24576 - protein, 937 aa, Enterobacter cloacae; identical to SEQ ID NO: 24536

SEQ ID NO: 24577 - protein, 1998 aa, Enterobacter cloacae; identical to SEQ ID NO: 24533

SEQ ID NO: 24578 - protein, 361 aa, Enterobacter cloacae; identical to SEQ ID NO: 24534

SEQ ID NO: 24579 - protein, 925 aa, Enterobacter cloacae; identical to SEQ ID NO: 24535

SEQ ID NO: 24580 - protein, 937 aa, Enterobacter cloacae; identical to SEQ ID NO: 24536

SEQ ID NO: 24581 - protein, 1945 aa, Enterobacter cloacae subsp. dissolvens SDM
MLDPIGGFRRIQDFFISYIETSFRIADPSVSASRRNLLNSSGEFAAEPYIEPVLRYESSDKTLEALAEMEGGPLNSLSHKGRKAFVELALSGLFDSKPGDEVWPRRSVHAPYSHQTQMLERGISPGCPGIVTSGTGSGKTESFMLPILAALSNEAVSWAAPCDGYLQNRWWNDEKTSWVSRREGEKRQAAVRALVLYPMNALVEDQMARLRKTLDSDNARKVMEHRFARNRIFFGQYTSATPITGYANHPRLSGVKSEKSRRARNLEKLRKALKRIDSDQQAARAFDEKENPSEKTRYIFPSTDGGEMMSRWDMQAAPPDVLVTNASMLGAMLSREVEDGIFDATREWLMNNNDAYFYLVFDELHLLRGSAGTETAMLIKSLIVRLGLDDPKHRYKLRLLASSASLPMEGVDGEQSRKYLRDLFSPFGTCRDSFDPGSDEPDFWRNCVIQGKPYIPSKPEGKIAVRPFAALMRVALEGQGNVVRNLNMTDALSKALSNVFQALGVKAQNDVQGIKQAAEKAAALLTNACIEEGSESPRAMPPGLIIDKIFLKEETDKQDELELALRGLMLVRALPESGMDCEQLANVTPAFRVHTFVRNIEGFFASVAPGEQKAKFADFCMERGLSHAPSAPGRDRGRRLFEMLYCEACGDLLLGGQKGQNHGKTIELLPSATNLENLPERPGAEYYDDMTLEEFAVFWPVDIAGRPPIGCEKGWDVWEKAALNPVTGIVTIGQETSTNTDAVRGYLYFQNPVKPKKGEPAKNPSAQPFCCPNCGIDYSSRPASNRSRSPIRAFRTGVTKSSQLVATELFELLHAIGAEAKSIVFSDSRQDAASMALEIERLHLRDLRREILVAASRAMINEAERRYISDEDIEDWKAKAKQSGDYDEYIRLHDLQKSQDGITELCKYRRIKIDKLLESEGDSIGRITSELVGLGISPYKYRSNSDENDNSVWHTNFIKEGGDIRFSERLPAHERMKIKTKISYDQSELIDDVIFANTFFALEETGLAYPCISDKDDMPEIDAWLRVFSGAYRIKENKYFDASRTRDWYVGKDVEKEKVKRVARALFGDGGYQDGLTSILNKLSLLDHKAGLINIGKLFLKISKPGDHYWQCANCGRIHLHLGFKYCTRCVNELDLEPSGIVEDLWEENFLGKRIVRGERDGVKRFRLNVEELTGQTDDFSDRLRKFKGIFVDKMSELEKLDSEIDMLAVTTTMEVGIDIGSLQSVYQANMPPQRFNYQQRVGRAGRRGQAFSFVITFCRGRTHDAYYFAHPHAITGDPPPPPFLAVDHDAIPLRLMRKVWLRAAFNLLREEDHKNGTAFPGDKLVPPDIHGEYVSTHDYYHSDETNWAERLLGALKATQNICDRFINAATFDPEQKQRLNLLLNAGKIIDEIAELKIYIPEEDMGLARFLAEHGKLPMYGMPTRVRNLYLGLRKTKGLNAQEEYEWSTMDRDLDLAVFEYAPGSVLIKDKKKHEVIGFTGNYQEPQVQNNRISDLSTVGSWLESCSHVAVCPACGSAKLELHKPENNINCEDCCTPISPDEFRLYITPAAFRTDFKPKDDMENFIRMSLKTTATVLHEGVPTKCDSFTVQRGEVTILRLNDGPINGEKEGERFNVDLVYDQKAPMPFSTNCPSVKGDQAIDSDWLKSHNNPRWQFRGEKKSFGLVSSKETESLHLEITEFNTRLNLDMVARYGEYMNLPTRAAAISATQILTHKAALYLDVSPDEFEMLEPRLHLGKPRLQIADALINGSGLCRRLAEPATADGLPLIVKLLHEILEENDNWPMIDFLNKDHPIQCQTACYKCIQRYGNRQYHGLLDWRLGMAYLRAMVMPKFACGLNAADWNQPEMKGWRERAFQLAEDVEALRPATIKLLKDYSLPVLIEMQDGKELWRAAVTHPLWQWRDDKRDALINSFGLADGESPLLFINTFELERRPLRALANLKRS

SEQ ID NO: 24582 - protein, 411 aa, Enterobacter cloacae subsp. dissolvens SDM
MSTKAVTRDNHLTELHEAGFSFYEFFAGGGMARAGLGKHWQCLFANDMDPVKASTYIDNWGDEHFDMRDVREVAPDELPLHADLSWASFPCQDLSLAGNGLGIGERDSSADETTRSGAVWPFLDLISRLSEENRKPPILVLENVLGLLTLNQGSHFAAICHQLSKTGYRYGAMIIDAKHFLPQSRPRVFLVAISRHVSIPECLVSEEPLPQWHSPSLIRACEALIKDDRNDWVWWSPGNMPGARTKELDDLIDFEDDNALWHSFDETQRLIGMMAPANLSRLAKAQASGVAIVGSLYLRMRKEKGVNRQRTEITFSPVLGCLRTPKGGASRPRIIVVKGNQVKTRLLSVKEAAALMGLPDDFILPAAYQSAFKVIGDGLAVPSVRFLAERILEPLAMAVRTSTHRTEDIRE

SEQ ID NO: 24583 - protein, 850 aa, Enterobacter cloacae subsp. dissolvens SDM
MNWTSPVTPDGWESKLIDYFLRFRADGDAQDIRWFEVTPATLAAAFAESGVSEDEAEEAFRKCMSKIRDLPQRLESGMMEKSTRRSPGYFTYLIMTLLISSQFDAQDERNDFRLKLQNWLQVTHSFQNLSGINKMWEALAEWLRHRIQEGEPYRRLILPPRDGWVQIGHTLRLAFPNKADLRLMSECLESYPQAAANPRQLIEYFQIFIQRQGVSHALKEAFTEFRDAWLLGRRALFDMPFWRLRQRAVQISSCVMTHQTIIDMYLDFDGSRCYFSVAGESDERVFHSTLSEALIARDAANSGNLGKATQVGLLFFYEIGHGRWRATSSPDVDSQRFHIALSSKHSVQISKRLNGYITEDEWILTAQALNRFSAVDIFRSISSSSSIQDDDVIRPQLYGGIRVPGGWLGLPAFLPFVESDTRSYRIYASGNVDARTNVSVIDGRLISSVPLNGEIFIEPTLDTGEKTPPWRRRARFFTRAVPHPTLGESARYRFEPFCDWSTSSLKVPAFNFEEKFQWEDSEECCDHLLEVIYASGASGWEEAELFALLRHVDGNINVWHLIRCLQNAGLIEPRLRSGWKGRAWTLVKPSLLHIRNGEDSLVVVEGAVCASLIDDFKKAVAGLGGESFRRRGVSLWSPPVFGAALANPDSLSQRLGWPLIEIPSSPDTLPLSLVTTERAAELHESVAIWNWRSGRFQQHGSKDKESASLSLHIHPGGRDHDIYRVVSGRKTTHYLSRTAAIIAAGAKNREPIFERVTKNHLLCLINDCGLPDALAAGIRRYTLRNGGPFDSGYAYPVDDVSFLWLESLLPGCFCSLSPNGEGDLSSINTASRHSGGKVRLIWRNGQLKLT

SEQ ID NO: 24584 - protein, 690 aa, Enterobacter cloacae subsp. dissolvens SDM
MGKIPWYLGQFDRRNYQSYLKAIAQETPVGWRSIDNPKKLFPRTGEVEFNEAEALSLRKGDWAAFHVGPGTRNRAQAKHARRIYPYYDLSSGQTLLETRRQLSFDGITTDGEPGLWAIRFGADGLILANLAESKSGCLILSKSQNVYEYDFHGGVVISVSGISESGKLFYMPDVDASPAYIHDWTPDKQYIENVIQILSCADSTAAIASWLRVHTNEQNGKLTSGVNDLLAAAQTLRAGELAKKLEEEDSLTRQFTEAVLKDQYIAQLLEHQIQKIAEEERVALRAEQYRSLDKEFSTERLRRREVIETEMSVFEKTRKCELEEDIAQLRQLEEEKLQIDFAKKQADLERTLKQEKEYLENEISRLKDACAELCAQNANQQQILTTLISEHKACLASLTDVKECTAQAKNELEKMDIAIAEKARRMAYSAIPEVRLPAQARVISCEEFGHSVRENKLLTPDGKILMTQFLALMLAGECPLLYGPETQDFLAIAESLISSGRSIRLVADPTMISCGDLWVRAGNHLATPLYQGLLLSESSYPRTILAVIERVECSAARFWLPALKEQLYGGDFPRRFLICGTIENEDCEETEKMKEQHLRLRMENVVIRNAIGLSPLHLSSENHSELDPGPASQGSLPDRLAIADEMSAGRLDLAYTLRAMRTAHEVGLLDAQNKSMYQENLIDLYAEIKE

SEQ ID NO: 24585 - protein, 1998 aa, Enterobacter hormaechei subsp. steigerwaltii; identical to SEQ ID NO: 24533

SEQ ID NO: 24586 - protein, 361 aa, Enterobacter hormaechei subsp. steigerwaltii; identical to SEQ ID NO: 24534

SEQ ID NO: 24587 - protein, 925 aa, Enterobacter hormaechei subsp. steigerwaltii; identical to SEQ ID NO: 24535

SEQ ID NO: 24588 - protein, 937 aa, Enterobacter hormaechei subsp. steigerwaltii; identical to SEQ ID NO: 24536

SEQ ID NO: 24589 - protein, 1998 aa, Enterobacter hormaechei subsp. steigerwaltii; identical to SEQ ID NO: 24533

SEQ ID NO: 24590 - protein, 361 aa, Enterobacter hormaechei subsp. steigerwaltii; identical to SEQ ID NO: 24534

SEQ ID NO: 24591 - protein, 925 aa, Enterobacter hormaechei subsp. steigerwaltii; identical to SEQ ID NO: 24535

SEQ ID NO: 24592 - protein, 937 aa, Enterobacter hormaechei subsp. steigerwaltii; identical to SEQ ID NO: 24536

SEQ ID NO: 24593 - protein, 1982 aa, Enterobacter sp. DC1
MNNPLETFESIRDFYISYLETAFRIDSSDIQSGRRALLEQQGTLCADLFLEPMPRYHNYGLTISELRNDAHGQIWLPGFNAQQRNAFIDLCLGGLLPCNKTDPTKGRFNLYTHQLDMLKRGVQPGKPGIVTSGTGSGKTESFLLPVLAQIAKEATGWPKSSALKHWQPWWHKVADKQPSFMREHEAAARPKAVRALILYPMNALVEDQLVRMRRALDSREAHDVMDAHFGGNRIFFGRYTSATKVTGWLKHPRLNEEKNEKKRVAKKITELREYMQLMEETHQEAVRQAQQDKDNELSFNFPRTAGGEVLSRWEMQKTPPDILITNTSMLSTMLVREVDDPIFEQTRQWIERDPDAYFYLILDELHLQRGTAGTEVSYLLKHLINRLGLDQEKHRHKLRILASSASLPVEGSEGDQSVEYLWGMFGQRGLPAGASSSDWRECIIKGDTLPPGNMSLFLGELEAFYHAVLQLQQAPFTSLQHWQNVARSMGMTASEASTEQLAQRVVLQAGNLLESGCYTDNHSPRATSIKMLSSRLFNAQPHSDKALQALIWLRSTEGDWPQWFSHAFPDDIGAPRFRAHAFLRALEGLYVAPLPVPSAASAQEINHRYFGDLTVESGLRYGKDKKSRRVELLYCECCGNLFLGGKPSVFSGSESRIELLPNDPDTEQLPEHAKSVTVERRSAEEYALFMPVVERFWPKGDEELNSDNDNTFGTWVKASYDPFTATIQHPVSLLKPLPENHIAGWFYYVKPGEFASSERCQSSSQSPGTALPFQCPACGTSYKYGKGKLSPIRSFRVGFSKTTQLLASSLMAELQRSGNREQLVTFSDSRQDAARAALDLESGHHDDVRREIVVHSLQSIAADKPSHNQLKVRQAEIDNRNKILINLNVRSDEEEDELDQLADERKKIRGLLSKPEADSIPLREILEPESPDAGQPLGLLLRTQVDAGIHPSDRTGIAPVPDPEKYGEGTLTFAWQQLFEKNAQGEWCWKALPSYEDNLLVARQEISRDLKRLVGESVFSKTYFALEESGWGYPCLPITGNDSREHLAIYDAMFRVLADAYRVTPSQYTKPETPWSSARDVNRRNRLYRFTQAICQRSGDEPLSLIDSFLRRLELAGHQGGIIDIGKIHFRLAEPTDRVWRCSRCGRIHMHIGAGICTRCYSPLPETPRSEAKTLQMQHYLGKRLSHSSGIHRMRSEELTGMTENPAARLRRFKGILIADDDDILPEGMKDFAPDRDLDRAARVVDVLSVTTTMEVGVDIGDLRAVFQANMPPQRFNYQQRVGRAGRRGQAFSFVLTACRSKSHDLFYFRHPEKITGDLPPPPFLTTKLEMICQRLVRKIWLVSAFKWLRQQTEKADHPWPVDDYAHAPDNHGEFFPVHWLKENQTDWLPKIRQAIEATILARDEFARTCTQQDHHLFQRVIQPLTPEQLIQDINVVLNDSAMEAKGLAEALAEHGKFPMYGMPTRSRLLLTRPVSTGEKEIEFASMDRDLDIAIQEFAPGKILVQDKRRYFTAGYSGMLKQSRKNPRSFYSNAPEPGELRTMTACPVCNIWAPANSLTTECTICGAVMDKAERYQCYVPYGFITTLEPKSAKEDFDQILTTASRVSIAEAYTFSAMPEPDVNVAIQLQPQTCLHRLNRGIYTDKTWRGFSATQGSLSVPFRKQGTYQPLWANRVWMDSQIIETDLLVKNRFTDRGETRNTFYLAAPKVTDLLALMVAQIPPGLRLQYSTLTPAFRAAALSASFIIVNYASKELLDIDPEEIEILEPRVQMLKNGKSVPVLQMADRLVNGSGLCERLQQKGASGSLIILEVMKNILNNKTAYPLAEFLQPDHRERCFQGCYHCLHRYGNQPYHGLLDWRLGLDVIQLLLDPTYNAGLNGDFTSPGVSDWPENALRLAEEAASLYSDSAAEMMGNIPVIRTGAGRWAAVLHPFWDPDAAFAANPELEAFSYEVDVDATNTFALSRRMGTEMAKLRTQASSSQE

SEQ ID NO: 24594 - protein, 361 aa, Enterobacter sp. DC1
MSSVFERENDNIRVLSLFSGCGGMDFGITSAGGDIVFANDVVENACKTLGNYFPDSDIRHSDISQILAFPDVDIVVGGYPCQSFSMAGNRKPNNDDRTNLYKHFLRVLETVQPKYFVAENVSGLKHLGAGSFLEKQLMAYKAAGYQVSYHMVNARAYGVPQSRKRLFIIGVRNDLGQYFEFPAETHGKATKKNPHLKPYVSHGEAIRDLPLWPEGEFYERPHDPEGHFSWYFMSRNRKALWDSPAYTVVANWRHVTLHPASPVMKLTWSNLEDGWKQRWDFSDEYEHLIIDTSRPKLEQARRLSWRECARIQTFPQGFEPVGDVESKFTQIGNAVPPLLAEVLFRHLFSGAGLKKMTANGN

SEQ ID NO: 24595 - protein, 921 aa, Enterobacter sp. DC1
MDDSFPVTLEEWNAELVKIVFLESSHTGSTLSRIDTTGRIFEQLAGPRSKEDAKRSFLISFGKKASKIQDALRDESRLDILAQIKGYPTYFAVLYLTLLAASADDETHDEGDFRVRFSVLLGFDKNKKFVFTELPNLWERLERWSSKRQNCTRLILPRPSKHERLIGYSKRIAFPCYKDEVFLRNILIDNKLDNYSTFESVNKVVHQYISYFSEVFNQEFIEFRTLLSKAAMQQAYDSPFWGAVRDITVHTEREQLKENGKYCIHMEFNDSGNPEIYLLMDDAAATASEIKHYYSLPNEIENYNNIYYERDIGTTLNSLDFLLKKRKGYFYKSRAGVALRSGCLPLFRDDFCHISSEGEYYEDSPTYLILHHTYADSIFTVLKKVGERVQRRDIKSTKWSIVSSDKVGRQTLDKIARLLPEEARRFLIQGWQPARPRMSGAARFGQAILLNPASTPIIHMPEVLRGCYVISNKDGEELTHGSLSQGAEGLFIPPEELMEISGQAFCRYELTLAHSDIPVNFDVHVLDHAPYATYCKITEPHDWLIDGPSGVLMALGDTAVIPPLKREEITPLSGAQMLWQYESCLPVTCQYTELHNIPAAFDWLAEALALRFQRRSTLPFGELKQHIDPVSQLTRIPEWQLRRMLFAAGWLCVVQRRHAPYSLVSLAERTISVDVTEQRIIARIMGMFTRSERNLLQETLNDGERIGRRLVEDNGCSIGCIELHLSARDRVHAFIEQFGLRLVNHDDLPVNALSGLLLPLSQMQFIPTLPPDLHVSLWQAEKYQWSEEQRLTQTVNNLLIRCQEKQRYRYFIRQNAGYWQTDSFSWALMAQMICSGVMFGVQKGDSDWCWSTKIIALPPSILQWWIHVAHGCLSITDNGSYLFAGGKVPLWNNVMTFPSCQRALARRNRALTIRKLRRTLQ

SEQ ID NO: 24596 - protein, 926 aa, Enterobacter sp. DC1
MAKKKSIISDRLGQMYYFGTESHELSRCLLECKQRLTRNGAKADNLPRGPEKRLHFLRTLPPKAKPIVSDWLRENLTFSEQNDPQTVLRDLLEAESNAEDIDLCKPLWRTILGFYISPDCPEIITKFLNGEQIDLSQHGVSDSLTINVTDEDIEQCALISQGKKIPMPERTIPLFVGGLVDALQGTRTADNQWRTKLSEHSLPLARKLGELIEQFEASNDLKTMDGTSVIQAPPVVSKEIDGAMDEVMFIGKVLALTASGAFFVTPVSLLIDGNLRDLPEALGKDLYPHSGEAIGFENHFSKKFARGEMAIWKARYQPSDKSAQYVITDYLSRVYPVVALPHASDEPDAVREWLLTNYQPQNDTPVIFQLSDGVSLRLPGDLPDPRKYDFDMPLESYRQVPQTLLDSHALTVITELPKVSEKYDCAEASTWIKRLLKRTDSAKFFPQFSKGQLQNLTHFIAEHESDNEASYLRAVSHLEQIADMRSFLNDTTQQLLALPEVETKINIEKQEILARYEDEQHQIKQSITVLSEKKIQLENEIADQKKKLKKETDRTNKALRQQENELEQRIKKTFEAASQAGMETLAQAALLRAIINNETAQEQPAQQRITSEPVAESANSNFPLAETNALTRKHQLISAIEKEALATGLSESLLFSLIATASITPAVGLMGKQTKQAIASLANLLAGNVWGEVSVHSDHFSFSDLMNSPTLIRLSGDTLTMTLGDFLTQQQEAGLASIVELRGFNRTPPETLLPELHECLFRTPHPAACSWTDRREALRHLPIRHPILFVLTFTTGKSTFPLQAPLAYQLPLFLAENIWSDERPFEQNTDITPSRITPELWQTIFVDNHRPEYQACAPWEVLKAALLSLLPDEQAQAVARLAYGLGRSTTQDIATTIDVLAPELGPYAQEMTIGESASVLEHLFQL

SEQ ID NO: 24597 - protein, 2009 aa, Gemmatimonas aurantiaca T-27
MQDPIGGFQRIRDLYITYLETAFRIRDPGVSRERRALLERPNTFCTEPLIEPLPRYRSVDWLLHELAKADPKDSRLPGFDVRERAAFADLALAGLLDSKPAREDNESRLAEYELYEHQAQMLWRGVQPGHPGIVTSGTGSGKTESFLLPVLAMLAKEAVRWPAPSADYLKRRWWQTASGEPYPKYDGDDGVPDRPTARSKSASPFKLQRVGEAAGRPAAVRALILYPMNALVEDQLARIRRALDSDLARRVMDRHFAGNRIFFGRYTSDTPVTGYHKHPRAGTKEHERRNRKLAELFRASTAIQHAQERARMMDRERGASSEDVRFLFPTVDGGELTSRWDMQETPPDLLITNVSMLNAILAREVDSPILDRTRDWLTSDDDAYFFLVLDELHLQRGSAGTETSYLLRLLFERLGLTDPAHRHKLRILASSASLPTEGEAGQSSLAYLWDMFGRHGLQAGPRREVENPRERWHHAVVPGVTVDVEPSSLQPLDPAPFFALLEAAGGDLQDEATAPAPAEAEVEWRGVARALGGERMEAGDLDGVVAACVREAGARIAHACWSEEERRARAMPLSNIARRVFGRSDADTLCAARALLLVRGAGDAWGRWWATEPPTAPSFRIHTFFRSIEGLFAPVGDLSGVPPQWRSASRLVGELSVERGQRFARVGSGDPGSRLVELVYCESCGELFLGGRRGGRETAIELLPAEPNVDNLPESAGQDFFETLSADEYAVFWPVESWPGVLPSPRDDVHVGEWKRAYLDPISATIQFPRIGNGVPEGRITGYVWERGDSQDRHKRRKESPGTAVPYECPACGSDYYWRNAPLRLSPIRNFRAGFAKTTQLLATELFDLLRLRQREPKLVAFSDSRQDAAKAALDIERRHHEDLRREVVVESLRAVAGARPDGTALQAEKERLTKEAQAHAVAGNLAAAFALKPRLDELETALANGADGADLPVAVVLESTRENPRFFGSRATREPLRPLLAEFVKLGIHPTDPTGTRRIKLPTGESVTWDSLFVIGEDGTPDWKDDAVEQDKLNAARQALVGEMQRLVTGVIFSKTYFALEETGVAYPSVGPSVASEDRELADAFLRVFADSYRLVDSQYEDAGQKDPWRSALDIRTNQRARRLASNIWAPDQVNAGLERVLKLLAKAGHPEGLVLTSSLRIRLVEESDPYWRCGRCSRVHLHRGVKVCTRCFQPLPEEQSGVSGDLHGESYLAKRIERDNATFRLRCEELTGQTEDPADRQRRFKNIVLDSDGRVDRRLREAARVIDMLAVTTTMEVGIDIGPLQAVFQANMPPQRFNYQQRVGRAGRRRQAFSMALTVCRSKSHDLHYFWHPEAITGDPPPPPFLTKRQPTAAKRFLRKAWLWAAFHKIRSDQGVGYAGDDLSDIHGEYVPAGDYFDAANGWRARLAGALDATRDYRARALAVLVEDSDLGRSPELEGLESDCLLLEIDKVSSSGVRQEGLAHTLAEAGLLPMYGMPTRVRNLYLGDTTRPDDQFWRTWRKVDRDLDLAVFEFAPGSVLTKDKQEHLCVGFTGALPDYISRSGPVPEIKPREDAFADPFWMVQCGYCGAWHRFDEDPSATGAECGSCERVLDVTTAGECRTPNGFRTDFWPREVEEQLLTAGRHRLNTAEGKAVRLEAEKKSNLSYAYQSQSRLYRLNRGRLDAAGGGRWLGFDVTAGAQRYGRGGRARLLDQWIATNDKLPVPVGFDPNPGVAPLQSIWLAAPKTTDALFVAPSSVARGLRSHMVGAGQQRITSVRAAAISAAYMLANRAALELDIDPEEFDVLEPRIYRAWNGQAVPLLQIADHLVNGAGFVERLAAQGSGGRPLVAELVSSIVRDESRYPLSELLRKDAHQNHPTECDQACYRCLQRYSNQSYHGLLDWRLGLAFLQLLDDPEWRCGLDGDFSSPALRDWTALARRYVEDLARFSPVEQRDAAGLVAFRIQGVGDWAVVVHPLWDTDALEGIVGKAVDEIERTSGSVPVFVDTFELARRLVSVRQDLLNPRPA

SEQ ID NO: 24598 - protein, 407 aa, Gemmatimonas aurantiaca T-27
MSSDGRAIERVIALRAGGTACTRIAINPDESLEGSQDALADRFDRAFLCTTSRPRIGARQREVRVVDLFSGCGAMSLGIWEASRAIGARMVPVMALDFNDKALRVYEDNFPNVWAISKPVESILDGALGAPASPAERDLVARLGHVDVLIGGPPCQGHSNLNNHTRREDPKNKLYDRMARFAELVEPTHVIIENVSAVLHDKGRVVDRTIAHLKKLKYSIDSKVVEAVAIGVPQRRRRHFVVASREIQPDIDATIDAFTRGERSVFWAIGDLACVSRDDLFDQTGTPSSVNRGRIKYLFDNKLYELPDEERPDCHRLEEHSYKSVYGRLRPNKPAQTITSGFLSMGQGRYVHPTKRRTITPHEAARLQFIPDFFDFGSVSKRTALAEMIGNAVPSKLAYVLGVELLR

SEQ ID NO: 24599 - protein, 983 aa, Gemmatimonas aurantiaca T-27
MQPGVWKDWDAAAWGQALLRHYFVGHDARPVSRLSISPEELAKAAGASDGEAAPARDAFLTAVRCSAAAFRRHLSIASLERHAWNRHGPPPFLAYLFFTCFAAASLDADTADEGVFRERLRQLLGHHEGTSYALGDLSRLWEAFAAWLEGRHDAGEPYRTLSLPDRGRATLIGYSVRLAFPRREDRLKLRALLAASSAGPAPTVPEAFQAIARARDRFSTDFRHVFDRARAALASGRDVPELQALWSAILEAAALADRRDSGDVRIRYRLLAQEDELGRLEPFVVTAGVPSGTRHSAQFSPLDEPFDQFDHLVCATDGSTGLIANLLLMDALADKVPGLGASPISRAVRDGVLLFRQVDSATWELAVTRPTEGKVRALVQSRLSDAFMRLVSGPQRHPREARFESWCEVAAFDVTELAEARESTAPELASVRCLQRIEIGPQLQLVGGVRVDGGYLGLSGLLPEVYCAEAEHASMFRLSEESGKRRSTHIATLEPVGERPGVFGWSPGHGDLEGPYVFAGTRDGRVVAPREVLFHSRGLSHDYEYPTDPARWLVEDCSTDVAPAGLASEIFLATGIGSPTRLPAVDALALESVHVLRNRSVDDNNEHDRLVEALAAILMARKGIAESELIEILGKIVRQATGFAVWGIIRGWVEAGYLDCLTRRQWRGRVYFARRPQLVLIPDADLGSIRVVLHGLAPYRLRSAAREAFSRAGATPLSASSLSPYVPAPQAWRFTSVEHVNASIAEYRELGTVGMREPEELVGDFDSAVSDEAPLPPGYECQRVWDWAAGGFRRAHGSAAPDEVRIECHTRSNGPDRYTIVAGCRRRTTLSRSWALLDGFRLAGRRAFTPVGSVAIVRSGDDGPQVPLPIARVIGLRAGIVGGPAETATLGQHYANATDGPSARRWLLAWLSGSRADEQVARRFAWLRAATDARGLDTVPIPADLRRRLRGLHALPDALSIAERRIPRHLLAHVRRAVALTES

SEQ ID NO: 24600 - protein, 754 aa, Gemmatimonas aurantiaca T-27
MPTTNRSYYIGRVKRAPHRGDAYLYASIEPLVESDPTGSQWLGPLRNSVSSFPKRGLVHWNKAPFQLQLGSLWQFTIDEHPSAVRSDQLEHFQLEDPQEPIEVLDLRGWSDEERLRSAITSDGIPLSPPPLARRVLLWLASDVYVGPLLLKPATAPGFWVLDRPDAHIDAARMPVCRLSASDINRVPLEGERWFVSPRLELGRSAGIQNWTSDAQVTRSILTRLRKMDPDLVRAIGVTESVFREYLDHVEGGRMGSADPAVERARADRLRGVRDAIQRDEVLLTEAVEALLGTEAVRTEVQSQAHAKIDGEVHSRRAEIDAALSDSTKELARVQDILNAKRTEVAALDAALLEKRGELEAKVASFDQEVSARLEEIARRPEAIFAETAVMRAVLTPGFARPVGGGNGGVPAYPPARAVSRQVRDFGESTLELGDETDVRRALAVHAGASALSLQAMLSLHAMFVSGAAPVVVGSYAYDLLRAYASAVAGGRLHWIPIGSSTMEPYDLLGRFDGASGRIIPSPSGLLDVARDATQSGRLHVVVLEGFNRAPCEAYLSPILEAAQAGRLGDALRVIPLANPELISGDDPYREVARLVWPSNVLIACLPSDGSVTLPVPPSVWRFVALVDADDRDRTQLPSVPAENGVAPRTEIPPTLWKESVATAQAHAAHDRDEVTTVARALSLSARDARDAVRVREVLCANGLPHGDATSVALVATLIARSGSDAKAIDEGLRTAGVAVPSWQTIRAEAQRLRS

SEQ ID NO: 24601 - protein, 1755 aa, Gordonia rhizosphera NBRC 16068
MNSITPLSLAAALRDAYLRYFDTAFWLNDEGIMAERRAMLSEPGVLVGEVLIEPVVPYPNTVRLADVAAAAGVPLQIASRVASALFSGTPAENIALRDHQAKSIQHHFLDGVSAGRNVVVTSGTGSGKTEAFLLPLLLRLSCEATEWPSQNSTAPWWQETEPKWRSVRENDTRAPAVRSLILYPTNALVEDQMTRLRRAVRTLRDKDPDHPIWFGRYTGNTIGSGKRNKESLGEAGRELRAHATEYDALLEAKRQGKSDVDLSQFPDPRAGEMLTRWDMISHAPDILVTNYSMLNTMMMRHHEESIFAQTASWLQSNTGNVFTIVVDELHLYRGTQGSEVAMILRALLRRLGLAADSPQLRIIATSASLTESQDGRKYLQEFFGVGPSSFSIEPGEQIPVAPPKVLDATEIINGTANLGAITHAIAAACFDPGEQRTRATPLKTIADKLFPSSNDAIETLTIGLQQLADGDISRATPTAIPLRAHTFVRVPRGMWACTNSNCTGVTGSARDERRVGRVFGSPVSTCTSCGCRVLELLYCYECGDISLGGFIVTQNRSEVLLSPTPTAENQSAKPVFLRSETEFFWYRPGVPATLPRDWTKDGIKLSFSQVEWNPQLGIVSRGVSTGTGITVQSSGAAPTDRIPSLPDRCPVCSYQPRGRSKSGAFRSGEVTSAIRAHTSGAPAATQLYLSQLIRSLAQGMPSEATTTADAKTIVFTDSRDDAARTAAGVARNHHRDLIRQVLRRELERGTDAEKTLDKFAANPANVPPEYQAAALARMKQQFGMPLTTSEENDLEAALTKLGAADAVGFPEMNERITKVLLGLGVNPGGSSPWNQRLEDDLNGETPWYRAYAPPEPDLWPTPPIAQGREKLQQALRASIVDATFDRARRDLESVGIASVHIDGWQPVSGPLDDQLQAEVLASVVRILGLNGRTEESRRGGVQQSATLPSRVRKYIEEVAKTHVLDRAAVERQLDTLISDAAATRAISGWLLRTTSVDSTLIFHPSGDTLWRCARCNFAHLHPSAGVCVNPQCSAAGLRQAPIEIESDYYAWLAHQPPRRLAIAELTGQTKPLSVQRDRQRWFKGAFTLAENNLTHALDVLSVTTTMEVGVDIGSLRSTLMANMPPQRFNYQQRVGRAGRTGQALSYAVTICRDRTHDEYYFNRPERMTGDVPPQPFLDLGRKRIVERVAVSECLFEAFGALATPPDWTPRSNHGSFGQIQEWSTHRDAIQGWLAAAPEVEAIVGRLALHTPLSSSDVAEIVSSVRTDLVSNIDRIVDDERDSTDTELSATLARYGVIPMFGFPTRVRNIWSQPVYSRKDMEKYAVSDRPLELAVRSFAPNAQIVKDGVIHTAAGFAAYRPTGNRVESLPPLGQVKHVSTCPNCDHTELSQTATCSACGQQVTQIQLYEPAGFRTTYSPRPYDDDQETVSTVSTPALVPGSAATDHADLDHVSLDIFERSRLVSVNDNFGRGYEFQNRPDKTVVASMPEVPPSQLNTIGEVRVTDALLATPHNLDIGTGTVALYDLRAGKATYTSFAEVLKRAAQVLLDLDPVELAAGIVPRKTPITAPKRHTDEHVAAAVFLADTAENGAGYAVELGGQTNFHALITGALTELSPLWEDPKHSAVCDSACPDCLRSYNNARRHPLLDWRLSLDMLELATGAPLTISRSMPASAKWIETSAAALGSVASEIGAVPAVLRGDKCVLLTHPLWRHEEVYWTADQAHAVGSALEEYRTVDMHDIRDFRRNPITVLQYLQ

SEQ ID NO: 24602 - protein, 422 aa, Gordonia rhizosphera NBRC 16068
MGTGQHSGNSRYSVIEICAGAGGQALGLEKAGFDHELAVELDAHACTTLRQNRDWDVRQGDVADKTVWDPAKYAGVSLLAGGVPCPPFSIAGQQLGASDERDLFAWAVEQVATVKPRALMLENVRGLSTPRFAAYRQRILDRLGKLGYEPFWKLLNACDFGVPQLRPRFVLVALRPEDAPYFAWPSQTVASPTVGTALHDLMAADGWRYADAWRNLANDVAPTIVGGSKKHGGADLGPTRAKAAWMSLSVDGKGIADAPPLRTARHPKTNPPRLTIEMVTRLQGWQDDDGWQFSGRKTAQYRQIGNAFPPPVAEAVGTSVFRAFDHAALTESSDLAMAEDELFTLLRRHPEGISESLISQNVPNLAGEYLDKRIAELSLDFEVLCSFVGNERAYRLGNFKGFVGQNDHFRHEYLAENRSKVS

SEQ ID NO: 24603 - protein, 1025 aa, Gordonia rhizosphera NBRC 16068
MTNQNRIREQETSVRTWNRDWTNYLAWNTAVADVVYPETSEPAPAYMDLDDDQLRLIASQAGYDGTDPAARLASVVRAVTARQGRLSLRTIVRETRIWHKKATLQEAPPCIAFLAVTVLAAEDMGNTSEGLASNAYYARLAPLLDVPSEDSSIVSQYRSNIEELWDATNGWLASLEGRRGLPSAFALSHRFVGLPMSQALVRAADRARLPHVFAQYGLTPGMHLAPSDLTPYLDEWLSSEHSTATHSLRTLWQRKDSHERISSVAAIELANWDGNLIDSSAFTQARALLVANLRDGFMGSSLDLSVGVRLPPGPEPHAEVLQSGAKWTPLTLNPGTAGLWRTSYTQSIDFVSVLDGLIDIRCRPNADEIRFQRRPREIVPLVYDELQTTYVETDRLQLGVDALILVRSQSPTRAKESAAQAVIQTLDEYARPGFECVTSFPGLPPGWLMLRNVQLFGIPAALNDRLNALIPLARNQLTVAGGLRIPSRVQKWSSLSPPEVRAMTHDQRAVRVELKDTSTGYLVHTWESVSGTLTASLRQIGLKDGDYQVSLFLDGKKEPLQQVAVRLRSSDTEDALWDQVTRLRYSLDTPLGTMTATELDSNTSDRYADGLYVESNPSPPSTKYPASSAVTWHKKRVQPKRRPLQIGTPDPDSCVVTGAHHWDFPKQIPGSRKSIQGVCRSCGLVKRYPGWLPRSPRTRPKAAHVESPPTSIDLSQVGPVQNASPASWESAYDALMHLGGGSFSKLESIATQIEGSALFVDTFVRALESLGHIAIERSSESWKPTAWEVSPTSLAGTASGSYRAVGFWARATAQDALVSARDMGGTSEFETSKGMQQLFIAELNTDSLNLIAGECNADVVENPGATMLSALPALSNLAASCPRIAMPGYDSAERFELETASWVPTGDTSVPGAYKIQRSFEVLYVFRSPTDTENNTAARVPVHVAKHLAANAAQRSLIVYFDTSASVVLPRGCDLPGLYNRAAVALSGHLPEERALTVARTKRDCLFYRGFTRADADTLNTLLVT

SEQ ID NO: 24604 - protein, 1766 aa, Hapalosiphon sp. MRB220
MFAYLAKESKNWEAPGTQQPHINDWWENKDWQNKCKPLVNKKRNFKQSYRVPQRNHEKRDAAVRALILYPMNALVEDQLTRLRRALDSDEARDWFKNNRKDNRIYFGRYNGVTPVPGHEYKQNGKPNGDKIEELLEEMQKMQESADAAIKHFKETGDEDVRFFFPRLDGAEMRCRWDMQDDPPDILITNYSMLSIMLMRDIDKNIFDKTREWLNKEGSVFHLILDELHLYRGTAGTEVAYLIRLLLQRLGLYPGHPKLRILASSASLEPKDTESLKFLSEFFGTEWHSEQIISGHPEPIPTIFAQKFLDSEPFITLANAPEDANLLNKCLHLLSSQSDTVGAIMLNACKLDNTIRAVSLTQFAKGIFGDNLDEENLNLAVKGLLIARGLSEDKSLESFRFRLHWFFRNIDGLWACTQPNYDCHGNESSKHRPVGRLFVKNPPIVHDGFRVLEMLYCEQCGTVFYGGNRLELENGNGWELLPTEPNIESIPDRQIGNFLERRTYREYAIFYPSTNIYDKEFSIKGWNQPSRGDKIKEKAWWDKAWLDTRSSRVTSEEPDPDAPSNQWVEGYIFNLRDTSPETQAFMAAQPSICPCCGADYTRRKSWKSSIRGFRTAFSRLSQLLSKEIFYQLPEKSDSRKLVVFSDSRENAASISNGIERTHYYDLVREAIFDELNQLAVGEVYLLEDIQKHGQPVRQEAIEFAQRKPDAVEKFKKAVKNANKPLPEGLDDDDLELYISRRNKAKNLINEIQKTAKTRIVPLKLLFEGEKDTPGVVIQRLAGLGINPAGNDINDQEFYYDNKLHHWTGFFDFASQPPKWKAGSSGEAIDKRYTLISKTQSEVCDAFFSRLFYSIEASGLGYACLDLPQEEVNKLATQCKLSPEVFLEICNGCLRVIGDLYRYPKYHVEDWNSWQDAKARLKKYINKYVTQHKLSEKQLFDALWSAICQHGKHDHLKINPLHLWVRVAVPGDPVWQCTSCGRPHLHRAGGICTNCLAELPTSPNKKCSDLYARNYYATEAVNKRQPVRLHCEELTGQTDDQAERQRHFRNIVVNIGEQDRDFIPVVDTIDILSVTTTMEVGIDIGSLMAVVMANMPPMRFNYQQRAGRAGRRGQPFAIVLTICRGNSHDEFYYQHPEKITGDPPPVPFLSMSQIEIARRLLAKECLRRAFLCADVKWWDGPTPPDSHGEFGTVKDWLENESRREQVRQWLQSSPEVTEVVNDLLIGVERIDSITFENYARQDLFNKINECANNKELTGKGLAERLAEGGVLPMFGMPSRVRDLYHHNPSKNKNIATIDRDLDLAVAEFAPGAEKTKDKRIYTSIGFTAPLLPDKKNGFVPAYNDPLSPRRWMLRCQRCQHTETSDNEFENTVCPKCRAIPEQGFKFFKWAVPLAFRTSLNRGADAKEEHDVLISGAGSVAESQPQNFNFVDNTNTQTAFSETGRVFHVNDNRGNLFEGAVGKASFGRGEKILEFQWIAQRFQNQPNGVNFKEPGESEKLAIVAPKTTGVLRIKPASVPTGLCLDPIAPGSAIKAAFYSAAFIIRAVAAQELDIDPDELDVSGLRQVELEETGEKVGEIVISDRLPNGSGFTLWLAQHWQDILIEKIVKAQNTFVDAMMSQQHRKKCDSSCYECLRHYRNINYHGLLDWRLGLSLLRALADNNFRCGLHGDFSAPDLENWLQTATKLRDSFCASFSSCSPQNIGGLPGFTMDEIAVIIVHPLWNLNNPIGLLADAVATVAPDRQIRYIDTFNILRRPSWCYQSLGSPQA

SEQ ID NO: 24605 - protein, 388 aa, Hapalosiphon sp. MRB220
MSNDKPISISLFAGAFGLDLGMEQAGFHTVSVVEIDSDATKTIVRNRPHLAESAVPRDIRQVSAQTLLEEGGRVLNLGRALCPGEVDLVTGGPPCQPFSTAGKRQSIGDPRGSLLMDFMRIIAEVQPRFFIMENVRGLLSAPIRHRPHSQRGKGFLPLEPDEMPGVALRVVLAEIEKVGYSVVYNLLEAADYGVPQKRQRVIFIGSRDNEPLSFPLNTHCEDGTNLPKWHTLQDAFVGLVDSKPEFIPYSENRIKYLKLLKAGQNWRYLPDELKQEAMGGAYNSGGGKVGYYRRLAWDKPSPTVTTSSHQKATDMCHPEKLRPLSVRECAQIQTFSDDWVFYGSTTSKYRQIGNAVPAQLARAIGEHVYNLITEESVKGKEYAYQMEL

SEQ ID NO: 24606 - protein, 689 aa, Hapalosiphon sp. MRB220
MKNVNLTVKTTINYSEWNDKIAQHFFNPEMAGRTVYLYVTEDLINSLGAYKGITYQDFIQTVKNAVSINGICKKAWGSMQNPEWRYQRQGYPPYIGYLALFVLAAGTEGDFSSKAYYPRLRELLGEELTSRPYPHFDQMQTLWKDLEKWANVDKSGELGIFNANITGRLVHVGIPIAQTLLTERELKALPVIFAEAGLEPISLPSERHTASLLVKHGRNYLRRRTLRLLEETSEGDELRHALIERIVDELRTWDGTTEIPSEGRTQVYGVLRLCCKLDLIAKRASFTLRCTTKHEFPENGLIFNSNHDSYSCTEQGNGWSSPIRWELNGKNIDASQLDWRQDLRMESTDKQWCFKLPASPIRVFVEGRSLGLPGLVEVVRIPKGLPFYLAVQQECCSLLEKWGASSCEGFEKLHTVKGLPNRWHLFKVAAAHSDEIVKSEYPILSFSTSIRLDLEGGVRLDKGNYFLKFAPPKLVLQGGDESVKVYCNGKLLQDKSGEGIYELSPDIPADTKLEIEACKGKDIIKRLSLFLVEDLPLITSMKTLYLDSFSSVIKNQNDNSPGVIGALVKGVDCPAFNFNTLLPIQGKQRIVFVGKEPGQVAIYPEESLPIDWYPVWAIAKGSLFDRAMFCGTSLKESEPKLSICKDKKKLFFWRKILLDNHKRTLPPIGDIRLNQLWGKFQKEAKRVQG

SEQ ID NO: 24607 - protein, 1946 aa, Klebsiella pneumoniae BIDMC 46b
MLDPIGGFRRIQDFFISYIETSFRIADPSVADSRRNLLNSSGEFAAEPYIEPVLRYESSDKTLEALAEMDGGPLNSLSPKGRKAFVELALSGLFDSKPGDEVWPRRSVHAPYSHQTQMLERGISPGCPGIVTSGTGSGKTESFMLPILAALSNEAVSWAAPCNGYLQNRWWNSEKTNWVSRREGEKRQAAVRALVLYPMNALVEDQMARLRKTLDSDDARQVMEHRFSGNRIFFGQYTSATPITGYANHPRLSGATSEKSRRARNLEKLRKALKRIDSDQQAARAFDEKENASEKTRYIFPSTDGGEMMSRWDMQAAPPDVLVTNASMLGAMLSREVEDGIFDATREWLMNNNDAYFYLVFDELHLMRGSAGTETAMLIKSLIIRLGLDDPKHRYKLRLLASSASLPMDGADGEQSRKYLRDLFAPFGTCRDSLDPGSDKPDFWRNCVIQGKPYIPLKPEGKIAVRPFAALMRVALENQGNVIRHLNMTDALSQALSDVFLALSVSAKNDMQGIKQAAEKAAALLTNACIEEDGELPRAMPPGLIIDKIFLKEDSDKPDELELALRGLMLVRALPECGVVCEKTANVTPAFRVHTFVRNIEGFFASVSPGEQKAKFADFCLERGLSHAPSTPAGKRGRRLFEMLYCEACGELLIGGQKGQNHGKIIELLPSATNLENLPERPGAEYYDDMTLDEFAVFWPVDIAYRPPVGCEKGWDVWEKAALNPITGIVTIGQETSTTNTDVVRGYIYFQNQVKPKKGEPPKKPSAQPFCCPSCGIDYSSRPASNRSRTPIRAFRTGVTKSSQLVATELFELLHAIGAEAKSIVFSDSRQDAASMALEIERLHLRDLRREILVAASRAMINEAESGYISDKDIEERKAKAKQSGDYDEYVKLHDLQKSQVGITELCKYRRVKIDKLLESEGDSIGRITSELVGLGISPYKYRSNSEEHDSAVWHANFIKEEESVRFSERLPSHELMKIKTKISYDQSELIDDVIFANTFFALEETGLAYPCISDKDDMPEIDAWLRVFSGAYRVKENKYFDASRTRDWYVGKDVEKEKIKRVARVLFGDNNYQDGLTRILKQFTDLKHPAGLISIGKLFLKVAKLGDNYWQCGNCGRIHLHLGFKHCTRCVNPLDIEPSGVVEELWEENFLGKRIVRGERDGVKRFRLNVEELTGQTDDFSDRLRKFKGIFVDKMSELEKLDAEIDMLAVTTTMEVGIDIGSLQSVYQANMPPQRFNYQQRVGRAGRRGQAFSFVITFCRGRTHDAYYFAHPHAITGDPPPPPFLAVDHDAIPLRLMRKVWLRAAFNLLREEDHKNGTTFPGDKLVPPDIHGEYVSTHDYYRDDETNWSERLLGALKATQNIHDRFIEAATFDPVQRQRLYSALNAEKIIYEIAELNTYVPEEDMGLARFLAEHGKLPMYGMPTRVRNLYLGLRKTKGLNAQEEYEWSTMDRDLDLAVFEYAPGSVLIKDKKKHEVIGFTGNYHEPQVQNNRISDLSTVGSWQESCSHVAICPACGSAKLELNKPDSDINCEDCRTPISPDEFRLYITPAAFRTDFKPKDDIDSFIRMSLKTTATVLHEGVPTKCDSFTVQRGEVTILRLNDGPINGEKEGERFTVDLVTDQKAPMPFSTYCPSVKGEQAIDSGWLESHNNPRWQCSGKKKSFGLVSSKETESLHIELTKFDARLNLDMVARFGEYMNLPTRAAAISATQILTHKAALYLDVSPDEFEMLEPRLHLGKPILQIADALINGSGLCRRLAEPASADGLPLIVTLLHEILEENNNWPIVDFLKKDHPTQCKTACYKCIQRYGNRRYHGLLDWRLGMAYLRAMVMPEFACGLNAADWNQPEMKGWRERAFELAEDVEALRPGTIKLSKEHSLPVLIEIQDGKELWRAAVTHPLWQWRDAERDSLIDCFGLAGGESQLRFIDTFELERRPLRALANLKRS

SEQ ID NO: 24608 - protein, 381 aa, Klebsiella pneumoniae BIDMC 46b
MARAGLGKQWRCLFANDMDPIKASTYIDNWGDEHFDIRDVRGIPSNDLPRHADLTWASFPCQDLSLAGNGLGIGDRDSSADEITRSGAVWPFLDLISKLSEENRKPPLLVLENVLGLLTLDQGRHFAAICHQLSKTGYRYGAIIVDAKHFLPQSRPRVFIVAVSRHISIPTNLVSEKTLPEWHSSSLIRACDAIAEEVHDDWVWWSPGITPEAKMKELTDIIDCEDTNALWHSADETQRLIHMMAPANQARLAKAQESGETMIGSLYLRMRKEKGVNQQRAEITFSTVLGCLRTPKGGASRPRIIVVNGNQVKTRLLSVKEAAALMGLPDDFILPEAYQSAFKVIGDGLAVPAVRFLAERILEPLAIAVRNDERRREDKHK

SEQ ID NO: 24609 - protein, 854 aa, Klebsiella pneumoniae BIDMC 46b
MKWTPPVTPDGWESKLIDYFLRFGHDGDAQDIRWFEVTPSTLAAAFADSGVGADEIEKAFQACMSRIPDLPLRLESGMMERSNDKSPGYFTYLVMTLLISSQFDAQEESNDFRLKLQNWLQTGHSYQNLAGVNAMWEALAGWLEQRIQKEEPYRRLILPEIPPSWSHIGYTLRLAFPGKTDLRLMTRVLRNHPQAVSSPRLLIDYFQFAIQKENASYAMSQAFNEFKSAWFAGRRTLADMPFWRLRQRALAQFPDVEMRKAIIDMRIDLDDSRCYFSSSDENNDSVFAPSLSEALISASAGHSENLGKAVQIGLIFFHQVGHGRWRAIAVPDKCSSQFYIALSCKHSTRISKYLDDAVIEGDWILTRRPQSRHLAMDILRVMKASSDSPDEQITRPLIYDGIRVPGGWLGLPAFMPFIKSDARNYRVYALGKNCAKIDVKKIDGQLISSMPLSGEFIIEPELEADKKMPLWRRRVRFFDRAVPHPALGESAKYHLERLTEWKISQLKTPVFRAESPLLMEDGDVRCEHLLEAIYATGASGWEEVELVSLLQSVADGISIWHLLRSLHDAGLIEPRLRQSWKGRVWTLVKPSLFHIRYGKSSLVIVEGAICARLIDDFQKAVSELGGKYFRRSGVSVWSPPVFGAEIDDPVTLSRIMEWPLVEAPLKSDMMPLAFMSTLRTAELHVQAAIWDWNSGRFLPHVDSDGETTRLTRHVHPGGRDHDVYRVVTHRKTEFFLSRTAAIIAANVDARRPTFRKIADNRFICITNDCGLPDALATGLRRNLLRNGGPTEAGYAYPLDDISFRWLNQLLPGCFYSLSSDDDNSASQLVSAARHSGGKMRLQWRNGLLALWTGK

SEQ ID NO: 24610 - protein, 696 aa, Klebsiella pneumoniae BIDMC 46b
MKDIPWYIGQYDRRNYQSYFKVVAQETLDGWRVIDNPRKKFPRTGEVEFNGTDILQFRPQEWAAFQVGPGPRNKTQAKHTRRIYPYYDLSSGLSLLEARRRLSFDGITADGEPGLWAIRFGPDGFILANLAESKSGCLMLSRNQSVYEYAFNENGVISVSDTSECGKAFYMPDTDASPARVHDWTPDKQYIENVIQLLSCACSTTELASWLRVHSDEKSGKLNSGVNDLLATAQSLRSGELAKKLEDEDCLARQLTESLLSDGRIADLLERQIQRIAEEEQATLRAEQKKALEDEFSAERQQRRDVLDAEMATFLATQKNEIEHQIAQLRQSDEEKLQADFTEKQAKIELTLKHEKLRLEREIDRLKDVITDLCAQNEHQRQTLVSLTSEREALVASLADVKEHSAQAQAELGHMNAAIAEKARRMAYSAIPEVRLPTEAKIVSCNEFGGCVRGNKLLTPDGKRLMVQFLALMLAGECPLLSGPETQDFLAIAESLISSGRSIRQIADPTMISCEDLWVRAGNNMATPLYQGLLLSEASRPRTILAIIERVECSAARFWLPALKDRLHSGDLPRRFLICGTIENEDCEEAEKIKEQHLHLRMENVIIRNAIALSPLHLSLENHSELDPGPASQSSLPEKLTIADEMSAGRLDLANTLRAMRTAHEVAPLDDEHKAIHQKHLVDLYADLQNNELYAQ

SEQ ID NO: 24611 - protein, 1998 aa, Klebsiella pneumoniae subsp. pneumoniae T69
MNNPLESFESIRDFYITYLETAFRIGSPDIQAYRRSLLEQQGTLCADLFLEPMPRYQDYGLTISDLRNVAEGEEWLPGFTEQQRDAFIDLCLGGLLPRDKSDSTKGRFKLYTHQLDMLKRGVQPAMPGIVTSGTGSGKTESFLLPVLAQIVKEASGWPKSPSLKCWQPWWHNGVNTQPTFMREAEASARPKAVRALILYPMNALVEDQMVRMRRALDSREAHEAMDLHLGGNRIFFGRYTGATKVTGWLNHPRPGSEEKEKKEKKRVAGKITELREYLQSVEDTHREAVRQGIRDHDDNLQFNFPGVSGGEMLSRWEMQKSPPDILITNTSMLSTMLVREIDDPIFDQTREWIEHDPDAYFYLVLDELHLQRGTAGTEVSYLLKHLINRLGLDQEQHRHKLRILASSASLPVDGPEGKKSVEYLWGMFGQRGLPVSAAAKDWADCVVNGAMVAPAQDNTLHFHGDLNHFCNTVKQLQGSSLPSLQHWSNVARSMGVYHDEQCIEKLAQWVVVQAACMLEKGCYTCEKSLRATSINTLAARIFPSHSTGREGIRALIWLRAATDSWPEWFSHPFPDDIPLPRFRAHAFLRALEGLYAAPLPSPSSASTEEREQHFFADLTVESGLRYGERHYDNKKSRRVELLYCECCATLFFGGKPSSFSATDSRVELLPNDPDIDQLPEHAKSVMVERRSAEEYALFMPSVDRFWPRGEGTPADEDSFGKWIKAGYDPFTAAIQHTLSPIRSIEQTHIAGWFYYVPSGDFSSRKRGQSSSQSPGSALPFQCPACGTSYKYGKGKLSPIRSFRVGFAKTTQLLASTLMAELQRSGDRERLVTFSDSRQDAANAALDLESGHHDDVRREIVVRSLKELSASQCSHKQVTIQLEQLNKRRKELISKEIKEGQLSADEDKELGQLFGEKQRLSDLLLLPQADSVSLSSILEPEAPIAGNVLNPLLATLVEAGIHPTDRTGISPVPEPSKQKHDEETITFAWQQLFEKNKQTKWCWKKHPSYEDNLDVARKEISRDLKQLVGESVFSKTYFALEEAGWGYPCLPLANSCTREQLAVYDAMLRVLADAYRVAPSQYTTTETRWHVADDVKPKNRLRRFSDELCNHSRAKTLLLIGDFLVHLKRSGHQGGIIDIGKVHFRLVEATAPFWRCSHCGRVHLHKGAKLCTRCYAPLPETSSGNAGELQTQNYLGKRISYASRISRMRSEELTGMTGNPAARLRRFKSILIADDDDILPKGLEDFEPHPELDRAAREVDVLSVTTTMEVGVDIGDLRAVFQANMPPQRFNYQQRVGRAGRRGQAFAFVLTACRSKSHDLFYFRNPEKITGDLPPPPFLTTKLEMICQRLVRKIWLVAAFKWLREHVVDSGQSWPVDGDKHKPDNHGEFFQVHWLKENQANWLPRIRNALKETINARDEFAQACMQQDEIFYRTIIHPLTPECLIQDIKSVLDDDAMAGKGLAEALAEQGKFPMYGMPTRTRLLLTRPVSTDEHDVQFASMDRDLDIAIQEFAPGKYLVQDKRRYFTAGYAGMLKQSYKNPAEFFTEADEPGECRAMTVCPVCKVWVLVGSMTAVCSACGGVMDGAEQYSCYVPNGFITTLEDKSAKEDFDQTLTVASRVSIAEAYSIENAVSVPDSNVAIQLKSQTCLNRLNRGVYADKKWSGFNAIQGNLRVPFRKAGVYQPLWANHVWIDSNLLEADLSLKNRFTPMQESRKSFYLSAPKVTDLLALMLVDTPADLQLQYLQGALTPAFRAAALSASFIIVNYASKELLDTDPEEIEILEPRVQILKNGISAPILQMADRLVNGSGLCERLQQIGSSGSPIVLEVMNEIINDEGSYPLKEFLEPQHRDVCFQACYYCLHRYGNQAYHGLLDWRLGLDVIQLLLDKTYDAGLRGDFSSPGIIDWTVNAKRLAEEASSLFKGSEVKIVGNIPLIGISPQRWAAVLHPFWSYDGVFKANPELEVLSLEEDIVFTNTFELSRRMGTVMAKLCTTPRSSEK

SEQ ID NO: 24612 - protein, 361 aa, Klebsiella pneumoniae subsp. pneumoniae T69
MNSIFAREGDEIRVLSLFSGCGGMDFGIESAGGKIVFANDIVENACKTLAKYFPDTDVKHGDISQIQTFPSVDVVVGGYPCQSFSMAGNRKPSDDARTNLYKQFLRVLNIVRPKYFVAENVSGLQQLGAGSFLEQQVNAYRAAGYQVSHHLVNAKSYGVPQSRKRLFIIGVRNDLGQYFEFPAATHGKATLKNPHLKPYVSHGEAIRDLPLWPEGEFYERPHDPEGHFSWYFMSRNRKAKWDSPAYTVVANWRHVTLHPASPMMKLTWSNLEDGWKQRWDFSEEYEHVAIDSTRPKLEQARRLSWRECARIQTFRHDFEPIGDIESRFTQIGNAVPPLLAEIIFQHLFSGDGLKMNLRKGE

SEQ ID NO: 24613 - protein, 925 aa, Klebsiella pneumoniae subsp. pneumoniae T69; identical to SEQ ID NO: 24535

SEQ ID NO: 24614 - protein, 937 aa, Klebsiella pneumoniae subsp. pneumoniae T69
MSKKQHIIKERLRQMYLFGAEPFELMNCLKESQQKLIMAGAKADNLPKVPNKILHFLSALPPKAHSIVLTWFRTHVQFPEQGDPQKIIHEILLAENNDKDISSPKPLWRAILGFYVTQPCPDIVAQFLRGEEITLLHNDDPDGSSDSLPEQSTISVTDEDIEQCLFVSQGRDISPSDRIIPAFVAGLVAMLKGETEVAGQWVSQLSNHPLPLGQKFGRLISTFGVVRPQEEADNGIVLLAEPVAPDEINGDIDGVSFVGKVTKVLPSGVFFVSPVGLFIDDELRDLSDAHSHMLYPDRGEVIGFLNHFTNNVTHGELGIWQARHKPSDKTAQCALTDYQSRVYSVVKIPYDSGEPDAIREWLLTCYQPQDKSPTIFFLTDGLALRLPGDILDPKKYDFDVPLDSYRELSCVELRSQSITIVPQLPGLSEKYDCAPAITWIKRLLKLDYSSTDFPVFSKSHLQRLAHFMAEYESDNRSAYLRALTQLEKVAVSREFLDGSIQQLLTLPTIKTQICAEKQVILAQYESEQEQLRQTIASLMDKKAQLDAEINRQEKTLKSETNRIKKALRQQEAELDSRIRQTFEQASQAGIETLAQTALLRTMIAGSATPTPVIPSERITEPASSLPLPQSLLPPEVNEIKSKRVLQAAIEEQAAITGLSENLLFSLIAAANVVSVVGLTGKYAQKTVVSLANILSGSIWGEVSIHGDLFSISDLMKSPVLIRSTNSTSSMTLGDFLEHQQSSGLMTIVKLRGFNRMPPETLLPELNECLFSSEYSAGLCWKDQNHTLRHLSLSYPVLFVLTFAVGKSTFPLQGPVAHQLPVFMAEYSSTQVEQTEYSPAEYTSDIAPACVASKLWSSLYADAHPKDNQQQTMRAVLNALGYSDEKSQALAMLAFTIGRSTTEKITAEIEPLAPALIPYVQEITHGASVTVLDHLFQL

SEQ ID NO: 24615 - protein, 2067 aa, marine gamma proteobacterium HTCC2080
MGAFHDLRWFLQKYVTSAFGTNSPSFEEERKRILDEPGAFFQEPMLEPLPEYKTGSHVTELDQSGLPGLSAPAIAAFKALVSEGLVPDEFALYTHQQNMLKQSLSGKHAVVVTGTGSGKTESFLLPVLAQIVSEACSPKQRWAAPSIPNASKWTQKSLPKWSDTASQLRGESRVPAVRALILYPMNALVEDQISRLRSALDSEKSRLVLDEYVEGNRIRFGRYNGSTPVSGHPVISDGAGGSKSNLSKRGELRTKLKSAIKQSEDLDKKITSLQKLISHALAQNDGVEVKRLDVELDRLIDQRSFIPRVNVDSAEMFHRWEMQRSPPDILITNTSMLSIMLMRQKHPDYPDDRSDADVFDATRSWLKDPRNVFQLVIDELHLYRGADGTEVAYLIRLFLARLGLDATSTQLRILASSASLDGTDASSYEFLGAMFGLSLPQAKASFHIEAGELVYKPVAISGPSLGQKLFDALDTANDGALSPDLLDNAYEILSRFGSAEYLLQPFFDPVEERYRATPFSEVVKGWFPFASKNSAERAGGALLRVVGASAANPNLGNLNLPRLRFHWMMKNISGVWATGNLAEYGSDERRRVGKLSAEAATGLSKNRLLEVLYCECCGTQLLSGFRIPLSKVKTELSFLPGNPEQLPDDGSVVRTDETDYATIGVIYLLPTKDSAADSLEDWQQGSIARGFFGDPVSRAQASWQPAIYDFESGVVTLGTFENITKSEVHCLFFDLIASPEESVDYKAMPQKCPQCHSDYSRRKGGRYSPIRAFATGLVQMSLLLSKHLMMSLPKGSSKKLVAFSDSRQAAARLADDVEKEQWSHLIQHFVLDEISSNVKNSNFVAIKQLLEICDAEGISAGAKFLTRLKASLPDQSFREIVSVFEDYKTITEYPDLADDFKKDRVAKSRLATPETVRLDDVFSIPTPDKPLSGLWSNLVKLGVPPAGPDVRFQRWPELFDFTDGMPSLRPSDELTSEDGTLLRNLGQEIRKASWKAISGKLLYDLEAKGFGYFVIPPNSKVTPPGSLTVQTFSEICSSVLRILTEERLVNPYPFDQGGAEAWRDDEPNNKSRSEKKKRILNYLEACAVTWTTQMGTLQEAVRTQLQSAQHQWGVVELSYLWITVVDASSQVIECPSCGRIHLHDSGKVCSRCFKSLSTNDRVMTAGSLIDKNYYALLASSEDSNLRVHAEELTGQTTAQSQRQRHFREVFYENEKIIEDDSTSRDVNPAVDAIDLLSVTTTMEVGVDIGSLQAVLQANMPPERFNYQQRVGRAGRKRQPFSVALTYSRGQTHDRIHFDHPKEMTGGTPPQPSLSVGSDQAILARRLMAKEVLRLGFRQAGMTWEDSGSPPDTNGEMGVVRDFLESPKLKQAISTWLATNTVTIKKCAAEIARGTEIEADTLFEYATEKLLPLCDEILSSQADLDKGVASSLAEAGVLPMYGMPTMVRDLYFDLPNASSSNEPKTLDRDLSQAILEFAPNNELVWDKRLLSVKGISGHIRPSGYKNGNWEVKTPAVSSVQRQIFCKACRHFQVHEIKLEEVDEDSFVVCPSCGDSQAERYCAVTPVAFITDFKVDTPTSHADSNRSKAATSVVVSPKLIDAKIRKEGRAELSFSAQGEVYKVSKEMSGGSFKFKRVGVVSVPPKSSDKNPQKVFSDSQDIWVTADQSPDVSVRFFAPKTTDLLGIRANDGNGLGFFDVDRQVAARRAAWYSAATILQRAIALELDVDSTSIEIASVHFHSTDKSSGAELYLADEHPNGAGLVDWANRNWSALLLGCTSAEGNLAQMGRFLIEANERASLGESWRSPDALLKGFRNKNIHGLIDWQLGIDLLSVLRDADYMPGFSRDYSVALSSVNGDWVARATEAASMLAAALGEDENSVRRLDDDSPIIGVVSTKGSQTYMNIVAHPLWSYRPGEGTLISKSIDELLEVSGCNHVMLIDTFNIERRVSWVIGNKDNRDIFMTHDVMLEGTDSGADDTFFDMWMDTDIGDTFDWLDSSWMKLTPQDLWSAEDGEWLISDGQVTKGSAPELVSLRQIPGKKAAKRKAGGKYEPSKNPGLKIIARRVGES

SEQ ID NO: 24616 - protein, 463 aa, marine gamma proteobacterium HTCC2080
MARPPKGSLTSILSAFMKNTPLTMIDLFAGCGGLSLGMEQAGFTPIFVNELNDDARASYLLNRDFDLKGKPFNQCHELHSADIYELTQSRLKQLKKHLLDLGLITDHDSHTSLDLICGGPPCQGYSGIGHRRSYAVEKKDVPSNQLYEKMAEIIEFFRPKIFLFENVKGLLSSKWTDEGAKGEIWQDVWNRFNAIEGYTIHWQLVSAKDYGVPQNRPRVLLVGIRNDAMMSDLEKLQPIVEAQAYDIGAAVKWGFLPEPTKDYPDPKILLGDLVDDPVKDILLSGKYPNDFSTKRYPKSASHKLQKQLRTRPGSKSAERKGNEVTEHEYSKHKPSVVKKFAAMIENDGVIPDEFKTKKFAQRLLKPEWPPEGPNITATSLPDDYVHFSQPRTLSVREWARLQMFPDWYRFAGKRTTGGTRRAGNPLEGNFDREVPKYTQIGNAVPVKLALEIGRHFATKLLNQ

SEQ ID NO: 24617 - protein, 1000 aa, marine gamma proteobacterium HTCC2080
MSTPLNLYDEWNALLLKEYFGPANDGEQVWIQTTREELDDFGFRLGGTAGLIDAVKTGPSWSNWSPKHIVLIVNSLVRQRNSAASRMAAYKDPGRHEELYENLDAPAYMPYVALFVLAASEVGEGGYYATTAELSDGFFESSEDSRELLCSVWNDLRDWTNDLAGEYGRFSSFKIGKHAYVGLAKAQALVTQKDRIELPKIFGRLGLKPAQQFTTSLTKQIAESVAFSEQCSNGMREACNDLSTYEDALNEIFSNLLNEWEETTGERRAKLRGQALAEIPKLQVMLRDTFDGWSICWRSRLDGNFENIQLKIGDSPYHGDTDPIRGHIIFRSSQPNAQDGAWQLLNDGAQSLASIEANVEYSGDDRLPETISLELSKLSTRGLCWIDTTEGSCTALAEAEMPVSGPLYLLSRLTDLSQQLGNELGSKFERIADTDGLSSKWGLWVIEHVDDLRPSERSAVQRLIGDDSGAEERARISFYGGCVIQRAGGRMYLDYDLPHVEVQMPPNSVLECDGLTITELAPSLGSKSGQKHVSAKHYSLARLEGSNKLQFELSVKQGSKKLCTKRLKIASEAGAAVGLHKDFSVGIYGEPRLDSNGIRGYTLPAEDAVHLTPNFDRYQKPSLFDSWKIETSPTDWLSVQFMDALASKGSLLFGEAKQLISRLNLSSSDKWLSPIPFLYDMQSLGHLEIQTDQRGHLIRIHACEPIIYEVCDTTNPNLSRWRFSGTFRQIVWVNLIKANEVRVFALRGILNIFWETSDSRSLHSFARDNNFFMVANPAANILSWAGSVSGLRSRIGERTIAERSSPSNLERFNPNQARFTTDALGSMKVDASRQVELFRLDDPIIPAMRVSMLGSINKEDRATYSYIEDSSWAVWLAFTSFIDFASTLPGYPALSPWPLCYRSETNSLILPARLRLPSIVERALCASAGLLPTKVKCLTSDNSPDDRFELFCEESMRKVASVPAVYHDMAEGTWLVYEGVPEYIASILASKLDCKLWIEL

SEQ ID NO: 24618 - protein, 1983 aa, Massilia sp. Leaf139
MEDPISSFGAIRDFYITYLETAFRIGDPGIQAKRRELLEQTGTLCTEAYLEPLPAYKDLGLRADDLVSDKYGKEWLPGFLPQERKAFAELCLAGLLPADGGDPAKGRFKLYSHQLEMLRKGVGSGTPGIVTSGTGSGKTESFLLPIFAALAKEAMKWPASPNLQKWAPWWRNESGAPTFQRETHESPKRPKAVRALVLYPMNALVEDQMVRLRKALDSDAAHAAMNRNFNGNRIFYGRYTGATKVTGWLKHPRITTAAEQKKAEERTGELRNYFRKLEETQAAVQQVLEEDGTDESLPFNFPRVPGNEAVSRWDIHRTPPDILITNTSMLATMLVREIDEPVFALTRQWLESDPDAYFYLVIDELHLQRGSPGTEVGYLLRMLLSELGLTRPEHQHKLRILCSSASLPLEGQAGQQSLDYLWGLFGKAGIGDGATRQDWAGAIVKGESPAVKQETFNGNVDVLCRALREAKGQAGSGSGFPSCGGWKAIATALEIAQQGRSEEEIAADCVAKAGRLLRSGCAVGADGNPRATSAAGIGHALFGPGAQSHEAAELLVWARALSDTWRKRFGHSLEPVDPIPRFRVHTFLRALEGLFAAPLPAPAGLAAPERAEYLFGDLSVDSGVRYGTRKTGEKRARNVDMLYCECCGVLFYGGKYARPQGQLDRIELLPNDPDTEALPERAKASMVEQRSAEDYSIFMPTVSRFWPLGSEELSEEDAQGTWARAEYDPFTATIKVLPPHKEPGNGILGWHYLAEAPHFSGDSRRGQNLPSDPGTALPFQCPACAVSYRFGRGKTSPIRGFRVGFAKTTQILASTLMNELRRTNPGERLISFSDSRQDAAKAAYDLESGHHEDVRRELVIRSLEGLRQNLASPGSIKDELAKLKAAIQQRAINGQIDEEFSRLSEEHKNLSALEKAAGTDCVAVADILEPAAPQPGTRTKAVLNALVSRGIHPIDPTGISPVPEPSFGKQVTFAWQQLFTRSGKDWAWTYHPGYVGELAEGAEKIAQDLVRLVGEVLFSKTYFAVEESGWGYPCFPLAEGETRESQAPFDAMMRVLTDSNRLDTSPYAYKQNPWNSPQDATRRLRTFVQAYCEATGGTVDMVLQRFLDLLAQKGHPGGIVMAGKVYYRPLPAEAAYWRCSICGRVHLHRGAQICTRCRSPLPQQASGKVSELRENNFVGKRVSESHGVYRLRAEELTGMTNNPAARLRRFKGILVQDDDDILPAGFPQLPPDSKLDRDARIVDVLSVTTTMEVGVDIGDLRAVFQANMPPQRFNYQQRVGRAGRRGQAFSFVLTVCRSKSHDLHYFRNPEQITGDPPPPPFLTTSLNQIAQRLILKQWLVAAFRNLRLAHSKKWPGDELKSAPDNHGEFFKTATLKAKKAEWFPKIRAELEALASQRDRFALLCTQGDKARADAITAGLTAAAVMNEVERAVNDPAMEGKGLAEALAERGLFPMYGMPTRTRLLHTRPTSTKYDAVSFATIDRDLDVAIQEFAPGRLLTQDKRRYLTAGYAGSMIYQDSFRKQSFHSMPGDLGELQNFAECPVCQSWAPAEAVAEGAVCKSCKSELSGALEYKTYVPRGFITSLEARKPDEILDEASIRPNRTVTAEAEDIPVQLWTGSNLATGLSGQSRVLRMNKGQSVENMFPGFTAVKGDLEASYVAGGVRRKAWVNGVYIDNIAAKADAASPHGLKNRFKPGETAVEGFYLLAPKMTDSLVLLPSSVPAHLHCISSREDGTRLLTGAFRAAALSACFMVIDYASRVLLDVDPDEFQILEPRVKRRDDGSFIPFMQISDDLVNGSGLCNRLNQPGATGQPIVLEVIREILSGQGKSPLPGMLEEGHRSKCLTGCYRCLHRYGNQTYHGLLDWRLGSTVLKLLLDGHHTAGLDGDFTAPGVADWPAVARQLAEEAAGFLSTPVTMTGNIPLIARGHGKWAAVIHPLWNWDAVLAANPELEDMYMQSEGMSAVTTFDLSRRMGDVLHRLKSS

SEQ ID NO: 24619 - protein, 363 aa, Massilia sp. Leaf139
MNLNTIEMCAGAGGQALGLHNAGFVHEVLIEIDEFACKTLHHNNNKLGFGWKEIVEGDLKVFAEQRAAEFHGKIALVAGGVPCPPFSKAGKQLGAKDERDLFPTALEIVRKVQPQAVLLENVAGLMEPQFADYRKLIQGQLLEMGYASDWKLLNASDYGVPQLRPRFILVALKEPLFEYFNWPEPSQVPTPTVGETLFDLMAGRGWSGADAWREKACFIAPTLVGGSKKHGGPDLGPARAKAAWYKLGINGHRLAADDEYPHAEFQGALLRDGRVREGFENMPLLNVRMAARIQGFPDYWDFAGSKTHAYRQVGNAFPPPVAEAVGLRIAHAIREHERHKAGLAAAAQQAALQETPELRCAAG

SEQ ID NO: 24620 - protein, 940 aa, Massilia sp. Leaf139
MAWQSWTLSDWNRALVEAVFFDSGRLNREITRIQTSEKFLAQCTGDPACNPLDAQRAFIASFGSTSDCIRRRFKWPQPSPSRTAKDNIPEVFAALYLTLLAASADEETYTEGNFRNRFVELLKPVNVAAPNFSVLPKLWLHVEDWSRLRAKQLGDCRILRLPHPGIEVLIGHSKRLAFPAYRDEIKLQSLLHSRKLSSGSDFRHIASAIASLPKEFSAAFLEEFKIFQLLVAQARYGEAYNSPLWRAVQAITWDDDQATSQRIGSFCLGVDAADPGWPEFYLLTDERGRSSLGNAAFCKNLPVATDYLYAAHLPDCASWTPAQLLGLTASRPRLAQARLWKHLAAGCAALFPSAQNSLTSGGSYYDGGPACLLVHEKLVPAIRSSSSHLGLKPAEAKAGGAFGAWTVLFFDSISTASMARLAEALPEAARQALPGSWRPPRISCSGGAWYGQSLLLSPASTPLFGLSGAASGSYELIGADTKPVTGQLEEVDGKFRIPPSALAAAPAFDTAYVSLSRDGKAMEGMRVPLAKNIPMAPPMRLADPNAWLADGPCGRLAGLAAEPGFADSPAGQARMPALHPRFSRSELAFEAATESRDLDAVPDPYGWLCEALALRFQRRQTLSYADLSSHLRPACAAADARHWAVRNLLFSAGWIVQLQKRSSPHPVVAAAPRTIALYGTAGSMHTARIAGMFPESECALLRASLGPAESAVRLAPAGDLFGIGAIQVELTSEARIAELARQFELEILSREPGTPPVFLPPRVFEPAGGAADAMRSAADAESWSPAQRKWGPAGGLGTAPVPGTIVRISRQQRRAFWVAAPGGWLETDSEAWAFMIGLAVENKPVGQVDAAGNCWLDVRLGRLPLPLVRWWMHWGGGCAAVAPSGEIVLASGSGAAAWSDLRSWFAAIAAAAPSQQCHDAALERRRLALRLRKAQQPAGY

SEQ ID NO: 24621 - protein, 872 aa, Massilia sp. Leaf139
MFLTGADEHELAQCLKKKKLHLLKAGARADNLPERPEEQARFISTLREEPMACIRDWFYANANFEDLPDVQDACRILADEAEAAALDRGGRRLHWRSVLAAFVQQRNSHAVDAFLQHSSVARSPVLPQAMKDEGIIVVKPSHAREPAKSSAPDSAAAGKIAGAIPSMRPGSLASALPLRLSEVLLNDKSVLTVLGRRTTVLPTGQFFIKISGILLDGTPVYLTPDESELVFPDSGDATGFPNTVHVGSSSAESLSVWQVEHKSPDKKVQYVVTDFMSHTYEVFDIPHPSSEPDLVRDWIKEVYKPAHDVFPVFRLQDGPIVKLPAEVTDPRTANFDAALPLYREHPTVKWSGRTIVIEPFPASRLQYDCAPIRTAVRKLFRESAELSGLPVLTKRQISELADAAARHSTDATIKQSVQRAKARLEQLFDNKEELRSLMEEIVLLPSVAEAIGAEKTRAAAAVREEAESSRAELGKLAAEKKQLQSEIENLKQARKKESAAAAREIKQAFERAGADGLKTLAELSVFKNILGLSAAHPAGTAPAAQPAEREAAQGAALEQPALPKHIHIASAEQLRPVLASWQLHNGLSTRMLQALIAAAATQGVAILAGTRRHEAAAALASTLAAGTSCAVSVSADMFNTSDLMNAPATVTDAHGSRAGQLGAFIARQQAAGMVSIVRIRGANRAPPESLIPELLEIAGTPVGGSAITWARKDGSLQLITAECPVVFLLELAHGRSVFPLMPPLAWEIPIIDTDAPWADYHEPEFEIPSPCAAIAPELFAAFSPPGPVPLPSARGIPRNAIEAARKMKGACMAAGLGASESALVPLVALAHCRADSGTLAAMIDAAGGELAPAFKAYAAEAAFTQTFDMGAV

SEQ ID NO: 24622 - protein, 2047 aa, Methanosarcina mazei LYC
MNDPIGAFDEVKANFIRYIKTAFGTRFESIEKEREEILTSSDVLCQDPWVEPLPQYKSSGKKIKSSDRNCEVSSKDLGGALTQKQIEDFKEFVSCGLFKKDIPLYTHQLEMLTKSLQKGKHCVITSGTGSGKTESFMLPLFAYLIKESSDQSIWKKPAEKLEHQEDWWCAEADCWREEKLQSGVSCRVPQRKNEEEAKETGRPSAVRAMIIYPMNALVEDQLTRLRKTLDSESALNWFTNNRRGNRFYFGRYTGVTPIPGNEFEPPNGKRLKPDKDRINRLRDKLQGIQKVSENAVEYYKSLSEDDDEATKEAKRESVYFFQQLNGSEMRSRWDMQDFPPDILITNFSMLSIMLMREEDSKIFERTREWLDGGDDRVFHLIIDEIHLYRGTAGTEVAYLLRLLLLRLGLSPESPKLKILGSSASLGEDDGEAKKFLHQFFGFPKDTLEIIHGEQEKQNSGLHEDRKVDWEKLANVFCSFVTAKENSEVIVSPPLDAYKESVQELITIFGLQKKENEEDWKASMVAVVESESLGLGNRMLHACSPEEVRTRAVPLEYFGKRLFFPLYDEEKTRTVRKKIRAAVRGLFIVRELCDKFRDPTYVGEEFAIYVKNKYGTQSKLPSFRLHWFFRNIDGLWAATRLVDNSSDSRPVGELYTQPYIMSKDKEPCRVLELLYCEHCGTVYLGGNRLLTGENGNKLELLPVEPDLEGVPDKGVIQIVEMRNYKDYAIFWPVGERQSLHPDSIGSWPLSKEKINDYKGSWKEAWLDTRTGKVLLEQTNKMGNSWVKGYLFVAVKDKSLLDINEDLETSLLIKALPSHCASCGADYHKKKRVSPIRGFRTGFAKVTQLLTDELFSQLPPKSQKMVVFSDSREEAARIAASVERNHYYQLFREIFNEELRVFAEGKPNLLGDLERNYEYLKDLEEIGNASEIYSKKSELFLRDNKIYQDKIWADLLTLKDEVPKNLPAQLRKKREKEYEEALARVNSIKKNGEERKVILKEIIAPYRDADEIDPGALIRRFVMLGVNPGGPDISSQNLEVYIDKNEGKRIRRVISWKDLFDFNTGNWKDTTDKSEIEARKIILLKVREETCKLLFNTLYFGFESSGLGYVKANLSPEYLEECAQSLNLDPETFLEVCDSGIRILGDLYRHEASEYEQTEWTSYQVAKRTKRFSHFVKSLADHLGISEDSLGNTLFKALRNSGHHKGVISTENIIIKVSSEDDPVWICENCRRPHLHASAGVCTNCGNPLDEEPSNTCKDIWDENYYSSLTLQDRESLRLHCEELTGQTDNQGERQRQFRNIFVNKDDAESEYVKKVDEVDLLSVTTTMEVGVDIGNLQAIMLANMPPERFNYQQRAGRAGRRGQAFAVVTTLCRGGRSHDDYYYKDPSHITGDEPPLPFLAMGEDQEQILKRLLAKECLRVAFRSAGVRWWHGPKNKDVHGEFGTPTLWQENSEISKKVISWLKTNDYREEVINALLVGSDVSDIKSEMNKYLSYLGSELVNQINNAVECSEIAGDGLAEKLAESAALPMFGMPTRIRSLYHDLPINENEPRTVERELDLAITEFAPGAQKTKDKAVHTAIGFTAPVVRRGPRWVQAGDTNPIPFVRWVSRCRNCGNIETFEVETTKPETCNVCLQAGEEEIEYYRVATPAGFRTDMSIGSDSIEDQPYFGMISTTSEKIEPKIEQERFNCTISFSDNCPMWRINDNRQEKEPKLFRGARVNTWNKVHGIPIKLQDQWIAEQYMAKNMERGYEPEYEELALASRKITNVISFMPKSVKRGILLNPFSSGEMVKAAVYSAAFMIQSIIAQRLDIDPEELDICRIQGTYVPGTQELVGRVIISDSLPNGSGFAKWAYDNWEEIESEILSTSPHNSYMGKIISEGHVNGDAHVPPCRTACYQCLFSFRNMSYHGLLDWRLGLSYLRLLHDLNYSCGIDGNFRYPELQDWKNTAEMEAKKFAKSFGFEYQENDDLPLPYITRSEKDLKIAVIIHHPLWDANDRTDILAKCFALAKHKGYTPFGIDTFNLVRRQSWCYSKLQKEVSEFFQRGET

SEQ ID NO: 24623 - protein, 489 aa, Methanosarcina mazei LYC
MPKIKNSARNKFENLKWEYYKKIQEPINGITKSQVRAYFGLITWIYEKEYIQSGEEKLNAHFNALETALNIYDKKRKKDEVVSSFKENLHVWRESNKKFIPRDPGGEPICRPPVRMITEWEKNGLTQISLFSGAFGLDLGFMAAGFDPRVALDIDKSSSSTIKANLPDIPFINCDINSVTTKKLLEEAGLGIGEVDVLVGGPPCQPFSTAGKRLGLKDPRASPLREFIRVVKEAQPRCFVMEEVPGLQSARLRHVSIAERSNRTLLPDEESGSAFKLITEMLKETRYNIKYEVLNAADYGAPQSRKRLIFIGLREGFPCMPEPTHSNTSQLKIGSKQPLLPWTTLWDVSADLQGCNQESASLSNKTREYIELVPPGGNWKTLPDDTKEIAMGGAYTSGGGKTGYYRRLSWNEPSPTVVASLTQMATLLCHPEESRSLSIDEYKRVQGFPDDWTIPGTVPTMYKLIGNAVPVHLSHAIAIKVKEMLINEN

SEQ ID NO: 24624 - protein, 697 aa, Methanosarcina mazei LYC
MGLSYSGWNDLISRYYFNEKMAGREVVLFANTDLIESLGKPFEADFNDFIRKLKIGPIYLSKKYKDIYQIAYDTYKYGKKYNFPYPPYLAYLALFVCTATIDGNFDDKAYYPRLAKLLGEEDRYPKARTSDMKYLWEDLEKWSKDIRGEEFGKFAKRIRGGNIHIGIPLSQTIISEKERANLPFFFSKADLDPGDLPSDEALKAKLKLYGDQYFQKRTLGLIDSSRSDHKYLSEALLDFILEELENWDGKISSTIVERYVEPTLKSERHSEFTKVYLRICLTEDFARYIISLRIKTKEEYPDNDLEFKVEGRETKFTCSETNQPEWSRRLEEQVSKPNEVADDSQFNWLEGLELRDEDNKWLAKLRPSSVRVFLPGNFEGLNEDWVESQHLEYGCKFLVACHDLHKDQISEWGQSNTESFEEKKIYGLPNWSLFFGKNAYNSCSKYEALSLPQKVRLRLKGGVKVGRGNQYLNFAPPYLVLEGAQGDESLTVNGIKLFTDQEEDIRRYTLPENLEIGETLTVEVTKAGEKICNIRTIKLVEPFLIEDFSQIPKRNHQGNIIKEIQAPRSFAQGAIVYGCELHDHVPIGLPTYLSHRIIFLGATPGQFVNWPDDELPRDWNPVWGIAKFKQNWEVNFCGSVEDLKKNPSTKEKVDCRKKIKKWREYIWGIRRTVKDPTLPILKELWITYKEVAKNVRS

SEQ ID NO: 24625 - protein, 1960 aa, Methylobacterium oryzae CBMB20
MLDPIGGFDRLREFFVSYLDTAFRIRHADLSDTRGALLRSAGHLAAVPFLEPVPRYRPCGYRLERLAEDFAGNPIGHLPRPARTAFAELALSGLFPGRDATGAEVGRAGTFDPFTHQMQMLERGTRPGRPGIVTSGTGSGKTESFMLPILATVAAEAVRWGAPAPGYLADRWWTDAPERFVPRRTGEAGNRPAAVRALILYPMNALVEDQMTRLRRTLDSPEAEAVARRRFAGNRIFFGRYTSATPVTGHLQHPRRAGDAREARRVERRTEQLSRRLTTIEEDREKARLFDEQEAARARRENREAPDPTRYLFPSTLGAELCTRWDMQATPPDLLVTNVSMLGTMLSREVDAPIFESTRAWIESDPDAYFFLVLDELHLVRGSAGTEVAGLVRALVERLGLAQSEHRHKLRILASSASLPTGGPEGERSFRYLDDFFGPFGTVAAPGAPAAATQAFWRDCIVPGNPELPPAPAALPLDPAPFARLAELLGASGFARTVEPGPAIEEAVSAAHRALLGEPPAEFGATVRAAVEAAAAALVHACTATGDARDVRATGIDVVARRLFGEAGLSAEALRGLTILRGLGDRAAAHGWQAPRETTASFRIHMFVRSIEGLFATPRSAGGATVWDGVTVERGTTYTELAEYGFRRAFELVYCEACGEAFVGGMRGVSGNGAAAVELLPASPDLENLPDGAASGHYEDLSYDAFAMFWPSRREPDPERPGGELWEPAVLDTRSGLVSPPNGEIDDPARVPGRLYRHTGAFSHHRRSGSRGTAGPDCCPACGTDYTQRKKERFSPIRSFRTGFAKTSQLLASELFDLLHASGVAAKAIVFSDSRQEAAKAALQIERRHHQDLRRRLLIEMLRRQRDAVDVSAERRRIQEAMQLAVAEGRFDDVGPLTVRLQALPTNTDPRRIPLRSVVERAIADAGADRRTNPMLAEMIRLGVHPTDEVGISDIEGFDWQRLFEQSDGAWSWRTSGAQAAELQTARDRVYQKQIPHIDEVLFAKTYFALEETGLGYPTLFAEAEPDADRLDAYLRVFSDAYRVSSNKWVLAGDPTLWPSADQVPQTNRVRRFAAATNPTDPVGELARVLEAFRARNHPNGIVDAAPLHVRLSDRGDPYYRCENCDRVHLHRGTGVCTRCRSALPTERTGVVEELWNRHFLARQIDRGLAEGTGSFRLRCEELTGQTDEPAERLRRFKGIFIHDAASPTPELDRAAAEIDLLSVTTTMEVGIDIGPLQAVYQANMPPQRFNYQQRVGRAGRRGQSFSLVATLCRSRSHDLHYFRHPESMTGDRPPPPFLATDHLDIPQRLLRKVWLSAAFSVLRDEDGPRYLGDDAPPDVHGEYIPATAYYADGSTWPDRLRGALRQTIDRRDGFAAVLAAGREGRRDALLAAMDPDVLVARITALTEAGRVYGGGFAQFLAEYGLLPMYGMPTRVRALYIGPKAVNAGEAEWDTVDRDLDVAIYEFAPGQELVRDKRRHQSIGFTAPIQNPRQLPGTQFFPPLVPSDRWWSERHYLAQCGTCGGTTSRPDLPLTDVVCEDCSTELDANAFREFVVPAGFRTSFRPLPVDEDSRVESVGRTVTAAIHRLEVEPVAGTNMAVHAGTGATVLRLNEGPRDAGGGRAGYDVRHVTQRRLGLPTGAGHFTVLENQFVATDVVDEAPTRWQPGAIGVEAGRRLLSRKQTEAIYIGLRTIPAGLGLDRIGRQTWQTSVRAAAISATQLIVQRAALELDVAPEEFEALEPRLREGLPLLQIADFLVNGSGFCRRLGESEADGRRIVVRLIASMLDEPADPLVGSYFAEDHRADCARACYRCLQRYGNRSYHGLLDWRLGLGFLRAFVDPDYRSGLDGDWTRHRELADWPRIAATVAEELARQNSTERTTTTLGRAGLPALRVRRAGNVEHYLVVHPFWRTDGPARAAEPLASAIAQAGGPVYFVDAFDAARRPVKALENARSRPRDV

SEQ ID NO: 24626 - protein, 340 aa, Methylobacterium oryzae CBMB20
MEAEGLEVLVGYDLDPACRYPYEANNFARFELADVRALKASDLEEAWRGCDVRVLAGCAPCQPFSRYNRRNAPRDERWILLEAFGRLVDETRPEIVTMENVPELVRHEVHGRFLDTLRDAGYLVSEHIVECTDYGIPQQRRRLIVLASRLGPIELVDPGCFGSSPATVRDTISPMPVLKAGQADRCDPLHRSSALTGINHDRIRASRPGGSWKDWKSELVAPCHTRREGRGYRSVYGRMEWDRPAPTITTQAYAFGSGRFGHPEQDRALSLREAALLQTFPREYAFVPRGRPIEMRTIGRLIGNAVPPKLGRVVGRSISRHLAFRNHRIPTEQRPEQAGP

SEQ ID NO: 24627 - protein, 925 aa, Methylobacterium oryzae CBMB20
MSRRSNVAPPTRLAATRNLTSSVDDRCATCSIALEECPNKRVRRGNVARGALPSNGREWELALVRHYLRCDGPFGASPLAFVDATGEELARAVGADAAHVEDVRSAFLGSFGSPSLLRDVLSGASRPTYSGVEAPGWFRYLFLSCLVAAAETGGCNAGVYRERLRTLLGAEATISDLRGLPLLWGRLAEWCDARRLEGEPFRRVVLPDRGHMTQIGESVRIAFPSRLDRLRLEQLAADWNAAEFTSPTCVIKFVRNRLDGLPWSEGFVAAFLDFGMRYRRGERLLADHPFWVLIRRTLASIGEGDERSAAGISIRLIAGLDDETLVELSARTQIPGLGLRPDAEAGFSCTVSTEAMIEAVGAAARLGGFGRLRGVVAALDRGVMPFVETSWGVWAFLASPDSGPVRILGRHGAVRSSGNPGIWQAAADGWWLSSQIPIGVYEEILGRIGKPLEPSDRLRSLRIEGGIRTGACFLGRPTFLPVVAAPDGATLTLQASRVERGELGLAAEARGPVPLVAEAPVAGAWRLTAREIEGSGTENELRLSFVDRAFEHNVGAGSAEGWENEVELVLLPGILGSRTTDVPPAAPSEDETCRDDLLEAVYAGGVGGWSEADLFPLLRRAVGGGGGGPRPWDVLRALREGGWVEPRLDPRWGARRWILRPMRLLRRDDRTAVLDGAWCATGLDRFEAACRRAGAAAEVRPGRGPWSVPTMVVRSADLVAVAAATGVPIVDLPRIGAAPAPACWPSTIHPLAARMVAGIWCWERGRFLAAAGGATGSVRLERWVRPRRDARDVYRISGSASGDLVLESRTAAILEAHRRAGIPLLHHAENELVRLRAEGNLPAEIVGALRFAHLASSGPIRRETGEWTYAYPCSRDDARELVAIFGAAVAGSAPAPDHARYRLSRKLGPRGRALLNPAAALRPVL

SEQ ID NO: 24628 - protein, 684 aa, Methylobacterium oryzae CBMB20
MLAKRTDNRTFHLGRCMFRNERFTRLEPLLSNAGDGWVAVTDRRRTFPDAGSVFTLDRPAVGSSEGSLWLFRCEPNGRGGEDRFVAVDLHEPKEILDFGFADAETARRAVVERGLDLPHTPTREVVVVFAVDRAVRLELARSEIDGLWRPAADVALETLEVHRFDPARHRGARIGRRAFLLPAAEFEAPSGTIDWSLDLVFLPKVLRRIRRTIPLQSGGELATISLRTIERLVTALRDGEMLAGDPHSNEAMLARLRDATPVLSASLTAATELGDTLLQLPAVQTRLQEEIAALHARTVADLRRELQPMVRAEIEVEEAAARAVLRDLEEQVAAAAARRDESRRELAELSREREEHRTGLAGDVEALLTTVARTADAFRQTTDVAVRFGIADAAAEAAAPWSVPAMETGEDLEATNLAAALTARERSAGFRQGALVELDAVARSGGIPVLFGEEAERFIEAYAACVSGGLARRMALDPATLGLDDLWRQSVGGGPTVLARAWSSAVRNPQRVELVVLDDLDAALECLWLPRLVARLSSPHRPSNLLVLATLMESGPERGPSLEVLRSAVPILAGAEAGAAAAAVASNPPAPTRLVFVAPPPVDPASLQRLAVDLVQSPGIDPATAVRAAALLRSALPTMGADAAFAFARDAAIQIRARTHADPGGSALERSFARLARRNSSPRT

SEQ ID NO: 24629 - protein, 1963 aa, Methylobacterium sp. AMS5
MLDPVGGFARMHDFFVSYVDTSFRIADPAVARERRELLLTPDVLATEPLVEPVLRYAANERTLEQLLGTEILAPLSPEGQRAFVELALSGLFDGAEAEGALKRKSPYPPYTHQVRMLERGIRPGHPSIVTSGTGSGKTESFMLPILASLASEAVKWSSPEDGYLGNTWWRKGQRFNRRKSQRTGEAADRPAAVRALILYPMNALVADQMVRLRKALDSDAARAVMDERFDGNRIFFGNYTGDTPVTGHETHPRLADDEVERNRRTRRGAKLRLAMSRMEEDQRDARAHDARTRSKSGGKSFEETKYIFPSLDGGEMVSRWDMQACPPDILVTNASMLGAMLSREVEDAVFDKTRAWIEGDENAYFYLVFDELHLVRGSAGTEVAFLVKSLLTRLGLDDPRHRHKLRILASSASLPMEDHAGEQSRRYLRDLFAPFGTYAGPGAEGRTDAAFWSTCVVPGDPEKVDAPAGKVDPAPFRALLATAAEDSRLVASYGETDANASAVRALAESLGLPSAATAEAAGAVSARAAALLVRGCSGTGQARATPLSDIGKEVFGAADREAVRGLMLARALPDGGAWGAKAPTGTPSFRVHTFIRNVEGLFGAPVASDDGKTRFTDLTIVRGVTHGPPGAGGAQGRRLFEMLYCEACGDLFLGGQRGQATADERQFELLPTSSDLESAPDRGAPELYDRMTFDQFAVFWPSTARPVLPEGGWDEWQTATLDAVTGVLSAYEAEERPGLVRGHVYFQADAAAGPGGRKTAQPFSCPRCGTDYSNRPSTIRTRSPVRAFRTGFVQASQLVSTELFEFLHAIRTEDGAEPKSIIFSDSRQDAANQALEIERLHLRDLRREVFVDSALRMIEAAGKSYVSEEEKERIEEEMIVSGRRKELRKLYAEWDKAESDSGVNLATRKVRVDRLLQYRDDEDGSGGNISYVMSELVRLGIHPFDEVGRKTFKGQPWYKAFSLRGGKADFASNLTTIEKRELGTAVLKAQSELVDDVIFSNTFFALEETGLGYPSVSAADGEEVDRLDAWLRVFAGAYRVEENQYFSWERNKEWHRLENVPQRNKVSRYARAVFGEDAPARFSQVLVDLEREGHGGGVIRVGKLFLRMSDAGDRYWRCGSCERVHLRLGYGVCTRCRKELPREASGTVEELWNANFLGRRIVRGREENVRRFGIKCEELTGQTDDFSERLRRFKGIFVGAEGEEPDALLKADKEIDLLSVTTTMEVGIDIGSLQTVLQANMPPQRFNYQQRVGRAGRRGQAFSFVTTFCRGRSHDEYYFRHPRAITGDAPPPPFLAADHLPIPRRLLRKVWLRAAFARLRDACASAGQPYPGDGLVPPDIHGEFVPTDAFYAEDSPWPERLRGALAATEASMRRFVEASVLSGEHRSELLGWAVPDTLVGEILELRDARPAGRAGLAQFLAERGLLPMYGMPTRVRQLYTGLVETGTKTNGQDDWDWSTMDRDVELAVFEYAPGALLTKDKLKHRVIGFTGTLPEPERENANRIDVKAPLNPWVSDRAYVARCASCGSAAYRPQRPDERVACDDCRADVHPDEFAWYVTPAAFRTDFRPEANKPDDVGIMSTRTVATVLRHGEGHDCGNVKVWSGAGVTVMHLNDGAAGEDGEPTRFAVQEMSDTWVLKGQPALRATNLVCQAVDTELASEEERGRWRDGVPVEETFGLVARKETDALYLELLSFDRRLNLDMVAKQGRMSSTAARAAAVSATHILVQKAALALDVSPDEFEPLEPRLRGTQPLIQVADALINGSGLCRRLGEPRADGRPEILHMIGEILGAAEAWPMNVLLEPTHRSNCHTSCYRCVQQYGNRRAHSLLDWRMGIAYLRALVTTGYACGADGNFDEPELSDWLGRARNLAASVAAMRPGSLRVEPAGRIGLPCIVEGAGEAAARLVVVHPLWRTDPGAVGRLLGAEARPTDRCVNTFELERRPLKALELAKVREPAPSFNEA

SEQ ID NO: 24630 - protein, 315 aa, Methylobacterium sp. AMS5
MPKAVSLFTGCGGSDAGLLAAGFDVVMANDVMGYARDVYLANMPATDYVLGSITDVRKFPKVDLLAGCYPCQGFSVGGVREADRKINYLYREFDRALRDIKPKAFIVENVSGMRNSNNQHLAVNQLTRFRMAGYRVAWSVLDARAYGVAQERTRMFFVGIRSDLGLRYEFPEPTHSLPGEDVPGLPPCPTIRDRIGDLPLWPDGEYDDQPFHWYYLSRDRWRDWEQVSRTIVANSRHTPLHPVSPRLKRIGTDEWRFVEDGPARRLSYREAARLQGFADMTFPETGGTRLRYRVIGNAVPPPLFKAVASAIPDIW

SEQ ID NO: 24631 - protein, 851 aa, Methylobacterium sp. AMS5
MEWERALTHHFLMVGSGGDASPIRSFEVSDGTIAEAAGLSGPDARELAMASFTRHVVQAGGLPNALRQGLHPNMDAQGLPGCFAYLVLTLYVASLRGNGEERNGDFRHKLRRFLGSERSFMNMPGVAGMWASLQRWLARRRLIDARFRELVFPEVPVKWSHIGISLKFAFPTKTDATLMASFLHDKPAAAGEPRRLLAEFAPVIDRGRRSAGMADAFEDFKDAFAAGERLLEDHRFWRLVRSCSTGGRAEASSPAFVSCGFDEEAQPVFSAALEDGTKLSPGPRTLSEAVSDLTAAGGPAAFSPAYLVFRQTGFGRWKSTEGFERAGPRVRLGLPRAAHRRLQRGSQRFVESGDWLFTAEPVRVALAEEMVASFTAAPSSERLAAISVSGGVRTGGLWLGRPAFMPYVDAGGSELLVRAGPGAAGTVSLDCQGRDPERLQADGPVSGTWFLEPPGGRQRSCRQVAFAPNAQLHRDALAGDEAGEILLDWAGGSAQARFPGQLPAEAGWSQAQGAMSDLVEAVYAGGRRGWDEGDLVAIVGEAFGEAADPWAMLRVLRDATVVQPRLRHRWRGRAWTLQPPALMPWGNGAVVQGAVCEAEADVFRKAAASVGAVPFRVQGPSDLAPPLTGCVGGDLQALAARMGWRIEQASICPDERPIAFRETDHTLLGKEPASRWDWEAAKFVADGRRGDGAVSLTRWTQAASRDHDVYQVLAEGRERRLHSRDAALVLAHCLARRPLFTVAGGYLEAQVRGAFLPDAIAAQLRLSTLANAGLADGRPRYRVTPEDAARAARLLPGAVAGAARAAVGHDADRVASVRHSSGRIRAAWTGGALRTLSAGGPGWGRFLNEGS

SEQ ID NO: 24632 - protein, 715 aa, Methylobacterium sp. AMS5
MKVRDREYVGRSGRGRDASALVTPVAERSEDGAWSALADVRALFPKHGQIEVRGIVANSIREGDWVAFGSVPNDRHGSSASFRAAAPRRLTPFLAAGGEVSPEGRRRLVVEAGLEAGPAGDWSVQVSPEAFVRVKLQQGEDGRFRASGPDLASLTLWRLTPDLVIDLGAEHAAPRLCDHQRAEQLPGTVNWSRDDEYIRMVAAALGPERRGPDIAALLAWALSQHTDVLTGRVSTLVGADAGTLAEIERAGTLSCRLAGERELLNLFRAGLMSDPSLKELIDQAAADAAEATRPALESAVRTEIEREMAAERAAAHEQVRALIAGLEAEEIAALEARCAAEAAKRDEDLAEARRRGMEAVEAATAERLREAEAAAAGMDARCASLAGEVEELEGRRQGLAASVAALADEERNKLEIVERLVKAGEGAAALRKPAAVTAVLAPWPPGSGNERRLGLRDLAGLAEEAGLLSQAGMETFLRVAVLVEAGEVPVLHGPDTGGFVEAAGRLMAAGRVARLYADPTLITFDDLWARAGSGIPTPLAAALASAAEGCAALGVVERAEHSGARFWYPQLADAARQGRLPAALIPLVTVADPKSEEAAAVAAEGPMVAVEGIFADGAAAVAPLVFAELAAAPAAFAKGSCEPDPGEAAKFLRKHAAGLDLPAAMRLSRIHAAASSAGGAEDGPRMAAALKTILFGPEEAVPHAAAQKLHLAARA

SEQ ID NO: 24633 - protein, 1813 aa, Microbacterium sp. MEJ108Y
MTSSSGHLDAIQTFEHLRDAYFRYYDTPFGLADERLQAERRTLLDRDGGVYRKPLLELRPEYESTGRSLAESVTAAGADPDLAQFASTGLLQGVPSLYRHQEEALAAGVQQRRHMVITAGTGSGKTESFLMPVLSSLLSESRSWTGQGATPADWWTGGNNPFRAQRDGETGRDAAVRAIVLYPMNALVDDQLIRLRRALDNDNIRAWLDENRNGHRFYFGRYTGATPVTGTRDNSLALAELRRYLRETDRRGIRARHLAAQKTDDDLRYFVPRLDGAEMRSRWDMLDYPPDVLITNYSMLNVMLLRERDGHFFDATRRWLDNPANVFTLVVDELHTYRGTAGTEVAYLLRTLKRRLGLDTRPDQFRVLAASASLDPGRDSDYLHEFFDADPGTFTFVAGSAIAPPPYQIPPAIDPAALASLDATTATTDGRAAGAVSALRGVLSGDGTGGAKTLSQVAEEIFPGTPADISEQAITNVLAGLAQDPKPGDPKFRAHLFFRNVVGMWACCDPSCTAVTEPHADRTIGKLYAEPATRCECGARVLELLYCQNCGDVMLGGFAPEGELQVAAVKTMLLADVPELAKLPDQVTLQRTADNYLVYWPRPEAALTNLDSPSWNRDSNAVEYTFRQSKLNPASGELSNLTNGFTGWSFHARIARNRATGELRRAPETVSPYPTQCPNCGDDWEIQYGRNGRLPAADPATQRSPIRQMRTGFEKINQVLTTELANDLSDAERKLIVFTDSRQDAAKLSAGLSLRHYQDLLRQLLYTRLATSGGTAHDVALAEAHVLQNEKTAESFAALDRLKQRNAAALAELREVWDGKPGTGPGDAERLKSNLAAPPSLRELASEVSADLLGLGMNPGGPHARLRETSDDPAVSWSELYDWEVSPPSPKPGLTDPQKALLNDIGSSLEEELLEGLFSGGGRDFESLGLGWLTLSSDTAPADAPADPAAGQARAALRILADQRRFFGLRRKRDDPTPKLRKFWAAVATAEAVGADSVRDDALTGAGGAVVEYLIDPSAVVLRMSDGRAWICAKCSRQHLSTGNGYCTKCATPLPATAAQTDLSQDYYSWKATRGDGRFRLNTAELTGQTDRIDAQSRQSRFQNVFLGSGENELTDAIDLLSVTTTMEAGVDIGALSAVVLGNMPPTRFNYQQRVGRAGRRNSPVAIALTVCRGRSHDEYYFERPDRITNEPTPKPYLVLNRPEIFARSLRSEVLRQASADFIAVASGEDASANVHGAFGKTADWQAMLRPRLEQWLHDHPDAVRDAARSLASSTAFHSTADEQAAKCARTLIDDIDSAATNPRHEDLSQLLAEQGLLPMFGFPTSVRYLYLNRPKRSYPWPPSGVIDRDLSMAVSQFAPMSEVVRDGTVYPVVGITAFRPAGPRPQPVTEPLGAESPLSICRACSYLGEQQAVGQVTNTCPQCGAGPSFYTSVPLHEPLGFRGGRGTDFDGNFSWSPRAMAARAMTDMDALTLQAPGNALILSGPGSRYVINDNGGQLFTLRAATPGGPEWGGYVSTRAIDAGLLHPSFATGEPISVALGAIQHTDFLFAGAAAPTDAASGLRLNLVTGVRQPYGAQEATDSRRAGWYSLAFLLRTVASAALDIQPLELAAGIYSGMTGSEPATYAFLADTLENGAGFSTHLGSSAFLPEFLDAVSNYLSELEEPSHADACTSSCYRCLRDYGNMAYHALLDWRLARDLFRLLKRQPLSIDTVAEAAAIERWARAYNATPISSSVPAARYDSPSEGSFAVIARHAFEASEDTLIAPRLAEAMAEIETAEEGLDGAIFVDSFTLDRDPRRVLKLISDSEPAGT

SEQ ID NO: 24634 - protein, 331 aa, Microbacterium sp. MEJ108Y
MTKAPELSVLEICAGAGGQSSGLEMAGFGHSLAVEIDRDAAATLRLNRPEWDVHEGDVREVNGRDYKGIDLLAGGVPCPPFSIAGKQLGADDERDLFPEAIRLVREARPTAVMLENVKGLASARFTPYRQSILDALDAMGYDADWQLFNSSEFGVPQLRPRFILVAMKRRNFRKFEWPRAHGTPPTVGRVLEPLMASRGWEGAAEWAKRANSIAPTIVGGSRKHGGADLGPTRAKQAWLQLGVDGKGIVEEAPGADTPMDFVPRLTNEMAARVQGFAPEWKFSGRKTSVYRQIGNAFPPPVANAIGGSIAEALGAVVARRTTTGSTLRAVS

SEQ ID NO: 24635 - protein, 683 aa, Microbacterium sp. MEJ108Y
MTAEYEEWQRLLSDAFLLPHDGPTVLFLDDSEITRLLPGAEDAGRHLGEAVRSRVRITEGRSMFSSITAAYQQWQRGSQKEPPPVLPVIAITVLAATRMRSDSEARSTNYYLRLAQALLPDATQQETETLRNDLREGGAFLNAVEMWRGLHSWLDAQDGTVGVSTIRDHPHLQRIGYPLSQALVRQSDRLALTRFFQALDFRPGSAPHAEVILGALDIWTAALQNRLSDGFMRALGDTDIRPLLAAVVEAHARAWDGRVLTSDGKQRIAMRLSIDLDAWQARWLFPVPLGGPETLTVLATDSGQEVQLTATPGLAHYAARESLAVSPELLLSGTRLRGREFTAEFPPSAVIFLLPDPQTGTWSSVPGMLPFEEHLVAISGAHTGEFQQVLREAATEGWRLIPQRGSVLLPGYALFRNVRFTDGQALELILSRLPGLRRIGVTPAAIPRARLVRGLPLATSISATHYLVGGEPDLLLPSGPDPRPATVTLDGRREHLQANGFPLELRRFVSGTGRHLVDADGQALAFTTLEEGPDPAQPSGTATLGWTSGARMSGSGQALAVVGALVTDTTDMIPVLARRSRDESWLLHHDGRTERITEPVPPSFLSSIDIDIHSPSFEISAPATARWLAQRRGARWHLTEIGPADPSEHTLAIDILDAWKRACSDTNGAQLWKVQLSMSAGSA

SEQ ID NO: 24636 - protein, 1812 aa, Micromonospora sp. M42
MTDRTLSASNNRSSTFPVPTQVYGELRDAYLRYFDTAFWLRDEPLRRERRQLLQEPGLIFTDILLEPVVPYDADYPLKQAAEAAGLDPAAARIVGEALFGDFVAPGEEIFLRSHQAEALIHSLRPGEGRRNVVVTSGTGSGKTESFLLPVLARLVREALTWRSQPAPDRWWQAPDNALQWRPLRDLENRPAALRTVVLYPTNALVEDQIGRLRRALRRIAATGQVPQLWFGRYTGATLGSGNRPGSGDGSKVREAAAEIRSAEQDYQALVRAYQDDTDRRAVEHMLSQFSDPALGEMVTRWDMVASPPDLMVTNYSMLNAMLMRDIEQELFQKTADWLAADRQNNFFTIVIDEMHLYRGTQGSEVAMVVRNLLSRIGLDADSPQLRCLATSASLSDDEKGGEYLEQFFGVPRSSFQVTAGVPRPVPNREPLSRIEFEEIARTLPEEPTVRSAALAAIADKHRLSEAIAAACREKPNQPLRATRLSVIEGRLFDKTVDAGAAMDVVLSAVAEAGSGPASIPLRAHMFVRTASGLWACANPNCSQVSSEHVYAGRAIGKLFSRPATTCPCGGRVLEVLYCFDCGEVSLGGYIIERHTASNPPELVIGANPIEIPSPQTRPVNMRPLNQYIWYWPGQSATGAWQHKTPQGRSATFSFRPVELDPTSGRIIETMTSATGFTLAVSGLGSSATAKPPALPERCPRCDAKNYNGDLRRFWRGIVRSPIRGHRSGQSQAIQLYLSQLFRSMGSTAAESRTILFTDSRDDAARTASAVARNHHRDLVRQLIRHELEERQPDPVDLVFKSVKEPLAPDELPPLMTFQQQHPDVYGAAIRAAAGAASPSDHALIAEYRQASDPTARIPWTQAAIRLETRMLARGVHPAGPARSVREWQGEPWYRIFDPPEPELWSPLAPHTRMAGIQLYRQMLATAMAEAVFDRAHRDLESTGLVMVEPRAPQLSGSGLDAELSLQILRSVIRIMGIQGRYAGGRWFSPQTDMPRPVRAYVHAVADKLGVDRSGLEVWVTREIRDRIAPDWGLRVSSADAPFVLVKGGDAVWVCPRCNYRHLHASAGVCAARGCHHVGLEQRHGDQIEQDYYAWLADLSPRRMAVAELTGQTKPLTLQRKRQRWFKEALLKPPTENHLTTPLDVLSVTTTMEVGVDIGSLRSTIMANVPPQRFNYQQRVGRAGRQGQPYSYALTVARSRTHDDYYFNATERMTGDTPPQPFLDLRRTRIARRVVAAELLRRAFAACEPVPERTPDSIHGIFGTRDDWPAYRPQVQAWLAAAADVPAIIAALTVRSGIASAEIKELERWAASDLIGDIDAAVSNPFYQQKELSQILANAGVLPMFGFPTRVRYLYKSHPRDKRQLEAAAVSDRSLDMAIASFVPGAEVVRDDEIHTAVGFAAFDVRGNSVLPVDPLGPPISVSRCEDCGSTSLAAPAPACAVCGGRVNTFDMYQPLGFRTDYRPRDYDVDGETVAVVGAPELAIASAPSRSSSVGGLLVEVYEMADILRINDNLGRLFPMEDAVDRSVVVTDESLYSNEVSIPKTRGRRSDAAIGDVRKTDALVVTLNRLALPGGIIPTAREVQPAGLPALWSLAEVLRKGFQAELDVDSSELTVGLSPARVGDEQTHRIFVADSLENGAGYASLLGQPELFAQVLNRVLDDLRQRWQASRHAAECTVSCPDCLRSFDNQRIHGALDWRLALDMAELGLAREVDWGRWLDRGDVLTRGFINSFGQYGIERHRVNGLWVLSSLARQKAVVLIHPLWRTDPSLFRPEQTDAMRQVQETFLSVKTADLFELDRTPVAVAGRLLSSA

SEQ ID NO: 24637 - protein, 392 aa, Micromonospora sp. M42
MTQLALIPSDAGVTKPAAAEFFAGIGLVRIGLEEAGIRVIWSNDIEPDKRDMYVRHFQDLEHEHTFQLGDVAKVTGGEMPEGLSLAWASFPCTDLSLAGARRGLAGSESGTFWHLVRVLEEMGERRPPVVALENVVGLATSHGGEDLAAAIRALNDLGYSVDVLTLDARRFVPQSRPRLFLVGAIDPPADEPVPNSELRPDWLQAPFGDSSLRTHRAMLPAPPPPLTTGLTQLADKLPLDSDLWWDGLRRAAFIESLSPIQAERLEALRKLRRISRRTAYRRTRGGKPTWEIRPDDISGCLRTARGGSSKQAVVEAGHGKVRVRWMTPGEYARLMGAGDYHLEGLRTNQALFGFGDAVCVPVVSWLAREYLMPLVRGELRAADPPHLAVVGA

SEQ ID NO: 24638 - protein, 1027 aa, Micromonospora sp. M42
MSRWEAYDAWNEAIAEVFFSEELGGQPVYIDVDSDTIPLLGEKTGTPSDEVEEALATAVREVLCLAGSRHTFGEILTHLTTWLGAWRRTAHTSRPTLSPPPILALLAVFSMAAERMGRDADMGPNNYFGRLAQLLGARDQHEKQRLKAHYRQHVVTFWNVLATWLTGLDGMRGLPSAVAISHRYIGLSISQALVREHDRSKLPRFFADYGLHPGQEVAPQEMQPLLDEWIRRDPPPISKNLASLWIRHAATRERIASVVSLELQNWDGSSTEVIPLSAEALRPRGEVRLVALTRSSMFGSSLELSVVARIPGPAEPHCMQIDSAIGDDKPVLELMPWVNGWHRLPRPAGLEKSSILDGVLVLSSEDGKTVQRRPRRVVPLRKDETLGLFLEVERLQLAEDGLVFASNSLAGEVADVLKHVARPGFQRVQGGSEGVPAGWVLFRDVQILGLLPSEARSRARADVNVLLPSVSSQVAFSEGLKLPGRLRKFSAYAPPEIRAVSTGAEHIRLQVARRDAESIVGDVDPNALERVACEREGEGAALILHTADEHLPVGDYEALLFVDGANDPTQRLPFLLRSADSVDLAMWTRCRRLAHQPAVHQGWAALSAEPYEEESSPVIDGAVATEASPLSPAVQAPRSVWWTQQRPTQYGEVASAVLTTPDARSCLVTGAHYYELPYASTSFVSGVCRNCGLVKRFPNNHWAAQKSKRARDKVEAMYRVDVHDVEPVRAEPLTWDVGLDGLMHAGGGPISALEGIALQIEGSLLFVDTFTRTLEALAHIAVRRDERTLEAVEWEIAPPALAQLADGAYLLTGYWPPSYVETLEELAAEAGAKVGIETTSPGPSRRTLSGLAPKTAQELASAIGEVTVAADAARAILRAAPDLTAVEASLPTITMPGARRIQHFHLGSAAWVPQRHAETLGAFRLESFGSTYIVRRDVELANGTARVGTAQLVKHLEALRAGRPLLAYDPAAQALDVPLGADLPGLYGRAAVLCAGRPPAPIKERRLLRYYNVPADVADMLATRLAR

SEQ ID NO: 24639 - protein, 1805 aa, Modestobacter marinus
MSVEALSHDLTDTFLRYYDTAYGLRDEAIMRERRELLRGQSALFQEPFLELLPDYVLADADLAASCQRAGVPELAGLAAAGLLAGRDRLFAHQERALQEALSGRHTVVTSGTGSGKTEAFLLPVLARLVRESASWSSPPRDGGSWWTGPQGWEPQRAGSPSRPAAIRALVLYPMNALVEDQLVRLRRALDGPAARRWLDSTRRGNRFYFGRYTGRTPVSAVRSNSSTTELRAVLRKLDERGRRLRARIEAEQRAGLPVREDDAYFLPRLDGAEMRSRWDMHDAPPDILITNYSMLNVVLMRDREEDMLAATRAWLDASPDHVFTLVVDELHSYRGTSGTEVAYLLRKLLDRLGLHERPEQLSVLAASASLEAGRARDMAFLEQFFGQPQDRFAVVPGALARPAGTGSVDGAAPALAEAREALMDGQLPSGLTRRLGVQAAMFNAGQDEGRLRARSFADWASRLFPGLAPQDQREAMNDLLACMDADPDGTRLRMHLFFRNLNGLWACADPACALVSTREQDDKAPRQRPIGRLYAQPRYRCDCGARVLELLYCQTCGELFLGGYRSPVADQSQYLVSTVTDLEELPERAALARNAANYTLFWPTSDPTQKPLTSKWTRTPYEMGMARRHLNVHTGEVAAPEPGSSGNGWGYYVTAGKNGDPSRLPAFPNKCPHCGDDRELKLNWLKAEDPKRNRSPIRTMGTGFEKVNQLLSDVLMRDLGDERKLVVFSDSRQDAARIAAGLEKSHYQDLVRQLVVAVLDRPVDIDPQKAAEYWSNPDAGADAQSAWDAVSQADKALADAVRRVGMGKPQADDESTIASRLEELRSRGYTLAELANLVEPLLLSLGVHPGGPAPSLQSYDAAAWTDLYDWKATPPARRPTNLLTPAQQALSDRVHGALLEEVQRSVFSSTGRDVEALGLARATSPVESSAPTGMSSTTFQEVCDSVVRLMGLRRLFPEQEKNGRDQLPRNAREYLGVIAEGDRGMTDELIQAVRRALGVGDKNLLDSTRVRLRPAGATQWRCTRCRRRHLQPSGGRCTQCRGLLGPAEERRLAGSDTSIEAADYYAWLARDAGEPFPLRVEELTGQTDTNDGQARQARFQNVFLDEEVPQTSAIDVLSVTTTMEAGVDIGGLRAVVLANMPPMRFNYQQRVGRAGRRNDRLSVAMTVCRGTRSHDEHYFAHPEQITGDPPPAPYVDLARPDILKRAMAAEFLRRAFLAAREDSPGFAPGSNAHGQFGDVAAWPAVQQHVVSWLKANAPEAEHILDVLLQHAAPPLQARRAELMSWAVTELPAAVDRIAHADTGNSALAQRLAEAGELPMFGFPTRERTLYHEQPHGREPDGTISRQLDIAISEFAPGSEIVKDKSVYVPVGLVEYVRRGTRWVPIGDPRGPIAKVGLCRACGAVDPSGTPSACPTCRTPASDDGVYRVVEVGEPEGFRTSYQRPADYDGTYEFTPRAGHARLSLENAGELEVRGHHELDLRFGKADVLVVNDSAGADFRFTSVAAQDGLLSLDLLADDERRKELGLPKPVGDHSGVTPIALGAWSRTDALLAGLRSVPDGLDLNPMRTSARAAWLSFGFLLRNAASKLLDVGVGEFKVGVFPRPGKGNDAVSGAAFLADSLENGAGYATHLGQDAGPLLSTARQLAVEYAEHARTGAGCDSSCYRCLRDHTNAAYHPLLDWRLALDLLDAAEGQPVSLDKLDQLAAQLADTFAANFGGVVHSAGGLPLIEDDFGSTLLVVHPLESFREGTSSQRVIAAHKEMAERGHGISMITHTYDLVRRPGVVWTRLAATNGSAPWGSLGSSR

SEQ ID NO: 24640 - protein, 355 aa, Modestobacter marinus
MSHGVAISLFSGCGGLDVGVEQANYEVRAAVELNQDAADSHEKNFSHLGAPVIRRDILDVPTRDILRAAGLTGRERPDLLIGGPPCTPFSKSGFWLDWKRAGLDPDASLLQAYTRVLAEAKPRLFVLENVYALTYNNKASRPAFDRLLREIDDAGYTFTWRVLNAADYGVPQARPRLIIVGAPKSRRKTPLLPEPTHTGKWERRSTGSAEGLPHVSAGKALAGLITEPEPSEIVGGQFGHLLPGVPPGDNYLFYTAERGHPDPLFKWRSRFWSFLLKLDPERPAPTIQAQPGPYVGPFHWENRRLRVAEMKRLFGYPDDFHLVGSRNSAQAQLGNSVPPPLARQVVEALHTSTSS

SEQ ID NO: 24641 - protein, 668 aa, Modestobacter marinus
MLRAVRARVKHSQPLDPWVRQAIQWRREGSVGNPPWVAVLAVTVLAASGAGREEDGRVLHERAYYRPLRQLLGLLAGAQPPGFDSDIRMLWTFLKEWLDDHLEGSRGLSTARAPRHLSNVGWAMSQVVLTSAERSRLPEFFQLIGAVPGEDITPDALLASYLRWGSRRRASRIHDDVRAQSNFAEMLGAALHQALISWDGRPRDERGRTTLPLLLGYYSSRGQLRLVSRAAHGLENRGLKVGADEVYIGARDELFVVPGDPDTALAGRPIRASLSPSEQDPVSVAIDIQMRLLSTDIHVLASNGELGMWVEVAAASLDQEHVIIVRDQVAPEAERAMTDLGGGAMRLPRIRLPAGWCAYHRFHPTRLAQVPVHLSALVPGRTELAQLTGGLPVDRLRKLWLTDGPPDVILPEILDAQAGRVLRLDGAELPWPDDNRLRLRSLGLHSGDHELSVAGRTMRLTLLDEVVDHAGHGDARLTVERQPVEQTFLARARAAGASHGSPTSPTDACITVTLCGARLSTTEGSLPLLPRPHQLRVGGCYYVLGAPGQAARLRPVAPPWLTAVEPPLYSRDADLESTIVGLSFAPRWLLYVPAGRRATVTDISDVSARAGRDTAVRAPDFGAEIWQQASRHLELAEVAPQDMSAWRAWLSAAGSAGQYRRSTIGRQP

SEQ ID NO: 24642 - protein, 1945 aa, Morganella morganii SC01
MLDPIGGFRRIQDFFISYIETNFRIADPSVAISRRNLLNSSGEFAAEPYIEPVLRYESSGKMLEDLVDIDGGPLNSLSPEGRKAFVELALSGLFDSRPGDANWPRRSVHAPYSHQTQMLERGLRPGCPGIVTSGTGSGKTESFMLPILAALSNEAVNWNRPDSSYLQNRWWHGAEKNWVSRREGEKRPAAVRALVLYPMNALVEDQMARLRKTLDSDDARQVMEDRFTGNRIFFGQYTSATPVTGYASHPRLSNTSSEKSRRVRNLEKLRKALNRIDSDQQAACAFDEKEKPSEKTRYIFPSTDGGEMVSRWDMQATPPDVLVTNASMLGAMLSREVEDDIFSATRDWLMNNDDAYFYLVFDELHLMRGSAGTETAMLIKSLIIRLGLDDPKHRYKLRLLASSASLPMDGADGEQSRKYLRDLFAPFGTCCDALDPGSDKPDFWHNCVIQGKPFIPLKPSGKIPVQPFAALMRAALTEQGNVVRNLNMTDALNQALLDVFQALGVKEQNVMQGIKQAAEIAAALLTNACIEKDGEMPRAMPPGLIIDKVFLKEELGKPDESELALRGLMLARALPESGIDCDKPVNVTPAFRVHTFVRNIEGFFASVSPGEKKAKFADFCLERGLSHAPSSASDGERGRRLFEMLYCEACGDLLLGGQRGQDNEGSTVELLPSATNLENLPERPGAEYYDDMTLAEFAVFWPTERTPATSEKDWDVWEKAVLNPVTGIVTVGQGASAMNADSVHGYLYFQKPTPSKKGEPEKKPSAQPFCCPNCGIDYSSRPASNRSRTPIRAFRTGVTKSSQLVATELFELLHAIGAEAKSIVFSDSRQDAASMALEIERLHLRDLRREILVAAAREMIREAESEYISEDYIEEKKIKALTNKDYAEYERLHNLKINQAGIADLCRYRRVKIDKLLESEGDSIGKISSELAGLGISPYKYRSSADGDGSDIWHANFIKDKNIVKYHEKLSSSDRLDLKKKIIDTQSELIDDVIFANTFFALEETGLAYPCISDREETSELDAWLRVFAGVYRVKENKYFDPENSVEWNTGQNVTKEKIKRVAKALFGENNYLDNLTQVLNQLATRGHSAGLFNIGKLFLKVAKPGDPYWQCGNCERIHLHLGFKRCTRCTELLDIKPRGVVEMLWEDNFLGKRIVRGERDGVKRFRLNVEELTGQTDDFSDRLRKFKGIFVDEMSELEKLDAEIDMLAVTTTMEVGIDIGSLQSVYQANMPPQRFNYQQRVGRAGRRGQAFSFVITFCRGRTHDAYYFAHPHAITGDPPPPPFLAVDHDAIPQRLLRKIWLKSAFNDIREECKKNKTTYPGDKLVPPDVHGEYISTHDYYHDNEANWAKLLYCALEANQNIRERFIEAATFDPDQRRRLYSTINTERIIEEIEKLRPYAPDDNTGLARFLAERGLLPMYGMPTRVRNLYLGLRKTKGTNGQAEYEWSTMDRDLDLAVFEYAPGSVLIKDKKKHQVIGFTGNYLEPQVRDNRVSDLSTVCSWKESSHYVAICQSCGSAKLEKNQPINNINCEDCDTPIGPDEFEIYITPTAFRTDFEPKDEMDNFTRMSLKTTATVLHKDIPENCGPFNVRRGGVTILRLNDGPINGEKEGERFTVDLATDQKAPIPLATYFSPIKGNQAIDSNWAGLRNNFRWRCTGENQNFGLVSSKETESLHLELMQFDDRLNLNMIARYGEYMNLPTRAAAISATQILTHKAALYLDVSPDEFETLEPRLHHEKPILQIADALINGSGLCRRLAEPAVVGSLPLIVTLLNEILEDKCVWPMVDFLKKDHPAQCQTACYKCIQRYGNRRYHGLLDWRLGMAYLRAMVIPEFACGLNDDDWSHPEMIGWRDRAFELAENVAALRPETIKLSKEYPLPVLTEIQDGKELWRAVVTHPLWKWREPERNALIDSIGLADGKLSLRFIDTFELERRPLRALASLKRS

SEQ ID NO: 24643 - protein, 411 aa, Morganella morganii SC01
MSTRAVTNDNHLTESHEAGFRFYEFFAGGGMARAGLGKQWQCLFANDMDPIKASTYIDNWGDEHFDIRDVREITPDDLPRHADLSWASFPCQDLSLAGNGLGIGEKDSSADKTTRSGAVWPFLDLIGRLGEENRKPPILVLENVLGLLTLDQGSHFAAICHQLSKTGYRYGAIIIDAKHFLPQSRPRVFLVAITRHISIPEYLVSEEPLSQWHSPSLLRACDALAEDARNDWIWWSPGNTPDARMKELGDLIDFEDKNVLWHSADETQRLISMMAPANLERLAKAQASGETITGSLYLRMRNEKGINRQRTEITFSAVLGCLRTPKGGASRPRIIVVKGNQVKTRLLSVKEAAALMGLPDDFILPAAYQPAFKVIGDGLAVPSVRFLAERILDPLAMTVQNNTHRTEDIHE

SEQ ID NO: 24644 - protein, 852 aa, Morganella morganii SC01
MNWTSPVTPDGWESTLIDYFLRFGTDGDAQDIRWFEVTPATLAEAFSDSGVSADEIEEAFRTCMSKIRDLPQRLESGMMEKSTRRSPGYFTYLVMTLLISSQFDAQDERNDFRLKLQSWLQVTHSFQNLSGINKMWEALDEWLRQRIQEGEPYRRLILPPRDGWVQIGHTLRLAFPNKADLRLMSECLESYPQAAANPRQLIEYFQIVIQRQGVSHALKEAFAEFRDAWLLGRRALFDMPFWRLRQRAVQISSCVTPHQTIIDMYVDFDGSRCYFSVAGNSGESVFHPTLPEVLIARDAESSENLGKATQVGLLFFYEIGHGRWRAKSSPNVDSQRFHIALSSKHSIQMSKRLNGYIAEGEWILTTQPLNRVSAVDLFRLIRSSSAIQNDDVTRPQLYGGIRVPGGWLGLPAFLPSIDSDTQCYKIYSSGNDEAGTNVSVIDGRLTSSVPFNGELFIEPALKAGEKTPPWRRRARFFTRAVPHPTLGESAKYRFEPLYDWLTSSLKAPTFNFEGLFEWEDSEACCDHLLEAIYASGASGWEEAELIELLRYVADDINVWHLIRCLHHAGLIEPRLRPGWKGRVWTLVKPSLLHIRNGENSLVVVEGAVCASLMDDFQKAVTGLSGESFRRRGISLWSPPVFGAVLANPVTLSRRLGWPLIEASSSSGTTPLSLVTTERAAELHEPAAVWNWHSGRFQQHGSLDKESASLSLHIHLGGRDHDIYRVVSGRKTTQYLSRTAAIIAAGAKNRAPIFELIAKNHLLCLVTDCGLPDALATGIRRHTLRNGGPTDSGYVYPVDDASFLWLRTMLPGCFYSLAPDGERDASNLVSSACHSGGKIRLTWRDGRLTLDLR

SEQ ID NO: 24645 - protein, 695 aa, Morganella morganii SC01
MSEIPWYLGQYDRRNYQSYLKAVAQETPNGWRTIDSKKLFPRTGEVEFNDADELRLRKGEWAAFQVGPGTRSKALAKRSRRIYPYYDLSFGQSLLEVRRRLSFEGITVDGEPGVWAIRFGSDALILANLAESKSGSLILFRNQNVYEYDFNENSVIIVSGMSESEKAFYMPDVDASPAQIHDWTPDKQYIENVIQRFSCADSTAMVAGWLREHADEQTGKLTFGINNMLTAAQTLRSGELAKKLEEEDSLARQFAEAVLKDHNIADLLERQIQSIAEEERAALRTEQHKVLDKEFSAERLQRREAIEVEMATFEKTRKSELEEQIAQLRQLEEEKLQIDFAEKQADIEQTLKQEKAYLESELSRLKDANADLCAQNENQRQILASLSCEREAFLASLTDAEERTAQAQIELEKMDIAIAEKARRMAYSAIPEVRLPVQARVVSCEEFGHSVRENKLLTPDGKILMTQFLALMLAGECPLLYGPETQDFLAIAESLISSGRSIRLVADPTMISCEDLWVRAGNHLATPLYQGLLLSGASSPRTILSVIERVECSAARFWLPALKDRLRDGDLPRRFLICGTIEDEDCEEAEKAKEQHLRLRMENVIIQNAIALSPLHLSLESHSELAPGEASHGEIPDKLAIAADMSAGRLNLANTLQAMRTAHEAAPLCDDNKVMHQKRLVDLYADLQNNELCAQ

SEQ ID NO: 24646 - protein, 1827 aa, Mycobacterium canariasense
MQPIPPVQRSLDVAGTFDRLKDAYFRYYNTPFGLADRRLQDERQGLFDRDNGVYREPLIELRPEYVNAPRTIAESVAHCAAPEELAAFAEAGLIPQGRALYLHQERALQAGLTAGRNMVITAGTGSGKTESFLLPVLASLLEESRTWSGAPAPVVPWWRTSPRTFRPQRDGEIGRRAAVRALIMYPMNALVDDQLMRMRRALDSQQARTWLDRNRRGHRFYFGRYTGATPVTGNSENPRAIERLQMGLLETERRAARATQVAAATGNEDVQYFVPRLDGAEMRSRWDMIAAPPDVLVTNYSMLNIMLLRERERSFFDQTRAWLDASPTHRFTLVIDELHMYRGTAGTEVAFLLRNLKHRLGLNDRPDQLRILAASASIDALRDQAYLETFFGVDAASFDFVEGSLAMPPAAPAGTAQDAADIQTASSDDDVVALARDRNLMDSLRRSFLDVLQGGHESTSAKLLPDLSARVFPGVATGGAALARLLGSMSASPAEADPKLRAHYFFRNVPGVWACTDPACDQVPADGTPRPVGKLYGEPMTRCGCGSRVLELLYCQSCGDVMLGGFTPDGDTQRQSVRTLLLADVPELAKLPDQVRLERNAANYLVYWPNPVDSLTAPDRPSWNSGNVQYAFRRSALNPASGEIRNTGGPGNHTGWSFHAYLPPARRRDREITDVSPFPTVCPSCGDDWAILYGPSGRRPATDPLTQRSPIRGMRTGFEKVNQVLTTELATDLGDQNRKVVLFTDSRQDAAKLSSGLGLRHYQDLLRLLLNEHLDARGDANADLDLARRFYAKNERVEGTWDAIGRLEVRDLNVLRQLVEIWQGRPGTKPEDEPALLARFNAGPTLDVVAGALAGELLDLGMNPGGPRASLQQTDPPEDQPTRPWTGLYDWGASPISRRANLGPDQNDLQRSIDQSLLTELLEGLFSGAGRDFESLGLGWLALANDTEPLDIPPGSDLAYARASLRVLAHKRRFFGLRETSDNAPAKLRGFWRTIEQAGGPTEVDLQQMFLTRCGSAVRQYLIDPTRVVLRRGSGEWWTCANCRRRHLTRGCGFCTNCFGPLPVESEPVNAEQDYYGWKATTRSGRFRLNCEELTGQTDRVDAQARQSRFQDVFLDSGPDPEIPRADGIDLLSVTTTMEAGVDIGSLSAVVLGNMPPTRFNYQQRVGRAGRRGTPVAVALTVCRGRSHDEYYFDQPQRITNDPTPEPYLAAGRPEIVSRSLNSEILRMAMPTIGDAIVADGGSWEPGVNVHGPFGSRTAWNDVGPRLDAWLASNQPAIDEAAASLTDRTSLAARAAELAAACVAQLPERIAEAVASPGDDALSQLLAEHGVLPMFGFPTSVRYLYLDRPRSNYPWPPSKVIDRDLAMASSQFSPLSEVVRDGRVYTSVGIVGFEPSGNRPRTVGEALGVSHEIYLCRSCSYLTSEDLNGQSTCPQCGNGPEGFARFPLREPTGFRAGRRPHDFDGNFSWSARAMAARAFADLSKLDPGQDGGAVAYSGTGMRYVINDNGGRLFNLRRAADTAPFWGGYVSVEALDKDDRNLVGPWDATGDAFSAALGSVRPTDFLFVGAEKNIIAAQQLRLNFLAGSQPSGAPDRSDGRRGAWYSLAFLLRKVASAMLDVEPLELVAGIFAGESDGEPAPYAFLADSLENGAGFSTYLGQDGVFKSLLDEVQKYLRHLGDPQHATECSASCYRCLRDYGNMSHHALLDWRLAGDLLEVLRERRLTIDESALERALANWGRGYDSTAVPGVPGALRFTHPQLGDHLLVAKHPLEATENILMSERLADIAADAEVASAGTRATLFVDAFTLDRSPGIVFELCNKIDAQP

SEQ ID NO: 24647 - protein, 329 aa, Mycobacterium canariasense
MMDTLSCLEICAGAGGQSLGLEQAGFAHELAVEIEPEPCETLRINRPQWKVHEGDVREIDGRPYRGIDLLAGGVPCPPFSIAGKQLGKDDERDLFPEALRLVSEAKPAAVMLENVRGLSTAKFDGYRQWVLDALASMGYRADWQVLNASDFGVPQLRPRFILVALKSAYFDSYQWPTPHAKTTTVGEVLKPLMARDGWPGAAAWVKRANDIGPTIVGGSRKHGGPDLGPTRARAAWLELGVDGRGLANSGPDASTPFHHVPRLTLEMAAAIQGFPKDWVFYGRKTAAYRQIGNAFPPPVAAAVGGSIAQVLAGRQAKARQNSSLVARSA

SEQ ID NO: 24648 - protein, 703 aa, Mycobacterium canariasense
MRDEYGRMQVSVHSETEVLSGRYAEWQQRLESAFFDDHADEPVVLFVDRDELTRLSAPDEDGARSLAAAVRDLVDVGSTAHMFAKVEMLQNSWLAAGCDGPPPTLPVLAVSVLAASEMRRDSQNSSNSYYIRLAEVLLPDGTDSAVRMLRQRLREGSAFLPVVAMWEYLAVWLDEADGAYGTSTVRGHERDKRRGYPLSQTLVRRSERAALSQFFAQARLRPGDVPAAETVLSWLERWMRYRSHGLSEQFEAALGDEELRPFLAQLVHDLATAWDGKIITPEGLRPLDIRLAVDLDDARAWWVIPSVNDVSADLLRGTANGVPFEAIIATDPHTSMYHAENLPEVTRSTLTAGFTARGDRAVAEFEPRKVFVLTLSADAGGWVSVDAIQPYEEHAFIIAADAVAQISAAVEAAADKGWRRLPGAFAQRLIGPGFAVFDRLVFSDQDRLDALLKALPSTVSAGLRLGATLRPRLIKGLPLMRHLTNRLYLSGGEPDLLLPFDETPRMVDVALDNRHGKLKASLFSVPFHNFTGGFTEGAHTISADGETLTFEVVRTSDDDRMPPGTGSIGWSRGHLQEVESAEICGAITTDGPTDTPVLARRGSIESWLLFRTGRVLPLADPPEPTALPELRFSMFEIAPQGAVWLVQKRATGWCAIRLQAQEPAFQSLGPDEQRVWTEVCAAVPHADPLWQLYARAWGRARGR

SEQ ID NO: 24649 - protein, 1753 aa, Mycobacterium fortuitum
MTTTPISLAEGLRDAYLRYFDTAFWLNDETVMDERRRLLEQPGALLGRLMIEPIVPYTNSAKLIDIGQQAGLSAEVTAAVGAALFPSVAPADLALREHQAQSVLHHFRDGRSEGRNVVVTSGTGSGKTESFLLPLLLRIAAEARRWERQPAADWWWEAQDEWKPLRGPEGRQPGIRGLILYPTNALVEDQMTRLRRAVRALRDQDPSHPIWFGRYTGNTMGTATRSRAAVAEAAADLRGYRRQYEELVEARNRGREVDLSQFPDPRSGEMLTRWDMVSHAPDVLVTNYSMLNTMMMRHIETPMFEQTASWLQSSDAHVFTLVVDELHLYRGTQGSEVAMILRALLRRLGLTPDSPQLRVIATSASLTDSVDGRKYLEEFFGLEGMSFTIQPGKQISLRNPARIDPDELRAGAISAVELSHAVARACEDPDEDRLRATAVDLIARRLFPDNAEADALVAILLEQLATADTSKSTEPVIALRAHAFVRVPRGVWACSNLQCKGVGRRGPDRQIGRIYNTPVTSCTDCGSRVLELLYCYECGDVSLGGFVVDRTGNEVLLSPTAVNEGQGGKPVFLRPATEFVWYRPGIPSELASWTKDKVELAFAPTSWNPALGMAIVNGPNPTGVTLVHKGAGAEDRIPGLPDRCPACGYAPKNALPKGAFRAGQVSSAIRAHTSGAAAATQLYLSQLIRSLAQGRPGSEGVADAKTIVFTDSRDDAARTAAGVARNHHRDLVRQVLRREIATGPDVYDKLDAIVFNPSGGAAAQGFGQAAMARFKQKNGMPLDDADRGALEQALATLGSVRSVGFADMCHKVTNVLVSLGANPGGPDPENQWLEESANAQTPWYRAFEPPRPRLWPTPPKVQGQAKLKSALRGSVIDATFDRARRDLESVGIALVHVDGWQTVDGPLGNEAQYQLVGSVLRILGLMGRTEGSTRPGVQETAVMPTAIRRFIDAVGTRNSVNANDLRQQLDEIMNGEAMQRAVAGWLLRTTAVDTSLVFQPGEGRIWRCGRCNFAHLHESLGVCANRQCHAPDLTLTLVMGESDYYAWLAHQEPRRLAIAELTGQTKPLAVQRDRQRWFKGAFTPAENELTYELDVLSVTTTMEVGVDIGSLRSTLMANMPPQRFNYQQRVGRAGRAGQVLSYAVTICRDRTHDEYYFNRPERITGDVPPQPFLDLGRRRIVERVVASECLYEAFASLRQGPKWTPNSNHGTFGQINEWADYRDEIAAWLSTAGQVDAIVDRLTAHTPLPRHEIETLRDSIRQQLVPQVDWVVEKEKESTDTELSAVLARYGVVPMFGFPTRVRTLWGRSITSRSGMQDYAISDRSLELAVRSFAPAAEVVKDGLVHTVAGFAAYKPMGNTVRAVDPLGTPRIVGRCGHCERMELSSDLICSVCGNPEQRVDLYEPRGFRTNYQPRAFDDDQEVLSSVSPPSLVPAGAPTSTDEAMNLRLELYSQSQLVSINDNFGRGYVFRPQGDNTVLADTAPSGASPMKTIGEVRVTDALLITPTRLEVGTGSVALYDIPSGRAAYTSFAEVLRRAAQACLDLDPVEITAGVLPLRLPICLEDGSQQGTQVGGAVFLADTAENGAGYAVELGRTELFATMLKSALDELSSVWEQKEHAENCDTSCPDCLRSYNNAQRHALLDWRLALDVLELVIGEPFTASRSLPTCGEWMDAAAAALNGSSKIEFDGVPAIARRDKCVVLCHPLWRQEEQFFSKLQRSAVEAARGQYAHVVTHDLREFRRNPISIWRYLQ

SEQ ID NO: 24650 - protein, 431 aa, Mycobacterium fortuitum
MTDLSVVEICAGAGGQSLGLHLAGFRHRLAVELDSDAADTLRRNLARLAKKAGEPQPDIAVGDVADEAVWRPGDYKGISLLAGGVPCPPFSIAGQQKGATDERDLFAWAVEAAGQMMPNAVLLENVRGLSLPRFAGYRQAVLDRFSELGYRADWRLLEAKDYGVPQLRPRFILVALREEFAPYFTWPEPTPAVQTVGAALYDLMAANGWPGAEAWSVRANRVAPTIVGGSKKHGGPDLGPTRAKREWRQLGVDGLGIADAAPGPDTPINHVPRLTNAMVARLQGWSGPSFEWDFRDRKGKKTTTYRQIGNAFPPPMARAIGTAIVAALRMEGEPVGTHGTAETFHDEVYRVLKAKESFMSITGISRALGGTMSREEIERRVEFIKRDFEVEERTRAGAPTYRLGSWRAFRGQDDHERHLAFAERRLRSRVS

SEQ ID NO: 24651 - protein, 1085 aa, Mycobacterium fortuitum
MPDTAKNSDGMLDRPPGHSLSGRSSSQWRRSHCCRTGQLSSGKVHSSVGRGFGMVAEGRRVAGSTGHSAGGVTQSWSQYLLWNQAIADVIYPATENPGPAYMDLEDEELEKIAAAAGYSGSNIAVELANAVRAVTVGSEGKFSLQILDTRTRGWAVRNLKKSSVEPPPCLAFLAVTVLAAEEMGSDEDLAANAYYARLARLLQLSDKDNSLRNQYSRHAEYLWRCLNRWLEDLDGIRGLPTAYALSYRFVGLPMSQALVRHHDRRKFPSMFAQYGLSAGMRLAPEDLVQYLDAWLTSEGTSGTANLRKLWTQPESHDRLASIAAVELANWDGTVGSEIAVTLSSVGARAVVVANLRTGFMGESLDLFLGLRPLRSDMGGSMEVRAVNGAWLSLGFAPGTAGLWRTAYTEVIDFRSMLDGVVQVRHAGDDQSPIYRHPPRMVMPLIYDELQSGFVEAERLQLGVDALLLVRSAGTSRLAVGAVEEVENILRQFARPGFRKVESISGLPEGWVLFADVQMFGAPSASTRFNELVPMARNQLTIAGGLRIPSRIRKWSSLSPPEIRATAQSDTHLKVVLSGALGEMKIAECSSDSGALVLSLEELLLPEDDYQVALYCGNRTTPVQQATVRLRSSNNVDTQWDDAPRLVYSLASPLGVLSATEGDVGDRFVDGLNTEGTSNVPLTNSATAKITWTEPKVAVSPEKVEIGSPDPKSCVVTGAHRIQLPPALGGWAPKFIHGECTSCGLVKRYPGWLPSSGARRRVGGLQAVGDAPTVRVEELKEVHDHDVNWDAALDALMHLGGGSISSLQSIAMQLEGSALFVDNFIRAMETLGHVSIERDERGLPTRWEIAPSCLGQRADGAFRLSGFWPTAMRRDLEGFAAASGGELIRKRYARNPESTILRGVTDDAAEEFTVDAPVTVAVQSGWSILQVLPRLSEVGAALLRSTMPGFQTAARFDLASACWTPTSDVHKSGAYRIRRGFETLYVYRSDADVDNSTAAIAPVHLVKHLAANDRGKSLVSYHEKQELVILPQGCDLPGLFGRAAVAMAGRLPVSKDVAVKGRQRKCLIYRDIDRTSADLLVTLLST

SEQ ID NO: 24652 - protein, 1753 aa, Mycobacterium goodii
MTITPISLAEGLRDAYLRYFDTAFWLNDESVMEERRRLLELPGALLGRLMIEPIVPYANSAKLMEVGREAGLTAEVTAAVGAALFPSVAPEDLALREHQAKSVLHHFRDGRSDGRNIVVTSGTGSGKTESFLLPLLLRIAAEAKTWAPQPAEDWWWEAQDGWKPLRGPETRQPGIRGLILYPTNALVEDQMTRLRRAVRVLRGKDPRHPIWFGRYTGNTMGTASRSRAAVAEAAADLRGYGRQYEELLKARDRGQDVDLSQFPDPKSGEMLTRWDMISHAPDVLVTNYSMLNTMMMRHIETPMFEQTASWLRSDDRNAFTLVVDELHLYRGTQGSEVAMILRALLRRLGLTPDSPQLRTIATSASLTDSSDGRKYLEEFFGLAGESFTIQPGKQIPLNPPTRIDPDALRAGTISPAELSHAVAAHCHDPEEDRLRATAADVIARRLFPDSGEADSLFETVLEQLAAADTEKTQEPVIALRAHAFVRVPRGVWACSNPQCKGVAQRGPDRRVGRIYNTPVTSCIDCGSRVLELLYCYECGDISLGGFVVARTGNEVLLSPTAINEAQGGKPVFLRPADEFVWYRPGIPAELATWTKDKIELAFAPTNWNPALGMATVNGPNPTGVTLRFKGAGAEDRIPGLPDRCPACGYAPRSPLSKGAFRAGQVSSTIRAHTSGAAAATQLYLSQLIRSLAEGRSGTEGVADAKTIVFTDSRDDAARTAAGVARNHHRDLVRQVLRREISTGPDVYDKLDAIVFNSSGGAAEKGFAQAAMARFKQKNGMPLDDADKAALDEALVKLGSVKTVGFADMCQKVTDVLVSLGANPGGPDPDNQWLEDSANAQTPWYRAFEPPRSGLWPTPPLVQGQAKLKSALRGSVIDATFDRARRDLESVGIALVHVDGWAPVDGPLGEEAQYQLVGSVLRVLGLMGRTEGSSRAGVQETAVTPPAIRRFIEAVAARNSIDVSELQHQLNAIMNGEALQRAVAGWLLRTTAVDTSLVFQPGEGRIWRCKRCNFAHLHESLGVCANRQCHAPHLTVMPATDETDYYAWLAHQEPRRLAIAELTGQTKPLAVQRDRQRWFKGAFTPAENELTHELDVLSVTTTMEVGVDIGSLRSTLMANMPPQRFNYQQRVGRAGRAGQVLSYAVTICRDRTHDEYYFNRPERITGDVPPQPFLDLGRRRIVERVVASECLFEAFASLRQGPKWTPNSNHGTFGQISEWAGYRDEIAAWLSVADQVDAIADRLTAHTPLPHDQIEALKDSIRQQLVAQIDWVVEKEKDSTDTELSAALARYGVVPMFGFPTRVRTLWGRSITSRSGMQDYAISDRSLEQAVRSFAPSAEVVKDGLVHTVAGFAAYKPMGNTVRAVDPLGTPRIVGRCGNCERMELTSDLICSVCGSPEQRIELYEPRGFRTNYQPRAFDDDQEVLSSVSPPSLVPAGAPTSADEAMNLSLELYSQSQLISINDNFGRGYVFRPQGDNTVLADTAPPGASPMKTIGEVRVTDALLITPRRLEIGTGSVALHDIPSGRAAYTSFAEALKRAAQAYLDLDPLEITAGVLPLRVPTYLEDGSQQGTQVGAAVFLADTAENGAGYAVELGRTELFTNMLKKALDELREVWERKEHAENCDTSCPDCLRSYNNAQRHALLDWRLALDILELVVGEQLTVSRSLPARGEWMDAAADALNGSSKIEIDGVPAVVREDKCVVLCHPLWRQEEHFFTKLQHSAVELARGKYAYVATHDLREFRRNPISIWRYLK

SEQ ID NO: 24653 - protein, 431 aa, Mycobacterium goodii
MTDLSVVEICAGAGGQSLGLHLAGFRHRLAIELDTDAADTLRRNLTRLAKKAGDPPPEIAVGDVAADAVWRPEDYKGVSLLAGGVPCPPFSIAGQQKGATDERDLFAWSVEAAGRMMPDAVLLENVRGLSMPRFAGYRQAVLDRFAELGYRADWRLLEAKDYGVPQLRPRFILVALREEFAPYFCWPEATPSAQTVGTALYDLMAANGWPGAEAWSERANRVAPTIVGGSKKHGGPDLGPTRAKREWRQIGVDGLGIADSAPGPEHPVSHVPKLTNAMVARLQGWSGPAFKWDFGERKGKKTTTYRQIGNAFPPPMARAIGASIAAALRKEGEANGTHGTAETFHDEVYRVLKEKGSFMSVAGIGRALGGSISRKEIERRIEFIKRDFEVEERSRAGAPTYKLGPWRAFRGQDDHERHLVFAERKLRSRVS

SEQ ID NO: 24654 - protein, 1031 aa, Mycobacterium goodii
MAVEAQRNVGGAVYAVGSVTKAWSQYLLWNHAIADVIYPAAESPEPAYMDLEDEELEKIAAAAGYSGSNIAAELARVVRAVTVGMGGKFSLQILDARTRGWAVRNLKKPSEEPPPCLAFLAVTVLAAEEMGTDEDLAANAYYARLARLLQLPDSDNSLRNQYSRHAEYLWRCLNRWLEDLDGIRGLPTAYALNYRFVGLPMSQALVRHHDRRKFPSMFVQYGLSAGMRLAPEDLIQYLDAWLTTEGTSATANLRKLWAQQESHERLASIAAVELANWDGTFGSEIAVTSSSVGARALVVANLRSGFLGESLDLFLGLRPYKSDMDGSMEVRAVNGTWLPLGFAPGTAGLWRTAYTEVIDFRSMLEGVVQIRHAGDDQGQSYRHPPRMVMPLIYDELQSAFVEAERLQLGVDALLLVRSAGTSKLAAGAVEEVEGILRQFARPGYRKVDSISGLPEGWVLFTDVQLFGAPSVSTRFNELVPMARNQLTIAGGLRIPSRIRKWSSLSPPEIRATAQSDTRLKVILSGALGEEMIAECTSDSGALVISLDELSLPEDDYQVALYCGTKTTPVQQATIRLRSSNNVDAQWDDAPRLVYSLGNPLGVMTASENDHGNRFVDGLAAEGTSDVAPSESATAKITWSEPKVAVSTQKVEIGSPDPKSCVVTGAHRIQLPPALGGWAPKFIQGECTSCGLVKRYPGWLPKNGQRRAGAQQAVDDAPTVRVEDLQDVHDHDVNWGAALDALMHLGGGPISSLQSIAMQLEGSALFVDNFIRAMEALGHVSIERDTTWHPTRWEISPSCLSQRADGAFRLTGFWPSTLRRDLKEFAAASGGELVRHRSAGNLETTILRGVAGETAEEFALDSPVAVAVQAGWSILQALPRLSEVGAAMPRITMPGFQTAARFDLASACWVPTSDVHKSGAYRIRRGFETIYIYRSDADVDNGTAAIAPVHLVKHLAANGRGKSLVSYHEKPELVIVPQGCDLPGLFGRAAAAMAGHLPVPRDVPLKGRKRKCLVYRAIDRPSADLLVTLLST

SEQ ID NO: 24655 - protein, 1822 aa, Mycobacterium novocastrense
MLSDQKPDLASSFENLREAFFRYYNTPFGLASEELQRERQALLDRDNGIYRMPLLELRPEYRTTGRNLRDSAVEAGLSTDIADFAATGLIPAGRQLYTHQELSLRHAAGSNRNIVITAGTGSGKTESFLLPILASLLEESKRWTGHRGSFVNWWTGEDDFISQRSGEVGRTAAVRAMILYPMNALVDDQLIRLRKAFDSNESRAWLDQNRLGHRFYFGRYTGATPVTGSPNDSRAVGDLRRYLRATEQRSRRAQEIGGDTQYFVPRLDGSEMRSRWDMSDAPPDVVITNYSMLNVMLLRSRDQQFFERTRAWLDEDASNRFTLVIDELHTYRGTAGTEVALLIRNLRNRLGLIDQPEKLRVLAASASLDPVRDRAYIEQFFGLPEESFDFLPGELIKPQRQHSDMSEAAKILAEAHNGHSALEAAESVGAQDALHAAFFEEGATEAPKALTQADLAEKLFPRTEGAVASDALSSLLRALAHSEGRPGWPRLRAHLFFRNVPGIWACTDSRRHSESTEDETRSVGPLFDEPVTRCGCGSRVLELLYCQNCGDVMLGGFVQAGITQSESLSAMMLADVPELSKLPDQVSLERTADNYIVYWPRTNRPELDELAWNADSGNVRYEFRRSILNSANGEVKNAKQGKNHTGWTFHTRSRMDRSGKPKRDPKSLSPFPTQCPNCGDDWEIKYKGGKLLPHTDPWRQRSPIRGMRTGFEKINQVLVTELMSQLPEPERKAIVFTDSRQDAAKLAAGMGLRHYQDLLRTLLYDSLAEAEDWPSIVDLARRLVRQGEKSAENKQARDRLRARDNALYNRLTDLWRGEEDEAYSGETLQLEKQLSAPQTLKLLADDVGAKALQLGVNPGGTHASLQSRYDRARGRRVGWSTLVNWEIEPVSARGGLDESEKQWWREVQENLHKEVIDGLFSGAGRDFESLGLGWLALTTDTSDITIEPTSAAALARSSLRVLGDARRFFGLRDPRDKPPVKLRLFWEAVADEHNLDYSEIQEAVLTHWGDAVRDYLISPEQVTLRRAGQQGWTCTNCRRQHLHRGTKVCTRCRRQLPADPGSVGAAQDYYSWKASTGQGRFRLGVAELTGQTDRVEAQSRQSRFQNVFLDGDENSRADGLDLLSVTTTMEAGVDIGSLEVVVLGNMPPTRFNYQQRVGRAGRRTSPLATALTVCRGRSHDEYYFARPELITNEPTPKPYLALGRQEILRRTLTSEAMRLAFEAVWPTAIESRVLSDLTNNSHGPFGLAAEWDAVSSAVQTWIEANADTLRDTARALTRFAPKHVSDVDWAQWLRETLVSAVTECAAAPTGHPDLSQRLAEAGILPMFGFPSQTRYLYLSRPKHPYPWPPRGAIDRDLSMAVSTFAPLSEVVRDGEVFPVVGVAAFRPTRPVRSEDDPLGPLRYVAVCRSCSYLHEAPDNRSGDENESCPQCSEPPGVYQWIPLRQPLGFRAGSPKDFDGNFAWTARAMAARALTDLSKLDEARHGDALALSGAGTRFVINDNGGRLHRFQHNAPGHTADWGGYVSVEAIEHGLLPGMAGSGDVMSVALGSVQPTDFLFVGTERPVRPSAGIRLSLDSLGLQPGGARETGEGRRAAWYSLAFLLRTAAAAYLDVQSLELAAGIYSGVLRGTPTTMAFLADTLENGAGFSTHLGKPEIFEEFLDRGILKYLESLRAPDHALECTASCYRCLRDYGNMAYHALLDWRLAGDLLNVMIDGTLAPDVDRERQSIERWAEAYGAEVCDDLECAAAIFESPIYGESAVIAKHPLEASEKALIAPRLSDSMAALEGRRSGVAVVFADTFVLDRDPSHVLQLFGEAQSPRP

SEQ ID NO: 24656 - protein, 326 aa, Mycobacterium novocastrense
MASQLSCLEICAGAGGQSLGLELGGFTHELAVEIAPEACDTLRLNRPQWSVREGDIRELDGRLYRGVDLLAGGVPCPPFSVAGRQLGPADERDLFPEALRLVAEARPASVLLENVRGLSTKRFAPYRAAIQAQLARLGYESEWKLITSSDFGVPQLRPRFILYAARKRTFARFQWPDPSPKATTVGEVLYPLMARDGWPGAADWARRANSIGPTLVGGSKKHGGADLGPTRARAAWLKLGVDGGGIADAGPSRDSSHDHVPRLTLQMVAVLQGFPPEWSFCGRKTAAYRQIGNALPPPVAAALGRAIFSAMEGRTSASTLAEPRSA

SEQ ID NO: 24657 - protein, 702 aa, Mycobacterium novocastrense
MGEREPSGQTELPDDLVRWQELLERAFFRERDPSGPFILDLELSDEIRQWTAEQNPSAQLGRVVARYVDLDNPLDVFGPLRSVWRKWAVGDRRNPPPNLAVLALTVAAASEMHRDESAVSHAYYYRLAQLVAPDESHESLEALRQRLAESFDLVAHWWSELSDWVDANPQVGVNTIRKHDRLTRIGYPLSQALLRRSDRMRLTRFFDRLDLRSLDVPEEGVLLSKLELWAATPRDLSPTLLSALTDPARRRVLASYLHRLAREWDGVVLTPEGATQLDIRLAVDLDDFTSQWVIFKHPQKSQVSLEVNDELVELTSGDYGAFYNWQGPMPAVVAWPSKPSVVVKGTGVAGRFAFPPLQPMRSHPDVGWLSEDDVEPYTPHILLVAPVWQNQIEKVLDAAARRGWRRLGQQPGAQLVVGRLIYIRVEIENLDAFKNALTQIDPSLARLFRSSACLRPRLVNGLHVFTDLGNRHYLQGGEPDLFLPAGDIPRTVPAALDGMHQEHPFQATGLPIPLRVIGPLNVGKHVLEVDGETLTFNVHTSGTEPVSPSSTLGWLQVGRLHELRRVGIDAVGVTAISGAIVNGSAAEPHFLRRAGRQYFVVDRRGTASAVSPPPPNPLFEQAGIPNSAVWELLAPDDAVWLFEERHNGEVAARRLRYAEPLIRDLDSYSRHLWTRVSEQLRGTNPLLDIYLRAWDRSSAHAR

SEQ ID NO: 24658 - protein, 1780 aa, Nakamurella multipartita DSM 44233
MTFPTPGQVERELKGAFLRYIDTAYALRDPHLVSERRRLLLEGQGNLFGPLMLEPVLPYQGVLDLAQSAAAAGINERDLTDVVRSVFGIEHSNSVMLRQHQVRSLCVHFNTGPGRNPVITSGTGSGKTESFLIPLLTRLAAEKRSACKLASPHHWWSIASQNDPWRPTRATGPTVAAMRAMILYPTNALVEDQVARLRRAVRGLRSQDEPIDVWFGRYTGATPGSGKPPLGRASGREVSDVAKGMRDLVRQNLLLAELADPDLISQFPDPTAGELVTRWDMIATPPDLLVTNYSMLNVMLMRDVEEPIFEATREWLTASKAHVFTLVVDELHLYRGSTGAEVGMVVRNLASRLGLDSESDQLRIIATSASIPGDHSGLDYLERFFGVGRTTFRVEPGEPKELRAVEVPSAVGILSMSSTQRMAGASAQNWAEAVATVCINEGENLPRAQTLDQIAGRLFGDDPDRNAALEAILGTLADVAKPSVQFRAHIMMRGMRGLWACSNSNCPGVVPEPGRRVGKLYDTPRSSCLVPKCGARVLELLYCYECGDVSLGGYIVDKMGDGTVVLSTTPVKAGDNTGDLVYRRTDDEYRWLWIGSPAPDEPIRHQLPASVSEDRATIEFNFVEAIYDPGLGSLTPASGPGNCVTIRHSGSDLDGVAIPALPEVCPRCHGRQSNRDLSVFFAGSVRSPIRAHTSGRSQLNQMAVSQLFRSLGHEASESRTIVFTDSRDDAARIAAGISLNNFRDQVRQVVRQLLHDRVSPVPTLRALIRGALNAGDVAMALSIASGRRSLYDKLRLEHAGLATDEDRAEIESAEREAETLPWALMVRETSRVLVKAGINPAGVGPSVAHSVGDLPWYRAYPPPQEADWARLESRIAEPVQLERERLTSEAVTQAVFDRASRDLESTRLGVVRAGITAPSDWGLAQEDADDLISSVLRLLGIANRYEGGYVAMTTSAPGSVRRYLTKVAVGQGLEPERLIALVGEFLRSSGLTDDSWTLRTMSGQDVLLLKVPGSELWVCSNCGTVHLHRSVGVCTNEECVNGRLEPTPVGEQNDDYYGWLASHELRRMRVAELTGQTSLSEQRARQRLFRGAVLPAPQESKLADPLDLLSVTTTMEVGVDIGSLRAVAMANMPPQRFNYQQRVGRAGRSGQPYSFALTISRDRAHDDYYFQSPERMTAADPPPPFIDLSRPRIVRRVIAAELLRRAFLNCSDPPTRTADSLHGTFGSTTEWMQRRNDVEGWLRTARDVTDVCERFAVYTAIDSAGLIGWARAQLVADIEEAIANPYFGHSELSELLANAGVLPMFGFPTRVRALYSGQITRSSDSEKYKVADRDLGMSISSFAPGAVVVKDGAEHLCVGFAAYSFIGASARARDPLGQALMVQRCDDCGSLNTDSNAAAVHCSVCQGDLRSFSVFQPEGYRTIYSSPDYDDSHITPMFSGYTELSANTALSREERLGGMSLRLLEQTEVVTVNDNNRRLFSLRRLHDGSIIATNPGLYRRPLPAWMQTGGSELDPAAIGEVRRTDVLLMGLDSLKVADGAIATRHWDCPAGFGALVSFAELVRNAAKDYLDIDQSELDVGLQPTLHNGTVSARVFLADALDNGAGYALELGQMPTLRRLLESIREQTGGRLRGDPHGSACTSSCPGCLRNYENRFLHWALDWRLGLDVVDLVLGRDLDLSSWAVRTAEVVASFLGGYGAYLNVVVEERNSIPVLVTREGRGRAVLVGHPLWRHDRAYWNSVVRDTVSLVEADGIAGVSVSDTFVLDRTPSRVFTALIDGI

SEQ ID NO: 24659 - protein, 467 aa, Nakamurella multipartita DSM 44233
MSEAEYSFRFVDLFAGLGGFHVALRELGGACVFAAELDPTLNALYAENYQLEAWKDINDLASSRIISQEVPDHDVLTAGFPCQPFSKAGEQLGFKDTTQGHLFFKVIQILQTKKPRHFLLENVPNILKHSGGGTLQTILAELEAIGYSVGVRRLSPHEFGIPQIRDRAYFVGSRDGLEQFRWPETEKSSTDIKSVLKHDLVDVRPIPAQTTHAINMWDDFLKRSPARVKLPWFPIWAMEFRATYPFEEATPSAIWAEKGSRGLSRHLGSFGFELRGLDRAAQFERLPSHARRADDFKFPDWKKDFIRQNREFYCENRKWIDPWLAKWEPWRMVSSYQKFEWNAQGAERKIDKHVIQVRASGLRVKRTTTAPSLIAMTNTQVPILGRHLVGVRRYMTPQECAELQCLGDIELPRNDLQAYKALGNAVNARVVKAIAEPLLGELTRAGGARIPVPKSRRKAIGGSVPSH

SEQ ID NO: 24660 - protein, 1002 aa, Nakamurella multipartita DSM 44233
MKARIEQRQGIDNSGYDKLRDAIADELFGLENAGQPVYALADIHALERIRARSSLSGEPIAAVSRLVLETLAIDRPGVTPFRWQADAAIRHRRHPVRTPPALPLLLVLSIAAEQMHAGGGVASHNYYSRLHELLNVPPGRRERLEQDYRRHAEELWGSLNAWLESWEGERGVPTAYALGGHAYIGLPLSQAVVRVQDRTDLHEIFVLEGMAPGLRYAPSDMQSTIEPYITRVPSPLSSNIRRLWQVATARERILDAACLELATWDGSGQAKATTAKQPVSTRLVAYVRTFPRRLVEFNLMLSFKWDGPTTVRFTTASGEVVVPTIAGTGGLTRLSSVEAIRADSLIEDDLKGQLGADDSKPFQRRAKRVVPLRWDDLQGAYVEIERITLGEDSLVLARRDVRNRVETHLTTHARPGWRRSDGIGGLPDGWDLYTDVQAISASDNPPPDLIPLTPRTRTSLTLRGGFVLPGHLRKWSSLDPPEVVALAAGAASICVRINEGSAVDPSSVIIEQELEGELAVVPLKSTEIVDGEYTVAMYVDGKRRPSSTTILRLRSADSPQFNVDDDDIRLVYSPDSGPTWPLSAGPAMWPVYVNGARCSGEIKGQAQSSTLMHEYSPRPRPSTKGTSSAIRIGQPPAGNSCLVTGRHRFELPPAVPGHRATRTIEGECTYCGLVKRFAGTPWAALRRVQRPTRSGGAVVIPPVDHHHGGPDYQVAFDALNHVGHGTYQSFEKIAAQVEGSGLFADSFIRRQEVVGHIDVARDPWLQVTDWAINSATLVPVASNRWVLIGSRSRKMLAQLRRVLQGTTINEFVDAEQVLVEVTCDKERMSGRESALAEIGVILLRGSPALNIALALPNLSELASALRRMQVPAYRTVESWNTTTATWQPAHSMERMGAYRIRDFRSTYVVREGADIASGEVAIGNAQLVKHIANMWADDPLARYHTPSDSVIAPLGADLPGLYGRALSICSGRAPREIVKHNMVQYQSVSREVANVIFARLCQ

SEQ ID NO: 24661 - protein, 1946 aa, Pantoea sp. BL1
MLDPIGGFRRIQDFFISYIETSFRIADPSVAASRRNLLNSSGEFAAEPYIEPVLRYESSDKTLEALAEMEGGPLNSLSPKGRKAFVELALSGLFDSKLGDEVWSRRSVHAPYSHQTQMLERGILPGRPGIVTSGTGSGKTESFMLPILAALSNEAVNWAAPCEGYLQNRWWTGEKTNWTSRREGEQRPAALRAMVLYPMNALVEDQMARLRKTLDSEGARGVMEQHFSGNKIFFGQYTSATPITGYASHPRLSGVKSEKSRRARNLEKLRKALKRIDSDQQAARAFDEKENTAEKTRYIFPSTDGGEMMSRWDMQAAPPDLLVTNASMLGAMLSREVEDGIFDATREWLINNNDAYFYLVFDELHLLRGSAGTETAMLIKSLIVRLGLDDPKHRYKLRLLASSASLPMDGVDGEQSRKYLRDLFSPFGTCRDSLDPGSDDPDFWRNCVIKGIPYVPLKPEGKIAVRPFAALMRVALEGQENVVRNLKMTDALSQALSNVFMALDVKAQNSMQGIKQAAEKAAALLTNACIEDGSELPRAMPPGIIIDKVFLKEDPSNQDELELALRGLMLVRALPESEIDCDKPANVTPAFRVHTFVRNIEGFFASVLPGEQKAKFSDFCLERGLSHAPAGLGEKRGRRLFEMLYCEACGELLIGGQKGQKGGKTIELLPSATNLENLPERPGAEYYDDMTLDEFAVFWPVDTTHSSPVGCEKGWDVWDKAVLNPVTGIVTIGQEIFPTNTDAVHGYLYFQKTIPGKKGEPTKRPSAQPFCCPNCGIDYSSRPASNRTRTPIRAFRTGVTKSSQLVATELFELLHAIGAEAKSIVFSDSRQDAASMALEIERLHLRDLRREILVAAARTMLKEAENNYISEDILKDQMTKAMLANDDNEYGRLYALKKHQEGIANLCKYKRIKIDRLLESEGDSIGRITSELVGLGISPYKYRSSSDDEDSNVWHANFTKEDTVVKYSDGLSSHEKMKIKTKVAGDQFELIDDVIFANTFFALEETGLAYPCISNKDDLPELDAWLRVFSGAYRVTDNKYFDSTRTRDWYEGSHVEKEKVKRVARVLFGDRGYQEGLTRILNQFSQLEHKAGRIKIGKLFLKISKPGDSYWQCRKCGRIHLHLGFKNCTRCLTPLEVKPSGVVEKLWKENFLGKRIVRGEQDGVKRFRLNVEELTGQTDDFSDRLRKFKGIFVDEMSELEKLDAEIDMLAVTTTMEVGIDIGSLQSVYQANMPPQRFNYQQRVGRAGRRGQAFSFVITFCRGRTHDAYYFAHPHAITGDPPPPPFLAVDHDAIPLRLMRKVWLRAAFNLLREEDHKKGIAFPGDKLVPPDIHGEYISTHDYYHSDETNWAERLLGALKATQNIHDRFVIAATFDPKQRQRLYSALDAERIINEIAELNDYVPSEDMGLARFLAEHGKLPMYGMPTRVRNLYLGLRKTKGINAQEEYEWSTMDRDLDLAVFEYAPGSVLIKDKKKHEVIGFTGNYQEPQVQNNRISDLSTVGSWQESCSHVAICPACGSAKLELDKPDNDINCEDCCTPISPNEFRLYITPAAFRTDFKPKDDIDNFIRMSLKTTATVLHEGVPTKCGSFTVQRGEVTILRLNDGPISGEKEGERFNVDLVNDQKAPMPFSTYCPSVKGEQAIDSDWLKSHANPRWQLRGEEKSFGLVSSKETESLHLEITKFDTRLNMDMVARYGEYMNLPSRAAAISATQILTHKAALYLDVSPDEFEMLEPRLHLGKPRLQIADALINGSGLCRRLAEPATANGFPLIVKLLHEILEENDKWPMVDFLNKDHPIQCQTACYKCIQRYGNRQYHGLLDWRLGLAYLRAMVMPEFACGLNAADWNQPEMKGWRERAFQLAEDVEALRPATIKLLKEYSLPVLIEIQDGKELWRAVVTHPLWQSKDPERNALIDSMGLADGRSSLKFIDTFELERRPLRALANLKPS

SEQ ID NO: 24662 - protein, 411 aa, Pantoea sp. BL1
MSTKAAMSDNHLTEPYEAGFSFYEFFAGGGMARAGLGKQWRCLFANDMDPIKASTYIDNWGDEHLDMRDVREVTSCELPLHADLSWASFPCQDLSLAGNGLGIGERDSSADETTRSGAIWPFLDLISRLGEENRKPPILVLENVLGLLTLDKGSHFAAICHQLSKTGYRYGAIIIDAKHFLPQSRPRVFVVAISRHISIPECLVSEEPLSKWHSPSLLRACDALAKEARNDWIWWSPGDLPDARMRELDDLIDFEHDNALWHSAEETQRLISMMAPANLARLANAQASGETIAGSLYLRMRKEKGVNRQRTEITFSTVLGCLRTPKGGASRPRIIVVKGSQVKTRLLSVKEAAALMGLPDDFILPAAYQSAFKVIGDGLAVPPVRFLAERILEPLVMAVRINSQRTEDIPE

SEQ ID NO: 24663 - protein, 852 aa, Pantoea sp. BL1
MNWTSLVTPDGWESKLIDYFLRFGAGGDAQDIRWFEVTPSTLAAAFADSSANANEIEEAFRTCMSKIRDLPQRLEYGMIEKSTRDTPGFFTYLVMTLLISSQFDAQEERNDFRLKLQNWLQTSHSFQNLSGVNQMWEALAEWLNQRIQEGESYRHLVLPPRDGRVQIGHTLRLAFPNKADLRLMSECLERYPQAAADPRQLIKYFQIVIQRPGVSYALKEAYTKFRDAWLLGHRALFDMPFWRLRQRAFEISSGAPNHQIIIDMYVDFDGSRCYFSSVGETGETVFHPELSKALKDRGAGSSENLGRASQAGLLFFDEIGHGRWRAKPSPDVNSQRFHIALSSKHSVHISKRLNGYIVEDDWILTVQPLNLVSAMDIFRLLRSSWGTQGDDVTRPQLYGGIRLPGGWLGLPAFLPFIESDTLRYKIYSSGNDEAGINVSVIDGRLISSVPLNCELSIEPALETGEKTPPWRRRARFFTYAVPHPTLGESARYRFEPLCDWLTSSLKAPTFNFEEQFQWEDNEVCCDHLLEAIYASGASGWEEAELIALLRHVDGKINVWHLIRCLQNAGLIEPRLRPGWKGRAWTLVKSSLLHIRNGENSLIVVEGAVCARLVDDFQKVVAGLGGKSFRRCGVSLWSPPVFGAVLADPVALSQRLGWPLIEASSSSDTIPLSLATTERAAELHDLAAVWDWHSGRFQQHGFQDKESVSLSLHIHPGGRDHDIYRVVSGRKTKHYLSRTAAIIAAGAHNREPMFERVAKNHLQCLIDDCGLPDVLATGIRRHALRNGGPMDSGYTYPVDDISLLWLESLLPGCFYSPSSNGEDDSSRVVSVSRHSGGRIRPIWRNGRLTLTLG

SEQ ID NO: 24664 - protein, 696 aa, Pantoea sp. BL1
MSNIPWYLGQYDRRNYQSYLTAIAQETPDGWRTIENPKKLFPRTGEVEFNDSDALPLRKGEWAAFHVGPGTRNRAQAKRARRIYPYYDLSSGQSLLEARRQLSFDGIATDGEPGVWAIRFGLDGLILANLAESKTGCLIISKSQNVYEYDFREGGVISVSGISDNGKLFYMPDVDALPTQIHDWTPDKQYIEYVIQLLSCADLTVDISSWLRVHTDEQNGKLSSGVDALLAAAQMLRAGELAKKLEEEDSLTRQFTEAVLKDQHITRLLEHQIQSIAEEERVTLRAQQQKALDNEFSGERLRRREVIEMEMAVFDKARKSQIEEEIAQLWQFQKEKLQTDFAENKADIEKTLNQEKEYLKSEISRLKDASNELCAQNENQHHILASLTYEHEACLASLRETEERTAQAKIELEKMDVAIAEKFRHMAYSVFPKVCLPTQARVVSCEEFGQLVRENKLLTPSGKILMTQFLALMLAGECPLLFGPETQDFLAVAESLISSGRSIRQIADPTIISCEDLWVRAGNNMATPLYQGLLLSEASCPRTILAVIERVECSAVRFWLPALKDRLYRGDLHRRFLICGTIENEDCEEMEEIKEQHLRLRMENVVIRNAIALSPLYLSSENHSELDPGPKSQGSFPDKLAIADEMSAGRLDLANTLRAMRTAHEVVPLDTENKAMHQKYLVDLYANLNNDEMYAQ

SEQ ID NO: 24665 - protein, 1953 aa, Paracoccus sp. MKU1
MFDPIGGFSRMIEQFLAYLDTAYRIDDSRVSAMRRELLSQPGQLALDPIFEAVPRYETAGHGLEALIDDPGKKLPGFTRPQREAFIELALSGLFERDKESADIKGEYEPYLHQMQMLSKGVSDGKPGIVTSGTGSGKTESFMLPILAQLAKEATTWPAPLKPVDDDWLEKGKEFQLHRRNEHPERPKAIRALILYPLNALVEDQMVRLRKALDSPDAQEVMAKHFKGNRLFFGRYTGKSPVTGFLSHPRKSRDRSWKGRNRRARRELKQELQRYQSIQRRLDAEGENDLRYIFPTTDGSELISRWDMQATPPDILVTNQSILNAMLVREVEDSILTQTRNWLVENNDARFYLVLDELHLVRGSAGAEMAGLLKVLLERLCLADGAHAHKLRILSSSASLPMDEENAAASIEYLRNMFGAAGTAGAENPDKVWKDSVVTGKAIAVPRPVRTPSRSSLVELSRALKDLDYRKQPAQLLEKFVASAQSLPGSSGAASAALMLEATATAAAMLDFAMQDADCPGAKRPSSVGDIGKNLFGAEDWDAVRGLLALRAIPDLPKSVLPDELRPSRSEIASLPGFRMHSFVRNIEGLFASVGRDRNGAVVWGRPSIERGQDYDEVKELGRKRLFEMLYCEACGDLYLGGKRGETEPGTSSRVSLLPAPQELEKLPESASSLRFEEASFREFALFWPSQGTPEREIRVERSPYEWARGYLNPQTGVVSGREEDGDVSGYLLRWKGNDAFHQRAMDDDGTAVPYCCAKCGTDYSGRYRQPNSKKREGRISPIRSFRTGFGKTSQLLATELVAALKSQGGDGKLVAFSDSREDAANLALEVEVQHQRDLRREILISAATRIAADRAFTADDDAELQRLKTEIVDLMADDQDTDHLMLRMKALQKRKAGAGQPPSVPLKDLFEFERDKAGYAARPILAELMKLGSTPVEGADTIHTRVRNKPWYEFFERQDGDQIAWKNEVPEEELKLIRRAREKVQDEQPPDATDLLFSKTYFALEETGLGWPSFYGPEEYTPEKSRDDAMLRIFADAYRITPNRFQEETKTAWKTAFDMLGLGDNRLKRLMTKIVQQPEKGCEDFLHKLKTTLKQVRGDGSIDISMLYFRAAEPSAKAWRCERCGRVHLHEGFGKCTRCGETLTHPEDLTASVIAQGNFLGRRVMRAVGSDEPLFRLKCEELTGQTKDPAERLQQFKGVFVKADGETDTNFEWRKLFDSVDLISVTTTMEVGVDIGSLQAVYQGNMPPQRFNYQQRVGRAGRRGQAFSTVLTVCRSKSHDIHYFHNPLEITGAAPPPPFITTGLIDIPSRLLRKFWLVEAFRILRKEADQDWAGDNVVPGDIHGEFLYCNEYFNPEKHWRKKLAAALAQTDHRRLRLAKILADVSGCEVIEITTIVTADKVLAAIDGLQDEFGLQPIGIAAALAERGLVPLYGMPTRTRNLYVELQKAKGSFEAEWDTIDRDQDMAIFDFAPGSVRTREKLRHRCIGFTGILPDPDEFMTDFGVPMRPFSPWYKDDFRLRFCGGCGAWSRGGDETLTCPACGADNSDPGIRCITPSGYRTEFRPTDENLASKVGQRISLASLGKVDKQKTDENLRVNFAEQSEIFLVNPGFKDDEDFTGFDIREAIDQDAQRIGWWTKTKPLVKLAGQAISSQVLAEDQNGRYKAEDDVVSAWLASTKITNSLQISPIQLNPNLRLLDMDVGLSMGRRDPSRTSVRAAAISATEILVQRAALDLDIAPEEFDVLAPNIMVSSSGERLPYLQISDALPNGSGFCRHLLGDSTIPVSSLIRSILDDAKAWPRNEVSDDTHRNRCGSSCYRCLQRYNNRSLHGLLDWRLGLSYLRALSDPGYECGFDGGYAHFELSDWTAVSHDLALQTKTFIPGNKVLSIESRLDIQIFSLDDRHSRWGVVVHPLWNTERLFKMMGLDRSYVAIDSFELARRPLHVLQRARFSVK

SEQ ID NO: 24666 - protein, 603 aa, Paracoccus sp. MKU1
MSCTAIDLYSGCGGMSAGAAAAIPGLEIKWALDIDANAARTFRKAHPEAVVDCCDVSLVTATDVVERAGIEKIDWFFAGPTCQAVSTMGVFHLEDPRNALFVHFIRLLDGFIAAGRKPRRVIMENVPGVVYGRNLLIVKELFKLFEERDYNVFADVVNMADYGLPQLRNRFILIATVEARPATFPLHTHAPVATENLQEYVTVREAIADLTEEVDKNAVARLSISGAPTPFQAFVRDSSGFAPNHHANNLSEINRRRVANVPQGGCWKDIPPELLPDRFRRVRLTDYATLYGRLHEASPSYTISAGFNNVTSGCFTHPIHNRALTVREGARLQGFRDSYEFLGPREAQYRQVGNAVPPYFMMRLVQHLQDSEAGLPARITSPVLDSGRKLPSMVKRYMKRKNDSVRSRDGYGGGTYWPAGWGEPIPADAVAANGYRLEDTPLRYRRRDEWRVTRDHFVNKDIIKVYEDQRRLELPSGAIALALVREDDVDAIDRAIVQLLAIIGSSGYPLEMQVSVRYLRARLKLLHDRLREKQVEYLPQMEIIELDGVIRFGQAIGLPDVARLTFEDSDFAEGQRTQGPHLVLHRQSISGEQFTSGDSLLSD

SEQ ID NO: 24667 - protein, 530 aa, Paracoccus sp. MKU1
MDAIEVRSGLWLTQFDRRPSGYGLSPSTIMRSVPVVTLKNRPETIRLSSGLVIYVTQPRWAPEKEVDLRPEHEMLQAAEYWLARATSSIVQSSSNERFIDLLRQYIANTINTEEMADLSAVIGLLSKRKTIVELLPQMMAREPDFQERLREFEQSERDRLRASLQSRLEEEMQSERARLSDIRADLADAETRLALVAHREGLLRSEAEKHDESIRTRIAEAAKDVVGEASRETQQLSEEVTRLRDLISQTPISTVYATKTDLLPERKQQEDASGQLVIATEEVRRSIIGSLSSAVAMPVADVATIILRSTEDLPVLIGNKASGVAADISVAIGGENSVIAFCDPSRISWQDLLRDETSGLAAAIAKARTHPGLIVPVALCGITNGPCEYWVPQFIESRRLGKLPRNLAIIASAGVDGTRVSVPDSVLEYFVPILVPASARPARNLFAGAWGAELEVDKKKLAEAIDLLSKSDSLERAALIRAAKTLSRTPAGIDMGEVAAALVRQEERRLSLPGEGQQHAFNTYFKNIEG

SEQ ID NO: 24668 - protein, 1986 aa, Pectobacterium carotovorum subsp. carotovorum
MNNPLETFESIRDFYIAYLETAFRIGSPAIQAYRRELLEKQGTLCADLFLEPMPRYRDYGLTISDLRDASKGETWLPGFTVQQRAAFIDLCLGGLLPRDPKDVTKGRFKLYSHQLEMLQRGVQPGKPGIVTSGTGSGKTESFLLPILAQIAKEASQWSQSSALKSWLPWWREPNAQPTFMRDREAPISGRPKAVRALILYPMNALVEDQLVRMRRALDSDEAHEVMDSHFGGNRIFFGRYTSATKVTGWLDHPRQGNEPKEKKRVAGKVAELREYLQFAEQTHKEAVHQGNLDKDDNLQFNFPRPGGGEVLSRWEMQKMPPDILITNTSMLSTMLVREIDDPIFDQTQQWIERDPNAYFYLVLDELHLQRGTAGTEVSYLLKHLINRLGLDQPQHRHKLRILASSASLPVSGQEGNQSIDYLWGMFGQRGLPTNASAKDWKTCIVDGKLEELVEIPYFCGDLPALCQAVEKLKSTEASVIWSGIARSLGCYRDDVTIEELAQHTVLLAARMLEKGCTDDKKSSRATAINSLATDLFGEHPDARRGVSALIWIRTTVDSWQQWFAHPFPAHIVLPRFRAHAFLRALEGLYAAPLPSPPQADKDEINQWLFADLTVESGLRYGDRLYGDKQRSRRVELLYCECCATLFLGGKPSAFSATSNRTELLPNDPDIEKLPEHAKSVMIERRSAEEYVLFMPTVDRFWPLGNEKLTDDDSFGKWREASYDPFTATITQPISLVKPLLKTEIAGWFYSVPLGDFIPPKREQSSSKSPGSSLPFQCPACGTSYKYGKGKQSPIRGFRVGFAKTTQLLASTLMAELQKFGDQERLITFSDSRQDAAKAALDLESGHHDDIRREILIGSLKELAADKCSHEKLRIRFDEVTKRKKELDILDDLNKLSDVQEKELDDLWKERKHIKETLLLPQADSVSLEAILENSPKAGEPLNRLLAKLVKAGIHPTDRTGITPIPDPSKHSEDIKTFTWQQLFDKDHQNKWCWKAFPYYETDLDIARQEISRDLKELAGESVFSKTYFALEEAGWGYPCIPISENYSREKLAIFDALLRVLADAYRVEPSQYRNPDNPNTPWGEALAIPKLNRVYRFANSICQQSGGSVLGLLDEFLLLLEKAGHQGGIIDIGKVHFHLVEPAASFWRCNKCGRVHLHLGAKICTRCHAVLPRIQYGEAGVLQKQNYLGKRILHSSGSHRMRSEELTGMTENPAARLRRFKGILIADDDDILPMGLKNFEPDTDLDRKARVIDVLSVTTTMEVGVDIGDLRAVFQANMPPQRFNYQQRVGRAGRRGQAFAFVLTACRSKSHDLFYFRHPEKITGDLPPPPFLTTKLEMICQRLVRKVWLVAAFKWLRQNTINSHQSWPVDEHRHKTDNHGEFFQVDWLKDRRVDWLPRIRQALIATMRDRDEFARVCMPDDQSFYHSIVQLLTPDNLSQDIDSALNDHAMAGKGLAEALAERGQFPMYGMPTRTRLLQTRAIATGEDDIQFASMDRDLDIAIQEFAPGKYLVQDKRRYLTAGYAGMLRQRYPNSKEFDSNVSELGEGRTMTACPVCHVWTSINHTIPECTACGAVVDDVEQYQCYVPYGFITSLEDKSVKEDVDQTLTNASRVSIAEAYSFSSEAEFDANVAIQLESQICLHRLNRGTYVDERWSGFNALQGNLRVPFRKEGVYQSLTANRVWADSQLLETDPVLKRRFIPLQESRTSFYLAAPKVTDLLALMVVNTPAGLQLQTPAFRAAALSAAFIIVNYASKELLDIDPEEIEILEPRVQRLADGRLAPIMQMADRLVNGSGLCERLQQKGTSGTPIILEVMKAIVSNKNGFPLKEFLDNDHPKKCIQACYHCLHRYGNQAYHGLLDWRLGLDVIQLLLDKNYDAGLNGDFSAPGIADWRENAVSLAKEAASLFNSEVRMVGHIPLINIGPQRWVAVTHPFWSVDGVFIANPELERLFLEWQLEKKTISTFDLSRRMGAVMTKLRNLDGNQED

SEQ ID NO: 24669 - protein, 361 aa, Pectobacterium carotovorum subsp. carotovorum
MNSVFEREHDNIQVLSLFSGGGGMDFGIESAGGKVVFANDIVENACKTLEKYFPESEVRLGDISNIQNFPHVDVVVGGYPCQSFSMAGNRKPDSDARTNLYKQFLRVLNIVRPKYFVAENVSGLQQLGAGSFLEQQLTAYQQAGYQVSYHLVNAKEYGVPQSRKRLFIIGVRNDLGQCFEFPPATHGKQNQKNSHLKPYASHGDAICDLPLWPEGEFYERPHDPEGHFSWYFMSRNRKAKWDSPAYTVVANWRHVTLHPASPVMKLTWSNLDDGWKQRWDFSDEYEHLAVDETRPKLEQARRLSWRECARIQTFCHDYEPVGDIDAKFTQIGNAVPPMLAEVLFSHLFSGAGLKNLSIKSR

SEQ ID NO: 24670 - protein, 927 aa, Pectobacterium carotovorum subsp. carotovorum
MGESFPVTLDEWNTALVKAIFFDPSYVGATLSRIDATGRIFDKLKGSRSKEEAKSSFLNAFGASADEIQNHFRDELRIDILAGINGVPPHFAILYLTLLAASADDHTHDEGDFRVRFSLLLGFDKNRKFIFSELPKMWKRLEKWSCNKKECAHLILPDPQRETLIGYSKRLSFPSYKDDLLLRRLLFSKGLDSYSKFEIISQAVYEKINSFSLTFRSEFSQFSDLLLNASLKQAYDSPFWGAVRDITRNDESQKIAENGKFCIQLGSADVWNPEIYLLMDQKGSDVFTAQELYTISQQTSIYTKSYYQSNINNTLIHLFLLSQKKRKGLYQSRIGMALRAGCLPLFQDDSGYISSDGHYFDDGPVCLVIDSNYVKNISVACKGINLRFIFLGVNSECDKWNVLVFDAVSRQALTTLADALPESAQRFLIQSWMPARPHLIGGARFGQAVLLNPASTPFIRMEGANSGSFVISDSMGNELATGELSASDEGLYISPEKLVSIHGQTLCRYLLTVDQQTTPLVYDVCVLDHAPDAVYRRLKEPSNWLIDGPLGVLVPFDDITHNESNSGFVNKQKLTPLGGVWSLWQHNESPPAEREAMGLHSIPVALDWLAEALALRFQRRSTLSFDELSKHLTPVSRAICIPVWRLRRMLFVSGFLSVVESRYTPYPLVIQAPRTISVFDEKAGTVARICGMMTKSERNQLQNALVDNEQLKRWSLRGHDLAIGCVELNLSGVERIELLIEQLGLQLITKADFSVSPLSGVISPITKIENIPMLPANINVSAWQEEKNKWSEESTLIYPASNTLIRCREKQRNRYFITTQNGCWQTDSFAWGLMAQTIFSKKKLGSQSHNGDLCWSKSLIALPLSLTQWWLHFAGGCLSIGDDGQVSFVGGGSSIWGDIGRSEITTQEYGDRAIVRRSRALKLRRGR

SEQ ID NO: 24671 - protein, 940 aa, Pectobacterium carotovorum subsp. carotovorum
MVKKKRVIKERLNQMYCFGTEPHELISCLKECKKKLIIAGAKADNLPRTLPQKLYFLSTLQPKARLVIQTWFRTNVLFPEVDEPEKILDQLLLKERNENNKIEASKPLWRAILGFYVSQSCPEIIERFLNDESVLTSHDDVEEYTESLPEHQVVNVTEDDIEQCLLISQGLNDLPPDRILPMFVAGLVDTLNGEQEAASAWKEKLSTHAIPMAQKFESILTEFELTHTRREANGLEVSSAEFITTEDMNDFVVDSIAFIGVVTKLLPNDAFFVSPIALLINDKVWSISEEQAKILYPHRGEVVGFINNYTKSFSQGELGVWLSEHRPSDKPAQYVLADYQSRVYPVVRIPHLSSTPDSVRAWLLTQYQPHDESPAIFLLDDGVALRLPSDLSDPRKYDFDVPLDSYRKLACIELHSQKTTIVTQLPVASEKYDCAPAGTWIKRLMKLNHSSTNFPVFNKTHLKNLTHFITEHEPESNAYLRALAHLEQIADSRELLDDMVQRLLKLPVIDAQINIEKKAILADYESEQEQLRQAIASLADKKAQLESEIDKQKKHLKTEIEKSKKVIRQQEAELDWRIRQTFENASQAGIETLAQTALFRALVADVTVSVSQPEFIVKPESAIATALSIPQPESYLSPIATEITSKNQLLTVMEEQATATGLSETLLSGIVAAANVIPIVGLLGKNTKKALSAIANVFSGGVRGEVSIHGDLFSISDLMKSPVLVRSVENTCSMTLGDFLLYQQDNRLATVVELRGFNRMPPETLLPELSDCQISDEQASGFCWVDQHQTLRHLSISQPILFVLTFAVGKSTFPLQGPSARRLPMFLTESIWGDEQPANSNTDITPAYVTSVLWQSLYTSIRQSNAHHYNEQQVLQTTLKSFHYSDEKSQAITKLVFESGRSTSEKIVSDIEPLAPTLTNYAREVTQGEAAAVLDCLFQS

SEQ ID NO: 24672 - protein, 1980 aa, Pectobacterium carotovorum subsp. carotovorum PCC21
MNNPLETFESIRDFYISYLETAFRIGSSDIQSERRALLEQQGTLCADLFLEPMPRYQHYGLTISELRNDAQGQTWLPGFNAQQRAAFIDLCLGGLLPHNKTDPTKGRFNLYTHQLDMLKRGVQPGKPGIVTSGTGSGKTESFLLPVLAQIAKEATGWPQSPALKRWQPWWHNVADKQPSFMRGHEAASRPKAVRALILYPMNALVEDQLVRMRRALDSSEAHEVMDAHFGGNRIFFGRYTSATKVTGWLKHPRLSEEKNEKKRVAKKITELREYMQLTEETHQEAVRQARQNKDNELSFNFPRTAGGEVLSRWEMQKTPPDILITNTSMLSTMLVREVDDPIFEQTRQWIERDPDAYFYLILDELHLQRGTAGTEVSYLLKHLINRLGLDQEKHRHKLRILASSASLPVEGPEGEQSVEYLWGMFGQRGLPSGASSSDWKECIIKGDPLPPGNMSLFQGDLEAFYHAVLQLQQAPLTSLQHWQNVACTMRMAASEVSTEQLAQRVVLQAANLLESGCYTDDHSPRATSIKMLSSRIFSAQPNSEKALRALIWLRSTEGDWPQWFSHAFPDDIGAPRFRAHAFLRALEGLYAAPLPAPSAASSQEINHRYFGDLTVESGLRYGKDKKSRRVELLYCECCGNLFLGGKPSVFSGSESRIELLPNDPDTEQLPEHAKSVIVERRSAEEYALFMPVVERFWPKGDETLNGDDAFGTWGKASYDPFTATIQHPVSLLKLLPENHIAGWFYYVKPGEFTSPERGQSSSQSPGTALPFQCPACGTSYKYGKGKLSPIRSFRVGFSKTTQLLASSLMAELQRSGNREQLVTFSDSRQDAARAALDLESGHHDDVRREIVVHSLQSIAADKPSHNQLKIRQAEIENRNKTLINLNVRSDEEEDELDRLADERKKIRALLSKPEADSIPLREILEPESPDAGQPLGLLLRAQVDAGIHPSDRTGIAPVPDPEKHEEGTLTFAWQQLFEKNAQGAWCWKALPSYEDNLLVARQEISRDLKRLVGESVFSKTYFALEESGWGYPCLPITGNDSREQLAIYDAMFRVLADAYRVTPSQYTTKETRWSSARDVNRRNRLYRFTQAICQRSGGEPLSLIDSFLRRLELVGHLGGIIDIGKMHFRLAEPTDRVWRCSHCGRIHMHTGAGICTRCHFPLPETPCSEAKTLQMQHYLGKRLSHSSGVHRMRSEELTGMTENPAARLRRFKGILIADDDDILPEGMKDFAPDRDLDRAARVVDVLSVTTTMEVGVDIGDLRAVFQANMPPQRFNYQQRVGRAGRRGQAFSFVLTACRSKSHDLFYFRHPEKITGDLPPPPFLTTKLEMICQRLVRKIWLVSTFKWLRQQTEKADHPWPVDDYAHTPDNHGEFFPVHWLKENQADWLPKIRRAIEATILARDEFARTCTQQDPHLFQKIIQPLTPDQLIQDINAVLNDSAMEAKGLAEALAEHGKFPMYGMPTRSRLLLTRPVSTGEKEIEFASMDRDLDIAIQEFAPGKILVQDKRRYFTAGYSGMLKQSRKNPRSFYSNACEPGELRIMTACPVCNIWAPANAQATECTICGAVMDKAERYQCYVPYGFITTLEPKSAKEDFDQILTTASRVSIAEAYTFSAMPEPDVNVAIQLQPQTCLHRLNRGIYTDKTWRGFNATQGSLSVPFRKEGTYQPLWANRVWMDSQIIETDLLVKNRFTDRGENLNTFYLAAPKVTDLLALRVAQTPPGLRLQYSTLTPAFRAAALSASFIIVNYASKELLDIDPEEIEILEPRVQMLKNGKSVPVLQMADRLVNGSGLCERLQQKGSSGSLIILEIMKKILNNKTAYPLAEFLQPDHRERCFQGCYHCLHRYGNQPYHGLLDWRLGLDVIQLLQDQTYNAGLNGDFTSPGVSDWPENALRLAKEAASLYSDSDVKVMGNIPVIRTGDGRWAAVLHPFWDPDAAFVANPELEAFSYEVDVDATNTFALSRRMGTEMAKLRTQASSSQE

SEQ ID NO: 24673 - protein, 361 aa, Pectobacterium carotovorum subsp. carotovorum PCC21
MSSVFERENDNIRVLSLFSGCGGMDFGITSAGGDIVFANDVVENACKTLGNYFPDTDVIHSDISQIQSFPDVDIVVGGYPCQSFSMAGNRKPNNDDRTNLYKHFLRVLETVRPKYFVAENVSGLKHLGAGSFLEQQLTAYKAAGYQVSYHLVNARAYGVPQSRKRLFIIGVRNDLGQYFEFPAETHGKATKKNPHLKPYVSHGEAIRDLPLWPEGEFYERPHDPEGHFSWYFMSRNRKAQWDSPAYTVVANWRHVTLHPASPVMKLTWSNLEDGWKQRWDFSDEYEHLTADTSRPKLEQARRLSWRECARIQTFPQGFEPTGDVESKFTQIGNAVPPLLAEVLFRHLFSGAGLKKMTANGN

SEQ ID NO: 24674 - protein, 921 aa, Pectobacterium carotovorum subsp. carotovorum PCC21
MDDSFPVTLEQWNAELVKIVFLESSHTGSTLSRIDTTGRIFEQLAGPRSKEDAKRSFLASFGKEASKIQAALKDESRLDILAQLKGYPTYFAILYLTLLAASADDDTHDEGNFRVRFSVLLGFDKKKEFIFTELPNLWERLERWSSRKQNCTRLVLPEPSKNERLIGYSKRIAFPCYKDEVFLRDILVNNALDSHSTFESVNRLVHQYISCFGEVFNQEFIEFRTLLSKAAMQQAYDSPFWGAVRDITVHTERKQLKENGKYCIHMEFNDSGYPEIYLLMDDAAVTASEIQHYYSLPNEIENYNNIYYEQDIGTTLNTLDLLLKKRKGYLYKSRVGAALRSGCLPLFRDDFCHISSEGENYDNSSLYLILHHKYADSIFTALKKTDERAQRWDIKSTKWSIVSSDKVDRQTLDKIVHLLPEEAHRFLIQGWRPARPRMSGAARFGQSILLNPASTPIIHMSEVLRGCYVISNKDGEELTHGSLSQGAEGLFISPEELMGISGQAFCRYKLTLAYSDIPINFDVHVLDHAPYATYRKITEPHDWLIDGPSGVLMALEDTAVIPPLKREEPMPLSGAQMLWQYENGLPVTCQYTELHNIPAAFDWIAEALALRFQRRSTLPFGELKKHIEPVSQVTRVPEWQLRRMLFAAGWLCVVQRRHAPYPLVSLAERTISVDVTEQGIVARILGMFTRSERNLLQEALNNGERIGRRLVEDNGFSMGCIELHLSARERVHAFIEQFGLRLVNHDDLPANALSGVLLPSSQMQFIPTLPPDLYVSLWQAEKYQWSEEQRLTQTANNLLIRCQEKQRYRYFIRQNAGYWQTDSFSWALMAQMICTGETFGVQKGDSDWCWSTKIIALPPSVLQWWTHVAHGCLSITDNGGYLFAGGKVPLWNNVITFPSCSRALARRSRALITRKLRRTLQ

SEQ ID NO: 24675 - protein, 931 aa, Pectobacterium carotovorum subsp. carotovorum PCC21
MAKKKSIISDRLGQMYHFGTESHELIKCLQECKQRLTRNGAKADNLPKGPEKRLHFLRTLPPKAKPVVSDWLRENLTFSERNDPQTVLRELLELEAESNTEDIELCKPLWRTILGFYISSDCPEIITKFLNGEEIDLPQHGVSDSLTINVTDEDIEQCALISQGKEILMPARTIPMFVGGLVDALKGTRTTDNRWRTKLSEHSLPLARKLGELIDQFGARNDRKTMDGTSVIQALPVVSKEIDGTMDEVIFIGKVLALTASGAFFVTPISLLIDGNLRDLPEELVKDFFPHGGEAISFENYFSKKFTRGEMAIWKARYQPSDKSAQYVITDYLSRVYPVVALPHTSDDPDAVREWLLTSYQPQNDTPVIFQLSDGLSLRLPGDLPDPKKYDFDMPLESYRQVPQTLLGSHALTVITELPQVSEKYDCAEASTWIKRLLKRTDSAKDFPQFSKGQLQNLTHFIAEHESDNEASYLRAVSHLEQIADTRSFLNDTTQQLLALPEIEAQLNIEKQEILARYEDEQLQIKQSITVLSEKKIQLENEIADQKKKLKKETDRINKALRQQENELEQRIKKTFEAASQAGVETLAQTALLRAIIKNETAQEQPAQQRIAPEPVAESANSNFPLAVLAETNALTRKHQLSSAIEKQALAAGLSESLLSSLIAAASVTPAIGLMGKQTKHTIASLANLLAGNVWGEVSIHSDHFSFSDLMNSPTLIRLSGDTLTMTLGDFLTQQQEAGLASIVELRGFNRTPPETLLPELHDCLFRTPHLAACSWTDRRQALRHLPIRHPILFLLTFTTGKSTFPLQAPLAHQLPLFLAENIWSDERPFEQNADITPSRITPELWQKIYVDNHQPEHQACAPWEELKAALLSLLPDEQAQAVARLAYGLGRNTAQDIATTVDVLAPELGPYVQEMTNGESASVLEHLFQL

SEQ ID NO: 24676 - protein, 1983 aa, Pragia fontium
MNNPLEMFESIRDFYIAYLETAFRIGSPAIQEYRRELLEQQGTLCADLFLEPMPRYKDYNLTISDLRDASKGDTWLPGFTVQQRTAFIDLCLGGLLPHDPKNATKGRFKLYTHQLEMLQRGVQSGMPGIVTSGTGSGKTESFLLPVLAQIAKEASQWSQSSALKSWQPWWREPNAQPTFMRDREAPTSGRPKAVRALILYPMNALVEDQLVRMRRALDSDEAHEVMDSHFGGNRIFFGRYTSATKVTGWLDHPRQGNEPKEKKRVAGKVAELREYLQFAEKTHKEAVHQGNLDKDDNLQFNFPRPGGGEVLSRWEMQKMPPDILITNTSMLSTMLVREIDDPIFDQTQQWIEHEPNAYFYLVLDELHLQRGTAGTEVSYLLKHLINRLGLDQPQHRHKLRILASSASLPVSGQEGNQSIDYLWGMFGQRGLPMNASAKDWKTCIVDGKLEELVEIPYFCGDLPAFCQAVEKLKSTEASVIWCDIARSLGCYRDGVAIEELAQHTVLLAARMLEKGCIDDKKSLRATAIKALAGNLFGEHPDARRGVSALILIRTMVDSWQQWFAHPFPDHIVLPRFRAHAFLRALEGLYVAPLPSPPQADKDERNQWLFADITVESGFRYGNRRYGDKRSRCVELLYCECCATLFLGGKPSAFSAIDSRRIELLPNDPDTEKLPEHAKSVMIERRSAEEYALFMPTIDRFWPLGKEKLADSDSFGQWQEASYDPFTATIQPISPVKPLAETDIPGWFYYVKPGDFSSPKRDQSSNQSPGSSLPFQCPACETSYKYGKGKQSPIRGFRVGFAKTTQLLASTLMTELQRSGDQERLVTFSDSRQDAAKAALDLESGHHDDIRREILVYSLQDLAVGTCSHEKLQEQLSGLVKRRKELVNKEVADGLTPEEDQELEHLFSERRMLEEKLELPLADSISLGEILEPSAPESGKRLNRLLAKLVEVGIHPTDRTGITAVPDPSNHHEDITTFVWQQLFSQDPQGEWCWKAHPSYEDDLDVARKEISWDLRKLAGESVFSKTYFSLEEAGWGYPCLPISGNYTRQQLAIFDAMLRVLADAYRVKPSQYTTKETLWNSTNDVSPNSRLHRFTSRFCQHSGGDHTSIIDKFLALLELVGHQGGIIDIGKVHFRLADPADSFWRCDKCGRVHLHLGAKICTRCHAPLPEIPSGEAGMLQKQNYLGKRISYSSGIRRMRSEELTGMTGNPAARLRRFKGILIADDDDILPTGLKDFEPDLDLDRLARVVDVLSVTTTMEVGVDIGDLRAVFQANMPPQRFNYQQRVGRAGRRGQAFAFVLTACRSKSHDLFYFRHPEKITGDLPPPPFLTTKLEMICQRLVRKVWLVAAFKWLRQNAINSHQSWPVDEHRQKPDNHGEFFQVDWLKDHRIDWLPRIRQALTATIRDRDEFAHVCMPDDQSFYHSIVQLLTPDNLIQDIGAALNDDAMAGKGLAEALAERGQFPMYGMPTRTRLLHTRAITTNEDDIQFANMDRDLDIAIQEFAPRKYLVQDKRRYLTAGYAGMLRQRYPKSIEFDSNVNELGEGRTMTACPVCHVWIPINHTISECTTCGAVIDGVEQYQCYVPYGFITSLEDKSVKEDVDQTLTNASRVSIAEAYSFSSGVEFDANVAIQLESQICLHRLNRGTYTDERWHGFNALQGNLRVPFRKEGVYQSLTANRVWVDSQLLETDPLLKRRFTPSQESRTSFYLAAPKVTDLLALMVVNTPVGLQLQTQAFRAAALSAAFIIVNYASKELLDIDPEEIEILEPRVQRLADGRLAPILQMADRLVNGSGLCERLQQKGTSGMPIILEVMKAIVSNKNGFPLKEFLDNDHPKKCIQACYHCLHRYGNQAYHGVLDWRLGLDVIQLLLDKNYDAGLNGDFSAPGIADWRENAVSLAKEAASLFNSEVRMVGHIPLINIGPERWVAVTHPFWSVDGVFTANPELERLFLEWQLERKMISTFDLSRRMGAVMTELRNPDSNQAN

SEQ ID NO: 24677 - protein, 361 aa, Pragia fontium
MNSVFEREDNCIKVLSLFSGGGGMDFGIETAGGKVVFANDIVENACKTLDKYFPDSDIRRGDISNIHNFPHVDIVVGGYPCQSFSMAGNRKPGSDARTNLYKQFLRVLNIVRPKYFVAENVSGLQQLGAGSFLEQQLTAYQQAGYQVSYHLVNAKEYGVPQSRKRLFIIGVRNDLRQCFEFPPATHGKPSQKNPHLKPYASHGDVISDLPLWPEGEFYERPHDPEGHFSWYFMSRNRKAKWDSPAYTVVANWRHVTLHPASPVMKLTWSNLEDGWKQRWDFSDEYEHIVVDDTRPKLEQARRLSWRECARIQTFRHDYEPVGDIDAKFTQIGNAVPPMLAEVLFSHLFSGAGLKNLSIKSR

SEQ ID NO: 24678 - protein, 932 aa, Pragia fontium
MGASFPVTLDEWNTALVKAIFFNPSCAGSTLSRIDATGRIFDELKGSRSEDEAKRSFLDAFGKTPYQIRARFKCSTKNAVLTQRDGIPPYFAALYLTLLSASADNETHEQGDFRVRFSILLGFGELQNFPFSDLPALWDQLADWSRRRRELKGDCAQLILPVPPASEKLIGHSKRLSFPCYKDEIRLRDLLANEKLDSYSPFQKVNEAVHRQLFFFNEVFNYEVKTFNCFLLSASWQQAFNSPFWGAVRDITRHDESQKIAENGRFCIQLDSTDVWNPEIYLLMDQKGAEIFATPEIYTLPQRTDIYTKGYYQSNMNITLIHLSSLLQKQEKGFSQSRVGMALRAGCLPLFQDDSGYMSSDGHYFDDGPVCLVIDSNYVKCINAACKSISLKFSSLGLNSELDKWQILVFDAVSRQALNTLATALPKKAQRFLIQNWMPARPHLTGGARFGQAVLLNPASTPFIRMEGANSGWFVISDSAGNELATGELSVSDEGLYISPEKLVSIHGQTLCRYLLVVDPKKAPLAYDVYVLDHAPDAVYRRLKEANNWLIDGPLGTLVPLDDITYNESTSGSVNKQKLTPLGGKWSLWQQNESSLAECEHINLHSIPAALDWLAEALALRFQKRSTLPLDELKKHVTFVSMAVGVPEWRLRRMLFASGWLSVIESRYAPYPLVILAVRTLSVFDEKTGTVARICGMMTKSERNILQSVLIDNEQVKRWSLPGHDLAVGCIELNLLGIERAELLAERFELRLITSADFSVSPLSGVILPITKIENISTLPVNINVSIWLEGKNKWSEESELIDPSRNVLMRCREKQRNRYFVTTQNGCWQTDSFAWGLMVQTIFSKKTLGSQSHNGDLCWSKDLIELPLSLTQWWLHFAGGCLSISDDGHVSFVGGSSSIWGDIDLSDNTMQVYVDRAIIRRSRALKLRRGR

SEQ ID NO: 24679 - protein, 938 aa, Pragia fontium
MVKKPHVIKERLSQMYCFGAEPHELINCLKECKQKLIIAGAKADNLPKTLPQKLRFLNTLQPKARLVIQTWFRTNALFPELDDPEKIVDELLLKERNDNDEMESLKPLWRAILGFYVSPSCPEIIERFLNNEPMMLFHDDVDECNEGLSEDQGINVTDDDIEQCLLICQGHDVLPSDRVLPIFVAGLVDTLNGEQEAASIWKEKLSKHALPMVQKLENIITEFEFTSSLKEADGVDVLPAEFIAIEDMNDYVVDSIAFVGVVNKLLPNDAFFVSPVGLFINDKLWSLSEEQAKILYPHRGEIIGFIKNYTKNFTQGELGVWHAGHRPSDKTAQYVLTGYQSRVYPVVRLPHLSSEPDSVREWLLTQYQPQYESPAIFLLDDGVALRLPGDPPDPKKYDFDVPLDSYRELTCIELHSQKTTIVTQLPVASEKYDCAPAGTWIKRLMKLNYSSTNFPVFNKTHLQNLTHFITEHEPESNAYLRALTHLEQIADSRELLDDMVQRLLKLPVIDAQINIEKKAILADYESEQEQLKQAIASLADKKTQLEAEIDKQKKHLKTEIEKSKKVIRQQEAELDSRIKQTFENASQAGVETLAQTALLRALVADVMVPVSQPTVKPESAIVAALSIPQMEPYLSPIATEITSKRQLLTVIEEQAAATGLSETLLSGIVAAANVTPIVGLLGKHTRKALSAIANVFSGGVRGEVSIHGDLFSISDLMKSPVLIRSAENACSMTLGDFLLHQQDNRLATVVELRGFNRIPPETLLPELSDCLLSEEQASGFCWMDQHQTLRHLSISQPILFVLTFTVGKSTFPLQGPIAHRLPMFLAESIWGDEQPANNTTDIAPTYVTSVLWQSLYTSIRQSNAHHSNEQKILQTTLKSFHYSDEKSQAITKLAFESGRSTSEKIVSDIEPLAPTLTNYAREITQGEAAVVLDCLFQS

SEQ ID NO: 24680 - protein, 1946 aa, Pseudomonas aeruginosa
MLDPIGSFYRIRDFFISYVETSFRISDPLASEARRALLKTSGILATAPFIEPVLRYESSDKNLEDLIEEADGVLKPLSLKGRKAFVELALSGLFDGSSDDGPLLRKSQYAPYRHQVSMLERGIRPGRPGIVTSGTGSGKTESFMLPILAALSNEAVEWQKPESKYLQEHWWKTPKSQWAPRRAGEKRPSAVRALVLYPMNALVEDQMVRLRKTLDSQDAHEVMDARFAGNRLFFGQYTSATPVTGYEQHPRLAGDKQEAKRRARRISRLRKAMQDFFCNQSAARKFDENSERQQGRIRETTRYIFPSIDGGEMVSRWDMQASPPDILVTNASMLGAMLSREIEDAIFDKTREWLLSDKDSYFYLVFDELHLVRGSAGTEIACLIKSLIQRLGLDQPEHAYKLRLLASSASLPLEGAEGVQSRTYLRDLFAPFGTSISEDDPGSTDPRFWNECIIQGVPHIPPARAGGIPSEPFAQLMMAALEGKDGFVGILDRTPALEAAISKAAAALGVVATAQASLEKLLAEAAAGLLTHACKNDDTIRATTPESIAARVFAPGSDDTELALRGLMLARALPEANDSRARVAGATPAFRVHTFIRNIEGLFASVTPRQHSVTFSDFSVERGTSHSSPATGQARGRRLFELLYCEACGDLFVGGQRGQSSGSTNATELLPSAANLEHLPERPGAEYYDDMTLDEFAVFWPRRGDWIGSDKGYDQWMPAHLSPDTGVVELGETAKEGNIAGYLYYQTETAISKGKNKPVQQPSAQPFCCPKCGTDYSNRPDTNRSRSPIRAFRTGVTKSSQLVATELFELLHAIGAEPKGIVFSDSRQDAAGQAMEIERLHLRDLRREILVTTARSYIKEASIEALSSAEIIELLGKAHAARDNNEIRRLSGLLTKQTENDASRTQKVKLDRLLELSQDGSIGRITAELVRLGISPYKSSSSSIKELPWHQEFEKSGEVISYDNALSLPQISEINLDIIDSQYELVDDVIFANTFFALEETGLAYPCLSSDEENQALDAWLRIFASAYRVKENKYFDKNKVKLWQRGGDISNSRIKKIAQALYGNSLYIDELTTVLYKFDRSGHRGGLFNIGKLFLKVTKPGDLFWRCTNCERVHLHEGLGICTRCATPLPEPSGKVEELWSTNFLGKRIIRSERDGVGRFRLRVEELTGQTDDFSDRLRKFKGIFVDEVSELERLASEIDMLSVTTTMEVGIDIGALQTVYQANMPPQRFNYQQRVGRAGRRGQAFSFVVTFCRGRSHDAYYFAHPHAITGDPPPPPFLAPAHDAIPMRLLRKTWLRAAFKQLRDQCAERGEIFPGDLLTPPDVHGEYVTTRDYYHNQDIDWSARLHAALAQTQAVREQFINAVTFDQEQRQRLRDKLSVDLLISEINDQRPNAPSDEMGLARFLAERGLLPMYGMPTRVRNLYVGLRESNSHGGGAEYEWSTMDRDLDLAVFEYAPGAVLVKDKKKHRVVGFTGNLTDPQIQGRAIEGIRSVTDWCESKTYVAICPTCGSACQSIEVPGEALKCSDCRALIPKECFLLYVTPAAFRTDFVPKDELDEFERMSLRTVATVLREGEDLDCGALKVRSGAGVTILQLNDGPTDGKSDGRQFTVDLVLDQRVPVPFSPQRPPIDGIQAIESGWRRSNNTQRWGASQGEQCFGLISKKETDSIHLELTSFDERLTLNMVARKGEFMHLPTRAAAISATQILVNKAALALDVSPDEFEALEPRLRSGSPMLQIADALINGSGLCRRLGEPGADSRTPLIVDLLRETLTNTNVWPLQDFLGTGADGVHTAQCQTSCYRCIQRYGNRRYHGLLDWRLGMAYLRALVTPNYACGLIPGDERYPEIQGWKERACQLAENVEAMRKGTVRYEYLRHSGLPCLSEQKDGAELWRAVVIHPLWRHTEVGAMRDLLGPDWSSSLRYLDTFELERRPLRRLAALKQEES

SEQ ID NO: 24681 - protein, 850 aa, Pseudomonas aeruginosa
MNPQSPKTFEEWERCLVRHFLVVGSDGDASDIRSFEVTPTTLALACGAGIDQERNIEESFRIFMAGISNLPNRLNIGMQGASTRELPNFFIYLVMTLLIDSQLEGSGDGNEFRGKLRKWLNSEHGFQQLPGVNIMWGALGRWLDKRVDEGLPYRRLILPIIPKTWCHIGYTLRLTFPNKVDLRLMEVFLANCPQAESDPGLVVRSFPAILLNDRASDALKSAFSEFRESYLLGRRALADLRFWRLLRRAHAHSEKLERHSVVVDMMFDADGTREYFSSADQTSQAVFHPTLFLALNGVSAESSLNLSAAVKTGLLFFRQIGVGRWRAEARLCSAPQGLHMALARRHVSHLGSRLGRLVCEGDWFLTTTVHSYHSLHETLTPMGFFPRASEQIVRPRLSGGVRVAHGWLGRPGFLPHIESDTTDYIINPVDVRLEKESIVMEGGQLTALVPVEGSFVIEPERELVEKAAPWRLRVQLIRNALPHLGLGSSARYKLEQLNDWSRVSPSSVVFEGQDPLVWEEIVSESEDLLEAIYADGASGWEEAALVTLLRGVDTSTWDLLRCLQDAGIIEPRLRNGWKGRAWTLVAPRLVGVTRGNQNIAVIEGAVCASLIDEFRSVVARLGGQCFRRTGVSPWSPPVIGASVASVEALAEKMDWPLALQPMMPDAEPLAFVETHRMSDLHEVASAWDWNERRFKESASREEPFKLTRFSHPGGRDHDLYCLTSRSRLMNYLSRTAAIAAAHASSHTPLFEQRDDNLLVRLTCDGGLPDAVAAGLRRRLLRTAGPVGNEYFYPITQQALSWLSSLLPGCLAGPDLIDERPPTRLVAEARRSRGQQRLHWRKGRLTLPRHT

SEQ ID NO: 24682 - protein, 711 aa, Pseudomonas aeruginosa
MASTTPWYAGTCERRNDMTVQLKVVAVKTKLGWSLVENPHKLFRKSGEVEMRGADVASLRFGEWVKFQVGPSERKDQWRATRHHRLYAYYDLSSAQSVEEARQTLTFNGVATHRPPGIWMIRINGDQVVQIEFTRSGDDLLLASHITTLPAYEFDQDSVISMPTGSSEHLFYDLGSDAKPCYTYDWTPESGYIERVIRRLAGFQSPQLAEIISWLQQHADERTGRITVNPDDVLAAHEALRSGELAKRLNAEQTLLRSLVDALTGDARMAGLLERERNALIEQERNTIHTNLEMQLAVEMELQRDLRTSQLEVQLKEHEAASRAQIKEQLDHDRQEAESAIAAYQAAQKVEIDKVICSRLAALEQEKAELTEYCANLSQSRDELILTLHELEIKAEDLNALVGDLSAAVTILKEQREHGTAEVERLKEISRVASEGRGYAPVTVVPFYRPKHSTAWCCSEAGEVLKNCALLTSNGKKLMEQFIALSLAGEIPLLVGPDVADFLLVAESLVASGRSARLEADPTILTFEDLWVRAGTGLPTSLAQGLTLASSQEPCSVLGVIDRAERSAARFWLPALTDRARRGDLPRRLLLCATVEDDSCEEAEALRGSQIWLPVKEAIAKDAATVAPLWLSPSQYRELDPGDCPVESIEGGLNVAQKLANRLGLVNTLRAVRSAAEVATFYKGKEAIDAIARMNTLFLNSVGSEQPAVAY

SEQ ID NO: 24683 - protein, 1946 aa, Pseudomonas aeruginosa; identical to SEQ ID NO: 24680

SEQ ID NO: 24684 - protein, 850 aa, Pseudomonas aeruginosa; identical to SEQ ID NO: 24681

SEQ ID NO: 24685 - protein, 711 aa, Pseudomonas aeruginosa; identical to SEQ ID NO: 24682

SEQ ID NO: 24686 - protein, 1946 aa, Pseudomonas aeruginosa; identical to SEQ ID NO: 24680

SEQ ID NO: 24687 - protein, 850 aa, Pseudomonas aeruginosa; identical to SEQ ID NO: 24681

SEQ ID NO: 24688 - protein, 711 aa, Pseudomonas aeruginosa; identical to SEQ ID NO: 24682

SEQ ID NO: 24689 - protein, 1946 aa, Pseudomonas aeruginosa; identical to SEQ ID NO: 24680

SEQ ID NO: 24690 - protein, 850 aa, Pseudomonas aeruginosa; identical to SEQ ID NO: 24681

SEQ ID NO: 24691 - protein, 711 aa, Pseudomonas aeruginosa; identical to SEQ ID NO: 24682

SEQ ID NO: 24692 - protein, 1946 aa, Pseudomonas aeruginosa
MLDPIGSFYRIRDFFISYVETSFRISDPLASEARRALLKTSGILATAPFIEPVLRYESSDKNLEDLIEEADGVLKPLSLKGRKAFVELALSGLFDGSSDDGPLLRKSQYAPYRHQVSMLERGIRPGRPGIVTSGTGSGKTESFMLPILAALSNEAVEWQKPESKYLQEHWWKTPKSQWAPRRAGEKRPSAVRALVLYPMNALVEDQMVRLRKTLDSQDAHEVMDARFAGNRLFFGQYTSATPVTGYEQHPRLAGDKQEAKRRARRISRLRKAMQDFFCNQSAARKFDENSERQQGRIRETTRYIFPSIDGGEMVSRWDMQASPPDILVTNASMLGAMLSREIEDAIFDKTREWLLSDKDSYFYLVFDELHLVRGSAGTEIACLIKSLIQRLGLDQPEHAYKLRLLASSASLPLEGAEGVQSRTYLRDLFAPFGTSISEDDPGSTDPRFWNECIIQGVPHIPPARAGGIPSEPFAQLMMAALEGKDGFVGILDRTPALEAAISKAAAALGVVATAQASLEKLLAEAAAGLLTHACKNDDTIRATTPESIAARVFAPGSDDTELALRGLMLARALPEANDSRARVAGATPAFRVHTFIRNIEGLFASVTPRQHSVTFSDFSVERGTSHSSPATGQARGRRLFELLYCEACGDLFVGGQRGQSSGSTNATELLPSAANLEHLPERPGAEYYDDMTLDEFAVLWPRRGDWIGSDKGYDQWMPAHLSPDTGVVELGETAKEGNIAGYLYYQTETAISKGKNKPVQQPSAQPFCCPKCGTDYSNRPDTNRSRSPIRAFRTGVTKSSQLVATELFELLHAIGAEPKGIVFSDSRQDAAGQAMEIERLHLRDLRREILVTTARSYIKEASIEALSSAEIIELLGKAHAARDNNEIRRLSGLLTKQTENDASRTQKVKLDRLLELSQDGSIGRITAELVRLGISPYKSSSSSIKELPWHQEFEKSGEVISYDNALSLPQISEINLDIIDSQYELVDDVIFANTFFALEETGLAYPCLSSDEENQALDAWLRIFASAYRVKENKYFDKNKVKLWQRGGDISNSRIKKIAQALYGNSLYIDELTTVLYKFDRSGHRGGLFNIGKLFLKVTKPGDLFWRCTNCERVHLHEGLGICTRCATPLPEPSGKVEELWSTNFLGKRIIRSERDGVGRFRLRVEELTGQTDDFSDRLRKFKGIFVDEVSELERLASEIDMLSVTTTMEVGIDIGALQTVYQANMPPQRFNYQQRVGRAGRRGQAFSFVVTFCRGRSHDAYYFAHPHAITGDPPPPPFLAPAHDAIPMRLLRKTWLRAAFKQLRDQCAERGEIFPGDLLTPPDVHGEYVTTRDYYHNQDIDWSARLHAALAQTQAVREQFINAVTFDQEQRQRLRDKLSVDLLISEINDQRPNAPSDEMGLARFLAERGLLPMYGMPTRVRNLYVGLRESNSHGGGAEYEWSTMDRDLDLAVFEYAPGAVLVKDKKKHRVVGFTGNLTDPQIQGRAIEGIRSVTDWCESKTYVAICPTCGSACQSIEVPGEALKCSDCRALIPKECFLLYVTPAAFRTDFVPKDELDEFERMSLRTVATVLREGEDLDCGALKVRSGAGVTILQLNDGPTDGKSDGRQFTVDLVLDQRVPVPFSPQRPPIDGIQAIESGWRRSNNTQRWGASQGEQCFGLISKKETDSIHLELTSFDERLTLNMVARKGEFMHLPTRAAAISATQILVNKAALALDVSPDEFEALEPRLRSGSPMLQIADALINGSGLCRRLGEPGADSRTPLIVDLLRETLTNTNVWPLQDFLGTGADGVHTAQCQTSCYRCIQRYGNRRYHGLLDWRLGMAYLRALVTPNYACGLIPGDERYPEIQGWKERACQLAENVEAMRKGTVRYEYLRHSGLPCLSEQKDGAELWRAVVIHPLWRHTEVGAMRDLLGPDWSSSLRYLDTFELERRPLRRLAALKQEES

SEQ ID NO: 24693 - protein, 394 aa, Pseudomonas aeruginosa
MNDALKFYEFFAGGGMARAGLGGDWDCLFANDLDRIKASTYIENWGDAHFDNRDVRDVKTSDLKGIGDLAWASFPCQDLSVAGNGLGIGSSGGNEITRSGALWPFLDLIEQLRLENRQPPLLVLENVVGLLTLEGGRDFSAICERLREMGYCYGATIVDAKHFLPQSRPRVFIIAILKGINIPTKLFRGMASSHWHSPTLLRTYRALPSRLHEDWVWWDLGDPPALREDALHSFIQRKNVIWNTQEETDRLIGMMAPSHLARLDKAKLSGRLAIGSLYLRMRREGGVNRQRAEITFSPLLGCLRTPRGGASRPRIITIEGGSVKTRLLTSNEASKLMGLEDSFLLPSIYHHAFKVIGDGVAVPVVRFLAERLLEPLAWAARLQNNLQGQTVVMG

SEQ ID NO: 24694 - protein, 850 aa, Pseudomonas aeruginosa; identical to SEQ ID NO: 24681

SEQ ID NO: 24695 - protein, 711 aa, Pseudomonas aeruginosa; identical to SEQ ID NO: 24682

SEQ ID NO: 24696 - protein, 1946 aa, Pseudomonas aeruginosa; identical to SEQ ID NO: 24680

SEQ ID NO: 24697 - protein, 394 aa, Pseudomonas aeruginosa; identical to SEQ ID NO: 24693

SEQ ID NO: 24698 - protein, 850 aa, Pseudomonas aeruginosa; identical to SEQ ID NO: 24681

SEQ ID NO: 24699 - protein, 711 aa, Pseudomonas aeruginosa; identical to SEQ ID NO: 24682

SEQ ID NO: 24700 - protein, 1946 aa, Pseudomonas aeruginosa; identical to SEQ ID NO: 24680

SEQ ID NO: 24701 - protein, 850 aa, Pseudomonas aeruginosa; identical to SEQ ID NO: 24681

SEQ ID NO: 24702 - protein, 711 aa, Pseudomonas aeruginosa; identical to SEQ ID NO: 24682

SEQ ID NO: 24703 - protein, 1946 aa, Pseudomonas aeruginosa; identical to SEQ ID NO: 24680

SEQ ID NO: 24704 - protein, 394 aa, Pseudomonas aeruginosa; identical to SEQ ID NO: 24693

SEQ ID NO: 24705 - protein, 850 aa, Pseudomonas aeruginosa; identical to SEQ ID NO: 24681

SEQ ID NO: 24706 - protein, 711 aa, Pseudomonas aeruginosa; identical to SEQ ID NO: 24682

SEQ ID NO: 24707 - protein, 1946 aa, Pseudomonas aeruginosa; identical to SEQ ID NO: 24680

SEQ ID NO: 24708 - protein, 394 aa, Pseudomonas aeruginosa; identical to SEQ ID NO: 24693

SEQ ID NO: 24709 - protein, 850 aa, Pseudomonas aeruginosa; identical to SEQ ID NO: 24681

SEQ ID NO: 24710 - protein, 711 aa, Pseudomonas aeruginosa; identical to SEQ ID NO: 24682

SEQ ID NO: 24711 - protein, 1946 aa, Pseudomonas aeruginosa; identical to SEQ ID NO: 24680

SEQ ID NO: 24712 - protein, 394 aa, Pseudomonas aeruginosa; identical to SEQ ID NO: 24693

SEQ ID NO: 24713 - protein, 850 aa, Pseudomonas aeruginosa; identical to SEQ ID NO: 24681

SEQ ID NO: 24714 - protein, 711 aa, Pseudomonas aeruginosa; identical to SEQ ID NO: 24682

SEQ ID NO: 24715 - protein, 1946 aa, Pseudomonas aeruginosa; identical to SEQ ID NO: 24680

SEQ ID NO: 24716 - protein, 394 aa, Pseudomonas aeruginosa; identical to SEQ ID NO: 24693

SEQ ID NO: 24717 - protein, 850 aa, Pseudomonas aeruginosa; identical to SEQ ID NO: 24681

SEQ ID NO: 24718 - protein, 711 aa, Pseudomonas aeruginosa; identical to SEQ ID NO: 24682

SEQ ID NO: 24719 - protein, 1946 aa, Pseudomonas aeruginosa; identical to SEQ ID NO: 24680

SEQ ID NO: 24720 - protein, 394 aa, Pseudomonas aeruginosa; identical to SEQ ID NO: 24693

SEQ ID NO: 24721 - protein, 850 aa, Pseudomonas aeruginosa; identical to SEQ ID NO: 24681

SEQ ID NO: 24722 - protein, 711 aa, Pseudomonas aeruginosa; identical to SEQ ID NO: 24682

SEQ ID NO: 24723 - protein, 1946 aa, Pseudomonas aeruginosa; identical to SEQ ID NO: 24680

SEQ ID NO: 24724 - protein, 394 aa, Pseudomonas aeruginosa; identical to SEQ ID NO: 24693

SEQ ID NO: 24725 - protein, 850 aa, Pseudomonas aeruginosa; identical to SEQ ID NO: 24681

SEQ ID NO: 24726 - protein, 711 aa, Pseudomonas aeruginosa; identical to SEQ ID NO: 24682

SEQ ID NO: 24727 - protein, 1946 aa, Pseudomonas aeruginosa; identical to SEQ ID NO: 24680

SEQ ID NO: 24728 - protein, 394 aa, Pseudomonas aeruginosa; identical to SEQ ID NO: 24693

SEQ ID NO: 24729 - protein, 850 aa, Pseudomonas aeruginosa; identical to SEQ ID NO: 24681

SEQ ID NO: 24730 - protein, 711 aa, Pseudomonas aeruginosa; identical to SEQ ID NO: 24682

SEQ ID NO: 24731 - protein, 1946 aa, Pseudomonas aeruginosa; identical to SEQ ID NO: 24680

SEQ ID NO: 24732 - protein, 394 aa, Pseudomonas aeruginosa; identical to SEQ ID NO: 24693

SEQ ID NO: 24733 - protein, 850 aa, Pseudomonas aeruginosa; identical to SEQ ID NO: 24681

SEQ ID NO: 24734 - protein, 711 aa, Pseudomonas aeruginosa; identical to SEQ ID NO: 24682

SEQ ID NO: 24735 - protein, 1946 aa, Pseudomonas aeruginosa; identical to SEQ ID NO: 24680

SEQ ID NO: 24736 - protein, 394 aa, Pseudomonas aeruginosa; identical to SEQ ID NO: 24693

SEQ ID NO: 24737 - protein, 850 aa, Pseudomonas aeruginosa; identical to SEQ ID NO: 24681

SEQ ID NO: 24738 - protein, 711 aa, Pseudomonas aeruginosa; identical to SEQ ID NO: 24682

SEQ ID NO: 24739 - protein, 1946 aa, Pseudomonas aeruginosa; identical to SEQ ID NO: 24680

SEQ ID NO: 24740 - protein, 394 aa, Pseudomonas aeruginosa; identical to SEQ ID NO: 24693

SEQ ID NO: 24741 - protein, 850 aa, Pseudomonas aeruginosa; identical to SEQ ID NO: 24681

SEQ ID NO: 24742 - protein, 711 aa, Pseudomonas aeruginosa; identical to SEQ ID NO: 24682

SEQ ID NO: 24743 - protein, 1946 aa, Pseudomonas aeruginosa; identical to SEQ ID NO: 24680

SEQ ID NO: 24744 - protein, 394 aa, Pseudomonas aeruginosa; identical to SEQ ID NO: 24693

SEQ ID NO: 24745 - protein, 850 aa, Pseudomonas aeruginosa; identical to SEQ ID NO: 24681

SEQ ID NO: 24746 - protein, 711 aa, Pseudomonas aeruginosa; identical to SEQ ID NO: 24682

SEQ ID NO: 24747 - protein, 1956 aa, Pseudomonas aeruginosa
MLDPIGGFRRIQDFVINYVETSFRISDTAAAEARRNLLQTVGVLATEPFIEPVLRYESHQESLEQLAQRNDGPLAPLSWEGKRSFVELALSGLFDGKRCKGEIRRKSSYAPYNHQVEMLRRGLLPGMPGIVTSRTGSGKTESFMLPVLAAISNEAVTWNAPDCNYLKNDWWKEDKARWLARRQGENRPSAVRTLIIYPMNALVEDQMQRLRKSLDSEDAREVMQERFKGNRIFFGQYTSSTPVTGFERHPRIAENEGEKQRRTRRITRLREAMRRFRRDQDAALAFDLQEEAAAQDEREAMPDKTRYIFPSVDGGEMVSRWDMQANPPDILVTNASMLGTMLSREVEEPIFAQTRDWLLNNDDAYFYLVFDELHLIRGSAGTEIAFLVKMLIQRLGLDLPGHRHKLRLLASSASLPTDGEQGLQSLAYLRDLFAPYGTSRHANDPGVDDPDFWHDCIVAGSPHVPTFGTRSIKPQPFVDLLETALECNKGFVAKILSAEAMNPAVEQAANALGISANNAVDRVKALAEAAAAVLTQACLDGAEVRATSTSDMAARIFRAGSNNLDKALRGLLLARALPESKVWPATVSLTTPAFRVHTFIRNIEGLFASVVPNGCIPKFGDFTVERGVTHAMPQAEGGRGLRLFELLYCEACGDLLIGGQRGQSIAESRVTELLPSAADLESLPEKVGSEYYDKMTLDEFAVFWPRRSQPSLSERDYDAWDAASLNPETGLVLTGQVAPPGHIDGYLYRQTEAAVKGRHGKTTGPLMAQPFCCPKCGTDYSNRPVSSRSRSPIRAFRTGVTKTSQLVATELFELLHAIGAEPKGIVFSDSRQDAANQALEIETLHLRDLRREVLVIAARALVKQANADWIDPTQFPSLIAAAAENHEEMKRLAEKFQKQMASGGQRNSGKIPLGKLLQCDGMDIGALTAEFASLGVHPFDRVGKKLYKGKRWHDLFAENGERLVYSPKLNDAQKAGINKEILEGQYELIDDVLFANTFFALEETGLAYPSIMVGDEAKADRLDAWLRVFAGAYRVLDNKYVNGENLNEWVSGLDVKHKRVLRFAQAVFGASSATEGLSGILSEFSALEHPSGMIHIGKLYLKVAEAHDSYWRCRNCERVHLHWGPGKCTRCGEILDEQPTGQAAELWRSNFLGNRIVRGQDEGVDRFRLRVEELTGQTDDFSERLRKFKGIFVDGENEIQKRAQEIDMLSVTTTMEVGIDIGSLQTVYQANMPPQRFNYQQRVGRAGRRGQAFSMVVTFCRGRSHDAYYFAHPHAITGDPPPPPFLAINHDPIPLRLVRKNWLHAAFRHLRDECAKAGYEYPGDLLIPPDVHGEYVSTHDFYHDVQADWPKRLREALKETIFVRDSFIDAASFDRDQCVRLTEQTDIDLLMQEIENLRSYAPDSEIGLARFFAEWGLLPMYGMPTRVRNLYLGLRSVEVGKEENFEWSIMDRDLDLAVFEYAPGAVLVKDKQKHRVVGFTGSLSTPQTVKKDELSIKALSRWYESETHVALCSACGSATRRDVLPNSSLPCDDCHEVILPDAFKPYIVPAGFRTDFNPKNDEEDIGRMSVRSMATLVHEGERLEYGSVTVLHGANVTIMQMNDGVANIEGEGDGFLIEEAFDLKVPMPSGSRKHPKIEGMPQAFEAGWLNAARSGNWGQARWSKFGNPLPRFGLISCKQTESVHLELSQIDPRLDLAHVARRGKYGRLSVRAAAISATQILVQRAALELDVSAEEFEALEPRVRSGKPMLQIADALINGSGLCRRLGETVPGGSRSKILEILDDILANHDKWPLVDMLKRSEEGEHSAQCHTSCYRCIQRYGNRRYHSLLDWRLGLAYLRAMTTPEYACGLNANDETYPEISDWRGRAEWLTENVAQMRPGTLTTYRLPHSGLSCLIERVGGAETRYVVVHPLWSLESSVLSDVLGADWSPKLLFVDTFNLERRPLKSMSTPLLPR

SEQ ID NO: 24748 - protein, 846 aa, Pseudomonas aeruginosa
MNLPRTFDAWERQLVDYFLRVGPDGDASPIRAFEVTPRTLALACGAPPESEPNVEEAFRRMLSVDPLLMNSLRLGSQRFEKLDVPNCFSYLAFTLLIDSLLEGNTTQSGEFRLKLMKWLGIKTPFSDLRGVALMWESLVRWLDERIQAGQPFRRLILPDPGHWSQIGYSRRLSFPSKPDLRLLANFCREHPEALRNPRVSITAFERVLTDSRASWGLHRAFDEFRCAYYLQRRALGSFPFWRLLEHASTLTGRPARSSVTIEMLFDMDKRALFFACRREDGEAEPFTSLSEALVFAGADHSENLATAAALGIVFFRLVGAGRWRAEADANDSAFGLHVAVAERHRRKIGNRLGDLSGSNSWAITTQPLTLEAIKDALKAAKLLSPQQERIVRPLLSGGVRSDGVWLGRPRFLPTLESDTSDYVIRDALPCVTDVPLKIDQGQLIATRPVEGCFFIQPTLLRDEEHAPWSIRLQFVSNAFPHEALEGARYKLPPLLDWMPRVSDRLEVSTKATLAWEADEPACADLLEAVYASGRSGWEETQIISLLGCADVAMSPWHLLRSLRDAGIVEPRLRAGWKGRTWTLREPSIIEAHQGGQKLALAEGALCARMVDAFKQAVEGFGGTPFRRLGATSWAVPLVGAKGVQAKALAEFLGWRFVAEPATPTEKPLAFVETRHQALHYKQADSWSWSVGRFLSGGCIEEGVRLVRLTHLGERDHDVYRVEHNSCVFHYLSRTAAIASAHALAQMPLFDWRPEEEVIALMGHEGGLPDALATEVRRRMLRNGGPRGVEYFYPVNNEVVRWLAGRLPGCIAGLAEGEIRGAPTLISLSRRSTGRLRLQWRNGKTSL

SEQ ID NO: 24749 - protein, 697 aa, Pseudomonas aeruginosa
MAANLAWYAGQCVSKNDVNMTVKVVGIRSEDGWSLLDKPQKLFPKAGEVEVRLQAASGYHKNDWVIFQVAHKEPRGKWKASTHRKLTPFLDLQDIGSLDALRSCLTEEGVDGPDHSAGWVIRYSEDRIILLDLIRSPDNRYRMAVGDNFYVYVYEPELLHCMPSDTGEVFLYDCKRTGECLQVLDWAPDDGYIKRIVRAMAGAHDPSVEFVIEWLKRHADEATGQIGSSLEDKLVAQQSARSGELIKRLLADKSLLGQLTELLLADAKMLSHLQSEIQAIAEQERGAIRASLMDALEHEVMALREERLLAFEAELRSLEAEQHEVLRGQLEQDMKSNILAMEERVAARQTKLEDQLESRRTELQQGIDALAAQREALKGELESIGFQIKAGEQSLAELKAHETLVAEEIERLKDDAASIHVPKSVKLESVLRFNPPQCAPTLGVGDMHREIKESILLTSVGKERMTQFFALLLAGESPVLHGPETQDFLLAAEALLSSGRSMRLEADPTVITFEDLWLRAGTQLPTALTHGLELSCGQTPVTVLAIVERAERSGARFWLPALADRTRRGELPRRFFICATVEDEDCEEAQAIRSQVPWLHVSGTIAPSAPALVPMVFAPAKVWQLDPGERPQDITPAMTAVAPLVNQLTLVNALRLARAATEWVRLNQGVGYEQTPSALTGLFIDQRAQADRTQQKS

SEQ ID NO: 24750 - protein, 1946 aa, Pseudomonas aeruginosa; identical to SEQ ID NO: 24680

SEQ ID NO: 24751 - protein, 394 aa, Pseudomonas aeruginosa; identical to SEQ ID NO: 24693

SEQ ID NO: 24752 - protein, 850 aa, Pseudomonas aeruginosa; identical to SEQ ID NO: 24681

SEQ ID NO: 24753 - protein, 711 aa, Pseudomonas aeruginosa; identical to SEQ ID NO: 24682

SEQ ID NO: 24754 - protein, 1946 aa, Pseudomonas aeruginosa; identical to SEQ ID NO: 24680

SEQ ID NO: 24755 - protein, 394 aa, Pseudomonas aeruginosa; identical to SEQ ID NO: 24693

SEQ ID NO: 24756 - protein, 850 aa, Pseudomonas aeruginosa; identical to SEQ ID NO: 24681

SEQ ID NO: 24757 - protein, 711 aa, Pseudomonas aeruginosa; identical to SEQ ID NO: 24682

SEQ ID NO: 24758 - protein, 1946 aa, Pseudomonas aeruginosa; identical to SEQ ID NO: 24680

SEQ ID NO: 24759 - protein, 394 aa, Pseudomonas aeruginosa; identical to SEQ ID NO: 24693

SEQ ID NO: 24760 - protein, 850 aa, Pseudomonas aeruginosa; identical to SEQ ID NO: 24681

SEQ ID NO: 24761 - protein, 711 aa, Pseudomonas aeruginosa; identical to SEQ ID NO: 24682

SEQ ID NO: 24762 - protein, 1946 aa, Pseudomonas aeruginosa; identical to SEQ ID NO: 24680

SEQ ID NO: 24763 - protein, 394 aa, Pseudomonas aeruginosa; identical to SEQ ID NO: 24693

SEQ ID NO: 24764 - protein, 850 aa, Pseudomonas aeruginosa; identical to SEQ ID NO: 24681

SEQ ID NO: 24765 - protein, 711 aa, Pseudomonas aeruginosa; identical to SEQ ID NO: 24682

SEQ ID NO: 24766 - protein, 1956 aa, Pseudomonas aeruginosa; identical to SEQ ID NO: 24747

SEQ ID NO: 24767 - protein, 846 aa, Pseudomonas aeruginosa; identical to SEQ ID NO: 24748

SEQ ID NO: 24768 - protein, 697 aa, Pseudomonas aeruginosa; identical to SEQ ID NO: 24749

SEQ ID NO: 24769 - protein, 1946 aa, Pseudomonas aeruginosa; identical to SEQ ID NO: 24680

SEQ ID NO: 24770 - protein, 394 aa, Pseudomonas aeruginosa; identical to SEQ ID NO: 24693

SEQ ID NO: 24771 - protein, 850 aa, Pseudomonas aeruginosa; identical to SEQ ID NO: 24681

SEQ ID NO: 24772 - protein, 711 aa, Pseudomonas aeruginosa; identical to SEQ ID NO: 24682

SEQ ID NO: 24773 - protein, 1946 aa, Pseudomonas aeruginosa; identical to SEQ ID NO: 24680

SEQ ID NO: 24774 - protein, 394 aa, Pseudomonas aeruginosa; identical to SEQ ID NO: 24693

SEQ ID NO: 24775 - protein, 850 aa, Pseudomonas aeruginosa; identical to SEQ ID NO: 24681

SEQ ID NO: 24776 - protein, 711 aa, Pseudomonas aeruginosa; identical to SEQ ID NO: 24682

SEQ ID NO: 24777 - protein, 1946 aa, Pseudomonas aeruginosa; identical to SEQ ID NO: 24680

SEQ ID NO: 24778 - protein, 394 aa, Pseudomonas aeruginosa; identical to SEQ ID NO: 24693

SEQ ID NO: 24779 - protein, 850 aa, Pseudomonas aeruginosa; identical to SEQ ID NO: 24681

SEQ ID NO: 24780 - protein, 711 aa, Pseudomonas aeruginosa; identical to SEQ ID NO: 24682

SEQ ID NO: 24781 - protein, 1946 aa, Pseudomonas aeruginosa; identical to SEQ ID NO: 24680

SEQ ID NO: 24782 - protein, 394 aa, Pseudomonas aeruginosa; identical to SEQ ID NO: 24693

SEQ ID NO: 24783 - protein, 850 aa, Pseudomonas aeruginosa; identical to SEQ ID NO: 24681

SEQ ID NO: 24784 - protein, 711 aa, Pseudomonas aeruginosa; identical to SEQ ID NO: 24682

SEQ ID NO: 24785 - protein, 1946 aa, Pseudomonas aeruginosa; identical to SEQ ID NO: 24680

SEQ ID NO: 24786 - protein, 394 aa, Pseudomonas aeruginosa; identical to SEQ ID NO: 24693

SEQ ID NO: 24787 - protein, 850 aa, Pseudomonas aeruginosa; identical to SEQ ID NO: 24681

SEQ ID NO: 24788 - protein, 711 aa, Pseudomonas aeruginosa; identical to SEQ ID NO: 24682

SEQ ID NO: 24789 - protein, 1946 aa, Pseudomonas aeruginosa; identical to SEQ ID NO: 24680

SEQ ID NO: 24790 - protein, 394 aa, Pseudomonas aeruginosa; identical to SEQ ID NO: 24693

SEQ ID NO: 24791 - protein, 850 aa, Pseudomonas aeruginosa; identical to SEQ ID NO: 24681

SEQ ID NO: 24792 - protein, 711 aa, Pseudomonas aeruginosa; identical to SEQ ID NO: 24682

SEQ ID NO: 24793 - protein, 1946 aa, Pseudomonas aeruginosa 39016; identical to SEQ ID NO: 24680

SEQ ID NO: 24794 - protein, 850 aa, Pseudomonas aeruginosa 39016; identical to SEQ ID NO: 24681

SEQ ID NO: 24795 - protein, 711 aa, Pseudomonas aeruginosa 39016; identical to SEQ ID NO: 24682

SEQ ID NO: 24796 - protein, 1946 aa, Pseudomonas aeruginosa 6077; identical to SEQ ID NO: 24680

SEQ ID NO: 24797 - protein, 379 aa, Pseudomonas aeruginosa 6077
MARAGLGGDWDCLFANDLDRIKASTYIENWGDAHFDNRDVRDVKTSDLKGIGDLAWASFPCQDLSVAGNGLGIGSSGGNEITRSGALWPFLDLIEQLRLENRQPPLLVLENVVGLLTLEGGRDFSAICERLREMGYCYGATIVDAKHFLPQSRPRVFIIAILKGINIPTKLFRGMASSHWHSPTLLRTYRALPSRLHEDWVWWDLGDPPALREDALHSFIQRKNVIWNTQEETDRLIGMMAPSHLARLDKAKLSGRLAIGSLYLRMRREGGVNRQRAEITFSPLLGCLRTPRGGASRPRIITIEGGSVKTRLLTSNEASKLMGLEDSFLLPSIYHHAFKVIGDGVAVPVVRFLAERLLEPLAWAARLQNNLQGQTVVMG

SEQ ID NO: 24798 - protein, 850 aa, Pseudomonas aeruginosa 6077; identical to SEQ ID NO: 24681

SEQ ID NO: 24799 - protein, 711 aa, Pseudomonas aeruginosa 6077; identical to SEQ ID NO: 24682

SEQ ID NO: 24800 - protein, 1946 aa, Pseudomonas aeruginosa BL08; identical to SEQ ID NO: 24680

SEQ ID NO: 24801 - protein, 379 aa, Pseudomonas aeruginosa BL08; identical to SEQ ID NO: 24797

SEQ ID NO: 24802 - protein, 850 aa, Pseudomonas aeruginosa BL08; identical to SEQ ID NO: 24681

SEQ ID NO: 24803 - protein, 711 aa, Pseudomonas aeruginosa BL08; identical to SEQ ID NO: 24682

SEQ ID NO: 24804 - protein, 1946 aa, Pseudomonas aeruginosa BL14; identical to SEQ ID NO: 24680

SEQ ID NO: 24805 - protein, 379 aa, Pseudomonas aeruginosa BL14; identical to SEQ ID NO: 24797

SEQ ID NO: 24806 - protein, 850 aa, Pseudomonas aeruginosa BL14; identical to SEQ ID NO: 24681

SEQ ID NO: 24807 - protein, 711 aa, Pseudomonas aeruginosa BL14; identical to SEQ ID NO: 24682

SEQ ID NO: 24808 - protein, 1946 aa, Pseudomonas aeruginosa BL17; identical to SEQ ID NO: 24680

SEQ ID NO: 24809 - protein, 379 aa, Pseudomonas aeruginosa BL17; identical to SEQ ID NO: 24797

SEQ ID NO: 24810 - protein, 850 aa, Pseudomonas aeruginosa BL17; identical to SEQ ID NO: 24681

SEQ ID NO: 24811 - protein, 711 aa, Pseudomonas aeruginosa BL17; identical to SEQ ID NO: 24682

SEQ ID NO: 24812 - protein, 1946 aa, Pseudomonas aeruginosa BWH030; identical to SEQ ID NO: 24680

SEQ ID NO: 24813 - protein, 379 aa, Pseudomonas aeruginosa BWH030; identical to SEQ ID NO: 24797

SEQ ID NO: 24814 - protein, 850 aa, Pseudomonas aeruginosa BWH030; identical to SEQ ID NO: 24681

SEQ ID NO: 24815 - protein, 711 aa, Pseudomonas aeruginosa BWH030; identical to SEQ ID NO: 24682

SEQ ID NO: 24816 - protein, 1956 aa, Pseudomonas aeruginosa BWH050
MLDPIGGFRRIQDFVINYVETSFRISDTAAAEARRNLLQTVGVLATEPFIEPVLRYESHQESLEQLAQRNDGPLAPLSWEGKRSFVELALSGLFDGKRCKGEIRRKSSYAPYNHQVEMLRRGLLPGMPGIVTSRTGSGKTESFMLPVLAAISNEAVTWNAPDCNYLKNDWWKEDKARWLARRQGENRPSAVRTLIIYPMNALVEDQMQRLRKSLDSEDAREVMQERFKGNRIFFGQYTSSTPVTGFERHPRIAENEGEKQRRTRRITRLREAMRRFRRDQDAALAFDLQEEAAAQDEREAMPDKTRYIFPSVDGGEMVSRWDMQANPPDILVTNASMLGTMLSREVEEPIFAQTRDWLLNNDDAYFYLVFDELHLIRGSAGTEIAFLVKMLIQRLGLDLPGHRHKLRLLASSASLPTDGEQGLQSLAYLRDLFAPYGTSRHANDPGVDDPDFWHDCIVAGSPHVPTFGTRSIKPQPFVDLLETALECNKGFVAKILSAEAMNPAVEQAANALGISANNAVDRVKALAEAAAAVLTQACLDGAEVRATSTSDMAARIFRAGSNNLDKALRGLLLARALPESKVWPATVSLTTPAFRVHTFIRNIEGLFASVVPNGCIPKFGDFTVERGVTHAMPQAEGGRGLRLFELLYCEACGDLLIGGQRGQSIAESRVTELLPSAADLESLPEKVGSEYYDKMTLDEFAVFWPRRSQPSLSERDYDAWDAASLNPETGLVLTGQVAPPGHIDGYLYRQTEAAVKGRHGKTTGPLMAQPFCCPKCGTDYSNRPVSSRSRSPIRAFRTGVTKTSQLVATELFELLHAIGAEPKGIVFSDSRQDAANQALEIETLHLRDLRREVLVIAARALVKQANADWIDPTQFPSLIAAAAENHEEMKRLAEKFQKQMASGGQRNSGKIPLGKLLQCDGMDIGALTAEFASLGVHPFDRVGKKLYKGKRWHDLFAENGERLVYSPKLNDAQKAGINKEILEGQYELIDDVLFANTFFALEETGLAYPSIMVGDEAKADRLDAWLRVFAGAYRVLDNKYVNGENLNEWVSGLDVKHKRVLRFAQAVFGASSATEGLSGILSEFSALEHPSGMIHIGKLYLKVAEAHDSYWRCRNCERVHLHWGPGKCTRCGEILDEQPTGQAAELWRSNFLGNRIVRGQDEGVDRFRLRVEELTGQTDDFSERLRKFKGIFVDGENEIQKRAQEIDMLSVTTTMEVGIDIGSLQTVYQANMPPQRFNYQQRVGRAGRRGQAFSMVVTFCRGRSHDAYYFAHPHAITGDPPPPPFLAINHDPIPLRLVRKNWLHAAFRHLRDECAKAGYEYPGDLLIPPDVHGEYVSTHDFYHDVQADWPKRLREALKETIFVRDSFIDAASFDRDQCVRLTEQTDIDLLMQEIENLRSYAPDSEMGLARFFAEWGLLPMYGMPTRVRNLYLGLRSVEVGKEENFEWSIMDRDLDLAVFEYAPGAVLVKDKQKHRVVGFTGSLSTPQTVKKDELSIKALSRWYESETHVALCSACGSATRRDVLPNSSLPCDDCHEVILPDAFKPYIVPAGFRTDFNPKNDEEDIGRMSVRSMATLVHEGERLEYGSVTVLHGANVTIMQMNDGVANIEGEGDGFLIEEAFDLKVPMPSGSRKHPKIEGMPQAFEAGWLNAARSGNWGQARWSKFGNPLPRFGLISCKQTESVHLELSQIDPRLDLAHVARRGKYGRLSVRAAAISATQILVQRAALELDVSAEEFEALEPRVRSGKPMLQIADALINGSGLCRRLGETVPGGSRSKILEILDDILANHDKWPLVDMLKRSEEGEHSAQCHTSCYRCIQRYGNRRYHSLLDWRLGLAYLRAMTTPEYACGLNANDETYPEISDWRGRAEWLTENVAQMRPGTLTTYRLPHSGLSCLIERVGGAETRYVVVHPLWSLESSVLSDVLGADWSPKLLFVDTFNLERRPLKSMSTPLLPR

SEQ ID NO: 24817 - protein, 384 aa, Pseudomonas aeruginosa BWH050
MARAGLGDRWQCLFANDMDIVKASTYIRNWGAEHFDGRDIREVNVTDLKGCGDLAWASFPCQDLSVAGNGLGMGESGTEEFTRSGALWPFLDLIDDLRLESRQPHLLVLENVVGLLTLEQGRDFAAICLRLGEMKYRYGAVIIDAKTFLPQSRPRVFIIAVRNDIEIPCKLSSETATDSWHAPTLIRAYKYLPSKAHEDWIWWDLGPAPLLKKNALEDLIRLNDAEWHAPEETQRFINMMTPLHLARLEEAKNAENFSVGSLYLRMRREGNANKQRAEVTFSPILGCLRTPRGGASRSRIIVAGKGQVRTRLLSISEAAALMGLDHTYTLPDIYHHAFKVIGDGVAVPSVRFLADRLLEPLILAARKPAVPGSEKRPDKCIALA

SEQ ID NO: 24818 - protein, 876 aa, Pseudomonas aeruginosa BWH050
MHRWKLSENLWFYGCRAEEKHEAFIKDGLNVNLPRTFDAWERQLVDYFLRVGPDGDASPIRAFEVTPRTLALACGAPPESEPNVEEAFRRMLSVDPLLMNSLRLGSQRFEKLDVPNCFSYLAFTLLIDSLLEGNTTQSGEFRLKLMKWLGIKTPFSDLRGVALMWESLVRWLDERIQAGQPFRRLILPDPGHWSQIGYSRRLSFPSKPDLRLLANFCREHPEALRNPRVSITAFERVLTDSRASWGLHRAFDEFRCAYYLQRRALGSFPFWRLLEHASTLTGRPARSSVTIEMLFDMDKRALFFACRREDGEAEPFTSLSEALVFAGADHSENLATAAALGIVFFRLVGAGRWRAEADANDSAFGLHVAVAERHRRKIGNRLGDLSGSNSWAITTQPLTLEAIKDALKAAKLLSPQQERIVRPLLSGGVRSDGVWLGRPRFLPTLESDTSDYVIRDALPCVTDVPLKIDQGQLIATRPVEGCFFIQPTLLRDEEHAPWSIRLQFVSNAFPHEALEGARYKLPPLLDWMPRVSDRLEVSTKATLAWEADEPACADLLEAVYASGRSGWEETQIISLLGCADVAMSPWHLLRSLRDAGIVEPRLRAGWKGRTWTLREPSIIEAHQGGQKLALAEGALCARMVDAFKQAVEGFGGTPFRRLGATSWAVPLVGAKGVQAKALAEFLGWRFVAEPATPTEKPLAFVETRHQALHYKQADSWSWSIGRFLSGGCIEEGVRLVRLTHLGERDHDVYRVEHNSCVFHYLSRTAAIASAHALAQMPLFDWRPEEEVIALMGHEGGLPDALATEVRRRMLRNGGPRGVEYFYPVNNEVVRWLAGRLPGCIAGLAEGEIRGAPTLISLSRRSTGRLRLQWRNGKTSL

SEQ ID NO: 24819 - protein, 697 aa, Pseudomonas aeruginosa BWH050; identical to SEQ ID NO: 24749

SEQ ID NO: 24820 - protein, 1946 aa, Pseudomonas aeruginosa BWHPSA006; identical to SEQ ID NO: 24680

SEQ ID NO: 24821 - protein, 379 aa, Pseudomonas aeruginosa BWHPSA006; identical to SEQ ID NO: 24797

SEQ ID NO: 24822 - protein, 850 aa, Pseudomonas aeruginosa BWHPSA006
MNPQSPKTFEEWERCLVRHFLVVGSDGDASDIRSFEVTPTTLALACGAGIDQERNIEESFRIFMAGISNLPNRLNIGMQGASTRELPNFFIYLVMTLLIDSQLEGSGDGNEFRGKLRKWLNSEHGFQQLPGVNIMWGALGRWLDKRVDEGLPYRRLILPIIPKTWCHIGYTLRLTFPNKVDLRLMEVFLANCPQAESDPGLVVRSFPAILLNDRASDALKSAFSEFRESYLLGRRALADLRFWRLLRRAHAHSEKLERHSVVVDMMFDADGTREYFSSADQTSQAVFHPTLFLALNGVSAESSLNLSAAVKTGLLFFRQIGVGRWRAEARLCSAPQGLHMALARRHVSHLGSRLGRLVCEGDWFLTTTVHSYHSLHETLTPMGFFPRASEQIVRPRLSGGVRVAHGWLGRPGFLPHIESDTTDYIINPVDVRLEKESIVMEGGQLTALVPVEGSFVIEPERELVEKAAPWRLRVQLIRNALPHPGLGSSARYKLEQLNDWSRVSPSSVVFEGQDPLVWEEIVSESEDLLEAIYADGASGWEEAALVTLLRGVDTSTWDLLRCLQDAGIIEPRLRNGWKGRAWTLVAPRLVGVTRGNQNIAVIEGAVCASLIDEFRSVVARLGGQCFRRTGVSPWSPPVIGASVASVEALAEKMDWPLALQPMMPDAEPLAFVETHRMSDLHEVASAWDWNERRFKESASREEPFKLTRFSHPGGRDHDLYCLTSRSRLMNYLSRTAAIAAAHASSHTPLFEQRDDNLLVRLTCDGGLPDAVAAGLRRRLLRTAGPVGNEYFYPITQQALSWLSSLLPGCLAGPDLIDERPPTRLVAEARRSRGQQRLHWRKGRLTLPRHT

SEQ ID NO: 24823 - protein, 711 aa, Pseudomonas aeruginosa BWHPSA006; identical to SEQ ID NO: 24682

SEQ ID NO: 24824 - protein, 1942 aa, Pseudomonas aeruginosa C48
MLDPIGGFNRIRDFFISYVETNFRIADRSIAAERRRLLETTNVFATASFVEPVLRYRTHDLRIDQMVGVVDGPLANLPYDVQVAFAELVLSGLFEGDAASGELTRVGRYAPYKHQVEMLQRGIQSGHPGIVTSGTGSGKTESFMLPIMAALSREAVSWSKPDAGYLKTPWWASSRGKWSPQRDGENRPAAVRALVLYPMNALVEDQMVRLRRTLDSDEARAVMDHRFEGNRVFFGQYTSSTPVTGYEDHPRIADSEGEKKRRQRRQRELRSAMRKFNQDQNDARNHDAEARKSAEERGASPPDMTRFIFPSLDGGEMLSRWDMQETPPDVLVTNASMLGAMLSREVEGPIFEKTRTWLRDNDDAYFYLVFDELHLIRGSAGTEVAFLIKSLIQRLGLDDLAHRHKLRVLASSASLPMDGEPGIQSRRYLRDLFAPFGTSAKAGEAGSENEEFWTDCVIKGEADIPSWEGGFIASGPFLKLMEAARTNDKDFIAKIVRSDALEKALDAVANALNVTASGDARIVQIAEVAAAVLTSACRVDEGVRAASIADLGKRLFGDIANADVAVQGLMLARALPESGQWSGRVSQGTPSFRVHAFVRNVEGLFGAPSNVAGKVTFTALSVERGLSHGQPAPGEARGRRLFEMLYCEACGDLLLGGQRGKRVGTSSLTELLPSTAELENLPERAASEYYDRMSFDQFAVFWPSQLTPQQDARGWDEWEPAHLDPESGVVTLGEEVPGGRIGGRLYHQSTTASQNGHRTAQPFCCPNCGTDYSNRPPSSRSRSPIRAFRTGVSKASQLVATELFELLHAVGAEAKSIVFSDSRQDAANQSLEIERLHLRDLRREILVTVARDYLQCAAVAKVDPKSAMAAAQKLLDAGDMEGFQKAVAAISAQAQDTQISVESRKVQISRLFDYKDTTGGVGALISEYVNLGIHPFDEVGRKPYDKRPWFQAFQKSGELISYASWLDDTQQKELGVFIEQELMELVDDVIFANTFFALEETGLAYPSISRESGPDIDRLDAWLRVFASATRVQENKFYDRSRTTEWDQASKIRPSSRVWKFADALNGDTNNQLQSVLDAFGKHGHVNGIIRVGRVFLRVSEPGDPFWRCSYCERIHLHRGVGNCTRCYKPLPSEKSGKVEELWETNFLGRRIVRGQKDGVARFRLRCEELTGQTDDFSERLRKFKNIFVDDFGEVARLAREIDMLSVTTTMEVGIDIGSLQTVYQANMPPQRFNYQQRVGRAGRRGQAFSFVITFCRGRSHDAYYFAHPAAITGDPPPPPFLATGHDPIPRRLLTKVWLRAAFQKVRDDFVNEGGVYPGDLLVPPDVHGEYVPTDDYYDDSEGCNWQGRLKDALQATIAQRDAYIDAACIDPVQRERLRAESSVERLIEEIGGQKEYKPVSRQGLAQFLAERGLLPMYGMPTRVRQLYLGVRAETDDTNPDYSWSTMDRDIDTAVFEFAPGAVLTKDKQRHRVIGFSGTLSAPERRGKDVVIESLSSWAESEHQVALCQACGSARYSLLRPQCAQQCEDCGADIEPNEFNDYITPAAFRTDFKAAETDLDTVGRMAVRTVATVLHLGGWKDAGSLRVRRGAGVTIMQLNDGVDDDTGKPSRFSVCEAEDSRVRIPRAASTTLTDDQAIVLEEISGSSSRWVVKSNTQRTFGLIAKKETDALYLELLDFDPRLTLDNVARKGNFSHLPTRSAAISATQILVQKAALDLDVSPDEFEALEPRLREGNPMLQIADSLINGSGLCRRLGEDRSDGTPHIVHLIREMLADRAIWPLIEFLSVDEDGDHAARCQTSCYRCIQRYGNRSYHGLLDWRLGLTYLRALVTPGYTAGLDAKDQMFPETTGWSQRALALAEAVAGMRPDSLSVEVHGPSNLPVLREKHKGGDTFLIVHPLWRVDGDFGKSLSDGAEVKFLDTFNLERRPLRAIELAKIDQMLR

SEQ ID NO: 24825 - protein, 398 aa, Pseudomonas aeruginosa C48
MYSEKLKYYEFFAGVGMARAGLGGDWQCLFANDSDQLKRQSYSENWAGEAFDSRDVAEVETTDLDGMADLAWASFPCQDLSQAGSKAGIGEADGSSVTRSGAVWPFLRIIRGLAEEGRHPVLLALENVVGLLSANSGNDFRSLCGALNEIGYRFGAIVADASHFVPQSRPRVFIVAIRREVPIPAALQAELPQSPWHPKTLLRARAGLSVEDMAGWVWWSPGAPPPQKDFELGDIIDLSEDADWNTEEATQRLIGMMSELQLNRLAAAKAEARPMIGSLYLRMRPNGDDGNVQRAEIAFGATLGCLRTPKGGASRPRIIVVEGERIRTRLLTVVEAARLMGLEEDFALPETYHDCFRLIGDGVVPAVVRFLADRLLEPLAKHAKGGSLFATLKRRELA

SEQ ID NO: 24826 - protein, 839 aa, Pseudomonas aeruginosa C48
MTQSVQVSSELPVTLHDWELTLTRALLRAEGGDSDAIRSFEITPETLAISCGLDMGAAEAAESAFRNALRADPHLIWCLQHGRFKKPDNDQPNCFAMLALSLLVDSLLDGIYEEKGQYRAKLAEWLSIDRSFTDLHGIAIMWRQLVAWLDSRIAAGAPFRRLILPAIPISWTHIGYTRYLSFPTKRDIRLLSKQINRRGSTSIDPATLVWQLDPIIRASSTSHGLKAAFEDFKMALRSGAASVDHRFWRLVLRASMQSGHAEPKAGSLVMDFDEDGVRRYRVGQLLDGNTAFNLLGSAIASPGVADSSNLGPSTRRGVLFFRSSGLASWTAAGEPHPGSGPFHVGISSQHIGSVRGVCTEFISSGSWFITAHPITGRIVDDILTQIGILNAKQTVRMIGLVDGVRVGNSWLGQPRYLPYLGGASGDVVIESVDGGSREGLSWIDGELRADGPVDGQFSISDAGAHWTRRASFVALAEVHASFSASAYSLPEQAEWLGATNRRCDHSHAVAREWDDTPCTNQDMIEALYASSRSGISEGDVISIIDRAAGPFRWQSLRLLQEASFFDARPLARWRGRVFTLGRPRLVQIQMGSRTALLVSGAVPARLEANFRSTVISQGGTAFRRLSKESFALPLLGAFGVVPEILSRALGWPLVDAPFQPDGTGVSRLIETKVIGEGYQVSSHWDWSVGRFCSGVGTDESVALVRLVHPGLRDHDIYRVQGRKCIRSFHSRHAAIIDAYLQAGRPLFRFDEDHLSRLTSEGALPLEISAALRVRTLFNAACTGSSWRYEVTKQDAVWLARLLPGLIDGLQGELVADAATSYRRGRGYRRPIWTDGGLVE

SEQ ID NO: 24827 - protein, 710 aa, Pseudomonas aeruginosa C48
MTVDVKMERSVFAASDLKRFAGHFVRWQGQYGSIAVVGQLNQNGLDIIANPKRLFPRDGLVEIQGGGQHGDLHQGEWVEFDVIRNTRFRAPAFKALHLKRLPRFAVLPESTLSIYRDLLTRDGWSGDARPGLWAFRLADDTVIVSELETGKDGRLRITRTSAREVKRYNYVHEGVVRANNGVKSDDVFITSISGEMTSLDWSDDVDYVSRVVSSLADMSDPRVAEIISWLERHQEVITNRVSTPDDREPVLDVLRSAALANRLRVDRKLMEVYLAAVLRDEAVRNVVADYVKEGHGAEGDKLRAELREEISAQRTRCLAQLSAEISAERTERMARIEQELEKYEADGRSECDVRLQDAEHAVSVRIQALEASASERSEQVERQIAEQTQRLMDIKAEVAGVEAERGTLWAEAEYARTQLTDAKGEIDRLLAIAAQLSPPMISAPQHAASKIGIGRIFPNYPKVDVAAKGQLIARQVMLSEKGKDVLRSLVVMLLSGELPILVGSDTTDLLRVAESVICPGRFVSVEADPTLISLDDLWARPGSGAPTLLAAAAEAVKDGGATLVVIRGIERSGARFWLPALSEVLRSGGLPRGLFVCCTVHEPEHEEVRVLRGSVPWLEITNVFSPGAALAGPSLLTPPRIELEILDPGEMPIDLSGASSLALELGENLSLDIAMRSARMLAEAFILLGDMELAQRLVLKVAKQLVMSSN

SEQ ID NO: 24828 - protein, 1946 aa, Pseudomonas aeruginosa JJ692; identical to SEQ ID NO: 24680

SEQ ID NO: 24829 - protein, 379 aa, Pseudomonas aeruginosa JJ692; identical to SEQ ID NO: 24797

SEQ ID NO: 24830 - protein, 850 aa, Pseudomonas aeruginosa JJ692; identical to SEQ ID NO: 24681

SEQ ID NO: 24831 - protein, 711 aa, Pseudomonas aeruginosa JJ692; identical to SEQ ID NO: 24682

SEQ ID NO: 24832 - protein, 1946 aa, Pseudomonas aeruginosa MH27
MLDPIGSFYRIRDFLISYVETSFRISDPLASEARRALLKTSGILATAPFIEPVLRYESSDKNLEDLIEEADGVLKPLSLKGRKAFVELALSGLFDGSSDDGPLLRKSQYAPYRHQVSMLERGIRPGRPGIVTSGTGSGKTESFMLPILAALSNEAVEWQKPESKYLQEHWWKTPKSQWAPRRAGEKRPSAVRALVLYPMNALVEDQMVRLRKTLDSQDAHEVMDARFAGNRLFFGQYTSATPVTGYEQHPRLAGDKQEAKRRARRISRLRKAMQDFFCNQSAARKFDENSERQQGRIRETTRYIFPSIDGGEMVSRWDMQASPPDILVTNASMLGAMLSREIEDAIFDKTREWLLSDKDSYFYLVFDELHLVRGSAGTEIACLIKSLIQRLGLDQPEHAYKLRLLASSASLPLEGAEGVQSRTYLRDLFAPFGTSISEDDPGSTDPRFWNECIIQGVPHIPPARAGGIPSEPFAQLMMAALEGKDGFVGILDRTPALEAAISKAAAALGVVATAQASLEKLLAEAAAGLLTHACKNDDTIRATTPESIAARVFAPGSDDTELALRGLMLARALPEANDSRARVAGATPAFRVHTFIRNIEGLFASVTPRQHSVTFSDFSVERGTSHSSPATGQARGRRLFELLYCEACGDLFVGGQRGQSSGSTNATELLPSAANLEHLPERPGAEYYDDMTLDEFAVFWPRRGDWIGSDKGYDQWMPAHLSPDTGVVELGETAKEGNIAGYLYYQTETAISKGKNKPVQQPSAQPFCCPKCGTDYSNRPDTNRSRSPIRAFRTGVTKSSQLVATELFELLHAIGAEPKGIVFSDSRQDAAGQAMEIERLHLRDLRREILVTTARSYIKEASIEALSSAEIIELLGKAHAARDNNEIRRLSGLLTKQTENDASRTQKVKLDRLLELSQDGSIGRITAELVRLGISPYKSSSSSIKELPWHQEFEKSGEVISYDNALSLPQISEINLDIIDSQYELVDDVIFANTFFALEETGLAYPCLSSDEENQALDAWLRIFASAYRVKENKYFDKNKVKLWQRGGDISNSRIKKIAQALYGNSLYIDELTTVLYKFDRSGHRGGLFNIGKLFLKVTKPGDLFWRCTNCERVHLHEGLGICTRCATPLPEPSGKVEELWSTNFLGKRIIRSERDGVGRFRLRVEELTGQTDDFSDRLRKFKGIFVDEVSELERLASEIDMLSVTTTMEVGIDIGALQTVYQANMPPQRFNYQQRVGRAGRRGQAFSFVVTFCRGRSHDAYYFAHPHAITGDPPPPPFLAPAHDAIPMRLLRKTWLRAAFKQLRDQCAERGEIFPGDLLTPPDVHGEYVTTRDYYHNQDIDWSARLHAALAQTQAVREQFINAVTFDQEQRQRLRDKLSVDLLISEINDQRPNAPSDEMGLARFLAERGLLPMYGMPTRVRNLYVGLRESNSHGGGAEYEWSTMDRDLDLAVFEYAPGAVLVKDKKKHRVVGFTGNLTDPQIQGRAIEGIRSVTDWCESKTYVAICPTCGSACQSIEVPGEALKCSDCRALIPKECFLLYVTPAAFRTDFVPKDELDEFERMSLRTVATVLREGEDLDCGALKVRSGAGVTILQLNDGPTDGKSDGRQFTVDLVLDQRVPVPFSPQRPPIDGIQAIESGWRRSNNTQRWGASQGEQCFGLISKKETDSIHLELTSFDERLTLNMVARKGEFMHLPTRAAAISATQILVNKAALALDVSPDEFEALEPRLRSGSPMLQIADALINGSGLCRRLGEPGADSRTPLIVDLLRETLTNTNVWPLQDFLGTGADGVHTAQCQTSCYRCIQRYGNRRYHGLLDWRLGMAYLRALVTPNYACGLIPGDERYPEIQGWKERACQLAENVEAMRKGTVRYEYLRHSGLPCLSEQKDGAELWRAVVIHPLWRHTEVGAMRDLLGPDWSSSLRYLDTFELERRPLRRLAALKQEES

SEQ ID NO: 24833 - protein, 511 aa, Pseudomonas aeruginosa MH27
MALARRHVSHLGSRLGRLVCEGDWFLTTTVHSYHSLHETLTPKGFYPRASEQIVRPRLSGGVRVAHGWLGRPGFLPHIESDTTDYIINPVDVRLEKESIVMEGGQLTALVPVEGSFVIEPERELVEKAAPWRLRVQLIRNALPHLGLGSSARYKLEQLNDWSRVSPSSVVFEGQDPLVWEEIVSESEDLLEAIYADGASGWEEAALVTLLRGVDTSTWDLLRCLQDAGIIEPRLRNGWKGRAWTLVAPRLVGVTRGNQNIAVIEGAVCASLIDEFRSVVARLGGQCFRRTGVSPWSPPVIGASVASVEALAEKLDWPLALQPMMPDAEPLAFVETHRMSDLHEVASAWDWNERRFKESASREEPFKLTRFSHPGGRDHDLYCLTSRSRLMNYLSRTAAIAAAHASSHTPLFEQRDDNLLVRLTCDGGLPDAVAAGLRRRLLRTAGPVGNEYFYPITQQALSWLSSLLPGCLAGPDLIDERPPTRLVAEARRSRGQQRLHWRKGRLTLPRHT

SEQ ID NO: 24834 - protein, 713 aa, Pseudomonas aeruginosa MH27
MVMASTTPWYAGTCERRNDMTVQLKVVAVKTKLGWSLVENPHKLFRKSGEVEMRGADVASLRFGEWVKFQVGPSERKDQWRATRHHRLYAYYDLSSAQSVEEARQTLTFNGVATHRPPGIWMIRINGDQVVQIEFTRSGDDLLLASHITTLPAYEFDQDSVISMPTGSSEHLFYDLGSDAKPCYTYDWTPESGYIERVIRRLAGFQSPQLAEIISWLQQHADERTGRITVNPDDVLAAHEALRSGELAKRLNAEQTLLRSLVDALTGDARMAGLLERERNALIEQERNTIHTNLEMQLAVEMELQRDLRTSQLEVQLKEHEAASRAQIKEQLDHDRQEAESAIAAYQAAQKVEIDKVICSRLAALEQEKAELTEYCANLSQSRDELILTLHELEIKAEDLNALVGDLSAAVTILKEQREHGTAEVERLKEISRVASEGRGYAPVTVVPFYRPKHSTAWCCSEAGEVLKNCALLTSNGKNLMEQFIALSLAGEIPLLVGPDVADFLLVAESLVASGRSARLEADPTILTFEDLWVRAGTGLPTSLAQGLTLASSQEPCSVLGVIDRAERSAARFWLPALTDRARRGDLPRRLLLCATVEDDSCEEAEALRGSQIWLPVKEAIAKDAATVAPLWLSPSQYRELDPGDCPVESIEGGLNVAQKLANRLGLVNTLRAVRSAAEVATFYKGKEAIDAIARMNTLFLNSVGSEQPAVAY

SEQ ID NO: 24835 - protein, 1946 aa, Pseudomonas aeruginosa NCGM2.S1; identical to SEQ ID NO: 24680

SEQ ID NO: 24836 - protein, 850 aa, Pseudomonas aeruginosa NCGM2.S1; identical to SEQ ID NO: 24681

SEQ ID NO: 24837 - protein, 711 aa, Pseudomonas aeruginosa NCGM2.S1; identical to SEQ ID NO: 24682

SEQ ID NO: 24838 - protein, 1946 aa, Pseudomonas aeruginosa U2504; identical to SEQ ID NO: 24680

SEQ ID NO: 24839 - protein, 379 aa, Pseudomonas aeruginosa U2504; identical to SEQ ID NO: 24797

SEQ ID NO: 24840 - protein, 850 aa, Pseudomonas aeruginosa U2504; identical to SEQ ID NO: 24681

SEQ ID NO: 24841 - protein, 711 aa, Pseudomonas aeruginosa U2504; identical to SEQ ID NO: 24682

SEQ ID NO: 24842 - protein, 1946 aa, Pseudomonas aeruginosa WS394; identical to SEQ ID NO: 24680

SEQ ID NO: 24843 - protein, 379 aa, Pseudomonas aeruginosa WS394; identical to SEQ ID NO: 24797

SEQ ID NO: 24844 - protein, 850 aa, Pseudomonas aeruginosa WS394; identical to SEQ ID NO: 24681

SEQ ID NO: 24845 - protein, 711 aa, Pseudomonas aeruginosa WS394; identical to SEQ ID NO: 24682

SEQ ID NO: 24846 - protein, 1948 aa, Pseudomonas protegens Pf-5
MVLDPIGGFHRIQDFFISYVETSFRISNPTAAEARRALLKTCGILATEPFIEPVLRYESSDKNLEDLIEEEDGTLQPLSLEGRKAFVELALSGLFDGEPSKGLLRRKSAYAPYRHQISMLERGVRAGCPGIVTSGTGSGKTESFMLPVLAALANEAVDWPKPGVNYLQEHWWQTPKSRWSPRRAGEKRPAAVRALVLYPMNALVEDQMVRLRKTLDAEEAHAVMDERFTGNRLFFGQYTSATPVTGYEQHPRLAGDKQEVKRRARRIARLRKAMQNFQRDQDAARRFDADVQSDGKASVEKTRYIFPSVDGGEMVSRWDMHAAPPDILVTNASMLGAMLSREIEDAIFEKTREWLMSDEDAYFYLIFDELHLIRGSAGTEIALLIKSLIQRLGLDQPEHCYKLRLLASSASLPMEGVEGVQSRTYLRDLFAPFGTSSRPNDLGSIDPSFWSKCIIQGVVHIPPVQQCGIPAEPFVQLMKAALEGKDNFVGQLDRTPALDAAIVQAAKVLGITETEQTTLVKQLAETAASLLTHACKNDGTIRATTPRSIAARIFAPATGDTELALRGLLLARSLPESNQSAVKVAVATPAFRVHTFIRNIEGLFASVAPGEPDVAFDNFSVERGTSHSAPVEGQRRGHRLFELLYCEACGDLFVGGQRGQSSGSMNATELLPSAANLEHLPERPGAEYYDDMTLDEFAVFWPRRGDWIGSDKGYDQWEPAHLNPDTGIVEIGEIAKEGNIAGYLYYQTKAAVSKDKERSTQQPSAQPFCCPKCGTDYSNRPDTNRSRSPIRAFRTGVTKSSQLVATELFELLHAIGAEPKGIVFSDSRQDAAAQAMEIERLHLRDLRREVLVTAARSYVKDASIEVLTSKEIIERLIKAETAGDKDEVIRLSELLKKQTVACGPKTRKVKLDKLLEFGNDGSIGRITAELVRLGISPYKHSSSNDAKELPWYREFEKNGDLIAYDHTLSYTQTVGLNKDIVEGQYELIDDVIFANTFFALEETGLAYPCLPMDEDDQALDAWLRVFASAYRVKDNRYFDKNKVKLWQKGPDVTNGRIKKVARALYGETRYGDELTRVLGEFERLGHRGGLFNIGKLALKVTEPGDDFWRCSNCERVHLHRGLGVCTRCVAPLHEPSGKVEALWETNFLGRRIVRGERDGVGRFRLRVEELTGQTDDFSDRLRKFKGIFVDDVSELEKLASEIDMLSVTTTMEVGIDIGALQTVYQANMPPQRFNYQQRVGRAGRRGQAFSFVVTFCRGRSHDAYYFAHPQAITGDPPPPPFLATGHDAIPMRLLRKTWLRAAFKQLREQCAKLGESFPGDLLIPPDVHGEYVTTKDYYHSQEIDWPIRLSEALKQTQSVRDRFIETATFDQEQRQRLYAKSSIDLLLKEINDQRPHAPDDEVGLARFLAERGLLPMYGMPTRVRNLYVGLRESKTQSDHSEYEWSMMDRDLDLAVFEYAPGAVLVKDKKKHRVIGFTGNLTDPQAQGRSIEGIRSVTDWSESQTYVAICPACGSASQSKQAPEGPLACNDCQAPIPKESFLHYVTPAAFRTDFLPKDELDEFERMSLRTVATVLREGDCFNYRALTVRSGAGVTILQLNDGPTDGKNDGQRFTVDLVQDQRVPVPFSTQRPAIDGIQAIESSWRRSHISPRWSQPLSEQRFGLISQKETDSIHLELTRFDKRLTLDMVSRKGDFMHLPTRAAAISATQILVNKAALALDVSPDEFEALEPRLRSGHPMLQIADALINGSGLSRRLGEPASDGPTPLLVDLLHEILEKPNVWPLQDFLRTGAEGPHAAQCQTSCYRCIQRYGNRRYHGLLDWRLGLAYLRTLVTPAYACGLTPGDDKYPEIQGWRERASQLADDVEAMRKGTIRTERLPHSDLPCLIEQKDGVELWRAVVIHPLWRHSEPGVMRDLLGADWSPSLRYLDTFELERRPLRRLAALKQEGS

SEQ ID NO: 24847 - protein, 394 aa, Pseudomonas protegens Pf-5
MSEDLRFFEFFAGGGMARAGLGNQWQCLFANDMDRIKASTYIQNWGKDHFDSRDIREVNSEDLERNGDLAWASFPCQDLSVAGNGLGIGSSSAKDFTRSGALWPFLDLIDTLRQEERQPPLLVLENVVGLLTLEGGRDFAAICERLGEIGYRYGAVIIDAKHFLPQSRPRVFIIAVQRNIDIPCKLSRGMATANWHTPTLLRAYKSLTPILHADWVWWELGDAPILQENALESFIQREGVLWNTPEETKRIISMMAPAHLARLENAKCAGGVAVGSLYLRMRREGGINKQRAEITFSPLLGCLRTPRGGASRPRIIVVESGHVRTRLLTICEAARLMGLANTYILPEIYHHAFKVIGDGVAVPAVRFLAERLLEPLAIAARGQIAIPHEKAFMA

SEQ ID NO: 24848 - protein, 851 aa, Pseudomonas protegens Pf-5
MTWSPPRTFEEWEQRLVQHFLTVGQDGDASDIRSFEVTATTLAQACGAESDQESIVEGTFRDIMSRIPNLPHRLNIGMQRSSTREWPNFFIYLVMTLLIDSQLEGHEDGNEFRSKLRKWLNTGHSLQQLPGINLMWEELAHWLERRINEGRPFRRLILPTIPKNWRHIGYTRRLTFPNKTDLRLMEGFLADCPQAQTDPNLVVRKFPVVLLNERASDALKLAFREFREAYLLGRRTLADLPFWRLLRRALAHSGKSARRSVVVDMMFDADGSRSYFSCPEQALQAEFHPTLFMALSGVSAQVSLNLGVAIQSGFLFFRQVGVGRWRAEARPCNAPQGLHVALARRHAQRLGNRLGSLVSESEWLLTSAAHSYHAVYETLGPMGLISQPSEQIVRPLLSSGVRVPHGWLGRPGFLPFIESDAVDYLIRPADASEEEAPITMEGGQLVALSPVEGSFVIEPVRELGEKSAPWRLRVQLFQDALPHPDLGSSARYRLERLSDWSRVSPALVIFDEQDVLEWETGPVDCEHLLEVIYASGVSGWEEAELVTLLHRLNASSWTLLRCFQDAGIIEPRQRSGWKGRAWTLAEPRLVRIARPGHEDLVVIEGAVCARLVEDFQTAVIGLGGKCFRRLGVSPWSPPVIGASVASLEALAKIMDWPLVLNPLMPDAVPLAFAGTERMPDLHEVASTWDWSTGCFKDIATREETVTLTRRVHPGGRDHDLYCLTSRRGTTNWLSRTAAITAAHALTRTSLFEQRDGQLLVRLARDGGLPDALAAGLRRRLLRTGGPMGAEYVYPVTPDILKWLGSLLPGCLAELALPDEQSPGRLVAEARRSRGQQRLHWCNGQLTLPRHT

SEQ ID NO: 24849 - protein, 712 aa, Pseudomonas protegens Pf-5
MAAITPWYAGTCERRNDMIVHLKVVTVKTESGWTLVDNPHKLFRKSGEVEMRGVDAASLRFGEWVKFQVGPSERKDQWRATRHHRLYAYYDLSQAKSIEEARRILTLEGLAAHRPAGTWMVRIHDAQVIQVELARSGDDTLLGAHITTLPAYDYDPDSVLSMPTGASDHVFYDLSADVKPCHIYDWTPEKGYIERVVRRLIGAQAPQMTQIVSWLQQHTDEHTGRVTANPGDALAAHEALRSGELARRLAAEQTLLRAFADGLVSDARIANLLERERKALIEEERGTIRQQIQTQLAQETELQRRLRASELDAKLKEYEASHRAELMKHLEHERQETENALITYQAAQKAEIDKVLGAQRAVVEQEKAELEEVCADLSQHRDGLVSALQTLEAQAQNLNASVADLKADVAILEERKEQETAELERLKATTTVVFDKRSPASTAVIPFHRPNTAQVWFCSEAGQIIKDCALLTGAGKKLMEQFMALVLAGETPLLVGSDVEDFLLIAESLMASGRSARLEADPTILTFEDLWVRAGTGLPTPLAQGLALASSENPCSVLAIIERVERSGARFWLPALTDRARRGDLPRRFLLCATVDDADCEEAEALRVRQIWLQVDGAVARDTATVAPLWLSSGYRRELDPGDHPPEDIESGLGVAHKLANRLGLVNTLRAVRAAAEVAAFHRGKDAIDAMVRMNTLFLNSVGSELPAVASD

SEQ ID NO: 24850 - protein, 1945 aa, Pseudomonas syringae BRIP34876
MLDPIGGFNRIKDFFISYVETNFRIADRQIAAERRRLLETTNVFATASFVEPVLRYRAHELRIDQMVGVINGPLAKLPYDVQVAFAELVLSGLFEGDDAAGKLMRVGRYTPYKHQVEMLQRGIQPGHPGIVTSGTGSGKTESFMLPIIAALSREAISWSKPDIGYLETPWWASPKGKWNPQREGENRTAAVRALILYPMNALVEDQMVRLRRTLDSDEARAVMDRRFGGNRVFFGQYTSSTPVTGYEYHPRTSDSEVEKKRRQRRQRQLRSAMKKANQDQIDARNHDMEEQRRAVERGTSPPERTRFIFPSLDGGEMLSRWDMQATPPDVLVTNASMLGAMLSREVEGPIFEKTRTWLRDNDDAYFYLVFDELHLIRGSAGTEVAFLIKSLIQRLGLDDPAHRYKLRVLASSASLPMDGESGIQSRRYLRDLFAPYGTSASAGETGSEDEEFWTDCIVKGEADIPSWEGGEIAPDPFINLMEASYSNDRDFVAKIVRTDALEQAIEDVARALKVTASRDARIVGIAETAAAVLTSACRAGEGVRATSIAKLGKQLFGDLANADVAVQGLMLARALPESGQWEGRVSQGTPSFRVHAFVRNVEGLFGAPSAAAGKFTFTDLSVERGLSHGQPAPGEVRGRRLFEMLYCEACGDLLLGGQRGKRVGASPLTELLPSTAELENLPERTASEYYDRMSFEQFAVFWPSRLTPQQDGRGWDEWEAAHLDPESGVVSLGEEVPSGRIGGRLYHQSTTASQNGHRTAQPFCCPSCGTDYSNRPSSSRSRSPIRAFRTGVSKTSQLVATELFELLHAVGAEAKSIVFSDSRQDAANQSLEIERLHLRDLRREILVTVARDYLQRAVAAKVDPKVAMVAANKLLEAGDMEGFQKAIAAISTQANDTQISVESRKVQISRLFDYKDATGGVGALIAEYVNLGIHPFDEVGRKPYRGRPWFQAFQKSGDLISYASWLDDTQQKELGVFIEQELMELVDDVIFANTFFALEETGLAYPSISRESGPDIDRLDAWLRVFASATRVQENKFYDRSRTTEWDQASKIRPSSRVWKFADALNGDTNDELQSVLKAFGNHGHVNGIIRVGRVFLRISEPGDPFWRCGYCERIHLHRGLGSCTRCYKPLASERSGKVEQLWDTNFLGRRIVRGQKDGVARFRLRCEELTGQTDDFSDRLRKFKNIFVDDLGEVARLAREIDMLSVTTTMEVGIDIGSLQTVYQANMPPQRFNYQQRVGRAGRRGQAFSFVITFCRGRSHDAYYFAHPAAITGDSPPPPFLAAGHDPIPRRLLTKVWLRAAFKKVRDDFVDERGIYPGDLLVPPDVHGEYVPTDDYYDDPDGCNWKRRLQEALRATVAQRDAYIDAACIDLVQRERLRAESTDEKLITEIGKQEEFKPVNRVGLAQFLAERGLLPMYGMPTRVRQLYLGVRAETDESNPDYSWSTMDRDLDTAVFEFAPGAVLTKDKQRHQVIGFSGTLSAPERRGKNVLLESLSSWIESEHQVALCSACGSARYSLSQPQCTLQCEDCGGDIEPKEFEDYITPAAFRTDFKAAETDLDTVGRMAVRTVATVLHLGAFSDAGSLRVRRGAGVTIMQLNDGVDDDIGQPIRFTVREAEDGHVRIPRASSTTLVDNQAIILDEISSSNNRWTAKPNTERTFGLIAKKETDALYLELLNFDPRLTLDHVARKGKFSHLPTRSAAISATQILVQKAALDLDVSSDEFEALEPRLREGNPMLQIADALINGSGLSRRLGEDRSDGIPHIVHLIRETLTEKTAWPLIEFLSADENGDHAARCQTSCYRCIQRYGNRSYHGLLDWRLGLSYLRALVTPGYTAGLDAGDQMFPETIGWNQRALALAEAVAGMRPDSLSVEVHGPSNLPALREKHDGGDTFLIVHPLWRVDGDFGKRLSGGGEVKFLDTFNLERRPLRAIELAQIGEAPKIEA

SEQ ID NO: 24851 - protein, 399 aa, Pseudomonas syringae BRIP34876
MILNFEKLKYYEFFAGVGMARAGLGGDWECLFANDSNQRKKQSYLDNWAGETFDSRDVAEVQTTDLDGIADLAWASFPCQDLSQAGSKAGIGEADDISVTRSGAVWPFLRIIRGLAEEGRPPALLALENVTGLLNANSGSDFRSLCSALNEIGYRFGAIVADASHFVPQSRPRVFIVAVRREIPIPARLQTELPQPTWHPKILLRAHAGLSVTDVAAWVWWSPGAPPPKKHFELEDIVDLSDDADWSSDEATQRLIGMMSESQLNRLSAAQRVARPMIGSLYLRMRPDGDSGNVQRAEIAFGATLGCLRTPKGGASRARIIVVEGERVRTRLLTVAEAARLMGLEEGFVLPETYHDCFRLIGDGVVPAVVRFLADRLLEPLAKHAKESVFPPFNRKELA

SEQ ID NO: 24852 - protein, 838 aa, Pseudomonas syringae BRIP34876
MTLGVQTSLGLPITLYDWELTLTRALLRAEAGDSDAIRSFEITPETLAIHCGLDREHAEAAEAAFKNALRADPHLIWCLQHGRIKKPDNKQPSCFAMLALSLLVDSLLDGVYEDKGQYRAKLAEWLSVDRSFTDLHGIAMMWDQLVAWLDSRIDGGAPFRRLILPVIPASWTHIGYTRYLSFPTKRDIRLLSKQIDRGINASIDPVSLVWQLDPIMRASSTSYGLKVAFEDFKMALRSGAASVDHRFWRLVLRASTQTGHSLPKAGSLVMDFDEDGVRRYRAGKLLEGNAAFNLLGSAIALSRTVDSLNLGPSIRRGILFFRSSGIASWTAAGEPHPGNGPFHVGISNQHIGSVRGVCTEFISSGNWFITAHPISGRIVDDVLTQIGITNAKHTVRTIGLVDGVRIGNSWLGQPRYLPYLGGASGEIVIESVGKGVPVRLAWVNGELQADDPVDGQFSISDTAAHWTRRASFVALAEVHARLGAKAYSLPEQAEWMGVTNRRCDLSHSVVGEWDDTPYANQDMIEALYAASRSGISEGHAISIIDRAVGVLRWQTLRLLQEATFFDGRPLTRWRGRVFTLGQPRLVQIRMNGKSALLVSGAIPARLEADFRSTVISQGGTAFRRLLQESSSLPLFGAFGVAPEILSKALGWPVVDAPFQPDGTSSSRLIETKVIGEGYQVASHWDWSVGRFRSGPGPEESVMLFRLVHPGLRDHDIYRIRTCKCIRSFHSRHAAIVDAYLQAGRSLFKFDQDHLSRLTSEGTLPLEISAAIRVRTLFNAACTSNSWRYEATKQDAAWLAGLLPGLIDGVLDETVIDAATSYRRGRGNRRPIWTDGGLV

SEQ ID NO: 24853 - protein, 711 aa, Pseudomonas syringae BRIP34876
MTVDVRTERGVSAAAELRRFAGHFVRWQGQYGSIAVIGLLNTDGLEVIANPMRLFPRDGLVEIQSGGNGDLHPGDWVEFDVIKNTRYRAPAYKALHLMRLPRFAVLPESTLPIYRDLLTREGWSGDSRPGVWALRLAGETVIVVELEAGKDGRLRIARASAREVKRYHYAQGCVVRTNNGARSDDVYVTSISSEMTALDWSGDVDHISRVVRSLAGMGDPRVPEIISWLELHEELITNRASATSEDREPELDMLRSAALANRLRADRKLMEVYLAAVLHDEAVRDVVANYVKEGHGAERNKMRVELDEEITAEKMRRLTQLSVEIEAERTASKARIEQETQKHEASVRSECDQRLMHAELAAFNRIQALETSVTERRDQLEHQIAEQAQKLVNIKSDAAVVETEQNELRAEAEKARTELTDVKGEIDRLLAVAAQLSSTTISASQLAVSNVGVGRVFPNHPKVGAALKGELITRQVMLSDKGRELLQSLVITLLSGELPILVGGDSADLLRVAEAIICPGRFVSIEADPTLISLDDLWARPGSGVPTLLAAAAEAARDSGAVLVVIRGIERSGARFWLPALSEVLRSGGLPRGLLVCCTVHEPEHDEVSTISGSVPWFEAKGAFSLGAAFAGPSLLTPPRIKLEVLDPGPMPTDLSIANSLAIEFGENLSLDIAMRSARMFAEAITLLGDIESAQRLVVKVAKQLMMKSSQ

SEQ ID NO: 24854 - protein, 1945 aa, Pseudomonas syringae BRIP34881; identical to SEQ ID NO: 24850

SEQ ID NO: 24855 - protein, 399 aa, Pseudomonas syringae BRIP34881; identical to SEQ ID NO: 24851

SEQ ID NO: 24856 - protein, 838 aa, Pseudomonas syringae BRIP34881; identical to SEQ ID NO: 24852

SEQ ID NO: 24857 - protein, 711 aa, Pseudomonas syringae BRIP34881; identical to SEQ ID NO: 24853

SEQ ID NO: 24858 - protein, 1957 aa, Pseudomonas syringae pv. tomato
MLDPIGGFRRIQNFVINYVETSFRISNKAAAEARRNLLTTVDVLATEPFIEPVLRYESHPENLEQLAQREDGPLAPLSECGRRAFVELALSGLFEGTRCEGEIRRKSIFSPYDHQVEMLKRGLLSGKPGIVTSRTGSGKTESFMLPVLAAISNEAVTWVAPGNGYLQKNWWLEDKGQWSARRQGENRPSAVRSLVIYPMNALVEDQMQRLRKTLDSDDAREVMQERFRENRIFFGQYTSSTPVTGFECHPRIADNKEEKQRRTRRVTRLRDAMRGFWRDQDAARAFDLKAELTAHDEGKRASDKTRYIFPALDGGEMLSRWDMQADPPDILVTNASMLGTMLSREAEESVFTKTRDWLLSNDDAYFYLVFDELHLIRGSAGTETAFLVKTLIQRLGLDQPAHRYKLRILASSASMPIDGSLGAQSLAYLRDLFAPYGTSQNANDPGVIDPEFWRDCIVVGNPHLPEFSGGRIEAQPFVDLLDAALDGKDGFVARISNAQALNPAVERAARALGRSASGSTDRIKVLAESAAAVLTQACREGSDVRATSTTDLCERIFLPHSGDYDKALRGLLLARALPESDAWDSSVSITTTAFRVHTFIRNIEGLFASVAMDGTIPVFEDFTVERGVTHAKPRIDGGRGRRLFELLYCEACGDLLIGGQRGQKVADSTETELLPAAADLDNMPEKVGSEYYDKMTLDEFAVFWPRRVQWAASDRDYDDWEAASLNPETGLVSVQSAVPSGHVAGYLYRQQEAAVKGRYGKMTGPLMAQPFCCPKCGTDYSNRPVFSRSRSPIRAFRTGVTKTSQLVATELFELLHAIGAEPKGIVFSDSRQDAANQALEIETLHLRDLRREVLVTAARELVKKSKEEWIDPLEFAPLVASLAANPSEMALLFEKINKQLTSGTQKNSDRISLSKLLQCGADSSIGELTSEFVSLGVHPFDRLGKKNFEGKIWYDLFVQNGGRPAYSHKLNDVQKTGLNKEILKGQYELIDDVIFANTFFALEETGLAYPSVTDENDEKADRLDTWLRVFAGAYRVLDNKFVEGDNVIEWLSGSDIKNKRLHRFAQVVFPGGGAIDGLSGILDELSTLGHPSGIIHIGKLYLKIAKESDPYWRCDNCERVHLHRGPGRCTRCGEKLGEQATGRAEELWHNNFLGSRIVRGQEEGVGRFRLRVEELTGQTDDFSDRLRKFKGIFVDGESEIQKRAQEIDMLSVTTTMEVGIDIGALQSVYQANMPPQRFNYQQRVGRAGRRGQAFSLVITFCRGRSHDAYYFAHPRAITGDPPPPPFLAVGHDPIPLRLVRKNWLRAAFKYLRDQCAKAGDVYPGDLVMPPDVHGEYISTQDYFHNPLASWSDRLHDALIKTLAERDSFIGVASFDPEQRSRLKEKSDVEQLIKEIGALKKYAPNSEMGLARFLAEWGLLPMYGMPTRVRNLYLGLRPVKVGGAEDYEWSTMDRDLDLAVFEYAPGAVLVKDKQKHRVVGFTGSLSTPQSFKKDDLSIRTLSHWYETETWVAVCKSCGSAIRTDLMPQTSLKCDDCQAEILPDELKRYVTPAGFRTDFNPKDGEEDVGRMSVRSMATLVIPGVRLEHGNVTVMHGAGVTIMQMNDGVANIEGEGEGFLVQEASDLRVTMPSGTKKPPKIDGEPQAYEAGWLRNARSTSWGLARWGNIGNPLLPFGLISCKQTESVQLELGTFDPRLDLSHVARRGKYDRLSTRAAAISATQILVQKAALELDVSADEFEALEPRVRSGKPLLQIADALINGSGLCRRLGETVPGGSRPQILDILHNVLENQDQWPLVDFLNVSAEGDHSAQCHTSCYCCVQRYGNRRYHGLLDWRLGLAYLRSMTTPSYACGLEAQDAAYPEIIGWRERAQWLAENIAQMRPGVLTPCNLPHSGLPFLLERKGGHETRYVIVHPLWSLDAGALSDLLGNDWSPELRFVDTFNLERRPLKTIANWLKAR

SEQ ID NO: 24859 - protein, 406 aa, Pseudomonas syringae pv. tomato
MLDSKEKIGDKFNFFEFFAGGGMARAGLGDEWNCLYANDMDHIKAATYINNWGGSHFDERDIHDVKTEDLKSNSDLAWASFPCQDLSVAGNGLGIGNSNSEGSTRSGALWPFLELIDGLRQESRQPSLLVLENVVGLLSLEGGRDFAAICVRLGEIGYRYGAVIIDTRHFLPQSRPRVFIIAVLRDIIIPHNLNHDMATQSWHPPTLMRAYRSLSQQAHTDWIWWDLGPVPTLKQNALESLVQFEGIEWDTPEETQKIISRMTPIHVARLEKAKASEIASIGSLYYRMRREGSINKQRAEITFSEVLGCLRTPKGGGSRSRIIVAGNGEVKTRLLSIREAAALMGLEASYVLPKAYQHAFKVIGDGVAVPPVRFLSERLLKPLILAARENAAGYFEEALQQLATID

SEQ ID NO: 24860 - protein, 847 aa, Pseudomonas syringae pv. tomato
MDLPHNFDAWETRLVDYFLAIGPDGNAAPIRAFEVTPSTLTHACGAASGSEAQVEELFRKMLSQDLLLMDSLRDGSQRIENRHVPNCFSYLILTLLIDNLLEGNTTQSGEYRHKLAKWLGKDTRASNLRGIALMWESLVRWLEKRSQAGEPFRRLILPNPGNWTHIGYTRHLSFPSKADLKLLVNFCQKHPRAHRDLHVSISAFPRELVDDRASWGLRDAFKEFRDAYYLQRRALGDLRFWRLLERASTLIGSPTRSSVTIEMLFDADKCALFFAYLGEQSEAEPFTSFNNALIAVRAEHSENLATAATMGVVIFRLIGAGRWRAEPEACDSAFGLHVAIADRHRRRIGDRLGLLAKSGDWAVTTNPLTFEVVKDALKQAKLFPSKLDLIVRPYLSGGIRSDGVWLGRPRFFPSLDSDTSDYVIRDALPRESGCLLTIKKGQLKAPQSIEGAFFIHPEMLRGEEHAPWNIRLQFVRNAFIHPMLAGARYKLAPLRDWTVGEKLPVDVTTQDSLDWESGDPACGDLLEAIYASGKSGWEEAQIIALLSCADDAISPWLLLRSLRDAGIVEPRLRSGWKGRVWTLREPVIIEAHRDGRALALVEGALCARMVEAFKLAVEGLGGIPFRRLGITSWAAPLFGAEDVQGKAVAELLGWRFESECLSPSEKPLAFVETPHQALHYELARAWSWAKGRFVSTDVIQENVQLVRLTHTGERDHDVYCVEQRGLIHHYFSHTAAIVAAYALARKSLFEWRPEQNLLVLTACEGGLPDALATETRRRMLRNGGPCGRVYIYPANCEMARWLDMRLPNCIAGPFHEALQQDTQGLIGIARRTSGRLRLQWRNGSTTL

SEQ ID NO: 24861 - protein, 611 aa, Pseudomonas syringae pv. tomato
MPFLDLQDVGTLEVLRSRLTVDGLKGPSHSGNWVIRYREDRILMLGLIRSSDNRYRMATGGNFNVYAYEPVLLHKVPSDGAEVSLYELKRGEECLEVLDWTADDEYIKRIVRAMAGANDPRADTVIDWLKRYSDEATGQVGASLVDSLAAQQNARSGELAKRLMGDKDLLQELTEALLTDSRLRSRLESETQAIAEQERESIFISLSGELEREFTTLREQRLLEIDSELKLLEASQREALSLQFNQELASNLLVVNDRIAARQVELECEFEEERDNLQRGLDTLIAQRETIIVELETLSTQIEYHQTNLSDLRSLESQAIQEITRLQEDAASIHVPMSVKLESVLRFNPPQIVPVLSAGEMQHAIMNCMLLTAEGKERMSHFFALMLAGEVPVVHGLEAQDFLLTAETLLSSGRSMRLEADPTVITFEDLWLRAGTQLPTSLTHGLEIASGRSPATVFAVIEHAERSGARFWLPALADRARRGELPRRFLICTTVVNDDCDEAQAIRSQAPWIDVTGTITQAGSALALIVFAPTNVRQLDPGERAEDISPAVAAVARVANQLTLVNSLRLARAATEWIHLNPGYQYEQTPAALTEFFINQSGQSGRIKEKS

SEQ ID NO: 24862 - protein, 1957 aa, Pseudomonas syringae pv. tomato; identical to SEQ ID NO: 24858

SEQ ID NO: 24863 - protein, 384 aa, Pseudomonas syringae pv. tomato
MARAGLGDEWNCLYANDMDHIKAATYINNWGGSHFDERDIHDVKTEDLKSNSDLAWASFPCQDLSVAGNGLGIGNSNSEGSTRSGALWPFLELIDGLRQESRQPSLLVLENVVGLLSLEGGRDFAAICVRLGEIGYRYGAVIIDTRHFLPQSRPRVFIIAVLRDIIIPHNLNHDMATQSWHPPTLMRAYRSLSQQAHTDWIWWDLGPVPTLKQNALESLVQFEGIEWDTPEETQKIISRMTPIHVARLEKAKASEIASIGSLYYRMRREGSINKQRAEITFSEVLGCLRTPKGGGSRSRIIVAGNGEVKTRLLSIREAAALMGLEASYVLPKAYQHAFKVIGDGVAVPPVRFLSERLLKPLILAARENAAGYFEEALQQLATID

SEQ ID NO: 24864 - protein, 847 aa, Pseudomonas syringae pv. tomato; identical to SEQ ID NO: 24860

SEQ ID NO: 24865 - protein, 697 aa, Pseudomonas syringae pv. tomato
MAANWAWYIGQCIKRHDINMAVKVVAVRSGEGWSLLDNPQKLFPKLGEVEVRLHNISAYNPNDWLSFQVAQREPRGKWKASTYRHLMPFLDLQDVGTLEVLRSRLTVDGLKGPSHSGNWVIRYREDRILMLGLIRSSDNRYRMATGGNFNVYAYEPVLLHKVPSDGAEVSLYELKRGEECLEVLDWTADDEYIKRIVRAMAGANDPRADTVIDWLKRYSDEATGQVGASLVDSLAAQQNARSGELAKRLMGDKDLLQELTEALLTDSRLRSRLESETQAIAEQERESIFISLSGELEREFTTLREQRLLEIDSELKLLEASQREALSLQFNQELASNLLVVNDRIAARQVELECEFEEERDNLQRGLDTLIAQRETIIVELETLSTQIEYHQTNLSDLRSLESQAIQEITRLQEDAASIHVPMSVKLESVLRFNPPQIVPVLSAGEMQHAIMNCMLLTAEGKERMSHFFALMLAGEVPVVHGLEAQDFLLTAETLLSSGRSMRLEADPTVITFEDLWLRAGTQLPTSLTHGLEIASGRSPATVFAVIEHAERSGARFWLPALADRARRGELPRRFLICTTVVNDDCDEAQAIRSQAPWIDVTGTITQAGSALALIVFAPTNVRQLDPGERAEDISPAVAAVARVANQLTLVNSLRLARAATEWIHLNPGYQYEQTPAALTEFFINQSGQSGRIKEKS

SEQ ID NO: 24866 - protein, 1957 aa, Pseudomonas syringae pv. tomato; identical to SEQ ID NO: 24858

SEQ ID NO: 24867 - protein, 384 aa, Pseudomonas syringae pv. tomato; identical to SEQ ID NO: 24863

SEQ ID NO: 24868 - protein, 847 aa, Pseudomonas syringae pv. tomato; identical to SEQ ID NO: 24860

SEQ ID NO: 24869 - protein, 697 aa, Pseudomonas syringae pv. tomato; identical to SEQ ID NO: 24865

SEQ ID NO: 24870 - protein, 1957 aa, Pseudomonas syringae pv. tomato T1; identical to SEQ ID NO: 24858

SEQ ID NO: 24871 - protein, 406 aa, Pseudomonas syringae pv. tomato T1; identical to SEQ ID NO: 24859

SEQ ID NO: 24872 - protein, 847 aa, Pseudomonas syringae pv. tomato T1; identical to SEQ ID NO: 24860

SEQ ID NO: 24873 - protein, 697 aa, Pseudomonas syringae pv. tomato T1; identical to SEQ ID NO: 24865

SEQ ID NO: 24874 - protein, 1930 aa, Psychrobacter aquaticus CMS 56
MLDPIGAYNDILELYLSYLDTVYRLRREDLSQERQRLLRQPGNLMPEPFIEPILRYQSTNIRLEDCLDDECQDNPLKKFNREQRRAIVEMMFSGLFPGKPATGELSRQSVFLPYVHQVQMLQRGLKSGHPGIVASGTGSGKTESFLLPILAELTAEATQWGTPPVDYLQNQWWREGSRFEYHRKGEDSNRPQAVRALILYPMNALVEDQMVRLRTMLDSPEAIEVLDKRANGNRIFFGRYTSASPVPGYLNHPRRQDDEKEKTATKRRLKRTKTTLLTLANDQEKALAYDRSNPETDTTRYLFPSLTGSELITRWDMQETPPDLLITNISMLNAMLSREVDAQIFDKTKQWLETDPKAYFFLVLDELHLIRGSTGTEMAALIRTLINRLGLDRTEYRHKLRILASSASLPLDGTEGDQSLGYLYDFFGPFGTYVDSHSKGAKKPQDWAEAVISGNTDIPKPITQQCIDTRPFIAVVDYLTPDGRYLGQLTNKLDRDEQLEKLLDACKTALGLSQSQATSDMVNQVAERLAISCTDKEGKTKARSISTLAEKIFGESREHKALRGLMILRGLGDIEGSEAISFREHLFLRSLEGLFAAPMIQQGRLVYEGMSVESGTSHIHTSKGTQRLFELFLCEGCNTEFIGGLRGKASRNNSRSPIEILPQTQDLEKLPEFGVGSGIEDLSHEEFVLFWPSIASAKRGDNDKESWVPVSLDPYNGQLRSTRPTNPADFISGKFFDMINVSDKDKQRKKTAAPNCCPACGADYSRRSEQYRKSPIRSFRTGFAKTSQLLATEVLELLKQAGNSPKVIAFSDSRQDAAKTAIDIERHHHNDTRRRILVDALINSAFVEDIETLKARREEAEKKGDYDLADEIDNKIKKIQRNQLSPDRIPLAAILETNEKGIIETGFKAQPLLAGMTAIGVHPTDDTGVEKINHNEWFSYFEEKQDGTIYWDDKIDGTKTTDAKNAVAKAQQTLIEDVIFARNYFALEETGIGYACFEAQHQQNSDELNAILRVFADNYRVLANKWVNQDSIKEWVSGYSISSRRVKHFLQASGISEDKMTDILKEMEKLNHRGGIIRIESLYIQLAKPQDPVYECTTCNRAHLHRGTGICTRCHQPLPTEPNLKSQQLRERNYISKRLDKAFADDQSIFRLRCEELTGQTRSPAERLRRFRGISIDDNSNPIKEKAQEIDLLSVTTTMEVGIDIGALQAVYQANMPPQRFNYQQRVGRAGRRKQAFSLAMTLCRGRSHDMHYFRHPEAITGDAPPPPFLTVEHIDISLRLLRKSWLTEAFKRLREEDDSNYPGDNMKSDIHGEFILTTDYYDEVKDWKQRLTTALKQTQSIAEKLANTLGQGVVNREQDLLTYLTTDKLIDEIDVLEKEGSNREMGLAQFLAENGLLPMFGMPTRVRNLYLNLESVGENESEWDSVDREIDIAIYEFSPGQVVIRDKQIHESIGFTDQLGFVQLRRGGAKLIPEPKEEWWNDKVSIADCPTCGALKLLAQSDDGVKCDDCKHKIPQEAFSVYYSPSAFRTDFRPRVSDGTEPPRPMIRRETGAIIAPMQMEKVVGTNLSLATGKEAYIIRRNRGVLDVDGNPKSYEMVHRIQNKVYCQGNSRLNIDKVPNQAILLDKAQKHSKPWQVQPELPEVQEVKLFSKKRTDALNLSMLSIADGLSMDRLGPKLERSGTSLRAAAISATQLIVQRASLALDISPDEFEPLEPRLREERPILQIADTLVNGAGFCQRLTKNIKGKSPLIVELIDSILNDLSDPMVGSFFESKHREECQRSCYRCIQRYGNRGYHGLLDWRLGLSFLRCLFDPTHRVGLDGDFTKYSELKDWPELAKIAAQDIKRLDPHKRDIISAGPLNLPVVLHNSSGPSSEAFVIVHPFWDVVDMSAELKQTVDSLDSSYSIMFIDTFETNRRLMSAIENVRSK

SEQ ID NO: 24875 - protein, 845 aa, Psychrobacter aquaticus CMS 56
MAITMQTTLASLTKKDWISSLQQHYLSTEGPYGNSDIINLDVTPAGLAEAIGMNGYSDEDIQDAFMSVFTRKLVRDFLSTKVHEIQGARAYSNFHFLILSCLVAATTTNAGDSNQYRERLGALLDDNQGAEQGVSGINSLWLALSKWMGSQIQQGKSYRKIILPKDIGNMTVIGYAVKLAYPSRDDRKQLKNILKKLSYRAFESSTSLLVELDEDYYGELPLLMQRELFNLRKLYESNHAIENHYFWQLILSILSEINRENPKNHTLLWSVSVRFGGWDGDELEEVVLAKGNRRQDLEVPFWQGGFLQFLEMHRIPKQIKALLDNGCIILLERHGGLWTQDDRKAHAEDTAIILANSPEIIERFQYPCSIAERWCYSENMPLQEALKITGDQGVAGENTSEKGLKFEGGIPVGRNKWLARSGYLPHIKIESNSKFSTNPALKVQIENDIVTIIDDDLIDKEWHLKHTDSYDELTLKRIQFFNNAPLNDSWPQRKSAFEASVELNYQLGNSIVETQNVMSVGVFPNRLCDALEALYARAQSSRSESEIIAILRIVLPQKPEFKYIVWDVLRSLEEAGWLEQDFSCRWRGRVWRLQAPKIVLTGGLTAIVEGAIAHKELEILKVEAIRQGIEIHISAQLEWAVPVISLYGDKIKKLAEELQWSIEIGKSIVAKPAPKCWPIENRTVIGRQLSSIWKAEPGLFIPLNQNISNTKMLVRFTRDDDRDVYAIDEEQGFVTTQRNIAILEYARQIKKPVFIYSDGLLKRQSLNGHLPLPVAKWLRQSTGLQSGPALTSKYSQYQYAVGEEQLNTLQAIFGLAIQGNNKIKPKKLILEIAKQRSRGIRVSYI

SEQ ID NO: 24876 - protein, 627 aa, Psychrobacter aquaticus CMS 56
MSEQWYFGEVDYTPRPQTRISGIAKVDNGKWKKQVLTSDLAPVGKVFAPSLYGVAEKQFLIFTAKLNPRVNEHNSYSSDKEHDHYIIEERKKPTVVIDYRHMSTERIRYKLVEFGLGSIDAIDAEPNEVIVALSDTECAIVEVMSHPRNGRYVAKTRNVEVYSFNSAIFEGDAFEGQFIEIPDVTVGDFIREITWKLDVDILNDLLDKLKDYDEYLKTTTKQQRADLVSLLDRALNITEQEDWADIHEWLKGYKQRVARSLIEPREVINTLSNMQPFQQKLEIAQQAASNAYRQKIQPIIEQEIRSELADLLSQQESLKQNIQERHEILENQKVIQDELQQKISSLNQQLVAEIGHLNQTLGDIKELDSQENISLVDRLKRALHDQGKLINPTDTTFPPWSRGSGRDDIPYIDNSEFVAKLQAFEEKAAISQSELNLFDRALRSGDFVLLPSISAEIIIPKYAEIVTGGVTFRESLGPNILNLDDLWMQPNQGTKTGFARAWSTAVANPNQYHLVWLDGLQRTAIDLWLPSLTSVMYSSERPSNLLVMATIDDNFIDKERLWSELSRFSTPLKFDNQVEYNKRLLQRLSIVPEKCTQLAYQKVSVASENYSEMLEKGQLWLKELLDK

SEQ ID NO: 24877 - protein, 1961 aa, Rhizobium acidisoli
MLDPLGAFERIRELYISYLDTAFRVRRPALAAERRRLLRTSGTLATVPFLEPVPRYRSSPLALEDLADLESSENPIGHLSKSGRRAFAELALSGLYPGLAAEGEVTRKSIFKPYEHQMEMLAKGTRPGSPGIVTSGTGSGKTEAFMLPILAAIAEEAVKWSAPQPGYLANAWWRDTPSEFRLHREGEASDRPKALRALVLYPMNALVEDQLSRLRRTLTSPEATAVMDERFAGNRIFFGRYTGATPVAGHLVHPRRPHDRKEQDAAARRVARVAAAMSSYERDQELARTHDRNHPDDDPTRYLFPSVDESELVARWDMQATPPDILVTNVSMLGTMLSREVEAPVFDLTREWLERDDDSYFFLVLDELHLVRGSSGTEVSGLIRGLIAQLGLDRPEHRHKLRILASSASLPLDGEQRERSLRYLHDFFGPNGTSETADDPGATGPEDWASAIVPGTPEIPTPEKPLPLDGSPFRALIAVLSADGALIGKIGERSAELDAVVIDCAKALVAVPPQAAGDAAKEAIEAASAVLTAACRTADGNGLRATGAETLAERIFGEKTPAAMEALRGLTVLRGLGDKTHDLWGFKIDEKTTSFREHIFIRSIEGLFATPVDTFSGVDFAGVTIERGTSYGTVGEGHQRIFELVYCESCGEEFIGGRRGETGRSNGLAVELLPSSPELESLPETGATGNYEDLSYQDFAVFWPTTRPAQQGDTTDEAWSEATLDTRNGLVLGSVGEGRTGVRGRLFCLPPKLGNNLKAPGSAGPKCCPACGIDYSGRSAKFRQSPIRSFRTGFAKSSQLVATELFSVLHASGDLAKAVVFSDSRQDASRAALDIERRHHQDSRRQLLIECLEAFAADVPAEREALQARLNEAAAKMDHAEMSKILARLTALPQNGEGGRVPLSGVVETPVRTGQVVTDEAGPLLSRMIDIGMHPTDDVGIARIGEGDRREGFEWDELFRQEDKLVRWREQQDANALQAARTDVITDMRPLVDDVLFSKTYFALEETGLGYPSLFPAEGADHDRFDAYLRVFADAYRVRGNRWVEKNEQRKEWPTGLSVQNKRVKTFAAAAGLKEPAEELETVIERLRSLGHGNGFIDPEKLFVRLVDSDHGYFACTNCTRVHLHRGVGVCTRCAVKLPKEPTGKTAEIRERHFLARSIEHAADAGIEAFRLRCEELTGQTGSPADRLRRFRGIFVDGQDGGQGDLYRKAREIDVLSVTTTMEVGIDIGALQAVYQANMPPQRFNYQQRVGRAGRRGQAFSMVATLCRSRSHDLHYFMHPEAITGDAPPPPFLTSDHLAIPLRLLRKFWLIEAFDILRDECGEDYPGDDARADVHGEFVPAHIFYGEGSPWPERLARALDASIGVRDASARALGSGMPGREEELLQALTPEILIGELMGLREAGSGSNANLASFLAENGLLPMYGMPTRVRDLIIGTKSSDIGQPEWDKIDRDLDVAIYEFAPGQSLIRDKRKHTSIGFAAPTLILNDGRKNTVNFITTGGPNWYTDQANIAVCEACGATNTAPPGAVEDRRCSDCGKAIPAASFVRYYMPAGFRTAFRPSPLDQDDMVSKPTRRETSSEMEDITADPVDGTNMMFAIGDKASIIRRNDGPVNVNGGGDGFVVREAVQRSVLLRETPPKLWGNNLKFQFVVPDELTNTGKWSPPDHGGLPAVDETVRLMSRKRTDSFYMSMRTVPPLLAYDRLGGRSVYKTSMRAAAVSATQLLLQRAALELDIGPEEFETLEPRLRGGLPLLQIADTLVNGAGFSRRLAGSVGTSSLALQLVRSIVENPGDSLVSPYFTDEHRQTCNRSCYRCMQRYNNRGYHGLLDWRLGVGFLRSCLDENWKAGLNGDWSAPEISDWIEIASRSAAELQQLDPVNRTIATAGTLQLPAVVERKGGVVSTFVIVHPFWRLDDASTNAGLLGEALSHFGTGNVHFVDTFEAARRPVKATEFAKLRPAEAF

SEQ ID NO: 24878 - protein, 353 aa, Rhizobium acidisoli
MNIEAIDLFCGAGGLSYGLQEAGIAVKAGLDLDGKCSYPFEANMAGAKFLEKDLSETTGDELAAFYSQDSVKLLAGCAPCQPFSTLRNGSDRQTNKKWPLLNEFGRMIEALAPDVVTMENVPVLRGEAVFRHFLGLLESNGYNVFWEVVDAADYGVPQRRKRLVLLASKMGPIRLLEPSELGTERVTVREAIGDLPSISAGESSTDDRLHRVRAITQLNLERIKASRPGGTWEDWPERLRLACHRKTSGSSYKSVYGRLEWDKPSGTITTQAHNFGTGRFGHPEQDRPLSLRELAILQSFPEHYRFVDEGEEVEFTPLGRLIGNAVPVKLGNAIGRSIVAHLEHYGDDRSGTN

SEQ ID NO: 24879 - protein, 854 aa, Rhizobium acidisoli
MPAVTTLTGADWNVRLCSHYLSSDGPYGGVPMTFLDATVPELATASGEAWSGDEALNSFLSGFGIGDVTRWLGRDDYPLRDKDRPPYFRYLVLTCVIAVNDIAGVDRGTHNFRRRLGQTLGMEELQTVNGVNRLWRALADWSARQRRNGLAVREVVLPDYGTMNLIGYAVRMAFPSWRDRTQFTAILRGIPEAVRISPGRLVAELSRPHRTLDIPKAIVEALTDFGTRRTSGQTMLDGHRFWSLVKSIEAELAVEAGEAPHRRVSVELRFGGYGQDEPEFRLVDKTAGSFDATPEGDGSWLDTMASIPRDPRSAMAKALARGYAIFKRSAGCWVCDDAGIDTNDICMIVAADGSAPRAWRLMAAWSEIGPGWRLSERVDGSDIVRLLGINDPGVRELDRPKLVGGVSLKRGVYLGRPGFLPRVEQFGAGTVAATRLVGSHGELAVADDGVMTATQPLDGIWRVSVAQGGNSLDIPFALERNAAEPAVYPPPPRADRWRPEEELRNTVPASVPCRGTLSESGSVEPTETISALCEAIVSRAGSGWRDGDLVGLVESAYPKSPIIWDIIRSFQEAGWLDAYSSTSWRARFWRCRPPGIIGIPGGDAVVDGATGSAALDRLRETANRLGVAVLVHDGISPNSLSTVRLSGPGIGKLSEALAWPMTVLEGLPSPSDQWIEDSRTPEGRIRTAIWSHEVGLFLEYNRDPMPITVECWARERRDEPDLYVVRDRSGVLRKTRSRVAAVLEGHRLNRVPLFSKREDRVVRTRKSGHLPLPIARAMRFRSLRASGVSPGEGPNREYSYSPDREIEMWLGNYLGAAFETGAASRSGTAASEVEWRHRGGRRPAWNAYPIGYGR

SEQ ID NO: 24880 - protein, 688 aa, Rhizobium acidisoli
MTTQWYLGRNAYDPRPNRLHTRIQPRAFSRDGAWRVYDKWIDYFPTEGKVFSPNHPQGASEAFFAFDVTEVTDLTKQDRFRLQTLRKVEEVLDYSDRDPEDVRRIFVEQGVSGRKADRETVVVVLPDDLCVRISLVRDGKGKKSVAELIDLAELPLYSFDRSLFAGDRIDGCWYSVPDVTVGPVQGTIDWSLDKDFLASLFKQLKRLSAPEPGELPYPATRSQIHAFLTTLDRHGLLPADEEPWRSDGERVRRLASDMRFEVDEIEELVHILSSLAPVEEKLSEALDKRRRTLEVELAASVEADVRAEVETRYEALSAQNTELDETLSKLTVEKASLERTVAELADRRDRTQREIRSLTANVASLIEVHEDGREVKADRLIQDIEKVLRGEKPAVSRVLHGPPRSELPTFDYDLAPVPWERLNQELGAAASQHGFEPRDIETLDLLARSGEVLLLCPDVAGAVLRCYASVVAQGGFAVQSLDPSTIGYDDLWRSPARGTPTPLSRAWAACANDPSVARMVLLEGIERTPLDLWIHPLIATLRAQERPKNLLVFLSMATATIDRDRSVANLSELVVPFKTQGPTELNPDFLKNLLGDEDEPGLWFDFRAKPAVARNEIGSLMSAEFGPSGKKRMPLALRASVAARGTGIFDVEKTVRILCENLDASPADAADRIGSLELGREYLRTLSN

SEQ ID NO: 24881 - protein, 1626 aa, Rhizobium sp. Leaf383
MEMLSKGTRRGCPGIVTSGTGSGKTEAFMLPILATIAEEAIGWSAPQPGYLANAWWRDEPSEFRLHREGEASDRPAAMRALVLYPMNALVEDQLSRLRRTLTSPEAAAVMDERFAGNRIFFGRYTGASPVAGHLVHPRRPHDRKEQDAAARRVARVAAAMSAYDRDQELARAHDRNHSEDDPTRYLFPSVDDAELVARWDMHRTPPDILVTNVSMLGTMLSREVEGPMFDLTREWLERNGDSYFFLVLDELHLIRGSSGTEVSGLVRSLIARLGLDRPEHRHKLRILASSASLPLEGDDRERSLRYLHDFFGPNGTSTTSDDPGAAGPEEWASSIVPGTQEIPRPEKSLPLEGVAFRSLITHLSPDGALIGKIDKTSDELDAAILECARALVVSPSQSAANAAKEAIEAASAVLTAVCRTIDGNKLRATGADVLAERLFGATTSDAMQALRGLTVLRGLGDQANDLWGFKIDDKTTSFREHIFIRSIEGLFATPVELSGNVDFVGVTIERGTSYSTVGEGHQRIFELVYCESCGEEFIGGRRGETGRSNGIAVELLPSSPELESLPETGATGNYEDLAYQDFAVFWPTTRPAQLGDAIDEVWSEATLDTRNGFVLGTSGESRTGIRGRLFCLPPKLGNNLRVPGSAGPKCCPACGIDYSGRSPKFRQSPIRSFRTGFAKSSQLVATELFSVLHASGDLAKAVVFSDSRQDASRAALDIERRHHQDSRRQLLIECLEAFAADVPAEREELQARLNEAAAKMDHAQMSKILARLTALPQSGEGGRVPLSGVVETPVRTGQVVTDEAGPLLSRMIAIGMHPTDDVGMARIGGGDGRDGFEWDELFREDDNLVRWREQHDSNALQAARTDVISDMRPLVDDVLFSKTYFALEETGLGYPSLFPSEGAGHDRLDAYLRVFADAYRVRGNRWVEKNEQRKEWTSGQSVLNRRVKTFAAAGLKVPAEELGTVIEQLAKLGHGNGFIDPEKLYVRLVDDDHGYYSCINCTRVHLHRGIGRCTRCAVELPEEVTGKAAEIRERHFLARSIRHAAEAGIEAFRLRCEELTGQTGSPADRLRRFRGIFVDGQDGAQGDLYRKAREIDVLSVTTTMEVGIDIGALQAVYQANMPPQRFNYQQRVGRAGRRGQAFSIVATLCRSRSHDLHYFMHPEAITGDAPPPPFLTSDHLAIPLRLLRKFWLIKAFDILRMEDGENYPGDDARADIHGEFVPAHVFYEEGSRWPQRLAGALGKSIALRESSARALGAGMPGREEELLQALTTETLIGELMALQNAGASSGANLASFLAENGLLPMYGMPTRVRDLIIGTKSSDIGQPEWDKIDRDLDVAIYEFAPGQSLIRDKRKHTSIGFAAPALILADVRKNTARFVHTGGADWYTDRANMAVCEACGATNTAPPEAVDDRRCSDCSCIIPAASFVRYYMPAGFRTAFRPSPLDQDDTVSRPSRRETSSELEEITSHPVDKTNMMFAIGDKASIIRRNDGPINANGDGEGFVVREAVQRSVLVREGRPKLWGNNLKFQFVVPDELTNPSKWSPPENGGLPSVDETVRLMSRKRTDSFYLSMRIVPPRLAYDRLGGRSVYKTSMRAAAVSATQLLLQRAALELDIGPEEFETLEP

SEQ ID NO: 24882 - protein, 853 aa, Rhizobium sp. Leaf383
MAAVTTLTGADWNARLCSHYLSSDGPYGGVPMTFLDATVPELVAASGETWSGVEALDSFLSGFGIEDVVRWLGRRDYPLPDRERPPYFRYLVLTCVVAVNDIAGVDRGTHNFRRRLGQTLGIGELQAVDGVNRLWRGLAEWSARQRLAGRTVREVVLPDYGSMNLIGYAVRMAFPSWRDRTQFTAILKRVPQPIRLSPGRLVRELSRTHRTLDFPPSILEALSDFATRLRSGQTVLAGHRFWSLVESIEAELMAEAGQSPYRRISIELRFGGYEQDVPEFGLVYGDRRSHHETTDGAGSWPDAIAVIPKDPRSTVGRFLAKGYAIFKRSAGCWVCDDTGVDVNDMCMIVAADGSAPRAWRVPTTWSEIGRGWRISERVDGSDIVRLLGTGDSGIRELDRPKLVGGVLLKRGVYLGRPGILPRIEQFGAGTLEATRLVGSEGELALSEDGGMTTTLPLEGIWRVSVSQAGEVLELPLTLERNSAEPVAYQSPPRADIWQAEEELRSIEPASPPHLVAASRSGTSGPSEAICSLAEAIVSRAGTGWRDGDLVALVQSVYPRHGVWDIIRSFQEAGWLDAYSSTRWRARLWRCRPPGIVALPGGDAVVDGALGTAALDRLREAADRFDVTVQVHEGMSPDCLRTVRLTGPCLHDLSETLGWPMTSLNGLPRPTDQWIEDNRTPDGRIHSASWSHEVGLFLEHVPDTMPVTVERWSRERRDESDLYVVRDRSGILRKTRSRVAAVLEGHRLNRIPIFSKRKDQVVRNGMSGHLPVSIARAMRFRSLRASGVFSGDGRNTEYIYFPDREAQTWLEKYLGAALDVGATGPLGSTAAEVEWRHRRGRRPLWNARPIGSFK

SEQ ID NO: 24883 - protein, 688 aa, Rhizobium sp. Leaf383
MKTQWYLGRSAFDPRPNRPYTRVQPLAFSNDGEWRVYDKWIDHFPSEGKVFSPNHPQAASEGIFAFDVTEVIDVSKQDRFRLQTLRKVEEVLDYSDRDPEDVRRIFVEHGIPGRKAERENVVLVLPDDLCVRISLVRDGNGKKSVADLIDLAELPLYSFDRSLFAGERIDGCWYSVPDVTVGPVLGTIDWSLDKDFIASLFKQLKRLSAPEQGELPYPTTKAQIHAFLTTLDRHGLLPADAGPWQSDGSRVRRVASDLRFELIEIEELVHILSSLEPVDEKLSDILEARRKAIEIEIAERVDADVRAAVETRYRSLFDRNVELDNTVSDLSVRKASLEQDVVELADRRDRTKREILSLTAKVTSLVDGRDDARENEVRDLVRDIDKILRGEKFVLPRVSHEPPGSDLPMLDYDLAPISWNNLRQELGAAASQHGFEQRDIEALDLLARSGELVLLCSENAVSILRCYASVVSQGGIAIQSLDPSTIGYDDLWRSPARGAPTTLARAWAACANDGSAARIVLLEGIERTPLDLWLGPLISTLRGHARPRNLLVFLSMGTAIVDRNRSVSNLPQLVVPMKTRLPSELNEQFLKHLLGAQDEPGLWVDFQAKPVIPSNEIAVLMSADFGPSGAKRMPLALRASVAASGTGYPDIQKTVRNLCENLDASPSDPDERIASLEYGREYLRSISN

SEQ ID NO: 24884 - protein, 1804 aa, Ruegeria sp. ZGT118
MPNATPNEVLKYIQEAYHKYYDSAFWMRDGALMAERRELLAEPGLTAQEILLEAVLAYPSAVPVEKACEEAGLPPSVAEHLGRVVFGANYSLRKHQAQSLVTSLAPNDAPTRNVVVTSGTGSGKTESFLVPVIARLLAERLGGVGSGTLNQWWERPWSQETHWNGIRSGISGGPTPAVRALLLYPTNALVEDQVARLRRAAFRAKAIHGQPLFYFGRYTGATPGGTFFPSGQLKAGDRQRIREVAKDLRKIAEEAERLRDRDEEIRGQFQDPTCGEMLTRWDMIDAPPDIMITNVSMLNVMLMRDHEAPIFEATKNWLRSSPNNHFSLVVDELHGYRGTAGTEVALVIRNLLLRLGMEPGSPQLRCLGTSASLDGEEGREYLQQFFGVDKSTFAVFPGEPRKPSVELPIDESHVADKADDIMRGDRSAIDQVLSRFSARDALGSACIAAGRKDDGGVAPARVSKVKEKLFGQGAADTSFAALLHAAATEQSVSFTEPKPSFRAHMFLRQIQGMWACSNPACSEVEERFRYEGRQIGKIFKQPAIKCPCGGQVLELLYCYDCGEAYLGGYVTPKVDEDEEGEVFLESGPTDLSSTVPGLVNERPHSRFRWYWPGKLVPSGVTTSWQHKNPATGKSVTFGFAPAVYRPLYGHLAKAQPGETPTGTLFQVPKGVDVPGLPGRCPACQSSKSQSRILKAFFSGSRVNSPIRGLRTGLNVTTQVIADRATSILGSEDVAAPMIAFTDSRDDAADVAAGLELNHFRSLVRQLVFAELEPKQVFSIDDAKEVAKKVQAENDLDAREKEIAAAINAFHPDLMQSLLLDSLRMANESQRARIREFSEKALGNPAVAWSQLVSGVLARLLELGENPQGTDASRQTVDNEPWWRFFDETRPSGVARLDASVEEAGRRTIRENLSSLVAAALFDGGGRDLETLGIAYVRPIGEFSAKLGLERSEAECILSNVVRLLGQARLYSGSGSSQSSTNTPAGVRKYLEKAAPRLNRDPVVLADAIGDLLKTEGIANENWVLQVTRYGSLKLELVPIESGLARCDRCSRISANTTVKACTSLNCESESFSPIDQPEDDYYRWLSGEKAHRLHVEELTGQTKPLSEQRRRQRLFKEAFLEGEEPRVHGIDVLSVTTTMEVGVDIGSLELVMMANMPPQRFNYQQRVGRAGRAGQSFSYALTICRGGSHDDFYYSNPERITGDTPPQPYLDLSRPEIVRRVAAAETLRRAFNALAEPPSRSASTHGSFGATSSWESKYKAPVSEWLATSPEVTEVVDALCLNAPLSTGKRDSIEAYCREKLADHVSEIVKSDRYIQEELSERLATAGILPMFGFPTQTRSLFGFKHGASVDEMVISDRPLDHAVWAFSPGSEIPKDKQIHVACGFEYKRQVGGRIISDPDPLGDPLVFSKCEEETCGNIMQGASETCDVCQSMASPFNLYQPKGFTTTGRPRDYDGQRQRGPALNPPVLAFKPDYSAGFDVGPMKVALTSDEPIALVNDASGEMFNFRRKVNSIIVNEEHFYRDDPPYRDLQGEPETTGAIGAVFNTDVMTLLLGSLPNVGYNGVLDIDNQPAARAALVSFGEFVKLAAAVELDVDPSELRVGTQRWRTPHCVTMQIYVADALENGAGYTRHICNPKRLRALLQRHYDVRRVEWEAADHALCDRSCPDCLRNYNNRFLHAALDWRLALDVAELVLGHPLDTDRWLASSQKIGSRVVELCNSEDGDVFLEQADSLFAVTRLNPGRSLVLSHPLWYTTKDGPAQDRQHDAKLTLQANYGPAHQVDFVDIRDLAASPQTYVVKLLEA

SEQ ID NO: 24885 - protein, 472 aa, Ruegeria sp. ZGT118
MLKAGELAATSMVSRPRVYSMVDLFAGCGGLSLGFENAAFTPVFVNELHDDALKTYLLNRHHELGGMRFSDNPALRCNDAHDLKDERLEQMVADLSSIREIDFRFDRTANEESGGGSTLDVLTGGPPCQGYSGIGIRRSYAVDRKVIPSNHLYGRMAEIIRRLRPRIFLFENVRGLLNAKWTREGGEPIWPEVLREFKEHIPGYEVRWSLVHAKDYGVPQNRPRVLIVGIRKDILADAKKKGVENLDDTADTEDAVKCGFLPAGCPGEYPDLGELLGDLLDDDVEDILLNQSYAPGPFETKSYPRAAKKGTIQERLRKAPDWYPHRGVRLTEQEYSKHKWAVVDKFRYMLGHNGEIPEKYKTRKFSQRVLKEKWGNAEPNITATSLPDDYVHYRQPRILTVREWARLQLFPDWYQFAGKRTTGGLRRAGKPTEGIFDREVPKYTQIGNAVPVGLAERVGKHFKMILDAAVDA

SEQ ID NO: 24886 - protein, 1026 aa, Ruegeria sp. ZGT118
MEEKAYWSVEIDTEYAAANSALNNYFFRGRFEMLPVYLDLEGDAETEVAEALEIEPDELGDFVGLCVSRSLRFDRADPYVDHTSWLKDWSKAGRRSPPPFTALLCALSIAAERMGADENFSPNNYYERYFELLGVKGATNQQKLKQYAKSTRQFWRALNLWLSENDYLLGRPTAKPLLSHWQYASYALSQALVRDADRRRFEGLFLAYDLTPGDPIGEAEMALLVNDWMTSHGSSGPTAWLKKLWTANELRERVVAAALDMFESWEPSAAVTPGQAKKARLQWQLGFPGFPRKRVTLALSVTRGGNAEPLRPIKPESILEDEFVLEEGEPGVQFLGPIGSINLDLLLLQSQTFMGQQSGVTYNYIAKPIVVFSRSAEGTMFREVTRASLFEEHAILCHEAWLEKVEGHLAKCARPGHAVLQSSDMPGIPRGWCILRGVEIVRSVDNAHDNFHALNPLDSTAAIACVGGLKLGHGTWHVDAKPHVEAKSEKSDGKLEILHERFGQDDEIVASSKAVGDFIELDLDQVEVAPGTNLRAVVKAGKAELAETDFSLRSADVPRPLGGKRFYHPFASGQGLSLNSETISLSPGNGLEGCTIVGRLNVEPDQSVSPQPETSSNKIPEGMAEATPEVDWNHSQDAVHQAAGSCVIRGYHYWVYEPFEKGDDRFEAKMAECKDCHVRALSRSRAVAKKNWKKSKQARYGTPVRRQTATQGAIQQEHGGSLPQTNSVSLDTVFDALCYLGQGSWHAFQRLVASVSEEPWFPRTLAADLFALGHLEMKDSILSDASDWSVPPPVMVVGLDKKARLAGFHSKLLLGKIRDALESAGAIYEVVSQPGRVTLHRWSGLAGLPLDALLEGITDPHGRSVTVAHDLGLAIARNLPSIEMAWMLGTPMHVERADALAKFDVRDARWIRAETIEGTGAYRVGLHGTRYVFRDHSGDTRQVGHRVAKILAAKSEGTRLHAYDISTGRFIAALGAEPPGLFARALVASSGALPLIEGGRLIYERVAPMIATIILKKLYEGDRTVA

SEQ ID NO: 24887 - protein, 1980 aa, Salmonella enterica
MNNPLETFESIRDFYISYLETAFRIDSSDIQSERRALLEQQGTLCADLFLEPMPRYQHYGLTISELRNDAHGQTWLPGFNAQQRAAFIDLCLGGLLPCNKTDPAKGRFNLYTHQLDMLKRGVQPGKPGIVTSGTGSGKTESFLLPVLAQIAKEATGWPQSPALKHWQPWWQKVADKQPTFMREHEAVARPKAVRALILYPMNALVEDQLVRMRRALDSSEAHDVMDAHFGGNRIFFGRYTSATKVTGWLKHPRLSEEKNEKKRVAKKITELRKYMQLTEETHQEAVRQAQQGKDNELSFNFPRTAGGEVLSRWEMQKTPPDILITNTSMLSTMLVREVDDSIFEQTRQWIERDPDAYFYLILDELHLQRGTAGTEVSYLLKHLISRLGLDQEKHRHKLRILASSASLPVEGPEGEQSVEYLWGMFGQRGLPSGATSSDWRECIIKGDTLPPGNMSLFQGDQEAFYHAVLQLQQAPLTSLQHWQNVARSMGMTTSEVSTEQLAQRVVLQAANLLESGCYTDDLSPRATSIKMLSSRLFNAQPHSEKALRALIWLRSTEGDWSQWFSHDFPDDIGAPRFRAHAFLRALEGLYAAPLPASSAASTQEINHRYFGDLTVESGLRYGKDKTSRRVELLYCECCGNLFLGGKPSVFSGSESRIELLPNDPDTEQLPEHAKSVMIERRSAEEYALFMPVVERFWPKGNETLNGDDAFGTWGKASYDPFTATIQHPVSLLKPLPENHIAGWFYYVKPGEFASPERGQSSSQSPGTALPFQCPACGTSYKYGKGKLSPIRSFRVGFSKTTQLLTSSLMAELQRSGNREQLVTFSDSRQDAARAALDLESGHHDDVRREIVVHSLQSIAADKPSHNQLKIRQAEIEDRNKTLINLNVRSDEEEDEMDRLADERKKIRGLLSKPETDSIPLREILEPESPDAGQPLGLLLRAQVDAGIHPSDRTGIAPVPDPEKHEEGTLTFAWQQLFEKNAQGVWCWKALPSYEDNLLVARQEISRDLKRLVGESVFSKTYFALEESGWGYPCLPITGNDSREHLAIYDAMFRVLADAYRVTPSQYTKPETPWSSASDVKSRNRLYRFTQAICQRSGGEPLSLIDSFLRRLELAGHQGGIIDIGKMHFKLAEPADRVWRCSRCGRIHMHTGAGICTRCYSPLPETPCSDAKTLQMQHYLGKRLSHSSGIHRMRSEELTGMTENPAARLRRFKGILIADDDDILPEGMKDFAPDRDLDRAARVVDVLSVTTTMEVGVDIGDLRAVFQANMPPQRFNYQQRVGRAGRRGQAFSFVLTACRSKSHDLFYFRHPEKITGDLPPPPFLTTKLEMICQRLVRKIWLVSAFKWLRQQTEKADHPWPVDDYAHAPDNHGEFFPVHWLKENQTDWLPKIRQAIEAAILARDEFARTCTQQDHHLFQRVIQPLTPEQLIQDINAVLNDSAMEAKGLAEALAEHGKFPMYGMPTRSRLLLTRPVSTGEKEIEFASMDRDLDIAIQEFAPGKILVQDKRRYFTAGYSGMLKQSRKNPRSFYSNAPEPGELRTMTACPVCNIWAPANSLATECTICGAVMDKAERYQCYVPYGFITTLEPKSAKEDFDQILTTASRVSIAEAYTFSAMPEPDVNVAIQLQPQTCLHRLNRGIYTDKTWRGFSATQGSLSVPFRKQGTYQPLWANRVWMDNQIIEADLLVKNRFTDRGETRNTFYLAAPKVTDLLALMVAQTPPGLRLQYSTLTPAFRAAALSASFIIVNYASKELLDIDPEEIEILEPRVQMLKNGKSVPVLQMADRLVNGSGLCERLQQKGASGSLIILEVMKNILNNKTAYPLAEFLQSDHRERCFQGCYHCLHRYGNQPYHGLLDWRLGLDVIQLLLDQTYNAGLNSDFTSPGVSDWPENALRLAKEAASLYSDSDVKVIGNIPVIRTGDGRWAAVLHPFWDPDAVFAANPELEAFSYEVDVDATNTFALSRRMGTEMAKLRTQAFSSQE

SEQ ID NO: 24888 - protein, 361 aa, Salmonella enterica
MSSVFERENDNIRVLSLFSGCGGMDFGITSAGGDIVFANDVVENACKTLGNYFPDTDIRHSDISQIQSFPDVDIVVGGYPCQSFSMAGNRKPNNDDRTNLYKHFLRVLETVRPKYFVAENVSGLKHLGAGSFLEQQLTAYKAAGYQVSYHMVNARAYGVPQSRKRLFIIGVRNDLGQCFEFPAETHGKATKKNPHLKPYVSHGEAIRDLPLWPEGEFYERPHDPEGHFSWYFMSRNRKALWDSPAYTVVANWRHVTLHPASPVMKLTWSNLEDGWKQRWDFSDEYEHLIVDTSRPKLEQARRLSWRECARIQTFPQGFEPVGDVESKFTQIGNAVPPLLAEVLFRHLFSGAGLKKMTANGN

SEQ ID NO: 24889 - protein, 921 aa, Salmonella enterica
MDDSFPVTLEQWNAELVNIVFFESSHTGSTLSRIDATGRVFEQLAGSRSKEDAKRSFLDSFGKKASKIQDALRDESRLDILAQRKGYPTYFAILYLTLLAASADDETHDEGDFRVRFSVLLGFDKNKKFVFTELPNLWERLERWSSRKQNCTRLVLPEPSKHERLIGYSKRIAFPCYKDEVFLRDILVNNELDSHSTFESVNKLVHQYLSYFGEIFNQEFIEFRTLLSKAAMRQAYDSPFWGAVRDITVHTEREQLKENGKYCIHMELNDSGHPEIYLLMDDAAVTASEIKHYYSLSNEIENYNNIYYERDIGTTLNSLDLLLKRRKGYFYKSRAGAALRSGCLPLFRDDFFHISSEGDYYDNSPLYLILHHKYADSIFIALKNAGERAQRRDIKSTKWSVVSSDNVGRQTLDKIAHLLPEEARRFLIQGWRPARPRMSGAARFGQAILLNPASTPIIHMPEVLRGCYVIRNKNGEELTHGSLSQGAEGLFIPPEELMEISGQAFCRYELTLAYSDIPVNFDVHVLDHAPYATYCKITEPHDWLTDGPSGVLMALGDTAVLPPLKREEITPLSGAQMLWQYENCLPVTCQYTELHNIPAAFDWIAEALALRFQRRSTLPFGELKQHIEPVSQVTRIPEWQLRRMLFAAGWLCVVQRRYSPYSLVSLAERTISVDVTEQGIIARIMGMFTRSERNLLQEALNDGERIGRRLVEDNGCSMGCIELHLSARERVHTFIEQFGLRLINYDDLPVNALSGVLLPSSQMQFIPTLPPDLHVSLWQAEKYQWSEEQRLTQTANNLLLRCQEKQRYRYFIRQNAGYWQTDSFSWALMAQMICSGVTFGVRKGDSDWSWSTKFIALPPSVLQWWFHVAHGCLSITDNGSYLFAGGKVPLWDNVMTFPSCQRALARRSRALTIRKLRRTLQ

SEQ ID NO: 24890 - protein, 926 aa, Salmonella enterica
MAKKKSIISDRLGQMYYFGTESHELSRCLQECKQRLTRNGAKADNLPKGPEKRLHFLRTLPLKAKPVVSDWLRENLTFPEQNDPQIVLRDLLEAESNAEDIELCKPLWRTILGFYISSDCPEIITRFLNGEKIDLPQQGVSDSLTINVTDEDIEQCALISQGKEIPIPERTIPLFIGGLVDVLKGTHTADNRWRTKLSEHSLPLARKLGELIDQFEASNDIKAMDSTSIIQAPPVVSKEIDGTMDEVMFIGKVLALTASGAFFVTPISLLIDGNLRDLPEALVKDLYPHSGEAIGFENHFSKKFARGEMAIWKARYQPSDKPAQYVITDYLSRVYPVVALPHASDEPDAVREWLLTNYQPQNDTPVIFQLSDGVSLRLPGDLLDPKKYDFDMPLESYRQVPQTLLNSHALTVITELPQVSEKYDCAEASTWIKRLLKRTDSAKYFPQFSKGQLQNLTHFIAEHESDNEASYLRAVSHLEQIADMRSFLNDTTQQLLALPEVETQINIEKQEILARYEDEQHQIKQSITVLSEKKIQLENEIADQKKKLKKETDRINKALRQQENELEQRIKKTFEAASQAGVETLAQTALLRAIIKNETAQEQPVQQRITSEPVAESANSNFPLAETNALTRKHQLISAIEKQALATGLSESLLSSLIATASITPAVGLMGKQTKQAIASLANLLAGNVWGEVSVHSDHFSFSDLMNSPTLIRLSGDALTMTLGDFLTQQQEAGLASIVELRGFNRTPPETLLPELHECLFRTPYPAACSWTDRRQALRHLPIRHPMLFLLTFTTGKSTFPLQAPLAHQFPLFLAENIWSDERPFAQNTDITPSRITPELWQTMYVGNHQPGHQACAPWEALKAALLSLLPDEQAQAVARLAYGLGRSTTQDIATTIDALAPELGPYVQEMTTGESASVLEHLFQL

SEQ ID NO: 24891 - protein, 1945 aa, Salmonella enterica
MLDPIGGFRRIQDFFISYIETSFRIADPFVAASRRELLNSSGEFAAEPYIEPVLRYESSDKTLEDLADMENGPLKSLSQEGRKAFVELALSGLFDSKSGDASWRRRSVHAPYIHQVKMLERGIRAGRPGIVTSGTGSGKTESFMLPILAALSNEAIGWPAPRDSYLQNRWWHNAEANWVSRRKGEKRPAAIRALVLYPMNALVEDQMARLRKTLDSDEARQTMEHRFAGNRIFFGQYTSATPVTGYASHPRLSGDRTEKSRRARNLEKLRKALNRIDCDQQAARAFDKEKEKSSEKTRYIFPSTDGGEMVTRWDMQAAPPDVLVTNASMLGAMLSREVEDAIFDMTREWLMSNEDAYFYLVFDELHLMRGSAGTETAMLIKSLIIRLGLDDPKHRYKLRLLASSASLPMEGADGEQSRKYLRDLFAPFGTCRDPRDEGSDSPEFWRNCVVEGTPFIPEPESKVDARPFAALMRMALTGQGDVVRRVKMTDEFERALVNAFQALGVKERNIRQGVKLAAETAAALLTHACIEKKGDKPRATSPKHIIDKIFLAESLDGEKESELALRGLMLLRALPDSVLDCDKPDAATPAFRVHTFVRNIEGFFASVSPGERKAKFADFCLERGLSHAPSTSQEKRGRRLFEMLYCEACGDLLLGGQRGQNCGGATVELLPSTTNLENLPERPGAEYYDDMALDEFAVFWPVEKTPAASEASEKRWDVWQEATLNPVTGIATVGQETSPLNPEAIRGYLYFQNPPPAKKGEPVKPPSAQPFCCPNCGIDYSSRPATNRARTPIRAFRTGVTKSSQLVATELFELLHAIGADAKSIVFSDSRQDAASMALEIERLHLRDLRREILVAAARTMISEAEKEYIPEEEFKEKRDKAIQAGDDDELDRLYELKTRQKDIARLCKFRRVKIDSLLESEGDSIGKISSELAGLGISPYKYRPSADGNDKVIWYENFVKDKNIVRYHEKLSLSDRLAIKQRIIDDQSELIDDVIFANTFFALEETGLAYPCVSDNEDTPELDAWLRVFAGVYRVKENKYVDPEQSDGWYVGEDVKKAKVKRVARAVFGDDKYLDNLTLVLNQFAAREHTAGLFNIGKLFLKVAKSGDPYWQCGNCGRIHLHLGFKRCTRCAEPLDITPKDSVETLWEQNFLGKRIVRGERDGVKRFRLNVEELTGQTDDFSDRLRKFKGIFVDKMSELEKLDAEIDMLAVTTTMEVGIDIGSLQSVYQANMPPQRFNYQQRVGRAGRRGQAFSFVITFCRGRTHDAYYFAHPHAITGDPPPPPFLAVDHDAIPLRLLRKVWLRSAFNLLREEDRENGIDFPGDKLVPPDVHGEYVSTHDYYYDDNANWSERLQGALEATQSIRERFIEAATFDPEQRQHLYSALNAKKIIDEITELSAYAPDDNVGLARFLAERGRLPMYGMPTRVRNLYLGLREKKGLNNQTEYEWSIMDRDLDLAVFEYAPGSVLIKDKKKHKVIGFTGNYREPHNRNNRVSDLSTVGSWLESSSHVAFCPACGSAKLELRQPDNDKCKDCGEPIKPDEFKLYITPAAFRTDFEPKDDIDSFTRMSLKTTATVSNEETPTHCDPLIIRRGEVTILRLNDGPINGEKEGERFTVDLTSDQKAPIPFAAYRPPIKGEQAIDSNWLREQDNSRWRRKGESRNFGLVSGKETESLHLELTRFDPRLNLNMVARYGEHMHLPTRAAAISAIQILTHKAALYLDVSPDEFETLEPRLHFGKPILQIADALINGSGLCRRLAEPAVAGSSPLIIKLLHEILKDERGWPMVDFLKKDHPVQCRTACYKCIQRYGNRQYHGLLDWRLGIAYLRAMVMPEFACGLNAEDWNHPEMKGWKERAFELAEDVEALRPGTIKLLKEHSLPILEINDGKELWRAAVTHPLWQCRDAERGTLIDSFGLDNIGASLRFIDTFELERRPLRALAKLNRG

SEQ ID NO: 24892 - protein, 395 aa, Salmonella enterica; identical to SEQ ID NO: 24501

SEQ ID NO: 24893 - protein, 852 aa, Salmonella enterica
MNWTLPVTPDGWESKLVDYFLRFGIDGDAQDIRWFEVTPSTLSAAFAGSGVGADEIEEAFRTCMSNIPDLPQRLESGMMERSNDKSPGYFTYLVMTLLISSQFDAQEGHNDFRLKLQNWLRTGHSYQNLAGVNAMWEALAGWLERRVQKGEPYRRLCLPEIPPSWSHIGYTLRLAFPGKADVRLMRRVLTSHPQTISSPRLLISYFQVAIQKENASHAHALKQAFSEFKDAWFSGRRALADMPFWRLRQRAIALISDVETRKAFIDMRVDFDGSRCYFSAASENDESVFAPSLSDALLSASAGNSYNLGIATQSGLLFFHQVGHGCWRAIAAPDAFSFKFHIALSCKYAARARQYFDDAVTENDWILTSRPQSRHAAMEIFRALKTSSTTLDEQISRLQLSGGIRVPGGWLGLPAFLPTVHSDTQNYRIYSPQGNGAKVSVREEDGRLTSSMPLNGEFIIEPELEIGEKTPPWRQRARFFERAVPRPAQEDSARYRLELLTDWKTSPLTTPAFHIELPLTTENNDERLEHLLEAIYASGASGWEEIELVALLERAADSVNVWHLIRCLHDAGLIEPRLRQGWKGRVWTLVKPSLFCIRNGDNSMIVVEGATCASLMDDFQKAVSGLGGKCFRRSGVSVWSPPVCGAEIDDPVELSRVMEWPLIDISSTPDMTPLALTSTCRTAEFHLQAAVWDWRSGRFSPHAASNNASTLLTRHVHPGGRDHDVYKVVSRRKMAFFLSRTAAIIAANVSARRPTFRRVGNHRFICLVDDCGLPDALAMGLRRSVLRNGGPTEAGYAYPIDDVAFRWLNRLLPGCFAPFPPDDGDDANRLVAAARHSGGKTRLRWQNGRLAL

SEQ ID NO: 24894 - protein, 698 aa, Salmonella enterica
MKDLPWYIGRYDRRNDRFSYFKVVAQQTENGWHAIDSPKKMFPRTGEVELTGFDASQLRPNDWIVFQVDTNTRSKLTRAKHPRRIYPYYDLSSAQSLQKARHRLSLEGIETCGEPGQWTIRFEAGGVILANLTESKPGFFILSRNQYVAEYAFNDSGIISVSGLSENNKIFYMPDADASPTRRHDWTPDKHYIENAVQLIAGTDSSTQIASWLRKHVDEQNGKLKSGVDDLLAAAQILRSGELAKKIEEEDALARELSQAVLNDERIAAQLERQIQSIAEEERDRLRAEQQKALNEAFCAERLLRSEAIEEEMTVFQTERKSEIEQQIAQLRLDEEEKLQKEFEEKQLSIEKTLKHEKDALESEINRLKNAAADLCRQNESQRRTLSSLEIKREASSGALREVEERVALARIELEKINAAIAEKARRMAHSAIPAICLPAEAKTVSRAELGRIISENKLLTHEGKILMEQFLALTLAGECPLLYGSETQDFLAIAASLISSGRAIRQIADPTMISYEDLWIRAGNNLATPLYQGLLLSDAHRPRTILAVIERVECSAARFWLPALKEGLRNGDLPRRFLVCGTITNEDNEEAEKIKEEHLFLPVENIVVRNAITRAPLYLSTRHHSELTPEAAPPESLEEKLAIADEMSGDRLNVVNTLRATKAALEVGLAVDEDKTAHQKRLVDLFANLQNSEICAP

SEQ ID NO: 24895 - protein, 1945 aa, Salmonella enterica; identical to SEQ ID NO: 24891

SEQ ID NO: 24896 - protein, 395 aa, Salmonella enterica; identical to SEQ ID NO: 24501

SEQ ID NO: 24897 - protein, 852 aa, Salmonella enterica; identical to SEQ ID NO: 24893

SEQ ID NO: 24898 - protein, 698 aa, Salmonella enterica; identical to SEQ ID NO: 24894

SEQ ID NO: 24899 - protein, 1945 aa, Salmonella enterica; identical to SEQ ID NO: 24891

SEQ ID NO: 24900 - protein, 395 aa, Salmonella enterica; identical to SEQ ID NO: 24501

SEQ ID NO: 24901 - protein, 852 aa, Salmonella enterica; identical to SEQ ID NO: 24893

SEQ ID NO: 24902 - protein, 698 aa, Salmonella enterica; identical to SEQ ID NO: 24894

SEQ ID NO: 24903 - protein, 1980 aa, Salmonella enterica
MNNPLETFESIRDFYISYLETAFRIDSSDIQSERRALLEQQGTLCADLFLEPMPRYQHYGLTISELRNDAHGQTWLPGFNAQQRAAFIDLCLGGLLPCNKTDPAKGRFNLYTHQLDMLKRGVQPGKPGIVTSGTGSGKTESFLLPVLAQIAKEATGWPQSPALKHWQPWWQKVADKQPTFMREHEAVARPKAVRALILYPMNALVEDQLVRMRRALDSSEAHDVMDAHFGGNRIFFGRYTSATKVTGWLKHPRLSEEKNEKKRVAKKITELRKYMQLTEETHQEAVRQAQQGKDNELSFNFPRTAGGEVLSRWEMQKTPPDILITNTSMLSTMLVREVDDSIFEQTRQWIERDPDAYFYLILDELHLQRGTAGTEVSYLLKHLISRLGLDQEKHRHKLRILASSASLPVEGPEGEQSVEYLWGMFGQRGLPSGATSSDWRECIIKGDTLPPGNMSLFQGDQEAFYHAVLQLQQAPLTSLQHWQNVARSMGMTTSEVSTEQLAQRVVLQAANLLESGCYTDDLSPRATSIKMLSSRLFNAQPHSEKALRALIWLRSTEGDWSQWFSHDFPDDIGAPRFRAHAFLRALEGLYAAPLPASSAASTQEINHRYFGDLTVESGLRYGKDKTSRRVELLYCECCGNLFLGGKPSVFSGSESRIELLPNDPDTEQLPEHAKSVMIERRSAEEYALFMPVVERFWPKGNETLNGDDAFGTWGKASYDPFTATIQHPVSLLKPLPENHIAGWFYYVKPGEFASPERGQSSSQSPGTALPFQCPACGTSYKYGKGKLSPIRSFRVGFSKTTQLLTSSLMAELQRSGNREQLVTFSDSRQDAARAALDLESGHHDDVRREIVVHSLQSIAADKPSHNQLKIRQAEIEDRNKTLINLNVRSDEEEDEMDRLADERKKIRGLLSKPETDSIPLREILEPESPDAGQPLGLLLRAQVDAGIHPSDRTGIAPVPDPEKHEEGTLTFAWQQLFEKNAQGVWCWKALPSYEDNLLVARQEISRDLKRLVGESVFSKTYFALEESGWGYPCLPITGNDSREHLAIYDAMFRVLADAYRVTPSQYTKPETPWSSASDVKSRNRLYRFTQAICQRSGGEPLSLIDSFLRRLELAGHQGGIIDIGKMHFKLAEPADRVWRCSRCGRIHMHTGAGICTRCYSPLPETPCSDAKTLQMQHYLGKRLSHSSGIHRMRSEELTGMTENPAARLRRFKGILIADDDDILPEGMKDFAPDRDLDRAARVVDVLSVTTTMEVGVDIGDLRAVFQANMPPQRFNYQQRVGRAGRRGQAFSFVLTACRSKSHDLFYFRHPEKITGDLPPPPFLTTKLEMICQRLVRKIWLVSAFKWLRQQTEKADHPWPVDDYAHAPDNHGEFFPVHWLKENQTDWLPKIRQAIEAAILARDEFARTCTQQDHHLFQRVIQPLTPEQLIQDINAVLNDSAMEAKGLAEALAEHGKFPMYGMPTRSRLLLTRPVSTGEKEIEFASMDRDLDIAIQEFAPGKILVQDKRRYFTAGYSGMLKQSRKNPRSFYSNAPEPGELRTMTACPVCNIWAPANSLATECTICGAVMDKAERYQCYVPYGFITTLEPKSAKEDFDQILTTASRVSIAEAYTFSAMPEPDVNVAIQLQPQTCLHRLNRGIYTDKTWRGFSATQGSLSVPFRKQGTYQPLWADRVWMDNQIIEADLLVKNRFTDRGETRNTFYLAAPKVTDLLALMVAQTPPGLRLQYSTLTPAFRAAALSASFIIVNYASKELLDIDPEEIEILEPRVQMLKNGKSVPVLQMADRLVNGSGLCERLQQKGASGSLIILEVMKNILNNKTAYPLAEFLQSDHRERCFQGCYHCLHRYGNQPYHGLLDWRLGLDVIQLLLDQTYNAGLNSDFTSPGVSDWPENALRLAKEAASLYSDSDVKVIGNIPVIRTGDGRWAAVLHPFWDPDAVFAANPELEAFSYEVDVDATNTFALSRRMGTEMAKLRTQAFSSQE

SEQ ID NO: 24904 - protein, 361 aa, Salmonella enterica; identical to SEQ ID NO: 24888

SEQ ID NO: 24905 - protein, 921 aa, Salmonella enterica
MDDSFPVTLEQWNAELVNIVFFESSHTGSTLSRIDATGRVFEQLAGSRSKEDAKRSFLDSFGKKASKIQDALRDESRLDILAQRKGYPTYFAILYLTLLAASADDETHDEGDFRVRFSVLLGFDKNKKFVFTELPNLWERLERWSSRKQNCTRLVLPEPSKHERLIGYSKRIAFPCYKDEVFLRDILVNNELDSHSTFESVNKLVHQYLSYFGEIFNQEFIEFRTLLSKAAMRQAYDSPFWGAVRDITVHTEREQLKENGKYCIHMELNDSGHPEIYLLMDDAAVTASEIKHYYSLSNEIENYNNIYYERDIGTTLNSLDLLLKRRKGYFYKSRAGAALRSGCLPLFRDDFFHISSEGDYYDNSPLYLILHHKYADSIFIALKNAGERAQRRDIKSTKWSVVSSDNVGRQTLDKIAHLLPEEARRFLIQGWRPARPRMSGAARFGQAILLNPASTPIIHMPEVLRGCYVIRNKNGEELTHGSLSQGAEGLFIPPEELMEISGQAFCRYELTLAYSDIPVNFDVHVLDHAPYATYCKITEPHDWLTDGPSGVLMALGDTAVLPPLKREEITPLSGAQMLWQYENCLPVTCQYTELHNIPAAFDWIAEALALRFQRRSTLPFGELKQHIEPVSQVTRIPEWQLRRMLFAAGWLCVVQRRYSPYSLVSLAERTISVDVTEQGIIARIMGMFTRSERNLLQEALNDGERIGRRLVEDNGCSMGCIELHLSARERVHTFIEQFGLRLINYDDLPVNALSGVLLPSSQMQFIPTLPPDLHVSLWQAEKYQWSEEQRLTQTANNLLLRCQEKQRYRYFIRQNAGYWQTDSFSWALMAQMICSGVTFGVRKGDSDWSWSTKFIALPPSVLQWWIHVAHGCLSITDNGSYLFAGGKVPLWDNVMTFPSCQRALARRSRALTIRKLRRTLQ

SEQ ID NO: 24906 - protein, 926 aa, Salmonella enterica; identical to SEQ ID NO: 24890

SEQ ID NO: 24907 - protein, 1945 aa, Salmonella enterica; identical to SEQ ID NO: 24891

SEQ ID NO: 24908 - protein, 395 aa, Salmonella enterica; identical to SEQ ID NO: 24501

SEQ ID NO: 24909 - protein, 852 aa, Salmonella enterica; identical to SEQ ID NO: 24893

SEQ ID NO: 24910 - protein, 698 aa, Salmonella enterica; identical to SEQ ID NO: 24894

SEQ ID NO: 24911 - protein, 1945 aa, Salmonella enterica; identical to SEQ ID NO: 24891

SEQ ID NO: 24912 - protein, 395 aa, Salmonella enterica; identical to SEQ ID NO: 24501

SEQ ID NO: 24913 - protein, 852 aa, Salmonella enterica; identical to SEQ ID NO: 24893

SEQ ID NO: 24914 - protein, 698 aa, Salmonella enterica; identical to SEQ ID NO: 24894

SEQ ID NO: 24915 - protein, 1945 aa, Salmonella enterica; identical to SEQ ID NO: 24891

SEQ ID NO: 24916 - protein, 395 aa, Salmonella enterica; identical to SEQ ID NO: 24501

SEQ ID NO: 24917 - protein, 852 aa, Salmonella enterica; identical to SEQ ID NO: 24893

SEQ ID NO: 24918 - protein, 698 aa, Salmonella enterica; identical to SEQ ID NO: 24894

SEQ ID NO: 24919 - protein, 1945 aa, Salmonella enterica; identical to SEQ ID NO: 24891

SEQ ID NO: 24920 - protein, 395 aa, Salmonella enterica; identical to SEQ ID NO: 24501

SEQ ID NO: 24921 - protein, 852 aa, Salmonella enterica; identical to SEQ ID NO: 24893

SEQ ID NO: 24922 - protein, 698 aa, Salmonella enterica; identical to SEQ ID NO: 24894

SEQ ID NO: 24923 - protein, 1945 aa, Salmonella enterica; identical to SEQ ID NO: 24891

SEQ ID NO: 24924 - protein, 395 aa, Salmonella enterica; identical to SEQ ID NO: 24501

SEQ ID NO: 24925 - protein, 852 aa, Salmonella enterica; identical to SEQ ID NO: 24893

SEQ ID NO: 24926 - protein, 698 aa, Salmonella enterica; identical to SEQ ID NO: 24894

SEQ ID NO: 24927 - protein, 1945 aa, Salmonella enterica; identical to SEQ ID NO: 24891

SEQ ID NO: 24928 - protein, 395 aa, Salmonella enterica; identical to SEQ ID NO: 24501

SEQ ID NO: 24929 - protein, 852 aa, Salmonella enterica; identical to SEQ ID NO: 24893

SEQ ID NO: 24930 - protein, 698 aa, Salmonella enterica; identical to SEQ ID NO: 24894

SEQ ID NO: 24931 - protein, 1945 aa, Salmonella enterica; identical to SEQ ID NO: 24891

SEQ ID NO: 24932 - protein, 395 aa, Salmonella enterica; identical to SEQ ID NO: 24501

SEQ ID NO: 24933 - protein, 852 aa, Salmonella enterica; identical to SEQ ID NO: 24893

SEQ ID NO: 24934 - protein, 698 aa, Salmonella enterica; identical to SEQ ID NO: 24894

SEQ ID NO: 24935 - protein, 1945 aa, Salmonella enterica
  subsp. arizonae serovar 62:z36:- str. 5335/86
MLDPIGGFRRIQDFFISYIETNFRIADPSVAASRRELLNSNGEFAAEPYIEPVLRYASSNKTLEDLADMENGPLNNLSPEGRRAFVELALSGLFDSKSGDAAWPRRSVHTPYLHQAKMLERGIRPGCPGIVTSGTGSGKTESFMLPILAALSNEAISWPVPCDGYLRNRWWNNEEANWVSRRKGEKRPAAVRALVLYPMNALVEDQMARLRKTLDSDEARQTMEHHFAGNRIFFGQYTSATPVTGYASHPRLSGDRSEKNRRARNLEKLRKALNRIDCNQQAARAFDENKNEKSSEKTRYIFPSTDGGEMVSRWDMQAAPPDVLVTNASMLGAMLSREVEDAIFDMTREWLMNNDDAYFYLVFDELHLMRGSAGTETAMLIKSLIIRLGLDDPKHRYKLRLLASSASLPMDGADGEQSRKYLRDLFAPFGTYRDSRDTGSDAPDFWRNCVIEGAPFIPEPERKVDARPFAALMRTALAGQGDAVRRVEMTDEFERALFNAFQALGVKERDSRQGIKPAAEIAAALLTNACIEKNGDKPRATAPKHIIDKIFLEKSWNGEEESELALRGLMLLRALPDSGLASEKPDAATPAFRVHTFVRNIEGFFASVWPGERKAKFADFCLERGLSHAPSASGEKRGRRLFEMLYCEACGDLLLGGQRGQSCEGATVELLPSATNLENLPERPGAEYYDDMTLDEFAVFWPVEKTPAASEKGWDVWQKAALNPVTGIVTVGQETSATNAETVHGYLYFQNPPPAKKGEPVKPPSAQPFCCPNCGIDYSSRPATNRARTPIRAFRTGVTKSSQLVATELFELLHAIGADAKSIVFSDSRQDAASMALEIERLHLRDLRREILVAAAREMISDAEKEYIPEEEFKEKRDKAIQAGDDDTLERLYELKTNQKGIANLCKFRRVKIDSLLESGGDSIGKISSELAGLGISPYKYRPSADGDDKAVWYDNFIKDKNIVKYHEKLSLSDRLAIKQRIIDDQSELIDDVIFANTFFALEETGLAYPCVSDNENTPELDAWLRVFAGVYRVKENKYVDPEQSDSWHVGKDVKKAKVKRLARALFGDDNYLDNLTQVLNQFAARGHTAGLLNIGKLFLKVAKSGDPYWECGNCGRIHLHLGFKRCTRCAEQLDITPKDSVEALWEQNFLGKRIARGERDGVKRFRLNVEELTGQTDDFSDRLRKFKGIFVDKMSELEKLDAEIDMLAVTTTMEVGIDIGSLQSVYQANMPPQRFNYQQRVGRAGRRGQAFSFVITFCRGRTHDAYYFAHPHAITGDPPPPPFLAVDHDAIPLRLLRKVWLRSAFNLLREEDCEKKVDFPGDKLVPPDVHGEYVSTHDYYYDDNANWAERLQGALEATQSIRERFIEAATFDPKQRQRLYSALNAKKIIDEIAELSAYAPDDNLGLARFLAERGKLPMYGMPTRVRNLYLGLREKKGLNNQTEYEWSTMDRDLDLAVFEYAPGSVLIKDKKKHKVIGFTGNYREPQIRDNRVLDLSTVGSWQESSSHVAFCPACGSAKLELRQPDNDIDCKDCGAPIKPDEFKLYITPAAFRTDFEPKDDMDSFTRMSLRTTATVLNEEIPTRCDPLIIRRGEVTILRLNDGPINGEKEGERFTIDLASDQKAPVPFAAYRLSIKGEQAIDSNWLRERDNSRWRRKGEKKNFGLVSGKETESLHLELIRFDSRLNLNMVARYGEYMHLPTRAAAISAIQILTHKAALYLDVSPDEFETLEPRLHFGKPILQIADALINGSGLCRRLAEPAVAGDSPLIIKLLHEILEDERGWPMVDFLKKDHPVQCRTACYKCIQRYGNRRYHGLLDWRLGIAYLRAMVTPEFACGLNPEDWNHPEMKGWKERAFELAEDVEALRPGTITLLKEYSLPVLTEIKDGKELWRAAVAHPLWRWRDAERDALIDAFGLDDKGVPLRFIDTFELERRPLRALAQLKRG

SEQ ID NO: 24936 - protein, 411 aa, Salmonella enterica
  subsp. arizonae serovar 62:z36:- str. 5335/86
MKKEAVTSKDETKETREAEFGFYEFFAGGGMARAGLGKRWRCLFANDMDPIKTANYIENWGNEHFDNRDVREVNPGDLAGRADLVWASFPCQDLSLAGNGLGIGEIDASEDETTRSGAVWPFLDLMDKLGEDNRKPSILVLENVLGLLTLDQGRHFAAICRQLSKTGYRYGAMIIDAKHFLPQSRPRVFIVAIDRQFSIPAGLCSQEPLAQWHSSSLLRACNALSEQARGDWIWWTPGDAPDTRTRELADIIECEDKNALWHSADETRRLLDMMAQANLTRLAKAQESGETMIGSLYLRMRKEKGVNRQRAEITFSTVLGCLRTPKGGASRPRIIVVRGNKVRTRLLSVQEAAALMGLPEDFILPAAYQSAFKIIGDGLAVPSVRFLAERILEPLAEAIRNDSRQTEGMQV

SEQ ID NO: 24937 - protein, 849 aa, Salmonella enterica
  subsp. arizonae serovar 62:z36:- str. 5335/86
MNWTPPVTFDGWESKLVGYFLRFGTDDDARDIRWFEVTPSTLAAAFSDSGASADEIEKAFQAYMSKIPDLPLRLESGMMERSNDKSPGYFTYLVMTLLVSSQFDAQEESNDFRLKLQSWLQTEHSYQNLAGVNAMWKALAGWLERRIERGEPYRRLNLPEIPASWSHIGYTLRLAFPGRADLRLMRRVLTSHPQTVSSPRLLIDYFQAAIQKENASHALRQAFSEFRDAWFSGRRALADMPFWRLRQRAMALSSDIDTRKAIIDMCVDFDGSRCYFSAAGENDESVFAPSLSDALLSASAENSDNLGSAAQSGLLFFHQVGHGRWRAIAAPDAFSPKFHIALSCQYAARASQYFDDAVTENDWILTPRPQSRHAAMEIFRALKASTALDEHVSRPQFSDGIRVPGGWLGLPAFLPTIKSDTQNYRIYAPQGNGAEISVRKADGRLTSSIPLSGEFIIEPEPEIGEKTAPWRRRARFFERAVPRPAQEESARYRLERLTDWSASPLSTPIFRADIPLKAESGDAPVDHLLEAIYASGASGWEEIELVSLLERAADGVNVWHLIRCLHDAGLIEPRLRQGWKGRVWTTVSPSLLHISAGENSLVVVEGAVCASLIDDFQTAVLALGGKYFRRRGVSVWSPPVFGARIDDPVALSRIMGWQLVDASSTPDMTPLALTSTCRTDELHAQAAIWDWRSGRFSAHAASDNAAALLTRHVHPGGRDHDVYKVVSRRKTAFFLSRTAAIIAACVSARRPMFRRVGGRRLICLFDDCGLPDALAAGLRRGALRNGGPTEDGYVYPLDDVAFRWLNRLLPGCFALLPSGDGDNANRLVSAARHSGGKARLIWRNGRLTL

SEQ ID NO: 24938 - protein, 698 aa, Salmonella enterica
  subsp. arizonae serovar 62:z36:- str. 5335/86
MKDIPWYIGRYDRRNDRFSYFKVVAQQTDKGWHAIDNPKKMFPRTGEVELTGFDASKLRPNDWIVFQVDSGARSKLARAKNPCRIYPYYDLSPAQTLLESRRRLSLEGIETCGEPGLWAIRFEAGGVILANLAESKPGCFILSRNQNVAEYAFNDGGLIAVSGLSKNNQMFYMPGADASPTRLHDWTPDKNYIENAAQLIADADSSMMIATWLRKHADGQNGKLKSGVDDLLAAAQALRSGELAKKLEEEDSLSRELAKALLNDGHIAALLERQIQNIAEEERTRLRSEQRKALDAAFSDERLRRREAIEAEMTLFQTERKSEIERQIAQSRLDEEERLRAEFAEKRLSIEKTLKHEKDAFESEIDRLKNAAADLCRQNESQRQTLSSLEAERAVSSSALRDAEERVALARSELEKINAAIVEKARRMAHATIPEIRLPAEAKTVSRIELDRIVSEHNLLTSEGKILMEKFLTLTLAGECPLLYGPETQDFLAIAASLISSGRAIRQIADPTMITYEDLWVRAGSGLATPLYQGLLLSDALRPRTIFAVIERVECSAARFWLPALKDGLRNGDLPRRFLVCGTMANEDGEEAEKIKEEHLFLQVENIVDRNAITRAPLYLSARRHSELDPGAAPPESLAEVLAIAEEMSGGRLNAVNTLRATKAALEAAVSGDKDKTIRQKRLVDLFVNLQNSEICAP

SEQ ID NO: 24939 - protein, 1945 aa, Salmonella enterica; identical to SEQ ID NO: 24935
  subsp. arizonae serovar 62:z36:- str. RKS2983

SEQ ID NO: 24940 - protein, 411 aa, Salmonella enterica; identical to SEQ ID NO: 24936
  subsp. arizonae serovar 62:z36:- str. RKS2983

SEQ ID NO: 24941 - protein, 849 aa, Salmonella enterica; identical to SEQ ID NO: 24937
  subsp. arizonae serovar 62:z36:- str. RKS2983

SEQ ID NO: 24942 - protein, 698 aa, Salmonella enterica; identical to SEQ ID NO: 24938
  subsp. arizonae serovar 62:z36:- str. RKS2983

SEQ ID NO: 24943 - protein, 1980 aa, Salmonella enterica
  subsp. enterica serovar Bareilly str. CFSAN000235
MNNPLETFESIRDFYISYLETAFRIDSSDIQSERRALLEQQGTLCADLFLEPMPRYQHYGLTISELRNDAHGQTWLPGFNAQQRAAFIDLCLGGLLPCNKTDPAKGRFNLYTHQLDMLKRGVQPGKPGIVTSGTGSGKTESFLLPVLAQIAKEATGWPQSPALKHWQPWWQKVADKQPTFMREHEAVARPKAVRALILYPMNALVEDQLVRMRRALDSSEAHDVMDAHFGGNRIFFGRYTSATKVTGWLKHPRLSEEKNEKKRVAKKITELREYMQLTEETHQEAVRQAQQGKDKELSFNFPRTVGGEVLSRWEMQKTPPDILITNTSMLSTMLVREVDDPIFEQTRQWIERDPDAYFYLILDELHLQRGTAGTEVSYLLKHLISRLGLDQEKHRHKLRILASSASLPVEGPEGEQSVEYLWGMFGQRGLPSGATSSDWRECIIKGDTLPPGNMSLFHGDLEAFYHAVLQLQQAPLTSLQHWQNVARSMGMTTSEVSTEQLAQRVVLQAANLLESGCYTDDLSPRATSIKMLSSRLFNAQPHSEKALRALIWLRSTEGDWSQWFSHDFPDDIGAPRFRAHAFLRALEGLYAAPLPASSAASTQEINHRYFGDLTVESGLRYGKDKTSRRVELLYCECCGNLFLGGKPSVFSGSESRIELLPNDPDTEQLPEHAKSVMIERRSAEEYALFMPVVERFWPKGNETLNGDDAFGTWGKASYDPFTATIQHPVSLLKPLPENHIAGWFYYVKPGEFASPERGQSSSQSPGTALPFQCPACGTSYKYGKGKLSPIRSFRVGFSKTTQLLASSLMAELQRSGNREQLVTFSDSRQDAARAALDLESGHHDDVRREIVVHSLQSIAADKPSHNQLKIRQAEIEDRNKTLINLNVRSDEEEDEMDRLADERKKIRGLLSKPETDSIPLREILEPESPDAGQPLGLLLRAQVDAGIHPSDRTGIAPVPDPEKHEEGTLTFAWQQLFEKNAQGVWCWKALPSYEDNLLVARQEISRDLKRLVGESVFSKTYFALEESGWGYPCLPITGNDSREHLAIYDAMFRVLADAYRVTPSQYTKPETPWSSASDVKSRNRLYRFTQAICQRSGGEPLSLIDSFLRRLELAGHQGGIIDIGKMHFKLAEPADRVWRCSRCGRIHMHTGAGICTRCYSPLPETPCSDAKTLQMQHYLGKRLSHSSGIHRMRSEELTGMTENPAARLRRFKGILIADDDDILPEGMKDFAPDRDLDRAARVVDVLSVTTTMEVGVDIGDLRAVFQANMPPQRFNYQQRVGRAGRRGQAFSFVLTACRSKSHDLFYFRHPEKITGDLPPPPFLTTKLEMICQRLVRKIWLVSAFKWLRQQTEKADHPWPVDDYAHAPDNHGEFFPVHWLKENQTDWLPKIRQAIEAAILARDEFARTCTQQDHHLFQRVIQPLTPEQLIQDINAVLNDSAMEAKGLAEALAEHGKFPMYGMPTRSRLLLTRPVSTGEKEIEFASMDRDLDIAIQEFAPGKILVQDKRRYFTAGYSGMLKQSRKNPRSFYSNAPEPGELRTMTACPVCNIWAPANSLATECTICGAVMDKAERYQCYVPYGFITTLEPKSAKEDFDQILTTASRVSIAEAYTFSAMPEPDVNVAIQLQPQTCLHRLNRGIYTDKTWRGFSATQGSLSVPFRKQGTYQPLWANRVWMDNQIIEADLLVKNRFTDRGETRNTFYLAAPKVTDLLALMVAQTPPGLRLQYSTLTPAFRAAALSASFIIVNYASKELLDIDPEEIEILEPRVQMLKNGKSVPVLQMADRLVNGSGLCERLQQKGASGSLIILEVMKNILNNKTAYPLAEFLQSDHRERCFQGCYHCLHRYGNQPYHGLLDWRLGLDVIQLLLDQTYNAGLNSDFTSPGVSDWPENALRLAKEAASLYSDSDVKVIGNIPVIRTGDGRWAAVLHPFWDPDAVFAANPELEAFSYEVDVDATNTFALSRRMGTEMAKLRTQAFSSQE

SEQ ID NO: 24944 - protein, 361 aa, Salmonella enterica
  subsp. enterica serovar Bareilly str. CFSAN000235
MSSVFERENDNIRVLSLFSGCGGMDFGITSAGGDIVFANDVVENACKTLGNYFPDTDIRHSDISQIQSFPDVDIVVGGYPCQSFSMAGNRKPNNDDRTNLYKHFLRVLETVRPKYFVAENVSGLKHLGAGSFLEQQLTAYKAAGYQVSYHMVNARAYGVPQSRKRLFIIGVRNDLGQCFEFPAETHGKATKKNPHLKPYVSHGEAIRDLPLWPEGEFYERPHDPEGHFSWYFMSRNRKALWDSPAYTVVANWRHVTLHPASPVMKLTWSNLEDGWKQRWDFSDEYEHLIVDTSRPKLEQARRLSWRECARIQTFPQGFEPVGDVESKFTQIGNAVPPLLAEVLFRHLFSGAGLKKMAANGN

SEQ ID NO: 24945 - protein, 921 aa, Salmonella enterica
  subsp. enterica serovar Bareilly str. CFSAN000235
MDDSFPVTLEQWNAELVNIVFFESSHTGSTLSRIDATGRVFEQLAGSRSKEDAKRSFLDSFGKKASKIQDALRDESRLDILAQRKGYPTYFAILYLTLLAASADDETHDEGDFRVRFSVLLGFDKNKKFVFTELPNLWERLERWSSRKQNCTRLVLPEPSKHERLIGYSKRIAFPCYKDEVFLRDILVNNELDSHSTFESVNKLVHQYLSYFGEIFNQEFIEFRTLLSKAAMRQAYDSPFWGAVRDITVHTEREQLKENGKYCIHMELNDSGHPEIYLLMDDAAVTASEIKHYYSLSNEIENYNNIYYERDIGTTLNSLDLLLKRRKGYFYKSRAGAALRSGCLPLFRDDFFHISSEGDYYDNSPLYLILHHKYADSIFIALKNAGERAQRRDIKSTKWSVVSSDNVGRQTLDKIAHLLPEEARRFLIQGWRPARPRMSGAARFGQAILLNPASTPIIHMPEVLRGCYVIRNKNGEELTHGSLSQGAEGLFIPPEELMEISGQAFCRYELTLAYSDIPVNFDVHVLDHAPYATYCKITEPHDWLTDGPSGVLMALGDTTVLPPLKREEITPLSGAQMLWQYENCLPVTCQYTELHNIPAAFDWIAEALALRFQRRSTLPFGELKQHIEPVSQVTRIPEWQLRRMLFAAGWLCVVQRRYSPYSLVSLAERTISVDVTEQGIIARIMGMFTRSERNLLQEALNDGERIGRRLVEDNGCSMGCIELHLSARERVHTFIEQFGLRLINYDDLPVNALSGVLLPSSQMQFIPTLPPDLHVSLWQAEKYQWSEEQRLTQTANNLLLRCQEKQRYRYFIRQNAGYWQTDSFSWALMAQMICSGVTFGVRKGDSDWSWSTKFIALPPSVLQWWIHVAHGCLSITDNGSYLFAGGKVPLWDNVMTFPSCQRALARRSRALTIRKLRRALQ

SEQ ID NO: 24946 - protein, 926 aa, Salmonella enterica
  subsp. enterica serovar Bareilly str. CFSAN000235
MAKKKSIISDRLGQMYYFGTESHELSRCLQECKQRLTRNGAKADNLPKGPEKRLHFLRTLPLKAKPVVSDWLRENLTFPEQNDPQIVLRDLLEAESNAEDIELCKPLWRTILGFYISSDCPEIITRFLNGEKIDLPQQGVSDSLTINVTDEDIEQCALISQGKEIPIPERTIPLFIGGLVDVLKGTHTADNRWRTKLSEHSLPLARKLGELIDQFEASNDIKAMDSTSIIQAPPVVSKEIDGTMDEVMFIGKVLALTASGAFFVTPISLLIDGNLRDLPEALVKDLYPHSGEAIGFENHFSKKFARGEMAIWKARYQPSDKPAQYVITDYLSRVYPVVALPHASDEPDAVREWLLTNYQPQNDTPVIFQLSDGVSLRLPGDLLDPKKYDFDMPLESYRQVPQTLLNSHALTVITELPQVSEKYDCAEASTWIKRLLKRTDSAKYFPQFSKGQLQNLTHFIAEHESDNEASYLRAVSHLEQIADMRSFLNDTTQQLLALPEVETQINIEKQEILARYEDEQHQIKQSITVLSEKKIQLENEIADQKKKLKKETDRINKALRQQENELEQRIKKTFEAASQAGVETLAQTALLRAIIKNETAQEQPVQQRITSEPVAESANSNFPLAETNALTRKHQLISAIEKQALATGLSESLLSSLIATASITPAVGLMGKQTKQAIASLANLLAGNVWGEVSVHSDHFSFSDLMNSPTLIRLSGDALTMTLGDFLTQQQEAGLASIVELRGFNRTPPETLLPELHECLFRTPYPAACSWTDRRQALRHLPIRHPMLFLLTFTTGKSTFPLQAPLAHQLPLFLAENIWSDERPFAQNTDITPSRITPELWQTMYVGNHQPGHQACAPWEALKAALLSLLPDEQAQAVARLAYGLGRSTTQDIATTIDALAPELGPYVQEMTTGESASVLEHLFQL

SEQ ID NO: 24947 - protein, 1980 aa, Salmonella enterica; identical to SEQ ID NO: 24943
  subsp. enterica serovar Bareilly str. CFSAN000236

SEQ ID NO: 24948 - protein, 617 aa, Salmonella enterica
  subsp. enterica serovar Bareilly str. CFSAN000236
NIYYERDIGTTLNSLDLLLKRRKGYFYKSRAGAALRSGCLPLFRDDFFHISSEGDYYDNSPLYLILHHKYADSIFIALKNAGERAQRRDIKSTKWSVVSSDNVGRQTLDKIAHLLPEEARRFLIQGWRPARPRMSGAARFGQAILLNPASTPIIHMPEVLRGCYVIRNKNGEELTHGSLSQGAEGLFIPPEELMEISGQAFCRYELTLAYSDIPVNFDVHVLDHAPYATYCKITEPHDWLTDGPSGVLMALGDTAVLPPLKREEITPLSGAQMLWQYENCLPVTCQYTELHNIPAAFDWIAEALALRFQRRSTLPFGELKQHIEPVSQVTRIPEWQLRRMLFAAGWLCVVQRRYSPYSLVSLAERTISVDVTEQGIIARIMGMFTRSERNLLQEALNDGERIGRRLVEDNGCSMGCIELHLSARERVHTFIEQFGLRLINYDDLPVNALSGVLLPSSQMQFIPTLPPDLHVSLWQAEKYQWSEEQRLTQTANNLLLRCQEKQRYRYFIRQNAGYWQTDSFSWALMAQMICSGVTFGVRKGDSDWSWSTKFIALPPSVLQWWIHVAHGCLSITDNGSYLFAGGKVPLWDNVMTFPSCQRALARRSRALTIRKLRRTLQ

SEQ ID NO: 24949 - protein, 926 aa, Salmonella enterica; identical to SEQ ID NO: 24946
  subsp. enterica serovar Bareilly str. CFSAN000236

SEQ ID NO: 24950 - protein, 1980 aa, Salmonella enterica; identical to SEQ ID NO: 24943
  subsp. enterica serovar Bareilly str. CFSAN000754

SEQ ID NO: 24951 - protein, 361 aa, Salmonella enterica; identical to SEQ ID NO: 24944
  subsp. enterica serovar Bareilly str. CFSAN000754

SEQ ID NO: 24952 - protein, 921 aa, Salmonella enterica; identical to SEQ ID NO: 24905
  subsp. enterica serovar Bareilly str. CFSAN000754

SEQ ID NO: 24953 - protein, 926 aa, Salmonella enterica; identical to SEQ ID NO: 24946
  subsp. enterica serovar Bareilly str. CFSAN000754

SEQ ID NO: 24954 - protein, 1946 aa, Salmonella enterica subsp. enterica serovar Cubana str. 76814
MLDPIGGFRRIQDFFISYIETSFRIADPFVAASRRELLNSSGEFAAEPYIEPVLRYESSDKTLEDLADMENGPLKSLSQEGRKAFVELALSGLFDSKSGDASWRRRSVHAPYIHQVKMLERGIRAGRPGIVTSGTGSGKTESFMLPILAALSNEAIGWPAPRDSYLQNRWWHNAEANWVSRRKGEKRPAAIRALVLYPMNALVEDQMARLRKTLDSDEARQTMEHRFAGNRIFFGQYTSATPVTGYASHPRLSGDRTEKSRRARNLEKLRKALNRIDCDQQAARAFDKEKEKSSEKTRYIFPSTDGGEMVTRWDMQAAPPDVLVTNASMLGAMLSREVEDAIFDMTREWLMSNEDAYFYLVFDELHLMRGSAGTETAMLIKSLIIRLGLDDPKHRYKLRLLASSASLPMEGADGEQSRKYLRDLFAPFGTCRDPRDEGSDSPEFWRNCVVEGTPFIPEPESKVDARPFAALMRMALTGQGDVVRRVKMTDEFERALVNAFQALGVKERNIRQGVKLAAETAAALLTHACIEKKGDKPRATSPKHIIDKIFLAESLEGEKESELALRGLMLLRALPDSVLDCDKPDAATPAFRVHTFVRNIEGFFASVSPGERKAKFADFCLERGLSHAPSTSQEKRGRRLFEMLYCEACGDLLLGGQRGQNCGGATVELLPSTTNLENLPERPGAEYYDDMALDEFAVFWPVEKTPAASEASEKRWDVWQEATLNPVTGIATVGQETSPLNPEAIRGYLYFQNPPPAKKGEPVKPPSAQPFCCPNCGIDYSSRPATNRARTPIRAFRTGVTKSSQLVATELFELLHAIGADAKSIVFSDSRQDAASMALEIERLHLRDLRREILVAAARTMISEAEKEYIPEKEFKEKRDKAIQAGDDDELDRLYELKTRQKDIARLCKFRRVKIDSLLESEGDSIGKISSELAGLGISPYKYRPSADGNDKVVWYENFVKDKNIVRYHEKLSLSDRLAIKQRIIDDQSELIDDVIFANTFFALEETGLAYPCVSDNENTPELDAWLRVFAGVYRVKENKYVDPEQSDGWYVGEDIKKAKVKRVARAVFGDDKYLDNLTLVLNQFADREHTAGLFNIGKLFLKVAKSGDPYWQCGNCGRIHLHLGFKRCTRCAEPLDITPKDSVETLWEQNFLGKRIVRGERDGVKRFRLNVEELTGQTDDFSDRLRKFKGIFVDKMSELEKLDAEIDMLAVTTTMEVGIDIGSLQSVYQANMPPQRFNYQQRVGRAGRRGQAYSFVITFCRGRTHDAYYFAHPHAITGDPPPPPFLAVDHDAIPLRLLRKVWLRSAFNLLREEDRENGIDFPGDKLVPPDVHGEYVSTHDYYYDDNANWAERLQGALEATQSIRERFIEASTFDPEQRQNLHSALNAKKIIDEIADLNAYAPDDNVGLARFLAECGKLPMYGMPTRVRNLYLGLREKKGLNNQTEYEWSTMDRDLDLAVFEYAPGSVLIKDKKKHKVIGFTGNYREPHNRNNRVSDLSTVGSWLESSSHVAFCPACGSAKLELRQPDNEIQCKDCGAPINPDEFKLYITPAAFRTDFEPKDDLDSFTRMSLKTTATVLNEETPTHCDPLIIRRGEVTILRLNDGPINGEKEGERFTVDLTSDQKAPVPFVAYRSPIKGEQAIDSNWLKEQDNSRWRRKGESRNFGLVSSKETESLHLELTRFDPRLNLNMVARYGEHMHLPTRAAAISAIQILTHKAALYLDVSPDEFETLEPRLHFGKPILQIADALINGSGLCRRLAEPAVAGSSPLIIKLLHEILTDERGWPMADFLKKDHPVQCRTACYKCIQRYGNRQYHGLLDWRLGIAYLRAMVMPEFACGLNVEDWNHPEMKGWKERAFELAEDVEALRPGTIKLLKEHSLPVLEINDGKDLWRAAVTHPLWQCRDAERDALIGSFGLDNIGAPLRFIDTFELERRPLRALAKLNRG

SEQ ID NO: 24955 - protein, 411 aa, Salmonella enterica subsp. enterica serovar Cubana str. 76814
MKKEAVTSKNGSGSEEMREAEFGFYEFFAGGGMARAGLGKKWRCLFANDMDPIKTASYIENWGAEHFDGRDVREIKPDDLTGSADLVWASFPCQDLSLAGNGLGIGEIDASEDETTRSGAIWPFLDLVDKLEEGNRKPPILILENVLGLLTLDQGRHFAAICRQLSKMGYRYGAMIIDAKLFLPQSRPRVFIVAISRQFSVPASLLSKEPLTQWHSSSLLRACEALPAETLGDWIWWTPGDAPGSRTKELTDLIDCEDQNTLWHSADETQRLIDMMAPAHLTRLAKARESGETTIGSLYLRMRREKGVNRQRAEITFSPVIGCLRTPKGGASRARIIVADKGEVKTRLLSVKEAAALMGLPEDFILPTAYQSAFKIIGDGLAVPSVRFLAERILEPLAASVRNDSHQTENR

SEQ ID NO: 24956 - protein, 852 aa, Salmonella enterica subsp. enterica serovar Cubana str. 76814
MNWTLPVTPDGWESKLVDYFLRFGTDGDAQDIRWFEVTPSTLSAAFAGSGVGADEIEEAFRTCMSNIPDLPQRLESGMMERSNDKSPGYFTYLVMTLLISSQFDAQEGHNDFRLKLQNWLRTGHSYQNLAGVNAMWEALAGWLERRVQKGEPYRRLCLPEIPPSWSHIGYTLRLAFPGKADVRLMRRVLTSHPQTISSPRLLISYFQVAIQKENASHAHALKQAFSEFKDAWFSGRRALADMPFWRLRQRAIALISDVETRKAFIDMRVDFDGSRCYFSAASENDESVFAPSLSDALLSASAGNSYNLGIATQSGLLFFHQVGHGCWRAIAAPDAFSFKFHIALSCKYAARARQYFDDAVTENDWILTSRPQSRHAAMEIFRALKTSSTTLDEQISRLQLSGGIRVPGGWLGLPAFLPTVHSDTQNYRIYSPQGNGAKVSVREEDGRLTSSMPLNGEFIIEPELEIGEKTPPWRQRARFFERAVPRPAQEDSARYRLELLTDWKTSPLTTPAFHIELPLTTENNDERLEHLLEAIYASGASGWEEIELVALLERAADSVNVWHLIRCLHDAGLIEPRLRQGWKGRVWTLVKPSLFRIRNGDNSMIVVEGATCASLMDDFQKVVSGLGGKCFRRSGVSVWSPPVCGAEIDDPVELSRVMEWPLIDISSTPDMTPLALTSTCRTAEFHLQAAVWDWRSGRFSPHAASNNASTLLTRHVHPGGRDHDVYKVVSRRKMAFFLSRTAAIIAANVSARRPTFRRVGNHRFICLVDDCGLPDALAMGLRRSVLRNGGPTEAGYAYPIDDVAFRWLNRLLPGCFAPFPPDDGDNANRLVAAARHSGGKTRLRWQNGRLAL

SEQ ID NO: 24957 - protein, 698 aa, Salmonella enterica subsp. enterica serovar Cubana str. 76814
MKDLPWYIGRYDRRNDRFSYFKVVAQQTENGWHAIDSPKKMFPRTGEVELTGFDASQLRPNDWIVFQVDTNTRSKLTRAKHPRRIYPYYDLSSAQSLQKARHRLSLEGIETCGEPGQWTIRFETGGVILANLTESKPGFFILSRNQYVAEYAFNDSGIISVSGLSENNKIFYMPDADASPTRRHDWTPDKHYIENAVQLIAGTDSSTQIASWLRKHVDEQNGKLKSGVDDLLAAAQILRSGELAKKIEEEDALARELSQAVLNDERIAAQLERQIQSIAEEERDRLRAEQQKALNEAFCAERLLRSEAIEEEMTVFQTERKSEIEQQIAQLRLDEEEKLQKEFEEKQLSIEKTLKHEKDALESEINRLKNAAADLCRQNESQRRTLSSLEIKREASSGALREVEERVALARIELEKINAAIAEKARRMAHSAIPAICLPAEAKTVSRAELGRIISENKLLTHEGKILMEQFLALTLAGECPLLYGSETQDFLAIAASLISSGRAIRQIADPTMISYEDLWIRAGNNLATPLYQGLLLSDAHRPRTILAVIERVECSAVRFWLPALKEGLRNGDLPRRFLVCGTITNEDNEEAEKIKEEHLFLPVENIVVRNAITRAPLYLSTRHHSELTPEAAPPESLEEKLAIADEMSGDRLNVVNTLRATKAALEVGLAVDEDKTAHQKRLVDLFANLQNSEICAP

SEQ ID NO: 24958 - protein, 1946 aa, Salmonella enterica; identical to SEQ ID NO: 24954
  subsp. enterica serovar Cubana str. CFSAN002050

SEQ ID NO: 24959 - protein, 395 aa, Salmonella enterica; identical to SEQ ID NO: 24501
  subsp. enterica serovar Cubana str. CFSAN002050

SEQ ID NO: 24960 - protein, 852 aa, Salmonella enterica; identical to SEQ ID NO: 24956
  subsp. enterica serovar Cubana str. CFSAN002050

SEQ ID NO: 24961 - protein, 698 aa, Salmonella enterica; identical to SEQ ID NO: 24957
  subsp. enterica serovar Cubana str. CFSAN002050

SEQ ID NO: 24962 - protein, 1946 aa, Salmonella enterica subsp. enterica serovar Cubana str. CVM42234; identical to SEQ ID NO: 24954

SEQ ID NO: 24963 - protein, 395 aa, Salmonella enterica subsp. enterica serovar Cubana str. CVM42234; identical to SEQ ID NO: 24501

SEQ ID NO: 24964 - protein, 852 aa, Salmonella enterica subsp. enterica serovar Cubana str. CVM42234; identical to SEQ ID NO: 24956

SEQ ID NO: 24965 - protein, 698 aa, Salmonella enterica subsp. enterica serovar Cubana str. CVM42234; identical to SEQ ID NO: 24957

SEQ ID NO: 24966 - protein, 1980 aa, Salmonella enterica; identical to SEQ ID NO: 24943
  subsp. enterica serovar Norwich str. CFSAN001077

SEQ ID NO: 24967 - protein, 361 aa, Salmonella enterica; identical to SEQ ID NO: 24888
  subsp. enterica serovar Norwich str. CFSAN001077

SEQ ID NO: 24968 - protein, 921 aa, Salmonella enterica
  subsp. enterica serovar Norwich str. CFSAN001077
MDDSFPVTLEQWNAELVNIVFFESSHTGSTLSRIDATGRVFEQLAGSRSKEDAKRSFLDSFGKKASKIQDALRDESRLDILAQRKGYPTYFAILYLTLLAASADDETHDEGDFRVRFSVLLGFDKNKKFVFTELPNLWERLERWSSRKQNCTRLVLPEPSKHERLIGYSKRIAFPCYKDEVFLRDILVNNELDSHSTFESVNKLVHQYLSYFGEIFNQEFIEFRTLLSKVAMRQAYDSPFWGAVRDITVHTEREQLKENGKYCIHMELNDSGHPEIYLLMDDAAVTASEIKHYYSLSNEIENYNNIYYERDIGTTLNSLDLLLKRRKGYFYKSRAGAALRSGCLPLFRDDFFHISSEGDYYDNSPLYLILHHKYADSIFIALKNAGERAQRRDIKSTKWSVVSSDNVGRQTLDKIAHLLPEEARRFLIQGWRPARPRMSGAARFGQAILLNPASTPIIHMPEVLRGCYVIRNKNGEELTHGSLSQGAEGLFIPPEELMEISGQAFCRYELTLAYSDIPVNFDVHVLDHAPYATYCKITEPHDWLTDGPSGVLMALGDTAVLPPLKREEITPLSGAQMLWQYENCLPVTCQYTELHNIPAAFDWIAEALALRFQRRSTLPFGELKQHIEPVSQVTRIPEWQLRRMLFAAGWLCVVQRRYSPYSLVSLAERTISVDVTEQGIIARIMGMFTRSERNLLQEALNDGERIGRRLVEDNGCSMGCIELHLSARERVHTFIEQFGLRLINYDDLPVNALSGVLLPSSQMQFIPTLPPDLHVSLWQAEKYQWSEEQRLTQTANNLLLRCQEKQRYRYFIRQNAGYWQTDSFSWALMAQMICSGVTFGVRKGDSDWSWSTKFIALPPSVLQWWIHVAHGCLSITDNGSYLFAGGKVPLWDNVMTFPSCQRALARRSRALTIRKLRRTLQ

SEQ ID NO: 24969 - protein, 926 aa, Salmonella enterica
  subsp. enterica serovar Norwich str. CFSAN001077
MAKKKSIISDRLGQMYYFGTESHELSRCLQECKQRLTRNGAKADNLPKGPEKRLHFLRTLPLKAKPVVSDWLRENLTFPEQNDPQIVLRDLLEAESNAEDIELCKPLWRTILGFYISSDCPEIITRFLNGEKIDLPQQGVSDSLTINVTDEDIEQCALISQGKEIPIPERTIPLFIGGLVDVLKGTHTADNRWRTKLSEHSLPLARKLGELIDQFEASNDIKAMDSTSIIQAPPVVSKEIDGTMDEVMFIGKVLALTASGAFFVTPISLLIDGNLRDLPEALVKDLYPHSGEAIGFENHFSKKFARGEMAIWKARYQPSDKPAQYVITDYLSRVYPVVALPHASDEPDAVREWLLTNYQPQNDTPVIFQLSDGVSLRLPGDLLDPKKYDFDMPLESYRQVPQTLLNSHALTVITELPQVSEKYDCAEASTWIKRLLKRTDSAKYFPQFSKGQLQNLTHFIAEHESDNEASYLRAVSHLEQIADMRSFLNDTTQQLLALPEVETQINIEKQEILARYEDEQHQIKQSITVLSEKKIQLENEIADQKKKLKKETDRINKALRQQENELEQRIKKTFEAASQAGVETLAQTALLRAIIKNETAQEQPVQQRITSEPVAESANSNFPLAETNALTRKHQLISAIEKQALATGLSESLLSSLIATASITPAVGLMGKQTKQAIASLANLLAGNVWGEVSVHSDHFSFSDLMNSPTLIRLSGDALTMTLGDFLTQQQEAGLASIVELRGFNRTPPETLLPELHECLFRTPYPAACSWTDRRQALRHLPIRHPMLFLLTFTTGKSTFPLQAPLAHQLPLFLAENIWSDERPFAQNTDITPSRITPELWQTMYVGNHQPEHQACAPWEALKAALLSLLPDEQAQAVARLAYGLGRSTTQDIATTIDALAPELGPYVQEMTTGESASVLEHLFQL

SEQ ID NO: 24970 - protein, 1980 aa, Salmonella enterica; identical to SEQ ID NO: 24887
  subsp. enterica serovar Virchow str. ATCC 51955

SEQ ID NO: 24971 - protein, 361 aa, Salmonella enterica; identical to SEQ ID NO: 24888
  subsp. enterica serovar Virchow str. ATCC 51955

SEQ ID NO: 24972 - protein, 921 aa, Salmonella enterica; identical to SEQ ID NO: 24889
  subsp. enterica serovar Virchow str. ATCC 51955

SEQ ID NO: 24973 - protein, 926 aa, Salmonella enterica; identical to SEQ ID NO: 24890
  subsp. enterica serovar Virchow str. ATCC 51955

SEQ ID NO: 24974 - protein, 1980 aa, Salmonella enterica subsp. enterica serovar Virchow str. SL491; identical to SEQ ID NO: 24887

SEQ ID NO: 24975 - protein, 361 aa, Salmonella enterica subsp. enterica serovar Virchow str. SL491; identical to SEQ ID NO: 24888

SEQ ID NO: 24976 - protein, 926 aa, Salmonella enterica subsp. enterica serovar Virchow str. SL491; identical to SEQ ID NO: 24890

SEQ ID NO: 24977 - protein, 1980 aa, Salmonella enterica subsp. enterica serovar Virchow str. SVQ1; identical to SEQ ID NO: 24887

SEQ ID NO: 24978 - protein, 361 aa, Salmonella enterica subsp. enterica serovar Virchow str. SVQ1; identical to SEQ ID NO: 24888

SEQ ID NO: 24979 - protein, 921 aa, Salmonella enterica subsp. enterica serovar Virchow str. SVQ1; identical to SEQ ID NO: 24889

SEQ ID NO: 24980 - protein, 926 aa, Salmonella enterica subsp. enterica serovar Virchow str. SVQ1; identical to SEQ ID NO: 24890

SEQ ID NO: 24981 - protein, 1982 aa, Salmonella enterica subsp. enterica serovar Weltevreden
MNNPLETFESIRDFYISYLETAFRIDSSDIQSGRRALLEQQGTLCADLFLEPMPRYHNYGLTISELRNDAHGQIWLPGFNAQQRNAFIDLCLGGLLPCNKTDPTKGRFNLYTHQLDMLKRGVQPGKPGIVTSGTGSGKTESFLLPVLAQIAKEATGWPKSSALKHWQPWWHKVADKQPSFMREHEAAARPKAVRALILYPMNALVEDQLVRMRRALDSREAHDVMDAHFGGNRIFFGRYTSATKVTGWLKHPRLNEEKNEKKRVAKKITELREYMQLMEETHQEAVRQAQQDKDNELSFNFPRTAGGEVLSRWEMQKTPPDILITNTSMLSTMLVREVDDPIFEQTRQWIERDPDAYFYLILDELHLQRGTAGTEVSYLLKHLINRLGLDQEKHRHKLRILASSASLPVEGSEGDQSVEYLWGMFGQRGLPAGASSSDWRECIIKGDTLPPGNMSLFLGELEAFYHAVLQLQQAPFTSLQHWQNVARSMGMTASEASTEQLAQRVVLQAGNLLESGCYTDDHSPRATSIKMLSSRLFNAQPHSDKALQALIWLRSTEGDWPQWFSHAFPDDIGAPRFRAHAFLRALEGLYVAPLPVPSAASAQEINHRYFGDLTVESGLRYGKDKKSRRVELLYCECCGNLFLGGKPSVFSGSESRIELLPNDPDTEQLPEHAKSVMVERRSAEEYALFMPVVERFWPKGDEELNSDNDNTFGTWVKASYDPFTATIQHPVSLLKPLPENHIAGWFYYVKPGEFASSERGQSSSQSPGTALPFQCPACGTSYKYGKGKLSPIRSFRVGFSKTTQLLASSLMAELQRSGNREQLVTFSDSRQDAARAALDLESGHHDDVRREIVVHSLQSIAADKPSHNQLKIRQAEIEERNKTLINLNVRSDEEEDEMDRLADERKKIRGLLSKPETDSIPLRGILEPESPDAGQPLGLLLRAQVDAGIHPSDRTGIAPVPDPEKYGEGTLTFAWQQLFEKNAQGEWCWKALPSYEDNLLVARQEISRDLKRLVGESVFSKTYFALEESGWGYPCLPITGNDSREHLAIYDAMFRVLADAYRVTPSQYTKPETPWSSAHDVNRRNRLYRFTQAICQRSGGEPLSLIDSFLRRLELAGHQGGIIDIGKMHFRLAEPTDRVWRCSRCGRIHMHIGAGICTRCYSPLPETPGSEAKTLQMQHYLGKRLSHSSGIHRMRSEELTGMTENPAARLRRFKGILIADDDDILPEGMKDFAPDRDLDRAARVVDVLSVTTTMEVGVDIGDLRAVFQANMPPQRFNYQQRVGRAGRRGQAFSFVLTACRSKSHDLFYFRHPEKITGDLPPPPFLTTKLEMICQRLVRKIWLVSAFKWLRQQTEKADHQWPVDDYAHAPDNHGEFFPVHWLKENQTDWLPKIRQAIEATILARDEFARTCTQQDHHLFQRVIQPLTPEQLIQDINVVLNDSAMEAKGLAEALAEHGKFPMYGMPTRSRLLLTRPVSTGEKEIEFASMDRDLDIAIQEFAPGKILVQDKRRYFTAGYSGMLKQSRKNPRSFYSNAPEPGELRTMTACPVCNIWAPANSLTTECTICGAVMDKAERYQCYVPYGFITTLEPKSAKEDFDQILTTASRVSIAEAYTFSAMPEPDVNVAIQLQPQTCLHRLNRGIYTDKTWRGFSATQGSLSVPFRKQGTYQPLWANRVWMDSQIIETDLLVKNRFTDRGETRNTFYLAAPKVTDLLALMVAQIPPGLRLQYSALTPAFRAAALSASFIIVNYASKELLDIDPEEIEILEPRVQMLKNGKSVPVLQMADRLVNGSGLCERLQQKGASGSLIILEVMKNILNNKTAYPLVEFLQPDHRERCFQGCYHCLHRYGNQPYHGLLDWRLGLDVIQLLLDPTYNAGLNGDFTSPGVSDWPENALQLAEEAASLYSDSAAEMMGNIPVIRTGAGRWAAVLHPFWDPDAAFAANPELEAFSYEVDVDATNTFALSRRMGTEMAKLRTQASSSQE

SEQ ID NO: 24982 - protein, 361 aa, Salmonella enterica subsp. enterica serovar Weltevreden
MSSVFERENDNIRVLSLFSGCGGMDFGITSAGGDIVFANDVVENACKTLGNYFPDTDIRHGDISQIQSFPDVDIVVGGYPCQSFSMAGNRKPNNDDRTNLYKHFLRVLETIHPKYFVAENVSGLKHLGAGSFLEQQLTAYKAAGYQVSYHMVNARAYGVPQSRKRLFIIGVRNDLGQSFEFPAETHGKATKKNPHLKPYVSHGEAIRDLPLWPEGEFYERPHDPEGHFSWYFMSRNRKALWDSPAYTVVANWRHVTLHPASPVMKLTWSNLEDGWKQRWDFSDEYEHLIVDTSRPKLEQARRLSWRECARIQTFPQGFEPVGDVESKFTQIGNAVPPLLAEVLFRHLFSGAGLKKMTANGN

SEQ ID NO: 24983 - protein, 921 aa, Salmonella enterica subsp. enterica serovar Weltevreden
MDDSFPVTLEEWNAELVKIVFFESSHTGSTLSRIDATGRVFEQLAGPRSKEDAKRSFLASFGKKASKIQDALRDESRLDILAQIKGYPTYFAILYLTLLAASADDETHDEGNFRVRFSVLLGFDKKKEFVFTELPDLWKRLERWSSRKQNCTRLVLPEPSKHERLIGYSKRIAFPSYKDEVFLRDILVNNELDSHSTFESVNKLVHQYISYFSEVFNQEFIEFRTLLSKAAIRQAYDSPFWGAVRDITIHTEREQLKENGKYCIHMEFNDSGNPEIYLLMDDAAVTASEIKRYYSLSNEIDSYNNIYYERDIGTTLNSLDFLLKKRKGYFYKSRAGAALRSGCLPLFRDDFCHISSEGDYYDNSPLYLILHHKYADGIFIALNNAGERIQRRDIKSTKWSIVSSDKVGRQMLDKIARLLPEEARRFLIQGWQPARPRMSGAARFGQAILLNPASTPIIHMPEVLGGCYVISNKDGEELTHGSLSQGTEGLFIPPEELMKISGQAFCRYELTLAHSDIPVNFDVHVLDHAPYATYCKITEPHDWLTDGPSGVLMALGDTAEIPSLKREEITPLGSAQMLWQYENGLPVTCQYTELHNIPAAFDWIAEALALRFQRRSTLPFGELKQHIEPVSQVTRIPEWQLRRVLFAAGWLCVVQRRHAPYSLVSLAERTISVDVTEQRIIARIMGMFTRSERNLLQETLNDDERIGRRLVEDNGCSIGCIELHLSARDRVHAFIEQFGLRLVNHDDLPVNALSGLLLPLSQMQFIPTLPPDLHVSLWQAEKYQWSEEQRLTQTVNNLLIRCQEKQRYRYFIRQNAGYWQTDSFSWALMAQMICSGVMFGVQKGDSDWCWSTKIIALPPSILQWWIHVAHGCLSITDNGSYLFAGGKVPLWNNVMTFPSCQRALARRNRALTIRKLRRTLQ

SEQ ID NO: 24984 - protein, 679 aa, Salmonella enterica subsp. enterica serovar Weltevreden
MFIGKVLALTASGAFFVTPVSLLIDGNLRDLPEALGKDLYPHGGEAIGFENHFSKKFVRGEMAIWKARYQPSDKSAQYVITDYLSRVYPVVALPHASDEPDAVREWLLTNYQPQNDTPVIFQLSDGVSLRLPGDLPDPRKYDFDMPLESYRQVPQTLLDSHALTVITELPKVSEKYDCAEASTWIKRLLKRTDSAKYFPQFSKGQLQNLTHFIAEHESDNEASYLRAVSHLEQIADMRSFLNDTTQQLLALPEVETQINIEKQEILARYEDEQHQIKQSITVLSEKKIQLENEIADQKKKLKKETDRINKTLRQQENELEQRIKKTFEAASQAGMETLAQAALLRAIIKNETAQEQPAQQRITSEPVAESANSNFPLAETNALTRKHQLISAIEKEALATGLSESLLSSLIATASITPAVGLMGKQTKQAIASLANLLAGNVWGEVSVHSDHFSFSDLMNSPTLIRLSGDTLTMTLGDFLTQQQEAGLASIVELRGFNRTPPETLLPELHECLFRTPHPAACSWTDRREALRHLPIRHPILFVLTFTTGKSTFPLQAPLAYQLPLFLAENIWSDERPFEQNTDITPSRITPELWQTIFVDNHRPEYQACAPWEVLKAALLSLLPDEQAQAVARLAYGLGRSTTQDIATTIDVLAPELGPYAQEMTIGESASVLEHLFQL

SEQ ID NO: 24985 - protein, 1982 aa, Salmonella enterica subsp. enterica serovar Weltevreden; identical to SEQ ID NO: 24981

SEQ ID NO: 24986 - protein, 361 aa, Salmonella enterica subsp. enterica serovar Weltevreden; identical to SEQ ID NO: 24982

SEQ ID NO: 24987 - protein, 921 aa, Salmonella enterica subsp. enterica serovar Weltevreden; identical to SEQ ID NO: 24983

SEQ ID NO: 24988 - protein, 926 aa, Salmonella enterica subsp. enterica serovar Weltevreden
MAKKKSIISDRLGQMYYFGTESHELSRCLLECKQRLTRNGAKADNLPRGPEKRLHFLRTLPPKAKPIVSDWLRENLTFSEQNDPQTVLRDLLEAESNAEDIDLCKPLWRTILGFYISPDCPEIITKFLNGEQIDLSQHGVSDSLTINVTDEDIEQCALISQGKKIPMPERTIPLFVGGLVDALQGTRTADNQWRTKLSEHSLPLARKLGELIEQFEASNDLQTMDGTSVIQAPPVVSKEIDGAMDEVMFIGKVLALTASGAFFVTPVSLLIDGNLRDLPEALGKDLYPHGGEAIGFENHFSKKFVRGEMAIWKARYQPSDKSAQYVITDYLSRVYPVVALPHASDEPDAVREWLLTNYQPQNDTPVIFQLSDGVSLRLPGDLPDPRKYDFDMPLESYRQVPQTLLDSHALTVITELPKVSEKYDCAEASTWIKRLLKRTDSAKYFPQFSKGQLQNLTHFIAEHESDNEASYLRAVSHLEQIADMRSFLNDTTQQLLALPEVETQINIEKQEILARYEDEQHQIKQSITVLSEKKIQLENEIADQKKKLKKETDRINKTLRQQENELEQRIKKTFEAASQAGMETLAQAALLRAIIKNETAQEQPAQQRITSEPVAESANSNFPLAETNALTRKHQLISAIEKEALATGLSESLLSSLIATASITPAVGLMGKQTKQAIASLANLLAGNVWGEVSVHSDHFSFSDLMNSPTLIRLSGDTLTMTLGDFLTQQQEAGLASIVELRGFNRTPPETLLPELHECLFRTPHPAACSWTDRREALRHLPIRHPILFVLTFTTGKSTFPLQAPLAYQLPLFLAENIWSDERPFEQNTDITPSRITPELWQTIFVDNHRPEYQACAPWEVLKAALLSLLPDEQAQAVARLAYGLGRSTTQDIATTIDVLAPELGPYAQEMTIGESASVLEHLFQL

SEQ ID NO: 24989 - protein, 1982 aa, Salmonella enterica subsp. enterica serovar Weltevreden; identical to SEQ ID NO: 24981

SEQ ID NO: 24990 - protein, 361 aa, Salmonella enterica subsp. enterica serovar Weltevreden; identical to SEQ ID NO: 24982

SEQ ID NO: 24991 - protein, 921 aa, Salmonella enterica subsp. enterica serovar Weltevreden; identical to SEQ ID NO: 24983

SEQ ID NO: 24992 - protein, 926 aa, Salmonella enterica subsp. enterica serovar Weltevreden; identical to SEQ ID NO: 24988

SEQ ID NO: 24993 - protein, 1982 aa, Salmonella enterica subsp. enterica serovar Weltevreden; identical to SEQ ID NO: 24981

SEQ ID NO: 24994 - protein, 361 aa, Salmonella enterica subsp. enterica serovar Weltevreden; identical to SEQ ID NO: 24982

SEQ ID NO: 24995 - protein, 921 aa, Salmonella enterica subsp. enterica serovar Weltevreden; identical to SEQ ID NO: 24983

SEQ ID NO: 24996 - protein, 679 aa, Salmonella enterica subsp. enterica serovar Weltevreden; identical to SEQ ID NO: 24984

SEQ ID NO: 24997 - protein, 1982 aa, Salmonella enterica; identical to SEQ ID NO: 24981
  subsp. enterica serovar Weltevreden str. 2007-60-3289-1

SEQ ID NO: 24998 - protein, 361 aa, Salmonella enterica; identical to SEQ ID NO: 24982
  subsp. enterica serovar Weltevreden str. 2007-60-3289-1

SEQ ID NO: 24999 - protein, 921 aa, Salmonella enterica; identical to SEQ ID NO: 24983
  subsp. enterica serovar Weltevreden str. 2007-60-3289-1

SEQ ID NO: 25000 - protein, 926 aa, Salmonella enterica; identical to SEQ ID NO: 24988
  subsp. enterica serovar Weltevreden str. 2007-60-3289-1

SEQ ID NO: 25001 - protein, 1982 aa, Salmonella enterica; identical to SEQ ID NO: 24981
  subsp. enterica serovar Weltevreden str. HI_N05-537

SEQ ID NO: 25002 - protein, 361 aa, Salmonella enterica; identical to SEQ ID NO: 24982
  subsp. enterica serovar Weltevreden str. HI_N05-537

SEQ ID NO: 25003 - protein, 921 aa, Salmonella enterica; identical to SEQ ID NO: 24983
  subsp. enterica serovar Weltevreden str. HI_N05-537

SEQ ID NO: 25004 - protein, 618 aa, Salmonella enterica
  subsp. enterica serovar Weltevreden str. HI_N05-537
MAIWKARYQPSDKSAQYVITDYLSRVYPVVALPHASDEPDAVREWLLTNYQPQNDTPVIFQLSDGVSLRLPGDLPDPRKYDFDMPLESYRQVPQTLLDSHALTVITELPKVSEKYDCAEASTWIKRLLKRTDSAKYFPQFSKGQLQNLTHFIAEHESDNEASYLRAVSHLEQIADMRSFLNDTTQQLLALPEVETQINIEKQEILARYEDEQHQIKQSITVLSEKKIQLENEIADQKKKLKKETDRINKTLRQQENELEQRIKKTFEAASQAGMETLAQAALLRAIIKNETAQEQPAQQRITSEPVAESANSNFPLAETNALTRKHQLISAIEKEALATGLSESLLSSLIATASITPAVGLMGKQTKQAIASLANLLAGNVWGEVSVHSDHFSFSDLMNSPTLIRLSGDTLTMTLGDFLTQQQEAGLASIVELRGFNRTPPETLLPELHECLFRTPHPAACSWTDRREALRHLPIRHPILFVLTFTTGKSTFPLQAPLAYQLPLFLAENIWSDERPFEQNTDITPSRITPELWQTIFVDNHRPEYQACAPWEVLKAALLSLLPDEQAQAVARLAYGLGRSTTQDIATTIDVLAPELGPYAQEMTIGESASVLEHLFQL

SEQ ID NO: 25005 - protein, 1946 aa, Salmonella enterica subsp. houtenae
MLDPIGGFRRIQDFFISYIETNFRIADPSVAISRRNLLNSSGEFAAEPFIEPVLRYESSGKMLEDLVDIDGGPLKNLSPEGRKAFVELALSGLFDSQPGDGTWKRRSVHAPYSHQTQMLERGLRPGCPGIVTSGTGSGKTESFMLPILAALSNEAVNWSKPDSGYLQNRWWNGAENNWVSRREGEKRPAAVRALVLYPMNALVEDQMARLRKTLDSDDSREVMEQRFAGNKIFFGQYTSATPVTGYASHPRLSSASSEKSRRARNLGKLRKALNRIDSDQQAARAFDEKENSSEKTRYIFPSTDGGEMVSRWDMQCAPPDVLVTNASMLGAMLSREVEDNIFGATHDWLMNNDDAYFYLVFDELHLMRGSAGTETAMLIKSLIIRLGLDDPKHRYKLRLLASSASLPMDGADGEQSRKYLRDLFAPFGTCCAALDPGSDQPDFWHNCVIQGKPFIPLKPSGKIPVRPFAALMRVALEDQGNVVRNLNMTGALSQALSNVFLALGVKAQNDMQGIKQAAETAAALLTNACIEEGGESPRAMPPGLIIDKIFLKEGTDNPDELELALRGLMLVRALPESGIDCEKPANVTPAFRVHTFVRNIEGFFASVSPGEKKAKFADFCLDRGLSHAPSTPDGKRGRRLFEMLYCEACGELLLGGQKGQNGSNTIELLPSATNLENLPERPGAEYYDDMTLDEFAVFWPIDIAERPPAVCEKGWDVWEKAALNPVTGIVTTKQETSTTNSSAVRGYLYFQNPVKPKKGEPAKKPSAQPFCCPNCGIDYSNRPASNRSRTPIRAFRTGVTKSSQLVATELFELLHAIGAEAKSIVFSDSRQDAASMALEIERLHLRDLRREILVAAAREMIKEAESEYISEDSINEKMDLALQVKDMKEYVRLHELKQNQSIVSDLCKYRRIKIDRLLESEGDSIGRITSELAGLGISPYKYRSNTDEDNSAGWHANFTKEGDVIKYSEKLPSPEKMKLKTKIFEDQFELIDDVIFANTFFALEETGLAYPCVSDKDDMPQLDAWLRVFAGVYRVKENKYFDASRSRDWLVGENVDKEKVNRIARVLFGDNSYQEGLTRILKQFADLKHTAGLFSIGKLFLKVTKPGDHYWQCGNCGRIHLHLGFKHCTRCINPLNVEPSGVVEKLWEDNFLGKRIVRGERDGVKRFRLNVEELTGQTDDFSDRLRKFKGIFVDKMSELEKLDAEIDMLAVTTTMEVGIDIGSLQSVYQANMPPQRFNYQQRVGRAGRRGQAFSFVITFCRGRTHDAYYFAHPHAITGDPPPPPFLAVDHDAIPKRLLRKIWLKSAFNDLREECHKNKTTFPGDKLVPPDVHGEYISTHDYYHDDKTDWAKRLYCALEANQNIRERFIEAATFDPDQRRSLYSEINAEKIIEEIEKLRSSAPDDNTGLARFLAERGLLPMYGMPTRVRNLYLGLRKTKGPNGQTEYEWSTMDRDLDLAVFEYAPGSVLIKDKKKHQVIGFTGNYREPQVRDNRVSDLSTVCSWEESSHYVAICQSCGSAKLEQNQPAKNINCEDCDTPISPDEFELYVTPAAFRTDFEPKDDMDSFTRMSLKTTATVLHKGVPEDCGPFKVRRGGVTILRLNDGPINGEKEGERFTADLATDQRAPIPSTAYYSPIKGNQAIDSNWAGLRNNFRWRCTGEKQNFGLVSSKETESLHLELMHFDARLNLNMIARYGEYMNLPTRAAAISATQILTHKAALYLDVSPDEFETLEPRLHHEKPILQIADALINGSGLCRRLAEPEVADGSPLIVTLLNEILGNKSNWPMVDFLNKEHPAQCQTACYKCIQRYGNRRYHGLLDWRLGMAYLRAMVTPDFACGLNDNDWIHPEMIGWRDRAFELAEEVEALRPGTIKLSKEYSLPILTEIQDGKELWRAVVTHPLWQWREPERKTLLNSLGLDDERSSLRFIDTFELERRPLRALANLKRS

SEQ ID NO: 25006 - protein, 411 aa, Salmonella enterica subsp. houtenae
MSKKAVTGNNKSNKTRKTSFCFYEFFAGGGMARAGLGKQWRCLFANDMDPIKASTYIDNWGDEHFDIRDVREIPSNDLPRHADLTWASFPCQDLSLAGNGLGIGDRDSRADEITRSGAVWPFLDLISKLSEENRKPPLLVLENVLGLLTLDQGRHFAAICHQLSKTSYRYGAIIVDAKHFLPQSRPRVFIVAVSRHISIPANLVSEKPLPEWHSSSLLRACDALAEEVHDDWVWWSPGIMPEAKMKELADIIDCEDTNVLWHSADETQRLIRMMAPANRARLAKAQGSGETMIGSLYLRMRKEKGVNQQRAEITFSTVLGCLRTPKGGASRPRIIVVNGNQVKTRLLSVKEAAALMGLPDDFILPTAYQSAFKVIGDGLAVPSVRFLAERILEPLVMATRNNIHRTEDIRE

SEQ ID NO: 25007 - protein, 852 aa, Salmonella enterica subsp. houtenae
MNWTPPVTPDGWESKLVDYFLRFGADGDAQDIRWFEVTPATLAAAFVDSGVSADEVEEAFRTCMSKIPDLPQRLESGMMEKSTRRTPGYFTYLVMTLLISSQFDVQEERNDFRLKLQNWLQTTHSFQNLSGVNKMWEALAEWLKQRIQEGEPYRRLILPPRDSWVQIGHTLRLAFPNKADLRLMSECLENYPQAAANPRQLIEYFKIVIQRQSVSLALKEAFAEFRDAWLLGRRALFDMPFWRLRQRAVQISSFVTTHQTIIDMYVDFDGSRRYFSVAGENNESAFHPTLSEALIARDAGNSENLGKATQIGLLFFYEIGHGRWRAISSPDVDSQGFHIALYNKHSVQTSKRLNGYIAEDEWILTAQPLSRVSATDIFRSVRSSSGIQDDDVTRPQLYGGIRVPGGWLGLPAFLPFVESDTQRYRIYSSGNDEAETNVSIIDGRLISSVPLNGELFIEPALEAGEKTPPWRRRARFFTRAVPHPTLGESARYRFEPLCDWSMPSLKAPTFNFEEQFQWEDSEACCDHLLEAVYASGASGWEEAELFALLRHVDGIINVWHLIRCLQHAGLIEPRLRAGWKGRAWTLVKPSLLHLRNGENSLVVVEGAVCASLMDDFQKAVAGLGGESFRRRGVSLWSPPVFGAVLANPVALSQRLGWPLIETPSSSATTPLSLVTTERAAELHEPAAIWNWRSGKFQPHGPTDKVAALLSLHIHPGGRDHDIYRVVSGRETKHFLSRTAAIITAGAKNRQPVFKRVAQNHLLCLINDCGLPDALAAGIRRHALRNGGPMDSGYAYPVDDVSFLWLGSLLPGCFYSLSPNGEDDISRIVSASRHSGGKIRPIWRNGRLALTPG

SEQ ID NO: 25008 - protein, 695 aa, Salmonella enterica subsp. houtenae
MSKIPWYLGQFDRRNYQSYLKAIAQETPDGWRTIENPKKLFPRTGEVEFNEADALQLRKGEWAAFHVGLGTRNRVQAKHARRIYPYYDLSSGQSLLEARRQLSFDGITTDGEPGLWAIRFGPDGLILANLAESKSGCLNLSISQNVYEYDFREGDVISVSGISVNGKLFYMPNVNVSPARIHDWTPDKQYIEYIIQLISCADSTAAIASWLQVHTNEQNGKLTSGVDALLAAAQMLRSGELAKKLEEEDSLTRQFTEAVLKDQHIARLLDHQIQNIAEEERVALRIEQHKGLDKEFSAERLRRREAIEREMAAFDKTRKSEIEEEIAQLWQLEEEKLQTDFAEKKANIEQTLKQEKAYLESEISRLKDANVDLCTQNENQRQILASLACEHEVFLASLTDAEERTAQAQTELEKMDIAIAEKARRMAYSAIPEVRLPAQARVISCEEFGHTVRENKLLTSDGKLLMAQFLALMLAGECPLLYGPETQDFLAIAASLISSGRTIRQIADPTMITGEDLWVRAGNKMATPLYQGLLLSEASCPRTILAVIERVECSAARFWLPALKDRLYGGDLPRRFLICGTIENEDCEEAEKLKEQHLRLRMENVVIQNAIALSPLHLSSENHSELDPGAASQGSLPDKLAIADKISAGRLDLTNTLRAMRTAHEAVPLDNENKTHQKRLVDLYADLQNNELYAQ

SEQ ID NO: 25009 - protein, 1946 aa, Salmonella enterica; identical to SEQ ID NO: 25005
  subsp. houtenae serovar 50:g,z51:- str. 01-0133

SEQ ID NO: 25010 - protein, 411 aa, Salmonella enterica; identical to SEQ ID NO: 25006
  subsp. houtenae serovar 50:g,z51:- str. 01-0133

SEQ ID NO: 25011 - protein, 695 aa, Salmonella enterica; identical to SEQ ID NO: 25008
  subsp. houtenae serovar 50:g,z51:- str. 01-0133

SEQ ID NO: 25012 - protein, 1947 aa, Serratia marcescens BIDMC 44
MLDPIGGFRRIQDFFISYIETNFRIADPSVAASRRNLLNSSGEFAAEPYIEPVLRYESSDKTLEVLAEMDCGPLNSLSHKGRKAFAELALSGLFDAKPGDEIWPRRSVHAPYSHQIQMLERGLSPGCPGIVTSGTGSGKTESFMLPILAALSNEAVNWAAPYDGYLQSRWWNGEKTSWVSRREGEKRQAAVRALVLYPMNALVEDQMARLRKTLDSDDARQVMEHRFAGNRIFFGQYTSATPVTGYASHPRISGVKSEKSRRARNLEKLRKALKRIDSDQQAARAFDEEKGNVSEKTRYIFPSTDGGEMVSRWDMQAAPPDILVTNASMLGAMLSREVEDDIFDTTREWLMNNNDAYFYLVFDELHLMRGSAGTETAMLIKSLIIRLGLDDPKHRYKLRLLASSASLPMDGADGEQSRKYLRDLFAPFGTCRDSLDPGSDKPDFWRNCVIQGKPYIPPKPEGKIAVLPFAALMRVALEGQENVVRKLNMTDALNQALSNAFLALGLKAQNGMQGIKQAAEKAAALLTNACIEEGCESPRAMPPGVIIDKIFIKEDTGNQDELELALRGLMLLRALPESGIDFEKPASVTPAFRVHTFVRNIEGFFASVSPGEQKAKFSDFCLERGLSHAPSTPGGKRGRRLFEMLYCEACGELLIGGQKGQNHGKTIELLPSATNLENLPERPGAEYYDDMTLDEFAVFWPVDMSDKSPAGCEKGWDVWDKAALNPVTGIVTVGQDISPTNTSVVRGYLYFQNPVKPKKGEPAKRPSAQPFCCPNCGIDYSNRPASNRSRTPIRAFRTGVTKSSQLVATELFELLHAIGAEAKSIVFSDSRQDAASMALEIERLHLRDLRREILVSSSRAMINEAESRYISDADIEDRKAKAKQSGDYDEYIRLHDLQKIQAGITELCKYRRVKIDKLLESEGDSIGRITSELVGLGISPYKYRSNSDENDSTVWHANFIKEGTAIRFSERLPSHERMKIKTKISLDQSELIDDVIFANTFFALEETGLAYPCISDKDEMPEIDAWLRVFSGAYRVKENKYYDESRTRDWYFGKDVEKEKIKRIARVLFGDNNYQDGLTHVLKQFADLKHPAGLISIGKLFLKVAKPGDNYWQCGNCGRIHLHLGFKYCTRCVNALDLKPSGFVEELWEDNFLGKRIVRGERDGVKRFRLNVEELTGQTDDFSDRLRKFKGIFVDKVSELEKLDTEIDMLAVTTTMEVGIDIGSLQSVYQANMPPQRFNYQQRVGRAGRRGQAFSFVITFCRGRTHDAYYFAHPHAITGDSPPPPFLAVDHDAIPLRLMRKVWLRAAFNILREEDYKNGITFPGDKLVPPDIHGEYISTHDYYHSDENNWAERLLGALKTTQDIHDRFIEAATFDPEQKRRLYSAVNAEGIIDEIDKLNAYVPEDDIGLARFLAEHGKLPMYGMPTRVRNLYLGLRKTKGINAQEEYEWSTMDRDLDLAVFEYAPGSVLIKDKKKHEVIGFTGNYQEPQIQNNRISDLSVVGSWQESCSHVAICPACGSAKLELHKPDNDINCEDCRTPISPEEFRLYITPAAFRTDFKPKDDMDSFIRMSLKTTATVLHEGVPTKCDSFTVRRGEVTILRLNDGPINGEKEGERFTVDLANDLKAPMPFSTYCPSVKGEQAIDSGWLESHNNPRWQCSGKKKSFGLVSSKETESLHIELTKFDARLNLDMVARYGEYMNLPTRAAAISATQILTHKAALYLDVSPDEFEMLEPRVHLGKPILQIADALINGSGLCRRLAEPAIAGGPPLIVTLLHEILEDKFVWPMVDFLKKDHPAQCQTACYKCIQRYGNRRYHGLLDWRLGMAYLRAMVMPEFACGLNIADWNQPEMEGWLKRAFELAEDVEALRPATIKLSKEYSLPVLIEIQDGKELWRAAVTHPLWQWGDGKRDALIDSFGLADGESSLLFIDTFELERRPLRALVNLKQS

SEQ ID NO: 25013 - protein, 411 aa, Serratia marcescens BIDMC 44
MSVETVTDNNHLTEPCEAGFSFYEFFAGGGMARAGLGKQWQCLFANDMDPIKASTYIDNWGDEHFDMRDIREIDPDDLPHHADLSWASFPCQDLSLAGNGLGIGERDSSGDETTRSGAVWPFLDLISRLGEENRKPPILVLENVLGLLTLDQGSHFAAICHQLSKTGYRYGAIIIDAKHFLPQSRPRVFLMAISRHVSIPEILVSEEPLSQWHSPSLLRACDALADDVRNDWIWWSPGNIPDARTKELDDLIDFEDENAQWHSVDETQRLISMMAPANLARLASAQASGTTKTGSLYLRMRKEKGVNRQRTEITFSAVLGCLRTPKGGASRPRIIVVKGEQVKTRLLSVKEAAALMGLPDDFILPVAYHSAFKVIGDGLAVPSVSFLAERILEPLAMAVRINTQQMEDIRE

SEQ ID NO: 25014 - protein, 852 aa, Serratia marcescens BIDMC 44
MNWTSLVTPDGWESKLIDYFLRFGADGDAQDIRWFEVTPVTLAAAFADRGITADEIEEAFRTCMSKIRDLPQRLEGGMMEKSTRRSPGYFTYLVMTLLISSQFDAQEERNDFRLKLQNWLGTGHSFQNLSGVNAMWEALAEWLNQRIQEGEPYRRLVLPPRDGWVQIGHTLRLAFPNRADLRLMSECLESHPQAAASPRQLIEYFQIVIQRQSVSHALKEAFAEFRDAWLLGRRALFDMPFWRLRQRAVGISSCITTHQSIIDMYVDFDGSRCYFSSADERGESVFHPTLSKALSAHYAENSDNLGKATQVGLLFFYEIGNGRWRAKSSPDVYSQRFHIALSSKHSVQMSKRLNGYIAEDEWVLTTQPLNQVSAMDIFRSLRSSLGIQDDDVTRPQLYGGIRVPGGWLGLPAFLPSIESDTRSYKIYASGNDGAGTNVSVIDGRLISTGSLSGEFFIEPVLEVGEKMPPWRRRARFFTRAVPHPTLGESARYRFEPLYDWSTSALQAPTFNFEELLQWEDNEVCCDHLLEAIYASGASGWEEAELFALLRHVADNINVWHLIRCLHHAGLIQPRLRPGWKGRAWTLVKPSLLHICNGENSLVVAEGAVCVSLMDDFQKAVAGLGGESFRRRGISLWSPPVFGAVLANPVALSQRLGWPLIEAPLSSDTTPLSLVTTERTAELHEPAAVWNWRSGIFQQDGSLEKESVSLSLHIHPGGRDHDIYRVISGRKTMHFLSRTAAIITAGAKNREPVFERVAKNHLICLINDCGLPDALAAGIRRHTLRNGGPVDSGYAYPVDDVSFRWLESLLPGCFNSLFPHGEGDINRLVSASRHSGGKIRTIWRNGRLTLTLG

SEQ ID NO: 25015 - protein, 693 aa, Serratia marcescens BIDMC 44
MSKIPLYLGQFDRRNYQSYLKVIVQETPVGWRTIENPKKLFPRTGEVEFNETDALQLRKDEWAAFHVGPGIRNRAQAKHARRIYPYYDLSSGQSLLEVRRQLSFNGITTDGEPGLWAIRFGPDGLILANMAESKSGYLILSKSQNVYEYDFHEGSVISVSGISESGKSFYMPDVDASPARIHDWTPDKQYIENVIQHLSCAGLTAEIASWLRVHTNEQNGKLTSGVDALLAAAQTLRAGELAKKLEEEDSLARQFTESVLKDQQIAYLLEHQIQNIAEEERVALRAEQHKALDKEFSAERLRRREAIETEMAVLKKTRKSEIEEEIVQLRQLEEEKLQIDFAEKQADIERTLKQEKVHLESEISRLKDTSADLYAQNENQHQILASLSCEREVCLASLTDTEERTAQAKIELEKMDIAITEKARRMAYSAIPEVRLPAQARAVSCEEFGQTVRENKLLTPDGKILMTQFLVLMLAGECPLLYGPETQDFLAIAESLISSGRSIRLVADPTMISCEDLWVRAGNHLATPLYQGLLLSGASRPRTILAVIECVECSGVRFWLPALKDQLHSGDLPRRFLICGTIENEDCDEVEKIKGKHLRLRMENVIIRDAIALSPLHLSLENHSELDPGPASEDSLTDKLAIADEMSAGRLDLVNTLRAMKTAHEFAPLDDKNKAIYQKYLIDLYADLQNNEM

SEQ ID NO: 25016 - protein, 1947 aa, Serratia marcescens BIDMC 81
MLDPIGGFRRIQDFFISYIETNFRIADPSVAASRRNLLNSSGEFAAEPYIEPVLRYESSDKTLEVLAEMDGGPLNSLSHKGRKAFAELALSGLFDAKPGDEVWPRRSVHAPYSHQIQMLERGLSPGCPGIVTSGTGSGKTESFMLPILAALSNEAASWAAPYDGYLQNRWWNGEKTSWVSRREGEKRQAAVRALVLYPMNALVEDQMARLRKTLDSDDARQVMEHRFAGNRIFFGQYTSATPVTGYASHPRISGVKSEKSRRARNLEKLRKALKRIDSDQQAARAFDEEKGNVSEKTRYIFPSTDGGEMVSRWDMQAAPPDVLVTNASMLGAMLSREVEDGIFDATREWLMNNNDAYFYLVFDELHLMRGSAGTETAMLIKSLIIRLGLDDPKHRYKLRLLASSASLPMDGADGEQSRKYLRDLFAPFGTCRDSLDPGSDKPDFWRNCVIQGKPYIPLKPEGKIAVWPFAALMRVALEGQENVVRNLNMTDALNQALSNVFLALGVKAQNGMQGIKQAAEKAAALLTNACIEEGSESPRAMPPGLIIDKIFIKEDTGNQDELELALRGLMLLRALPESGIDCEKPANVTPAFRVHTFVRNIEGFFASVSQGEQKAKFSDFCLERGLSHAPSTPDGKRGRRLFEMLYCEACGELLIGGQKGQNHGKTIELLPSATNLESLPERPGAEYYDDMTLEEFAVFWPVDIAGRPPVGCEKGWDVWEKAALNPVTGIVTTGEEISTPNTDTVRGYLYFQNSVKPKKGEPAKKPSAQPFSCPNCGIDYSSRPASNRSRTPIRAFRTGVTKSSQLVATELFELLHAIGAEAKSIVFSDSRQDAASMALEIERLHLRDLRREILVAAARAMLEEAEKSYISEDIINDKMNKAMLASDDDEYGRLYALRKHQGAVANLCKYKRIKIDRLLESEGDSIGRITSELVGLGISPYKYRSSSDENDSNVWHSNFIKKGKDIKYSETLSSHEKMKIKTKISGDQFELIDDVIFANTFFALEETGLAYPCISDKDDSPELDAWLRVFSSAYRVTDNKYFDPARTRDWYEGSHVEKEKVKRVARVLFGDGRYQDGLTNILKQFSLLEHKAGRINIGKLFLKISKPGDNYWQCGKCGRIHLHLGFKNCTRCLTPLNIEPSGVVETLWEENFLGKRIARGERDGVKRFRLNVEELTGQTDDFSDRLRKFKGIFVDKMSELEKLDAEIDMLAVTTTMEVGIDIGSLQSVYQANMPPQRFNYQQRVGRAGRRGQAFSFVITFCRGRTHDAYYFAHPHAITGDSPPPPFLAVDHDAIPLRLMRKVWLRAAFNLLREEDYKNGTTFPGDKLVPPDIHGEYVSTYDYYHSDEKNWAERLLGALKTTQNIHDRFIEAATFDPEQKRSLYSALNAEDIIDEIDKLKAYVPEDDMGLARFLAEHGKLPMYGMPTRVRNLYLGLRKTKGINAQEEYEWSTMDRDLDLAVFEYAPGSVLIKDKKKHEVIGFTGNYQEPQIQNNRISDLSVVGSWQESCSHVAICPACGSAKLELHKPDNDINCEDCRTPISPEEFRLYITPAAFRTDFKPKDDMDSFIRMSLKTTATVLHEGVPTKCDSFTVRRGEVTILRLNDGHINGEKEGERFTIDLVNDLKAPMPFSTYCPSVKGEQAIDSGWLESHNNPRWQCSGKKKSFGLVSSKETESLHIELTKFDARLNLDMVARYGEYMNLPTRAAAISATQILTHKAALYLDVSPDEFEMLEPRLHLGKPILQIADALINGSGLCRRLAEPAIAGGPPLIVTLLHEILEDKCVWPMVDFLKKAHPAQCQTACYKCIQRYGNRRYHGLLDWRLGMAYLRAMVMPEFACGLNAADWSQPEMKGWRKRAFELAEDVEALRPATIKLSKEYSLPVLIEIQDGKELWRAAVTHPLWQWRDAERDALIDSFGLAGGESPLLFIDTFELERRPLRALVNLKQS

SEQ ID NO: 25017 - protein, 411 aa, Serratia marcescens BIDMC 81
MSVETVTDNNHLTEPCEAGFSFYEFFAGGGMARAGLGKQWQCLFANDMDPIKASTYIDNWGDEHFDMRDIREIDPDDLPHHADLSWASFPCQDLSLAGNGLGIGERDSSGDETTRSGAVWPFLDLISRLGEENRKPPILVLENVLGLLTLDQGSHFAAICHQLSKTGYRYGAIIIDAKHFLPQSRPRVFLMAISRHVSIPEILVSEEPLSQWHSPSLLRACDALADDVRNDWIWWSPGNIPDARTKELDDLIDFEDENAQWHSVDETQRLISMMAPANLARLASAQASGTAKTGSLYLRMRKEKGVNRQRTEITFSAVLGCLRTPKGGASRPRIIVVKGDQVKTRLLSVKEAAALMGLPDDFILPVAYHSAFKVIGDGLAVPSVSFLTERILEPLAMAVRINTHQMEDIRE

SEQ ID NO: 25018 - protein, 852 aa, Serratia marcescens BIDMC 81
MNWTSLVTPDGWESKLIDYFLRFGADGDAQDIRWFEVTPVTLAAAFADRGITADEIEEAFRTCMSKIRDLPQRLEGGMMEKSTRRSPGYFTYLVMTLLISSQFDAQEERNDFRLKLQNWLGTGHSFQNLSGVNAMWEALAEWLNQRIQEGEPYRRLVLPPRDGWVQIGHTLRLAFPNRADLRLMSECLESHPQATASPRQLIEYFQIVIQRQSVSHALKEAFAEFRDAWLLGRRALFDMPFWRLRQRAVGISSCITMYQSIIDMYVDFDGSRCYFSSADERGESIFHPTLSKALSAHYAENSENLGKATQAGLLFFYEIGNGRWRAKSSPDVYSQQFHIALSSKHSVQMSKRLNGYIAEDEWVLTTQPLNQVSAMDIFRSLRSSLGIQDDDVTRPQLYGGIRVPGGWLGLPAFLPSVESDTRSYKIYSSGNDGAGTNVSVIDGRLISSGSLSGEFFIEPVLEVGEKMPPWRRRARFFTRAVPHPTLGESARYRFEPLYDWSTSALQAPTFNFEELLQWEDNEVCCDHLLEAIYASGASGWEEAELFALLRHVADNINVWHLIRCLHHAGLIQPRLRPGWKGRAWTLVKPSLLHICNGENSLVVVEGAVCASLMDDFQKAVAGLGGESFRRRGISFWSPPVFGAVLANPVALSQRLGWPLIEAPSSSNTTPLSLVTTERTAELHEPAAVWNWRSGIFQQDGSLEKESVSLSLHIHPGGRDHDIYRVISGRKTMHYLSRTAAIITAGAKNREPVFERVAKNHLICLINDCGLPDALAAGIRRHTLRNGGPVDSGYAYPVDDASFRWLESLLPGCFNSLFPHGEGDINRLVSASRHSGGKIRTIWRNGRLTLTLG

SEQ ID NO: 25019 - protein, 696 aa, Serratia marcescens BIDMC 81
MSKIPLYLGQFDRRNYQSYLKVIVQETPVGWRTIENPKKLFPRTGEVEFNETDALQLRKDEWAAFHVGPGIRNRAQAKHARRIYPYYDLSSGQSLLEVRRQLSFNGITTDGEPGLWAIRFGPDGLILANMAESKSGYLILSKSQNVYEYDFHEGSVISVSGISGSGKSFYMPDVDASPARIHDWTPDKQYIENVIQHLSCAGLTAEIASWLRVHTNEQNGKLTSGVDALLAAAQTLRAGELAKKLEEEDSLARQFTESVLKDQQIAYLLEHQIQNIAEEERVALRAEQHKALDKEFSAERLRRREAIETEMAVLKKTRKSEIEEEIVQLRQLEEEKLQIDFAEKQADIERTLKQEKAHLESEISRLKDTSADLHAQNENQHQILASLTCEREVCLASLTDVEGRTAQAKNELEKMDIAIVEKARRMAYSAIPEVRLPAQARVVSCEEFGHTVRKNKLLKPDGKILMTQFLALMLAGECPLLYGPETQDFLAIAESLISSGRSIRLVADPTIISCEDLWVRAGNNMATPLYQGLLLSEASHSRTILAVIERVECSAARFWLPALKDRLDGGDLPRRFLICGTIENEDCEEAVKIKEKHLRLRMENVVIRDAIALSPLHLSLENHSELDPGPASEGSLPDKLAIADEMSAGRLDLANTLRAMRTAHEFAPLDDKNKALYQKYLIDLYADLQNNDMYAK

SEQ ID NO: 25020 - protein, 1832 aa, Sinorhizobium meliloti 1021
MKAIIDEANPASVIEYIRDAYLRYYDSAFWMRDQAVMDERREILLADGVMAREPLLEAVPQYPSTDPISDACTQAKLDPFVAQHLANVIFGASNVRLRKHQAQSLVTATAGNAEGHRNVVVTSGTGSGKTESFLLPLIATLMQERVRGPGAGEIHRWWRSDLANDAREWFHSRSGFDGAVQPAMRALVLYPTNALVEDQVSRLRQAASRALGLFGSPLFYFGRYTGATLGGTFIPPASLRSGDRSRINEIGREVLKIESEVAAIRKHMGSEGKDEKEIIETCSQFQDPSIGEMLTRWDMIAAPPDILITNTSMLNIMLMRAEEGPLFANTREWLESDERNTFTLVVDELHSYRGTQGTEVALVVRNLLDRLGLDPNSRQLRCIATSASLDGEAGKEYLEQFFGVDRRSFSIYPGEPREFSVPLPIDRQLASTLAEDLRAGGDRAKAAQGEISKAFSPREAIATACAVAGRSLVTDPTTGERRNVVRPSALPALSEVLFGDSNARNELTALLVAAKLEDRGTFEIPRPAFRSHMFLRQVQGMWACSNPECTQIEGRFKSSRRRFGRLFKSPAMKCGCGGQVLELLYCYDCGEAFLGGYIVPTTDPLLAGFTFVEATRAGEGNDKASQVNERTIDEYRWYWPGGELPPRSSWEHQSPSGKAVRMQFQRGTLNHFSGELGNDTNPGSGLIFCRPATGLEASETIAALPEVCPCCLSSKISINGQEENRRAFFSGMVKSPIRGLRTGLNVTTQLVADRAMFATGDGDQSEKMIAFTDSRDDAADLAAGIELNHYRDLIRQLVHSSLAPRKIPASTELLAYVGSDPSDDPILRELVDAAERQTPGIFTAVKLDKFGVADKAQKALIARHDAGVSSPRVGWPSLLEMMSTRLVTLGQNPAGPRASRATDNGEEDGTPWWRFFDPPTPGDWATVAPDVARARRRDYMELFATEVAVSLFDRAGRDMESMAVASIEVDGKHGNRLFMDDEVANGVLANIVRILGHARYMAGEKSRGSTSIPRTAKSYIEKVARHLNLDALALGSTISEYLQERGVINANWLLQITNHSTLPLAIVPRGERKLHRCEKCSRRTMLLPVKACTTPHCNSSSFLVVENPGQDYYSWVSREPVHRLAAAELTGQTKPMSKQRNRQRLFKGTAYLDGESPLVQGIDALSVTTTMEVGVDIGSLKLVMMANMPPQRFNYQQRVGRAGRAGQAFSYAVTISRGAAHDDYYFNNPERMTGDLPPQPKLDLSRPEIVRRVVASECLRRAFASLNPGPDRNVDSIHGTFGRKAEWNPTYRAPIAVWLSSSPEVDEVVGRLLVHTPIKDRANDLASYARSGLVLAIDDAVANTRFIQEELSHLLAVAGILPMFGFPTQVRSLFHDKVRPSRLEEVVISDRPLDHAVWAFCPGSEIPKDKQLSTACGFVLRKDGPKGVHNDEQPLGRPTMYTRCEDATCSTISAGEHTQCATCGGLSVPFPLYQPKGFLAARRRRDYDGERQRGPSLPPPVRAFEQGYGNEGCGPVKIAFRPGPVAIVNDNRGRLFEFFQEPYERVSVRDPNLYRDHSPWGDGNAAPFLDRGAIGAVFTTEVLSFFIDGAPGIGRLGMLDIRKQPAARAALASFAELVKLALATTLDIDPSEFRGGRQAFRKDDCETEQVFIADSLENGAGYARWASDPVNLERAVRGYHEVVSSKWQAHSHAHDCDRSCPDCLRNYGNRFSHGILDWRLALDLADLMLGNPLPLTRWIEDTEMDSVRAFVKFCSDAGMPVNAGYAGGLSTVSRGRKALVLGHPLWHTDAGHLQPQQIQARDELRLDGTEAEFVDARDFSTRMANYYLRLQS

SEQ ID NO: 25021 - protein, 440 aa, Sinorhizobium meliloti 1021
MKKYSFADLFSGCGGLSLGLTQAGLKGQFAIERDAMAFRTFATNFIDARGASDRFEWPAWLERRAWGIEELLEYHGKELLGLRGTIDVLAGGPPCQGFSFAGRRNEDDPRNLLFKKYVEMVEALQPQALVIENVPGMRVAHARRNVVELQAADPGGRKISFYDKLVESLSAAGYDVDAMLVDSASFGVPQKRSRLIAIGVSKDLCKWLDGGILRAFKLLEEARVEQLAELGLPPLVTASDAISDLEITGRPLVECVDPESPKRFMEASYGGPRTPYQTLMHHAHVGSMDSMRLARHTDEVKDRFAKILAECRKGVRMDDASRRTYGLKKHRIYPMAEREPAPTVTTLPDDILHYREPRILTVRECARLQSFPDRFIFKGKYTTGGERRTKECPRYTQVGNAVPPLLARAIGNALTRLLDEVSVAQLDSDNAATQLALTMA

SEQ ID NO: 25022 - protein, 997 aa, Sinorhizobium meliloti 1021
MVPPVSYKDCNSALNKVFFDGRFAGQPVYLTLDNDMREEVGKHLRVEPDLVEAAICQRVGQWLDRRGNPYETTVDAVELWRRVGMKSQPLFTAILFCLSHAASIMAAEEDFAANNYYLRLAQVTGIERQRLSQHGKSTDMLWSALRDWLVLNNYGFGKPTAVAATTWKYVGKAMSQAAVRAGDRELFHDLFGRYGFSGSEIISLKEMEFYLSYWIIGGRANSRLKNVWSKPELRERVAEAALAELSKWSSSGPGTMGSRPSTGSSRLSMLANFVQRFPRQLLELHLGRIASEEASGPFKTEGGSQEFSLSSDRFGGYSTLAPSPLVASIGHRCHLVPASPGLRPLDWQPRLVIPLAKSAQDNLWVEVAKVSFGIPHVLLVRDAHGLPGKVESYLAIAAMKMPEKASPSDLPGLPLGWILYKDVQVRQPGMVPSDDLECLVPWSNDGVLSIGEGLQLLPGFYHASRPVMAEFLATEGPTRVEAWTQDESPKLIAWADGGGNTCSLRLDAARLRFPRGIKVKAYQDGSEQASAELYFRDSNSPHPLNRDNKGRLAYRSVVSATAIRDDASGIAVSGMEPSEAVPSRTGFPMETAGPLPDGVVEEMQVPVVAAALQRQASAETCIERGYHYWICETLPPGRPRNTPLEQRCNGCGAMVIILHRGTHQAGVLPPLPIPISRLSQPASPHANAIDANELLDALCFLGCGNWGKFQALAGLGNDPTSTSARQVAQDFFLLGFLDTELSPGSSAIKSWCVPRATINFIDDRRAFLSGFRSPNLLDAIKRATKQHAGRVFEEDLPGRPRMILLDGLDATSAKSAFSGLKDPLEREIAINDRPGDKLAGACQKLESIASSLRQVSIGRPKSLQKFDVPKARWIDAGLASRAGAYRWNEGYQVYAYVAPNGTAWAGSYQVVKLLAARAEGVSLWQYSEAQASFRATLGCDPPGLLGRVLVACSGLLPTLGRGIISYSNIGPTVASSVMSALSMENFDEGDHRRSQSG

SEQ ID NO: 25023 - protein, 1832 aa, Sinorhizobium meliloti 2011; identical to SEQ ID NO: 25020

SEQ ID NO: 25024 - protein, 440 aa, Sinorhizobium meliloti 2011; identical to SEQ ID NO: 25021

SEQ ID NO: 25025 - protein, 997 aa, Sinorhizobium meliloti 2011; identical to SEQ ID NO: 25022

SEQ ID NO: 25026 - protein, 1961 aa, Sinorhizobium sp. GL28
MLDPLGAFERIRELYISYLDTAFRVRRPALAAERRRLLRTSGTLATVPFLEPVPRYRSSPLALEDLVDLESSENPIGHLSRSGRRAFAELALSGLYPGLAAEGEITRKSIFKPYEHQMEMLAKGTRPGSPGIVTSGTGSGKTEAFMLPILASIAEEGVKWSAPRPGYLANAWWRDTPSEFRLHREGEASDRPKALRALVLYPMNALVEDQLSRLRRTLTSPEATAVMDERFAGNRIFFGRYTGATPVAGHLVHPRRPHDRKEQNAAARRVARVAAAMSSYERDQELARAHDRNHPDDDPTRYLFPSVDESELVARWDMHATPPDILVTNVSMLGTMLSREVEAPVFDLTAEWLERDENSYFFLVLDELHLVRGSSGTEVSGLIRGLIARLGLDRPEHRHKLRILASSASLPLDGEQRERSLRYLHDFFGPNGTSETADDPGASGPEDWATAIVPGTPEIPTPEKPFPLDGSPFRALIAVLSADGTLIGKIGETSAELDAVVIDCAKALVAVPPQAAADAAKEAIEAASAVLTAACKTADGNRLRATGAETLAERIFGEKTPEAMQALRGLTVLRGLGDKAHDLWGFKIDEKTTSFREHIFIRSIEGLFATPVDTSSGVDFAGVTIERGTSYGTVGDAHQRIFELVYCESCGEEFIGGRRGETGRSNGISVELLPSSPELESLPETGATGNYEDLSYQDFAVFWPTTRPAQQGDTTDEAWSEATLDTRNGLVLGSVGEGRTGIRGRLFCLPPKLGNNLKAPGSAGPKCCPACGIDYSGRSAKFRQSPIRSFRTGFAKSSQLVATELFSVLHASGDLAKAVVFSDSRQDASRAALDIERRHHQDSRRQLLIECLEAFAADVPAEREALQTRLNDAAAKMDHAEMSKILARLTALPQNGEGGRVPLSGVVETPVRTGQVVTDEAGPLLSRMIDIGMHPTDDVGIARIGEGDKREGFEWDELFRQEDKLVRWREQQDANALQAARTEVITDMRPLVDDVLFSKTYFALEETGLGYPSLFPAEGADHDRFDAYLRVFADAYRVRGNRWVEKNEQRKEWPTGLSVQNKRVKTLAAAAGLKEPAEELETVIERLRSLGHGNGFIDPEKLFVRLVDSEHGYFACTNCTRVHLHRGVGVCTRCAVELPKEPTGKTAEIRERHFLARSIEHAADAGIEAFRLRCEELTGQTGSPADRLRRFRGIFVDGQDGGQGDLYRKAREIDVLSVTTTMEVGIDIGALQAVYQANMPPQRFNYQQRVGRAGRRGQAFSMVATLCRSRSHDLHYFMHPEAITGDAPPPPFLTSDHLAIPLRLLRKFWLIEAFDILRDECGEDYPGDDARADVHGEFVPAHIFYGEGSPWPERLAGALDASIGVRDSSARALGSGMPGREEELLQALTPEILIGELMGLHEAGSGSNANLASFLAENGLLPMYGMPTRVRDLIIGTKSSDIGQPEWDKIDRDLDVAIYEFAPGQSLIRDKRKHTSIGFAAPTLILNDGRKNTVNFITTGGPNWYTDHANIAVCEACGATNTAPPEAVQDRRCSDCGNAIPAASFVRYYMPAGFRTAFRPSPLDQDDTVSKPTRRETSSEMEDITADPVGGTNMMFAIGDKASIIRRNDGPVNVNGGGDGFVVREAVQRSVLMRETPPKLWGNNLKFQFVVPDELANTVKWSPPDNGGLPAVDETVRLMSRKRTDSFYMSMRTVPPLLAYDRLGGRSVYKTSMRAAAVSATQLLLQRAALELDIGPEEFETLEPRLRGGLPLLQIADTLVNGAGFSRRLAGSVGTSSLALQLVRSIVENPGDSLVSPYFTDEHRQTCNRSCYRCMQRYNNRGYHGLLDWRLGVGFLRSCLDENWKAGLNGDWSAPEISDWLEIASRSAAELQQLDPVNRTIATAGTLQLPAVVERKGGVVSTFVIVHPFWRLDDASTNAGLLGEALSDLGTGNVYFVDTFEAARRPVKATEFAKLRPAEAF

SEQ ID NO: 25027 - protein, 383 aa, Sinorhizobium sp. GL28
MTVVSAPGSIFAIVTLIPSSGHAIYRGASAVNIEAIDLFCGAGGLSYGLQEAGIAVKAGLDLDGKCSYPFEANMAGAKFLEKDLSETTGDELAAFYSRGSVKLLAGCAPCQPFSTLRNGSDRQTSKKWPLLNEFGRMIEALAPDVVTMENVPVLRGEAVFRHFLDLLESNGYNVFWEVVDAADYGVPQRRKRLVLLASKMGPIRLLQPSELGTERVTVREAIGDLPSISAGESSPDDRLHRVRAITQLNLERIKASKPGGTWEDWPERLRLACHRKTSGSSYKSVYGRLEWDKPSGTITTQAHNFGTGRFGHPEQDRPLSLRELAILQSFPEHYRFVDEGEEVEFSPLGRLIGNAVPVKLGNAIGRSIVAHLERYGNDGSARN

SEQ ID NO: 25028 - protein, 854 aa, Sinorhizobium sp. GL28
MPAATTLTGADWNARLCSHYLSSDGPYGGVPMTFLDATVPELANASGEAWSGDEAMNSFLSGFGVGDVTRWLGRDDYPLRDKDQPPYFRYLVLTCVIAVNDIAGVDRGTHNFRRRLGQTLGIEELQTVNGVNRLWRALADWSARQRRNGLAVREIVLPDYGTMNLIGYAVRMAFPSWRDRTQFTAILRGIPEAVRISPGRLVGELSRAHRTLDIPKAIFEALTDFGTRRMSGQTMLDGHRFWSLVKSIEAELALEAGETPHRRVSLELRFGGYGQDEPEFRLVDQTAGSADATPAGDGSWLDTAGRIPRDPRSALAKALARGYAIFKRSAGCWVCDDAGIDTNDICMIVAADGSAPRSWRLTAAWSEIGPGWWLSKRVDGSDIVRLLGIHDPGVRELDRPKLAGGVPLKRGVYLGRPGFLPRVEQFGAGTVAATCLVGSHGELAVADDGVLTATQPLDGIWRVSVAQGGNALDIPFALERNAAEPAVYSPPPRADRWQFEEELRNTVPATVPCRGTLSESESVEPTETISALCEAIVSRAGSGWRDGDLVGLVESAYPKSPIIWDIIRSVQEAGWLDAYSSTSWRARFWRCRPPGIVGIPGGDAVVDGATGSAALDRLRETADRLGVTVLVHNGISPNSLPTVRLSGPGIGKLSEALAWPMTVLEGLPSPSDQWIEDSRTPEGRMRTAIWSHEVGLFLEYDRDPMPITVECWARERRDEPDLYVVRDRSGVLRKTRSRVAAVLEGHRLNRVPLFSKREDRVVRTRKSGHLPLPIARAMRFRSLRASGVSPGEGPNREYSYSPDREIEMWLGNYLGAAFETGAASRPGTTASEVEWRHRGGRRPAWNAYPIGYGR

SEQ ID NO: 25029 - protein, 639 aa, Sinorhizobium sp. GL28
MFSPNHPQGASEAFFAFDVTEVTDLTKQDRFRLQTLRKVEEVLDYSDRDPEDVRRIFVEHGVSGRKADRETVVVVLPDDLCVRISLVRDGNGKKSVAELIDLADLPLYSFDRSLFAGDRIDGCWYSVPDVTVGPEQGTIDWSLDKDFLASLFKQLKRLSAPEPGELRYPATRSQIHAFLTTLDRHGLLPADEEPWRSDGERVRRLASDMRFEVDEIEELVHILSSLAPVEEKLSEALDERRRALEVELAASVEADVRAEVETRYEALSARNAELDEMLSKLAVEKAALEGTVAELADRRDRTQREIRSLTAKVTSLIEVHDDGREFRADRLIQDIEKVLGGEKPAVSRVMPGQPRSQLPPFDYDLAPVPWERLNEELGAAASQHGFEPRDIETLDLLARSGEVLLISPDVARAVLRCYASVVAQGGFAVQSLDPSTIGYDDLWRSPARETPTPLSRAWAACANDRSVARLVLLEGIERTPLDLWIRPLIETLRGQERPKNLLVFLSMASATIDRDRSVADLSEFVVPFKTHDPTALSPDFLRNLLGDAEGPGLWFDFRAKLAVARNEIGTLMSADFGPSGKKRMPLALRASVAARGTGIADVEKKVRILCENLDAAPADAADRIWSLELGREYLRTLSN

SEQ ID NO: 25030 - protein, 1849 aa, Streptomyces auratus AGR0001
MPGKTNSLDINRSFEQLRSALFRYYDTPFRLANKKLRKERRDLLDVDGGAWRRPLIEIRPQYKSCGTDIAGSVAAAGAPGELAELVSAGLLEGIEKMHSHQHQSLVAAVRDGKDVVITAGTGSGKTEAFMAPVLAELVRESAAWVSGTPAHPEKWWSGGDGSYVPQRRGETGHKAAVRALVLYPMNALVDDQMMRLRKALDSDAARQWADKYRRGHRFYFGRYTGATPVTGDRKTKQAVAKLRTLLHETEKRSNRVRESAGEGNDQYFVPRVDGAEMRSRWDMIESPPDIMITNYSMLNIMLQRPDEEAVFEQTRQWLQEDRGAKFTLIIDELHMYRGTAGTEVAYLLRNLRSRLGLDQHPEQFRVLAASASLDPQRDGDFLEEFFGIPQARFEVLGGELDLPMAESADISEHTGTLSGIGDDITPAGSARVLQETGGHLALVKALYDGVDLVARLDRDAAGLLFPRADEESRAAAFQGLLTALRTADETVTGPLPKLRGHLFFRNIPGIWACSDPDCSGVERTEGDDRTVGRLFARPTSRCSACASRVLELLYCQNCGDVMLGGYASASSIAAKRFNGGLLPDLPDLEAQAEGTLLDASAANYVVYWPRTEEPVIDATDFAWARSSEGGTYSAEFRFKRSKLSPRTGHLANTRDRNESTGWSFHTTVPQPGKRKQALRLEQLPAAPTQCPACGDDWETPRIKSEALSLRDRRRMRTPVRTMRTGFEKINQVLTTSVLSELDRKKAVVFSDSRQDAAKIAAGLGLRHYQDLLRLLLAEQVARQGSPADDAELVRKYFKREGPADTQRAAEALERMCSLDKEAVDELRAIWNADPIDGVPDPAREEELLAHLGKFPSLKAHARAMEKALVTRGVNPGGPKESLERVARQKGAPDLAWTSVYDWGRTPVEPRTGLGERQKDLLTSIRESLSSEMLGGLFGSAGRDFESLGLGWLSLASDTSPLDADPFSETALVRSSLRVLGHLRRFQGMRTGAAEPPAPLRAFWKAVGEQTGQDPEDLRTRVERSIRDAAPQYVINPEKVCIRPAGPDMWICLKCKRKHLHRGAGVCTKPKCGQPLPSEPRPVTRAEDDYYAWQAAKGDGWFRLNCAELTGQTDRLDAQARQARFQDIFLEGTEIEGPDSVDVLSVTTTMEAGVDIGSLAVVLMANMPPTRFNYQQRVGRAGRRDAPVALALTVCRGRSHDEHYFQAPERITNDETPEPYLSTDMPDIYQRVLAAEVLRRAFAAAGGLAEDGEQLDPTRNVHGQYGAVADWKRVRQPISDWVNRSEPEIAAVATALAAHTRVPGQAARAVRWVRNRLISEIDAVADAGHGHGDLSQRLAEEGLLPMFGFPTSVRYLYTRRPEKAYPWPPAGVVDRGLPVAVSQFAPGAETVKDGAVYTAIGVADFRPAGAHVQAAANPLGPARHIGLCRACSHVEELITKEMSEESAEPEPLECPACKSADGLYTHVELRQPAGFFAPPVMPFKRDFDGNFSWRARSLAPRTGANLETEAKKREIGPDSIAVHAGKGRRYAVNDNGGSLFQFAPLSTSDRWWAGAYADVSATERAPWLKVQPEKTVNVALGAVQQTDLFLFGPREPVVREHGYRLDLSPVRQVTGFPDDRTGRKAAWYSLAALLRKSAGELLDIQPSEIAAGIHGAVTKDVGARVFAFLSDTLDNGAGYCTHLAEPDTFDRLMKSTGALLAKLGVGSHGEECRGACYECLRDYTNMAYHPLLDWRLAADLLGIMKGEKLDVDRENARTLLESWTADTAEAGPVVDLDSHPVVIFDSSVVVAVKSPFETVGRDLESKRITLVGDEIARQEWDVKSVVFVDDFLLERVPSRFTVQLGNFLNQ

SEQ ID NO: 25031 - protein, 405 aa, Streptomyces auratus AGR0001
MTTTKRSLTSVEICAGAGGQALGLHNALFRHLALIEIDSNAVATLRANVEGNAEWEGCEVIPADLTKLDPLELRKNLGLEPGDLDLLAGGVPCPPFSVAGKQLGRDDERDLFPTMLKLVRELEPKAVMIENVRGLLEPAEKFQGYREEILDTLDLLGYGKCYWEVLEAKNYGVPQLRPRAILVAMKKSYIPFFENKKPEACPLVTVGEALEKSMRHRYDASDDPRADEQFTRWLEKASKDVAPTLVGGSKKHGGADLGPTRAKKAWADLGVCGLGVANTPEEMKAKDSEQRDLFSAAGPKLTVKQAALIQGFPENWVFTGRKTTAYRQVGNAFPPPVAEAVGVQVRTALEAASRAGVEAPVREWERRTIARQRDSELLFRISDISTPLSAEPADRRGDCERAVAG

SEQ ID NO: 25032 - protein, 705 aa, Streptomyces auratus AGR0001
MLGVNRDSAYDQWQSVLEQEFFGPHMSGYAAVFYVDECAKRSLMDANSQLAELAEAVSAELYWDRPTGMFSRLEWRCRLWAAGEQRDAPPVLPMLATSVLAASKMAAEGDISSSNYYKRLAEVFCAGSRERDSLRAYFKPVADMWETLDTWLESRGGERGYSTISRDSHLTRIGYPMSQALLREQDRRILTAFFAATGVKPASPEEFPGQEIIRRLRLWTSSQSHGLSRPLLNVLHGNGSGSDGVEKREVLVRLLERLVEHWDGTLYERGAGARRAAALRLVLAGRGRQLRWAAGAVQGIPAAAVRHESSGVRYSLSEPYGGLYSGLEELAVTNHQVAHGLVLEGDELYLSWVPQPLIFFTEDEYSGDFVSVASFGPGQPHILMVPDSEVSAVRSVLSEIADGRRIAEHTAPLVGWTLIRNVDLDAAVTPATLLRGGVPHAAHFMPSTRHGIRFVGGLRIGRDLGSHHYLQGGVPDWLLPRDISRGEATLQVTLNGGGGSHTHDFPLQKVLRPFPARLIPLADGTYQLSAPESGKATFTVSSALRERQAPDAGSIGHRCDATAETEAEGAGPGVKAIRGANAPEKLSLPKTVMVPRRVKELVLIGAKGELQRLDLPGIPEWMHERLPDEAYGYCAEVTVPDGCVWALQRWQNRTTVRCLKRSGPTLRPEPAGDATEWAEAVLSAASAESGPLWDAYVTAARTVLR

SEQ ID NO: 25033 - protein, 1857 aa, Streptomyces aureofaciens
MTDTNTTGSGPDQRSLDILRTFDELKTALFRYYNTPFGLANRRLELEREALFNTPGGAWQRPLLEVRPRYRSAGVDLAGSVSDADAPPELAKLIGLGLVKGIPALYEHQHHALIAAFRDQKDVVVTAGTGSGKTESFMLPILADLVRESASWKPARLPVNRWWNIPNGPYQGQREGEQGRHQAVRAMVLYPMNALVDDQMMRLRKALDSDEVRAWFAQNRPGHRFYFGRYTGATPVPGDVRSPSGQKILRREFTETEKRARQAQQAGDDKRFFVPRLDGAEMRSRWDMIETPPDIMITNYSMLNVMMLRPRESGIFDKTRQWLEEVPGARFTLVVDELHMYRGTSGTEVAYLIRNLRHRLGLDRHPERFRVLAASASLEAPRDLGFLEEFFGLSRDRFEVLGGELVLPVGTGRDLSAHAPALASLGTDPEPAQADEVLAATGAADALVNALRDGTRLMSRSDTDVEDLLFPAVAEDGRKSALQGLLGALRTTTLAGMPTLRGHLFFRNIPGVWACSDPQCSGVAPEAAEDRTVGRLYPRPASRCDSCEARVLELLYCQNCGDVFLGGYAPEKAVYESQGKQFDAGLLADLPDLDQLPDRAATGQSAANYVVYWPRTQDPVVDRLEWTATANKGTESAEFAFKRSAYNPRTGRLTNSRNHTGWSFHTDVPRSPRGRQRLCLESLPAAPTKCPACGDDWELLQIGRDRLPLSDQRRMRSPIRAMRTGFEKVNQVITTAMLSGLPEKKAVLFSDSRQDAAKLAAGLGLRHYQDLLRLLLAQEVTDQGDPAADLAAVSAYYKGEETGPEAKRLATEARSRLKPRAPETFAAWEKLQKPPTPGGLDDLEDEDPRPEEELYAELSRVPSLESHVAEIHERLAALGANPGGPKASLQRTRYRTGQPTSSWSSLFDWRSQRPREVSDRLLNDSQRDLREEMGESISAELLMGLFGSAGRDFESLGLGWLCTATDQAPLEADPASDTALVRASLRVLGHLRRFAGMRTGQDEPPKKLALFWAKAAERLAITPEDVRFRVERTWGEAVVKYVIQPAHTAIRHGTAQSWTCERCQRRHLHPGIGICTKCGQDLPKTPEPYDGAAEDYYAWMARERVGRFRLNCAELTGQTDRIEAQSRQARFQGVFLDDTEHDLPDGLDVLSVTTTMEAGVDIGPLSVVLMANMPPTRFNYQQRVGRAGRRNAPVAIALTVCRGRSHDEYYFQNPARITNDPTPRPYLSTEMPDIYQRVFAAEILRRAFAAAADNGDIGADPTRNVHGQFGLSTDWPDIRATVQRWIAGHGADVEAVAEALSLSTRGGRAAAEWRQWSETFLVAVVDEIAARSHGHRDLSQRLAEAGLLPMFGFPTSVRYLYTRKPQEAYPWPPADVVDRALPIAVSQFAPGAETVKDGSVHTAVGVVAYEPSGPAQVRPVADPLGPARLIGLCRACGHIEEDAIPSQATVSTQPVDFPCRACGAADGSYQAVELREPAGFYASGKRDFDGNFAWRARSLAPRTAANLETDAPQQPLPVPMAVHAGKGRRFAVNDNGGRLFEFHALKPTARIWNGAFVEQGAVDQFPYLKDDIAGLEPVTAAIGAVQVTDLFLLGPIRAELPGPGLRLNLASPAQTSGFPDDRSGRKAAWYSLAALLRSAAGALLQIQPNEIAAGIHGAVVPGKQARVFAFLSDTLDNGAGYCTRLADPEEFTALIAKAAEMATGFAAGSHGAECRGSCYQCLRDYSNMAYHTLLDWRLAADLLAVLNGDGLDATTLFARSGKLLRNWAEDPGHTDAEFVSDLGGAGPAVLFEDRLWVAAKHPFEAADARLEGARLAAVRAAAREETPHAPDVVFIDDFLLDKVPGKVTTLLGTFDLK

SEQ ID NO: 25034 - protein, 405 aa, Streptomyces aureofaciens
MPGFHSSSRDQIRILDLFSGGGGFAAGFRSFSRGNPGAAEFIPVAAVEFDRAAASTYAANFSSAHVHVGDIEGFDAWPLSGAVDVVVGGPPCQGFSQLGSGHAGDPRNRLWEDYLRFVTTIKPKVFVLENVDRFIKSDEFEEFLAATERGQPLGEYSLAFGVLNSADYGVPQSRRRTIVIGTHKDLTLVDLPRPSHTKSRRLLGKRADPALFSTSTGAGLKPWETVESVFHRSSRKKIQGTELPSRQAEVLPGIVVPGAYRTADLHVGRNPKPLSLARYAAIPPGGNRYDLRGKTALIDGRELALSTASWDNHNSGSADVMGRLRIDRPSVTIRTEFFKPEKGRYLHPFENRPITHYEAALIQGFPEDYQWYGTKLEIARQIGNAVPVGLGSAIAESIHNHLQLR

SEQ ID NO: 25035 - protein, 712 aa, Streptomyces aureofaciens
MLVRTWQGCRMGALYGQWQQILAAEYFGPDSAEQSIAFYVDDEVGQELAQRPDVTGSLPEAVREELDWARPEHLMWRLMERCRRWESRGRLGAPPSLPVLACSVLAATKMASSDGMRRSNYYGRWAQLFGERPGSPRAERLEGAFEEVVSMWQELDRWLEDAAGLYGASTISTDGFYRKIGYPLSQALIRASDREALTRFFSASGVLAGNPVGVPGRELLRRLRLWVAGRDRNLSPRLLEEVELATGLADNSVPLLAEILFRLASQWDGTLHEPGRERRRKAAPLRLVLAGRGERLEWTADVAPGLNTVQVGFPEGRSFLLKAVYGGVYSGLESVFPSDVQLRQGVHLTGDELVLDWSGREVILLRMHERLGEWVSTEYFEPGAQHLILAAPAATAEVRAMALGLQSRPAREVPAPVPGWKLFKGVRAFDGAAFGRTLARGGEHIHVLEPPVREQAELIGGLRILREYRAGGRLVGHYLRGGEPDLLLPTSTAEDGRVTVVLNDRTERLAADSRVPFPLRVLRLEEGEYTVGTPDAVRTFTVSGGISEGVPAGTGSLACVRTENAGPVMRNFEGQPDAVRGAAAPAVGPIAKRTMVPYSASEAYLLGVHGSIQEVRIPGRPDWIASRLAARLEDHAFEVPVPDGYVWLLVREQQRWSTAPLLPYAVLPPPTPPPDDYQWAWAVLNAADCISTPIWEAYVRAAREISGRGDRP

SEQ ID NO: 25036 - protein, 2093 aa, Vibrio splendidus ATCC 33789
MKDPIGAYSTLQEGIKRYITSAFGTNSTSFEDERKQLLDQDGVLFQVPYVEPIPSYLSGKRLIELGEPDLPTLSPDGTRAFKAIVKAGLFSGEFPLYSHQQNMLKRSLEGKHCVVVTGTGSGKTESFLLPAIANIVREATTTETRWQEPTNRRAAEWTSENPPKWNDSRKEIRGEKREAAVRALILYPMNALVEDQVSRLRQALDSEEVLDALDEHLDGNRIRFGRFNGSTPVAGHPVKPDGKSNSAKRSELKKELEKALEVYQAITAKVAQCKEKLDLASANGDTSLVEKAKAELARAQEEKSFIRRIAPDAAEMFHRWEMQATPPDILVTNTSMLSIMLMRHASQDIKSDRADADIFDATKKWLAQDRKNNVFQLIIDELHLHRSSSGTEVAYLLRLLLERLGLQPDSPQLRILASSASLDGEDDATFRYLGEFFGFSSEIAKERFHIESGELSVSVDSEHSYFDAGTAEACLAVANSSLEVEPQELKSLVDSLWSNAESTNKCIFSAFQKEGAIRARSLSTIAERWFSILETKEDRLKATRGLFMALGSDYAKRCKTGFPRLRFHWMAKNIDGLWATIATSPEDDKRRVGTLLPEKKLTFDNQRVLEVLYCECCGTQLLCGNRVSNPGFMPGMPPQRFELTPLETQIDGLPESTVETRTDAQNYRDVGVVWLCDQEGGSDASHPSLDWEHGTIETNDNDKFPGQPKDRRPATWRRAKISPKTGLVSFVSGALDGIDCYVFDLKADDKEQHQYSAMPQRCPSCGIDYSERYGRRTPIRSFVTGLARMSHLFSKHIMVGLPEGSSRKLVAFSDSREAAANLSVGVEEEQWSLLLRTFINHELNQRAENGILPVKKQLAELLELGNKEDIQQFQMDLMSRADLSESDMEELKVFYGSAQTVVENPIFASKEATESFNQAKAFKVGFVRVNDILAAPKEGTELTSIWKNFIDSGVNPGGVSVDKKKIGRDLDWTSVFDRDSGQLLPKLKRGAEDEGIDALSLSLRKNAWRALAGRLLYDLEEQGIGHLSIAPNIQSKPPVTMSPDIFFQACNSVIRILSEENRFDPNPWRRATEGWRLDQPMGDKREGTAKKRVYRYLKRVSERYRTSYEALLDSVSKSFIEAGHSVGMDSWAVIRLEKLWVRVVDEAENPWICSNCGRTHWQASAGVCSRCHEVLDDKPNGGQSALDIQRSHYYAFESMDKSNLFRIHAEELTGQTYDQAQRQRHFRDIFFDNEVIDDVSRRPVLKNVDSIDFLSVTTTMEVGVDIGSLQAVMQANMPPERFNYQQRVGRAGRKGQAFSVAFTFCRGQTHDRIHFEHPDEMTGGVPPQPGLSMGEEQQILARRLLAKEVLRRAFLSIGVSWIDTSHEPDTHGEMGTLSNATSNLDCVSEWIRTNQAEVEHLARVITQGSRISADVLFKFIVNKLSEKIKQVIDSEEYVGRTLAQRLAEAGILPMFGMPTSVRQLYFDLPSTSSSTADAKSLDRPSDQAIADFAPESVRTWDKRQLNPKYITGPLFSDLRGGGWTSSGLPVGAVFIHVRCPACRNLHVEHVDSSELRTYESPEGLWKPEWLTKAPEGVTCPNPSCRCKEAKPYVAVSPRAFATDMDVTKPALGAGEHRGRSGRTEIMSPRLTLKGYETKCNVKIKKESNAQVFRTNTNLGEGYGFDEVSEINEGWPRVKGDSIWKSNNESPDLRVALTSVKTTDIFAIRMEDDRGLKFFDEPKEVRLSRRKAAWYSAATILQRAIALELDVDSMDIEIASVHALHEPNGGELYLADAHPNGAGLVDTASENLSSILYGCLFGEGKASLMGKHIRKEVELSSEAGYAWRSPDLLLKGFRNRQVHGLLDWQLGIELIACMYDSDYRPGLDYEVQGKELPFGKENAWSSLADRLVGEWFANDLSPDAKRIQEGVISGWITDTTFNVVVHPLWNGHPSELNAVGEAHAIAKKHGCTEIRRIDSFNLSRRMIWVYSNLTDQDIFVVEDVLDDFDIEESGSTSSEVEEPLVTVTDFREVDQLAVGDVFLFSGQKWCKEPLNTLSQLKDNEVWLASKLDGNLSRVTASCKKGMPTPRLRTNNGFMSKQDAEKIKFIARIAE

SEQ ID NO: 25037 - protein, 528 aa, Vibrio splendidus ATCC 33789
MNHIELFAGCGGLSLGLDEAGFELVLANELSPMAAETFAYNFFGEDLEELGNQNRMPAHTFWLNSENNRLRPRLRENPFEFPAYGTEGFSDLSDDWQALNGNLIVGSIIELNRLLDAQPVLVEHLRNAFGRDGGLDLVSGGPPCQSFSLAGKREKNNDKNTLPWEFAKFVKHTRPKIALLENVTGILRPFKDDDGKQFHAWYEVAKVFASIGYVPLCLHINARQVGVAQNRPRFIMIAVEHAHLENLREFLDEASLALFDQPLAFYHQVQRVVVNQNADLPFGLLDYTDTTKSSGSQQLIGTFLHPLFKAESEVSVQEALDDLKIHNPAQPSIFIQKLNQTFSRLGKHPTGLNHDFRNNSPLVQRRFRLYQVLQQVDDRKVKSAVFSILKGEADTLPDDIWATLSGFEYLHENQELYAFASKREFEQYLLAHPTKKQTQKALIANNPAPAALSIPDDACHYDEHELRVLTVREMARIQSFPDNFVFRSKITTGGQMRKYEVPQYTQVGNAVPPILALRLGQCIAKLLD

SEQ ID NO: 25038 - protein, 1014 aa, Vibrio splendidus ATCC 33789
MILEIPDKADSLANMPSWLNRKPSGELFFEWNLRILISFFSKASENEEVFLRVDSDFFDQIGQDIGGDAGFINAVKQGPSSVKAQGGLADKATELCNQRLLKATGYEDPGELDSSYLSVRAPTYLPYLAALVRNFTRSNTKFYFNLKNELNLEEDFSSPDMAKLEILWEDLRTWTSTQGGKFGFFKKRTLGGYRHIGLPAAQSIVKQTDLNSLLLCFVHLQLKTGEELSDSRLQEVINYIGSLDNYFSAGFHEALHDREFRQPICEIIRYVFSDWDGSLPKKEREFSGSASYKDEFELGISLIVNNTQPPSFSPCWFIPPLQDEGNFLLQNGKHSWSGRFSGTNGVSCSREVAIEQKIWDLAGEIRSTPLNFELESSGADDTKPSKTSLQLPTSGLWVLTWSQDQLSGVPQLVPSDLPAHGPAYLLASPSQAGKLVEYLELQKPDAEFIHDYGVPANWKMLFIKDCSNLTSNQRHLPDGSGQPRPRPRVIRFTGGRTVQRGYKRMYLSYDLPSIELDAAANVRLVASDGVAIEEQFHELDKSYQEESLFHDIKFTRTFALRLLKAQSANYRIRAFDLKGRELASVQLKVAGVNGDLVEVKDNFSLDKFGKTQATLSGLVGVEVNLPSIGLPNSNGQANFVSVQELGNDTSFLIEDACLFRKFLDTLAQSGSLDFGTAKNVLRRQIQASTVELQPIFILLELQRLGHIELATTLKGNTARVHAIPPRFYNLPVDCSGHTVWGISGTLRLEHWESIAEAQSAWKIISVPSTSGMNNWRLVIKDNNNAQDIVNQLGLDVVDMAALTIADYSGDITEFHDNTFRNPIESIGGAEDQSHRFIASEGYFVKEPTGRIKTIGELWKLQDLDIRFDNVHVLVKDGQYAFVRDSSWGKWLAIHEFAGFVRELPGFDSELEIPINYQKQTGKVWIPARIGFPRILERALVVCGATAPSVVTLKKVNEDSLSNEMTLADSLTDVLLSSNFYSGMSDGKWLVYDHVPESVAKVVASKLGATLYLCK

SEQ ID NO: 25039 - protein, 1981 aa, Yersinia aldovae
MNNPLETFESIRDFYITYLETAFRIGSPAIQTYRRELLEKQGTLCADLFLEPIPKYQDHGLTISDLRDTSKGETWLPEFTALQRAAFVDLCLGGLLPRDPKDPTKGRFKLYTHQLEMLQRGVQSGMPGIVTSGTGSGKTESFLLPVLAQIAQEASKWPQGSGFKSWQPWWREPNTHPTFMRDLEAPALERPKAVRALILYPMNALVEDQLVRMRRALDSDEAHEVMDSHFGGNRIFFGRYTSATKVTGWLEHPRQHNDKKEKKRVLGKVSELREYMQFADKTHKEAVHQGNLDKDDNLQFNFPRLGGGEVLSRWEMQKMPPDILITNTSMLSTMLVREIDDPIFDQTQQWIERDPNAYFYLVLDELHLQRGTAGTEVSYLLKHLINRLGLDQPQHRHKLRILASSASLPVGGPEGKQSIDYLWGMFGQRGLPVNASAKDWGSCIVDGKPINLVEIPKFCGDLQAFCNAVEQLKSGRATGAWNDIARCLGCYRDGDSVEELAQHTVLLAARMLEKGCIDDKQSLRATAIDQLAISLFAEHPNAREGVRELIWLRTTADNWYSWFAHPFPDHILLPRFRAHAFLRALQGLYVAPLPLLPQALKDEINQQLFADLTVESGLRYGDRLYGDKRTRRVELLYCECCATLFLGGKPSAFSVISRHTELLPNDPDTEKLPEHAKSVMIEQRSAEEYALFMPTVDRFWPLGDEKLSDEDSFGKWKEASYDPFTATITQPISPVKPIPETDIAGWFYRVTPGDFTNPKRGQSSSQSPGSALPFQCPACGTSYIYGKGKLSPIRGFRVGFAKTTQLLASTLMAELQQSGDQERLVTFSDSRQDAAKAALDLESGHHDDVRREILIGSLKEIAAGKCSHKNLRMRLDEVNKRRKELDAMAELSLSDAQEKELEDLWDERQQIRETLLHPEADSISLDTILENSPKANKQLNRLLAKLVEAGIHPTDRTGITPVPDPSKYREDIQTFTWQQLFDKDHQDKWRWKTVLNYETDLDVARQEISRDLKELAGESVFSKTYFALEEAGWGYPCIPVSDGYSREKLAIFDALLRVLADAYRVDPSQYRNPDNPDTPWEEASAIPKLNRVYRFAISLCKRSGCSVLGLLDEFLKLLEKAGHQGGIIDIGKVHFRLVDSTDNYWRCGKCGRVHLHLGGGICTRCHDPLPEMPFDKAKALQEQNYLGKRISHSSGNLRMRSEELTGMTENPAARLRRFKGILIADDDDIFPTGLKNFDPDPALDRKARVIDVLSVTTTMEVGVDIGDLRAVFQANMPPQRFNYQQRVGRAGRRGQAFAFVLTACRSKSHDLFYFRHPEKITGDLPPPPFLTTKLEMICMRLVRKVWLVAAFKWLRVKIEGTGQAWPADVSRHKPDNHGEFFQIDWLQDNQHYWLPLIHQALAATIGKRDEFVHVCMPEDQAFYQTIVRSLTLENLIQDIGDALGDPAMTGKGLAEALAERGKFPMYGMPTRTRLLQTRAISRGKDEVQFASMDRDLDIAIQEFVPGKYLVQDKRRYLTAGYAGMLRQRYPNSTDFDLTTCELGESRMMTACPACGVWAPINQEVNICTACGAVMDDVEQYQCYVPYGFITTLEDKSVKEDGDQTLANASRVSVAEAYSFSAAPEPDVNVAIQLESQILLHRLNRGTYADEQWSGFNAIQGNLRVPFRKGGKYRPLTANHVWIDSGLLGNDLSLSKRFTPLSENRTSFYLAAPKVTDLLALMVVSTSANLQLQTPAFRAAALSAAFMIVNYASKELLDIDPEEIEILEPRVQLLKNGKLAPILQMADRLVNGSGLCDRLQQKGTSGTPIILEVMRAIVSNKNDFPLRDLLDDEHREKCLQACYYCLHRYGNQAYHGLLDWRLGLDVIQLLLDDNYDAGLNGDFSAPGIADWRNNALCLAKEAASLFDSKIRMVGHVPLIGIGPQRWVAVTHPFWNENAIFATNPEFERLFLEGQLEKKTVNTFDLSRRMGSVMTKLKNPESN

SEQ ID NO: 25040 - protein, 362 aa, Yersinia aldovae
MNNIFEREHDNIRVLSLFSGGGGMDFGIESAGGKVVFANDIVENACKTLDKYFPDSDIRLGDISNIQSFPCVDVVVGGYPCQSFSMAGNRKPDNDARSNLYKQFLRVLNIVRPKYFVAENVSGLQQLGAGSFLEQQLTAYQQAGYQVSYHLVNAKEYGVPQSRKRLFIIGVRKDLDQCFEFPLATHGKLSQKNSHLKPYVSHGDAICDLPLWPEGEFYERPHDPEGHFSWYFMSRNRKAKWDSPAYTVVANWRHVTLHPASPVMKLTWSNLDDGWKQRWDFSDEYEHLTVDDTRPKLEQARRLSWRECARIQTFRHDYEPEGDIDAKFTQIGNAVPPMLAEVLFSHLFSGAGLKNLSIKAGD

SEQ ID NO: 25041 - protein, 928 aa, Yersinia aldovae
MGESFPVTLDEWNTALVRAIFFDPSCIGSTLSRIDATGRIFDKLKGTRSKEEAKGSFLNAFGTSAEKIQNYFRDELRLDILAARNGVPPYFAILYLTLLAASANDDTYDEGDFRVRFSLLLGFDKNKKFIFSELPKMWERLERWSHNKKECAHLILPDPHRETLIGYSKRLSFPSYKDDLLLRRLLADKNQDSHSTFESISQIIHQKINSFSQTFINEFDQFRILLLKALSKQAYNSPFWGAVRDITRYKENQQVTANGRFCVQLEDATDMWNPEIYLLMDSKGAKELGTNRIYTLPQKTEIYSKGYCKSDVNTTLIHLSLLLQKQKKGLSQSRVGMALQAGCLPLFRDDSGFMNSDGHYFDDGPVCLVISSNYVRKVYAACNHINLRFHSLGLTPELNEWQLIVFESVSQQAFLTLATAIPKLAQRFFIQNWMPTRPHLAGGARFGQAVLLNPASTPFIRMEGASSGRFVISDSADNKLATGELTVSDDGLYISPEKLIAISGQTLCRYLLTLDQQESPLVYDVCVLDHAPDAAYRRLNEPNDWLIDGPMGTLVPFNDIANNVPASRSINKLKLTPMGGEWSLWQQNEYPPAECESIDLHSIPIALDWLVEALALRFQRRSTLPFDELNKHLIPVSIAVNIPVWRLRRMLFTTGWLSMTESRYAPYPLVTLAVRTISVSDEKAGVVARICGMMTKSERNQLQCALVDGEQVKRWSVLGHDLAAGCIELNLTGIERVETLIEQFGLQLVTKTDFSVSPLSGVILPITQIKNIPTLSENINVSTWQEGKNMWSEETTAIDPRSNALMRCQEKQRNRYFITTQNACWQTDSFAWGLVVQAIFSKKTLGYQSHNGDLSWSKNLIALPLPLTQWWLHFAGGCLSISDNGSISFLGGGSSMWGDIDCSDETEQLYIDRATVRRSRALKLRRAR

SEQ ID NO: 25042 - protein, 938 aa, Yersinia aldovae
MVKKQSVIKERLSQMYYFGIESHELANCLKECKQKLIMAGAKADNLPRTLTQKLHFLSKLQPKAQLIIQTWFSTNIQFSEHNDPNEILNELLLKEKSDDDVEHLKPLWRAILGFYVSQSCPEIIERFLNDEEMNKLNNGDTEKYNDNLFAQSALNVTDEDIEQCLLIGQGQNIYPSDRILPMFIAALTDTLNGNQNSAILWKEKLAAHPLPMAKKLEGIIAEFESGHSQKIADSLAVLPAEFVTPESMDDNIDDITFVGIVTKSLPSGAFFVSPIALFIDNSLRDLSEENVKVLYPHHGETVGFMNHFSRNFIQGELGIWQATHQPSDKLAQYVLTRYQSRIYTIIRLPHQLSEPDAIREWLLTQYQPKNDSPVIFLLDDDVALRLPGDIADPKKYDFDSPLDSYRELACIELRSRKITIATQLPMLAEKYDCAPASTWIKRLIKLNYSSVDFPAFSKAQLQNLANFIESNESESDKYIRALAHLEQVAVSREFLDSMVQKLVNLPVVEAQINEQKKVILSDYEGEQEKLRLAITSLVDKKTQLEAEIDNQKKRLKAETERSKKVIRQQEAELDSRIRQTFENASQAGIETLAQTALLRALIADVTGPVSQLEPMCKLEPVTAMASSLALESFKSPIAVEITSKRRLLTIIEEQAAVTGLSETLLSGIIAAANVTPIIGLLGKYTKKVLSTVANILSSGVWGEVSIHGDLFSISDLMRSPVLVRSTENTFTMSLGDFLAHQQANGQATVVELRGFNRMPPETLLPELSDYLLSDEQASGFCWTDEHQKLRHLSINHPVLFVLTFVVGKSTFPLQGSASHKLPVFLAEKIWGDEQPADETTDVTVTYVTSIIWQLLYATLRKSSSHSHNELEILQILLKDFGFTEQKSEGIAKLVFEAGRSPSVNLVSDIEPLAPVLMNYAREITQGEVAAVLDCLFQA

SEQ ID NO: 25043 - protein, 1981 aa, Yersinia intermedia
MNNPLETFESIRDFYITYLETAFRIGSPAIQTYRRELLEKQGTLCADLFLEPIPKYQDHGLTISDLRDTSKGETWLPEFTALQRAAFVDLCLGGLLPRDPKDPTKGRFKLYTHQLEMLQRGVQSGMPGIVTSGTGSGKTESFLLPVLAQIAQEASKWPQGSGFKSWQPWWREPNTHPTFMRDLEAPALERPKAVRALILYPMNALVEDQLVRMRRALDSDEAHEVMDSHFGGNRIFFGRYTSATKVTGWLEHPRQHNDKKEKKRVLGKVSELREYMQFADKTHKEAVHQGNLDKDDNLQFNFPRLGGGEVLSRWEMQKMPPDILITNTSMLSTMLVREIDDPIFDQTQQWIERDPNAYFYLVLDELHLQRGTAGTEVSYLLKHLINRLGLDQPQHRHKLRILASSASLPVGGPEGKQSIDYLWGMFGQRGLPVNASAKDWGSCIVDGKPINLVEIPKFCGDLQAFCNAVEQLKSGRATGAWNDIARCLGCYRDGDSVEELAQHTVLLAARMLEKGCIDDKQSLRATAIDQLAISLFAEHPNAREGVRELIWLRTTADNWYSWFAHPFPDHILLPRFRAHAFLRALQGLYVAPLPLLPQALKDEINQQLFADLTVESGLRYGDRLYGDKRTRRVELLYCECCATLFLGGKPSAFSVISRHTELLPNDPDTEKLPEHAKSVMIEQRSAEEYALFMPTVDRFWPLGDEKLSDEDSFGKWKEASYDPFTATITQPISPVKPIPETDIAGWFYRVTPGDFTNPKRGQSSSQSPGSALPFQCPACGTSYIYGKGKLSPIRGFRVGFAKTTQLLASTLMAELQQSGDQERLVTFSDSRQDAAKAALDLESGHHDDVRREILIGSLKEIAAGKCSHKNLRMRLDEVNKRRKELDAMAELSLSDAQEKELEDLWDERQQIRETLLHPEADSISLDTILENSPKANKQLNRLLAKLVEAGIHPTDRTGITPVPDPSKYREDIQTFTWQQLFDKDHQDKWRWKTVLNYETDLDVARQEISRDLKELAGESVFSKTYFALEEAGWGYPCIPVSDGYSREKLAIFDALLRVLADAYRVDPSQYRNPDNPDTPWEEASAIPKLNRVYRFAISLCKRSGCSVLGLLDEFLKLLEKAGHQGGIIDIGKVHFRLVDSTDNYWRCGKCGRVHLHLGGGICTRCHDPLPEMPFDKAKALQEQNYLGKRISHSSGNLRMRSEELTGMTENPAARLRRFKGILIADDDDIFPTGLKNFDPDPALDRKARVIDVLSVTTTMEVGVDIGDLRAVFQANMPPQRFNYQQRVGRAGRRGQAFAFVLTACRSKSHDLFYFRHPEKITGDLPPPPFLTTKLEMICMRLVRKVWLVAAFKWLRVKIEGTGQAWPADVSRHKPDNHGEFFQIDWLQDNQHYWLPLIHQALAATIGKRDEFVHVCMPEDQAFYQTIVRSLTLENLIQDIGDALGDPAMTGKGLAEALAERGKFPMYGMPTRTRLLQTRAISRGKDEVQFASMDRDLDIAIQEFVPGKYLVQDKRRYLTAGYAGMLRQRYPNSTDFDLTTCELGESRMMTACPACGVWAPINQEVNICTACGAVMDDVEQYQCYVPYGFITTLEDKSVKEDGDQTLANASRVSVAEAYSFSAAPEPDVNVAIQLESQILLHRLNRGTYADEQWSGFNAIQGNLRVPFRKGGKYRPLTANHVWIDSGLLGNDLSLSKRFTPLSENRTSFYLAAPKVTDLLALMVVSTSANLQLQTPAFRAAALSAAFMIVNYASKELLDIDPEEIEILEPRVQLLKNGKLAPILQMADRLVNGSGLCDRLQQKGTSGTPIILEVMRAIVSNKNDFPLRDLLDDEHREKCLQACYYCLHRYGNQAYHGLLDWRLGLDVIQLLLDDNYDAGLNGDFSAPGIADWRNNALCLAKEAASLFDSKIRMVGHVPLIGIGPQRWVAVTHPFWNENAIFATNPEFERLFLEGQLEKKTVNTFDLSRRMGSVMTKLKNLESN

SEQ ID NO: 25044 - protein, 362 aa, Yersinia intermedia; identical to SEQ ID NO: 25040

SEQ ID NO: 25045 - protein, 928 aa, Yersinia intermedia
MGESFPVTLDEWNTALVRAIFFDPSCIGSTLSRIDATGRIFDKLKGTRSKEEAKGSFLNAFGTSAEKIQNYFRDELRLDILAARNGVPPYFAILYLTLLAASANDDTYDEGDFRVRFSLLLGFDKDKKFIFSELPKMWERLERWSHNKKECAHLILPDPHRETLIGYSKRLSFPSYKDDLLLRRLLADKNQDSHSTFESISQIIHQKINSFSQTFINEFDQFRILLLKALSKQAYNSPFWGAVRDITRYKENQQVTANGRFCVQLEDATDIWNPEIYLLMDSKGAKELGTNRIYTLPQKTEIYSKGYCKSDVNTTLIHLSLLLQKQKKGLSQSRVGMALQAGCLPLFRDDSGFMNSDGHYFDDGPVCLVISSNYVRKVYAACNHINLRFHSLGLTPELNEWQLIVFESVSQQAFLTLATAIPKLAQRFFIQNWMPTRPHLAGGARFGQAVLLNPASTPFIRMEGASSGRFVISDSADNKLATGELTVSDDGLYISPEKLIAISGQTLCRYLLTLDQQESPLVYDVCVLDHAPDAAYRRLNEPNDWLIDGPMGTLVPFNDIANNVPASRSINKLKLTPMGGEWSLWQQNEYPPAECESIDLHSIPIALDWLVEALALRFQRRSTLPFDELNKHLIPVSIAVNIPVWRLRRMLFTTGWLSMTESRYAPYPLVTLAVRTISVSDEKAGVVARICGMMTKSERNQLQCALVDGEQVKRWSVLGHDLAAGCIELNLTGIERVETLIEQFGLQLVTKTDFSVSPLSGVILPITQIKNIPTLSENINVSTWQEGKNMWSEETTAIDPRSNALMRCQEKQRNRYFITTQNACWQTDSFAWGLVVQAIFSKKTLGYQSHNGDLSWSKNLIALPLPLTQWWLHFAGGCLSISDNGSISFLGGGSSMWGDIDCSDETEQLYIDRATVRRSRALKLRRAR

SEQ ID NO: 25046 - protein, 938 aa, Yersinia intermedia
MVKKQSVIKERLSQMYYFGIESHELANCLKECKQKLIMAGAKADNLPRTLTQKLHFLSKLQPKAQLIIQTWFSTNIQFSEHNDPNEILNELLLKEKSDDDVEHLKPLWRAILGFYVSHPCPEIIERFLNDEEMNQLNNGDTEKYNDNLFAQSALNVTDEDIEQCLLIGQGQNIYPSDRILPMFIAALTDTLNGNQNSAILWKEKLAAHPLPIAKKLEGIIAEFESGHSQKIADSLAVLPAEFVTPESMDDNIDDITFVGIVTKSLPSGAFFVSPIALFIDNSLRDLSEENVKVLYPHHGETVGFMNHFSRNFIQGELGIWQATHQPSDKLAQYVLTRYQSRIYTIIRLPHQLSEPDAIREWLLTQYQPKNDSPVIFLLDDDVALRLPGDIADPKKYDFDSPLDSYRELACIELRSRKITIATQLPMLAEKYDCAPASTWIKRLIKLNYSSVDFPAFSKAQLQNLANFIESNESESDKYIRALAHLEQVAVSREFLDSMVQKLVNLPVVEAQINEQKKVILSDYEGEQEKLRLAITSLVDKKTQLEAEIDNQKKRLKAETERSKKVIRQQEAELDSRIRQTFENASQAGIETLAQTALLRALIADVTGPVSQLEPMCKLEPVTAMASSLALESFKSPIAVEITSKRRLLTIIEEQAAVTGLSETLLSGIIAAANVTPIIGLLGKYTKKVLSTVANILSSGVWGEVSIHGDLFSISDLMRSPVLVRSTENTFTMSLGDFLAHQQANGQATVVELRGFNRMPPETLLPELSDYLLSDEQASGFCWTDEHQKLRHLSINHPVLFVLTFVVGKSTFPLQGSASHKLPVFLAEKIWGDEQPADETTDVTVTYVTSIIWQLLYATLRKSSSHSHNELEILQILLKDFGFTEQKSEGIAKLVFEAGRSPSVNLVSDIEPLAPVLMNYAREITQGEVAAVLDCLFQA

SEQ ID NO: 25047 - protein, 1982 aa, Yersinia pseudotuberculosis
MNNPLETFESIRDFYITYLETAFRIGSPAIQANRRELLEKQGTLCADLFLEPMPRYKDHDLIISDLRDALKGETWLPGFTTQQRAAFIDLCLGGLLPRDPKDATKGRFKLYTHQLEMLQRGVQPGMPGIVTSGTGSGKTESFLLPVLAQIAKEASKWPQSPSLKSWRPWWIEPNIQPTFMREREGRPKAVRALILYPMNALVEDQLVRMRRALDSDEAHEVMDSHFGGNRIFFGRYTSATKVTGWLDHPRQGDDQKEKKRVTGKVAELREYLQFAEKTHKEAVYQGNLDENDNLQFNFPRPDGGEVLSRWEMQKTPPDILITNTSMLSTMLVREIDDPIFDQTQQWIEHDPDAYFYLVLDELHLQRGTAGTEVSYLLKHLLNRLGLDQPQHRHKLRILASSASLPVSGPEGEQSINYLWGMFGKRGLPMNASAKDWKTCIVHGKPEALVEIPDFYGDLPAFCRAVKKLRSGGTTEVWNDIARGLGCYHKYDTLEELAQYTVQYSARMLEKGCADDKKSLRATAIDQLAISLFAEHPNARDGVSELIWLRTAADNWYSWFAHPFPDHIPLPRFRAHAFLRALEGLYVAPLPSPAQAAKDERNQWLFADLTVESGLRYGDRLYGDKQHSRRVELLYCECCATLFLGGQPSAFSATSNRTELLPNDPDTEKLPEHAKSVMIERRSAEEYVLFMPTVDRFWPLGNEKLSDDDSFGKWKEASYDPFTATITQPISPVKPLPATDIAGWFYRVPSGDFIPPKRDQSSSQSPGSSLPFQCPACGTSYKYGKGKQSPIRGFRVGFAKTTQLLASTLMAELQQSGDQERLVTFSDSRQDAAKAALDLESGHHDDIRREILIGSLKELAADKCSHEKLRIRLDEVTKRKKELDALDDLNKLSDIQTKELDDLWKERKQIRETLLLPQADSISLEAILENSPKAGKPLNRLLAKLVDAGIHPTDRTGITPVPDPSKHSEDIKTFTWQQLFDKGHQDKWCWKAFPYYETDLDIARQEISRDLKELAGESVFSKTYFALEEAGWGYPCIPISENYSREKLTIFDALLRVLADAYRVEPSQYRNPDNPDIPWGTTSAIPKRNRVYCFANSLCQQSGGSVLGLLDEFLLLLEKAGHQGGIIDIGKVHFRLVDPADNFWRCDKCGRVHLHPGAKLCTRCHAPLPEIPSGEAGTLQKQNYLGKRISHSSGVRRMRSEELTGMTGNPAARLRRFKGILIADDDDILPTGLKNFEPDPDLDRLARVIDVLSVTTTMEVGVDIGDLRAVFQANMPPQRFNYQQRVGRAGRRGQAFAFVLTACRSKSHDLFYFRHPEKITGDLPPPPFLTTKLEMICQRLVRKIWLVAAFKWLRQKTVDSRQPWPVDEHRQKPDNHGEFFQVDWLKDQQADWLPCIRQALTATISDRDEFAHVCMPQDQTFYHTIVQLLTPDKLIQDICAALNDGAMAGKGLAEALAERGQLPMYGMPTRTRLLQTRAIATGGDDIQFASMDRDLDIAIQEFAPGKYLIQDKRRYLTAGYAGMLRQRYPKSIEFDSNVNEPGEGRMMKACPVCHVWTPINHQVHECTACGAVMDDIEQYQCYVPYGFITSLEDKSVKEDIDQTLTNASRVSVAEAYSFSAIQESDTNVAIQLQSQICLHRLNRGTYADERWSGFNAVQGSLRVPFRKGGTYQPLMANRVWVDSQLLEADLLLKRRFTPWQESKTSFYLAAPKVTDLLALMVVNTPVGLQLQTQAFRAAALSAAFIIVNYASKELLDIDPEEIEILEPRVQRLEDGRLAPILQMADRLVNGSGLCERLQQKGISGTPIILEVMRAIVSNKNDFPLKELLDKDHREKCFQGCYYCLHRYGNQAYHGLLDWRLGLDVIQLLLDENYDAGLNGDFSAPGIADWRENALRLAKEAASLFNSEIRMVGHIPLIGVGPQRWVAVTHPFWSVDGVFTANSELERLFLEWQLEKETVSTFDLSRRMGAVMTKLRNPDSNQAN

SEQ ID NO: 25048 - protein, 376 aa, Yersinia pseudotuberculosis
MEQLFKQDDNTRYDYMNNIFEREHDNIQVLSLFSGGGGMDFGIESAGGKVVFANDIVDNACKTLDKYFPDSDIRLGDISNIQNFPRVDAVVGGYPCQSFSMAGNRKPDSDARTNLYKQFLRVLNIVRPKYFVAENVSGLQQLGAGSFLEQQLTAYQQAGYQVSYHLVNAKEYGVPQSRKRLFIIGVRNDLGQCFEFPSATHGKLSHKNPHLKPYASHGDAIRNLPLWPEGEFYERPHDPEGHFSWYFMSRNRKAKWDSPAYTVVANWRHVTLHPASPVMKLTWSNLQDGWKQRWDFSDEYEHLNVDDTRPKLDQARRLSWRECARIQTFHHDYEPVGDIDAKFTQIGNAVPPMLAEVLFNHLFSGAGLINLSTKNR

SEQ ID NO: 25049 - protein, 927 aa, Yersinia pseudotuberculosis
MGECFPVSLDEWNAALVKAIFFDPSCVYLTLSRIDATGRIFEQLKGSRSKDEAKISFLDSFGKSSNEIQNHFKDVLRTEILTIRDGIPPNFSILYLTLLAASADDNTHDEGDFRVRFSLLLGFDKDKKFIFTELPKMWKRLAKWSHNKKGCSRLILPDPQRETLIGYSKRLSFPCYKDDSLLRSLLASNNFDSYSTFELVSQAIHKRINSFSKIFINEFIHFRELLLKAETQQAYNSPFWGAIRDITRNDESQQIASNGRFCIQLDSADTWNPEIYLLMDQKGAEILAPHEIYTLPQQTDIYTKGYYKSSANRTLIDLSSLLQKQKKGLSKSRVGMALRARCLSLFKDDSGYMSSDGHFFDNGPVCLAVDSDYVKCINVACERINLKFRTLGINSEFDEWQFLVFDAVSRQALTILAQALPKSAQQFLIQNWMPARPHLIGGARFGQAILLNPASTPFIRMEGARSGRYVISDCAGRELSVGELTFSDEGLYISPEKLINIFGQAFCRYLLTLDQRENPIVYEIHVLDHAPYADYRRLNELSNWLVDGALGTLVSLDDIAHNVSTSIPVHKKKYTPLGGKWSLWQQNEYPLEECERIDLHSIPVELEWLAEALALRFQKRSTLPFEELKKHLISVSIAVGIPEWRLRRMLFASGWLCITENRYAPYPLIILTSRTISISGDGGVTVARISGMMTKSERNRLQHLLEEGEQAKQLSVLGHDITTGCIELSLLSIERVEWLAEQFGWRLITRADFPVSPLSGVILPITEIENIPTLPVNITVSTWLGEKNKWSEESTLIAPNSNALMRCQEKKRNRYFITTQNSVWQTDSFAWGLMVQTIFSKKILGTINHRGDLCWSKNLVTLPLPLTQWWLHFAGGCLSIGDDGHVSFVGGGSSIWADIDLSDKTTEVFVDRATVRRSRALMLRRGR

SEQ ID NO: 25050 - protein, 929 aa, Yersinia pseudotuberculosis
MVKKQHVIKERMNQMFCFGLEPHELINCLKECKQKLIIAGAKADNLPRTLPQKLRFLNTLQPKARLVIHAWFSTNLLFPESDEPEKILNELLVKERTDNDEIESSKPLWRAILGFYVSQSCPEIIERFLNDESMVPPHDDIEECNESLSEHLSINVTDDDIEQCLLISRGNAVLPSDRVLPMFVAGLVDTFNGEQEAASIWKEKLSNHALPMVQKLENIIKEFEITRGPKEADSVEVLPAEFIATEDMNDYVVDSMAFVGVVTKLLPNEAFFVSPVGLLIHDKLWALSEEQAKILYPHRGETVGFINNYTKNFTQGELGIWHAEHRPSDKPAQYVLTSYQSRVYPVIRLPHLSSEPDSVREWLLTQYQPQDESPAIFLLDDGVALRLPSDLPDPKKYDFDVPLDSYRELTCIKLHSRQITIVTQLPVASEKYDCAPASTWIKRLIKLEYSSTNFPVFNKKNLQNLTHFIAEHEPETDGYVRAIAHLEQVSVSRGLLGNMIQQLLTLPEVEAQINVEKKAIITGYKCEQEQLRQAIASLAEKKVQLEAEIDKQKKHLKTETEKSKKALRQQEVELDSRIRQTFENASQAGIETLAQAALLRALIADVAVPVSQPEPTTKPEPTIALPLSSPIANKLINKRQLLTVIEKQAVATGLSETLLSGLVAAANVTPIIGLLGKHTKKALYTIANILSGGVLGEVSIHGDLFSISDLMKSPVLVRSTENTCTMTLGDFLMHQQDNGLSTVVELRGFNRMPPETLLPELSDCLLSDEQASGFCWVDQHQTLRHLSISQPILFVLTFAVGKSTFPLQGPAVHRLPVFLAENLWGDEQSADSSITITPTHVTPALWQSFYQEANPSANHDFNEQQTLRAVLQAFGFSESKSRAIAALAFTAGRSTSEAEAFGSELLARTLMDEIDHGEAATILDCLFQR

SEQ ID NO: 25051 - protein, 1981 aa, Yersinia pseudotuberculosis
MNNPLETFESIRDFYITYLETAFRIGSPAIQTYRRELLEKQGTLCADLFLEPIPKYQDHGLTISDLRDTSKGETWLPEFTALQRAAFVDLCLGGLLPRDPKDPTKGRFKLYTHQLEMLQRGVQSGMPGIVTSGTGSGKTESFLLPVLAQIAQEASKWPQGSGFKSWQPWWREPNTHPTFMRDLEAPALERPKAVRALILYPMNALVEDQLVRMRRALDSDEAHEVMDSHFGGNRIFFGRYTSATKVTGWLKHPRQHNDKKEKKRVLGKVSELREYMQFADKTHKEAVHQGNLDKDDNLQFNFPRLGGGEVLSRWEMQKMPPDILITNTSMLSTMLVREIDDPIFDQTQQWIERDPNAYFYLVLDELHLQRGTAGTEVSYLLKHLINRLGLDQPQHRHKLRILASSASLPVGGPEGKQSIDYLWGMFGQRGLPVNASAKDWGSCIVDGKPINLVEIPKFCGDLQAFCNAVEQLKSGRATGAWNDIARCLGCYRDGDSVEELAQHTVLLAARMLEKGCIDDKQSLRATAIDQLAISLFAEHPNAREGVRELIWLRTTADNWYSWFAHPFPDHILLPRFRAHAFLRALQGLYVAPLPLLPQALKDEINQQLFADLTVESGLRYGDRLYGDKRTRRVELLYCECCATLFLGGKPSAFSMISRHTELLPNDPDTEKLPEHAKSVMIEQRSAEEYALFMPTVDRFWPLGDEKLSDEDSFGKWKEASYDPFTATITQPISPVKPIPETDIAGWFYRVTPGDFTNPKRGQSSSQSPGSALPFQCPACGTSYIYGKGKLSPIRGFRVGFAKTTQLLASTLMAELQQSGDQERLVTFSDSRQDAAKAALDLESGHHDDVRREILIGSLKEIAAGKCSHRNLRMRLDEVNKRRKELDAMAELSLSDAQEKELEDLWDERQQIRETLLHPEADSISLDTILENSPKANKQLNRLLAKLVEAGIHPTDRTGITPVPDPSKHREDIQTFTWQQLFDKDHQDKWRWKTVLNYETDLDVARQEISRDLKELAGESVFSKTYFALEEAGWGYPCIPVSDGYSREKLATFDALLRVLADAYRVDPSQYRNPDNPDTPWEEASAIPKLNRVYRFAISLCKRSGCSVLGLLDEFLKLLEKAGHQGGIIDIGKVHFRLVDSTDNYWRCGKCGRVHLHLGGGICTRCHDPLPEMQFDKAKALQEQNYLGKRISHSSGNLRMRSEELTGMTENPAARLRRFKGILIADDDDIFPTGLKNFDPDPALDRKARVIDVLSVTTTMEVGVDIGDLRAVFQANMPPQRFNYQQRVGRAGRRGQAFAFVLTACRSKSHDLFYFRHPEKITGDLPPPPFLTTKLEMICMRLVRKVWLVAAFKWLRVKIEGTGQAWPADVSRHKPDNHGEFFQIDWLQDNQYYWLPLIHQALAATIGKRDEFVHVCMPEDQAFYQTIVRSLTLENLIQDIGDALGDPAMTGKGLAEALAERGKFPMYGMPTRTRLLQTRAISRGKDEVQFASMDRDLDIAIQEFVPGKYLVQDKRRYLTAGYAGMLRQRYPNSTDFDLTTRELGESRMMTACPACGVWAPINQEVNICTACGAVMDDVEQYQCYVPYGFITTLEDKSVKEDGDQTLANASRVSVAEAYSFSAAPEPDVNVAIQLESQILLHRLNRGTYADEQWSGFNAIQGNLRVPFRKGGKYRPLTANHVWIDSGLLGNDLSLRKRFTPLSENRTSFYLAAPKVTDLLALMVVSTPANLQLQTPAFRAAALSAAFMIVNYASKELLDIDPEEIEILEPRVQLLKNGKLAPILQMADRLVNGSGLCDRLQQKGTSGTPIILEVMRAIVSNKNDFPLRDLLDDEHREKCLQACYYCLHRYGNQAYHGLLDWRLGLDVIQLLLDDNYDAGLNGDFSAPGIADWRNNALCLAKEAASLFDSKIRMVGHVPLIGIGPQRWVAVTHPFWNENAIFATNPEFKRLFLEGQLEKKTVNTFDLSRRMGSVMTKLKNPESN

SEQ ID NO: 25052 - protein, 362 aa, Yersinia pseudotuberculosis
MSNIFEREHDNIRVLSLFSGGGGMDFGIESAGGKVVFANDIVENACKTLDKYFPDSDIRFGDISNIQSFPCVDVVVGGYPCQSFSMAGNRKPDSDARSNLYKQFLRVLNIVRPKYFVAENVSGLQQLGAGSFLEQQLTAYQQAGYQVSYHLVNAKEYGVPQSRKRLFIIGVRKDLDQYFEFPLATHGKLSQKNPHLKPYASHGDAICDLPLWPEGEFYERPHDPEGHFSWYFMSRNRKAKWDSPAYTVVANWRHVTLHPASPVMKLTWSNLDDGWKQRWDFSDEYEHLTVDNTRPKLEQARRLSWRECALIQTFRHDYEPVGDIDAKFTQIGNAVPPMLAEVLFSHLFSGAGLKNLSIKAGN

SEQ ID NO: 25053 - protein, 928 aa, Yersinia pseudotuberculosis
MEESFPVTLDEWNTALVRAIFFDPSCIGSTLSRIDATGRIFDKLKGTRSKEEAKGSFLNAFGTSAEKIQNYFRDELRLDILAARNGVPPHFAILYLTLLAASADDYTYGEGDFRVRFSLLLGFDKDKKFIFSELPKMWERLERWSHNKKECAHLILPAPHHETLIGYSKRLSFPSYKDDLLLRRLLADKNLDSHSTFESISQIIHQKINSFSQTFINEFDQFRRLLLKALSKQAYNSPFWGAVRDITRHKENQQVTANGRFCIQLEDATDMWNPEIYLLMDSKGAKELGTNRIYTLPQKTENYSKGYCKSDVNNTLIHLSLLLQKHKKGLSQSRVGMALQAGCLPLFRDDSGFMNSDGHYFDDGPVCLVISSNYVRKVNAVCNHIKLRFHSLGLTPELNEWQLIVFESVSQQALLTLATAMPKLAQRFFIQNWVPTRPHLAGGARFGQAVLLNPASTPFIRMEGASSGRFVISDSADNKLATGELTVSDDGLYISPEKLIAISGQTLCRYLLTLDQQESPLVYDVCVLDHAPDAAYRRLNEPNDWLIDGPMGTLVPFNDIANNVPASRSINKLKLTPMGGEWSLWQQNDYPPAECESIDLHSIPIALDWLVEALALRFQRRSTLPFDELNKHLIPVSIAVNIPVWRLRRMLFTTGWLSMTESRYAPYPLVTLAVRTISVSDEKAGVVARICGMMTKSERNQLQCALVDGEQVKRWSVLGHDLAAGCIELNLTGIERVETLIEQFGLQLVTKTDFSVSPLSGVILPITQIKNIPTLSENINVSTWQEGKNMWSEETTALDPCSNALMRCQEKQRNRYFITTQNACWQTDSFAWGLVVHAILSKKTLGYQSHNGDLSWSKNLIALPLPLTQWWLHFAGGCLSISDNGSISFLGGGSSMWGDIDCSNETEQLYIDRATVRRSRALKLRRAR

SEQ ID NO: 25054 - protein, 938 aa, Yersinia pseudotuberculosis
MVKKQSVIKERLSQMYYFGIEPHELANCLKECKQKLIMAGAKADNLPRTLTKKLQFLSKLQPKAQLIIQTWFSTNIQFSEHNDPNEILNELLLKEKSDDDVEHLKPLWRAILGFYVSQSCPEIIERFLNDEEMNQLNNGDIDKYNDNLFAQSALNVTDEDIEQCLLIGQGQNIYPSDRILPIFIAGLTDTLNGNQNSAILWKEKLATHPLPMAKKLEGIIAEFESGHSQKIADSLAVLPAEFVTPERMDDNIDDITFVGIVTKSLPSGAFFVSPIALFIDNSLRDLSEENAKFLYPHHGETVGFMNHFSRNFIQGELGIWQATHQPSDKVAQYVLTRYQSRIYTIIRLPHQLSEPDAIREWLLTQYQPKNDSPVIFLLDDGVALRLPGDIADPKKYDFDSPLDSYRELACIELRSRKITIATQLPMLAEKYDCAPASTWIKRLIKLNYSSVDFPAFSKAQLQNLAYFIESNKSESDKYIRALAHLEQVAVAREFLDSMVQKLVNLPVVEAQINEQKKVILSDYEGEQEKLRLAIASLVDKKTQLEAEIDNQKKRLKAETERSKKVIRQQEAELDSRIRQTFENASQAGIETLAQTALLRALIADVTGPVSQLEPMCKLEPVTAMVSSLALESFKSPIAVEITSKRRLLTIIEEQAAVTGLSETLLSGIIAAANVTPIIGLLGKYTKKVLSTVANILSSGVWGEVSIHGDLFSISDLMRSPVLVRSTENTFTMSLGDFLVHQQANGQATVVELRGFNRMPPETLLPELSDYLLNNEQASGFCWTDEHQKLRHLSINHPVLFVLTFVVGKSTFPLQGSASHKLPVFLAEKIWGDEQPADETTDVTVTYVTSIIWQLLYATLRKSSSHSHNELEILQTLLKDFGFTEQKSEGIAKLAFEAGRSPSVNLVSDIEPLAPVLMNYAREITQGEVAAVLDCLFQA

SEQ ID NO: 25055 - protein, 1982 aa, Yersinia pseudotuberculosis
MNNPLETFESIRDFYITYLETAFRIGSPAIQANRRELLEKQGTLCADLFLEPMPRYKDHDLIISDLRDALKGETWLPGFTTQQRAAFIDLCLGGLLPRDPKDATKGRFKLYTHQLEMLQRGVQPGMPGIVTSGTGSGKTESFLLPVLAQIAKEASKWPQSPSLKSWRPWWIEPNIQPTFMREREGRPKAVRALILYPMNALVEDQLVRMRRALDSDEAHEVMDSHFGGNRIFFGRYTSATKVTGWLDHPRQGDDQKEKKRVTGKVAELREYLQFAEKTHKEAVYQGNLDENDNLQFNFPRPDGGEVLSRWEMQKTPPDILITNTSMLSTMLVREIDDPIFDQTQQWIEHDPDAYFYLVLDELHLQRGTAGTEVSYLLKHLLNRLGLDQPQHRHKLRILASSASLPVSGPEGEQSINYLWGMFGKRGLPMNASAKDWKTCIVHGKPEALVEIPDFYGDLPAFCRAVKKLRSGGTTEVWNDIARGLGCYHKYDTLEELAQYTVQYSARMLEKGCADDKKSLRATAIDQLAISLFAEHPNARDGVSELIWLRTAADNWYSWFAHPFPDHIPLPRFRAHAFLRALEGLYVAPLPSPAQAAKDERNQWLFADLTVESGLRYGDRLYGDKQHSRRVELLYCECCATLFLGGQPSAFSATSNRTELLPNDPDTEKLPEHAKSVMIERRSAEEYVLFMPTVDRFWPLGNEKLSDDDSFGKWKEASYDPFTATITQPISPVKPLPATDIAGWFYRVPSGDFIPPKRDQSSSQSPGSSLPFQCPACGTSYKYGKGKQSPIRGFRVGFAKTTQLLASTLMAELQQSGDQERLVTFSDSRQDAAKAALDLESGHHDDIRREILIGSLKELAADKCSHEKLRIRLDEVTKRKKELDALDDLNKLSDIQTKELDDLWKERKQIRETLLLPQADSISLEAILENSPKAGKPLNRLLAKLVDAGIHPTDRTGITPVPDPSKHSEDIKTFTWQQLFDKGHQDKWCWKAFPYYETDLDIARQEISRDLKELAGESVFSKTYFALEEAGWGYPCIPISENYSREKLTIFDALLRVLADAYRVEPSQYRNPDNPDIPWGTTSAIPKRNRVYCFANSLCQQSGGSVLGLLDEFLLLLEKAGHQGGIIDIGKVHFRLVDPADNFWRCDKCGRVHLHPGAKLCTRCHAPLPEIPSGEAGTLQKQNYLGKRISHSSGVRRMRSEELTGMTGNPAARLRRFKGILIADDDDILPTGLKNFEPDPDLDRLARVIDVLSVTTTMEVGVDIGDLRAVFQANMPPQRFNYQQRVGRAGRRGQAFAFVLTACRSKSHDLFYFRHPEKITGDLPPPPFLTTKLEMICQRLVRKIWLVAAFKWLRQKTVDSRQPWPVDEHRQKPDNHGEFFQVDWLKDQQADWLPRIRQALTATISDRDEFAHVCMPQDQTFYHTIVQLLTPDKLIQDICAALNDGAMAGKGLAEALAERGQLPMYGMPTRTRLLQTRAIATGGDDIQFASMDRDLDIAIQEFAPGKYLIQDKRRYLTAGYAGMLRQRYPKSIEFDSNVNEPGEGRMMKACPVCHVWTPINHQVHECTACGAVMDDIEQYQCYVPYGFITSLEDKSVKEDIDQTLTNASRVSVAEAYSFSAIQESDTNVAIQLQSQICLHRLNRGTYADERWSGFNAVQGSLRVPFRKGGTYQPLMANRVWVDSQLLEADLLLKRRFTPWQESKTSFYLAAPKVTDLLALMVVNTPVGLQLQTQAFRAAALSAAFIIVNYASKELLDIDPEEIEILEPRVQRLEDGRLAPILQMADRLVNGSGLCERLQQKGISGTPIILEVMRAIVSNKNDFPLKELLDKDHREKCFQGCYYCLHRYGNQAYHGLLDWRLGLDVIQLLLDENYDAGLNGDFSAPGIADWRENALRLAKEAASLFNSEIRMVGHIPLIGVGPQRWVAVTHPFWSVDGVFTANSELERLFLEWQLEKETVSTFDLSRRMGAVMTKLRNPDSNQAN

SEQ ID NO: 25056 - protein, 376 aa, Yersinia pseudotuberculosis; identical to SEQ ID NO: 25048

SEQ ID NO: 25057 - protein, 927 aa, Yersinia pseudotuberculosis
MGECFPVSLDEWNAALVKAIFFDPSCVYLTLSRIDATGRIFEQLKGSRSKDEAKISFLDSFGKNSNEIQNHFKDVLRTEILTIRDGIPPNFSILYLTLLAASADDNTHDEGDFRVRFSLLLGFDKDKKFIFTELPKMWKRLAKWSHNKKGCSRLILPDPQRETLIGYSKRLSFPCYKDDSLLRSLLASNNFDSYSTFELVSQAIHKRINSFSKIFINEFIHFRELLLKAATQQAYNSPFWGAIRDITRNDESQQIASNGRFCIQLDSADTWNPEIYLLMDQKGAEILAPHEIYTLPQQTDIYTKGYYKSSANRTLIDLSSLLQKQKKGLSKSRVGMALRARCLSLFKDDSGYMSSDGHFFDNGPVCLAVDSDYVKCINVACERINLKFRTLGINSEFDEWQFLVFDAVSRQALTILAQALPKSAQQFLIQNWMPARPHLIGGARFGQAILLNPASTPFIRMEGARSGRYVISDCAGRELSVGELTFSDEGLYISPEKLINIFGQAFCRYLLTLDQRENPIVYEIHVLDHAPYADYRRLNELSNWLVDGALGTLVSLDDIAHNVSTSIPVHKKKYTPLGGKWSLWQQNEYPLEECERIDLHSIPVELEWLAEALALRFQKRSTLPFEELKKHLISVSIAVGIPEWRLRRMLFASGWLCITENRYAPYPLIILTSRTISISGDGGVTVARISGMMTKSERNRLQHLLEEGEQAKQLSVLGHDITTGCIELSLLSIERVEWLAEQFGWRLITRADFPVSPLSGVILPITEIENIPTLPVNITVSTWLGEKNKWSEESTLIDPNSNALMRCQEKKRNRYFITTQNSVWQTDSFAWGLMVQTIFSKKILGTINHRGDLCWSKNLVTLPLPLTQWWLHFAGGCLSIGDDGHVSFVGGGSSIWADIDLSDKTTEVFVDRATVRRSRALMLRRGR

SEQ ID NO: 25058 - protein, 929 aa, Yersinia pseudotuberculosis; identical to SEQ ID NO: 25050

SEQ ID NO: 25059 - protein, 1986 aa, Yersinia rohdei
MNNPLETFESIRDFYIAYLETAFRIGAPAIQKYRRELLEKQGTLCADLFLEPMPRYKDYGLTISDLLDAPKGETWLPGFTIPQRAAFIDLCLGGLLPRDPMDTIKGRFKLYTHQLEMLKRGVQPGMPGIVTSGTGSGKTESFLLPVFAQIAKEASQWSQSSELKSWQPWWSEPNAQPTFVRDREASTSGRPKAVRALILYPMNALVEDQLVRMRRALDSDEAHKVMDSHFGGNRIFFGRYTSATKVTGWLDHPRLRNDPKEKKRVAVKVTELRKYMQFADKTHKEAVYQGKRDEDDNLQFNFPRPDGAEVLSRWEMQKTPPDILITNTSMLSTMLVREIDDPIFDQTQKWIEHDPNAYFYLVLDELHLQRGTAGTEVSYLLKHLINRLGLDQPQHRHKLRILASSASLPVSGQEGNQSIDYLWGMFGQRGLTMNASAKDWKACIVDGKPEALVDISDYCCDLPAFCHSVEQLKSTEASIIWRDIARSLGCYRDEVTLEELAQHTVLLAARMLEKGCTDNKKSLRATAINSLATGLFGEHLDARRGVSALIWIRTTVDRWQQWFEHPFPAHIILPRFRAHAFLRALEGLYVAPLPSPPKANKDEINQSLFADLTVESGLRYGDRLYEDKQRSRRVELLYCECCATLFLGGKPSAFSVTSHRTELLPNDPDTEKLPEHAKSVMIERRSAEEYVLFMPTVDRFWPLGSEKLTDDDSFGKWREASYDPFTATITQPISPVKPLPETDIAGWFYSVPSGNFIPPKREQSSSKSPGSSLPFQCPACGTSYKYGKGKQSPIRGFRVGFAKTTQLLASTLMAELQKSGDQERLVTFSDSRQDAAKAALDLESGHHDDIRREILIGSLKELVADKCSHEKLLIRLDEVTKRKKALDIIDDLNKLSDEQEKELNDLWKERKRIKETLLLPQADSVSLEAILENSPKAGKPLNRLLAKLVKAGIHPTDRTGITPVPDPSKHSENIKTFTWQQLFDKDHHNKWCWKAFPYYETDLDIARQEISRDLKELAGESVFSKTYFALEEAGWGYPCIPISENYSRKKLAIFDALLRVLADAYRVDPSQYRNPDNPDTPWKTASAIPKRNRVYSFANSICHQSGGSVLDLLDEFLLLLEKTGHQGGIIDIGKVHFHLVEPTSSFWRCSKCGRVHLHLGAKICTRCHALLPEIQYGEAGVLQKQNYLGKRILYSSGSHRMRSEELTGMTENPAARLRRFKGILIADDDDILPTGLKNFEPDTELDRKARVIDVLSVTTTMEVGVDIGDLRAVFQANMPPQRFNYQQRVGRAGRRGQAFAFVLTACRSKSHDLFYFRHPEKITGDLPPPPFLTTKLEMICQRLVRKIWLVAAFKWLRQNTINSHQSWPVDEHRQKPDNHGEFFQVDWLKVNWVTWQPRIRQALIATIRNRDEFAHVCMPDEQSFYHRIVQLLTPDNLIQDIGAALNDDAMTGKGLAESLAERGQLPMYGMPTRTRLLQTRAIATGEDDIQFASMDRDLDIAIQEFAPGKYLVQDKRRYLTAGYAGMLKRRYPKSIEFDSNANELGESRMMTACPVCHVWAPINHEISECTACGAETEDAEQYQCYVPYGFITSLEDKSVKEDVDQTLTNASRVSIAEAYSFSAVSDFYANVAIQLESQICLHRLNRGTYVDERWSGFNAAQGNLRVPFRNGGTYQPLTANRVWVDSQLLEADLLLKRRFTPLQESKTSFYLAAPKVTDLLALMVVNTPAGLQLQTQAFRAAALSAAFIIVNYASKELLDIDPEEIEILEPRVQRLEDGRLAPILQMADRLVNGSGLCERLQQIGTSGTPIILEIMKAIVSNKNDFPLKEFLDDSHREKCFQGCYYCLHRYGNQAYHGLLDWRLGLDVIQLLLDENYDAGLNGDFSAPGIADWRENAQRLAKEAASLFNSEIRMVGHIPLIGIGPQRWVAVTHPFWSSDGIFNANPELERLFLEWKLEKQTVSTFDLSRRMGAVMTKLKNPESNLGN

SEQ ID NO: 25060 - protein, 362 aa, Yersinia rohdei
MSNIFEREHENIRVLSLFSGGGGMDFGIESAGGKVVFANDIVENACKTLDKYFPDSDIRLGDISNIQSFPCVDVVVGGYPCQSFSMAGNRKPDSDARSNLYKQFLRVLNIVRPKYFVAENVSGLQQLGAGSFLEQQLTAYQQAGYQVSYHLVNAKEYGVPQSRKRLFIIGVRKDLDQYFEFPLATHGKLSQKNPHLKPYASHGDAICDLPLWPEGEFYERPHDPEGHFSWYFMSRNRKAKWDSPAYTVVANWRHVTLHPASPVMKLTWSNLDDGWKQRWDFSDEYEHLTVDDTRPKLEQARRLSWRECARIQTFRHDYEPVGDIDAKFTQIGNAVPPMLAEVLFSHLFSGAGLKNLSIKAGN

SEQ ID NO: 25061 - protein, 928 aa, Yersinia rohdei
MEESFPVTLDEWNTALVRAIFFDPSCIGSTLSRIDATGRIFDKLKGTRSKEEAKGSFLNAFGTSAEKIQNYFRDELRLDILAARNGVPPHFAILYLTLLAASADDDTYDEGDFRVRFSLLLGFDKDKKFIFSELPKMWERLERWSHNKKECAHLILPDPHRETLIGYSKRLSFPSYKDDLLLRRLLADKNLDSHSTFESISQIIHQKISSFSQTFINEFDQFRRLLLKALSKQAYNSPFWGAVRDITRHKENQQVTANGRFCIQLEDATDMWNPEIYLLMDSKGAKELGTNRIYTLPQKTENYSKGYCKSDVNNTLIHISLLLQKHKKGLSQSRVGMALQAGCLPLFRDDSGFMNSDGHYFDDGPVCLVISSNYVRKVYAVCNHIKLRFHSLGLTPELNEWQLIVFESVNQQALLTLATALPKLAQRFFIQNWMPIRPHLAGGARFGQAVLLNPASTPFIRMEGASSGRFVISDSADNKLATGELTVSDDGLYISSEKLVAISGQTLCRYLLTLDQQESPLVYDVCVLDHAPDAAYRRLNEPNNWLIDGPMGTLVPFNDIANNVPASRSINKLKLTPMGGEWSLWQQNEYPPAECESIDLHSIPIALDWLVEALALRFQRRSTLPFDELNKHLIPVSIAVNIPVWRLRRMLFTTGWLSMTESRYAPYPLVTLAIRTISVSDEKAGVVARICGMMTKSERNQLQCALVDGEQVKRWSVLGHDLAAGCIELNLTGIERVETLIEQFGLKLVTKTDFSVSPLSGVILPITQIKNIPTLPENINVSTWQEGKNMWSEETTAIDPSGNALMRCQEKQRNRYFITTQNACWQTDSFAWGLVVQAIFSKKTLGYQSHNGDLSWSKNLIALPLPLTQWWLHFAGGCLSISDNGSISFLGGGSSMWGDIDCSDETEQLYIDRATVRRSRALKLRRAR

SEQ ID NO: 25062 - protein, 938 aa, Yersinia rohdei
MVKKQSVIKERLSQMYCFAIEPHELANCLKECKQKLIMAGAKADNLPRTLTQKLHFLSKLQPKAQLIIQTWFSTNIQFSEHNDPNEILNELLLKEKSGDDVEHLKPLWRAILGFYVSQPCPEIIERFLNDEEMNQLNNGDTEKYNANLFAQSALNVTDEDIEQCLLIGQGQNISPSDRILPMFIAGLTDTLNGNQNSAILWKEKLATHPLPMAKKLEGIIAEFESGHGQKIADSLAVLPAEFVTPESMDDNIDNITFVGIVTKLLPSGAFFVTPIALFIDNGLRDLSEENAKFLYPHHGETVGFMNHFSRNFTQGELGIWQATHQPSDKLAQYVLTRYQSRIYPIIRLPHQLSEPDAIREWLLTQYQPKNDSPVIFLLDDGIALRLPGDIADPKKYDFDSPLDSYRELACIELCSRKITLATQLPTLTEKYDCAPASTWIKRLIKLNYSSIDFPAFSKAQLQNLAYFIESNESENDKYIRALAHLEQVVVSREFLDSMVQKLLNLPVVEAQINEQKKVILSGYENEQEKLRLVIASLVDKKTQLEAEVDNQKKRLKAETERSKKVIRQQEAELDSRIRQTFENASQAGIETLAQTALLRALTADVTGPVSQLEPMGKLEPDTVMAPSLALKPFKLPVAVEITNKRRLLTIIEEQAAVTGLSETLLSSIIAAANVTPIIGLLGKYTKKVLSTVANILSSGVRGEVSIHGDLFSISDLMRSPVLVRSLEDTCTMSLGDFLAHQQANGQATVVELRGFNRMPPETLLPELSDCLLSDKQASGFCWTDEQQKLRHLSINHPILFVLTFVIGKSTFPLQGSASNRLPVFLTENIWGDEQPAVDTNDVTVTYVTSVVWQLLYATLQQFSSHSHNELESLKNLLNDFGFTEQKSEGIAKLAFEAGRSPSANLVSDIESLTPVLMNYAREITQGEVTAVLDCLFQA

SEQ ID NO: 25063 - protein, 1986 aa, Yersinia rohdei ATCC 43380; identical to SEQ ID NO: 25059

SEQ ID NO: 25064 - protein, 362 aa, Yersinia rohdei ATCC 43380; identical to SEQ ID NO: 25060

SEQ ID NO: 25065 - protein, 928 aa, Yersinia rohdei ATCC 43380; identical to SEQ ID NO: 25061

SEQ ID NO: 25066 - protein, 901 aa, Yersinia rohdei ATCC 43380
MAGAKADNLPRTLTQKLHFLSKLQPKAQLIIQTWFSTNIQFSEHNDPNEILNELLLKEKSGDDVEHLKPLWRAILGFYVSQPCPEIIERFLNDEEMNQLNNGDTEKYNANLFAQSALNVTDEDIEQCLLIGQGQNISPSDRILPMFIAGLTDTLNGNQNSAILWKEKLATHPLPMAKKLEGIIAEFESGHGQKIADSLAVLPAEFVTPESMDDNIDNITFVGIVTKLLPSGAFFVTPIALFIDNGLRDLSEENAKFLYPHHGETVGFMNHFSRNFTQGELGIWQATHQPSDKLAQYVLTRYQSRIYPIIRLPHQLSEPDAIREWLLTQYQPKNDSPVIFLLDDGIALRLPGDIADPKKYDFDSPLDSYRELACIELCSRKITLATQLPTLTEKYDCAPASTWIKRLIKLNYSSIDFPAFSKAQLQNLAYFIESNESENDKYIRALAHLEQVVVSREFLDSMVQKLLNLPVVEAQINEQKKVILSGYENEQEKLRLVIASLVDKKTQLEAEVDNQKKRLKAETERSKKVIRQQEAELDSRIRQTFENASQAGIETLAQTALLRALTADVTGPVSQLEPMGKLEPDTVMAPSLALKPFKLPVAVEITNKRRLLTIIEEQAAVTGLSETLLSSIIAAANVTPIIGLLGKYTKKVLSTVANILSSGVRGEVSIHGDLFSISDLMRSPVLVRSLEDTCTMSLGDFLAHQQANGQATVVELRGFNRMPPETLLPELSDCLLSDKQASGFCWTDEQQKLRHLSINHPILFVLTFVIGKSTFPLQGSASNRLPVFLTENIWGDEQPAVDTNDVTVTYVTSVVWQLLYATLQQFSSHSHNELESLKNLLNDFGFTEQKSEGIAKLAFEAGRSPSANLVSDIESLTPVLMNYAREITQGEVTAVLDCLFQA

SEQ ID NO: 25067 - protein, 2166 aa, Acetobacter cerevisiae
MTEHASTQATSHLYTALERLSRRSADAFVGYARFSKPSLTSLVHDMLRGVPGSGSAGLISDPYLEAAKLWKPAHETYAQLAEEGLLEKGFVKALARSNPNWMGKSCHPYAHQVEALRTAQTGKSYIVTSGTGSGKTECFMLPVINDVLRHPERKGIQAIIVYPLNALIDSQRERLRKWTDELAAVGLGDRVRFALYTGDTPLSRSSRGQNEARPDGIGKAEVESRDEIRKNPPSILITNVTMLEYMLLRPEDQRILQVSKGSLRWVVLDEAHSYVGSQAAEMALLLRRVRQAFDVPPDKAQVLATSATISGSEVGNDALARFVAALSGRSVDDAAVIHGVPQPVVLPPQNPNSSLNLDAVAAASDHDKWRMLAPHPAVQKLSRELREEGACKKASDIGTQVLGLKVSEAETQALLDALAVARNPETNDKLLSWRAHVFHRSVGGLWACTNPDCHYRQATLRAEDAKWGWGALYLGETDRCQCGSLCLELAGCQECGEVWLAARHIMAGRDDYIRRRRAWNGNTTDFERDNEPVTSDDDEGSEHHSNEDSSGETVADIWIQDPFFPQERALPEPSGLQPGGVLDPQSGRFAPNGSLPDDKAGLPISYITAHGPDCCCKRGNQKVQIRTFHYGSVFFSDTGLPDLLGLLAHPMDKSLPGYRPMDGRRALTFTDSRQGVARLSAKLQAASERNLVRAFIYHSVQTTNSLPPEEKLALQRNLDRKRRFRAGCDSETPEGLEDIASFDKEIRSIEQELAIEHKPVPWNRLVENLAELTSVSENLAMLWGGRFKRALGQSGDYNLSEHPEILAKILLLQELGRRPKIQNNIETMGMAQIIFPKMYDLILEDNGPFADVKRASGLKDEDWLSLARAAIDLIFRQRWAVVFPESKKLLHLVFPNMHNAMSIGSERELNHEIQSWNRRWPDAKDKMDFMRLVRLTMSARQVPDTRVQGFLDGLWDLLKTTCLKKVQTSPEYYALDFSKASLEPVKQAWICPLTRRVINYLVNGRSPFAPDVAAEPESINFSAPPHIDKNGLNSAKREVNRRWFEGNETWALRKRLIWTDQAENVITWRPYFRAQEHSAQIHRGDLHTYEEAFDKGQINILDCSTTMEMGVDIADVHLVGNTNVPPSISNYRQRVGRAGRRGEPWAFGMTWCREQPLDENTFRNPGAFLQRAIKAPTVYLESEPIVQRHINALLFGMFVRTSGIPLTTSTDEFFGAPKTRGDVNASTFRNDLDKWTDPSDTLAGRFSEWLSNAADIPAVNEAVVTLVHGTSLVAKTVTHLVDKVEKELDDLRRKWREDYQVVIDRLKKSIDQKDNSSVISLFQSRAQNMAGKFILSELGSRNFLPPHGFPIDVVQLEYETHTTNLNRRRSQLRSTEVSQEDVRPLRRTVGESSRPLSIALREFSPGADVVIDGLVYRSGGVKPAWARLHGEGGTEHLERLWTCPKCEQTGIVRIFEVGQLCTNQDCKHRLRIEDTAEVLKPAGFIADRGTHAGYDVIAQAPFDPAVITLNKNDWTHLIQPKWGRFRCDSAGQIIVTAKGRDQNGFALCLTCGRMKEQLTETDEEGEKSVRNAVSLLKDHKPLEPSVVPTEAGRCPGNDQNGAIRSRVQLFSQNLTNVFELCLPEFDLWPDEVLKHMREHEQKGDYRAGVGLAVGAALREALCAALNVESQEVHVYGKRGKSHSHDSIFLYDAAEGGAGLSSQLDNFDFLVNCLQDAEKQLECQNSADGGDGCENGCPECIMRPDVAFSRILAQRKAALALLKWLLPYLSLSQDLQLFGPETHYAGQDAERWLQNALDQHVFSTLTLCMPGEPDEWDVNEWLSKRTRYMLEQSGISINLLLPRVAVEPSRLSTARIADLMALQIATNADCRVVDTLPKIKDKAILLFGTARRKGSDFTTPLALATVDEYGPIVSSDWGKCNTLDLAHSCNIAGPYDDVPMVGKPLELSALLTMPENIKGTNAYFAPVTHELDGSINRQQDSFGMRFWHYWENKAGAGVEIDALRKIGVKAVYYTDRFVRSPLVVALLYSVVSTIPGADAHLEVIIKTVPLDPDEVHTSRYHRSYASKDWPKTNERDGVLKSVFPKVDIRIYENRHDMQHDRELTLIRHDGRRLTIGLGQGFGAWGAIYKPKFDFGALVDEQARQIKQANWLINYAGKGRTTLVMALE

SEQ ID NO: 25068 - protein, 557 aa, Acetobacter cerevisiae
MFDGGENHVSLPFENGIARGKIVSSGEVPAAMRLVIAELHSGQSIELTRPWPSKHPFLVDDTKRLTQERQIFITQLSEFRAIGPDNAELLLLVRGQSQSGTIPLCSPAPLSTQAAFLRQLLAQDTRAADGSLAFSLLAKGVTSPILHVKRYARQCREWSGLGIMDPMLLPDHETAEIIAVEVSGKLKTTTYSTEVVPNGESAFTLGSHFSCNGQWMIYVTIDGKPYRPFFWLGSATLASPAPRTRQARIEGYVKQWEERLEAGALRDWYGRWRVIREAAEAGDAGALDEAQAIAHVPAAALCLLLVVEEEQINDVIALNEAIPLFWPCVPVKEFSRALVQAYRMRLEREREQDTLDPESQVNVRRPEEETVRVIGNRLCKIGERMPALRMHWVRGLYENGMLLDFMDFLNSGPLKPQPADPTTQFRDEIKATDCGSHEMRSRSALWNLAQDCARSVAQANRGDNNIRKIPRVSIPPRVPRANWQKLFPDGAIPGAEFGADDLIQAPYIAARLALGEGSQLSWEDRLSAQAALLFLSDFDSSYFEEALPWVIATLGPQ

SEQ ID NO: 25069 - protein, 2105 aa, Acinetobacter baumannii
MYKYFSSLTQESIQKNKEATLSILGISYPELRDVLGQQMSQAAGKDQSFLSSPVIEQMFAWEKGQPTLDALGGELLHKKLIDALDHSENGAYRFNRNYQPYVHQLQSWNALLKDKKSIMVTSGTGSGKTECFMVPILNDLYEEFIQAGQSLTGVHALFLYPLNALINSQQERLDTWTRHFSQSNAIRYCLYNGNTPEHKSQETGKQKLHPNQVLTREELRLNPSPILVTNGTMLEYMMVRQIDAPILQKSQGKLRWIVLDEAHSYMGSQAAELAMQLRRVLHAFGVEAKDVRFVATSATIAGADAEEKLKQFLSEISGQSTENILVIGGQREVPVLPVVENHQQSFDELVAIDAQHEISYERYQQLAGHPIACVLRESICSQRALTLDDLLKITREKGFQLSQHEILEWLDLLTYTRPSDEEQAFLKIRVNYYQRVTHGLWSCTNDKCDKKDDGLKNWSFGQIYATHQEKCDCGAPVLELTFCHSCKEPHLIGSLGKEDVLKQWTVEIEDEFALLLDNETEEQEEVEYKNTIKNRLVVFSVNENKEKNYRRDQLNLENLKLGEISKNTLNVHYFEPHNSSDPILCSHPECGAKGSKFDLPFNRAILGAPYYITQTVPQLLQYCPDIEQKEINEASKNYNDPEFIEGEFKDLKDCAPEDMPAKGKRLITFTDSRQGTARLSVKMQQEAERSRLRGAVLKAIIQHTKAQAKTIDPMEVLLRQRLNEAEQEGNIARIKFFQEELNNLSANNTPMTLPEMNWEELCRELAKDFDFRTGILLANRHIAGGIFDDAGSLKLAQMLLTREFSRRPKNANSLETLGLVKVSYQGLKDLNDLPNYWKEQGLTGQDWQNFIKVILDYFIRENTVIELAEDWKQWLGGPVLPKHVVSPELKEQFKKREDGSKNNSVLAWPLASVSKNHRLVKLLVLGAKLDLNLIQHRNMADDWLKKAWQVLKAEFLVEDGNSKYHLRKEKLTFSLVDQVFLCPITHRLIDITFKGFTPYLPRSLPQDIDKYKTQEMDFPKLWNFDVEDLTELHQDSAVQKLRSLNLWTDLSDSAVSGGFFYRTAEHSAQQSANLLKQYETYFKAGKVNVLNCSTTMEMGVDIGGISTVVMNNVPPHPANYLQRTGRAGRGNQSRAISYTICKNNPHDQQVFKQPLWAYTTAIQAPHVSFNSQRLIQRHINAQLLAIFLIKEVGDTDIDRPSLDLKWFYIKQDGQSDSICDTFEKWLVGKVIQDYQYVLEFLKKGTALKDIDNAAIIDACLTKIRELKTEWLEEYVIIEREYQQELVTNPNSSYLHRLTCERDRLTQAYLLSELAMRNFLPSYGFPTDVITFDNTNKIERDHWKKLSKRRKKKDLESSIDREDNLSRIKGLPSRNIAIAIREYAPGAEVIVEGRVYTSKGISLAWRNIHNEHDKKPQKFDYAWMCHHCGQTGLTSGVLSNENELTCTNIECEETITDIKKVLRPNGFSVDYHDKPNNDVTTQKYIPVQKPWVGLSKSAETWPLPHANLGYFNLDPNGHVFQYSSGLNGTGYAICMQCGRADSMEESYDGEVKFPSTLTPDRPHQSLKAQKDGDKFKHHDCGGSSVVKSNIHLGCQIKTDVLEIVLRHPTHNEYILNSEEGRVIATTLVVALRQAIASELGIATDELGYAIKVKRIDNQSVLILQIYDDLSGGAGFSTTAANFIAEVLSSLIEKLNCVDESCSSVCGKCLLDSQTRHDSEYLDRTLALSWLGSDFLTYLESPIPGTKFISGTPFSIIEQYVNYGATQVTFNLTGNSEDWDVLCTANRKKLFKLLNTNIKLVIVVSPTLNLNAQIQQEMLALEKIGLSFAVNINLNSEYLYAQIVGQDKITTLYSQSPEVSCFNEYWLESQSPSYKSTSDPELQLQKFSFDFKAIESYENEFHQLKISKDFDSDLVDAFAYKFWSKILPVSKLNNLVNDEVVEIEYSDRYLQSPANIILISSLFKEIKNLLGNRPKFTITTFFKNKQVQEERLYSDFRQLDEFNNFFINYFEDQLSQKLNLNISRSKIDHSRYFIFSLKSGKKVDIRLDQGVGYWQIKYINWREIQEKGDFPFLESIQKQLLWINGNNTNMYVVGEDGFKTDIYITKS

SEQ ID NO: 25070 - protein, 1096 aa, Acinetobacter baumannii
MYSLNFSSRQYLAQILKTRGLTSADARVLYQYQLSFPEFKEIENILKTSFQFQNINRIGDEWANLFTLYAAEWFRREYTAKWTWDPILTALDIRDLPVNTRNEVVIKGLRFWKRPIIKYSKANNYLGSIFKEGGFPSRLLKEDGNRYIAIFQKVTSLYLENKSHIDELRAEVQQELKTLPQAFEHDETLSLVLDIVRLIIEKVENCQLTALQDPITTLDQQSKHWRNEFPLPIDEDQTIVEDFLRNLFKSASEEISKHHQLRQALKCTHSLSEDFKYLSSTIYLPEELSFTLNEDVELRRTRGNLVIKEGWNHKSQFLCTTYLSQQNNKVIAEINRGFLKDIYRQFHNEALYLCLEVDGVVLSHIELEDTALDFETLPIAFEIQEKPKYIAQGALKTKAPEIFISLPTGARFTSVESAELFESVGQFLTFKLYKIRGQQQILTQDGDQIIIKCGHSDIEFEQLLFRKNNISQLETSPSLAFMGKPALKTYGTHTLFRGNDQIETTPLHLLLGQQMLTLKNRKGESLLKKKVVILPKHFKVMVQAGVTLDQAILDIESDAEIHIEVSNSHSSLVYEKIGISYKCQVKCAVVPLALNLKIIFKFGGECIVTVPFPARGFKLINEQKEVTSKDLVIHDLLNTELQVYSYDRAAKLNFDIVLKTKINQGHAVPFYRKKIKVKQGISSINLYELVEDVKGVLALDDDLDSFVECAISYHHSEKKWNIRHYAHQLNWGKSIKAYYNNEALLSFKPQAMSLVQPQVAPLVLLEKNEWIGKVFQVPELDMSLAPYLLIPTKNSTLFRAKLIPEFDYPQDSEIEALTEATRSFGQNKQSIKQFIRTLNYDNNEVFWDYVKTLLHDYDHLPLNTFEVLKGLATNYDQLAITVFKLDLSLDILRRFETELSVLWFLIPVSSWQNATLQVIQYWQKMLGDEGTYGRVKAENILKKVKNLTPLLAESFHSFYLSNQREFGPEFNFHFLNDWIFKGEFLGGVENTEYQRMLQRNHSATEDQAWPTALSQNKWGYFECMQKLPFSCQLASKWNKDVVYLPFCLAYMNVKYHSKLQLSAYDLLQLKQIIAFDEQWFNQIFSSTVKYLILEAK

SEQ ID NO: 25071 - protein, 2105 aa, Acinetobacter baumannii; identical to SEQ ID NO: 25069

SEQ ID NO: 25072 - protein, 1096 aa, Acinetobacter baumannii; identical to SEQ ID NO: 25070

SEQ ID NO: 25073 - protein, 2105 aa, Acinetobacter baumannii
MYKYFSSLTQESIQKNKEATLSILGISYPELRDVLGQQMSQAAGKDQSFLSSPVIEQMFAWEKGQPTLDALGGELLHKKLIDALDHSENGAYRFNRNYQPYVHQLQSWNALLKDKKSIMVTSGTGSGKTECFMVPILNDLYEEFIQAGQSLTGVHALFLYPLNALINSQQERLDTWTRHFSQSNAIRYCLYNGNTPEHKSQETGKQKLHPNQVLTREELRLNPSPILVTNGTMLEYMMVRQIDAPILQKSQGKLRWIVLDEAHSYMGSQAAELAMQLRRVLHAFGVEAKDVRFVATSATIAGADAEEKLKQFLSEISGQSTENILVIGGQREVPVLPVVENHQQSFDELVAIDAQHEISYERYQQLAGHPIACVLRESICSQRALTLDDLLKITREKGFQLSQHEILEWLDLLTYTRPSDEEQAFLKIRVNYYQRVTHGLWSCTNDKCDKKDDGLKNWSFGQIYATHQEKCDCGAPVLELTFCHSCKEPHLIGSLGKEDVLKQWTVEIEDEFALLLDNETEEQEEVEYKNTIKNRLVVFSVNENKEKNYRRDQLNLENLKLGEISKNTLNVHYFEPHNSSDPILCSHPECGAKGSKFDLPFNRAILGAPYYITQTVPQLLQYCPDIEQKEINEASKNYNDPEFIEGEFKDLKDCAPEDMPAKGKRLITFTDSRQGTARLSVKMQQEAERSRLRGAVLKAIIQHTKAQAKTIDPMEVLLRQRLNEAEQEGNIARIKFFQEELNNLSANNTPMTLPEMNWEELCRELAKDFDFRTGILLANRHIAGGIFDDAGSLKLAQMLLTREFSRRPKNANSLETLGLVKVSYQGLKDLNDLPNYWKEQGLTGQDWQNFIKVILDYFIRENTVIELAEDWKQWLGGPVLPKHVVSPELKEQFKKREDGSKNNSVLAWPLASVSKNHRLVKLLVLGAKLDLNLIQHRNMADDWLKKAWQVLKAEFLVEDGNSKYHLRKEKLTFSLVDQVFLCPITHRLIDITFKGFTPYLPRSLPQDIDKYKTQEMDFPKLWNFDVEDLTELHQDSAVQKLRSLNLWTDLSDSAVSGGFFYRTAEHSAQQSANLLKQYETYFKAGKVNVLNCSTTMEMGVDIGGISTVVMNNVPPHPANYLQRTGRAGRGNQSRAISYTICKNNPHDQQVFKQPLWAYTTAIQAPHVSFNSQRLIQRHINAQLLAIFLIKEVGDTDIDRPSLDLKWFYIKQDGQSDSICDTFEKWLVGKVIQDYQYVLEFLKKGTALKDIDNAAIIDACLTKIRELKTEWLEEYVIIEREYQQELVTNPNSSYLHRLTCERDRLTQAYLLSELAMRNFLPSYGFPTDVITFDNTNKIERDHWKKLSKRRKKRDLESSIDREDNLSRIKGLPSRNIAIAIREYAPGAEVIVDGRVYTSKGISLAWRNIHNEHDKKPQKFDYAWMCHHCGQTGLTSGVLSNENELTCTNIECEETITDIKKVLRPNGFSVDYHDKPNNDVTTQKYIPVQKPWVGLSKSAETWPLPHANLGYFNLDPNGHVFQYSSGLNGTGYAICMQCGRADSMEESYDGEVKFPSTLTPDRPHQSLKAQKDGDKFKHHDCGGSSVVKSNIHLGCQIKTDVLEIVLRHPTHNEYILNSEEGRVIATTLVVALRQAIASELGIATDELGYAIKVKRIDNQSVLILQIYDDLSGGAGFSTTAANFIAEVLSSLIEKLNCVDESCSSVCGKCLLDSQTRHDSEYLDRTLALSWLGSDFLTYLESPIPGTKFISGTPFSIIEQYVNYGATQVTFNLTGNSEDWDVLCTANRKKLFKLLNTNIKLVIVVSPTLNLNAQIQQEMLALEKIGLSFAVNINLNSEYLYAQIVGQDKITTLYSQSPEVSCFNEYWLESQSPSYKSTSDPELQLQKFSFDFKAIESYENEFHQLKISKDFDSDLVDAFAYKFWSKILPVSKLNNLVNDEVVEIEYSDRYLQSPANIILISSLFKEIKNLLGNRPKFTITTFFKNKQVQEERLYSDFRQLDEFNNFFINYFEDQLSQKLNLNISRSKIDHSRYFIFSLKSGKKVDIRLDQGVGYWQIKYINWREIQEKGDFPFLESIQKQLLWINGNNTNMYVVGEDGFKTDIYITKS

SEQ ID NO: 25074 - protein, 1096 aa, Acinetobacter baumannii
MYSLNFSSRQYLAQILKTRGLTSADARVLYQYQLSFPEFKEIENILKTSFQFQNINRIGDEWANLFTLYAAEWFRREYTAKCTWDPILTALDIRDLPVNTRNEVVIKGLRFWKRPIIKYSKANNYLGSIFKEGGFPSRLLKEDGNRYIAIFQKVTSLYLENKSHIDELRAEVQQELKTLPQAFEHDETLSLVLDIVRLIIEKVENCQLTALQDPITTLDQQSKHWRNEFPLPIDEDQTIVEDFLRNLFKSASEEISKHHQLRQALKCTHSLSEDFKYLSSTIYLPEELSFTLNEDVELRRTRGNLVIKEGWNHKSQFLCTTYLSQQNNKVIAEINRGFLKDIYRQFHNEALYLCLEVDGVVLSHIELEDTALDFETLPIAFEIQEKPKYIAQGALKTKAPEIFISLPTGARFTSVESAELFESVGQFLTFKLYKIRGQQQILTQDGDQIIIKCGHSDIEFEQLLFRKNNISQLETSPSLAFMGKPALKTYGTHTLFRGNDQIETTPLHLLLGQQMLTLKNRKGESLLKKKVVILPKHFKVMVQAGVTLDQAILDIESDAEIHIEVSNSHSSLVYEKIGISYKCQVKCAVVPLALNLKITFKFGGECIVTVPFPARGFKLINEQKEVTSKDLVIHDLLNTELQVYSYDRAAKLNFDIVLKTKINQGHAVPFYRKKIKVKQGISSINLYELVEDVKGVLALDDDLDSFVECAISYHHSEKKWNIRHYAHQLNWGKSIKAYYNNEALLSFKPQAMSLVQPQVAPLVLLEKNEWIGKVFQVPELDMSLAPYLLIPTKNSTLFRAKLIPEFDYPQDSEIEALTEATRSFGQNKQSIKQFIRTLNYDNNEVFWDYVKTLLHDYDHLPLNTFEVLKGLATNYDQLAITVFKLDLSLDILRRFETELSVLWFLIPVSSWQNATLQVIQYWQKMLGDEGTYGRVKAENILKKVKNLTPLLAESFHSFYLSNQREFGPEFNFHFLNDWIFKGEFLGGVENTEYQRMLQRNHSATEDQAWPTALSQNKWGYFECMQKLPFSCQLASKWNKDVVYLPFCLAYMNVKYHSKLQLSAYDLLQLKQIIAFDEQWFNQIFSSTVKYLILEAK

SEQ ID NO: 25075 - protein, 2105 aa, Acinetobacter baumannii; identical to SEQ ID NO: 25073

SEQ ID NO: 25076 - protein, 1096 aa, Acinetobacter baumannii; identical to SEQ ID NO: 25074

SEQ ID NO: 25077 - protein, 2105 aa, Acinetobacter baumannii; identical to SEQ ID NO: 25073

SEQ ID NO: 25078 - protein, 1096 aa, Acinetobacter baumannii; identical to SEQ ID NO: 25074

SEQ ID NO: 25079 - protein, 2105 aa, Acinetobacter baumannii; identical to SEQ ID NO: 25073

SEQ ID NO: 25080 - protein, 1096 aa, Acinetobacter baumannii; identical to SEQ ID NO: 25074

SEQ ID NO: 25081 - protein, 2105 aa, Acinetobacter baumannii; identical to SEQ ID NO: 25073

SEQ ID NO: 25082 - protein, 1096 aa, Acinetobacter baumannii; identical to SEQ ID NO: 25074

SEQ ID NO: 25083 - protein, 2107 aa, Acinetobacter baumannii 1542444
MYKYFSSLTQESIQKNKEATLSILGISHPELRDVLGQQMSQAMGEDQSFLSSPVIEQMFAWKKGQPTLEDLGGQLLHANVIHALDHKENGAYRFNRHYQPYVHQLQSWNALLEDHKSIVVTSGTGSGKTECFMVPILNDLYEEFIREGQSLTGVHALFLYPLNALINSQQERLDAWTRHFLPSNAIRYCLYNGNTPEHKSQKTGEQNLHPNQVFTREELRSNPAPILVTNGTMLEYMMVRQIDAPILQKSQEKLRWIVLDEAHSYMGSQAAELAMQLRRVLHAFGVEAKDVRFVATSATIAGADAEEKLKQFLSEISGQSTENILVIGGQREVPPLASVENNLLTLDELVSIDEGQEVSSERYHKLSGHPIALTLRECICSERALTLEDLFKKTQEKDFKLSQQEILKWLDLLTFTKPSHAEQAFLKIRVNYYQRVTHGLWSCINDKCDQKSEDLKNWNFGQVYATHQENCACGAPVLELTFCKSCKEPHLLGLLGRDDVLKQWTVEVEDEFALLIDNEAEEQEEKEFKKAIKNRLVVFSSNENKEKNYRRDQLNLDNLKLGQISKNTLNVHYFEPYSSGDAVECSNSECGSKGTKYDLPFRRAILGAPYYITQTVPHLLQYCPDIDQEDIEEVSKNFNDPEFIEGEFKELKDCTTWDMPAKGKRLITFTDSRQGTARLSVKMQQEAERSRLRGAVVGALIEHTKNTSQQQTLNPAVVTFTQLLSKAEEEGNTALINICKAELEKLNTNDTKFELPEIPWEDLCKRIAKDFDFQNGILLANRHIAGEVFADAGPLKLAQMLLTREFSRRPKNANSLETLGLVKIGYQGLNNLNDLPNYWKDSGLGNQDWQDFIKVVLDYYIRENTVIDLADDWQQWLGGRVRPKHVVSFELVNQFKYRDDGSKNNSILAWPLASVSKNHRIVKLLVLGAKLDLSLQAHRNMADDWLKKAWQVLKAEFLVEDGNSKYHLRKEKLTFSLVDKVFLCPITHRLMDTTFKGFTPYLPISLPHNIDKYKTEEMVFPKLWQFDYENLTALHQDLAVSKLRSLNLWTDLSDSAVLGGFFYRTAEHSAQQSANLLKQYETYFKAGKVNVLNCSTTMEMGVDIGGISTVVMNNVPPHPANYLQRTGRAGRGSQSRAISYTICKNNPHDQQVFKQPLWAYTTAIQAPHVSFNSQRLIQRHINAQLLAIFLIKEIGDTDIDRPKLDLKWFYLKQHGQSDSICDTFEKWLVGKAVKDYKHVLEFLKKGTALKDIDNVEIIDACLTKIRELKTEWIEEYAIVEREYQQELATNPNSSYLYRLTCEKYRLTQAYLLSELAMRNFLPSYGFPTDVITFDNTNKLEKDRWDKLSKNQKTKDLESHLDREDNLSRVKGLPSRNIAIAIREYAPGAEVIVDGRVYTSKGISLAWQNVHNEHDKKSQKFDYAWMCHHCGQTGLTSGVLLNEEQLICTNAKCGEIIKDVKKVLRPNGFSVDYYDKPNNDVTTQQYIPVQKPWVGLSETALRWSLPHANLGYLNVDPNGHVFQYSSGLNGTGFAICLQCGRADSMEESYDGEAKFPNTLTPDRPHKALKAQKDGDKFKRPDCGGSSVVQSNIHLGCQIKTDVLEIILKHPTRNEYILNNEDGRIIATTLVVALRQAIATKLGIATDELGYAVKVKKIDDKAVLVLQIFDDLSGGAGFSTTAANYITEVLRLLIEKLQCIDHTCNSVCGKCLLDTQTRHDIENLDRNLALEWLGDDFLNYLDSPIPETEFIAGTPFSIIEQYVNHGATKITFNLTGNSEDWDILCPVIRRKLFNLLNSNIEIVFLLSSNVKLTPHIQQEMLTLEKIGISFTVNSNVTSEYLYTQILSKEKVISLYNQSAEVSCFNELWLEGQSPSYKSTISPKLQLQKFSFDFKAIKSYENEFQRLKVGKDFDGESVNDFSQKFWAKVLPISKLHDLVNDEVIEIEYSDRYLQSPANIILIIGLLKEIKKILCIRPRLSIITCFRNKQIQDEKLYSDFSQREVFEIFFVNYFEDQLSQKLNLNISRSKIDHSRYFIFSLKSGKKVDIRLDQGVGYWQVKYINWRAIQEKGDFPFLESIQKQLLWINGNNTNMYVEGEDGFKTDIYITKS

SEQ ID NO: 25084 - protein, 1096 aa, Acinetobacter baumannii 1542444
MYRLNFSSRQYLAQILKTRGLTSADARVLYQYQLSFPEFKEIENILKTSFQFQNINRIGDEWANLFTLYAAEWFRREYTAKWTWDPILTALDIRDLPVNTRNEVVIKGLRFWKRPIIKYSKANNYLGSIFKEGGFPSRLLKEDGNRYIAIFQKVISLYLENKSHIDELRAEAQQELKTLPQAFEHDETLSLVLDIVRLIIEKVENCQLTALQDPIITLDQQSKHWRNEFPLPIDEDQTIVEDFLRNLFKSASEEISKHHQLRQALKCTHSLSEDFKYLSSTIYLPEELSFTLNEDVELRRTRGNLVIKEGLNHKSQFLCTTYLSQQNNKVIAEINRGFLKDIYRQFHNEALYLCLEVDGVVLSHIELEDTALDFETLPIAFEIQEKPKYIAQGALKTKASEIFISLPVGARFTHVESTELSEFVGQFLTFKLYKIRGQQQILTQDDDQIIIKCGHSDIEFEQLLFKKNNISQLETCPSLAFMGKPALKTYGTHTLFRGNDQIEITPLHLLLGQQMLTLKNRQGESLLKKKVVILPKHFKIMVQAGATLDQAILGIESDAEIHIEVSNSHSSLVYEKTGISYKCQVKCAVVPLALNLKITFKFGGECIVTVPFPARGFKLINEQKEVTSKDLVIHDLLNTELQVYSYDRAAKLNFDIVLKTKKNQGHDVPFYRKKIKVKQGISSINLYELVEDVKGILALDDDLDSFVECTVNYHHSEKKWNIRHYAHQLNWGKNVQGYYNDKTTLVFKPQAMSLVQPQVEPLDLLEKNEWIGKVFQVPELDMNHAPYLLIPAKDSTLFRAKLIQEFNYPEDTELDVLTTATRNFGQNKLLIKQFIRAVNYENNEVFWDHVKALLQNYNHLPLNTFEVLKGLASNYDQLAIAIFKLDLSLDILRRFETELSVMWYLIPVASWQKATHQVIQYWQKILGDDGGYGRGKAENILKRLRNFTPLLAESFHSYYLNNQYSFGPEYNFQILNDYIFEGKCWGGVENSEYQRMLQRNHGATEDQAWPTALSQNKWTYFDCMQKLPFSCQLASQWNKDVVYLPFCLAYMNVKHQSLLQLSAYEVLQLKQIIAFDEQWFNQIFSSIVKYLILEAK

SEQ ID NO: 25085 - protein, 2099 aa, Acinetobacter baumannii 99063
MQPYYSDLLEQACQRTKESTLSVLGINDPELREHLAEQMSQLPGSKFSFLAPPVFEHTFAWKQAPVTMTELSGKLLAKSVVSALDSQSNGRYRFGAEFKPFEHQLKSWKNLLADKKSIVVTSGTGSGKTECFMVPILNDLFELSENINAPLEGVHALFLYPLNALINSQEERLSAWTQHFGGKLRYCLYNGNTPESESSNRTLQKDRPYQVLSRELMRKSPAPILVTNGTMLEYIMVRQIDAPIIEKSRAKKSLRWIVLDEAHSYVGSQAAELALQLRRVLEAFGVEAKDVRFVATSATIADSNAEQQLKTYLSQLAGIEESQIEVIGGQRAVPQLKLETNHNKLSLKELSEIESDLEVSAKRFEALESNQTARAIREIIVQQGRESYKPLTSLEIKEKLNADYAISVNQVEIIAWIDLLTNTKAQEKEEAFLKVRAHFLQRITHGLWSCINPHCNQKEGTALKKWPYGNVYATCEQKCKCESPVLELTFCKECNSPHLLGQLVDANDGIRQLKQVGEVKIDEFSLLTEEDEIEEADINNSSNKLIDYNQSILLSVNDNGEMLNLDRGGFEKYPGEEEFNLFATSNKCHYCELETQEGYLPVNRSILGAPFYVTKAIPTILEFCPDITIKELEENGVTNISPQSLPSFGRRLITFTDSRQGTARMSVQMQQEAQRSRLRGAVVEMLKKIPDLSGGEMSREEIEEQIEQIKHDPKMKMFLTLLQQELLKLDTSDESSISWKEMIEKLTALSDFNFSILNAMKYYSPEVFGDQTEGSHRLISMLLLSEFSRRPRNRNSTETLGLVKVGYSGLEKVSSVPLYWESKGLNLQDWKDFLKVVLDFYVREYYYIHIDRSISNWMGRKIVTKRLFGPDSKLTEDKISKQWPLASKRKNNRLVKLLALGGQLDLNAPIDIDIADEWLKCAWKVLTQDIAILESDNGQFFIRPQKFKFSLNEHVFICPVTHRLIDTTFKGITPYLPTGIPKSKEAFICQKTKMPNLKVFSSNKDHHDNIQYIRELIANDETIKELRSLNLWNDLCDRIIEGGMYYRVAEHSAQQASERLQDYEKRFKSGEVNVMNCSTTMEMGVDIGGISAVVMNNVPPHPANYLQRAGRAGRSKESRALSYTICKSNPHDQQVFHNPKWAFETSIPAPYVALNSKRLIQRHVNSMYLSFFLKNEIGNTDAEKTKLNLKWFYLANGDEDISVCNRFINWIKANIYTYSYALEKLIKGTDLSFDSVESILGNTIQKITEMRDQWLREYLRLETQMSEAVKGSAYAYRLSIEMRRLSDEYLLRELAAKCFLPGYGFPTDIASFETTNVIDYIRQKQDRDAEKQRKSREDNVSLLRDMPSRNLAVAIREYAPGSEIVLDGRVFKSKGISLAWHNIHSSDAKEAQKFDLAWRCVHCGQNGFNTDSAVDINNVYCDNPSCGEKIRINEQRKVLQPTGFVHDFYEEPSNDVTTQTFIPVQTPWIAGKGARLSLPNSALGFMVADTSGHVFNYSSGLYGHGYAVCLECGRAESQKEKEKFPLSLSPEQKHYPLKPSKHDRENGQRKFCEGSERLIKDLHLGSYMTTDIFELVLHHPERNEYLTDSKENESIAFTLAVAFRKALAKKLGISANELGYGKRPILLDGNHQITAIQVYDFISGGAGFASSAPRHIESLLSSMVDELECPKYCESVCAHCLLDSQSRHHYSLLNRHDVKKWLGANYKNFISTEELSFFSGAQYWPYSLKECIEHHVSLGAKKLILNWGGESDSWELLSPSVKKTIARWAEDTSLEIDISLPQTIIDSKAYLAELKFLQTHFNVQFVDGDNIHQSIVAQLYLTDRIVTVVSPDMNSRIPNEEWLNTNAIVGVSETYKLLSEKVITLPTLVEKNQSSIVGLDLLDQLNVDLCSFGRKFWNLVAESTSEFGEICQNETIKSIEYSDRYIKSASNMLLIVSWLKGLEDQVGNIGQLKIKTVISDDETKDLPTILHHDYHSVKQFEKVFEKLLTDNLDISQKEIDLMTYENGKALYHKRNLTITFESGTIFDIQLDQGLGYWRLFESHKLSQRNVYFNAQRDFVSVAKGLTDLQKFIVVRNGEQNPTSIYVKRRVADLVAVVSK

SEQ ID NO: 25086 - protein, 1122 aa, Acinetobacter baumannii 99063
MELLASDILGEQLSARHILKRIFESRKLTEPTSHPLYSYHITLEEYQDLKRTLRYSQQDQKSHKPGREWCAVFTLFVSEWFRREYKSGWSWGPVYDELGFQPLDDIRYVVQQGLEGFWKRPILKFEGSNHTNYLGSAFKEGGFPSNLLMEKGNHYQTVFKRIVAQFSHYRHYNPEINDQLIQAYTRYLPQAFKEHETRVLISDMAEHLVHLVETHQLDNTDNPAAYLSNNFPKWREAFPLPLESSVAEQFLNQLLVTSSTELKQMKTKQDALSCASFFNRNSNQILTEVFLPNSLEITLEDVKGIPPRVEIVLYEAHEPLAKLGTATFMARPEAKKPVNIRIGAQTRIITRKHYQHGLILALQNKDQILYQKELPQTCLEIGSVPVAFAQDEGELCPFIGQASFKTAESEIILLLPPSYRFTSQECVTGHLSNAFGQHVYKVKGDIEVIGDNQEQYQIQCSKYFDKSELVDLVGKKFSWPTVPALAFLGRPKARYIETGLQSKNDSLAIYAEQKLLAHHMGSAAYGVKTLTIKNSSQNVVLRRKVVIFPEDLQIELLAGDTPNEANIRLLTKSNIICLGITTDHQAVSFKSRKLNDDIYGQYGYEYHLKCNEHPPENIKLNLMLNLGDQVDLLLPFPSHGATLYNGNHQPIKQKVLTVDDLLGSRLCLYAPENKPTNFRMTIRLKSIHIRDVDAPYYKWQFLVSGKPHQESLIHYRAEIEELLALTKDLDARIILEVTGGKQSLNYEIKHYQTEFEIDEQGHYFLNGLNLSGSQVVDPVIMVLNQPEQAVLPLEPVTTEGVETGKYKLPRLSNVGPCLIIPRDEQSIKFRPKFISQQIKEDSLSFETADTLHTAVRDYHPTFNPNSIADYLELMASDLQNSGWLYLYHLYSKYNHLPLVTFQVWKDLVRNPSCLALAIWLLDFEHDIYQRFEREFDLVWELIPAKAWKNAISKTFELYVSQGIPEAIVKKTLKARYAKLSQDISTLNQSLEAYYFDEPVLNGLTQNQLNNIVNGHYLQNLLRYQPEGELWPMWFQQQLTAWFEKDNLNLPLKPMVSLPQHASVILLPIYLALKNVGLTSFVLEDKSNSLTHHKIRQIRDFDQSWFNSIFEITTSYLLNLKAH

SEQ ID NO: 25087 - protein, 2107 aa, Acinetobacter baumannii AA-014
MYKYFSSLTQESIQKNKEATLSILGISHPELRDVLGQQMSQAMGEDQSFLSSPVIEQMFAWKKGQPTLEDLGGQLLHANVIHALDHKENGAYRFNSDYQPYVHQLQSWNALLKDHKSIVVTSGTGSGKTECFMVPILNDLYEEFIREGQSLTGVHALFLYPLNALINSQQERLDAWTRHFLPSNAIRYCLYNGNTPEHKSQKTGEQNLHPNQVFTREELRSNPAPILVTNGTMLEYMMVRQIDAPILQKSQGKLRWIVLDEAHSYMGSQAAELAMQLRRVLHAFGVEAKDVRFVATSATIAGADAEEKLKQFLSEISGQSTENILVIGGQREVPPLASVENNLLTLDELVSIDEGQEVSSERYHKLSGHPIALTLRECICSERALTLEDLFKKTQEKDFKLSQQEILKWLDLLTFTKPSHAEQAFLKIRVNYYQRVTHGLWSCINDKCDQKSEDLKNWNFGQVYATHQENCACGAPVLELTFCKSCKEPHLLGLLGRDDVLKQWTVEVEDEFALLIDNEAEEQEEKEFKKAIKNRLVVFSSNENKEKNYRRDQLNLDNLKLGQISKNTLNVHYFEPYSSGDEVECSNSECGSKGTKYDLPFRRAILGAPYYITQTVPHLLQYCPDIDQDDIEEASKNFNDPEFIEGEFKELKDCTTWDMPAKGKRLITFTDSRQGTARLSVKMQQEAERSRLRGAVVGALIEHTKNTRQQQTLNPAVATFTQLLSKAEEEGNTALINICKAELEKLNTNYTKFELPEIPWEGLCKRIAKDFDFQNGILLANRHIAGEVFADAGPLKLAQMLLTREFSRRPKNANSLETLGLVKVGYQGLNNLNDLPNYWKDSGLGNQDWQDFIKVVLDYYIRENTVIDLADDWQQWLGGRVRPKHVVSFELANQFKYRDDGSKNNSILAWPLASVSKNHRIVKLLVLGAKLDLGLQAHRNMADDWLKKAWQILKAEFLVEDGNSKYHLRKEKLTFSLVDKVFLCPITHRLMDTTFKGFTPYLPISLPHNIDKYKTEEMVFPKLWQFDYENLTALHQDLAVSKLRSLNLWTDLSDSAVLGGFFYRTAEHSAQQSANLLKQYETYFKAGKVNVLNCSTTMEMGVDIGGISTVVMNNVPPHPANYLQRTGRAGRGSQSRAISYTICKNNPHDQQVFKQPLWAYTTAIQAPHVSFNSQRLIQRHINAQLLAIFLIKEIGDTDIDRPKLDLKWFYLKQHGQSDSICDTFEKWLVGKAVKDYKHVLEFLKKGTALKDIDNVEIIDACLTKIRELKTEWIEEYAIVEREYQQELATNPNSSYLYRLTCEKYRLTQAYLLSELAMRNFLPSYGFPTDVITFDNTNKLEKDRWDKLSKNQKTKDLESHLDREDNLSRVKGLPSRNIAIAIREYAPGAEVIVDGRVYTSKGISLAWQNVHNEHDKKSQKFDYAWMCHHCGQTGLTSGVLLNEEQLICTNAKCGEIIKDVKKVLRPNGFSVDYYDKPNNDVTTQQYIPVQKPWVGLSETALRWSLPHANLGYLNVDPNGHVFQYSSGLNGTGFAICLQCGRADSMEESYDGEAKFPNTLTPDRPHKALKAQKDGDKFKRPDCSGSSVVQSNIHLGCQIKTDVLEIILKHPNRNEYILNNEDGRIIATTLVVALRQAIATKLGIATDELGYAVKVKKIDDKAVLVLQIFDDLSGGAGFSTTAANYITEVLRLLIEKLQCIDHTCNSVCGKCLLDTQTRHDIENLDRNLALEWLGDDFLNYLDSPIPETEFIVGTPFSIVEQYAHHGVTQIIFHLTGDSENWDILCSAIRKKLFKLLNTDIKLVIVVSPTLNLNAQIQQEMLALEKIGLSFAVNTNLNSKYLYAQIVGQDKITSLYSQSPEVSCFNEYWLESQSPSYKSTSYPELKLQKFSFDFKAIESYENEFHQLKIGKDFDGGLVDAFAYKFWSKILPVSKLNNLVNDEVVEIEYSDRYLQSPANIILISSLFKEIKNLLGNHPKFTIITSFKNKQTQEEKLYSDFRQLDEFKSFFINYFEDQLSKKLNLYISKSKIDHPRYFIFTLKSGKKVDIRLDQGVGYWQIKYFNWREIQKKGDFPFLESIQKQLLWIKRNNTNMHVVGEEDFKTDIYIAKS

SEQ ID NO: 25088 - protein, 1096 aa, Acinetobacter baumannii AA-014
MYSLNFSSRQYLAQILKTRGLTSADARVLYQYQLSFPEFKEIENILKTSFQFQNINRIGDEWANLFTLYAAEWFRREYTAKWTWDPILTALDIRDLPVNTRNEVVIKGLRFWKRPIIKYSKANNYLGSIFKEGGFPSRLLKEDGNRYIAIFQKVTSLYLENKSHIDELRAEVQQELKTLPQAFEHDETLSLVLDIVRLIIEKVENCQLTALQDPITTLDQQSKHWRNEFPLPIDEDQTIVEDFLRNLFKSASEEISKHHQLRQALKCTHSLSEDFKYLSSTIYLPEELSFTLNEDVELRRTRGNLVIKEGLNHKSQFLCTTYLSQQNNKVIAEINRGFLKEIYRQFHNEALYLCLEVDGVVLSHIELEDTALDFETLPIAFEIQEKPKYIAQGALKTKASEIFISLPVGARFTHIESTELSEFVGQFLTFKLYKIRGQQQILTQDDDQIIIKCGHSDIEFEQLLFRKNNISQLETCPSLAFMGKPALKTYGTHTLFRGNDQIEITPLHLLLGQQMLTLKNRQGESLLKKKVVILPKHFKVMVQAGATLDQAILDIESDAEIHIEVSNSHSSLVYEKTGISYKCQVKCAVVPLALNLKITFKFGGECIVTVPFPARGFKLINEQKEVTSKDLVIHDLLNTELQVYSYDRAAKLNFDIVLKTKKNQGHDVPFYRKKIKVKQGISSINLYELVEDVKGVLALDDDLDSFVECTVNYHHSEKKWNIRHYAHQLNWGKNVQGYYNDKTTLAFKPQAMSLVQPQLEPLDLLEKNEWIGKVFQVPELDMNHAPYLLIPAKDSTLFRAKLIQEFNYPEDTELDVLTTATRNFGQNKLSIKQFIRTVNYENNEVFWDHVKALLQNYNHLPLNTFEVLKGLASNYDQLAIAIFKLDLSLDILRRFETELSVMWYLIPVASWQKATHQVIQYWQKILGDDGGYGRGKAENILKRLRNFTPLLAESFHSYYLNNQYSFGPEYNFQILNDYIFEGKCWGGVENSEYQRMLQRNHSATEDQAWPTALSQNKWIYFDCMQKLPFSCQLASQWNKDVVYLPFCLAYMNVKHQSRLQLSAYEVLQLKQIIAFDEQWFNQIFSSIVKYLILEAK

SEQ ID NO: 25089 - protein, 2105 aa, Acinetobacter baumannii NIPH 201
MYKYFSSLTQESIQKNKEATLSILGISYPELRDVLGQQMSQAAGKDQSFLSSPVIEQMFAWEKGQPTLDALGGELLHKKLIDALDHSENGAYRFNRNYQPYVHQLQSWNALLKDKKSIVVTSGTGSGKTECFMVPILNDLYEEFIQAGQSLTGVHALFLYPLNALINSQQERLDTWTRHFSQSNAIRYCLYNGNTPEHKSQETGKQKLHPNQVLTREELRLNPSPILVTNGTMLEYMMVRQIDAPILQKSQGKLRWIVLDEAHSYMGSQAAELAMQLRRVLHAFGVEAKDVRFVATSATIAGADAEEKLKQFLSEISGQSTENILVIGGQREVPVLPVVENHQQSFDELVAIDAQHEISYERYQQLAGHPIACVLRESICSQRALTLDDLLKITREKGFQLSQHEILEWLDLLTYTRPSDEEQAFLKIRVNYYQRVTHGLWSCTNDKCDKKDDGLKNWSFGQIYATHQEKCDCGAPVLELTFCHSCKEPHLIGSLGKEDVLKQWTVEIEDEFALLLDNETEEQEEVEYKNTIKNRLVVFSVNENKEKNYRRDQLNLENLKLGEISKNTLNVHYFEPHNSSDPILCSHPECGAKGSKFDLPFNRAILGAPYYITQTVPQLLQYCPDIEQKEINEASKNYNDPEFIEGEFKDLKDCAPEDMPAKGKRLITFTDSRQGTARLSVKMQQEAERSRLRGAVLKAIIQHTKAQAKTIDPMEVLLRQRLNEAEQEGNIARIKFFQEELNNLSANNTPMTLPEMNWEELCRELAKDFDFRTGILLANRHIAGGIFDDAGSLKLAQMLLTREFSRRPKNANSLETLGLVKVSYQGLKDLNDLPNYWKEQGLTGQDWQNFIKVILDYFIRENTVIELAEDWKQWLGGPVLPKHVVSPELKEQFKKREDGSKNNSVLAWPLASVSKNHRLVKLLVLGAKLDLNLIQHRNMADDWLKKAWQVLKAEFLVEDGNSKYHLRKEKLTFSLVDQVFLCPITHRLIDITFKGFTPYLPRSLPQDIDKYKTQEMDFPKLWNFDVEDLTELHQDSAVQKLRSLNLWTDLSDSAVSGGFFYRTAEHSAQQSANLLKQYETYFKAGKVNVLNCSTTMEMGVDIGGISTVVMNNVPPHPANYLQRTGRAGRGNQSRAISYTICKNNPHDQQVFKQPLWAYTTAIQAPHVSFNSQRLIQRHINAQLLAIFLIKEVGDTDIDRPSLDLKWFYIKQDGQSDSICDTFEKWLVGKVIQDYQYVLEFLKKGTALKDIDNAAIIDACLTKIRKLKTEWLEEYVIIEREYQQELVTNPNSSYLHRLTCERDRLTQAYLLSELAMRNFLPSYGFPTDVITFDNTNKIERDHWKKLSKRRKKRDLESSIDREDNLSRIKGLPSRNIAIAIREYAPGAEVIVDGRVYTSKGISLAWRNIHNEHDKKPQKFDYAWMCHHCGQTGLTSGVLSNENELTCTNIECEETITDIKKVLRPNGFSVDYHDKPNNDVTTQKYIPVQKPWVGLSKSAETWPLPHANLGYFNLDPNGHVFQYSSGLNGTGYAICMQCGRADSMEESYDGEVKFPSTLTPDRPHQSLKAQKDGDKFKHHDCGGSSVVKSNIHLGCQIKTDVLEIVLRHPTHNEYILNSEEGRVIATTLVVALRQAIASELGIATDELGYAIKVKRIDNQSVLILQIYDDLSGGAGFSTTAANFIAEVLSSLIEKLNCVDESCSSVCGKCLLDSQTRHDSEYLDRTLALSWLGSDFLTYLESPIPGTKFISGTPFSIIEQYVNYGATQVTFNLTGNSEDWDVLCTANRKKLFKLLNTNIKLVIVVSPTLNLNAQIQQEMLALEKIGLSFAVNINLNSEYLYAQIVGQDKITTLYSQSPEVSCFNEYWLESQSPSYKSTSDPELQLQKFSFDFKAIESYENEFHQLKISKDFDSDLVDAFAYKFWSKILPVSKLNNLVNDEVVEIEYSDRYLQSPANIILISSLFKEIKNLLGNRPKFTITTFFKNKQVQEERLYSDFRQLDEFNNFFINYFEDQLSQKLNLNISRSKIDHSRYFIFSLKSGKKVDIRLDQGVGYWQIKYINWREIQEKGDFPFLESIQKQLLWINGNNTNMYVVGEDGFKTDIYITKS

SEQ ID NO: 25090 - protein, 404 aa, Acinetobacter baumannii NIPH 201
MKGVLALDDDLDSFVECTVNYHYSEKKWNIRHYAHQLNWGKNVQGYYNDKTTLAFKPQAMSLVQPQLEPLDLLEKNEWIGKVFQVPELDMNHAPYLLIPAKDSTLFRAKLIQEFNYPEDTELDVLTTATRNFGQNKLSIKQFIRTVNYENNEVFWDHVKALLQNYNHLPLNTFEVLKGLASNYDQLAIAIFKLDLSLDILRRFETELSVMWYLIPVASWQKATHQVIQYWQKILGDDGTYGRVKAENILKKVKNLTPLLAESFHSFYLSNQREFGPEFNFHFLNDWIFKGEFLGGVENTEYQRMLQRNHSATEDQAWPTALSQNKWGYFECMQKLPFSCQLASKWNKDVVYLPFCLAYMNVKYHSKLQLSAYDLLQLKQIIAFDEQWFNQIFSSTVKYLILEAK

SEQ ID NO: 25091 - protein, 2105 aa, Acinetobacter baumannii NIPH 335; identical to SEQ ID NO: 25073

SEQ ID NO: 25092 - protein, 1097 aa, Acinetobacter baumannii NIPH 335
MMYSLNFSSRQYLAQILKTRGLTSADARVLYQYQLSFPEFKEIENILKTSFQFQNINRIGDEWANLFTLYAAEWFRREYTAKCTWDPILTALDIRDLPVNTRNEVVIKGLRFWKRPIIKYSKANNYLGSIFKEGGFPSRLLKEDGNRYIAIFQKVTSLYLENKSHIDELRAEVQQELKTLPQAFEHDETLSLVLDIVRLIIEKVENCQLTALQDPITTLDQQSKHWRNEFPLPIDEDQTIVEDFLRNLFKSASEEISKHHQLRQALKCTHSLSEDFKYLSSTIYLPEELSFTLNEDVELRRTRGNLVIKEGWNHKSQFLCTTYLSQQNNKVIAEINRGFLKDIYRQFHNEALYLCLEVDGVVLSHIELEDTALDFETLPIAFEIQEKPKYIAQGALKTKAPEIFISLPTGARFTSVESAELFESVGQFLTFKLYKIRGQQQILTQDGDQIIIKCGHSDIEFEQLLFRKNNISQLETSPSLAFMGKPALKTYGTHTLFRGNDQIETTPLHLLLGQQMLTLKNRKGESLLKKKVVILPKHFKVMVQAGVTLDQAILDIESDAEIHIEVSNSHSSLVYEKIGISYKCQVKCAVVPLALNLKITFKFGGECIVTVPFPARGFKLINEQKEVTSKDLVIHDLLNTELQVYSYDRAAKLNFDIVLKTKINQGHAVPFYRKKIKVKQGISSINLYELVEDVKGVLALDDDLDSFVECAISYHHSEKKWNIRHYAHQLNWGKSIKAYYNNEALLSFKPQAMSLVQPQVAPLVLLEKNEWIGKVFQVPELDMSLAPYLLIPTKNSTLFRAKLIPEFDYPQDSEIEALTEATRSFGQNKQSIKQFIRTLNYDNNEVFWDYVKTLLHDYDHLPLNTFEVLKGLATNYDQLAITVFKLDLSLDILRRFETELSVLWFLIPVSSWQNATLQVIQYWQKMLGDEGTYGRVKAENILKKVKNLTPLLAESFHSFYLSNQREFGPEFNFHFLNDWIFKGEFLGGVENTEYQRMLQRNHSATEDQAWPTALSQNKWGYFECMQKLPFSCQLASKWNKDVVYLPFCLAYMNVKYHSKLQLSAYDLLQLKQIIAFDEQWFNQIFSSTVKYLILEAK

SEQ ID NO: 25093 - protein, 2098 aa, Acinetobacter baumannii NIPH 67
MQRYYSDLLEQACQRTKESTLSVLGISDPELREHLAEQMSQLPGGKFSFLAPPVFEHTFAWKQAQVTMSDLSGKLLAKSVVDALDAENNGRYRFGKEFKPFEHQLKSWKNLLSDKKSVVVTSGTGSGKTECFMVPILNDLYELSENINTPLEGVHALFLYPLNALINSQEERLSAWTQHFGGKLRYCLYNGNTPESESSKRTLQKERPYQVLSRELMRKSPAPILVTNGTMLEYIMVRQIDAPIIEKSRAKKSLRWIVLDEAHSYVGSQAAELALQLRRVLEVFGVEAKDVRFVATSATIADSNAEQQLKTYLSQLAGIDESQIEVIGGQRAVPQLKIESHQNKLSLKELAEIDGDLEVSAKRFQALESNQTARAIREIIVQQGAENYKPFTSLEIKDKLNAEYAISVDQVEIISWIDLLTNTKAHEKEEAFLKVRAHFLQRITHGLWSCINPNCDQKEGTALKKWPYGNVYATCEQKCKCESPVLELTFCKECNSPHLLGQLVDSTNGRQLKQVGEAKIDEFSLLTDEHEVDEADLMDNSNQLLDYNSLLLTINGYGEMLSLDQKGFEKFPGEEDFNLFATSNECHNCGSVTQEGYLPVNRSILGAPFYVTKAVPTVLEFCPDITIKELEENGVTNISPQSLPSFGRRLITFTDSRQGTARMSVQMQQEAQRSRLRGAVVEMLKTLPEASSEEMTREELLDQIEKIKKDPKMKMFLTLLQQQLHRLDNSAESSISWKEMIEKLTALSDFNFSILNAMKYYSPEVFGDQIEGSYKLISMLLLSEFSRRPRNRNSTETLGLVKVGYIGLEKVARVPLYWESKGLNLQDWKDFLKVVLDFYVRDYYYIHIDKSISNWMGRKIVTKRLFGPESKLIEDKISKQWPLASKRKNNRLVKLLALGAQLDLNAPIDIDIADEWLTSVWKALTQDTGILESDNGQFFVRPQKFKFSLNEQVFICPITHRLMDTTFKGITPYLPTGIPKSKDAFICQKTRMPDLKAFNSNKDHHANIQYIRDLIANDETIKELRSLNLWNDLCDRIIEGGMYYRVAEHSAQQASERLQDYEKRFKSGEVNVMNCSTTMEMGVDIGGISAVVMNNVPPHPANYLQRAGRAGRSKESRALSYTICKSNPHDQQVFNNPKWAFETSIPAPYVALNSKRLIQRHVNSMYLSFFLKNEIGDTDAEKTKLNLKWFYLENGAEDISVCNRFITWIKANIYTYSHALDKLIKGTDLSFDSIECILGNTIQKITEMRNHWVKEYKRLETQLSEAEKGSAYAYRLTIEMRRLCDEYLLRELAAKCFLPGYGFPTDIASFETTNIIDYIRQKKDRDAEKQRKSREDNVSLLRDMPSRNLAVAIREYAPGSEIVLDGRVFKSKGISLAWHNIHSSDTKEAQKFDLAWRCVHCGQNGFNTDSAVDANNLYCDNPSCGEKIRLSEQRRVLQPTGFVHDFYEEPSNDVTTQTFIPVQTPWIAGKGTRLSLPNSALGFMVADTSGHVFNYSSGLYGHGYAVCLECGRAESQKEKDKFPVYLSPEQKHYPLKPSKHDRENGQRKFCEGSERLIKDLHLGSYMTTDIFELVLHHPERNEYIADKKENDSIALTLAVAFRKALSKELGISTNELGYGKRPILLDCHQQITAIQVYDVISGGAGFASSAPRHIESLLSNMIDELECPKDCESVCAHCLLDSQSRHHYSLLNRHAAKAWLGSNYKKFISTEELSFFQGAQYWPYSLKECIEHHVSLGAKKLILNWGGVDDSWELLSSSVRKNIARWADDTTLSIEIAIPKAIMDSDQHLAELRFLEKHFNIQFVEGDDIHQSIVAQLHLIDRIITVVSPDMDSRIPNEEWLSTSAIVGVSESYKLLTENVITLPILEATHQSSIVGLDLLDQLNVDLYSFGRKFWDLVVESSSDFGKICKNETITSIEYSDRYIKTASNMMLIVSWLKGLEEQVSSLGRVKIKTIISNDETKGLPMYLHHDYHNAIEFERIFEKLLIDNLNLSKKEVGLMIYDNTKALYHKRNLTVVFESGTIFDIQLDQGLGYWRLFESHKLSQRNVHFNAQKDFASVAKGLTDLQKFLVVRNGEHNPTNIYVKRREADLVVATSVY

SEQ ID NO: 25094 - protein, 1122 aa, Acinetobacter baumannii NIPH 67
MEFLVSETLRTQSSSRLLLKQIFEARKIKEPTSHPLYTYHITLEEYEDLKHMLKSSQQDQKSHKPSLEWCAVFTLFVSEWFRREYKSGWSWGPVYDALSFQPLDDIRYVVQQGLENFWKRRILKFESSNHTNYLGSAFKEGGFPSNLLMEKGNNYQTVFKRIVAQFSHYRHYNPEINDQLIQSYTRYLPQAFKEFETRVLISDMAEHLVHLVETHQLDNTDNPAAYLSANFPKWREAFPLPLESSVAEQFLNQLLLTSSTELKQMKTKQDTLSCVSFFNRNSIQILTEIFLPNLLEIALEDVKGIPPRVEIVLYEAYEPLAKLGTATFMTRPEIGKPVNIRIGAQTRIITRKNYQHGLILALQNKDQIIYQKELPQTCLEIGSVPVAFAQDDGELCPFIGQASFKTAESDIILLLPPSYQFTSQDCVTGHLSNAFGQHVYKVKGDIQIIGDNQEQYQIQCSKYHDKSELVDLFGKKFPWSTVPVLAFLGRPKACYIETGLQSKNDSLAIYAEQKLLVHHVGSAGYGVKTLTVKNVAQNVVLRRKVVIFPEDLKVELLAGDTPNEADIRLLTNSNIICLGITADHQAVSFKSRKLNNDIHGQYGYEYHLSCNEYPPENIKLNLMLNLGDQVDVSLPFPSHGAMLYNGNHQPIKQKILTSDDLLGSRLCLYAPENKPTNFRMTIRLKSIHIRDVDAPYYKWQFLVSGKPHQESLIHYRAEIEELLALTKDLDARIILEVTGGKQSLNYEIKHYQTEFEIDEQGHYFLSGLNLSGSQVADPVIMVLNQPEQAVLPLQPISTEGVETGKYKLPRLSNVGPCLIIPRDQKSIKFRPKFIVQQVRADSFSLKSVDTLHTAVRDYHPTFNSNSIVDYLEIMASDLQNSGWLYLYYLYSKYNHLPLVTFQVWKDLVRNPSCLALAIWLLDFEHDIYQRFEREFDLVWELIPTEAWKNAIFKTFKLYVSQGIPEAIVKKTLKARYVKLSQDISTLNQSLEAYYFDESVLNGLTQNQLNSIVNGYYLQNLLRYQPEGEMWPTWFQQELTAWFEKENQNLPLKPIVSLPQHSSVILLPIYLAMKNVGLTSFVLEDKSNSLTNHKIRQLRDFDQSWFISIFEITISYLLNSQAH

SEQ ID NO: 25095 - protein, 2098 aa, Acinetobacter baumannii OIFC035
MQRYYSDLLEQACQRTKESTLSVLGISDPELREHLAEQMSQLPGGKFSFLAPPVFEHTFAWKQAQVTMSDLSGKLLAKSVVDALDAENNGRYRFGKEFKPFEHQLKSWKNLLSDKKSVVVTSGTGSGKTECFMVPILNDLYELSENINTPLEGVHALFLYPLNALINSQEERLSAWTQHFGGKLRYCLYNGNTPESESSKRTLQKERPYQVLSRELMRKSPAPILVTNGTMLEYIMVRQIDAPIIEKSRAKKSLRWIVLDEAHSYVGSQAAELALQLRRVLEVFGVEAKDVRFVATSATIADSNAEQQLKTYLSQLAGIDESQIEVIGGQRAVPQLKIESHQNKLSLKELAEIDGDLEVSAKRFQALESNQTARAIREIIVQQGAENYKPFTSLEIKDKLNAEYAISVDQVEIISWIDLLTNTKAHEKEEAFLKVRAHFLQRITHGLWSCINPNCDQKEGTALKKWPYGNVYATCEQKCKCESPVLELTFCKECNSPHLLGQLVDSTNGRQLKQVGEAKIDEFSLLTDEHEVDEADLKDNSNQLLDYNSLLLTINGYGEMLSLDQKGFEKFPGEEDFNLFATSNECHNCGSVTQEGYLPVNRSILGAPFYVTKAVPTVLEFCPDITIKELEENGVTNISPQSLPSFGRRLITFTDSRQGTARMSVQMQQEAQRSRLRGAVVEMLKTLPEASSEEMTREELLDQIEKIKKDPKMKMFLTLLQQQLHRLDNSAESSISWKEMIEKLTALSDFNFSILNAMKYYSPEVFGDQIEGSYKLISMLLLSEFSRRPRNRNSTETLGLVKVGYIGLEKVARVPLYWESKGLNLQDWKDFLKVVLDFYVRDYYYIHIDKSISNWMGRKIVTKRLFGPESKLIEDKISKQWPLASKRKNNRLVKLLALGAQLDLNAPIDIDIADEWLTSVWKALTQDTGILESDNGQFFVRPQKFKFSLNEQVFICPITHRLMDTTFKGITPYLPTGIPKSKDAFICQKTRMPDLKAFNSNKDHHANIQYIRDLIANDETIKELRSLNLWNDLCDRIIEGGMYYRVAEHSAQQASERLQDYEKRFKSGEVNVMNCSTTMEMGVDIGGISAVVMNNVPPHPANYLQRAGRAGRSKESRALSYTICKSNPHDQQVFNNPKWAFETSIPAPYVALNSKRLIQRHVNSMYLSFFLKNEIGDTDAEKTKLNLKWFYLENGAEDISVCNRFITWIKANIYTYSHALDKLIKGTDLSFDSIECILGNTIQKITEMRNHWVKEYKRLETQLSEAEKGSAYAYRLTIEMRRLCDEYLLRELAAKCFLPGYGFPTDIASFETTNIIDYIRQKKDRDAEKQRKSREDNVSLLRDMPSRNLAVAIREYAPGSEIVLDGRVFKSKGISLAWHNIHSSDTKEAQKFDLAWRCVHCGQNGFNTDSAVDANNLYCDNPSCGEKIRLSEQRRVLQPTGFVHDFYEEPSNDVTTQTFIPVQTPWIAGKGTRLSLPNSALGFMVADTSGHVFNYSSGLYGHGYAVCLECGRAESQKEKDKFPVYLSPEQKHYPLKPSKHDRENGQRKFCEGSERLIKDLHLGSYMTTDIFELVLHHPERNEYIADKKENDSIALTLAVAFRKALSKELGISTNELGYGKRPILLDCHQQITAIQVYDVISGGAGFASSAPRHIESLLSNMIDELECPKDCESVCAHCLLDSQSRHHYSLLNRHAAKAWLGSNYKKFISTEELSFFQGAQYWPYSLKECIEHHVSLGAKKLILNWGGVDDSWELLSSSVRKNIARWADDTTLSIEIAIPKAIMDSDQHLAELRFLEKHFNIQFVEGDDIHQSIVAQLHLIDRIITVVSPDMNSRIPNEEWLSTSAIVGVSESYKLLTENVITLPILEATHQSSIVGLDLLDQLNVDLYSFGRKFWDLVVESSSDFGKICKNETITSIEYSDRYIKTASNMMLIVSWLKGLEEQVSSLGRVKIKTIISNDETKGLPMYLHHDYHNAIEFERIFEKLLIDNLNLSKKEVGLMIYDNTKALYHKRNLTVVFESGTIFDIQLDQGLGYWRLFESHKLSQRNVHFNAQKDFASVAKGLTDLQKFLVVRNGEHNPTNIYVKRREADLVVATSVY

SEQ ID NO: 25096 - protein, 1122 aa, Acinetobacter baumannii OIFC035
MEFLVSETLRTQSSSRLLLKQIFEARKIKEPTSHPLYTYHITLEEYEDLKHMLKSSQQDQKSHKPSLEWCAVFTLFVSEWFRREYKSGWSWGPVYDALSFQPLDDIRYVVQQGLENFWKRRILKFESSNHTNYLGSAFKEGGFPSNLLMEKGNNYQTVFKRIVAQFSHYRHYNPEVNDQLIQSYTRYLPQAFKEFETRVLISDMAEHLVHLVETHQLDNTDNPAAYLSANFPKWREAFPLPLESSVAEQFLNQLLLTSSTELKQMKTKQDTLSCVSFFNRNSIQILTEIFLPNLLEIALEDVKGIPPRVEIVLYEAYEPLAKLGTATFMTRPEIGKPVNIRIGAQTRIITRKNYQHGLILALQNKDQIIYQKELPQTCLEIGSVPVAFAQDDGELCPFIGQASFKTAESDIILLLPPSYQFTSQDCVTGHLSNAFGQHVYKVKGDIQIIGDNQEQYQIQCSKYHDKSELVDLFGKKFPWSTVPVLAFLGRPKACYIETGLQSKNDSLAIYAEQKLLVHHVGSAGYGVKTLTVKNVAQNVVLRRKVVIFPEDLKVELLAGDTPNEADIRLLTNSNIICLGITADHQAVSFKSRKLNNDIHGQYGYEYHLSCNEYPPENIKLNLMLNLGDQVDVSLPFPSHGAMLYNGNHQPIKQKILTSDDLLGSRLCLYAPENKPTNFRMTIRLKSIHIRDVDAPYYKWQFLVSGKPHQESLIHYRAEIEELLALTKDLDARIILEVTGGKQSLNYEIKHYQTEFEIDEQGHYFLSGLNLSGSQVADPVIMVLNQPEQAVLPLQPISTEGVETGKYKLPRLSNVGPCLIIPRDQKSIKFRPKFIVQQVRADSFSLKSVDTLHTAVRDYHPTFNSNSIVDYLEIMASDLQNSGWLYLYYLYSKYNHLPLVTFQVWKDLVRNPSCLALAIWLLDFEHDIYQRFEREFDLVWELIPTEAWKNAIFKTFKLYVSQGIPEAIVKKTLKARYVKLSQDISTLNQSLEAYYFDESVLNGLTQNQLNSIVNGYYLQNLLRYQPEGEMWPTWFQQELTAWFEKENQNLPLKPIVSLPQHSSVILLPIYLAMKNVGLTSFVLEDKSNSLTNHKIRQLRDFDQSWFISIFEITISYLLNSQAH

SEQ ID NO: 25097 - protein, 2105 aa, Acinetobacter baumannii OIFC098; identical to SEQ ID NO: 25073

SEQ ID NO: 25098 - protein, 1096 aa, Acinetobacter baumannii OIFC098; identical to SEQ ID NO: 25074

SEQ ID NO: 25099 - protein, 2099 aa, Acinetobacter guillouiae NIPH 991
MQRYYSDLLEQVCQRTKESTLSVLGISDSELREHLAEQMSQLPGDKFSFLAPPVFEHTFAWKQAQVTMSDLSGKLLAKSVVEALDAENNGRYRFGKEFNPFEHQLKSWKNLLVDKKSIVVTSGTGSGKTECFMVPILNDLYELSEDINTPLEGVHALFLYPLNALINSQEERLSAWTQHFGRKLRYCLYNGNTPESESSKRTLQKERPYQILSRELMRKSPAPILVTNGTMLEYIMVRQIDAPIIEKSRASKSLRWIVLDEAHSYVGSQAAELALQLRRVLEVFGVEAKDVRFVATSATIADSNAEQQLKIYLSQLAGIEESQIEVIGGRRAVPQLKHETHQNKLSLKELAEIEGDLEVSAKRFQALESNQTARAIREIIVQQGAESYKPLTSLEIKDKLNAEYAISVDQVEIISWIDLLTNTKAQEKEQAFLKVRAHFLQRITHGLWSCINPNCDQKVGTALKKWPYGNVYATCEQKCKCEFESPILELTFCKECNSPHLLGQLVDSIHGRQLKQVGEAKIDEFSLLTDDDELDEGDLKGNSNKLLDYSSLLLTVNGCGEMLSLDQKGIEKFPGEEDFNLFATSNECHNCGSVTQEGYLPVNRSILGAPFYVTKAVPTVLEFCTDITIKELEENNITNISPQSLPSFGRRLITFTDSRQGTARMSVQMQQEAQRSRLRGAVVEMLKTLPETSSGGMNREEVEDQIEKIKHDPKMKMVLTLLQQELLRLDSSEDSFISWKEMIEKLTALSDFNFSILNAMKYYSPEVFGDQTEGPHKLISMLLLSEFSRRPRNRNSTETLGLVKVGYSGLEKVNSVPSYWEAKALNLQDWKDFLKVVLDFYVREYYYIHIEKSISNWMGRKIVTKRLFGPESKLIEDKVSKQWPLASKRKNNRLVKLLALGAQLDLNSPVDIDIADEWLKFAWKVLTQDTGILESDNGQFFIRPQKFNFSLNEQVFICPVTHRLIDTTFKGITPYLPTGMPKSKDAFICQKTKMPNLKTFSSNKDHHTNIQYIRDLITNDEAIKELRSLNLWNDLCDRIVEGGMYYRVAEHSAQQASERLQDYEKRFKSGEVNVMNCSTTMEMGVDIGGISAVVMNNVPPHPANYLQRAGRAGRSKESRALSYTICKSNPHDQQVFYNPKWAFETSIPAPYVALNSKRLIQRHVNSMYLSFFLKNEIGDTDAEKTKLNLKWFYLENGAEEISICNRFINWIKANIYTYLNALNKLIKGTDLSFDSVESILANTVQKITEMREHWMKEYERLETQLSEAEKGSAYAYRLSIEMRRLCDEYLLRELAAKCFLPGYGFPTDIASFETTNVIDYIRQKKDRDAEKQRKSREDNVSLLRDMPSRNLAVAIREYAPGSEIVLDGRVFKSKGISLAWHNIHSSDAKEAQKFDLAWRCVHCGQNGFNTDSAVDINNVYCDNPSCGEKIRLNEQRKVLQPTGFVHDFYEEPSNDVTTQTFIPVQTPWIAGKGERLSLPNTALGFMVADTSGHVFNYSSGLYGHGYAVCLECGRAESQKEKDKFPLYLSPEQKHYPLKPSKHDRENGQTKFCEGSERLIKDLHLGSYMTTDIFELVLHHPERNEYLADLKENESVAFTLAVALRKALSKKLGISTSELGYGKRPILLDGHHQITAIQVYDVISGGAGFASSAPRHIQSLLSSLIDELECPNHCESVCAHCLLDSQSRHHYSLLNRHDAKEWLGANYKNFISTEELSFFSGAQYWPFSLKECIEHHVSLGAKKLILNWGGTFDNWEILSASVRKNIARWAEDTTLKIEISIPQTIIDSDTHLAELRFLEKHFNVQFIESDDIHQSIVAQLQLTDRIVTVVSPDMNSRIPNEEWLSTSAIVGVSESYKLLTENVFTLPILEATHQSSIVGLDLLDQLNVNLYSFGCKFWELVVESCSDFAKICKNETITSIEYSDRYIKSASNMMLIVSWLKGLEEQVSSLGRVKIKTVICDDETKDLPIYLHHDYHNANQFERVFEKLLTDNLDLSKKEIDLMIYDNSKALYHKRNLTITFESGAIFDIQLDQGLGYWRLYESHKLSQRNVYFNAQKDFTSVANGLTDLQKFIIVRNGEQNPTNIYVKRRVADLVVAVST

SEQ ID NO: 25100 - protein, 1120 aa, Acinetobacter guillouiae NIPH 991
MELLASDILGEQLSARYIIRRIFESRKLTEPTSHPLYTYHITLEEYQDLKSTLRSSQQDQKSHKPGREWCAVFTLFVSEWFRREYKSGWSWVPVYDALGFQPLNDIRYVVQQGLESFWKRPILKFEGSNHTNYLGSAFKEGGFPSNLLMEQGNHYQAVFKRIVAQFSHYRHYNHEINDQLIQAYTRYLPQAFKEHETRVLISDMAEHLVHLVVTHQLDNTDNPAAYLSVNFPKWREAFPLPLESSVAEQFLNQLLLTSSTELKQMKTKQDALSCVSFFNRNSNQILTEIFLPNSLEITLEDVKGIPPRVEIVLYEAHEPLAKLGTATFMARPEADKLVNIRIGAQTRIITRKNYQHGLILALQNKDQIIYQKVLPQTCLEIGSVPVAFAQNEGELCPFIGQASFKTAESEIILLLPPSYQFTSQDCVTGHLSNAFGQHVYKVKSDIGVIGDNQEQYQIQCSKYYDKSELVDLFGKKFPWSTVPVLAFLGRPNACYIETGLQSKNDSLAIYAEQKLLAHHVGSAGYGVKTLTVKNAAQNVVLRRKVVIFPEDLKIELLVGDTPNEADIRLLTKSNIICLGITAGHQAVSVKSRKLNDDINGQYGYEYHLKCNEYPPENIKLNLMLNLGDQVDLLLPFPSHGATLYDGNHQPIKQKILTVDDLLGSRLCLYAPENKPTNFRMTIRLKSSHIRDVDAPYYKWQFLVSGKPHQESLIHYRTEIEELLALTKDLDARIILEVTGSKQGLNYEIKHYQTEFEIDEQGHYFLSGLHLSGSQVVDPVIMVLNQPEQAVLPLEPITTEGVETGKYKLPRLSNVGPCLIIPRDQKSIKFRPKFILQQVSADSLSLESADTLHTAVRDYHPTFNSNSIADYLALMVSDLQNSGWLYLYHLYSKYNHLPLVTFQVWKDLVRNPSCLTLAIWLLDFEHDIYKRFEREFDLVWELLPIEAWEKAISETFKLYVNQGIPESTAKTMLKARYIKLSQEISTLSISFQDYYFEERIQNIVPKPALDYLVNEIHLQNLLRYQSEGEMWPTWFQHELKIWFENNKLQVRPKVSLPQQASVILLPIYLAMKNLGLTSFVLEDKSNSLTNHKIRQLRDFDQSWFNSIFEITISYLLNSQAH

SEQ ID NO: 25101 - protein, 2105 aa, Acinetobacter sp. CIP 102136
MYKYFSSLTQESIQKNKEATLSILGISHPELRNVLEQQMSQAVGEDQSFLSSPVIEQMFAWKKGQPTLEDLGGELLHANVIDALDHKENGAYRFNRNYQPYVHQLQSWNSLLEDKKSIVVTSGTGSGKTECFMVPILNDLYEEFIQAGQSLTGVHALFLYPLNALINSQQERLDAWTRHFLPSNAIRYCLYNGNTPEHKSQKTGEQNLHPNQVFTREELRSNPAPILVTNGTMLEYMMVRQIDAPILQKSQGKLRWIVLDEAHSYIGSQAAELAMQLRRVLHAFGVEAKDVRFVATSATIAGADAEEKLKQFLSEISGQSIENILVIGGQREVPPLASVESNLLSFDELVSIDEGQEISFERYHKLSGHPIALTLRECICSERALTLKDLFKKTLEKDFQLSQQEILKWLDLLTFTKPSSTEQAFLKIRVNYYQRVTHGLWSCINDKCDQKTEDLKNWSFGQVYATHQENCACGAPVLELTFCKSCKEPHLLGLLGREDVLKQWTVEVEDEFALLIDNETEEQEEREFKNAIKNRLVVFSANENKEKNYRRQQLNLDNLKLGQISKNALNVHYFEPHNSGDPVECNNPECGSKGTKYDLPFRRAILGAPYYITQTVPHLLQYCPDIDQDEIDEASKNFNDPEFFAGEFKDLKDCTPWDMPAKGKRLITFTDSRQGTARLSVKMQQEAERSRLRGAVLKALIQHTKAQTITMDPTEVFLRQKVEEAEKSGNDFLINLFQKELDGFMNNKAPVVLPEISWEELYRVLAKDFDFQNGILLANRHIAGDIFDDAGPLKLAQMLLTREFSRRPKNANSLETLGLVKVSYQGLNNLNDLPNYWKESGLGNQDWQDFIKVVLDYYIRENTVIDLADDWQQWLGGRVRPKHVVSFELADQFKHRDDGSKNNSILAWPLASVSKNHRIVKLLVLGAKLDLSLQAHRNMADDWLKKAWQVLKAEFLVEAGNSKYHLKKEKLTFSLVDKVFLCPITHRLMDTTFKGFTPYLPISLPHNIDKYKTEEMAFPKLWQFDPENLIEIHGDSNVGKLRSLNLWTDLSDSAVLGGFFYRTAEHSAQQSANLLKQYETYFKAGKVNVLNCSTTMEMGVDIGGISTVVMNNVPPHPANYLQRTGRAGRGSQSRAISYTICKNNPHDQQVFKQPLWAYNTAIQAPHVSFNSQRLIQRHINAQLLAIFLIKEIGETDIDRPKLDLKWFYLKQDGQSDSICDTFEKWLVGKAVKDYQQVLEFLKKGTALKDIDNAEIIDACVTKIRELKIEWLEEYVIIEREYQQELARNPNSSYLYRLTCEKYRLTQAYLLSELAMRNFLPSYGFPTDVITFDNTNKLEKDRWDKLSKNRKTKDLESRLDREDNLSRVKGLPSRNIAIAIREYAPGAEVIVDGRVYTSRGISLAWQNIHNEHDKKPQKFDYAWMCHHCGQTGLTSGVLSNEEQLICTNIECGEIIKDVKKVLRPNGFSVDFYDKPNNDVTTQKYIPVQIPWVGLSETALSWSLPHANLGYLNVDPNGHVFQYSSGLNGTGFAICMQCGRADSMEESYDGEAKFPSTLTPDRPHKALKAQKDGDKFKRPDCGGSSVVKSNIHLGCQIKTDVLEIVLKHPTRNEYILKSEEGTIIATTLVVALRQAIATKLGIAAHELGYGIKVKKIDDKAVLVLQIFDDLSGGAGFSTTAVNYITEVLRLLIEKLQCVDDSCNSVCGKCLLDTQTRHDIENLDRTLALAWLGDDFLTYLDSPIANTDFIAGTPFSIIEQYVNHGATQITFNLTGNSEDWDVLCTAIRKKLFKFLNSNMKLVGVVSLDMSLTPQIQQEMLALEKIGISFTVNSNITPEYLYAQIVSQEKVITLYNQSAEVSCFNEFWLEGQSPSYKSITSPELQLQKFSFDFKAIESYENEFQQIKVGKDFDGESVNDFAEKFWAKVLPISKLHDLVNDEVIEIEYSDRYLQSPANIILITSLLKGIKKLLGIRPRLTITTCFRNKQIQDEKLYSDFSKREVFDSFFINYFEDQLSQKLNLQIPDSKIDHARFLLFRLKSGKKIELRLDQGVGFWQIKYIEWPKVKEDRDFPFNESFQKQLLWVKRQETNLCVRSEENFKTDLYITKS

SEQ ID NO: 25102 - protein, 1097 aa, Acinetobacter sp. CIP 102136
MSNLNFSPRKYLEQILTTRGLTSADGRVLYQYQLSVGEFKEIENILKKSFPFQNLNRIGDEWARLFTLYAAEWFRREYTAKWTWDPILTALNIVDLPVNTRNEVVIKGLRFWKRPIIKYSKANNYLGSIFKEGGFPARLLKEDGNRYISIFQKVTSLYLNNKYDIDELRAEIQQELKTLPQAFEHDETLSLVIDIVKLIIEKVEKYGLNVQQDPITILDQESRSWRKEFPLPIDEDQTIVDDFLRHLFKSTTEEISKHHQLRQAFKCTHSLSEDFRELFSTVYLPEELSFTLKENTELLRTRGHLVIKEGLNNKSHFLCIAYLSLQGSQQVIAEINRGFSKDIRRQSCNETLYLCLEVDGVVLSYKELEDSSLDFETLPVAFEIQDKPKYIAQGALKTKASEVLLSLPAGAKFIHTESEDSPQYIGQFLAFDLYKISGQQRILTQDGDQIFIKCGHSQVEFEQLLFRTNNISALQTSPSLAFTGKPVLKTFGTHTLFCGKEPIESIPLHRLLGEQMLTLKNRQGESLLKKRVIVLPKHFEVNVRAGAVLNQAILDIESDAEIQIEVLNLHSSLVYEKTGISYKCQVECAVVPLALNLKITFKFGGECIVTVPFPARGFKLINEQKEVTSKDLVIHDLLNTELQVYSYDRAAKLNFDIVLKTKKNQGYDVPFYRKKIKVKQGISSINLYELVEDVKGVLALDDDLDSFVECTVSYHHSEKKWNIRHYAHQLNWGKNIKAYYNDKASLSFKPQAMSLVQPQVTSLDLIEKKEWVEQAFQLPELDMSLAPYLLIPVKDSTLFRAKLIPEFNYPEDTEIDELTEATRNFGQNKLSIKQFIRTVNYENNEVFWEHVKALLHNYEHLPLNTFEVLKGLAANYDQLAISVFKLDLSLDLLRRFETELSVLWYLIPVSSWQNAINQLIQYWQKILMDDGTYGRAKAENILKRLKNFTPLLAESFHTFYLSNQRSFGPEFNFHFLNDWIFEGNFIGGLENSEYQRMLQRNHSATEDQAWPTALSQNKWAYFDCMQKLPFSCQLASQWNKDVVYLPFCLAYMNVKHHSKLQLSAYDILQLKQIIAFDEQWFNQIFSSIVKYLILEAK

SEQ ID NO: 25103 - protein, 2099 aa, Acinetobacter sp. CIP 102637
MQPYYSDLLEQACQRTKESTLSVLGINDPELREHLAEQMSQLPGSKFSFLAPPVFEHTFAWKQAPVTMTELSGKLLAKSVVSALDSQSNGRYRFGAEFKPFEHQLKSWKNLLADKKSIVVTSGTGSGKTECFMVPILNDLFELSENINAPLEGVHALFLYPLNALINSQEERLSAWTQHFGGKLRYCLYNGNTPESESSKRTLQKERPYQVLTRELMRKSPAPILVTNGTMLEYIMVRQIDAPIIEKSRAKKSLRWIVLDEAHSYVGSQAAELALQLRRVLEAFGVEAKDVRFVATSATIADSNAEQQLKTYLSQLAGIEESQIEVIGGQRAVPQLKLETNHNKLSLKELSEIESDLEVSAKRFEALESNQTARAIREIIVQQGRESYKPLTSLEIKEKLNADYAISVDQVEIIAWIDLLTNTKAQEKEEAFLKVRAHFLQRITHGLWSCINPHCNQKEGTALKKWPYGNVYATCEQKCKCESPVLELTFCKECNSPHLLGQLVDANDGIRQLKQVGEVKIDEFSLLTEEDEIEEADINNSSNKLIDYNQSILLSVNDNGEMLNLDRGGFEKYPGEEEFNLFATSNKCHYCELETQEGYLPVNRSILGAPFYVTKAIPTILEFCPDITIKELEENGVTNISPQSLPSFGRRLITFTDSRQGTARMSVQMQQEAQRSRLRGAVVEMLKKIPDLSGGEMSREEIEEQIEQIKHDPKMKMFLTLLQQELLKLDTSDESSISWKEMIEKLTALSDFNFSILNAMKYYSPEVFGDQTEGSHRLISMLLLSEFSRRPRNRNSTETLGLVKVGYSGLEKVTSVPLYWESKGLNLQDWKDFLKVVLDFYVREYYYIHIDRSISNWMGRKIVTKRLFGPDSKLTEDKISKQWPLASKRKNNRLVKLLALGGQLDLNAPIDIDIADEWLKCAWKVLTQDIAILESDNGQFFIRPQKFKFSLNEHVFICPVTHRLIDTTFKGITPYLPTGIPKSKEAFICQKTKMPNLKVFSSNKDHHDNIQYIRELIANDETIKELRSLNLWNDLCDRIIEGGMYYRVAEHSAQQASERLQDYEKRFKSGEVNVMNCSTTMEMGVDIGGISAVVMNNVPPHPANYLQRAGRAGRSKESRALSYTICKSNPHDQQVFHNPKWAFETSIPAPYVALNSKRLIQRHVNSMYLSFFLKNEIGNTDAEKTKLNLKWFYLANGDEDISVCNRFINWLKANIYTYSYALEKLIKGTDLSFDSVESILGNTIQKITEMRDQWLREYLRLETQMSEAVKGSAYAYRLSIEMRRLSDEYLLRELAAKCFLPGYGFPTDIASFETTNVIDYIRQKQDRDAEKQRKSREDNVSLLRDMPSRNLAVAIREYAPGSEIVLDGRVFKSKGISLAWHNIHSSDAKEAQKFDLAWRCVHCGQNGFNTDSAVDINNVYCDNPSCGEKIRINEQRKVLQPTGFVHDFYEEPSNDVTTQTFIPVQTPWIAGKGARLSLPNSALGFMVADTSGHVFNYSSGLYGHGYAVCLECGRAESQKEKEKFPLSLSPEQKHYPLKPSKHDRENGQRKFCEGSERLIKDLHLGSYMTTDIFELVLHHPERNEYLTDSKENESIAFTLAVAFRKALAKKLGISANELGYGKRPILLDGNHQITAIQVYDVISGGAGFASSAPRHIESLLSSMVDELECPKHCESVCAHCLLDSQSRHHYSLLNRHDAKKWLGANYKNFISTEELSFFSGAQYWPYSLKECIEYHVSLGAKKLMLNWGGVSDSWELLSASVKKTIARWAEDSNLEIDISVPQTIIGSKAYLAELKFLQTHFNVQFVEGDNIHQSIVAQLHLTDRIVTVVSPDMNSRIPNEEWLNTNAIVGVSETYKLMNEKVITLPTLVEKDQSSIVGLDLLDQLNVDLCSFGRKFWNLVAESTSGFGEICRNETIKSIEYSDRYIKSASNMLLIVSWLKGLEDQVGNIGQLKIKTVISDDETKDLPTILHHDYHSVKQFEKVFEKLLTDNLDISQKEIDLMTYDNGKALYHKRNLTITFESGTIFDIQLDQGLGYWRLFESHKLSQRNVYFNAQKDFISVANGLTDLQKFLVVKNGEQNPTNIYVKKREGDLVVAVSI

SEQ ID NO: 25104 - protein, 1122 aa, Acinetobacter sp. CIP 102637
MELLASDILGEQLSARHILKRIFESRKLTEPTSHPLYSYHITLEEYQDLKRTLRYSQQDQKSHKPGREWCAVFTLFVSEWFRREYKSGWSWGPVYDELGFQPLDDIRYVVQQGLEGFWKRPILKFEGSNHTNYLGSAFKEGGFPSNLLMEKGNHYQTVFKRIVAQFSHYRHYNPEINDQLIQAYTRYLPQAFKEHETRVLISDMAEHLVHLVETHQLDNTDNPAAYLSNNFPKWREAFPLPLESSVAEQFLNQLLVTSSTELKQMKTKQDALSCASFFNRNSNQILTEVFLPNSLEITLEDVKGIPPRVEIVLYEAHEPLAKLGTATFMARPEAKKPVNIRIGAQTRIITRKNYQHGLILALQNKDQILYQKELPQTCLEIGSVPVAFAQDEGELCPFIGQASFKTAESEIILLLPPSYQFTSQDCVTGHLSNAFGQHVYKVKGDIEIIGDNQEQYQIQCSKYHEKSELVDLFGTKFTWPTVPSLAFLGRPKARYIETGLQSKNDSLAIYAEQKLLTHHVGSSGYGVKTLTIKNTAQNVVLRRKVVIFPEDLKIELLAGDTPNEADIRLLTKSNIICLGITADHQAVSFKARKLNDDIHGQYGYEYHLKCNEHPPENIKLNLMLNLGDQVDLLLPFPSHGATLYNGNHQPIKQKILTVDDLLGSRLCLYAPENKPTNFRMTIRLKSSHIRDIDAPYFNWKFLVSGKPHQESLIHYRAEIEELLALTKDLDARIILEVTGGKQALNYQIKHYQTEFEIDEQGHYFLSGLNLSGSQVVDPVIMVLNQPEQAVLPLEPVTTEGVETGKYKLPRLSNVGPCLIIPRDERTIKFRPKFIAQQIKEDSLSFETADTLHTAVRDYHPTFNPNSIADYLELMASDLQNSGWLYLYHLYSKYNHLPLVTFQVWKDLVRNPSCLALAIWLLDFEHDIYQRFEREFDLVWELIPSEAWKNAISKTFELYVSQGIPEAIVKKTLKARYANLSQDISTLNPGLEAYYFDEPVLNGLTSNQLNNIVNGHYLQNLLRYQPEGELWPTWFQQELTAWIEKDNLNLPLKPMVSLPQHASVILLPIYLALKNVGLTSFVLEDKSNSLTHHKIRQIRDFDQSWFNSIFEITTSYLLNLKAY

SEQ ID NO: 25105 - protein, 2047 aa, Alistipes putredinis DSM 17216
MNMNYFSFYNKAKELLIDSLASLWFKGQAQEQEYIKRILTKDEPLFAEPVFQSIFPWEESADSFEEHSSKLRLLTPSFVNALSSEGIDKDLRFPLDRHPYKHQTESWRTMLSSRPQTIVVTTGTGSGKTECFMIPVLQDLAKTNEKNCVQAIFLYPLNALMKSQQKRIHAWCKALPEKVTYAIYNGETDKENRSDRYTTSHYPQLVTRPQIRKTPPQILFTNPTMLNYMLVRAEDREILEKSKGKLKWILLDEAHTYTGSSAAELSLQIRRVLDAFGVTIDQVNFAVTSATIGDESDPKTTIKLKTFVSQLTGKPFEDIKIISGKRIIPELNKGIAEDQLSKINKKFSIELSYSDIEKLRKKLNSSPVLKAKEIGRMLDKGIGKNVDASLEIIDALGEKVKGLNKGGGLGALLPTRAHLFVRSISGVYVCTNPDCQRHKGYRLSIGSLTTYQNMNCPVCKSKMLELATCSSCGSPIIVGETNTTKGFRMHTNVIDLDKSLFYEQKEDLIDLEDMGNIEDVEQNEADGFSRFFFAIPKKACLRKNANRTYHIFNHQNGKIELVPEDNRSNKCFTSLKSEESIPVIYQSLRHSGDNHVLCPHCGNNLSEFKNLDYLRISATQIGRTLATLLLDNAEPIDSNDADVVYEGRKYITFTDSRQGSARSAMGLNQDVERSWIRASIFHKLADMRLNDVKPGGLTPDEEAEYNAYLSIREHLPTLLFEKFKQLEKKKNGIPVIPNPEEVSWGQISQSLENDSNFKKLYEHVDKARGRKNFENATDYLKALLVDQFGWIPKRANSLETMGFVRLVYPALKNAKCPALLQKRCTDTDWQNFLKICMDYVIRGGRHYMLSGAYKDYLTQNKYCSPIYPSNSELRKNGSPVSKWFKVNVSSKGINENQNRLVLLLCAVLDYDDISQINQIKIADINSILDAAWDFLKQNVLEATDVENQGYMLDLMGDKVKLQLIEKGYLCPVDNVIIDAPFCGYSPRMNGYISRENFDRFKIKTEFVNPLFPFKSADQTEKNVMEWIEKNFSEQKAAGVFGVMNSRVFASKPIFISAEHSAQQSSEDLDRYEREFNEGKINILSCSTTMEMGVDIGGITEVVMNNVPPKSSNYLQRTGRAGRRSETKALALTVCAPNPIGTHTWNNPDYPITHVTETPLLKLESRQLIQRHVNAMVFASFVADQGGIRVTATLRDFFVTAEGMSFFDKFLNYIDSVISGKVERLQEPYLKLIKGTSLAQITLADVAQVVKKDIVAVYNVFDAHKGALAKAIESLKNESGTTNAIKAIEKQEENFFKTSMLSYLAENSFLPSAGLPLGLVECLLGGKEKVDGNSPTLHISQAISSYAPGNPVVKNEWVYETNGIRLKTKYDDSTSRYIIQNCTHCGYTTIIYGSAKTDCPKCGRHGTMHGIKDISLSTDQRFTEVVEPAAFSVAWDSTPTRKMDSLGSMNFIQPILLEMDAWLLKTNSAKMSIRCSTPRSEILFYNKGTNGYGYAFCPYCGRMKSEKSPDTTERMLSHHKHLLASTSCPGGENDGAAVRRHVLLVGRYQTDFVEIKFYDKDNNLVEDTETLYSLGVILSRKLTELLGVNDGEIEFGYDGINHSIFIYDTALGGAGYSLLFREYKDEVLKMALETLERCDCERSCTKCLIDRRSQWYTNYLNRPKALEWLRQEVKARVAPKEIIYLMPDSHVVTSDITTEFYQLTRNKDISGIRIFVNDNISQWDAETFPFKKILTELSLEGVDVAFILPSVPDVKSLSSADSATLIAEVFKTNFKCLENTLPTGLFPLMVVIMNDGIVKTYFGKNIDTSYSKNWGSGDVFITTQPNSLSYADINRMQLLSAFSSDDSSFMFEYRIREHSSLGRFFDSLKAPETGNWNRIISNLRGKAVSIEYSDRYLKTPLGCMLLAKMISSLKNEADLVLVSIKVIVTNIVSINDPDMAVNAIKDFTNGKKRNHFLKDAIFELTGIEPEIQDTGYVEHERCLTVKADNAEICIRPDAGIAKGWAPFGRDNAECTDRDFREDWNIDLELFNKQQIGNGILYTISYKQL

SEQ ID NO: 25106 - protein, 1065 aa, Alistipes putredinis DSM 17216
MVNICNSEQHVVLMRILDARNRPSITPDMPLWKLKLTEEEYTNLKETLAQNAYRLEDFGIEAALCYAEWWRRDYNGGIPSREDVAVGLGLPHYCWEQLYKAARHGLKSHGFAFIHSLKGNEYFRTLLNQGGLPVNYIKNGTNLSGFSRFLIGLVEELSSINIDWDDNNIDLIKNFNCIAYLGKAFKNDNIYDVSLQIAHAIISEEDRWLPYDDTDSSLSELTKSLKREYRRVKSEHRTKPLSLSWKLRLTSSETANLFVNLNIVKEISSKSIEGLNYQSCYTFDVFVSGILVGKYVRKSLVKDDVGEVIGAIYSRITVGVANDIKWSGEPVVEVKIRCDNDDRLFPTLCGSYPPNFECPQVFQMLDDNVYSLKSTVNAENNIAVFSTNWKCDGSHKLLLNGELYSAIKFTDKVDLHNCMSNEDITITNEFTPYSAEFRGTYIQWVEQSNFKLLTRIPVISVFDQTGTRVGNIKPKYRIHNSKAEWRNLSNSCLLPFGLVDIKVEFPDNKYVMETFYFIDDMTFASRNETMFSTELHLDSRHVISAKVDECENLSVEMTDKNTWRISRDACASKYSPTCNLKIIAENNPPLKVSVVVPFEGIVISDLEGKIVPSGKIISYDNLRYFNIISHGQSGMIDVTYKSDKIEDDDTIKHLKSPVIEGIVPLSDYRDLFARMFQLYGANTFDRSSSIELKICDKRIYIRKFVLDSELSSDKIRITDYTSEDTSDFIYDGDVYALPVSENIKPAELVQIKLEPYNRQMNLFTIPHELLNSEAILFSGPESSRRLVPKYYNFEQEDYSSEVRGEMSAANIILWSERLSKDDVFVGEYWAKTVKAFRIISEFNLPFTTYNAFKSIGRDPKLLVNLILACWLNGASDVLIQEIDRFEDELNIAVHWIPHTVWGECIESFIRLLPPTLINIMNTKLGEITELINALFNATLSAEVASELTQYVAGGNIGDARIFSRADINQFKSKIHGYTDNNIDLPITRFVLQNKYYVDQEMHKSYRVMIESAMCAAENFAQVKNHTNLFLLESRDYARITNFYRKYFKETYSKIFIGTVKQIVNK

SEQ ID NO: 25107 - protein, 2100 aa, Alteromonas macleodii
MKYFSELVNQSIARAKESSLSVLGITNPALRQHLATQMSQDCGESESMMATPLFEHTFGWTEADRTMGQLAEDRLLSSAVLDALDKEKITDSQGKQVENRYQFKKEFKPYTHQLKSWNTLLADKPKSVVVTSGTGSGKTECFMVPVLEDLYRESQQTQEPLSGVRAIFLYPLNALINSQRERLHAWTQDFGKDIRFCLYNGNTEEKANKVKARQAQVPNEILSRELMRDQPAPILVTNGTMLEYMLVRNVDSPIINKSKEQKSLRWIVLDEAHTYVGSQAAELSMQLRRVLHAFGVEAKDVRFVATSATIGDKDAEKQLQSYLADLAGVPNDHVVVIGGKRNIPQLTFSPKDAQTLEELSLIPADKKPGEKDYDPDVSKTRFEALTESTVAKKIRDKFVNSNKPLKLAELKKYLEGEFPSQTFTQNSVLQWLDLLTGTKLSPKHEAFLKVRAHFFQRMMNGIWSCIDPHCASKKSSVLKDSWPFGMVYSKQTGKCNCGAPVLEVGFCNDCNEPHLLAADKSGFITQRDTDVGDEFSLLIDQDDDDDTEGDESVNKNKPTSIFVTLRAEPDDELIYSPVDINVSTGKLGDITDAVRLYYAYDRDENSTYQTGCCGYKGTSFKKPIRRAILGSPFYVANAVPTILEFCPDPKVDKETGLGPNTLPGRGRKLITFTDSRQGTARMAVRMQQEAERSKLRGLIFGILKDNQNAVQAEIPAIEPKELATLKERYKKLKNAGEHDWANEVYQQIIEGEKSLNSSFKPAVLSWNSLVKELQLKNDIKDNILTYNKYANPEVFGDSTGAEKLSEMLLIREFARRPKFQNNMETQGIIKIGYQGLEKVNAIPDNWSEHGLKLEDWLDFLKVCLDFYVRENTYIKLEDDWRVWIGFKFAPKTFLKPDSFEEDENRVKKWPQVKGAYNRLAKLLIIGAKLNKESKVTKDLVNEWLRSAWTALTKNKVLNNEGNQFFLSRQKITFEFAEKCFICPVTNKLLDTTFRNLTPYLPNSFDSKNFECKSIDLPPIWTLDISQYDYSEGLKKIRQSVSADEKVSQLRSRNLWTDINDRVVEGGFYYRTAEHSAQQSSERLNNYESMFKSGKVNVLNCSTTMEMGVDIGGISAVVMNNVPPHPANYLQRAGRAGRSKESRAISYTLCKSNPHDTEVFNEPSWPFVTAIPAPKISLDSKRLVQRHVNSLLLSIFLRDVIGSTNKEKTSLNLEWFFLPSEGGQSVCDKFIAWASGNANTLEKTLKDVLKGTVLSTVPAWNVIDDTNQAIEKLSERWITHYRQLKTAEQDATPESAYEFKVRVELTRHTNEYLLKELAAKAFLPGYGFPTDIVTLNNKNIVDFKREKEGKQKREKFREDNISQLRELPTRNLAVAIREYAPGAEIVLDGRVFKSAGVALNWQKLASDAKEGQKFDVAWRCGSCGHSGVETNTTVKEDWSCGSCGTKIRNSWKKTVLEPTGFVTDFFTAPSNDISSQSYIAVQPSWLSIDALPINLPDPNLGYMKYGTESTIFQHSSGANEHGYAICMQCGKAESMLGDGEFPKSLNPASFHKPITSTPKSKDKDGFEPELCDGSATVHGNVHLGCSGLTDAFELVLRNPLSGEYIDPSHPDSESIALTLAVAMRNALAAKLGIATSEIGYSTRKTRVQESNKQAIAVQLYDVVSGGAGFSTSAALHIEDVLMQTYQNLSCEASCDSACSTCLLDSNTRHDANQLNRNLAKAWLGDEFSNFVSLSEQYHFIKGAKFCYEPILEAISRQINKGASEIRVWMGSNVNEWDLNSRHVQMFAFQMLNIHKVKLTIVLPNTTLSDADYISLSRLSDIGVEFVTSDAELDSGALVAQAIYEKDKAFTLACSSFDVLNPSQSWLLSRTENMVVYSEALSSVEVSPVDTSSWIKFDGNSMAKVELRKELDGAIDGFGKRFWELLGSNFKPLEDDLNSSQLAGVKYTDRYLQSPWYIILLGEVIRALPKAPGVGFELETLFNSRDKGARLHDDWSNSNAMTEVISTWFEKGAATPCYLDLHQRRDDIAHRREMKLSFSNGNMYSISLDQGMGYWNHHLAKNKHWFDFGQPHEQLLQMAEVWQYGNLQTTYDWETVIFIAKL

SEQ ID NO: 25108 - protein, 1132 aa, Alteromonas macleodii
MLIVDSPSLWLKKFLMERNLSSPNGNPLFSYQMTHDEYRQLFELVRDFYPKTNVSWSKHKDWSACFVIYCSEWYRRDCCAQKWEWFPLWQRFHFELTASQRADIIPLGLEGFWKRPIRRYESDTRNFLGSIFIEGGLPFKLISSTGNKFSEAIRKLLKLYYQVDLYAVSITELVKSQLGHLPVVFSEPESVELIGSVVKNLMTCAGLVDSDVGEESPSMQLDQKSPGWRDSFPIPLDDETGKGLLDNWLLGATNASKVIKDFKDKLSCEHSFDKTTGRFYTQISLPRKLTFRNCSEALESTYTQLGLLEGTKRIAELGGVVAQIDNGNVLVPPRKKSIKVPRRLLSSSLFTDLSQSGIVIGKVEVNESSISFNEAPLGFLEDEGELKLVGQGSFSTKYAEILVLAPLAYEIEILSGYQEYAGKQAIDGVEFNWFRVNGDSRFYHGDNRFRIRTNSTSTSSGSLYIDGAEILLKTLPSRVYKGVPSVRDAEGTLASQLGLSTLLNNKPVESLAAHELYGKHYLSVKNKESDTLLRRTVAIVPDDLDIEAVAVKEHAQIKVTSSRNLLMTVYAQACRVENEKLENGRLFEIYPEAEPPSSVTLEVQANLMEDPIIVTLPFPASGMFAFDSEGKPLKTELTVEQLLGAEVNLYSAKSYPEDVSIELALKPNNRTSPRYQSKVKVKDRTLSVSLYSFKEKIIELMSLSNNLDAEVEICLSGLSDKKVFSIRRYVSSLNFDSVGGGIALAQSELAHADLKPPMAMLIAEPERSPLELPEKEIGGISLGWFNTTEKMEKTGPWMIVPSSETPHLFRPTFYKGVESSYEHSETIKSLQTAVKQFNPRSEVNSIEMFLTVMESDFTHPSWDYCRKLWEHFSYLPLSTFEVWKALVKNPHCLTVALFRFEMNEEFIRALDREFSILWELIPISVWQQSILVVKKAFLNLGLPTSMVEERVEVLLDKFYDVVLNVPEPLIKRLKGIEINCNDYLAERIVELIQDPERESEQFQLFRDIGMKRLTGEAQLTEQEMFKVIDIAMKQPLLRNHKDSDWPSFQFPLLSEGLSHRIRCDLPHHASVINYPLIAAAIAAGYIEINPNKLSAKMKFEIKQIKMFAPDWFSGVYAFGIGYYSDCKEEVVA

SEQ ID NO: 25109 - protein, 2100 aa, Alteromonas macleodii str. 'Balearic Sea AD45'
MKYFSELVNQSIARAKESSLSVLGITNPALRQHLAIQMSQDCGESESMMATPLFEHTFGWTEADRTMGQLAEDRLLSSAVLDALDKEKITDSQGKQVENRYQFKKEFKPYTHQLKSWNTLLADKPKSVVVTSGTGSGKTECFMVPVLEDLYRESQQTQEPLAGVRAIFLYPLNALINSQRERLHAWTQDFGKDIRFCLYNGNTEEKANKVKARQAQVPNEILSRELMRDQPAPILVTNGTMLEYMLVRNVDSPIINKSKEQKSLRWIVLDEAHTYVGSQAAELSMQLRRVLHAFGVEAKDVRFVATSATIGDKDAEKQLQSYLADLAGVPNDHVVVIGGKRNIPQLTFSPKDGKTLEELSLIPADKKPGEKDYDPDVSKTRFEALTESTVAKKIRDKFVNSNKPLKLAELKKYLEEEFPSQTFTQNSVLQWLDLLTGTKLSPKHEAFLKVRAHFFQRMMNGVWSCIDPHCASKKSSVLKDSWPFGMVYSKQTGKCNCGAPVLEVGFCNDCNEPHLLAADKSGFITQRDTDVGDEFSLLIDQDDDDDTEDDESGNKNKPTSIFVTLRAEPDDELIYSPVDINVSTGKLGDITDTVRLYYAYDRDENCTYQTGCCGYKGTSFKKPIRRAILGSPFYVANAVPTILEFCPDPKVDKETGLGPNTLPGRGRKLITFTDSRQGTARMAVRMQQEAERSKLRGLVFSILRTFQESQPEKEDIAKDADLAGLKENIKSLQSAGLYDMAAQLQEKINAAEGGKPVSFKPEVVSWGTMVKELQLKNDIKDNILTYNKYANPEVFGDSTGAEKLSEMLLIREFARRPKFQNNMETQGIIKIGYQGLEKVNAIPDNWSEHGLKLEDWLDFLKVCLDFYVRENTYIKLEDDWRVWIGFKFAPKTFLKPDSFEEDENRVKKWPQVKGAYNRLAKLLILGAKLNKESKVTKDLVNEWLRSAWTALTQNKVLDNEGNQFFLSRQKITFEFAEKCFICPVTNKLLDTTFRNLTPYLPNSFDSRNFECKSIDLPPIWTLDISQYDYSEGLEKIRQSVLADEKVSQLRSRNLWTDINDRVVEGGFYYRTAEHSAQQSSERLNNYESMFKSGKVNVLNCSTTMEMGVDIGGISAVVMNNVPPHPANYLQRAGRAGRSKESRAISYTLCKSNPHDTEVFNEPSWPFVTAIPAPKISLDSKRLVQRHVNSLLLSIFLRDVIGSTNKEKTSLNLEWFFLPSEGGQSVCDKFIAWASGNANTLEKTLKDVLKGTVLSTVPACNVIDDTNQAIEKLSKRWITHYRQLKTAEQDATPESAYEFKVRVELTRHTNEYLLKELAAKAFLPGYGFPTDIVTLNNKNIVDFKREKEGKQKREKFREDNISQLRELPTRNLAVAIREYAPGAEIVLDGRVFKSAGVALNWQKLASDAREGQKFDVAWRCGSCGHSGVETNTTIMEDWSCGSCGTKIRNSWKKTVLEPTGFVTDFFTAPSNDISSQSYIAVQPSWLSIDALPINLPDPNLGYMKYGTESTIFQHSSGANEHGYAICMQCGKAESMLGDGEFPKSLNPASFHKPITSTPKSKDKDGFEPELCDGSATVHGNVHLGCSGLTDAFELVLRHPLSGEYIDPSHPDSDSIALTLAVAMRNALAAKLGIATSEIGYSTRKTRVQESNKQAIAVQLYDVVSGGAGFSTSAALHIEDVLMQTYQNLSCEASCDSACSTCLLDSNTRHDANQLNRNLAKAWLGDEFSNFVSLSEQYHFIKGAKFCYEPILEAISRQINKGASEIRVWMGSNVNEWDLNSRHVQMFAFQMLNIHKVKLTIVLPNTTLSNADYISLSRLRDIGVEFVTSDAELDSGALVAQAIYEKDKAFTLACSSFDVLNPNQSWLLSRTENMVVYSEALSSVEVSPVDTSSWIKFDGNSMAKVELRRELDGAIDGFGKRFWELLGSNFKPLEDDLNSSQLAGVKYTDRYLQSPWYVILLGEVIRALPKAPGVGFELETLFNSRDKGARLHDDWSNSNAMTEVISTWFEKGAATPCYLDLHQRRDDIAHRREMKLTFSNGNRYTVSLDQGMGYWNHHLAKNKHWFDFAQPHEQLLQMAEVWQYGNLQTKYDWETVIFIAKL

SEQ ID NO: 25110 - protein, 1132 aa, Alteromonas macleodii str. 'Balearic Sea AD45'
MLLSNSPATWLKDFLIQRSLSEPNGNPLFSYQMTHDEYRQLFELVRDFHPKTNVSWSKHKDWSACFVIYCSEWYRRDCCAQKWEWFPLWQRFHFELTASQRADIIPLGLEGFWKRPIRRYESDTRNFLGSIFIEGGLPFKLISSTGNKFSEAIRKLLKLYYQVDLYAVSITELVKSQLGHLPVVFSEPESVELIGSVVKNLMTCAGLVDSDVGEESPSMQLDQKSPGWRDSFPIPLDDETGKGLLDNWLLGATNASKVIKDFKDKLSCEHFFDKNTGRFYTQISLPRKLTFRNCSEALESTYTQLGLLEGTKRIAELGGVVAQIDNGNVLVPPRKKSIKVPRRLLSSSLFTDLSQSGIVIGKVEVNESSISFNEAPLGFLEDEGELKLVGQGSFSTKYAEILVFAPLAYEIEILSGYQEYAGKQAIDGVEFNWFRVNGDSRFYHGDNRFRIRTNSTSTSSGSLYIEGAEILLKTLPSKVYKGVPSVRDAEGTLASQLGLSTLLNNKPVESLAAHELYGKHYLSVKNKESDTLLRRTVAIVPDDLDIEAVAVKDHAQIKVTSSRNLLMTVYAQACRVENEKLENGRLFEIYPEAEPPSSVTLEVQANLMEDPIIVTLPFPASGMFAFDSEGKPLKTELTVEQLLGAEVNLYSAKSYPEDVSIELALKPNNRTSPRYQSKVKVKDRTLSVSLYSFKEKIIELMSLSNNLDAEVEICLSGLSDRKVFSIRRYISSLNFDSVGGGIALAQSELAHGDLKPPMAMLIAEPERPPLELPEKEIGGISLGWFNTTEKMEKTGPWMIVPSSETPHLFRPTFYKGAEPSYEQSVTIKSLQTAVKQFNPRSEVNSIEKFLTEMEGDFTHPSWDYCRKLWEHFSYLPLSTFEVWKALVKNPHCLTVALFRFEMNEEFIRALDREFSILWELIPISVWQQSILVVKKAFLNLGLPTSMVEERVEVLLDKFYDVVLNVPEPLIKRLKGIEVNCNDYLAERIVELIQDPERESEQFQLFRDIGMKRLTGEAQLTEQEMFKVIDIAMKQPLLRNHKDSDWPSFQFPLLSEGLSHRIRCDLPHHASVINYPLIAAAIAAGYVETNPNKLSAKMKFEIKQVKMFAPDWFSAVYAFGIGYYSDCKEEVVA

SEQ ID NO: 25111 - protein, 2037 aa, Asticcacaulis biprosthecum C19
MKPFAILSDIRARAVEAVLSQSGLTHEGLKTHLRSVMSGPPGSQSVLLQEPIIEGAHPFVTAPFALGNMPKPVLDPRFVKVLDGLAPTDDYRFPATRRPFRHQYAAWEQLSAKGDPQSVLVTSGTGSGKTECFLFPILSDLVTQAEQTTQRLEGVQAIMLYPLNALIESQKERLSAWTAPFAGKIRYCLYNGDLPKTAPASDHRRTPEQVVDRNQLRASPPSVLVTNVTMLEYMLSRADDQPIIEKSKGKLKWIVLDEAHSLVGAAAAEIALLLRRVLLAFETEPEQVHFVATSATIGSGPDILQTLQRFLAEVAGIADAKVHVIEGDRQMPGKPARAPLKAVDLEVADPGYLYDFLGSDPDVWGFIERLHKGTQSLEQAGRIGKRFGLDGEAFINLLTRAERIAPDTGEPVRLAPVRIHAFERAVPGVWSCLNPECRGRPENWPFGRLFTEKANTCPDCQAPVLEAINCMECGEPFLDAEEDLETGKLVSPVRIAVRDEFDLDADTEAPPEETGEGEKDNREIFAPAANPHMLLAANPTGRARPLNLNKQTWNVEDKGGEGRRTFLCEEFPIDERCPCCQVKAKAKTSIYQLVRPMRFGAPFLIGNAAPLLVEGVDPATSVSGVLPSDGRRLLSFTDSRQGTARLSAKIQAEAERNFVRSFVYHSVQASMAASPEESTLDALKAELSELEDAYEASRMPILEGIIQDRKQALLKLTSGSTDGIAWDVLVDRLASRPEVEAWIKDVWEPRDPELFSEPRKLARFLLLREFARRPRKANSLETLGLARLRLPSIDGLTSAPAVFARQGKSVDDWKDFLYAMVTHFVRSYSAIGVSRSEQHWLMPNVSLHSLLPPDQTANGDKRRQTWPSIRRVRGQMAGPLMWLLRGLVLRQDEAADKDDLDECMRMAWHNLQPVFGNDPEHRALDFTKTWIAPVKQAYVCQITRRLLDRTPFGITPYGRFERAEEKLKVLPVSMPTHPAPQLGQVDVQLGAQKIKTWLQSGPEIVKLRESGQWTNITDRIAEFAQYARSAEHSAQQDSQRLRRYEKAFKEGKINILNCSTTMEMGVDIGSVSMVMMTNVPPSIASYRQRVGRAGRRGQSSSLAFTFCKDNPLDREAFRKPADYLKRTVSPPKVALSSRPIVQRHVNAYLLRAFILEQSGNAIQMMIGPFLGCPSDPAGLRPILAERPVALFKSWLDLPSVKAAHRAALATLVRRSVLEGETNLVEETRSAIDALEVAFVAEWEGIRALARDEGLKDAGKSRMHIELKRLCEDFLLGALAGQGFLPGHGFPTDVVTFLPAKAPKKDDQDLDGRSRFRSQGPQRSLDLAIRDYAPGSEIVLDGLVHRSEGVTLNWKRPATEEGLVEIQSLKYHWSCRTCGTSDTTRGVPNACTACGSSDLEPVQYLRPSGFTVDFRTKAHADTDVISYVPPEDPKASTRDAPWTALPIPDAGRFRSSREGLVFYANKGPHRCGFSVCLYCGRAEADEQNWTANDPKSRPFYRHKPLRPRKGEAVDVCPGTEQSWKIRSNLTLGHEITTDVFELQPVAALNRAGSTALVIALREGLARELGVEADEMGFSVKQTTGRFGKQAVSMLLFDKAAGGAGFSVSLESKLANVLMEASKVLDCKTPGCTTGCAACVMTSDAPVEENGLDRVGALNFIREHLSFPAALAEEDKFSADAVLSHSVVDEIGEALRDGVAARLSIFATPTFDSAGLTAWSAATDFSNWKHLGYAIDLVLPATVVPGLDAAARLALHAFVLTHGIQLRSGDAPGSHPTMRVLAVVQGQVRTQAWASRDEAACLPGASWAQPSLHLIARGSLARLPDYPSIDPSSLLPLPTTKFASIESELDISIGLFGNRMATHIRSLLDACGLNTTVPITGMTYKDPYVSSPLVARLLIDTLAALTAEKGRGGEIKIITQKLKSSSEHGPPRQASHNWRYEGAAKSVIEAYGRLKRLTVELDHKDTVPHGRYLNIAYGDGTKAQVVFDQGFGAWSPPAGQPMRHDFDFDVSRQVYQISRQSAPVRKSRFGPTYLVAVKL

SEQ ID NO: 25112 - protein, 1147 aa, Asticcacaulis biprosthecum C19
MDLGKGLKSLSEVQLRDLFQQSKSDLPTLIAINAELKTRRSEGAIDLQFEVAQQIVYLRKSGDAPEAQSLKPVGDWLNAFMLTRGLKRPDGRPLSRYRMTDDEYSDAKKILRLLARQGRLAVPDERAGRLFVAYCAEWFRREAASMSAEWNQLAPDVFPSVPQGNMRTLTEMGLNYWGRDLIRLATHREFLLTLALEGGIPVHVITDQDRSWLNGYLETLMRASVSDRSEAAIRVVAYEEAHRLRQSYRHDLFIDTCAELVHSILHWRHTAETEAPKVDAVDYLDACHKDWRAKLPVYVPKDESHEARILLNGLMNEPLTGLAVSGIQANRYLIREKGEWIPALQIVADGHLRRDKLPGLAADSRYRAVPSGELSNFIADEFALFEPPVDDQRTWRVKPRLDLSRLLKGFAFKAPVTTTLTSGSTLYPMTWPHGEAIRSDILVFEAEEDKHGLRLRLVGQGSASRAAKVLYALMPADWELQADTPEAILEFEDVPNLKCRLVKTDGTLYLRSPDDPADLRYRVEAGKDERQAELRYLNPHWAGIESTDANLDILEGALDMRIGEDDKLRMPATGELFWRRPGQTWQAVRDGSLKELGLVEVSWRDPKAGIQLERRCLGLLPGGASIRANMVEAKRGDLTLVNLPGWKLSPRRPDLDIVDQHTEGFSVTFPGRPDYRLVCDLLPPSGRPLPVRITFRGRDAVIVKHDGAIVAPGTMLDLASLRGTFALAPHRTSLLISRIGAKTGASSVTFDGEYPLATRRQVIEALLAEAGHQDAQIELAFLGDSRSSVRLGRYRFDKPIQSAGLVDLPQTEGAVVARMVCDPADEVPLTFDPQGPGYRAPASCYGPILIYMRDGPDVVSRPVVVDTKDRSFARREGLMMALTELDFKQRQGDITKVLSELATTSARPEDVSYLVKHVATLNGVPASAFDALARLAEVPVALARVLLNATDEASRQAVFSLQNELPFLWLALPISAWGEAFGAEWAGLESALASVESAARSVLIMKCLAGKAADMSTLDSALAAVFARVGFASPAVSEEPSLQDIAQAYVRGRSDGESADSNLTTVPDLSGKLSANGFDLPPDISRLSFKDWGGLLAPAFLALSALEKLPLDTETKSLVRRVMREDQNAKSPYVSPAFPHFLRFYGA

SEQ ID NO: 25113 - protein, 2035 aa, Asticcacaulis sp. AC402
MKPFAILSEIRARAVEAVLSQSGLAHEGLKTHLRSVMSGPPGSAGVLLQEPIIEGAHPFVTAPFALGNMPKPVLDPRFVKVLDGLAPTDDYRFPATRRPFRHQYAAWEQLSAKGDPQSVLVTSGTGSGKTECFLFPILSDLVTQAEQTTQRLEGVQAIMLYPLNALIESQKERLSAWTAPYAGKIRYCLYNGDLPKSAPTSDHRRTPEQVVDRNQLRASPPPVLVTNVTMLEYMLSRADDQPIIEKSKGKLKWIVLDEAHSLVGAAAAEIALLLRRVLLAFETEPEQVHFVATSATIGSGPDILQTLQRFLAEVAGIADAKVHVIEGDRQMPGKPDRAPSKAEDLETADPGYLYDHLGSDPDVWGFIERLHKGTQSLEQAGRIGKRFGLNGEAFVNLLTRAERLAPDTGEPERLAPVRIHAFERAVPGVWSCLNPKCRGRPEKWPFGRLFTEKANTCPDCQAPVLEAINCTECGEAFLDAEEDLETGRLVSPVRIAVRDEFDLDADTEAPPEEADDGEKDNREIFAPAANPHILLAANPMARARSLNLNKQTWNVEDKAGDGCSTFLYDEFPIDERCPCCQVKAKTGIYHLMRPMRFGAPFLIGNAAPLLLEGVDPATTLSGQLPSDGRRLLSFTDSRQGTARLSAKIQAEAERNFVRSFVYHSVQASMMASQDDSVIGELQADIAKWEAAYQASPMPIIEGEIQKRKEALSKLTSGSTDGVAWDDMVDRLAARPEIENWIKDVWEPRDPELFNEPRKLARFMLLREFARRPRKANSLETLGLARLRIPSIDAITSAPAVFARQGKSVDDWKDFLYAMVTHFVRANSAIGVSRSEQHWLMPKVCLHSLLPPDQTANGDKRRQIWPSIRRVRGQMPGPLMWLLRGLVLRQDEAADKDDLDECMRMAWHSLQPVFGNDPEHRAFDFTKTWIAPVQQAYVCQITRRLLDRTPFGITPYGRFERVEEKLTVLPVTMPNHPAPQLGQVDVQPGAQKIKTWLQSEPEIVQLRLGGQWTAITDRIAEFAQYARSAEHSAQQDSQRLRRYEKAFKEGKINILNCSTTMEMGVDIGSVSIVMMTNVPPSIASYRQRVGRAGRRGQSSSLAFTFCKDNPLDREAFRKPADYLKRTVAAPKVALSSRPIVQRHVNAYLLRAFILEQSGNAIQMMIGTFLGCPADPAGVRPILAERPVALFKSWLDLPSVKAAHRAALANLVRRSVLEGETNLVDETRSAIDALEVAFVAEWEGIRALARDEGVKDAGKSRMHIELKRLCEDFLLGALAGQGFLPGHGFPTDVVTFLPAKAPKKDDQDLDGRSRFRSQGPQRSLDLAIRDYAPGSEIVLDGLVHRSEGVTLNWKRPATEEGLVEIQSLKYHWSCRACGTSDTSRGVPNACTACGSSDLEPVEYLRPSGFTVDVRQKAHADTDVVSYVPPEDPKASTRDAPWTALPIPDAGRFRSSREGLVFYANKGPHRCGFSVCLYCGRAEADEQIWTANDPKSRPFYRHKPLRHRKGEVVDVCPGTEQSWKIRSNLTLGHEITTDVFELQPVAGLNRASSTALVIALREGLARELGVEADEMGFSVKQTTGRFGKQAVSMLLFDKAAGGAGFSVSLESKLANVLLEASKVLDCKTPGCTTGCAACVMTSDAPVEENGLDRLGALNFLREHLSFPATLAKEDKFSADAVLSHSVVDEIGEALRDGVAARLSIFATPTFDAAGLTAWSAATDFSNWRHLGYEIDLVLPSTVVPGLDAAARLALHAFVLTHGIQLRSGDAPGSHPTMRVLAAVKGQVRTLAWASRDDAAGLPGASWAQPSLHLIARGSLTGLPDYPAIDPSSLLPLPTTKFASIESELDISIGLFGNRMATQIRSLLDACGLNTTVPITGMTYKDPYVSSPLVARLLIDTLAALAGEKGRGAEIKIFTQHLKSSSDYGPPTQASHNWREESAAKGVIEAYGRLKRLNVVLDHKETVPHGRYLNITYGDGSKAQVVFDQGFGAWSPAVGQPMSHGFRLDIPRQVDQISRQSAPVRKSRFGPTYLVAVKL

SEQ ID NO: 25114 - protein, 1147 aa, Asticcacaulis sp. AC402
MDLGKGLKSLSEVQLRDLFQQSKSDLPTLMAINAELKTRRSEGAIDLQFEVAQQIVHLRKSSDEPVAQSLKPVGNWLNAFLLTRGLKRPDGRPLSRYRMTDEEYSDAKKILRLLARQGRLAVPDERAGRLFVAYCAEWFRREAASMFKEWNELAPDVFPSVPYQSKLKLTEFGLNYWRRDLIRMANQREFLLTLALEGGIPVHVITDQDRGWLNAYLRTVMRASVSDPSEDAIRLISFEEAYLLRQSYRHDLFIDACAELVHRVLYWRRTADTEAPQVDAVVYLDACHPHWRADLPVYVPKTESHEARILLNGLMNEPLTGLAVSGIQANRYLFLEKGEWIPALQIVADGHLRRDKLPGLAADSRYRAVPSGELSNFIADEFALFEPPVDDQRTWRVKPRLDLSRLLKGFAFKAPVTTTLTSGSTLYPMVWPHGEAIRSDILVFEAEEEKHGLRLRLVAQGSTSRAAKVLYALMPADWEVQADTPEAILEIEHVPNLKCRLVKTDGTLYLRSPDDPADLRYRVEAGKDERQAELRYLNPQWAGIESTDANLDILEGALDMRIGEDDKLRMPAAGELFWRRPGQAWQAVRDGSLKELGLVEVSWRDPKAGIQLERRCLGLLPGGASIRANMVEAKRGDVALVNLPGWKLSPRRPDLDIVDQHSEGFSVTFPGRPDYRLVGDLLPPIGRPLPVRITFRGRDAVIIKKDGAVVAPGETLDLASLRGTSALVPYRTSLQISRIGARTGSSCVTFEGEFALSARRSVIESMLAEAGHQDAQIELAFLGDSRPSVRLGRYRFDRPMQSAGLVDLPATRGTVVARMVCQPEEEHELTFDSEGPGYRAPAAAYGPTLIYMRDGPDVVSRPVVVDNKDRSFVRREGLITAVTEIDFKKRQGDITNVLSEMGSPAARPEDISYLVKHVVTLNGVPASAFDALARLAEVPVALVRVLLNTTDEASRQAVFALQNELPFLWLALPISAWRAAFGAEWAGLEAAFAHVETAERSNLIMSCLAGKAADLSTLDGSLAAVFARVGFNGPALSTEPSLQDIAQAYVRGQSEGESAETHLMALPDLSGKLAAKGFGLPSDISQLSFKDWGGLLAPAFLALSALEKLPLDTEAKSLVRRVMREDQNAKSPYVSPAFPHFLRFYGA

SEQ ID NO: 25115 - protein, 2109 aa, Azoarcus sp. BH72
MKKQYFAQLLPELATRASRATLSRLGFSNASLRAYLERAFSASYGAKGCFVGDPVFEATFGWEEAEHSLAELSPELLTPALVSALDRPGGDARSSYRFPREARPYRHQLEAWRILGQDKPQSVVVTSGTGSGKTECFMVPILDQLARAHAQRGSKLIGVQALFLYPLNALIQSQRERLNAWTSSFGDGLRFCLYNGLTPQKQPQGLRDQMRNEVLDRESLRAAPPPLLVTNATMLEYMLVRAQDAPILEQSQGALKWIVLDEAHTYIGSQAAELALLLRRVLHAFGVTPEQVRFVATSATIGGGEAEAQLREFLARVAGLSLDRVHVVSGHRVVPDLDAGEPAYADAPLEALESIAEDPGRLYAALCANKTARSIRASFTPPNDRVLPLSSLAGSLCGHVAPEASDKAKALRWLDLLTLAQSGPKGKPTKSYLPLRSHLFHNVLNGLWACADLGCRCKAGTELDSPDWSFGLVYTEPRKHCECGSPVYELRSCNECNTTYLWARRYGPGEDGKYRLLQTTEEDFDEFSLDTERAEEDEQQAQVRPGYSPVLIANAHKGATEEILVDAATLALDPLELDGAVRLRGRDESVIDDQGTLAMVCPECGAHDPSNGLGLFRKAILGAPFLLGEIVPTLLEFCPDIDNSEAKPLERPYRGRRMISFTDSRQGTARIAARLQQDSERNRIRGLVFTKVLTSGSPGGEADVAQLQGQVEALGAVLAGGPNPQIQVIYDSLRAKLLEFSGFRPVPFAEMVQWLSSAVSDVRDWMYGYYRDQDPGEFGTNNGRERLARILLTREFGRRPKRVNSLETMGLVRTVYPKLEAINRLPDFVGEVPAISLSDWKDFLKIALDFHIRENTFIDLPDAWRKWGGNRLSAKQLMPPETQQAQTNRYKRWPQCAVIERQSRLVRILARGLNIDPQSASGRNAIDAILRGAWKQLLDLKLLEMGDVGRYLKLDGAEIMALAPIENAWLCPVTRRVLDTAFMGITPYLPEQAKSDSVAKCVPLKMPDYSPIANLDEIGDERVELVRDWLNTDDAVTALRKDGLWSDLNDRVVEGAFYFRAAEHSAQQPGARLAEYEAAFKTGRINLLSCSTTMEMGVDIGGISVVAMNNVPPHPANYLQRAGRAGRRSETRSVALSLCKSNPHDQQVFTNPMWPFETVLPAPRVQLSSAILVQRHLNSMLLANFLRKELSGPGSAEKLNLEWWMLPADQSRQQRFCAWTQCFSSGNDPELAKGLRSLLRHTPHEGTASLERLVAAAGRMAQDHARKWLSEFDVVEAELARLSTPAGMTEPAYKALKIQRKRLTGEYLLRELATEGFLPGYGFPTDIAPLDTLTVDELARIEATQRRQQQDEAGRIDNRMRFRELPSRDMVTALREYAPGSEVVIDGLVYRAAGITLNWHTPASVTEANEIQSIRDAWRCRHCGSSGTHVRASRLLECPDCGSLLGADKEVRFDYLEPAGFAVDLYSTPHNDVSTQTFVPVSLPWINANGEWLPLPNPALGVHRSSVDGVVFHHSAGIHGHGFAICLCCGRAEPMEGEDDLPDAFFDHKKGKLKDHRRLRGAQGGETNVCEGSYNAYSIQRGLRLGHEARTDVLELVLRGLDDQPIRDRKIAFTLAVAIRNAIAATLGIESSELGCDTKPVRFLGEGSCQAIVVFDRSASGYASSVADRLPQILRAAAGQLNCAEGCDSACQHCLLDFDTRFRLDDLDRHAGQSFLSGEWLTALELPAELAHFGPGSVAEHQTPVEAITRELAMPSCEWLRIYLSGEPEDWDLAVSPLRRWVSRWAATGVAVELVLDAEVVQRVSRADQSVLAAMDMLDGVTLRAGKAAVIAQGSAVLAEVGQGGRVLAWAGLQGRAVPGANWGDCDGTILVRGAVIKPVALGERLEFALSAPEGLPAQTVRIEISNELDGMADGFGRRMLESFQGHLGISLVLPGERIVELTYHDRYLNAPLPVALLLEFVCALRASADESWDVKQVALSVAPVPDAQPSRMPPSKVWQNWSSDEERDKALVAAFEYAGLDLSLATLTKRDSIHARRLDIVFASGKKLQVWFDQGFSYWQVPRDRTIGTGRVWFPFAGDLERQAESIGRAEFRIEGQPYPTYVFLGWS

SEQ ID NO: 25116 - protein, 1192 aa, Azoarcus sp. BH72
MFGRRSLPRPDGRWLYAYRLGTEEYQTLHKLLADAVRATPIQVLSRRNRHFAALFVLYAAEWWRREYDGGPWRWAPILASLQINKDDLAPNERSEVVLTGFSFWGLRPTTGDGKRYFGTVVAHGGLPLKLIGHGGSRLNAVMGTVLRQAARYRWSESQVVDAVADHAHAMPASLRHEEVFRLLATLILTTLDLNDRHQLGGMPDPIGHLDNVEPGWREAYPLQIDDSAAVQLLASMVRAASQTSTEQGAVAVFQVVRSLSCSDVGEWRLESRVVHPAVASADALALQFGLGAASALPRYFEVDVTAGERGALTSGRLLLGSDRATVAFGTQRRRWSGRVACDEHILHLRTAGNDVVEGGVALPGGESLADIEGPWVFVAEGERYRLAGAGDLRLPDAEALVAVAEGSILESLEESAPGSELLGQLHVDSGKTLVLWRVSGSVQISDTNDSWRVRLGQTRKLSGSLVLEGRRAAYSSRPWPVFRGKPHVVRYDDEGARVVLSKGLHWFAAGSRSLIDPARYCGPVELQVFEDDERIGRFRFVLVSAHSSERFLSGTSAEDASVEFTGWGFADLAVESGRAEMGAFRKTAQGHAVTLQVESTPPKDVLVYLRWPESPHELRVWVPFPASGGRAFDVEGTPVLSGSVMSLRHAAGVRVLVFDQNPDQPKKYEVELELRGDPVLGRSDSSLSRRTVPIVKGFAEVRLLDLYGEIEALLSLSSELDARVELRLMVGGKRNFSMSVSRYDVALRPKVMGVALEDEDLRRVQLEQVQGCEVLASPILRPAEAPRVLSQSVSEGAPSGVWSIERLRPEFAPWLVYPAPGSALEFRPLCIGGGIASEDDAATADPLPACALAAAIRLPDAAARLAAIDAVLVAMGDDFDHDSWSMLDGLWSAFGRLPLCSIDTFKVLARRPEIVVAMLFRSELPAAQLGDHVRQLKRQLGMTLELVGITVWRRAIEKFSNAWTQRLGDDLAKLSVPILLKGRLKAVVDELPALQLNMEWLQFECSNEYPPAVLQLQKDIAANRGVHLTRLWQGEDSLLQRLLLRVHADDVAWPEPRFFADKAIRVFVEAVLPVPRMKSQLKLLHSFFWLDNGDFKLSVANVPVLCALWCALDLPLDWWRDPGNRLALQRLRAFDPLWFEGAYQHAFAACIGLALIEPTSARLGGTAPPVEGGPRVHRLPAGTVQRIKEKTK

SEQ ID NO: 25117 - protein, 1705 aa, Azotobacter chroococcum NCIMB 8003
MRYFRDLIEQSLNRTREATLGVLGVNHQGLRHHLSEQMVNELGAEGCFLAPPVFEHTFGWEEADVTLQDLQSGLLSESLLNTLHYAENYAFSKDSRPYKHQLKAWNVLTSEPPRSAIITSGTGSGKTECFMVPILNDLVEEVTRTRVPLVGVRALFLYPLNALINSQQERLDAWTRPYGDKIRFCLYNGKTEESASIMRKEQSEKPNQVLSRELLRKEPAPILMTNATMLEYMLVRQVDSPILAISQQQESLRWIVLDEAHTYVGSQAAEISLLLRRVVQAFGRRADQIRFVATSATIAGDDTQKQLQKYLADLAGVSPDQVDVISGSRVWPDVVDLITGENTSLDELLDIEPDREVSPARFEALTRNYLACNLRHAVVSSPRPLDLNELIQAVAPWLRGKTNLERQQEVLAWLDLMTGTFESDDQPPFLKLRTHLFQRMLHGLWACVNPECSAKSEHLTDWPLGNVYVNQRSHCDCHAPVYELGFCAECRTPHLEAEDRNGVLRQKSPYVDDEFSLSYESDGDEAAGGNGPAKVLTQGFVLARNNHRKAPYMPLTLDLDTQQLGLVGQGNCIELSVVEDKRAECSHCTYSGYEGDFLRKAYLGAPFYVANAVPTVLEFCQDPDKADCDGLSPEELPGRGRKLITFTDSRQGTARMAVKMQQEAERSRLRGLVFETLRNAQVKSNLAQPQSSEGHAKLLAAEMLEKMGQPEAAAEMRREAEQEMQARVLAPVKIEWTDMVRELATTNDIGRSILEYNRYANPMLFSDSQGSVTMARLLLTREFAIPPKTQNSSETLGLVRVDYKGFDSITSPPPRWLDTLAPPATAGGEKSRLTKEDWRDFLKVALDYFVRQNAFLRLERNMQLWMGMKAITKSLFSPKADVEESTTVKKWPQTRAVGNPSRLIKLLELGTRLSRTSPDDASLIDSWLEAAWQALTAAHILEPVDLGHRLKLETLMFSLPTEGWVCPLTHRILGSTFRGLTPYLPRNTVGRDYHCEKIQLPALTDLLVDGSAESRLSQIRSRVTADPVIAELRRESLWSNLCDRVVEGGFYYRTAEHSAQQSAKKLDDYVELFKKGRVNVLNCSTTMEMGVDIGGISAVVMNNVPPHPANYLQRAGRAGRRREARAIAYTLCKADPHNQRAFAEPKWPFVTSIPAPNITLSSARIVQRHVNSLLLSLFLRSSTSNDGDRTKLTLKWFFSPPEDSPCLAFTGWLAVSQKAFADAVRSLVAGTCLEGQPISAIMTNTRNAIRELEARWISEYAKLNAKLQAATDEPYKKALTLERRRHENEYLLRDLAARAFLPGYGFPTDVVSLNTYNIDDFKNQQNERLHARDSSREDNIFSHKDLPSRSLNIAIQEYAPGSQVVIDGRVYRSAGISLHWHAAGQVNEAQKFDVAWRCENCGATGLIENAYTNMDDLKCNCCQASIPSSQIKTVLRPSGFVTDFYEETGNDISSRKMIRVERPRIHLKAEVVALPDKRCGTVRFGHNGAVFYHSSGEHERGYAVCMACGRAESMLPTGEVPKSLRPDQMHRPVGGIGASHKEKDCSGAAVKANLYLGYQIHTDVLELFLKSPATGQWLGDSPTEQTIAMTLAVAIRDEIAEQLGISSDEMGFGFRLDRDLESNQGRSVVQLFDDVSGGAGFVLSAVNDLGGLLKKALARLHCPASCDNVCSHCLAGQDSRVEREELDRKLTQEWLASSGIIAARA

SEQ ID NO: 25118 - protein, 1110 aa, Azotobacter chroococcum NCIMB 8003
MLSTTPIKSPFKAWLAEFLLSRGIVKESTGKPLYSYQVTEAEYHSLRALLSANIALMDNPVHAEYVGGCFALFVSEQFRRAYNASWSWSGAEGELGVSLSPTQRIYLAKRGLDYWKRPIRARENGRDWLGSLFAEGGLPWPLVQSEDHGFGRAVRSGIKHFFRTEGNRRTTADLMADFESYLPLAFQNLETRQLLAGIVDHLMFLAGQYPLKDQADPAAYLDEVAPSWADAFPIPLDETNGRNLISTWLQAAGERTRIRQEALLRAKAFTGEHILCGTLPAWTIRTELTLPTETLQPIDANTLRSMRLEVAFYEGDRMLARGPAVYGQKEGAQTRLRFPNTQITLERHCLRSPLNIRLLDSGREVHRIFIEDSALDHQEAPLIFEPVDGRWKLVSMSSCALAGGLARIRMPANFEAVTGSGIEPRLLELDAQDGWWLEAADSLSLRHGADLYRVTLNQGSTEIARPTLEGTLALYEGAPSIMYLGWPHLSLPENYLYALEDLCEFANGQLVSELRRQGAIGVMRYTVRNKAGETLLQRRFGVLPREFGLTQFPACKDEPARLQIRGANGLELAVAGEVRIAGQVASDDTVTLHLRHTGEAPPAGFTLEIRMRPEHPPLQLRLAYPYQGARLMDQDGKATLVRNLTLNDLPGLRVALTSGLPQGQDFHMRMELIGDSSQCRSWRMQRDFQIKVGYNPILLDLFSYQAKILQLLGAVDDKEAYVRLGIETETRLLTLNIQRYSGRLQREGRTLIEVVDVATGLVTHDARIEAMNLADPKQKPIALGELTSEGVGTGRFDTADYLPESGAWLIYPASDSSKSFPVWVQSTYASSLREQDGAPKSVDSLHKAAEVFHPQLNPGVIDEQIARMQDDFGHSGWQYLADLKQLYGHLPLSSFEPWKALTHNPEALSFAVFRLEMNEAFCTRMADELAVIWEAIPLPVWVKAYQRYFDSLAQMGLPEAAISSLQRNRDAVLRMLVPGFDYLGDYLSTGNPRSLMLAPPAAVLPAWVNTLYSSGRRFPTDLGSELAAWIEQQSLPAAVKGLAKSHYAEAVIYLPIFMGFVTAGKATLDDLPVPLPYAKFVIRTISDFDRHDWFAPVHALMTSYLLASTA

SEQ ID NO: 25119 - protein, 2048 aa, Bacteroides fragilis
MNMNYFSFYNKAKELLIDSLASLWFKGQAREQEYIKRVLTEDEPLFAEPVFQSIFPWEESVYSFEAHSSKLGLLTSSFVNALSNEGIDKDLRFPLDRHPYKHQTESWRTMLSPRPQTIVVTSGTGSGKTECFMIPVLQDLAKTNMKDCVQAIFLYPLNALMKSQQKRIHAWCKALPEKVTYAIYNGETDKENRSDRYTAPHYPQLVTRPQIRRTPPQILFTNPTMLNYMLVRAEDHEILEKSKGKLKWILLDEAHTYIGSSAAELSLQIRRVLDAFGVTIDQVNFAVTSATIGDESDPKTMIKLKTFVSQLTGKPFEDIKIIGGKRIIPELNKGIAEEQLSKINKRFGIRLTYSDIERLRKKLNSSPVLKVKEIGSILDKKIGINVDASLEIIDALGEKVKNLNEGSGFGALLPTRAHFFVRSISGVYVCTNPDCQRHKGYRLPIGSLTTYQNINCPVCKSKMLELATCSSCGSPIVVGETSTTKGFRMHTNIIDLDNTLFYEQKEDLIDSEDMENIENVEQNEADGFSRFFFAIPEKLCLRKNATCTSHIFNHRNGKIELAPENNESSKGITPLERGESTPVRYQSLRHSGDNHVLCPHCGNNLSELKKLDYLRISATQIGRTLATLLLDNAEAIGSNDAGVVYEGRKYIAFTDSRQGSARSAMGLNQDVERSWIRASIFHKLADMRLNDVKPGGLTPDEEAEYNAYLSIRGCLPALLLEKFKQLEEKKNGVPVIPSPEEVSWSQISQPLENDSNFRKLYEHVDKARGRKNFRNATDYLKALLVDQFGWIPKRANSLETMGFVRLVYPTLKNAKCPTLLIQKRCTDTDWQNFLKICMDYVIRGGRHYMLSGAYKDYLTQNKYCSPIYPSNSELRKNGNPVSKWFKVNVSQKGVDENQNRLVLLLCAVLGYDDISQISQTKIADINSMLDAAWDFLKQNVLEATDAENQGYMLDLTGDKVKLQLIEKGYLCPVDNVIIDTPFCGYSPRMNGYIGRENFDRFKIQTEFVNPFFPFKFAEQIEENVTEWIEKNLFDQKAAGVFGVMNYRVLASKPIFISAEHSAQQSSEDLDRYEKEFNEGKINILSCSTTMEMGVDISGITEVVMNNVPPKSSNYLQRAGRAGRRSETKALALTVCAPNPIGTHTWNNPDYPITHVTETPLLKLESRQLIQRHVNAMVFASFVADQGGIRVTATLRDFFVKAEGMSFYDKFLNYIDSVISGNVERLQRAYSKLIKGTSLAQITLPDAAQVVKKDIAAVHNVFDAHNGALEKALESLRNESETANAIKAIEKQEENLLKTSMLSYLAENSFLPSAGIPIGLVECLLGGKEKVDGSSPTLHISQAISSYAPGNPVVKNEWVYEPSGIRLKTKYDDSTSRYIIQNCTHCGYTTITYGSAKTDCPKCGRHGTMHGIKDISLSIEQRFTEVVEPAAFSVAWDSTPIRKMGTLGGMNFIQPILLEMDAWQPKTNSAKMSIRCSTPRSEILFYNKGASGYGYAFCPYCGRMKSEKSPDSTERMMPHHKHLLASTPCLGGENDGAAVRRHVLLVGRYQTDFVEIKFHDKNNNLIVDSETLYSLGVILSRKLTELLGVNDGEIEFGYDVINHSIFIYDTALGGAGYSLLFREYKDEVLKMALEALERCDCERSCTKCLIDRRSQWYLNYLNRTKALEWLRQEIKARIAPKEILRLIPDSHTVTSDITTEFYQLTRNKDISCIKIFVNDNISQWDAEAFPFKKILTELSLEGVDVAFILPSVPDVKSLSSADSATLIAEVFKNDFKGLENTLPAELLPLMVVIMNDGTVKTYFGKNIDTSYSKNWGSGDVFITTQLNSLSYADINRMQLLNTFSSGDTSFMFDYRITEHSSLGHFFDSLKNPEVENWNRIVSNLQGKTVSVEYSDRYLKTPLGCMLLAKMISGLKNEADLNVVSIKVIVTNIVSMDDSDVAVNAIKDFTNGEKRNLFLKNAISELTGIEPEIQDTGYVEHERCLTVKADNAELCIRPDAGIARGWVPFGRDNAECADCDFREDWNMDLELFNKQQRGAGILYTISYKQP

SEQ ID NO: 25120 - protein, 1065 aa, Bacteroides fragilis
MANIYNSEQHIALMKILDARNRSSITPNMPLWKLKLTEEEYTNLKETLAQNICRLEDFGIEAALCYAEWWRRDYNGGIPSREDVAVGLGLPHYCWEQLYKAARQGLKSHGFAFIHSLKGNEYFRTLLNQGGLPVNYIKNGTNLGGFSRFLLGLVEELSSINIDWDDNNLDLIKNFNCIAYLGKAFKNDNIYDVSLQIAHAIISEEDRWLPYDDADSSLSELTKSLKREYRRVKSEHRTTPLSLSWKLRLTSDETANLFVNLNVVKEISSKSIEGLDYQSCYTFDVFVAGILVGKYVRKSLVKDDIGEVIGAIYSRVTVGVANDIKWNGEPVVEVKIRCDNDDRLFPTLCGSYPPNFECPQVFQMLDDNVYSLKPTANAESNIAVFSTDWKCDGNHKLSLNGKLYSAIEFANQVDLHNCVLNEDMTITNEFTPYSAEFRGTYIQWVEQSNFKLLTRIPVISVFDQTGIRVGNIKPKYRVHNSKTDWRNLSNSCLLPFGLVDIKVEFPDNKYEVETFYFIDDMTFVSRNERMFSTELCLDSRHIMSAKVDECEDLSVEMIDKNIWRISRDACASKYSPTCNLKIMAEGNPPLRISVVAPFEGIVISDLEGKIVPSGKIISYDNLRYFNIISHGQAGMIDVTYKSDKITDYDKIKHLKSPVIEGIVPLSDYRDLFARMFQLYGANTFDRSSSIELRIYDKCIYIRKFVLDSELISDKIRITDDTNEDTSDFIYDGDVYALPVSEDIKPAELVQIKLESYNRQMNLFTIPDELLNSEAILFSGPESSRRLVPKYYNFGQEDYSLEVRREKSATNIIHWGEKLSKDDVFSGEYWMKTVKAFRIISEFNLPFTTYNAFKAIGRVPKLLVNLILACWLNGASDILIQEIDRFEDELNIAVHWIPRTVWGECIENFICLLPPELSSIITAKLGEITELINGLFNATLSAEVASELIHYVAEGNIGRAHIFSISDINQFKSRIHGYTDNNMDLPLIRFVLQNQYYVDQKMLVSYRVMIEAAMCAAENLAQVKDCINLFSLEGRDYARIINFYQKYFKETYSEIFIGTVKQIASK

SEQ ID NO: 25121 - protein, 2048 aa, Bacteroides fragilis 638R
MNMNYFSFYNKAKELLIDSLASLWFKGQAREQEYIKRVLTEDEPLFAEPVFQSIFPWEESVYSFEAHSSKLGLLTSSFVNALSNEGIDKDLRFPLDRHPYKHQTESWRTMLSPRPQTIVVTSGTGSGKTECFMIPVLQDLAKTNMKDCVQAIFLYPLNALMKSQQKRIHAWCKALPEKVTYAIYNGETDKENRSDRYTAPHYPQLVTRPQIRRTPPQILFTNPTMLNYMLVRAEDHEILEKSKGKLKWILLDEAHTYIGSSAAELSLQIRRVLDAFGVTIDQVNFAVTSATIGDESDPKTMIKLKTFVSQLTGKPFEDIKIIGGKRIIPELNKGIAEEQLSKINKRFGIRLTYSDIERLRKKLNSSPVLKVKEIGSILDKKIGINVDASLEIIDALGEKVKNLNEGSGFGALLPTRAHFFVRSISGVYVCTNPDCQRHKGYRLPIGSLTTYQNINCPVCKSKMLELATCSSCGSPIVVGETSTTKGFRMHTNIIDLDNTLFYEQKEDLIDSEDMENIENVEQNEADGFSRFFFAIPEKLCLRKNATCTSHIFNHRNGKIELAPENNESSKGITPLERGESTPVRYQSLRHSGDNHVLCPHCGNNLSELKKLDYLRISATQIGRTLATLLLDNAEAIGSNDAGVVYEGRKYIAFTDSRQGSARSAMGLNQDVERSWIRASIFHKLADMRLNDVKPGGLTPDEEAEYNAYLSIRGCLPALLLEKFKQLEEKKNGVPVIPSPEEVSWSQISQPLENDSNFRKLYEHVDKARGRKNFRNATDYLKALLVDQFGWIPKRANSLETMGFVRLVYPTLKNAKCPTLLIQKRCTDTDWQNFLKICMDYVIRGGRHYMLSGAYKDYLTQNKYCSPIYPSNSELRKNGNPVSKWFKVNVSQKGVDENQNRLVLLLCAVLGYDDISQISQTKIADINSMLDAAWDFLKQNVLEATDAENQGYMLDLTGDKVKLQLIEKGYLCPVDNVIIDTPFCGYSPRMNGYIGRENFDRFKIQTEFVNPFFPFKFAEQIEENVTEWIEKNLFDQKAAGVFGVMNYRVLASKPIFISAEHSAQQSSEDLDRYEKEFNEGKINILSCSTTMEMGVDISGITEVVMNNVPPKSSNYLQRAGRAGRRSETKALALTVCAPNPIGTHTWNNPDYPITHVTETPLLKLESRQLIQRHVNAMVFASFVADQGGIRVTATLRDFFVKAEGMSFYDKFLNYIDSVISGNVERLQRAYSKLIKGTSLAQITLPDAAQVVKKDIAAVHNVFDAHNGALEKALESLRNESETANAIKAIEKQEENLLKTSMLSYLAENSFLPSAGIPIGLVECLLGGKEKVDGSSPTLHISQAISSYAPGNPVVKNEWVYEPSGIRLKTKYDDSTSRYIIQNCTHCGYTTITYGSAKTDCPKCGRHGTMHGIKDISLSIEQRFTEVVEPAAFSVAWDSTPIRKMGTLGGMNFIQPILLEMDAWQPKTNSAKMSIRCSTPRSEILFYNKGASGYGYAFCPYCGRMKSEKSPDSTERMMPHHKHLLASTPCLGGENDGAAVRRHVLLVGRYQTDFVEIKFHDKNNNLIEDSETLYSLGVILSRKLTELLGVNDGEIEFGYDVINHSIFIYDTALGGAGYSLLFREYKDEVLKMALEALERCDCERSCTKCLIDRRSQWYLNYLNRTKALEWLRQEIKARIAPKEILRLIPDSHTVTSDITTEFYQLTRNKDISCIKIFVNDNISQWDAEAFPFKKILTELSLEGVDVAFILPSVPDVKSLSSADSATLIAEVFKNDFKGLENTLPAELLPLMVVIMNDGTVKTYFGKNIDTSYSKNWGSGDVFITTQLNSLSYADINRMQLLNTFSSGDTSFMFDYRITEHSSLGHFFDSLKNPEVENWNRIVSNLQGKTVSVEYSDRYLKTPLGCMLLAKMISGLKNEADLNVVSIKVIVTNIVSMDDSDVAVNAIKDFTNGEKRNLFLKNAISELTGIEPEIQDTGYVEHERCLTVKADNAELCIRPDAGIARGWVPFGRDNAECADCDFREDWNMDLELFNKQQRGAGILYTISYKQP

SEQ ID NO: 25122 - protein, 1065 aa, Bacteroides fragilis 638R
MANIYNSEQHIALMKILDARNRSSITPNMPLWKLKLTEEEYTNLKETLAQNICRLEDFGIEAALCYAEWWRRDYNGGIPSREDVAVGLGLPHYCWEQLYKAARQGLKSHGFAFIHSLKGNEYFRTLLNQGGLPVNYIKNGTNLGGFSRFLLGLVEELSSINIDWDDNNLDLIKNFNCIAYLGKAFKNDNIYDVSLQIAHAIISEEDRWLPYDDADSSLSELTKSLKREYRRVKSEHRTTPLSLSWKLRLTSDETANLFVNLNVVKEISSKSIEGLDYQSCYTFDVFVAGILVGKYVRKSLVKDDIGEVIGAIYSRVTVGVANDIKWNGEPVVEVKIRCDNDDRLFPTLCGSYPPNFECPQVFQMLDDNVYSLKPTANAESNIAVFSTDWKCDGSHKLSLNGKLYSAIEFANQVDLHNCVLNEDMTITNEFTPYSAEFRGTYIQWVEQSNFKLLTRIPVISVFDQTGIRVGNIKPKYRVHNSKTDWRNLSNSCLLPFGLVDIKVEFPDNKYEVETFYFIDDMTFVSRNERMFSTELCLDSRHIMSAKVDECEDLSVEMIDKNIWRISRDACASKYSPTCNLKIMAEGNPPLRISVVAPFEGIVISDLEGKIVPSGKIISYDNLRYFNIISHGQAGMIDVTYKSDKITDYDKIKHLKSPVIEGIVPLSDYRDLFARMFQLYGANTFDRSSSIELRIYDKCIYIRKFVLDSELISDKIRITDDTNEDTSDFIYDGDVYALPVSEDIKPAELVQIKLESYNRQMNLFTIPDELLNSEAILFSGPESSRRLVPKYYNFGQEDYSLEVRREKSATNIIHWGEKLSKDDVFSGEYWMKTVKAFRIISEFNLPFTTYNAFKAIGRVPKLLVNLILACWLNGASDILIQEIDRFEDELNIAVHWIPRTVWGECIENFICLLPPELSSIITAKLGEITELINGLFNATLSAEVASELIHYVAEGNIGRAHIFSISDINQFKSRIHGYTDNNMDLPLIRFVLQNQYYVDQKMLVSYRVMIEAAMCAAENLAQVKDCINLFSLEGRDYARIINFYQKYFKETYSEIFIGTVKQIASK

SEQ ID NO: 25123 - protein, 2046 aa, Bacteroides fragilis str. 1009-4-F #10
MNYFSFYNKAKELLIDSLASLWFKGQAREQEYIKRVLTEDEPLFAEPVFQSIFPWEESVYSFEAHSSKLGLLTSSFVNALSNEGIDKDLRFPLDRHPYKHQTESWRTMLSPRPQTIVVTSGTGSGKTECFMIPVLQDLAKTNMKDCVQAIFLYPLNALMKSQQKRIHAWCKALPEKVTYAIYNGETDKENRSDRYTAPHYPQLVTRPQIRRTPPQILFTNPTMLNYMLVRAEDHEILEKSKGKLKWILLDEAHTYIGSSAAELSLQIRRVLDAFGVTIDQVNFAVTSATIGDESDPKTMIKLKTFVSQLTGKPFEDIKIIGGKRIIPELNKGIAEEQLSKINKRFGIRLTYSDIERLRKKLNSSPVLKVKEIGSILDKKIGINVDASLEIIDALGEKVKNLNEGSGFGALLPTRAHFFVRSISGVYVCTNPDCQRHKGYRLPIGSLTTYQNINCPVCKSKMLELATCSSCGSPIVVGETSTTKGFRMHTNIIDLDNTLFYEQKEDLIDSEDMENIENVEQNEADGFSRFFFAIPEKLCLRKNATCTSHIFNHRNGKIELAPENNESSKGITPLERGESTPVRYQSLRHSGDNHVLCPHCGNNLSELKKLDYLRISATQIGRTLATLLLDNAEAIGSNDAGVVYEGRKYIAFTDSRQGSARSAMGLNQDVERSWIRASIFHKLADMRLNDVKPGGLTPDEEAEYNAYLSIRGCLPALLLEKFKQLEEKKNGVPVIPSPEEVSWSQISQPLENDSNFRKLYEHVDKARGRKNFRNATDYLKALLVDQFGWIPKRANSLETMGFVRLVYPTLKNAKCPTLLIQKRCTDTDWQNFLKICMDYVIRGGRHYMLSGAYKDYLTQNKYCSPIYPSNSELRKNGNPVSKWFKVNVSQKGVDENQNRLVLLLCAVLGYDDISQISQTKIADINSMLDAAWDFLKQNVLEATDAENQGYMLDLTGDKVKLQLIEKGYLCPVDNVIIDTPFCGYSPRMNGYIGRENFDRFKIQTEFVNPFFPFKFAEQIEENVTEWIEKNLFDQKAAGVFGVMNYRVLASKPIFISAEHSAQQSSEDLDRYEKEFNEGKINILSCSTTMEMGVDISGITEVVMNNVPPKSSNYLQRAGRAGRRSETKALALTVCAPNPIGTHTWNNPDYPITHVTETPLLKLESRQLIQRHVNAMVFASFVADQGGIRVTATLRDFFVKAEGMSFYDKFLNYIDSVISGNVERLQRAYSKLIKGTSLAQITLPDAAQVVKKDIAAVHNVFDAHNGALEKALESLRNESETANAIKAIEKQEENLLKTSMLSYLAENSFLPSAGIPIGLVECLLGGKEKVDGSSPTLHISQAISSYAPGNPVVKNEWVYEPSGIRLKTKYDDSTSRYIIQNCTHCGYTTITYGSAKTDCPKCGRHGTMHGIKDISLSIEQRFTEVVEPAAFSVAWDSTPIRKMGTLGGMNFIQPILLEMDAWQPKTNSAKMSIRCSTPRSEILFYNKGASGYGYAFCPYCGRMKSEKSPDSTERMMPHHKHLLASTPCLGGENDGAAVRRHVLLVGRYQTDFVEIKFHDKNNNLIEDSETLYSLGVILSRKLTELLGVNDGEIEFGYDVINHSIFIYDTALGGAGYSLLFREYKDEVLKMALEALERCDCERSCTKCLIDRRSQWYLNYLNRTKALEWLRQEIKARIAPKEILRLIPDSHTVTSDITTEFYQLTRNKDISCIKIFVNDNISQWDAEAFPFKKILTELSLEGVDVAFILPSVPDVKSLSSADSATLIAEVFKNDFKGLENTLPAELLPLMVVIMNDGTVKTYFGKNIDTSYSKNWGSGDVFITTQLNSLSYADINRMQLLNTFSSGDTSFMFDYRITEHSSLGHFFDSLKNPEVENWNRIVSNLQGKTVSVEYSDRYLKTPLGCMLLAKMISGLKNEADLNVVSIKVIVTNIVSMDDSDVAVNAIKDFTNGEKRNLFLKNAISELTGIEPEIQDTGYVEHERCLTVKADNAELCIRPDAGIARGWVPFGRDNAECADCDFREDWNMDLELFNKQQRGAGILYTISYKQP

SEQ ID NO: 25124 - protein, 1065 aa, Bacteroides fragilis str. 1009-4-F #10
MANIYNSEQHIALMKILDARNRSSITPNMPLWKLKLTEEEYTNLKETLAQNICRLEDFGIEAALCYAEWWRRDYNGGIPSREDVAVGLGLPHYCWEQLYKAARQGLKSHGFAFIHSLKGNEYFRTLLNQGGLPVNYIKNGTNLGGFSRFLLGLVEELSSINIDWDDNNLDLIKNFNCIAYLGKAFKNDNIYDVSLQIAHAIISEEDRWLPYDDADSSLSELTKSLKREYRRVKSEHRTTPLSLSWKLRLTSDETANLFVNLNVVKEISSKSIEGLDYQSCYTFDVFVAGILVGKYVRKSLVKDDIGEVIGAIYSRVTVGVANDIKWNGEPVVEVKIRCDNDDRLFPTLCGSYPPNFECPQVFQMLDDNVYSLKPTANAESNIAVFSTDWKCDGSHKLSLNGKLYSAIEFANQVDLHNCVLNEDMTITNEFTPYSAEFRGTYIQWVEQSNFKLLTRIPVISVFDQTGIRVGNIKPKYRVHNSKTDWRNLSNSCLLPFGLVDIKVEFPDNKYEVETFYFIDDMTFVSRNERMFSTELCLDSRHIISAKVDECEDLSVEMIDKNIWKISRDACASKYSPTCNLKIMAEGNPPLRISVVAPFEGIVISDLEGKIVPSGKIISYDNLRYFNIISHGQAGMIDVTYKSDKITDYDKIKHLKSPVIEGIVPLSDYRDLFARMFQLYGANTFDRSSSIELRIYDKCIYIRKFVLDSELISDKIRITDDTNEDTSDFIYDGDVYALPVSEDIKPAELVQIKLESYNRQMNLFTIPDELLNSEAILFSGPESSRRLVPKYYNFGQEDYSLEVRREKSATNIIHWGEKLSKDDVFSGEYWMKTVKAFRIISEFNLPFTTYNAFKAIGRVPKLLVNLILACWLNGASDILIQEIDRFEDELNIAVHWIPRTVWGECIENFICLLPPELSSIITAKLGEITELINGLFNATLSAEVASELIHYVAEGNIGRAHIFSISDINQFKSRIHGYTDNNMDLPLIRFVLQNQYYVDQKMLVSYRVMIEAAMCAAENLAQVKDCINLFSLEGRDYARIINFYQKYFKETYSEIFIGTVKQIASK

SEQ ID NO: 25125 - protein, 2048 aa, Bacteroides fragilis str. 1009-4-F #7; identical to SEQ ID NO: 25121

SEQ ID NO: 25126 - protein, 1037 aa, Bacteroides fragilis str. 1009-4-F #7
MPLWKLKLTEEEYTNLKETLAQNICRLEDFGIEAALCYAEWWRRDYNGGIPSREDVAVGLGLPHYCWEQLYKAARQGLKSHGFAFIHSLKGNEYFRTLLNQGGLPVNYIKNGTNLGGFSRFLLGLVEELSSINIDWDDNNLDLIKNFNCIAYLGKAFKNDNIYDVSLQIAHAIISEEDRWLPYDDADSSLSELTKSLKREYRRVKSEHRTTPLSLSWKLRLTSDETANLFVNLNVVKEISSKSIEGLDYQSCYTFDVFVAGILVGKYVRKSLVKDDIGEVIGAIYSRVTVGVANDIKWNGEPVVEVKIRCDNDDRLFPTLCGSYPPNFECPQVFQMLDDNVYSLKPTANAESNIAVFSTDWKCDGSHKLSLNGKLYSAIEFANQVDLHNCVLNEDMTITNEFTPYSAEFRGTYIQWVEQSNFKLLTRIPVISVFDQTGIRVGNIKPKYRVHNSKTDWRNLSNSCLLPFGLVDIKVEFPDNKYEVETFYFIDDMTFVSRNERMFSTELCLDSRHIISAKVDECEDLSVEMIDKNIWKISRDACASKYSPTCNLKIMAEGNPPLRISVVAPFEGIVISDLEGKIVPSGKIISYDNLRYFNIISHGQAGMIDVTYKSDKITDYDKIKHLKSPVIEGIVPLSDYRDLFARMFQLYGANTFDRSSSIELRIYDKCIYIRKFVLDSELISDKIRITDDTNEDTSDFIYDGDVYALPVSEDIKPAELVQIKLESYNRQMNLFTIPDELLNSEAILFSGPESSRRLVPKYYNFGQEDYSLEVRREKSATNIIHWGEKLSKDDVFSGEYWMKTVKAFRIISEFNLPFTTYNAFKAIGRVPKLLVNLILACWLNGASDILIQEIDRFEDELNIAVHWIPRTVWGECIENFICLLPPELSSIITAKLGEITELINGLFNATLSAEVASELIHYVAEGNIGRAHIFSISDINQFKSRIHGYTDNNMDLPLIRFVLQNQYYVDQKMLVSYRVMIEAAMCAAENLAQVKDCINLFSLEGRDYARIINFYQKYFKETYSEIFIGTVKQIASK

SEQ ID NO: 25127 - protein, 2048 aa, Bacteroides fragilis str. 3783N1-2
MNMNYFSFYNKAKELLIDSLASLWFKGQAREQEYIKRVLTEDEPLFAEPVFQSIFPWEESVYSFEAHSSKLGLLTSSFVNALSNEGIDKDLRFPLDRHPYKHQTESWRTMLSPRPQTIVVTSGTGSGKTECFMIPVLQDLAKTNMKDCVQAIFLYPLNALMKSQQKRIHAWCKALPEKVTYAIYNGETDKENRSDRYTAPHYPQLVTRPQIRRTPPQILFTNPTMLNYMLVRAEDHEILEKSKGKLKWILLDEAHTYIGSSAAELSLQIRRVLDAFGVTIDQVNFAVTSATIGDESDPKTMIKLKTFVSQLTGKPFEDIKIIGGKRIIPELNKGIAEEQLSKINKRFGIRLTYSDIERLRKKLNSSPVLKVKEIGSILDKKIGINVDASLEIIDALGEKVKNLNEGSGFGALLPTRAHFFVRSISGVYVCTNPDCQRHKGYRLPIGSLTTYQNINCPVCKSKMLELATCSSCGSPIVVGETSTTKGFRMHTNIIDLDNTLFYEQKEDLIDSEDMENIENVEQNEADGFSRFFFAIPEKLCLRKNATCTSHIFNHRNGKIELAPENNESSKGITPLERGESTPVRYQSLRHSGDNHVLCPHCGNNLSELKKLDYLRISATQIGRTLATLLLDNAEAIGSNDAGVVYEGRKYIAFTDSRQGSARSAMGLNQDVERSWIRASIFHKLADMRLNDVKPGGLTPDEEAEYNAYLSIRGCLPALLLEKFKQLEEKKNGVPVIPSPEEVSWSQISQPLENDSNFRKLYEHVDKARGRKNFRNATDYLKALLVDQFGWIPKRANSLETMGFVRLVYPTLKNAKCPTLLIQKRCTDTDWQNFLKICMDYVIRGGRHYMLSGAYKDYLTQNKYCSPIYPSNSELRKNGNPVSKWFKVNVSQKGVDENQNRLVLLLCAVLGYDDISQISQTKIADINSMLDAAWDFLKQNVLEATDAENQGYMLDLTGDKVKLQLIEKGYLCPVDNVIIDTPFCGYSPRMNGYIGRENFDRFKIQTEFVNPFFPFKFAEQIEENVTEWIEKNLFDQKAAGVFGVMNYRVLASKPIFISAEHSAQQSSEDLDRYEKEFNEGKINILSCSTTMEMGVDISGITEVVMNNVPPKSSNYLQRAGRAGRRSETKALALTVCAPNPIGTHTWNNPDYPITHVTETPLLKLESRQLIQRHVNAMVFASFVADQGGIRVTATLRDFFVKAEGMSFYDKFLNYIDSVISGNVERLQRAYSKLIKGTSLAQITLPDAAQVVKKDIAAVHNVFDAHNGALEKALESLRNESETANAIKAIEKQEENLLKTSMLSYLAENSFLPSAGIPIGLVECLLGGKEKVDGSSPTLHISQAISSYAPGNPVVKNEWVYEPSGIRLKTKYDDSTSRYIIQNCTHCGYTTITYGSAKTDCPKCGRHGTMHGIKDISLSIEQRFTEVVEPAAFSVAWDSTPIRKMGTLGGMNFIQPILLEMDAWQPKTNSAKMSIRCSTPRSEILFYNKGASGYGYAFCPYCGRMKSEKSPDSTERMMPHHKHLLASTPCLGGENDGTAVRRHVLLVGRYQTDFVEIKFHDKNNNLIEDSETLYSLGVILSRKLTELLGVNDGEIEFGYDVINHSIFIYDTALGGAGYSLLFREYKDEVLKMALEALERCDCERSCTKCLIDRRSQWYLNYLNRTKALEWLRQEIKARIAPKEILRLIPDSHTVTSDITTEFYQLTRNKDISCIKIFVNDNISQWDAEAFPFKKILTELSLEGVDVAFILPSVPDVKSLSSADSATLIAEVFKNDFKGLENTLPAELLPLMVVIMNDGTVKTYFGKNIDTSYSKNWGSGDVFITTQLNSLSYADINRMQLLNTFSSGDTSFMFDYRITEHSSLGHFFDSLKNPEVENWNRIVSNLQGKTVSVEYSDRYLKTPLGCMLLAKMISGLKNEADLNVVSIKVIVTNIVSMDDSDVAVNAIKDFTNGEKRNLFLKNAISELTGIEPEIQDTGYVEHERCLTVKADNAELCIRPDAGIARGWVPFGRDNAECADCDFREDWNMDLELFNKQQRGAGILYTISYKQP

SEQ ID NO: 25128 - protein, 1052 aa, Bacteroides fragilis str. 3783N1-2
MKILDARNRSSITPNMPLWKLKLTEEEYTNLKETLAQNICRLEDFGIEAALCYAEWWRRDYNGGIPSREDVAVGLGLPHYCWEQLYKAARQGLKSHGFAFIHSLKGNEYFRTLLNQGGLPVNYIKNGTNLGGFSRFLLGLVEELSSINIDWDDNNLDLIKNFNCIAYLGKAFKNDNIYDVSLQIAHAIISEEDRWLPYDDADSSLSELTKSLKREYRRVKSEHRTTPLSLSWKLRLTSDETANLFVNLNVVKEISSKSIEGLDYQSCYTFDVFVAGILVGKYVRKSLVKDDIGEVIGAIYSRVTVGVANDIKWNGEPVVEVKIRCDNDDRLFPTLCGSYPPNFECPQVFQMLDDNVYSLKPTANAESNIAVFSTDWKCDGSHKLSLNGKLYSAIEFANQVDLHNCVLNEDMTITNEFTPYSAEFRGTYIQWVEQSNFKLLTRIPVISVFDQTGIRVGNIKPKYRVHNSKTDWRNLSNSCLLPFGLVDIKVEFPDNKYEVETFYFIDDMTFVSRNERMFSTELCLDSRHIISAKVDECEDLSVEMIDKNIWKISRDACASKYSPTCNLKIMAEGNPPLRISVVAPFEGIVISDLEGKIVPSGKIISYDNLRYFNIISHGQAGMIDVTYKSDKITDYDKIKHLKSPVIEGIVPLSDYRDLFARMFQLYGANTFDRSSSIELRIYDKCIYIRKFVLDSELISDKIRITDDTNEDTSDFIYDGDVYALPVSEDIKPAELVQIKLESYNRQMNLFTIPDELLNSEAILFSGPESSRRLVPKYYNFGQEDYSLEVRREKSATNIIHWGEKLSKDDVFSGEYWMKTVKAFRIISEFNLPFTTYNAFKAIGRVPKLLVNLILACWLNGASDILIQEIDRFEDELNIAVHWIPRTVWGECIENFICLLPPELSSIITAKLGEITELINGLFNATLSAEVASELIHYVAEGNIGRAHIFSISDINQFKSRIHGYTDNNMDLPLIRFVLQNQYYVDQKMLVSYRVMIEAAMCAAENLAQVKDCINLFSLEGRDYARIINFYQKYFKETYSEIFIGTVKQIASK

SEQ ID NO: 25129 - protein, 2048 aa, Bacteroides fragilis str. 3783N1-6; identical to SEQ ID NO: 25127

SEQ ID NO: 25130 - protein, 1065 aa, Bacteroides fragilis str. 3783N1-6; identical to SEQ ID NO: 25124

SEQ ID NO: 25131 - protein, 2048 aa, Bacteroides fragilis str. 3783N1-8; identical to SEQ ID NO: 25127

SEQ ID NO: 25132 - protein, 1037 aa, Bacteroides fragilis str. 3783N1-8; identical to SEQ ID NO: 25126

SEQ ID NO: 25133 - protein, 2048 aa, Bacteroides fragilis str. 3783N2-1; identical to SEQ ID NO: 25127

SEQ ID NO: 25134 - protein, 1065 aa, Bacteroides fragilis str. 3783N2-1; identical to SEQ ID NO: 25124

SEQ ID NO: 25135 - protein, 2048 aa, Bacteroides fragilis str. 3976T7; identical to SEQ ID NO: 25127

SEQ ID NO: 25136 - protein, 1065 aa, Bacteroides fragilis str. 3976T7; identical to SEQ ID NO: 25124

SEQ ID NO: 25137 - protein, 2047 aa, Bacteroides stercoris ATCC 43183
MNMNYFSFYNKAKELLIDSLASLWFKGQAQEQEYIKRILTKDEPLFAEPVFQSIFPWEESADSFEEHSSKLRLLTPSFVNALSSEGIDKDLRFPLDRHPYKHQTESWRTMLSSRPQTIVVTTGTGSGKTECFMIPVLQDLAKTNEKNCVQAIFLYPLNALMKSQQKRIHAWCKALPEKVTYAIYNGETDKENRSDRYTTSHYPQLVTRPQIRKTPPQILFTNPTMLNYMLVRAEDREILEKSKGKLKWILLDEAHTYTGSSAAELSLQIRRVLDAFGVTIDQVNFAVTSATIGDESDPKTTIKLKTFVSQLTGKPFEDIKIISGKRIIPELNKGIAEDQLSKINKKFSIELSYSDIEKLRKKLNSSPVLKAKEIGRMLDKGIGKNVDASLEIIDALGEKVKGLNKGGGLGALLPTRAHLFVRSISGVYVCTNPDCQRHKGYRLSIGSLTTYQNMNCPVCKSKMLELATCSSCGSPIIVGETNTTKGFRMHTNVIDLDKSLFYEQKEDLIDLEDMGNIEDVEQNEADGFSRFFFAIPKKACLRKNANRTYHIFNHQNGKIELVPEDNRSNKCFTSLKSEESIPVIYQSLRHSGDNHVLCPHCGNNLSEFKNLDYLRISATQIGRTLATLLLDNAEPIDSNDADVVYEGRKYITFTDSRQGSARSAMGLNQDVERSWIRASIFHKLADMRLNDVKPGGLTPDEEAEYNAYLSIREHLPTLLFEKFKQLEKKKNGIPVIPNPEEVSWGQISQSLENDSNFKKLYEHVDKARGRKNFKNATDYLKALLVDQFGWIPKRANSLETMGFVRLVYPALKNAKCPALLQKRCTDTDWQNFLKICMDYVIRGGRHYMLSGAYKDYLTQNKYCSPIYPSNSELRKNGSPVSKWFKVNVSSKGINENQNRLVLLLCAVLDYDDISQINQIKIADINSILDAAWDFLKQNVLEATDVENQGYMLDLMGDKVKLQLIEKGYLCPVDNVIIDAPFCGYSPRMNGYIGRENFDRFKIKTEFVNPLFPFKSADQTEKNVMEWIEKNFSEQKAAGVFGVMNSRVFASKPIFISAEHSAQQSSEDLDRYEREFNEGKINILSCSTTMEMGVDIGGITEVVMNNVPPKSSNYLQRTGRAGRRSETKALALTVCAPNPIGTHTWNNPDYPITHVTETPLLKLESRQLIQRHVNAMVFASFVADQGGIRVTATLRDFFVTAEGMSFFDKFLNYIDSVISGKVERLQEPYLKLIKGTSLAQITLADVAQVVKKDIVAVYNVFDAHKGALAKAIESLKNESGTTNAIKAIEKQEENFFKTSMLSYLAENSFLPSAGLPLGLVECLLGGKEKVDGNSPTLHISQAISSYAPGNPVVKNEWVYETNGIRLKTKYDDSTSRYIIQNCTHCGYTTIIYGSAKTDCPKCGRHGTMHGIKDISLSTDQRFTEVVEPAAFSVAWDSTPTRKMDSLGSMNFIQPILLEMDAWLLKTNSAKMSIRCSTPRSEILFYNKGTNGYGYAFCPYCGRMKSEKSPDTTERMLSHHKHLLASTSCPGGENDGAAVRRHVLLVGRYQTDFVEIKFYDKDNNLVEDTETLYSLGVILSRKLTELLGVNDGEIEFGYDGINHSIFIYDTALGGAGYSLLFREYKDEVLKMALETLERCDCERSCTKCLIDRRSQWYTNYLNRPKALEWLRQEVKARVAPKEIIYLMPDSHVVTSDITTEFYQLTRNKDISGIRIFVNDNISQWDAETFPFKKILTELSLEGVDVAFILPSVPDVKSLSSADSATLIAEVFKTNFKCLENTLPTGLFPLMVVIMNDGIVKTYFGKNIDTSYSKNWGSGDVFITTQPNSLSYADINRMQLLSAFSSDDSSFMFEYRIREHSSLGRFFDSLKAPETGNWNRIISNLRGKAVSIEYSDRYLKTPLGCMLLAKMISSLKNEADLVLVSIKVIVTNIVSINDPDMAVNAIKDFTNGKKRNHFLKDAIFELTGIEPEIQDTGYVEHERCLTVKADNAEICIRPDAGIAKGWAPFGRDNAECTDRDFREDWNIDLELFNKQQIGNGILYTISYKQL

SEQ ID NO: 25138 - protein, 1065 aa, Bacteroides stercoris ATCC 43183; identical to SEQ ID NO: 25106

SEQ ID NO: 25139 - protein, 2047 aa, Bacteroides uniformis
MNMNYFSFYNKAKELLIDSLASLWFKGQAQEQEYIKRILTKDEPLFAEPVFQSIFPWEESADSFEEHSSKLRLLTPSFVNALSSEEVDKDLRFPLDRHPYKHQTESWRTMLSSRPQTIVVTTGTGSGKTECFMIPVLQDLAKTNEKNCVQAIFLYPLNALMKSQQKRIHAWCKALPEKVTYAIYNGETDKENRSDRYTASHYPQLVTRPQIRKTPPQILFTNPTMLNYMLVRAEDREILEKSKGKLKWILLDEAHTYTGSSAAELSLQIRRVLDAFGVTIDQVNFAVTSATIRDESDPKTTIKLKTFVSQLTGKPFEDIKIISGKRIIPELNKGIAEDQLSKINKKFSIELSYSDIEKLRKKLNSSPVLKAKEIGRMLDKGIGKNVDTSLEIIDALGEKVKGINNGGGLGALLPTRAHLFVRSISGVYVCTNPDCQRHKEYRLSIGSLTTYQNMNCPVCKSKMLELATCSSCGSPIIVGETSTTKGFRMHTNVIDLDKSLFYEQKEDLIDLEDMGNIEDVEQNEADGFSRFFFAIPKKACLRKNANRTYHIFNHRNGKIELVPEDNRSNKCFTSLKSEESIPVIYQSLRHSGDNHVLCPHCGNNLSEFKNLDYLRISATQIGRTLATLLLDNAEPIDSNDADVVYEGRKYITFTDSRQGSARSAMGLNQDVERSWIRASIFHKLADMRLNDVKPGGLTPDEEAEYNAYLSIREHLPTLLFEKFKRLEEKKNGTPVIPNPEEVSWGQISQSLENDSNFKKLYEHVDKARGRKNFKNATDYLKALLVDQFGWIPKRANSLETMGFVRLVYPALKNAKCPALIQKRCTDTDWQNFLKICMDYVIRGGRHYMLSGAYKDYLTQNKYCSPIYPSNSELRKNGSPVSKWFKVNVSSKGINENQNRLVLLLCAVLGYDDISQINQIKIADINSMLDAAWDFLRQNVLEATDVENQGYMLDLMGDKVKLQLIEKGYLCPVDNVIIDAPFCGYSPRMNGYIGRENFDRFKIKTEFVNPLFPFKSADQTEKNVMEWIEKNFFEQKAAGVFGVMNSRVFASKPIFISAEHSAQQSSEDLDRYEREFNEGKINILSCSTTMEMGVDIGGITEVVMNNVPPKSSNYLQRTGRAGRRNETKALALTVCAPNPIGTHTWNNPDYPITHVTETPLLKLESRQLIQRHVNAMVFASFVADQGGIRVTATLRDFFVTAEGMSFFDKFLNYIDSVISGKVERLQEPYSKLIKGTSLAQITLADAAQVVKKDIVAVYNVFDAHKGALAKAIESLKNESGTTNAIKAIEKQEENLLKTSMLSYLAENSFLPSAGLPLGLVECLLGGKEKVDGNSPTLHISQAISSYAPGNPVVKNEWVYEPNGIRLKTKYDDSTSRYIIQNCTHCGYTTIIYGSAKTDCPKCGRHGTMHGIKDISLSTDQRFTEVVEPAAFSVAWDSTPTRKMDSLGSMNFIQPILLEMDAWLLKTNSAKMSIRCSTPRSEILFYNKGTSGYGYAFCPYCGRMKSEKSPDSTERMLSHHKHLLASTSCPGGENDGAAVRRHVLLVGRYQTDFVEIKFYDKDNNLVEDTETLYSLGVILSRKLTELLGVNDGEIEFGYDGINHSIFIYDTALGGAGYSLLFREYKDEVLKMALETLERCDCERSCTKCLIDRRSQWYTNYLNRPKALEWLRQEVKARVAPKEIIYLMPDSHAVTSDITTEFYQLTRNKDISGIRIFVDDNISQWDAETFPFIKILTELSLEGVDVAFILPSVPDVKSLSSADSATLIAEVFKTNFKCLENTLPTGLFPLMVVIMNDGIVKTYFGKNIDTSYSKNWGSGDVFITTQPNSLSYADINRMQLLSAFSSDDSSFMFEYRIREHSSLGRFFDSLKAPETGNWNRIISNLRGKAVSIEYSDRYLKTPLGCMLLAKMISSLKNEADLVLVSIKVIVTNIVSINDSDVAVNAIKDFANGKKRNHFLKDAIFELTGIEPEIQDTGYVEHERCLTVKADNAEVCIRPDAGIAKGWAPFGRDNAECTDRDFREDWNIDLELFNKQQIGNGILYTISYKQL

SEQ ID NO: 25140 - protein, 1065 aa, Bacteroides uniformis
MVNICNSEQHVVLMRILDARNRPSITPDMPLWKLKLTEEEYTNLKETLVQNAYRLEDFGIEAALCYAEWWRRDYNGGIPSREDVAVGLGLPHYCWEQLYKAARHGLKSHGFAFIHSLKGNEYFRTLLNQGGLPVNYIKNGTNLSGFSRFLIGLVEELSSINIDWDDNNIDLIKNFNCIAYLGKAFKNDNIYDVSLQIAHAIISEEDRWLPYDDTDSSLSELTKSLKREYRRVKSEHRTKPLSLSWKLRLTSSKTANLFVNLNIVKEISSKSIEGLNYQSCYTFDVFVSGILVGKYVRKSLVKDDKGEVIGAIYSRITVGVANDIKWSGEPVVEVKIRCDNDDRLFPTLCGSYPPNFECPQVFQMLDDNVYSLKSTANAENNIAVFSTNWKCDGSHNLLLNGELYSAIKFTDKVDLHNCMSNEDITITNEFTPYSAEFRGTYIQWVEQSNFKLLTRIPVISVFDQTGTRVGNIKPKYRVHNSKAEWRNLSNSCLLPFGLVDIKVEFPDNKYVMETFYFIDDMTFVSRNETMFSTELHLYSRHVISAKVDECENLSVEMTDKNTWRISRDACASKYSPTCNLKIIAENNPPLKVSVVAPFEGIVISDLEGKIVPSGKIISYDNLRYFNIISHGQSGMIDVTYKSDKIKDDNTIKHLKSPVIEGIVPLSDYRDLFARMFQLYGANTFDRSSSIELKICDKRIYIRKFVLDSELSSDKIRITDYTSEDTSDFIYDGDVYALPVSENIKPAELVQIKLEPYNRQMNLFTIPDELLNSEAILFSGPESSRRLVPKYYNFEQEDYSSEVRGEMSAANTILWSERLCKDDVFAGEYWAKTVKAFRIISEFNLPFTTYNAFKAIGCEPKLLVNLILACWINGASDVLIQEIDRFEDELNIAVHWIPHTVWGECIESFIRSLPPTLINIMNTKLGEITELINALFNATLSAEVASELTQYVAGGNIGNARIFSRADINQFKSKIHGCTDNNIDLPLTRFVLQNKYYVDQEMHKSYRVMIESAMCAAENFAQVKNRTNLFLLESRDYARIINFYRKYFKETYSEIFIGTVKQIVNK

SEQ ID NO: 25141 - protein, 2053 aa, Bilophila sp. 4_1_30
MPLSYFSRIFPRLQERIRQDVPSALPLNNDSLRRCLDAMLSCAPGDEGSLTSDPAFEAMFGWKQADLSMADLAGNLLDERLARCLNEPPEELRQDYEFPSSRRPYTHQLEAWKTLCGKEPSSAVISSGTGSGKTECFMIPILDRLARQSAVQGGPLEGIRALFLYPLNALISSQRDRLDAWTRGFNGNVRFCLYNGKTPQSLPAHEKRCANEVRSRDELRASPPPILFTNASMLEYMLVRTEDAPILQKSQGTLEWIVLDEAHCYIGSQAAELSLLLRRVQMAFGVTPDTVRFVATSATIGDPNGSTGLELKRFLADVAGVPVSQVTLIAGERMIPVLPPLEEKPAMLEELEGMAPEEAQSAARHEALCRSKTAKVLRALFTRDKNVACLSEVQTLLKKEGLPAGTNVALRWLDVLSWTRGSDGTPFLPLRAHMFGRGLSGIWACADPNCPHKQKDLQDDWPYGAVWTDLREHCTCGSPVFEIVTCRGCRTPFLLAQKNDRTDSDGRPAEFLMQKIHLLEPEYEDDSLIDEETTMSRIVDSYAILLVRPGASSVSFFLDKETFRLMDTDNGHAIRVSLKEPNPDKGSLACPLCLETSRGHQEFYHYNTIGTPYLQNTIAPVLLEFAPDGKDPMQHPFRGRKMLTFNDSRQGTARSAMSMQLFSELTRIRGLLYHISLQVCQDGNDEKMAKLQQDIAKLEALPEETLSALQNILDEKKAELTSLGNMVPVTFDDIAKKLQIERSSFEALLRIYQEKAPALFSVGSGTSDFARMLIFREFGRRPAKAVNLETLGLMAVRYPALEQVTAVPRELSRENLTLQDWKDFLKICLDFVFRANGATDFPREWRKWLGMTYNQNFMLPPDREEHGKFQLLWPQCRRNRQHRLVRLLERALRINTEHWEHADLIDSILRQAWNQITSLPKLCSRHTDGVLLQHSAMSFAPLKKVRLCPFTRRFLDTAFLGISPYLPRKGEQNASCREYAMPLYPSPFEPTSESGVQKARDWLSKNKDVQTLRQAGLWFADHDSVVELTPYFRAQEHSAQLPSAELDLCTQKFREGDINVLSCSTTMEMGIDIGGISIVGMNNVPPHPANYLQRSGRSGRRGETRALTFTMCKNNPHEMAAFANSRWAFDTSLSVPRVSLNSPVIMQRHVNALLLTTFLKERQQEDDKDLAKLSCDAFFTGNNPAARLFSLRFKTLKTDSPLLESIRLLCRNSVFQNERPEAMAEKAAEAMDRAYERWHGDYDILCQEEKNMQSDGGKENSAAKKAVTLRKERMAKEYLLKELISQEFLPAHGFPLHVATFDTMYLSLFLEQQRRKKESRGEVDNLFLRRELPSRSLSSALTEYAPGNSVAINGLVYESRGITLNWHIPASEEAAAELQNIRSRWRCRNCGSFGTAASRSLTACSNCGAPLTKENWHEYLEPAGFAVDFFREPSNNVALGMKGLSHAEANVCACGPWISLGLPETARFRCTTSGTVFHRSRGLYSKGYAVCLACGRVESISETREIPSAIKHHKKLRGGKNENDPANHICPACREGMEWKIKAPLWLACESKTDVLELQIRKEDQSWLNNEAQAFPIAVALRDALAARLGIQTEEMECTVDTRRREDGTICTSIFVFDKNAAGYASSAGEYMVELMRDAHDRLLCKGHGCETACPHCILSFDLRYQSRELDRHKGLEVLTPAWFTLLDLPSQARIFGASTATETMRLEESVLFISLLHPEATILMHLGPNSLWLPGDGDMLHLLDILRLRQVHVELTLEKEFYDSFSQEERMLLAPLIHGNVTCSVLEGDFSHPHARLAVTIEDGLLHRWAVYEEEENRLLLKGCTEGDAGTRRPLLQKDLQAKSGNSAIVQIGGNDKTSVTDFGPWLWHKLRQSLEKNLGLDPVAARRPITRILFSDRYCNSPLTTALLYRLLSHLKELYGEAWTSPTFFVMLADRISGEYSHVWDDWSRATERDEAVRGLLNELGTAKVVPMDKKMMAHARSLRLDFQDGTALTIWLDQGLGFLKVERKCPDRLFPFQETCEEQIITLKNMEQTLEVVPGGTVVSLQLGKV

SEQ ID NO: 25142 - protein, 1115 aa, Bilophila sp. 4_1_30
MAKQLKIKDWLNDFLASRELDAPDGRHLFSYHATPDEFLTLEEGLKQNMTLASMLGCQNPFCLWDNAPDFDAVFVLYAALCWQQRYGGTTWTYDVILNGLNTSLSNPSLELRDIIERGLNFWGLAKSERGYAYLGAIAREAGLPQKLLAENRGAVGRLLHSVLREALRSGQSGSIVTSWIESCKTLLPQSYWNEEIIALLADSINAILNIKKNLRASTLEEAMSELDEKTPDWRSCFPLPLYDDTARDLLNRLLEDAASSTQTVQTGSPVSAVRSLIRNAGQDWDLLVRLDIPSRIETGISQDKPRVLSMCITSGQRSFESVLKKHADSDFYFFQQKKNMTFSGPDAVQEIIVRYTAPSGFCLTHTCPGGTELDSELPWIFEGEQYGYRFRQQGGGSVRGTVSYVALAPGWEAENAEDIGSLLGTNRHVYRMTKPSRLKKDDLDFSIRTSELIGEEYDWSRDNRFWDVEMLQPALAFRGIPKAVVSTGGTKKIPHGKMLKKTAGMEKFAPFSASNAPVGVTQVWFKANDGASLRSRMLLLPMKASISLSTDAEGNGLLRLENWNAEAATFDQPQAGLELACRPLGNSLELAFKTLPGRVPPATVDLRVSWKNNPQSARIRVPFPQTGARLFNAEGQEILSNKQICALHLHGLRLYCFIMGVHHTALRLSLPGKKLDYPLETHEHCMGIHLIDWQNALLEMLAMTNGLDDRVSLDILFDGQKVAGWNVARYESCLVPEETKAVLALPKYGTRPSQGYAMKALLLDHPELGPTLLEESLREDGTASGEWELSEVLDRPGPWLIFDDTEGTSLRPLLWTVNGDIDETPRNCLQAAIAEKDRESRLRAFLSCVAVMEHDLDAPEWTTLLALFKYVRNLPLSTLEVWQALLHFPRIMAMIALHPGISFQVLTSRVDTELPFLWNFVSRQDWSAASQCVKHYFEKLIPGDMAFGIWQDHMQKTMENLGSCCPSVNALVHIANPLPCETPMLTSVCAYYHADQVACLLFKDNNSEMQKLLRRHADDKWPTAFASLVNRERHSDDIKSFLPFSQGHGNSVLGLPILLTLQAFEPQTMFIPVPPDQDTVFHVREHLHFDAEWFEQASSLTAYCCASKRFSIKES

SEQ ID NO: 25143 - protein, 2083 aa, Burkholderia sp. H160
MKYFTDLIEQSLSRTREATLSVLGINDENLRRHLGSQMNSTLGSDGCFLAPPVFEHTFGWQEAEEITLNDLRGNLLSASLLDTLHAAEGTYRFAANTHPYVHQLKAWETLLAPTPKSAVVTSGTGSGKTECFMVPILEDLVRERAKLGQSLVGVRALFLYPLNALINSQRERLHAWTRPFGSDIRFCLYNGKTVESASEVRKLQHQRPNEVLSREELRRQPAPMLMTNATMLEYMLVRQVDAPILELSRQQQSLRWIVLDEAHTYVGSQAAELALLLRRVVQAFGKRPDEIRFVATSATIADSNANERLQQYLASLAGVHPEQVVVLGGSRKVPDIVCTGTPDQRSYEAACSVDAGQEISEARFSVLAHHPLASALRHGIVNKGRPLDLNELVDIAGNRLTGETLAERQQELLGWLDLMSGTRRAAKEPPFIKLRIHLFQRMLHGLWACIDARCSAKPAGLEAWPFGNVYVTQRSRCECHAPVYELAFCDECKTPHLLAEDRAGQLQQRSPYASDEFSLSYDSPAEDEPNGDLPSSLSRRQFAEKFVIAASETQREPYFPLQVNLSTLNVGALPSTDTRELVVAPESLATCSRCETSFTGSPGPLRKAYLGAPFYVANAVPTVLEFCPDPMPEDSDGKSPEELPGRGRKLITFTDSRQGTARMAVRMQQEAERSRLRGLVFEILRNAQAKLDAKPKDIPTVGYEELIEQAKRLQSMGMNDMSAQLFQKAEEARSGLSTSGTSEMSWSDMVTELATSRDISLSIRDYNKYANPELFEGQEGAIPMARLLLAREYARRPKNQNSTETLGLVRVGYRGLDGITSAPALWLGRKAGALPGEAVPGNLTLQDWRDFLKVALDFHVRENTFIRLDPTMQRWMGARFTSKVLMPSKRDAAESATFKKWPQFRQGRGHRLVKLLEQGCNLDRSRPDDQDIINHLLEHAWNALVGATILEQFEGGYALNLNTLTFSLPTIAWVCPLTHRMFDTAFRALTPYMPDRFREGDYRCRKVQLPTFSLLSPAGDADAARVQVRRLVTDNPQVQQLRSQNLWTDICDRTAEGGFYYRTAEHSAQQSSSRLETYEDMFKRGKINVLNCSTTMEMGVDIGGISAVLMNNVPPHPANYLQRAGRAGRRNEARSIAYTLCKADPHNQRAFREPKWPFVTAIPAPGITLSSERIVQRHVNSALLGRFLRTLGNTGTDRTKLTLNWFFGGEASTCTRFIDWMQSDPEGLDQSVADITRGTSLAARSRTSIIDNAVATLLPIQSRWCSEHHKLVELLASAVDEPYRKALGFELKRHEDEYLLRDLAARAFLPGYGFPTDVVNLNTYNVEDFKERSRQREERGREDNIFTSKEQPTRGLSIAIREYAPGAQIVIDGRVYRSAGIGLHWHSGGARHEAQKFDIAWRCSHCGTAGYTENAYSNSDNIRCTRCDHPVHATERKLILRPSGFVTDFYESTTNDISTQKFIRVAPPRIQLDGEMLALPDSRCGYLHFGHNGSVFYHSSGEHENGYAVCLACGRAESMTLEGEVPPALRPEKFHRPVGGATGSKRDKTCSGAAVKSNIHLGYHTATDVLELVLRSPTTGEWLGDSPDEAIVATTLAVALRDAIADEIGVASTEMGFGTRLDRDPATGKVRSVIQLFDQVSGGAGFVLAALPQVVNLLTRAAHKLDCPQDCENVCSSCLASRDSRVEAEELDRRAAKRWLDDHEFLHHLELPDQFRNIPGATYCSFSPERFIRESINRGATGIQLMLTGDPGEWDLDHPSFRDKVLTWKVKDLLEVCLAVPSIKVLTAENRRSLNFLGKLGVRVCQHDAAGDAAGVAVIAQVCRGETAQTLLTSEAATGVPGENWLRTHDTSVWVSTGQLKSLRVTPIDVAAWEARESGATVLEVVTELNGPVSSLAARLRGLISERVPALASLMAHDHATEVSYSDRYLKSPWSLMLLGGFLSIFKSSELRRLEIATLRPQATQVSNHLKHDWNRPEDMRKLICAWLQTMVSVEPQVTMVEKPYDLQHSRVIYVSWASGRKTKLILDQGVGYWQPKTVYRDQAHFDFNESLEAQGSRMVEQYKFANMVNGGTWPTFLSVVSE

SEQ ID NO: 25144 - protein, 1107 aa, Burkholderia sp. H160
MLSPMRAWLTEFLFIRDIFREPPGLPLYRYQVTPGEYHELERMLRDHRMHAVHPTYGLSWAAAFCLFVAESFRREYDAKDGGWVWARFENRLDCKFTPQQHGELVRQGLGQYWKRPIRQYLDGRDNLLGSLFTEGGLPWPLVQSESHGFGRVVRKGLKYYYRTEGGLRTAADVLADFEQELPQTFRTLETRQLLAGIVEQLMFLATKYELRGKADPAQYLDEVTPRWWHDFPLPLDEGNARRLISEWLRDASRRRAEREAERAEVGTFSCDHRLVEQPHGWRIRTEVTIPREALFPLDPLIANTTRYELAFFEGDRLLASAGTAYGHQSVDQSALSVRFIRTQISIDRSQPCDELTLRLLANGSSAYTVRFEQGALDEQELPLVFECRGDEWWFIASASCSTTSDRVRVHLPERFSYSCDGRVSVQKSAENSLWLETSDNLHLTSDTGDRYTIKLRTRQEQNAQLVLKGNTAHFASVPQVVYLGWPQLDASADAGESRPRIQEVANRQQLMRINGGEPLGGIRYIARNALGEILLQRRFGVVPAGFAIQAFPASSSKPARLVLKNARALDLQVIDSAIKSRVEIVDQDTTITLEPLANDPPSFLTLEARGRTNSGCDPIQFRLAYPYQGARLLGSDGAAISRRNFTLVELVGLRIALATSTSNGTEFCLHLELASREGRCARHYFVRAGNTPVLLSLFSYQADMLQMLGAVDDQDAYLRVTVETNQPLLHFDVRRYNGAVRWEDKDTFSLMTPSGGPLDEEVAVEAMLLPDPKQAHVEIPEMTSEGASTGRFRTLLSMHRDGPWVIYPATGSSTQFRPVLYVPEQLSETGIPAEIRSLHTAARVFHPVNHPDVINQQIADMATDLDHSGWQYLADLRQHYRHLPLSVFESWLALSRNPSALATAVFRLELDEAFCERIHDELAVLWECIPLPGWATAYARFREWLVRQGVPEVLLDSLLRNRQAMLPAVVSGFKEVGNYLETADPTSLHRLPVEHILPDWYQQLRRTHEGNNRWPTDLGFRVKEWIRKQPLPSQIANLSMVEFTDAVTYLPIFMAYVTAGMAHIEELKERRSYLKFAIKMVSDFDRSSWYTPVHGMMVSYLLASARA

SEQ ID NO: 25145 - protein, 2080 aa, Burkholderia ubonensis
MQYFTRLIDQTLNRTREATLSILGISDVPLRNHLREQMGDTLGADGCFLAPPVVEHTFGWQEADDVTLGDLRGSLLSRRLIDTLQRAPHPYQFTSDSRPYVHQLKAWKVLLDESPRSTVITSGTGSGKTECFMLPILEDLIREHQAGTGQLTGVRALFLYPLNALINSQRDRLHAWTKEFGADIRFCLYNGKTEESADTVRKEQATRPNEILSREELRKHPAPMLMTNATMLEYMLVRQVDAPILEISRQQRSLRWIVLDEAHTYVGSQAAELALLLRRVVQAFGKKPEEIRFVATSATIADRDSDDRLRQYLAALAGVPAEQVVIVSGARRVPDLPATVVKWRSIDDVRSIEADQEVAPARFAALVEHPVAAALRHAIVGNGRPLDLNELEKLIGDGLLAKTTGPRQREVLEWLDLMSGTRRAKGEPPFIKLRIHLFQRMLHGLWACVDAHCTAKPLTLKDWPFGSVYVAQRPRCECGAPVYELAFCDDCKTPHLLAEDSNGQLLQRSPYANDEFEVSYEASDEDQPNSDGSDSLYTLPATRLLIAATLASKEPYLPMTLDLRTLELGAPAADARSLAIAPNAQACCCHCAADFTAAPRLLRQSYLGSPFYVANAVPTVLEFCPDPLPEDCEGKSPDELPGRGRKLITFTDSRQGTARMAVRMQQEAERSRLRGLVFEILRNAQAKIDAGPKDKPTANYEEIVATAKTLESMGYAQKAAEILADAEKKKAGVDVQRMNVITWRDMVYELATSKDISQSILDYNKYANPELFGYADSAAPMARLLLAREYARRPKNQNSTETLALVSVGYEGMDRIRSAPNVFLQHRPGPMSGTTRDTNLTLQDWKDFLKVALDFHVRENTFIRLNPSEQRWMGARFTSKQLMGPHWDGAESNTIKKWPQVRGAVASRLVKLLELGCGLDRSRADDHDIIDHLLEQAWLALIEAKILEPIDGRFALNLNTLNFSLAAQGWVCPLTHRMFDTTFVGLTPYLPRRYREGDFRCRKVQLPEFSDLAPGGDSEPALLQIRRLVSEDARIQALRAENLWTDVSDRTAEGGFYYRTAEHSAQQSSKKLEVYEELFKRGKINVLNCSTTMEMGVDIGGISAVVMNNVPPHPANYLQRAGRAGRRSEARSIAYTLCKANPHNQRVFDRPTWPFVTAIPAPGIALSSERIVQRHINSMLLGRFLRTLGDTGTDRTKLTLKWFFGGKDDSFCTRFVDWLQSKPDELASSVKELARGTCLATRSWQSLAADAAMSIQPLQERWCAEHDKLTQLIQNASEAAYKKALGYELKRHEDEYLLRDLAMRTFLPGHGFPTDVVSLNTYNVEDFIEQARRKEDKTREDNIFSSKELPTRGLNIAIREYAPGAQIVIDGRVFRSAGVALHWHSGGVVNEPQKFDIAWVCKCGAQGFVENAYSNSDVHCTRCGETIALSARQLVLRPSGFVTDFYESTTNDVSSQKFIRVAQPRIQLDGETLSLPDSRCGHFNFGHRGSVFYRSSGEHEHGYAVCLSCGRAESMTHDGQVPKALQPGKMHRPVGGPKGSKKEASCSNEAVKPFVHLGHHSATDVLELVLRSPKTGEWLGNSADDRVVATTLAIAMRDAIAAEIGVASTEMGYGTRPERDHVTSKIRTVIQLFDQVSGGAGFVLSALPQVVKLLTDAASRLNCPINCENVCSACLASNDSRVEQEELDRRKAKQWLEDNAFLAHLELPADFSAIPGAAYCSFGPDRFIRERINRGAKQLDIILSGNSDDWDLGHSSFRDRMLSWKISDGLDVRILVPSSAVLSVASKQSLSFLAGAGVQIGCREGTEMVAGVSAIAQIGSGEVTETLFTLDRDAATPGEHWLRTRDTSVWVSSRDVGVSQAFPLDIAGWDLRDKGATVVEVSTELNGPVSSLTTRLRKIFMSQAPGLAALLETDHAVNLEYSDRYLKSPWSIMVMSGFMALFRNERLKHLQIITLEPSSPATPSSVIKHDWPNAAHMHDLIEAWLTATVSVKPLVTMYKKTHDVQHSRVLTVTWASGKKTKLIFDQGAGYWQPRAQYAEQLVFNFNAKTEPQALRMFEQYKSINMVNGGVWSTLFYIVEE

SEQ ID NO: 25146 - protein, 1046 aa, Burkholderia ubonensis
MYRRQYDAKAISWAWAPFERLVDCQFNPQQRGQLVRLGLEYWKRPVRKWKRPSDKFEDGRDNLLGSLFTEGGLPWPLVQRDTHSFGRVVGKGLKYHYRTEAGLRTTADLLADFVEDLPQTFRDSPETLHLLAGVVEQLMELATRHELRDKEDPARYLDSVEAGWRNDFPLPLDEANARNLVNDWLRDASRSRAEREALRTKGTAFSCTHRLIEEPQGWRICSEVSVPRVAELSIDAGVLNPGRFELAFFEGDRLLARAGVAYGSKREGSDDVSVRFVKTQFSLDRVRFEDALTLSLLANGCDACIVPFDQAALDETLPLVFEYKGDEWWYLASASCSTAAARVRVRLPRGLSYRCDGAVTMHQEATGDARWIEADESLLLFSDDGDRYEVSLRAGAQTSHMLSLKGVPTHYDSVPQVVFQGWPKLDATEADGDAPVPSIREFVNRRHLTRADHGKLFGVFHYLARDTSDNILLQRRFGVVPFGFAIEGYAASGGKLARLVIRQSSQLEMQIVDRAIRCRREVHGQDTVIWLEPQTQPLPTFLTLEVSGNGSAPVPITFKVAYPDEAARLIDANGAIIGHHDFMLTDLLGTRVALSTSRSNGTRFCLQLELVSKEARCMRHYYIAVRGKTVLLSLFSYQTDMMQMLGAVDQQDAFLRVRVETDRPLLQFDVRRYNGAHWRDDGDPSTFTVTDLSRGALTTKVCVQAMLLSDPKQASVNIHEQLTQNVGTGRFRVPPSMGAEGTWLIFPASGSPTQFRPFLHSGEHIESDVPESEIRSLHEAARAFHPVKQPYVIARQIANMADDLDHSGWEYLADLKQHYSHLPLSVFESWLALSRNPAALAVAIFRLEVDESFCARIRDELAVIWECVQLQQWAAAYQRFEAWLGARGLPDAFSDNLLLNRRQMLEYVLGSFGGSGLTPYLKTGDSRVMQKYRIEGILPHLYQDLRRVHDGDHWPTELGPALRDWLGRQKLPRSVLELSRIEYTDAVAILPIFMAYVTAGRTTIEEFKTSRSYTRFAIKMVSDFDRWNWYAPVHGLMVSYLLATQE

SEQ ID NO: 25147 - protein, 2080 aa, Burkholderia ubonensis; identical to SEQ ID NO: 25145

SEQ ID NO: 25148 - protein, 1046 aa, Burkholderia ubonensis; identical to SEQ ID NO: 25146

SEQ ID NO: 25149 - protein, 2080 aa, Burkholderia ubonensis; identical to SEQ ID NO: 25145

SEQ ID NO: 25150 - protein, 1046 aa, Burkholderia ubonensis; identical to SEQ ID NO: 25146

SEQ ID NO: 25151 - protein, 2084 aa, Burkholderia ubonensis
MKYFTNLIEQSLSRTREATLSVLGINDENLRRHLGTQMNSELGSDGCFLAPPVFEHTFGWQEAEETTLNDLRGKLLSASLLDTLQSADGPYRFAPNAHPYVHQLKAWETLLAPTPKSAVVTSGTGSGKTECFMVPILEDLVRERAKLGQPLVGVHALFLYPLNALINSQRERLHAWTKPFGSDIRFCLYNGKTAESASEVRKLQHERPNEVLSREELRRQPTPVLMTNATMLEYMLVRQVDAPIIELSRQHQSLRWIVLDEAHTYVGSQAAELALLLRRVVQAFGKHPEEIRFVATSATIADSNANERLQQYLASLAGVHPEQVVVVGGSRKVPDVGSMGTPDLRSYEAACSIDAEQEVSAARFSVLANHPVASALRHGIVSKGRPLDLNELVDIGDNRLQGKTLAERQREVLEWLDLMSGTRPAANEPPFIKLRIHLFQRMLHGLWACIDAWCSAKPTGLEAWPFGNVYVTQRSRCDCHAPVFELAFCDECKTPHLLAEDRGGQLLQRSPYASDEFSLSYESPAEDEPDIDLSSGPSRRQAAEKFVIAAADTQHEPYFPLQVDLSTLNVGALASPDTRELVVAPESLASCSRCEASFTGSHGPLRKAYLGAPFYVANAVPTVLEFCPDPTPEDCEGKSPEELPGRGRKLITFTDSRQGTARMAVRMQQEAERSRLRGLVFEILRNAQAKLDSKPKDIPTVGYEALIEQAKRLQSMGMNDMAAQMLRAAEETKSGVSTSGTSEMSWSDMVTELATSKDIALSIRDYNKYANPELFDGHDAAAPMARLLLAREYARRPKNQNSTETLGLIRVSYRGLDSIASAPALWLDRKAAPLPGETTSSNLTLQDWKDFLKVALDFHVRENTFIRLDPTMQRWMGARFTSKVLIPPKREADESATLKKWPQFRQGRAHRLVKLLELGCNLDRSHPEDQDIINHFLEQAWTALVGATILEQFEGGYTLNLNTLTFSLPSIAWVCPLTHRMFDTAFRALTPYVPDRFREGDYRCRKVQLPTFSLLSPAGDAEAAQSQVRRLVAENPQIQQLRSQNLWTDLCDRTAEGGFYYRTAEHSAQQSSTRLETYEDMFKRGKINVLNCSTTMEMGVDIGGISAVVMNNVPPHPANYLQRAGRAGRRNEARSISYTLCKADPHNQRAFREPKWPFITAIPAPGITLSSERIVQRHVNSALLGRFLRTMGNAGTDRTKLTLNWFFGGETSACTRFIDWMQSNPEGLDGSIADITRGTSLAARSLTSIIDNAVTTLLPIQSRWCSEHQKLVELLASAVDEPYKKALGFELKRHEDEYLLRDLAARAFLPGYGFPTDVVNLNTYNVEDFKERSRQREEKSREDNIFTSKEQPTRGLNIAIREYAPGAQIVIDGRVYRSAGIGLHWHSGGARHEAQKFDIAWRCGHCGAAGITENAYSNSDSIRCTRCDHPVHVTDRKLVLRPSGFVTDFYESTTNDISTQKFVRVAPPRIQLDGELLALPDSRCGYLHFGHNGSVFYHSSGEHENGYAVCLACGRAESMTHDGEIPPSLRPDKFHRPVGGATGSQRDKTCSGAAVKANIHLGYHTATDVLELVLRSPTTGEWLGDSQQEIIIATTLAVALRDAIADEIGVASTEMGFGTRLDRDTATGKVRSVVQLFDQVSGGAGFVLAALPQVINLLTRAANKLDCPRECENVCSACLASRDSRVEQEELDRRAAKQWLDDNEFLRHLELPGEFQSISGATYCSFSPERFIREGINRGATEIQLMLKGDPREWDLDHPSFRDRILTWKVKDSLEVYIVVPSVTLLSSENRRSLSFLGRLGVHICEYDTARNALGIPAIAQVCNGETTRTLFTNDVMAGLPGEDWLRTSDSSIWVSTSQVKPLDLTPLDLSGWYTDESGVTVLEVVTELNGPVSSLVSRLRELISEKVPALANLIEHDRATEVSYSDRYLKSPWSLLVAGGFLSLFKNSGLRHLEIATLRPQPTTQVSNSIKHDWGRSEDMMELVKAWLQTMVSFEPQVRMVEKSYDLQHSRVISVSWASGRKTKLILDQGVGYWQPKAAYRDQLYFDFSGSLEAQANSMVEQYKITNMTNGGTWPTFLSIVSD

SEQ ID NO: 25152 - protein, 247 aa, Burkholderia ubonensis
MATDLEHSGWQYLADLRQHYRHLPLSVFESWLALSRNPSALAIAVFRLEFDEVFCERIRDELAVIWECIPLPSWAIAYARFREWLMRQGVPEALLGSLLKNRQAMLPAVVSGFKEVGNYLETHDPTSLPKLPIEVILPGWYQQLRQTHEGNNRWPTDLGFPLKEWIRKQSLPKQITNLSMVEFTDAVTFLPIFMAYVTAGIAHIEELRESRSYVRFAIKMVSDFDRSSWYTPVHGMMVSYLLASAPV

SEQ ID NO: 25153 - protein, 2080 aa, Burkholderia ubonensis; identical to SEQ ID NO: 25145

SEQ ID NO: 25154 - protein, 1046 aa, Burkholderia ubonensis; identical to SEQ ID NO: 25146

SEQ ID NO: 25155 - protein, 2062 aa, Candidatus Contendobacter odensis Run_B_J11
MERSQFYSTLIEQLSRRATHAVLGLCGFRNDALREYLRDLFDRDAGMPGAFLADPVFEASFGWQLAERTLGGLEGKLLHPDLVRALREPQKKGLSEDYSFPARQRPYRHQLQAWQTLIEGSPPRSVLVTSGTGSGKTECFLIPILNDLATELEQRQNAPLIGVRALFLYPLNALIKSQKDRLVAWSEPFRGGLHFCLYNGDTPEQAKSDWLCEVADRRTLRKDPPPLLITNATMLEYLLVRNEDRPIIEQSQGQLRWIVIDEAHTYIGSQAAELTLLLRRVLHTFGCHPGEVRFIATSATLGDATEASRRHLAEFLADVAGVSVDRVRVIEGQRQTPALPETLQKLNQPFPNLATLRAASPVERFTALASNQPLRAVREQLVKEASRLSQLACILLDNDEAPARREALQWLDLCTTAINAQDEPFLPLRGHFFQRTVSGLWVCANSACSGRANTALDHADWPFGAIFLERREHCSHCDYPVFDLVQCGECKAEYLSAVEVHEKGQEWLRPQEYDQDEDEFQQELEPLANDEEENEAKESNTISTKQPRLLTSFAQANVWNWRLAQDHSLDLSGQKGILIQLRIPGENGLECPVCREKNGERKLFNPVRVGAPFLLGVAIPTLLEAMPPLADKLEALPLDGRRLITFTDSRQGTARIAVKLQQESERDYVRSLLYHSLIASVQPADPNQVQKIQVEIKALEPLVRANPGLRSILGQKRQELAKLEAQPLGRLTWEEAENKLFNTDDFKRWLLPTLKELTFDLPERQLVKLCLLREFFVRPKRQFSLEGLGLVQLHYPGLDKAEPPAVMQQRGIKPEEWRALLQMTIDYFMRSGKPMIQATPDVTRWLSYPGWPSVLIPPGKFITDRKTQRSWPSTYSRRAKDNRLIRLLSHVFHLDIEIKEQGSQIDEMLIAIWDGIRPLLSQTESGFQLELEKQAVFTEVREAWFCLMTRRLLPVTFREITPYLPVLPAPAALIQCQRVVMPRVPYPFWFGRDPEEADAWLESDPQVQTLRALGAWPDLSDRLARHRRYFRAVEHSAQISGPELTRCETAFKAGQINLLSCSTTMEMGVDIGGLTAVAMNNVPPHPANFLQRAGRAGRRGETAALSFTLCKATPQGEAVFQNPLWPFISRLGLPRVALHSEPIIQRHLNALSLAAFLRDRAPDIRRLHTGWFFETADEQTSAPCYRFIAWCEEVESTASLSDGLTALTHRTVLAGQSSAYLLGRTAEMMRRATERWLRELNALLDQKKMVQSNEDDRKAQQAVEIQLKRLRGEYLLGELANLGFLPGYGFPSDVVQLVTTTLESLKLSSNEREDNRSRRAGYPSRNLAIAIRDYAPGTDTVLGGRVYRSGGVTLNWQLPAELEAAPEIQNLRWVWRCKSCGSNGTRLTMPERCPHCGERDGNKLTRYRYIQPAGFAVDIRDKPHNNITVPQYIPVRDPLIALEDADWMPLPNPALGRYRMTMQGSLFHHSAGLNNQGYALCLRCGLADSENEQEGVLPTIFKNHKRLRGGRLNDREKICPGNEESSWAILRGVRLGIATHTEVFELQLHDLDGKPVEQIAAYTVAVALRRALCLHLGIEEAEVGALAASSRSVDKKQKISSIYLYDTAMGGAGYSTQIVAHLSALLRQARQILECPRDCDMACQSCLLTHDTQHHLDDLNRHTAIALLSEPFLTALDLPEELRVFGPHSQLEMEPLPLALNREWQQQTVQELRIYLGGKARDWEPLAWRLRDDLTRWRQTDAIIQLITPATTLSKLNSSQRDELAALIAYTGAELYRSLDLIQVGDLPLMVELGSANQQIRWAASHADALIPRPHWDGGESGGPLVRVIDNQPLSPLPETWRHLDSAEIRQPVPGVIALTITRELDGPSADFGGRAWTLLEQRVPALAEYLNENAPLQAVHYTDRYLRSPLAIVLLYELLNGLACYSGGLQQTTDIQIETTNLDRTDTKPSRWLFHDWRDGEDRRQVVETWFAETWPTFAWREAPLHKRPHARELTLTWSNDHRWTIRLDQGFGYWGIAPGVRPEFPFDNDVARQVEKLRKSCFLLEPLNANYPTYWHCNRN

SEQ ID NO: 25156 - protein, 655 aa, Candidatus Contendobacter odensis Run_B_J11
MIPQNLQQRLLYRGMPRIQALDPEGRRLPTAGRLQWRFLGDAAPWREIYEGAHGRIWLRLIAANGVERWRRQVDVAPSTFRIEADIGTGNQAGVVRLSELAGATVQPGVDCPASVTMSSTSDQARIVCLSVSGIAPLLTLLLHWPGSQPIPLTLPYPQRGAFFQLAGRPLLNDDWIPLDRLGGLQLFIQDPAGGCRFWLESTLIADSNADVPVSRQGFRDRLPPLAQSQLEISLFNWQERIASLLASSGHLEAQVQLLIKTTQGERLTQIRVARFDALIEPDREAGIVRIAADSLKRLGRDWETRIRLEMIRLWEPGTTPVTLAGPDETGNWAIPPDLEPGPWWIVGRDGDWARFRPLLWTVAVSENAVESVDSRLVTAIWEANREQRDQQLNRLLTELGQDPDHTDWTLLFDYVRLAREFPPSALDVLRLLIQHPRILALTLFNVDEETFESVWALSKQMPFLWMLVSVADWHNAAVAYFGGLQITLAEVDTSGEIVFSLFQGFRERASSTRRDYWRSLCDWLQERLFPNRPLNGSSELKMARRHPIFIEQQIESAEQELMERHDAEEQWPEGNQVINRLSLIAEKYRYQHLDQFYRPVRYAPFVAARISLNGIDPPESLIYELRLLRAFDSEWFDSVYAIALTLGLATLAMEI

SEQ ID NO: 25157 - protein, 2057 aa, Candidatus Magnetomorum sp. HK-1
MTDFYSSITSKLTLGASRAALGLRSFRSDALREHLRTVWEGAPGSKNAFLSDLIFESTFNWCLSRKTFKSLSGKLLHPDLVNAMIYPLKSHKDEYAFPANRQPYKHQLKSWKQLIQKQPARSVLVSSGTGSGKTECFLVPILNDLAHESQKSSGRLIGTRALFLYPLNALIKSQRDRLLAWSEPFEGRIRFCLFNGDTPNEAKKSDLKSEIRDRKTLRASPPPILVTNSTMLEYMLVRNEDRPIIEKSQGKLRWIVIDEAHTYIGSQAADLTLLIRRVLHAFACNIEQVHFVATSATIANTNEKNTNTLREFLADIAGVNPNRISVITGYRETPDLKMLKKNKLISELPEVNDLKTLSPELLYDKFCTYKPLRKIRKILMKKPTPLTEITNYLVSKKQKNRTQQTLQWLDLCSQAINGKNEPFLPLRGHIFQRAISGIWACANDKCSGLSGTHLCDGDWSFGKIFLERRLYCDSCKSPVFEVVQCNVCGSSYLIALEEFKKHSFLKQYQYNQDEDEFQQELEPPDEGEQEDIELSDQFQEFRRLLVQKDSEHGSTAYLLNNRQIDSKEGISICLIVPDGNDRLRCPCCESRELNNYLFSPIRIGAPFLLQTAIPIILNKMPAFRKKNDHLPHKGRRILSFTDSRQGTARFSTKLQLETERNFVRSILYHSVHDRIKSANQNDIEKIEKEIKALKQIKNPSSTFQNMIKEKQEQLKEMNSPALGRLSWDDAINRLLTNNGFRDWLLPPLKEQTFGFKDRHLAELCLWREFMRRPKRQFSLEVFGLLRLGYSEIDRIRELPSVAKQYNITIEDWRNLAHIFMDFKIRTEMSVAIPRDMKRWIGYPGSPGYIIAPDQDKTNYLQKYWPSTKTRITRKSRIVRLIAIALNFDLEDPSDRSVIEELLIELWRVIHPILSRTEYGYHLELNQQVDFVQVREAWICPITRRLLPMTFKGITPYLPPNKTAPSLSECVKVKMPSTNNPFWLDKNTISSQEWLETDPDINNLRKSGVWTDLSDRIAAFSKYFVSTEHSAQISGPTLTQREKLFKEGRINLLSCSTTMEMGVDIGGLSTITMNNVPPHPANFLQRAGRAGRRGETKALSYTLCKSTPHGESVFQNPLWPFTTQLSIPQVSLQSQPIVQRHIQSLVFSYFLNQQSPDDILKLSCGWFFGADLEDQSSPCNHFTHFCQNDAINNQLLHAGINHVTQRTILAGVSIQNLLHRTREMIKNIIEQWENDYKSLRNNLDLVKTAKGNSKAEQAINFQIKRMTNEYLLKELANQNFIPAYGFASGLACLITTTIEQIKLKKEKQKKSREDNKAMRAGYPSRPLAIAIRDYAPGTDTVLDGRVYRSSGITLNWQLPAELEGPPEIQSLRWVWQCKTCGGNATRNTYPSACPQCGENNSDKLRRYEYIQPSGFAVDIRCEPHNDISIPQYLPVRDPLVSLEGSDWLSLPTSVLGRYRFSNNGSLFYRTDGNHGEGFALCLRCGRADAMLPGGDPPVIFTEPHKRLRGGKDNDLERECPGSHEEWAIKYNIRMGVNIITDVLELQLNQLNGQPLDRELAYSTGVSLRLALARKLGVDDQEISSVVNPSIDAHGHKAWSIYLFDTTQGGAGFVKYALQELPTIFSHAQKIVRCPKKCDTACHACLMDFNTQYHLDLLNSSRTLELLNNTYLNAFELPSHLKVLGANAKLEMEPLSMAIYRELQRMNIKEIRIYLDGNTQHWELLDWWMYQELLSIAKTDCKMVIIVPQNILKHLERSQKDELFVIAISTHANLYAISPEGTKKSKAPKNAKIIEIGDNTVSVCWYATTQESLIPGNQWGSGIKNTQYVRVKSNKELTPVPKGGSYIQTEELKQSEKHFTETIITSELNGSIKTFGKKAWQLIMSNVPKLEKQLKDHMALEKIVYTDRYLRSPMVLMLLKMLLNELQSFKGGLHNTTSIEIHTTELDNRNIRSPYLISHDWLYPDDRKKVFESILTFHNKPLFIEKHRNAIPHARELCLSWTDKVQFIIRFDQGMGYWKAEREPFPFDYSVEEQVEKLKKANFNILGISEAYPSHLYIK

SEQ ID NO: 25158 - protein, 1131 aa, Candidatus Magnetomorum sp. HK-1
MDLSHFLFVHSRKTRPDGRPLYAYKCTDKFYIKIKAFMLNQFQVTVKKKQPPLFSILFCLYAAETWRRKHESGTWKWETIFKEISATTPSHASIHEWVKNGLHYWERDILSDKNGKNLYLVTIACEGGLPLLLLRKENAKLNRFFKNLLEKYHYKRQLPDCNINKIAQKLSFSLLPQSLCNDIVCKLSSDLVQKVVNLQEKVRDSDKPIAALDSDYPHWRDALPLSLEDKTIELLLNDLVIDAKKLSTSIPKNLQWQLFLVQKKNRWCVEKRLHLSTTISGSVLKQWIQKKDLPYRMRVLLETSEGIEPLALMTHMYSENKDRLFRCELLNPYHKNITALLSIIVSGNKILENLRLILTDGTFESELQSAGQDLGDLPWIFHEHNDQLKFIGEGSINASSELLTILSPSGGKWSTNDNVIDFITHIDDMDRDMYQVMGTCEWNHPEHGKCLICSSSQSTSNDILMIQGKKIRSTIDRDPPFLGMPDLYKIDQHNVIQKENNLQMEWAPSGTGNLKWNSDPTHCSGPLWVRYINSSGYQVLRRKIRVVPNTTQVNIVQTGVNEHPGVIEIKGLSNIEINCADTRCTYQRQSDHHYEIHCLAKDNQLKTDFTVRLEWPDFRYIDLQLPFPCAGAAFLCGEKHILSNERIAISRLSAIIAVAQAASVNQKFFIHITIKTREKLFSTKVRKTQYRYYQDFEFQEPFCLEKDGRHIFYLHRIQERIKSLLSLTGDIDSTADIKIKNNANQMLAEIEVGTFDLWFERKLDEKMVTIHKDCSNVLKNYIKESIFINMLPLWDPEISSIELIRTSDETWKIPDDLMPGPYWIVGDINKVARFRPILWTIPGQVEKSKTQIEEAIRSENATIRKSLQNQWVKSIATDPNHPEWTLFFKFLQMVGPYPASALDFFSCMIESPEAMVMALLKSNDDDFEAVWLLSYQLPFSWYLVPAKAWLSSVRLYIQSIQEELSSIDLDPDGELLFSFFESFQNRLIIRRPFFKQICDWLCMNIFPEKQLQGSELQIASIQPEFIENNIKDHELKFQGRYGADEHYPTGPEVLKWTDSLDFPDQHKYLKLSHHMRAIRCAPFVAAYICLKGEMYSQQLLFEIKKIRHFDKEWFSQAYAGALCLGLSKKTT

SEQ ID NO: 25159 - protein, 1978 aa, Cellulophaga baltica NN016038
MSLTETKPMNFKDFYSKTENRLTDAILSLWATGDKEMQDYFRYLLSQEPIMADAVFQNTFPWEQGKIEFGESAGIFDQKFINALDAIKDKDFRFPKDRKPYRHQLQSWKTLLEQKKSIAVTTGTGSGKTECFMLPVIHDIHENCKNKDGVNAIFLYPLNALIASQRKRMHAWCSALDGVKYALLTGDTPNIESGKEKKEKALPELISREQIRATPPQILFTNPTMLEYMLVRNADVPIIEKSKGALRWILLDEAHTLTGSKAAEIALLIRRVVSAFEVNIEDIRFAITSATVGSGNTDSLKKFMSDLCGISKDQIEVITGERVNNQILDQDIPSLSPMLSKNNIKLLRQKFLNSKAISQSEIGKDFKVSNKLEQLAIIDTLSEQKINNENLLPVRGHFFTRGIGGVYVCTNKKCDKHKGEKPNKAMGTMYTIAGKKCSCGHPLLELIACRSCGNMMMEGERVKGATPKLDRIRQKASLGYEAFSVENETDNEDEEKRNDERRDNALIRLINRDQINQDIDLTPCSINNDDTIDYGSEDFFMTDDTHCPHCGNQNEYPIHFRISSAFTNRILSDIVLDQTEVAERQTTKTLYKGRKYISFTDSRQGTAKISALINIDSESDWIRYQVYHFLLKKLKQNEVNASTDELIQARAMYVSQLDTAPPFMKIKIEQDIAKINGLLGSGNSSNLLASRSSWREIVDFIKEKEDFKTLFKKGARGNNLAIKNEAYAKSLLYDQFARRIPRERSLENLGLINIVYPSLDNLQAPDIAVKMGIDNMEWVDLLKIATDYIIRYNFNFFLDDSMREFTSKFYRSESIYPSNNEIVNAKKWRLYNSQSIAQSRLVLLICAGLEWHDRAEINEEREDLLNELLEKIWRTLQQKVLNEDGAGFKLDFFESTNFEIAGKEFLCPVTNRLIDKVFRGYSPLIKGNLESNNIDNYKIDESKNYEFPVFSKPFHKNAENVTISNDEVSSWLKENSIGAREKGLWNDLHERIFDHSKLYLAGEHSAQQDKRRLKELEEQFENGEINVLSCSTTMEMGVDIGGISAVVMSNVPPMPANYLQRTGRAGRRSENKSLALTFCAPNPIGLRTMNNPKWALEHKIASPILAFDSKNIVERHVNSLLFGFFVRSQQNTNRGLNVKENIEKFYYEDTPSIAESFLNWLDGDEVLQYQNELSYIVKDTQLSEASSEELISTVKDNFNRTIIKIRSQKEGFEKKLSELKKEFGDSSPAYKAIGYRKGQFLQKFVLNYLAEENFLPNAGLPTGIVDFEKITLSDLQKSKGKFKSNPSYTISRALTEFAPGNNILIDGLNYKSSGIVMKNNWGQATERNVIQGCRSCGYQRTVDLGEKVGDNCPECNEVNSFNGLDLGEDRKSYTELVEPAGFSIDLFSIPTRVISEKSKPQYLEPLLLNIKPWAKDQNQFIDFRTSSSETETQVLFYNTGEGEGYSLCLDCGRVEMSTERLEGHRRLRGGKDSKGESLCSAQNVREHIILGSRFNTDFTEIRLKNRNQSFVNDKMLAYSLGVIFSKSLAEYLAVEESELGFGIKQYKGYQTIFIYDTAKGGAGYASQFRLYAEKILNLALQVLDNCDCQNACTKCMIDRSTQWHIEDLDRHMAIDWLRAALENQLPKDLNTPNNDVSLVFVSMHDELKRLNYHYGIKSINIHINNTISEWDIESLKWLEELKRERIVVNLIVEGEISYSNNQEKISAHLLSYNFNLKQGTSNKLKNYAIHASVILQNNKCVGYISNEGYDSLSPEWSVDFKEKIYKVENFISLDHAGYVVPNFSTSNLYESRIKGNLPRNSQSNDVALLMSENLSNFKELLSKVSGKKYQVSYFDKYNQSEFSLRLILQFINQIREIWSIEVSQFNVHLSKADFKSFNYPEYIIHNYKELDDYVYDLKELSANFDFAIDFKEERRLPHYRYFEFKSEETSFSIRIDAGIAHGLKPIDRLTSNDMKMDNQVFEIRKDVSHDIIYNISID

SEQ ID NO: 25160 - protein, 1006 aa, Cellulophaga baltica NN016038
MSFFQTLTISKNSDQDKKQALWKYEISDEDLDRLISTLQYGQIYNIDPKDVCLYYAVWWKRKYNGGIPSKQEIFESIGGNLKYNLTKEEFFKLAKVGARQLGVQWIKKQNTLYFKTLLLQGGLPLKHIAENKGVYKVFLEAVLEEQPESIEDFIFKNHIIDLLPKSSQNDTIYENCFEIVRSILNEDGAYDSLFESEESLKEISTALKIKRNSLVKKKRQSKPKNYWLLNFKNDTPKITLRLGFADTYTIEALSDILRFEPTERNYQFFMDDNLVCVFRKMASGKYKTDWYSSQNEERDILEGIPSTYVVGDDLKTELPEFIQTIPNLNEPSLWSRFNDNEWRSVKGYTVSNNDAALLFPNNWQCFLPATNISIYDKTLSWVSFEGEIEIQSENEQNTYISGVDSFDWVIESKRPSWMLKSNLAVTQGVPKILLYDDSGYDINNTRFATFIKRHNSKEEWESLGRIKNISKGCYDLKIEKDGVIAHDTFFNIGNLKVRFLEQTIDSAIVDFSNNDFYELKLSETDLMQIEQTENQYSLKVNKEKLKIPSFIKGSFGLSNKKKLFFDIRSPFQGMAITDSEGGIIDEIQPLSLANLYGLRILSTPKRETLLKLKNSLKPDVKITKEIKESTQPLIAYKDEIVRLLYLADAMNHENTVTLELLEGSYRRTYRISGFSHTLDVSNQLEHRVDVFNSNDILELYAVALNCNSENIAPISLTKIESGYEIPTSIESSELIVFSSKIDGKQLMPRFVRTTEFYSGIDKAERIEKYHTNLSASGFSDEIWKQVLSYFKICIDFDIPFSTFDQLRAISRSSNVASRAFLYLGNNHHDRNEYIQKVIPEMEKDLGFCFHWISKIDWGNAIEEVNELTGNSYYKDILELLSSYLSLNGQTKLFKFISGAKIETNSITQRDILDLRQQLGERVLKELPYHSPKINSTYSVQIEQHKVVKVLLRSPIAVAESINNIENNYPIWGGDEFRDVIRRNIQYSQYLKPDFYNSIILHVLNRN

SEQ ID NO: 25161 - protein, 1820 aa, Chondromyces apiculatus DSM 436
MRSNEFFSALTHELAQRAARATASQIGPASRGLRDYLHTSLESAPGNKSSFLAPPVFEALFDWERSPMTLEQVPFLDRRLVDAMDQPPPQLARYRFARDQQPFVHQHRAWQLLRRAEGRSVVVRTGTASGKTECFLVPILDDLAHEVAASDSREPLEGVRALFLYPLNALINSQRQRLRAWTHGFEGRIRFCLYNGATPRRERGDTQARSPTEVICREKLWLNPPPILVTNATMLEFMMVRKDDKPIVEKSRGKLRWIVLDEAHTYLGSGAAEIALLLRRVMHDFRVDPRQVRFVATSATIARPGAEELLRLYLADLAGVDPSRVEVIGGHRSVTPLPERFEAVSAPLPDLAELKALDDATLFERLASVPAIRDLRLHLSENPKPLPVVSEWVFGRECEAALSEERQRTTLQLLDLCSRACSAENHLPTLLPLRGHFFMRTQQGLWACCDNRCDKRAGTALAESDWPFGKVYFERREECDCGARAYPLVICQGCGTAYLAVRDHHGTLVQPLPSNGDFDAAEGVDDDEESESEVANPLTYIAGSTQNDHTSAPISLSMDTGILEGGGERRRRIVLLRQEKGSHRCARCGDRENLQNEIFRPVRLGGPFYLGVAVPAILERLAPKNDRTTRLPADGRRLITFNDSRQGTARFAARAQLEAERMYIRAKVYHQLWSKVGKADPVREAELIGQIAKLKAIEDPDFKAMLSEKQDALDRLRTTARSGAVPWKEMREWLEGDTVVGEWMRTSLKNRYAPAELSTQDMARLCLFREFVRRPKRQNSLETLGMVAVQYPDLAKETRVPAPWSNLAGNDLASWIGFLKIVVDFFVRSHTAIDLPRSFFRWMGANISPTRITSPGDRTEKNRKYAWPTIVKGKRLPRLARLLFLAFRLDEKDPRARSDVDGVLREAWDVLRTRLLTDTGEGLVLELEDKAQLALITEGWICPVTRRVLDTTLQAFSPYQTERWLDSQQRCEPIQMPQISFPFGERGQGVSPEDVARWLDHDEQVKQARAKGVWTEFSDRIASFGHALYFQVAEHSAQQSKSRLEYFERSFEQGEVNVLSCSTTMEMGIDIGALTAVGMNNAPPGPANYLQRAGRAGRRDEPRALAFTLCQGSPHGEAVFADTSWPFVTPVHVPVVSLERKRIVERHANAIALGYFLREVYRGDGASLLCEAFFLRDGEERSGSPANAFCLWLQDHASSDEILMRGVRHLIARTALDGVSGKELFDAAREKIETVARNWHAEDEALALLLAEAGFKPKGKDEKPSSPIQRALWIQRRRLREEYVLKTLASEGFLPSYGFPLHVVPFIHTTKEMLDYEKEHRERDEGYGLQRGYPARHLALAIREYAPGSGIVLNGMIYESKGLTLNWKIPASDAQVREIQSLRWAWRCDNCGQYGTTATKPSSCKGCNSDRLAKKHYIRPAGFAVDIREKPHNDLSQQRFVPAREPWIWAGNEPWVRFEDFPVGRWRYMQDGIVFHWNDGVGHHGYAICLRCGRAASERGLGGRTSIPHELQEHSRLRGGKEDPKSARCPGSDGGFAIQRNVDLGGEEHTDIFELQLTRPDTGADVSDATECTSIAIALRQALAEMLGIEPREIGWAVPVSSTAQQTAGRSIVLFDATAGGAGHVAVARDQLPSLLWRARAIVACPRRCDRACHGCLLSFNTQTVINRLNRKAAQSVIDALLLAASRDADRADTGASSAFLQVTAGFLGQDGIAPVRLTSGVPAQFEVMIDRERSSNIELLRSTPLDVMVFCPGAQVTPARNRFELPQHLGHMATWTITPQCEGRLALDVLLLIRGEPIHRKTFTFIAAESSSQEQEPRS

SEQ ID NO: 25162 - protein, 1135 aa, Chondromyces apiculatus DSM 436
MKEGGGGKKEQSDALVSDLRTLVRQILANHGLVAPDQRPLYAYRVDEATLHALQTALTSRLSARHRLDDDESAAALSLFAATYFCRTYQGGAWSWRDVLAALDHQGSYTVLYEPVERGLAYWRRSLLVAAHHRGFLLTLACEGGLPLKVLQAPERESHIKRYFRELVRVSEAYNRPAADIVARHADVLPVSLHNDLVLELSANLVDAVVKLRKCVRGQADPIHTLDTCLPEWRKSVPLHLDDDVAREFLDGLLRAPREPTTAEEPGLLVDTLLRTEGSLRVERRLGGPPDLAAAKLAEQLQISEEDLPARLYLHLVTADGERRLCAIATASVAGEGRYDLQLLASRPIDHTAVVQGGVLLVAAVGGRDIACIQLPGGEALDNVPWIFEGHEQHPTHVLVGVGAYRTRAESIIAVVATTEVLAPEPGARVEDWGEIAGLDRVVKRVEGSVQCKGAEESFVIATRQPSAYAVRFILRGKPWWSASTSAEAWLGPPQIKEVGADGTERWVPPDAIEWRPRRSGAPWQRLDATALGAGKIRVIRGGEQVFRTSCTILPPDFDLRIHPKDGGGGHIRVESRALADVGVIGPGGDVARKEHAEAGVNVTLQAPATPPAFVDVWLRFRGGGEARFNVPYPARVVVFSGRGGVALRNGDRVSLDGLSLVRARAVSPVRQERFALEARLEGSTWIPIQPLHVVGNGCFELPLDVVRDTLRAVLASCDELDHTVSLRIVGTQATAPCMLRVGWYEASLEKRDSPDGSSTLFLADDARRVLGDDVVERLRLVTRPLLEPEAPDLELPSENGRWSFVPQGKVVGPWLLLGLQGDTLRLRPLRITVKGEEAPESTSLLERAARIKQMQARQRAFSEVVETLAGDFGHPDWPRMQSFLRTLGVWPASTLDAVRALASHPGASAVALLKASSNDFDRLWDGLEQLSLLWSLIPICAWLRAARQLLRWVTSKPQFREALDWSTSRAVSELLANFAACGPQRARFLAVVTELIHLTLLGMPPQPGGSTLGHSDALHARLSSSERPALLRRHTHDTWPAWEVRQAAVIYRVPNSLLEPELLLPEFPCRDGIINAPALAAAISMHGITTDDTLRFHMRRLRAFDETWFDVAHATALTRMIARKLKEDPGYFNAL

SEQ ID NO: 25163 - protein, 1956 aa, Chryseobacterium sp. Leaf201
MSKLIFNKIYTEIQDRLLDSILSLWATGDAQFQNYLEELLNKEKLLAEPVFQNTFPWTPASQTFGDLTHLFDSNLIKNLDKIKGEYEFPKNRNPYVHQVTSWEKLLSDKKSIAVTTGTGSGKTECFMLPVLQDLYQNCENESGVRAIFLYPLNALIGSQKKRIDTWVKAIGGLTYAVYNGNTDENATAAHAKNALPELISRKQIRDTPPQILFTNPSMLEYLLVRDKDVSLLTNSKGKLRWILLDEAHTLVGSAATEMALLIRRVVDAFEVDVKDLRFAITSATVGSGEESDRKLKDFMANLCGIDSSQIEVITGNRELTPLQDDFEIENKQGIEQLRTRTYTSAAIKLSDMTDGFVVNNSSTEDKLDWLDHIVEKKDHLDNSILPLRMHLFSRGIGGVYVCSNPECDKHNNFKNISHMGNLTTYTEKTCSHCNFPMFELVACRSCGNELLKAEKEINKQGIQTLQLSTSLNQDNFVLDDIDNDEDSEEKLPTLSFFFTRKNPNKRFVLGTNEFGIEDTGKIDRNRNEFIEADNNNGECVCPHCATSLENPLHFRISSSYMNRNLSDIFLENTPEAGEIRQETLWNGHKYISFTDSRQGTAKISALINIDNESNWIRSQVFHKLSLENINNATPDPYRSVLEAQIHNATNPVFKREFERQLAELPIPITNSIRLSWKQVYDFVNPKTDLKTIFRNNNPREEDIVNIEKYSRALLFDNFSRRLPRERSLENLGLVSLVYPDLDNVQLPSIAERCNISLAEWKSLLKIGLDYIIRYKFNFFVDPVIYPYSTSFLRSSLIHNPNSNVVGAIEWPTFEKNNLRPNRLALLLCVGLGFSERDEITNEVEDNINELLKNIWQNIKPLLTQDGNQSYKLNLEEKTRFQLANGLWLCPVKKRLIDAHFKGVSPWINGTFTDENVRHYRIENIQSIIFPELKLKMGDNDVMQTVKEWIAENSVDWKQQGIWNNIHEKVILNRPIYLSGEHSAQQNEKRLKQLETKFENSEINILNCSTTMEMGVDIGGISTVVMNNVPPGPANYLQRAGRAGRRKESKSLAFTVCAPNPVGLNAFNTPTWALTHKIAPPFISFNSQQVIERHINAFFLGKFVQTEQVGGMRVTDKISDFFFAEINPIASRFISWLLNDEISSLDGRLKSITKNTSFSDRNFNFIINKVFSNFNRILHFTQAKKQGFERKMAEFENEFGQNSPAYKAVNIQYIQFIEKNALSFLAQEGFLPTAGLPTGIVEFETTNIDNLNRKQKKENPSYFITRALTEFAPGNNVVIDGMNYKSSGIILDNNRGSQASKEIIQLCNSCGYQRIVEIADNQTIDSSCPHCNNQSFRGLIFDDEGNRGSFTEMIQPAGFAVDVYQMPNRKISETSRTQYVDPLLINVKPWEQNTTNIIDIRESEDNGEILYYNVGNGNGFHVCLNCGKTGFSIEELEDHRRLRGGKDDQNGAICQGNFTPSSIRPNVILGGRFKTNFCEIRIKENDRYSTDETLLYSLASVFAKELASYLAVEAAEIDFGIKKYDHYNTIFIFDTTKGGAGYSTKFFLYADEILKAAKDKLECNCTGACTKCLIDRKTQWHINLLDRNKALDWLQNIAKLSIPEEIEYSYPNPKRILDGIRADIVKVSYTNQIDEIWLKVDHEISNWDLENIIFLENLKNKSEINLVFETKPIVSNPQNVMTLIQVSSWAKVCVQKDNNNEDIKAVALIKLSDVDYHSYLVSGQVNLSLNQYWGDTDNGELYRINQLLKIDCDPLNVMDYLNSNQIFEVYLNPTENISSKNLASILITGLANKFDLQSIMNGQKFNVSYYDRYLKTPFGCFLMLQFIDQLKTELNFELQDFIFYGQDFNNDRNASRVFHDFRNQKSRKSFIEFYKYDLDLENMEILSDEIPHYRYFEFSNDQYRIIIRPDAGIEHGWRLVEDNIRIEDLNSLDQSLDILKMKNHPILYTISFNTINT

SEQ ID NO: 25164 - protein, 995 aa, Chryseobacterium sp. Leaf201
MSEFIKILQARTLSFHTGQPLWKYNISDFEFEQLKVRFQNVERASQLDPRTCALYYAEWWKRKYIGGYPSKLEIYESIGGKQLCFDDEEFFKLAKQGGNYLNFKWIRIQNTLYLKTLLLQGGLPVNHIKNNKGKYRDFLVKIIHLNPNTIEDFSSDYEVISLLPKSSQNDIIYSSCLEIVRAVLDNDESMLSSFQHNKDLVDIANDLITERDKVVRKGNSLRFRWFYDRNKKTFFLNTSLNLKLNKTDLQYLLNDNVNDSISEYRLFVDSSLIAKLVKRNADTFKVIQVTNTIKFDGKLDPEIYFIDTLDKTYTANHLLYHKLNLEIPSLWNSSGDAIYHLDKSRHTRNNSAFVLCESSYFWQGDVDVEEKLIINDDDYYFVKFKHQLHVKKDNENGFKFKTNAQNMFEWTILSDRPKWILKSNLEIVRNQLRLFVCDKNGERISNPIIQWKPTHRSEWNSINSPLSKGVLDIKISLNEIEEFDRVFNIADLDLNVISKHHHFVFRNSEPFTTEIYPSALYDFEIENFVIRFNIIEHSSFPTSVKTRFSIQRQSAGLIAEIASPFQGLCIVDQNNQKVDDKVLYLDNIRGWRLVSNLHEKEFEISFKNHKNDQIIINKAIDRKIIPLIEFHDTLKSLFQLYNVIDEENYIEIMISEILTNSKTKKIKSYQIKQFSKTVVWKVNEHNKIQFIDDDINFADSVFALPLECELEEIDKIELSKEQDSFSLQKSNIEKFILFSVKNSFPKIKPVFISVNPENKFTTDDDRNARMLDFASQLLEQDFPGIIWNKLWIYYILCKENDLPFATFDIIKSITTSSELAAKAFVFLSEKFDNGQFAFSGNDFAELENDLGFSFHWVKLEHWHNHLHMSEAIATMLGHHFPELKVCLLQNRSKRDFVFLAELNKARERLGNRVLSQLPKYNLLTDRNSYIKPIPHQHWNDEVNILVIAPLAVASSIKKDNAGLWHTNGDSYRRMIKYVENIDKKWYEDSLIFYLN

SEQ ID NO: 25165 - protein, 2108 aa, Citrobacter freundii
MNVQQLHYAPLLNQLHQRAVRSVVSQLALRSKSLSQYLESQYFQPPGLGGSLLADPVFESTFGWMPADETMEDLRDKLISSPLVDALSNAPVPFRHQLTAWRTILEDKQSLLVSSGTGSGKTECFMVPVLEDLIRQQNLTRQSLTGTQAIFLYPLNALINSQQERLREWTRGFKGKIRFALYNGETRHTKYEVQEDQLKVPEQALSREAIYEAPPSIMVTNTTMLEYMLIRRKDAPVIEKSQGMLKYIVLDEAHSYIGSQAAELALLLRRVMQAFNVGPGTDKPVQIIATSATIGEDSPEGNKELAKFVADLAGVTERDVKVVRGYRQIPPISESLIRHEYPTSLASLNSLSSQELYQQLCHYRVAQQLRQALTRPGRLAVRLSELLNVARRTWPDINHRELLQLLDLMAKSREGESKFSLAFTPLRMHGFIRTLAGLWACSNKQCAHKASELGESDWPFGQVWFEQRQYCDCGAPVFEILRCSGCGSAYLSAKEEVRGDGTSWLVAQPAAAEEDEFALDLDVYSEDEDNNELENNSQFDRLIASDGEKYIISLEEATAGKIDREAQKHYEINLLRPESRGEGRNNSFACVCCGDTQRKNNPLFRPLRLGAPFFLNEIIPTLLEFSPLPQTREEQLGPFNGRRLLTFTDSRQGTARISARLQQDADKATLRTLCYQELANINEPSVKLSPAHCALLESFITQFSIPPLKNSIDALRKAMVSNEKLSPADVQALRIIEPMVSSLSQEHAEAMQILLVNSGNQQKKTMSWQTLSEQLVGSVDLADRMRGSFKDLSGLELTKQQFADFCLYSEFGRRPKNAWTLESLGLVAIHYPFIDKVTTCPQDWKTLLPDPDKQLPEWRNLLKITLDFFIRENSAVFYENEEYPRWMGARFPVKMLQGPDKKYKGQKRDQLWPQIRDRHYNRVIKLLIAVFPAIQPEQAHWKALVNYLMNEVWEAIRPCLRQFESGYQLDIKQQAEFYSPKQVWRCPYTRRALDVTLLGYSPYLPGSKEIAPEKAVLIEMPELPARHWRLSGGGEMAREERLHWLECNERIQHAREEGVWSTRSDRLALKDSWYRLEEHSAQRTPEKNQFNEKQFKAGKVNVLNCSTTMEMGVDIGGMSLVAMNNVPPAPANYLQRAGRAGRRGESASAAITLCKNTAHGMEVFKDPLWAFNTVASAPRVRFGSSSIVQRHVNALVLGAFLRAEVPDATKLSCKWFFEGDESQCLRFLHWLNHQADQLADKLKRLTQGTVLMSLTPPQLLTRTQTMMQLVDTRWRSQLAILLENIEALKADNSAWEETPAGKAITYQLRDYRGAYLFSKLISEAFLPGHGFPVGVVNFNYLTADELERRRAIKATQADPNEGGENFSRRIEKLPSRDLPTALREYAPGADVVLGGKVYRSSGIMLGKVLASGQELSGDHHIPWFWHCRKCGAGATSATRPVECCHCKADIQQLDVKRYLQPVGFATDIRYQAHNDVSMPAQLPWKDPRVLVPSSVWVSLPDAGLGRYRFSHSGELFHFSEGEFGHGYAICLSCGRAESQTQPQRTPENLKNPEKENTHYLLRGGSNDRQGNNKLCHGHVHKDLWLGYSSRTDMVELQLSDDSGLLIRDDVAARSLAVALREGLAHKLGIENTELGVTTQQARDIDGFTGYSIFIYDNNAGGAGYAVQLIDNWSDVFNYARKLLDCSCDKFCHHCLLSYDSQHYVGKLDRHQALTLLTNLRLQRLNLAPEYQYFGESSRVETNPLSLRIAQCLNSEVYDSCSLVLAGSQEQWSFAQWPLFKELLQFASSGGNVELLIATQLENLADSTRHQLSALAAIPGECLQVKSIDTAQLVQGNGHLLAQVTREGQTQQWAAADSATVSPGELWGQSSASPVVTIKGASRKTFSGQTLSAEDLLPALPAGAVRINLSQQLDGQVEGFGSRFWALIAQQHAGWKKVFTNGREITHVHYSDRYLNSPFTVRLLGEILTELVEQGLAERAELTVSVKKLEYSSRQHDSLYNAWLDEQDRQQVMTTLLEEGYLGPAWSGKISWLAGDNQNTDHGRELTVTFSDGSEHYVLLDMGLSYWRCTGDTFFDFSGRIPNQVERLATCRALLIAPDNGLKSYIIAG

SEQ ID NO: 25166 - protein, 212 aa, Citrobacter freundii
MVVQLLISSCLSGDSDAIYDIQEELPFSWGWIPVSIWKDVFEQCWYSLEKQINDKAFALNILQPFIAFINHQAHIDRRLVPIANMLLTHSEILPAGCTVLPSVSREQFNDAKQMLLRNPDSFGRVSIFSKELWDSAITPDLKSVFNKFWIENTYHTRFEKRFNLMLVAALLSQRNNKLMHQLTALFEFHYQQAPQQLGVIYQYYFEQAGVCH

SEQ ID NO: 25167 - protein, 2106 aa, Citrobacter freundii
MTTRYFSSLIEQSLSRSTEATLSIMGVTNPQLREHLAQQMGADCGESGSFIAAPVFQQMFGWKESNNTMRSLTEGKALLSKAVVDSLDDQNNGRYRFGADWKPFTHQLASWKALLEEKHSVVVTSGTGSGKTECFMVPVLEDLYRELHENGNNPLVGVRALFLYPLNALINSQRERLDAWTRGFGTGIRYCLYNGNTENLHAAVKSEQVKRPNEVLSREKMREEPAPILVTNGTMLEYMMVRQIDAPIIQQSKAQKSLRWIVLDEAHTYVGSQAAELALQLRRVMTAFGVTPDDVRFVATSATIAGGDAEKQLKIFLSELSGIPQERIDVLDGTRVIPKLEPCKHVYIPLEEIEQIPDTDIKGVSPERFDALTHSPEAHYLREMLVTQPDPMKLDTMTQRLNTLTRQHYSQQDVLRWIDVCSGTQPNTKDPAFLKVRAHIFQRNTQGVWACVDKECRKKHGTPLEKGWPFGYVYVNQRQNCDCGSPVYELAFCNECNEPHLLARDKKGKLVQWENKGGDEFSLQDDTHVEYDGVEDKVEKESTFQPPHIIAAEKTSEMGYTIQRLDRKTRRIGVGSNDSIPLVINDIEQVCSASGCGYRGTSGKQPFRRALLGGPFYVTNIVPTVLEYCQDFISEEGKEGVGPDSLPGRGRRLITFTDSRQGTARMAVRMQQEAERSRLRGSVVEILSWHQRTQTTVTPNANADLEKLSARAKQARNEAEEYRSWGMPEQAKLAEAQAEQLEQAIQVATGGKAATVLLSRTWTEMVNELKEKADIRGPILQYNHYLKPEIFNENGGPLKLSEMLLFREFMRRPKRTNSLETQGLVQVGYQGLEKIIKLPVHWEEKGLTLGDWQDFLKVTLDLYVRESNFTQLDDELKNWIGSRFSSKFVRNPETKDPEDNQNKRWPQIRNGNLSHRLVKLLMLGAGFKTANTATIDIINAWLKEAWNQLTGPLAVLKPDGNRFYLPKEHLTFSLIADGWICPVTNKILDTTFKGLTPYLPTHISFEHLSQVQFDTFVAQKVTMPEIWKLDRSQEDYAAGLAKVRDWVSKEPLIAQLRSENVWTDINDRVVEGGFYYRTAEHSAQQSSERLQSYEKMFKNGQLNVLNCSTTMEMGVDIGGITAVVMNNVPPHPANYLQRAGRAGRSKESRAISYTLCKGNPHDQQVFANPLWPFETMIPAPMVAMNSARLVQRHVNALLLSDFLCNVIGETEKEKTSLDSLWFFGEDDGQSKCERFKVWLERPVLDIDAALERLVKGTALHGARPDLLRDKTINAITFLQQRWLSVYRDLVAQERESQPQTPYRKRIELEKKRHCGEYLLRDLAARTFLPGYGFPTDVVTFDNFTMEDYVREKSRKSRDKKDREDNVSRYKGLPSRNLGVAIREYAPGAEIILDGRVFRSAGVSLHWHNINADTNEAQRLDCAWRCHKCGTIGYKEGMSNSGTLYCTNSACGEKIITENRRQVLQPAGFVTDAHAPVTNNIETMKFIPVVPAWVFVKAEPMPLPNPIMGYMTSGADGHVFQQSLGEGGHGYALCLSCGRAESMLNANDAPKSMEAHYPPRPGKADRDSQNQRLICPGSTALMKKVTLGALARTDVFEMVLRKPQNGEYLPDNTEEGRVVAMTLAVALRQALAGVLGISAAELGYAVRPVRLEDGQSVLAVQLYDVISGGAGFASSAPLHIESILQGMVKQLGCHHCDTSCSECLLDSQTRHDHDLLDRKAALAWLGDDFVYYVGLPDTETFSLPDARYCPGAISDTLRRAINEGAEKLTLWMNGPLNEWDLYARQFRAAIQNYRVKDNVAVDLVIPAGVDDPELMHELSQFTALGVRLCHSEQAPELPIVAQIAFADRVMTLASRSQQATIPGPGWHLNDELVVRSVGYQAVALNEFVLPGKATSAAERVKDIAIHKELNGPLSLFGQRFWDVLFNDHEEAQSLMKNQRIIGVHYTDRYLQNPVALVLLAALLKPLKPLLTNDAKVAIDTLFKPKDRAGNRPFHDWMSDADFQDFADQWFAAAMGRAVALRVFDSLRDIPHHRKLTVTFENGQVLKIRFDQGMGYWRINFASKWYYFDFSDDVSFQLGNMAQACQDGKVLNSEESWATDVLVEVMAA

SEQ ID NO: 25168 - protein, 1099 aa, Citrobacter freundii
MSQSEYTSILKCTPWLAKFLARRGLKQPDHRPLYEYHATCDEYDELKRMLRAIGLPDGYKSDKGYAACFTLFCSEWYRRDYERDCGWSWEPIYKTLSISLPSSEMGNIIPKGLDGYWGRPVRFYDTERRNFLGSLFSEGGLPFRLLKESDSRFQSMFSLILNQYDQAKSSDISTYALVHAAVEKSSLPVVFKEDTSVELISRMAEQLVSLVQIYDLSNHTEPVKELERVHPKWRDSFPVPLEDDTGTSFLNGLLRTASTESKPRLQKNKTTLCQFLWSENNPEAVQALISLPEELSFSIDSEPSTTRFELAIYEDGNEIASLGPAYATLSNSQAKIRVRKREIKFCRRNPAVSLFIVARAGGMFVGSNLLEGSEVAVGDVPLVFVSDKSEWLLQGQASCSVRGSHVLIVLPKDGCLASEHEDCDSGFSALGCRALTIKGRQDIIIEGDETYRIKTGRDQIIQAGFSFQGKRLNWTSYPDEAFLGIPGITKNPENLSKHHYKRFFNGTFIDDCDVQERMGAQFISVRNESNETLLRKKIGILPNDFSLEIKNGEQANEGSVIITTQHPCLYRLKEKTLEVGRERLPGSTEIMMKAEGIPPASISLQVTPNLTADPIVICLPFPARGCLAFDKDEKPLPKNLTISDLLGARAYLFGKNGEPTRYQLELRLHSRSGMQAWYEWHYSAGESPVELTLYSLREHIDNLLSLEEGIDQIVDMRIEGGGSSFTWQIRRYKYSLDYDRERQVLFANSVSNLTGQIPSPVIMLLSEPERKPIPLMSRMSEGVPVGEFELSSTIQNNGPWLVLPKQGEEASFRPCYIAGESVIQSDTTTIQSLQKATQLFNPRSDVNTITLVLEQMASDPAHSGWQFLRNLYDQFGYLPLATFEVWRALVQHPQALAMSLFKFEMSIDYLSRIESEFPVFWEFLPITEVKCAAKRFRTFLTHKGAPEEMQIRLLDRMYQQLGTVFPTYANEVKLWLSQGKLPPVFPELVMKGIIQGWYQELLREHGESRWPEFGGPGLFRWYISQQNPVIDISPDTSYRYSVTLLPVFAAAVASGKTTFSSVFENKPGAVFFLRQVRDFDSRWFNAIFQYCLLRNVTEK

SEQ ID NO: 25169 - protein, 2162 aa, Citrobacter sp. MGH100
MKSISLHKLYDSINSVSAEAVLNQLQIINPSLRQYLTQQFKSKFGSGGSFLSAPLIESTFGWKSASTLECRNTMTDLAEKGVLTERLVQVMDQAPAHPSLKREDLENGITRLEYDDDFPEKDDPRWPASRAPYAHQLEAWGILGQEKPTSTVVTAGTGSGKSECFIVPLLNDMSKLSEDIEGPLVGVQAIMLYPLNALINSQRDRLSAWTRGFKGDVRYALYNGDTPHEPEALSTTQEAVLKKTKPEEVTNRKDIRETPPPILVTNATMLEYMLVRPQDRPIIQKSQGKLRWIVLDEAHTLIGSAAAETSLLLRRTMHAFGVKPEDVRFVATSATIGDMNQWEETEKLLKTFLGELAGVAPSKIAIVRGHRNVPELPEYTGEVPTLSVSELESLDSGTAYDTLSQMALIRSLRKRLIDEGPKTLQEIAAHLNPNVDESQIDGHMLNSALRIIDVATDAHPNGDDKAEALLPIRAHLFHRAQRGIWACINPECSGKHGTYLEEDWAFGRVYLDERQSCSYCDHPVFELSHCSSCNEPTLNAVRYLGEGQVFFRPRKLDTLDDYAEDAFEYTGASEGTEEASVERDENVQLYTSLSPIDDRRQNAGGSTRGYLHPVTGLVSHDKVEGVEIRYTVASDNSGLRCGCCNQIELHEGMTFKRAVLGAPFLMGNIVPEMLKHVPTKSDTNLRGRRLITFTDSRQGTARFSAKLQLDSERRWTRSVVYNYLIDKVPETSGTAADEVAKIEGIIKTLIASGNTEAIKFMQDQREVKKAAASTSTGFSVTWDEMIDHLSKQPEIRLLAGVEGTEDALPGEYAARAEELSSTRNLARLFLLREFARRPKYSNNLESLGLVKLTYPSLDRITESEARDACRIWFEFGFTLSQWKDYLKLIVDYYARENTLVDISPSEKSWMGAEVPVRLCQPPTFKYSTETSKKDDKILIKDLQRLAFRVFPSGRIRNRPVRLIELVSGRTIERDSGGFERIMLAVWDTLRKKELMEFVDAQPDEHGFVRSGYRFRYERAALSLIDKAYLCPITGRWLDTVMKGPSADALNGITPFVTGTMLLEDVKVEDKPIDVPRPERKLLKGDNTTLLKAWLEENPVITELRNRGQWRDLNDSAVSYPTLLRSREHSAQQESEKLKDFERAFKNDHLNVLNCSTTMEMGVDIGSLSMVAMNNAPPATSNYLQRAGRAGRRGQSTSVVLTFCKASPHDERIFSDPKWAFSTTPVPRVALESAVIVSRHVNALLLATFLLKAYQDENLLVTKVGQFFVSDLEFTKCQAFLAWCDNDAIQDANLIEGLESLRNGTALEGMSLPNLIHKVATAMREVEEHWLARHSALVDELGKTNAKMILDSGKVVEDFAYKRMKRQLESMEKNHLLGILTNRGFLPGYGFPTNVVELITNNMIESRQKNKKDKSFGYPSRSLDVAIREYEPGKDMVLNGAVYRSAGLQLSWKIPNSEKEVQELQQMRYVAKCRCGYHSADHTIWNNLPEICPECSSFLSRMEYIVPTGFQVDFRKPLHNNYTRPEYSPYVAPLLQIDQEEWQAIGRAELGKFRATQNGNMFFYNHGKGAGFAMCWQCGRTHAIEASYNTDTGNFYVNESEIGKVWKKHKRIQGTTQKGCSECSSDKWALKVGTYNAETMEIQVPFVLGYSAQTTMLEIQLRNPETNSWVRSTELAYSLGIAMREVFCRENGISDIELGVAVQQRFAQIGGTRTSIFIFDKASQGAGYATQMAENLPHVLVKAYEFAKTCPHACDRACHACLLDFDTQHQLEELNRHAIIQYFNETRLIERLELPEERKFFGPNSQPELLNAISLLSLKGGRSKEIDIFISGENWDLSNAAVLRRVKYMTMQPVRVLFHKSLEDKIDSDLAWQLRRVIDSDIDVCLYSTPSILEGKALPIMRMKFQDYDYWYATEETDLISLNCDWGNTHNLCLVASKNKSYDFEANLFDLESKAAQANISSNMGVLNNFDLLTGIHISRFGNHLLDALIKTAPALEAYLNSGISKIEYSDRYLLSPIGIMLIGDIFKGFNDRFGSFSAELTISYPPTNTRRPCCVADNFENSDQLLDCVSGVSDSIGLTITSKLREKYDMDHGRKLNIELGNGTIIQILFDQGMGYWANRKPYSRNRFDFENSFDEGADYQRKEIVVRIGSGDSYIVVYERD

SEQ ID NO: 25170 - protein, 1204 aa, Citrobacter sp. MGH100
MVAITDIQGWVSSFKSSRGIPASNPLWAYKVTDEELADLQSLLLKFADQLGIRKILRLYESQYAGAFVLFAATWLQRNNTGRSKWEPVLEAIHAKGIEHSEKTSLVEAGLRSWGLEVFATELSHRYIDTLACQGGLPRSDMLRESHSQIMGYFESVLAYYERYQQSISLYDLALEELKHLPLTLQQDAFAELVSRLIERLLDWKTTYDLVDVKDAVGVLDYQHPRWREELPFLVLDEEAQTLIDTLLKRASCIKRRELHPVRVKRTLYITEHGYRFNSEIYIAQQIDSEDLNRQFGVTAMPSCFELSTIIPDNQRFRTAVFTHRQGAHSGWLVSSYITDLKNALATGEVGYELLSEGRQLAEGVYYRGDAMSDAAPWVFNLSGMEINFIGQGSIKSSKGKLIVVTKTTPRKGNQLSSVRLCGDVIGIDRQVYEVTGEALISGIAGDYRILCSADTNEEVSVIVTGRELDTARANLPVYLGIPAIHFSMQDNKGKIDPSDLFWFTSKNEPLISLQDPLAIGKGVIVWRSDNNVVWEHACVLLPAGFALKITNNAEGLYLLSISDAGNPQIGMQVGFESWMTSASYVVDGTTKCSLSPTDSIRDHVGIVLRWNNLDYSEVNLDISISFNSISLTDRKGKLYRETEHGCLSLQDLPRMRTVIRTATEVSQINSVVSLAHVNKHTGHEQVIVAKKRTFDVVRENGIYVIEGSELAELARFVYSQADDQEQYVKMDFFVHQGLFSETLQSFLPVIHRYKHDPRFIKAKRAFELPVTPLLKRLDSPALYLSPIWDLGADPLILMPDDTKASVWRYSMPEVGEIEYGAWLVWGEPEMSIRPRISIYPTPPKAKKREEVSAIGQQLLSILNMTVENDMPVYEETLAWDTLAYAVKYLDPSEERSVRRLKSIVRAMGYDLNHEGWNYIEGVLKRIESIEPLAVYTMTAVMRNHFTLVALLFRNPAYFHAVWGLSDKMGFEWASIRPYNWITSIRNAYEWHKENFKTLKSIDKEYYEKAINAPFENLREKGPFFAYLADVATDTPAFEPVEIWADDEIRAQGLESQTLAHHFFLKRGELLARHAGRLLNEIGTLRNTKQLLEIMDEKWPFAELPRPLKGLLGTIKVNNDPYGKKMTAHQLTIGLPLRWAFFSGGFYESQLPGWAQVKIRYAIALLDEFDREWLQSVLLIGHLACEIALLEYAAPGLKHKEDVTP

SEQ ID NO: 25171 - protein, 2106 aa, Citrobacter sp. MGH110
MTTRYFSSLIEQSLSRSTEATLSIMGVTNPQLREHLAQQMGADCGESGSFLAAPVFQQMFGWKESNNTMRSLTEGKALLSKAVVDSLDAQNNGRYRFGADWKPFTHQLASWKALLEEKHSVVVTSGTGSGKTECFMVPVLEDLYRELHENGNNPLVGVRALFLYPLNALINSQRERLDAWTRGFGTGIRYCLYNGNTENLHAAVKSEQIKRPNEVLSREKMREEPAPILVTNGTMLEYMMVRQVDAPIIQQSKAQKSLRWIVLDEAHTYVGSQAAELALQLRRVMTAFGVTPDDVRFVATSATIAGGDAEKQLKKFLSELSGIPQERIDVLDGTRVIPKLEPCKHVYIPLEEIEQIPDTDMKGVSPERFEALTHSPEAHYLREMLVTQPDPMKLDTMTQRLNTLTRQHYSQQDVLRWIDVCSGTQPNTKDPAFLKVRAHIFQRNTQGVWACVDKECRKKHGTPLEKGWPFGYVYVNQRQNCDCGSPIYELAFCNECNEPHLLARDKKGKLVQWENKGGDEFSLQDDTHVEYDGVEDKVEKESTFQPPLIIAAEKTSEMGYTIQRLDRQTRRIGVGSNDSIPLVINDIEQVCSASGCGYRGTSGKQPFRRALLGGPFYVTNIVPTVLEYCQDFISEEGKEGVGPDSLPGRGRRLITFTDSRQGTARMAVRMQQEAERSRLRGSVVEILSWHQRTQTTVTPNASADLEKLSARAKQARNEAEEYRSWGMPEQAKLAEAQAEQLEQAIQVATGGKAATVLLSRTWTEMVNELKEKADIRGPILQYNHYLKPEIFNENGGPLKLSEMLLFREFMRRPKRTNSLETQGLVQVGYQGLEKIIKLPVHWHEKGLTEGDWQDFLKVTLDLYVRESNFTQLDDELKNWIGSRFSSKFVRNPETKDPEDNQNKRWPQIRNGNLSHRLVKLLMLGAGFKTANTATIDIINAWLKEAWNQLTGPLAVLKPDGNRFYLPKEHLTFSLITDGWICPVTNKILDTTFKGLTPYLPTHISFEHLSQVQFDTFIAQKVTMPEIWKLDRSQEDYAAGLAKVRDWVSKEPLIAQLRSENVWTDINDRVVEGGFYYRTAEHSAQQSSERLQSYEKMFKNGQLNVLNCSTTMEMGVDIGGITAVVMNNVPPHPANYLQRAGRAGRSKESRAISYTLCKGNPHDQQVFANPLWPFETMIPAPMVAMNSARLVQRHVNALLLSDFLCNVIGETEKEKTSLDSLWFFGEDDGQSKCERFKVWLERPVLDIDAALERLVKGTALHGARPDLLRDKTINAITFLQQRWLSVYRDLVAQERESQPQTPYRKRIELEKKRHCGEYLLRDLAARTFLPGYGFPTDVVTFDNFTMEDYIREKSRKSRDKKDREDNVSRYKGLPSRNLGVAIREYAPGAEIILDGRVFRSAGVSLHWHNINADTNEAQRLDCAWRCHKCGTIGYKEGMSNSGTLYCTNSACGEKIITENRRQVLQPAGFVTDAHAPVTNNIETMKFIPVVPAWVFVKAEPMPLPNPIMGYMTSGADGHVFQQSLGEGGHGYALCLSCGRAESMLNANDAPKSMEAHYPPRPGKSDRDSQNQRLICPGSTALMKNVTLGALARTDVFEMVLRKPQNGEYLPDNTEEGRVVAMTLAVALRQALAGVLGISAAELGYAVRPVRLEDGQSVLAVQLYDVISGGAGFASSAPLHIESILQGMVKQLGCHHCDTSCSECLLDSQTRHDHDLLDRKAALAWLGDDFVYYVGLPDTETFSLPDARYCPGAISDTLRRAINEGAEKLTLWMNGPLNEWDLYARQFRAAIQNYRVKDNVAVDLVIPAGVDDPELMHELSQFTALGVRLCHSEQAPDLPIVAQIAFADRVMTLASRSQQATIPGPGWHLNDELVVRSLGYKTVKLNEFVLPGKATSAVERVKDIAIHKELNGPLSLFGQRFWDVLFNDHEEAQSLMKNQRIIGVHYTDRYLQNPVALVLLAALLKPLKPLLTEEAKVAIDTLFKPKDRAGNRPFHDWMSDADFQDFADQWFAAAMGRAVALRVFDSLRDIPHHRKLTVTFENGQVLKIRFDQGMGYWRINFASKWYYFDFSDDVSFQLGNMALACQDGKVLNSEESWATDVLVEVMAA

SEQ ID NO: 25172 - protein, 1099 aa, Citrobacter sp. MGH110
MNQSEYTSILKCTPWLDKFLARRGLKQPDHRPLYEYHATCDEYDELKRLLRAIGLPDGYKSDKGYAACFTLFCSEWYRRDYERDCGWTWEPIYKTLGILLPSSEMGNIIPKGLDGYWGRPVRFYDTERRNFLGSLFSEGGLPFRLLKESDSRFQSMFSLILNQYDQAKSSNISTYALVHAAVEKSSLPVVFKEDTSVELISRMAEQLVSLVQIYDLSNHTEPVKELERVHPKWRDSFPVPLEDDTGTSFLNGLLRTASTESKPRIQKNKTTLFQFLWSENNPEAVQAIISLPEELSFSIDSEPSTTRFELAIYEDGNEIASLGPAYATLSNSQAKIRVRKREIKFCRRNPAVSLFIVARAGGMFVGSNLLEGSEVAVGDVPLVFVSDKSEWLLQGQASCSVRGSHVLIVLPKDGCLASEHEDCDSSFSALGCRTLTIKGRQDIIIEGDETYRIKTGREQIIQTGFSFQGKRLNWTSYPDEVFLGIPGITKNPENLSKHHYKRFFNGTFIDDCDVQERMGAQFISVRNESNETLLRKKIGILPNDFSLEIKNGEQANEGSVIITTQHPCLYRLKEKTLEVGRERLPGSTEIMMKAEGIPPASISLQITPNLTADPIVIWLPFPARGCLAFDKDEKPLPKNLTINDLLGARAYLFGKNGEPTRYQLELRLHSRSGMQAWYEWHYSAGESPVELTLYSLREHIDNLLSLEEGIDQIVDMRIEGGGSSFTWQIRRYKYSLDYDRERQILFANSISNRTGQIPSPVIMLLSEPERKPIPLMSRMSEGVPVGEFELSSTIQNNGPWLVLPKQGEEASFRPCYIAGESVIQSDTTTIQSLQKATQLFNPRSDVNTITLVLEQMANDPAHSGWQFLRNLYDQFGYLPLATFEVWRALVQHPQALAMSLFKFEMSIDYLSRIESEFPVFWEFLPITEVKRAATHFRTFLTHKGAPGEMQIKLLDRMYQQLGTVFPTYASEVKLWLSQGKLPPVFPEFVMKGIIQGWYQELLREHGESRWPEFGGPGLFRWYMSQQNPVIDISPDASYRYSVTLLPVFAAAVASGKTTFGSVFENKPGAVFFLRQVRDFDSRWFNAIFQYCLLCNVTEK

SEQ ID NO: 25173 - protein, 2099 aa, Comamonadaceae bacterium A1
MQTSYFADLLPELSTRAARATISKLGFSNQPLRKHLFEIFARGFGETGCFLADPVFEATFGWKQADASMASLTKGLLHADLVNAMDKPWGDNAKEYRFPREAKPYVHQLTAWNALLAPGYQSVVVTSGTGSGKTECFMVPVLSSLAHARTKEPDIRGIRALFLYPMNALIQSQRERLRAWTGPFNGDIRFCLYNGMTPEEARAEKYRESPNEVHDRATLRSRPPPILVTNPTMLEYMLVRAQDAPILEQSQGTLEWIVLDEAHNYIGSQAAELALLLRRVLHAFGTDAQKVHFVATSATIGSGDVNAKAQLQEFLAKLAGVETGRVVVVEGERRVPQVDAPIDLAAAKTSPTELASLPDDEGRYLRLAVHPVARKLRDLFVPAVSGQGYQPLSAIKKALQSAGPTRTDTEALEWIDLLTSAVQGSGREAVPFLPLRLHAFHNTLNGLWACASPLCSKKITTLLADADWPFGLVYTEERSRCGCGAPVFPLTSCNDCNETFLSADLIYSGGMRCLKPPMQDDVDEFTLDRDPEEREPSDDDVADDEAPTSGPRTHALIVNGSSRGAAVSIDVETLELVPKPVESALALRVQDVSLIDKQQVLKCPGCGGAAPQLEQFRRPMLGAPFLLGNIIPTLLEFCPDGEQPLDSPMRGRRMITFTDSRQGTARIAAQLQQDAERNALRAAVYRRLVLAMSSSGPEQAEINKRLADNSTVLKVLPAGTPAALTVEKMMRDDEEKLRKLAGGKPVLHAELVQWLATQVPDISRWIHRYYEESDSHFRTGRGKELLTEILLCREFARRPKRQNSLETMGLMAVKYPKLAAIVSRRPAVEQAGMTLPEWVDFLKICLDFYVRQSFCLKLPTSWERWGGNRVFSKQLLPPLSVERSTSKLLKWPKVRLGDRQHRLVRLLAYALKVDPQTATGRDRIDSLLLAAWDDLSGTANLLQLGGGQGRYLDLADFAFQTITKGWVCPVTRRILDVTLRGATPYLPERQMREDVVLCRSIEIPVCDVIGRDFSSESEKVLAARAWVEAQPSLVDARIEGIWSNVNDRVIEGAGYFRAVEHSAQQAGSRLQQYEGQFKRGAINLMSCSTTMEMGVDIGGINTVAMNNVPPHPANYLQRAGRAGRRSETRSIALTVCKNNPHDQHVFKHTTWPFETRISTPGISLSSPQLVQRHVNSLLLSKFLRLQDRQGKLDKLTLDWWMLPRGSSRQERFVAWCECFKPDAHRDLNLGISSLVKRTVLEGRESNFSLVADVGQAAARHATEWMAELNAIDEQISELSKRTDEDRIPLKALQIQRKRLTGEYLLRELATSGFLPGYGFPTDITTFETLNKDSAELNQFRGESGGREDNRYQRRELPSRDTVTALREYAPGASVVIDGLVYESAGITLNWHAPATLDQVNELQNIRQAWRCGHCGSSGTSVLASPLDHCLECGARLTREGNRNKQYLEPAGFSVDLYSETHNDISLQKYIPVETPWISAQGDWVPLANPALGAFRCSSEGSVFHFSSGLGGSGYAVCLECGRAAPLGHGEDPEETPAVFKRPHKRLRGRRGNGDDWNCGGSDSPFKIKKGVSFGREYTTDVLELSLVGLDGHALAVADAAYTLAVALRTAIAARLGVEESELGCDTKPIRDPNGRPCRVVQIFDMRSGGYSSLVVTDLPSLLRDARKVLMCENECESACQSCLLTFDTRFRLDSLNRHSALQFLSDEWIQSLQLKEDQQIFGKTSRAEYQPLAEAITRELNRTNARCLYVFMAGDPSDWDIAASPLRQLLHRLSVKSGVGLALVTPLADLNSLSIGNASTLRSLETICNVKLLVGNPPVVSSSGVCLATVEALDGTCTSWGVSDQWLAVPDLRWGVLGSALPLVVSSSSTPALTNAAPKLPPPTSAGARAIEVAGELDGPGQGFGMRFWAAVSPPDLPNGLPLDGSIVSVIYEDRYLVTPLSCALLIELISALKVRFEPMDRWDDPEIIVSSMYIDDTRQGRHRDQWTSDWPSTELRDAALHSALEYCGLRASITSKAKRDLIHGRRMVIRFDRGPDCTIWMDQGLSYWTVARQQSRTSAIIFTFADDAASLGERLAEVKVGVEGHGMPTQIFLTRRDR

SEQ ID NO: 25174 - protein, 1185 aa, Comamonadaceae bacterium A1
MHEYADWIDAFLSKRGLSRPNGEMLFGYRATKAEYLSLQALMARKLESLEGTPWILRSTSECACFVFYASEWWRREYNGGPWRWTHILQSLGQPFSLDVLERTAAVELGLRAWGHRPGGQGKKYLGAIVAHGGLPLQLIERGDGSIARLLIRAMRQAQLYSWDSNRLASFFDAHQFELVQHLRDDDIYRLLASVVVTVLSLRQECQLAGVANPVEVLDRLRPSWRERFPIAVDDNSAEPLLVGLVKEAAKEYAPVTSFPVIATRSLTLGDDGETYGLAMTADMPGSITLAALSAAIGLSPDALPQSFSVDLVGVERVSLGEGRQLLGGSEPTAILAGRTGPIKGDAALAEHLLVLRCLGEDLHAPAEVPGAYALDETQPWVFVSRDTGIVLAGIGGCSVPEDTCLVAVPDDCNVAAGDDGSTADLKGMIGGLAQTRWVYMVRGAARVLAQGSHFIVRTGQTADPSSQLLWRGTRAPYCSGSMSVYLGVPVLCRLALDGSLAQVPPRSIEWTILGRASELVEQPRQHRGPIDAWLIEDGARQRRFRMVLLPPEAKLRFKSGATECEGAIEFHAWGIESIDAPKELKARTDPVANGPKLQLHAEDRPPAHVPVSVNWPHTPYALRLELPFPATGGRFTTTDGVSLQAGQAVPIRQLQTVRVQVFDRNPDAPKRYSLIVELSGRGGISGVGRLHVEHAIPIDKQGFGELRLLEVESSLLGLLCQSSQLDARLELSLTVNGAASSKIDVSRYDADLELQHQSQAMTLPGACLAGLSADELGSVNLRALPLLLANAEEVVLSQAQSEGTPAGRWSVASLSAERGPWMVYPSSTSTLQLRPTLYAGFSIGAASSRTARLCPLGEAMAIAYADERAKAVRRVVGVMAQDLDHESWLLITRQYQLLSHLPLSTFDYWRALASSMPSSLAALLKLSHDVHSLVKRMRDELGVVWELMPHSTLAEGLSGLQQSWAKQLTTDAEDPVVKTLSEQVFRTIGVSDPLLDDLIELVLFQAGYNRTDKLDRLIAPFSTGARLLVARLWLGENSMLQRFLLRTHTEDRIWPHFDLSRALVQLWQAMQPDAASKLFELCGKDLIWMPTAGQAGPYSKNVKEDVANAPVLAGLVSQLLPAESPWWTDSQLAQLRQIRNFDPAWFELGCRTGLLLALMLEQKLAQTKPNTGAGRSSTPRSSGSA

SEQ ID NO: 25175 - protein, 2106 aa, Cronobacter sakazakii
MTTRFFSSLIEQSLSRSTEATLSILGVTNPRLREHLTQQMSADCGKPGSFLASPVFQQMFGWQQSNDTMRSLTEGKALLSKAVVDSLDDQNNGRYRFGADWKPFTHQLASWKALLEKKNSVVVTSGTGSGKTECFMVPVLEDLYRELHQNANKPLVGVRALFLYPLNALINSQRERLDAWTRGFGTGIRYCLYNGNTENLHASVKTEQAKRPNEVLSREKMREEPAPILVTNGTMLEYMMVRQIDAPIIQQSKSQKTLRWIVLDEAHTYVGSQAAELALQLRRVMTAFGVTPDDVRFVATSATIAGSDADKQLKKFLSELSGIPQERIDVLDGKRVIPELEPCKHTYIPLEKIEQLPDTDIKGVSPQRFDALTHSPEAHYLRDMLVTQPNPMKLDELTQRLNSLTKKNYSQQHVLRWIDVCSGTQPNTEEPAFLKVRAHIFQRSTQGIWACVDKGCRLKHGTPLEKEWPFGYVYVNKRPNCDCGSPIYELAFCNECNEPHLLAQDKNGKLVQWENKGGDEFSLLDDVHIEHDEVEGKGGRESRFQPPLIIAAGEISEAGYTLQRLDRQTRRIGVINNDSIPIVINDIEEVCNASGCGYRGMSGKQPFRRALLGGPFYVTNIVPTVLEYCQDFTSEEGKEGVGPDSLPGRGRRLITFTDSRQGTARMAVRMQQEAERSRLRGSVVEILSWHQRTQTSTAPNANADLEKLAARAKQAREQAEEYRSWGMPEQAKLSEAQAEQLEQAYQAATGGKAATTLVSRTWSEMVNELKEKADIRGPVLQYNHYLKPEVFNENGGPLKLSEMLLFREFMRRPKRTNSLETQGLIQVGYLGLEKIHKIPPHWQEKGLTLDDWCDFLKVTLDLYVRESNFTQIEEELKNWIGSRFSSKFVRNPESKDPEDNQNRRWPQIRNGNISHRLAKLLMLGAGFKAVNTATIDIINTWLKEAWTQLTGPLAVLKPDGNRFYLPKEHMTFSLITDAWICPVTNKILDTAFKGLTPYLPTHIPFEHLTQAQYHAFIARKVTMPEIWKLDRSQDDYAIGLAKVRDWVNKEPQITQLRSENVWTDINDRVVEGGFYYRTAEHSAQQSSERLQSYEKMFKNGQLNVLNCSTTMEMGVDIGGITAVVMNNVPPHPANYLQRAGRAGRSKESRAISYTLCKGNPHDQQVFANPLWPFETMIPAPMVAMNSARLVQRHVNALLLSDFLCNVIGETDKEKTSLDSLWFFGEDNGQSKCERFKVWLERPVLDIDTALERLVNGTALHGARAEHLRDKTINAISFLQQRWLSIYRDLMAQERESQPQTPYRKRIELEKKRHCGEYLLRDLAARTFLPGYGFPTDVVTFDNFTMEDYIREKSQKSRDKKDREDNVSRYKGLPSRNLGVAIREYAPGAEIILDGRVFRSAGVSLHWHNINADTNEAQRLDCAWRCHKCGTIGYEEGLNSSGIIYCSNSACGEKIIMDNRRQVLQPAGFVTDAHASVTNNIEIMKFIPVVPAWVFVKAEPVPLPNPIMGYMAFGSDGHVFQQSLGENGHGYALCLSCGRAESMLNENDAPKSMEAHYPPRPGKADLDSQNQRLICPGSAALMKKVTLGALARTDVFEMVLRRPQNGEYLSDSTEEGRLVAMTLAVALRQALAGVLGISASELGYSVRPVRLEDGQSVLAVQLYDVISGGAGFASSAPLYIEAILQGMVKQLGCHHCDTACSECLLDSQTRHDHDLLDRKAALAWLGDDFTYYIGLPDEESFSLPDARYCPGAISDTIRRAINEGAEKLTLWMNGAPNEWDLYARQFRAAIQSYRLKDNVAVDLVIPSEVDEPELWDELSQFTALGVRLCHVEQTSQLPIVAQVTFTDRVMTLASRGQQATIPGPCWHLNDELVVRSLGYKAVALREFILPAKTASSVERVKDIQIHKQLNGPLSQFGQRFWDVLFNDHEEARSLLKSARITSVHYTDRYLQNPVALALLAAILKPLRTKLTDGANVALDTLFKSKDRPGNRPFHDWMSEADFHDFADQWFAAALGRAVGLTVFDSPRDIPHHRKLTVTFEGGQVLKIRFDQGMGYWRIEFPYVWRNFDFADDVAYQLGKMAQACQEGNVLNHEESWATDVLVEVMAA

SEQ ID NO: 25176 - protein, 581 aa, Cronobacter sakazakii
MMGAQTIIIKNNKNETLLRRKIGILPADFDIQMKSGEQANEGSIIISTQHPCFTVLKDKPLEIARKRMPGQTEIFLKAEGKPPESVSLLISPNLLAAPVELTLPFPAKGCLIFDAHGTPLDKNITLHDLIGARAFLFGKNGEPTRFSLELRLKSTNGLQAWHDWHYTAGKRPVELNLYSLREHIENLLSLESGIDQVVEMQVKGAGVVMSWQIRRYKYSLRYDYERELLISYPVSYRVGKIPSPIIMLLSEPERKALPLSSRMSEGVSLGEYELSSIVNKNGPWLIIPKPGEEMAFRPCFIRGEPSLPAENLNISSLQKATQLFDPKAEINTITLVLDQMANDPAHSGWQFIRSLFDQYGYLQLATFEVWRALIQHPRALAMSLFKFEMSADYLNRIENEFPVLWEFLPIYEIRAAADNFQLFLSQKGVPQETQTLIIMNMYKRLGTVFPTYADEIEKWLSCGELPPLIPECFVRVWYQELLREHSEARWPEYGCKRLYNWMILQKDIPLLGINPDADYRFPVIFFPVFAAAVATGKTSFKTVFDHKPGAVFFLRQVRDFDSRWFKAIFQYSLLRYVSEKK

SEQ ID NO: 25177 - protein, 1380 aa, Cronobacter sakazakii SP291
MPEQAKLSEAQAEQLEQAYQAATGGKAATTLVSRTWSEMVNELKEKADIRGPVLQYNHYLKPEVFNENGGPLKLSEMLLFREFMRRPKRTNSLETQGLIQVGYLGLEKIHKIPPHWQEKGLTLDDWCDFLKVTLDLYVRESNFTQIEEELKNWIGSRFSSKFVRNPESKDPEDNQNRRWPQIRNGNISHRLAKLLMLGAGFKAVNTATIDIINTWLKEAWTQLTGPLAVLKPDGNRFYLPKEHMTFSLITDAWICPVTNKILDTAFKGLTPYLPTHIPFEHLTQAQYHAFIARKVTMPEIWKLDRSQDDYAIGLAKVRDWVNKEPQITQLRSENVWTDINDRVVEGGFYYRTAEHSAQQSSERLQSYEKMFKNGQLNVLNCSTTMEMGVDIGGITAVVMNNVPPHPANYLQRAGRAGRSKESRAISYTLCKGNPHDQQVFANPLWPFETMIPAPMVAMNSARLVQRHVNALLLSDFLCNVIGETDKEKTSLDSLWFFGEDNGQSKCERFKVWLERPVLDIDTALERLVNGTALHGARAEHLRDKTINAISFLQQRWLSIYRDLMAQERESQPQTPYRKRIELEKKRHCGEYLLRDLAARTFLPGYGFPTDVVTFDNFTMEDYIREKSQKSRDKKDREDNVSRYKGLPSRNLGVAIREYAPGAEIILDGRVFRSAGVSLHWHNINADTNEAQRLDCAWRCHKCGTIGYEEGLNSSGIIYCSNSACGEKIIMDNRRQVLQPAGFVTDAHASVTNNIEIMKFIPVVPAWVFVKAEPVPLPNPIMGYMAFGSDGHVFQQSLGENGHGYALCLSCGRAESMLNENDAPKSMEAHYPPRPGKADLDSQNQRLICPGSAALMKKVTLGALARTDVFEMVLRRPQNGEYLSDSTEEGRLVAMTLAVALRQALAGVLGISASELGYSVRPVRLEDGQSVLAVQLYDVISGGAGFASSAPLYIEAILQGMVKQLGCHHCDTACSECLLDSQTRHDHDLLDRKAALAWLGDDFTYYIGLPDEESFSLPDARYCPGAISDTIRRAINEGAEKLTLWMNGAPNEWDLYARQFRAAIQSYRLKDNVAVDLVIPSEVDEPELWDELSQFTALGVRLCHVEQTSQLPIVAQVTFTDRVMTLASRGQQATIPGPCWHLNDELVVRSLGYKAVALREFILPAKTASSVERVKDIQIHKQLNGPLSQFGQRFWDVLFNDHEEARSLLKSARITSVHYTDRYLQNPVALALLAAILKPLRTKLTDGANVALDTLFKSKDRPGNRPFHDWMSEADFHDFADQWFAAALGRAVGLTVFDSPRDIPHHRKLTVTFEGGQVLKIRFDQGMGYWRIEFPYVWRNFDFADDVAYQLGKMAQACQEGNVLNHEESWATDVLVEVMAA

SEQ ID NO: 25178 - protein, 581 aa, Cronobacter sakazakii SP291; identical to SEQ ID NO: 25176

SEQ ID NO: 25179 - protein, 2076 aa, Desulfobulbaceae bacterium BRH_c16a
MTDTRFFASLAEQLNRGATRAALGILGFRNDALREHLRELFQQVPGIEHSFLADVVFEATFGWKPAKENLGELSGQLLHPKLVAALSDPPESLPKDYIFHREQYPYHHQLQAWEALVSDTPPRSVLVTSGTGSGKTECFLIPILNDLANELETRTGPLVGVHALFLYPLNALIKSQRDRLTAWSEPFGGQIRYCLYNGDTPNEARKSEWKSEVVDRKSLRATPPPILVTNSTMLEYMLVRNEDRPILAQSQGKLRWIVIDEAHSYIGSQAAELTLLLRRVLHAFGCQSNDVRFVATSATIAGAGENAKKQLQGFLADIAGVSLDRVTVVEGSRLLPEISEISKKKWKDADCKIMRESSPEKRFALLSADPRMRELRKSLAQNAQTVSQLAIKLHKDKNQETILRTLELLDLCTNAYDARKEAFLPLRGHFFQRTLNGLWACANPACTGRTATHLDKPAWPFGKVFLERHLICDACRFPVFEIVQCGECGGEHLSALEFSQQGNDRLNPHIYSHDEDEFQQELEPSDEEDSQDEESRHEPLGPGLPRLLVAPPNGNQVALLPDGRLDWNRLEGDGIDVHLLGPGEDDNVRCPSCHGSNLRGQLFRPIRLSAPFLLQTAIPILLRHIQPTQTKEALPYDGRRILSFTDSRQGTARIAVKLQIETERDYVRSLLYHAVTDRIRSASPQETGKIREEIAELEKVVLNHPGLSGVLEQKRLELSKLESPPVGRLSWRDAQDRLLSDEGFKRWLLPPLQEQSFGMNDRQLSDLCLWREFFLRPRRQWSLESFGLLQLSYPGIERIDRVPAVAAKLQIGLDDWRNLAQVVIDFVIRLNKAVAIPEDTLRWIGYPGKPTLALSPGQDKSIYNQRTWPSTRSVVQRRSRLVRLLAYAFKKDLEQQEDQELLEELLIGLWCDIQSILSRTEHGYRLDMSQQVEIVQVRDAWLCPVTRRVLPVTFLGLTPYLPENPAKEFAECQKVKMPVLPDPFWLNSSPEEAEEWLESNEQVLCLRSHGVWINVNDRIARFARYFRSAEHSAQLSGSTLVRRENDFKAGKINLLSCSTTMEMGVDIGGLSAVAMHNAPPNPANFLQRSGRAGRRGESVSISFTLCKSTPHGEAVFHNPLWPFTTALATPRVSLHSPPIIQRHVNSMVLSIFLAHHAAENLRKLTTGWFFEPSQPGGSAPWENFRAWCETDALTNENLREGITILLRRSIMEGRSLMSILGNSSTMINQCARAWLEEARALLESRTIVNTSEGNSAAEKAVDFQLQRLRKEYLLSELTTRGFLPGYGFPGEVVPLVTTTAEEFSRRTTQRANTIREDNPTIRAGYPARDLSIAIRDYSPGTDTVLDGRVYRSGGVTLNWHIPADQDGSPELQSFRWIWRCDSCGANGTKPTRPYSCPQCGEQNEKRILCYEYLQPSGFAVDIRCRPHNDINIPQYIPVRDPLISMEGSEWVALPVPALGRYRVNPEAKIIHRSDGLHDNGYALCLRCGRADSMTSDDELPYIFMDSKGNPVPHKRLRGGKNNDREIECPGSNEPWAIKRNLRLGIARRTEVFELQLQEVTGKPLDRVAAYTTGVILRRALAERLGVEEREIGVAISPTRDINGHSTFSIFLFDTAQGGAGYVSQAVQYLALLFHKGKEILQCSRNCDVACQSCLLSYDTQHHIQDLDRMRALALINAQFLQALQLPVTMQAFGSKTLLEVEPLALALRRERQRINLLEVRIFLGGSVKEWEPLTWRLRKELLVIHETGATIKLILPDCIFEVLESSQRDELAALAALIHAEIYCPGNSPEVGNGGQNLLRIMELSGNSTSVQWAANNQDALAPTPSWGGSPRGAQFVRVAKEGPLDAIPKKWRKRDVSSLRAREEDTISISITNEFDGSSKHFGEQAWQLLGNRVPDLKRKLLSEQAIAAIEYSDRYLRSPLSIMLLQKFINGLGSYSGGVNTATRLMIVTSYLQRNDFQQPRFLHHNWQDAEHRRGIFTTMFRPFGEFILIDDKVNLALPHARELQLRWGDGSGFSIRLDQGIGYWRTANGMRPFPFDQSSERQTDFLRDLELEVEASNSEFPTQWYISNLEEQM

SEQ ID NO: 25180 - protein, 1125 aa, Desulfobulbaceae bacterium BRH_c16a
MQSNGLHNWIEKFLFARTRSIKPDGRPLYAYKCGCADYETLKSIVLSALNTSLWNWPAPSEARFCLFAAETWRRCHSGGPWKWETVFRELEYYVPEHSWLSKTVENGLRWWRRPLLKNRVGHREFLVTIACEGGLPLLLLQKENVHLYRYFRQLLTAYHLERKSLSCDARQLAQRLSSIIPQSLRHDIVFSLSGDLIQNIVDLQEQVADAPDPISALDQKVGDWRNLLPLPLEDDTIERLLRNLVNEARTLSITERQKIRWRRFLILKGEEWSIEQVLDLPDRVSGSSLQAWLNSTNIPSRLRIFLYTSKGPEQIALLTRLKGEGSNAVFRCEVLRRQGVKLSGAEILDGVRLRISDGIKDHHLSIEGDQEWGPLPWSFRTGEEDMEFLGEGTIKSKVPKIFVLAPPDGSFEGDGSFEPVGLSLGTDRMLFEITGKGEWRHPELGICRYQCASAEESTETFLLDGPRIMMQLEENSPFQGAPKLFVINNNGNRHRIDNARLEWRPAGLSGLEWQKDIDECMGEVWIRYCDDEGSQFLLRKVRVVPPSIRISIEKIGIKQNEAGSIRIVGLGLCKVWCENIPGCHFEAQPISDGVDILSFSTHGSSITQFSCSISWSGGRSLILQLPFPRQGAAFVIGGNSIPPGGKIAASRLAAVHAIIQAPVGEKYFHLTAEIKSRNAAYYSFSLNESIYLDGRGRGQFDLHRIQEKLSSMLALTGDLDAVAELKILDIMERSLAAMEVGLFELVFIPDYASNLLTLPINCIEQLEKSWEQQLNIKMIKLWQPEAEPLLLKRSGASVAWTVPEELEAGPWLVLGEEGDWPRFRPVLWRIDGELEPSTSLLVQTICEQDRLTRQNKFHEFVQQLGQNPDHPDWTFFSDYLQLTRRYPASAFDLFRYLIKEPEALVLGLLRSDDKDFDAIWSLAYQLPFSWHLVPVAIWESAASRFIFSLRGALSSLEEGEEMVWQTFQTIRERVSIRQPFFRQICDWLSLSLFPGRQLENSELCLAKQAPQIIFDLIVTEEQKLQARHNANEHYPDGPLVMECLHHSDYNSEFSYKRLARPYRPVRCAPFVAAQIAIAGESYGESVLFELQKLRNFDREWFDSAFAFALCLGLVKLSEIPMGVSV

SEQ ID NO: 25181 - protein, 2106 aa, Enterobacter aerogenes
MTTRYFSSLIEQSLSRSTEATLSIMGVTNPYLREHLTQQMAAECGKDGTFLASPVFEQTFGWKESNFTMRELATKQTLLSKEVVDSLDNEENGRYRFGSTWKPFTHQLASWQALLDKKHSVVVTSGTGSGKTECFMVPVLEDLYRELRDNGGKPLIGVRALFLYPLNALINSQRERLDAWTRGFGTGIRYCLYNGNTEELHASVKSEQANRPNEVLSREKMREEPAPVLVTNGTMLEYMMVRQVDAPIIQKSKAEKSLRWIVLDEAHTYVGSQAAELALQLRRVMTAFGVTPDDVRFVATSATIAGSDAEKQLKKFLSELSGVPQERIDVLGGSRVIPDLAPCKHLSLSLDELEHIPDSDGEGISLERYTALTHSPQARHLREMIVSQPRPMKLDTLTRRLNELTKHQYTQQEILRWLDLCTGTLPSAQEPAFLKVRAHIFQRNTQGIWACVDKHCSAKHNTALEKGWPFGNVYVNQRQSCECGSPVYELAFCNECNEPHLLARDKKGKLVQWDNKGGDEFSLQDEAPDDFDSSSEKVQKEQVFQPPHIIAAECNTELGYIVQRLDRQTRSIGVVNPDSIPLAMNDIEQVCSASNCGYRGGKGKQPFRRALLGGPFYVTNIVPTVLEYCQDFISDEGKEGVGPLSLPGRGRRLITFTDSRQGTARMAVRMQQEAERSRLRGSVVDILGWYQRKQSTYAPNAQADVTKLTEMAAKAREEAKNLHDWGMPEEAIRREEQAERLEHAIQVATGGKVDTVLISLSWPEMVKELKDKADIKGPILQYNHYLKPEIFTENGGPLKLAEMLLFREFMRRPKRTNSLETQGLVQVGYLGLEKVHSIPAHWQEKGLTLDDWRDFLKVTLDFYVRESNYTQLDEDLKNWIGSRFSSKFVRNPDSKEPDDNQVKRWPQIRHGNVTQRLVKLLILGAKFSSVNTVTIDIVNAWLKEAWLQLTGSLAVLKSDGNRFYLPKEHLTFSLVQKAYICPVTNKLLATAFRGLTPYLPMHIQFERLTSAQYDAFVAQAVTLPEIWQHDRSQDDYVDGLRKVRDWLGQDPLVAQLRSQNLWTDINDRVVEGGFYYRTAEHSAQQSSERLQSYERMFKNGQLNVLNCSTTMEMGVDIGGISAVVMNNVPPHPANYLQRAGRAGRSKESRAISYTLCKGNPHDRQVFANPLWPFETVIPAPMVAMNSERLVQRHVNSLLLSDYLCHVIGETEKERTSLNSQWFFGEELEQSVCNRFKAWLERPTLSIDAALVRLVKGTALHGVAAEKLRDKTCDAIAALQKRWLGIYRDLVKQESESQPNTPYRKRLELEKKRHCGEYLLRDLAARTFLPGYGFPTDVVTFDNFTMEDYIREKTYKVRDKSDREDNVSRYKGLPSRNLSVAIREYAPGAEIILDGRVFRSAGVSLHWHNLNADTNEAQRLDSAWRCHKCGTLGYEEGIGGSGDLFCTNDACGERITPENRRQVLQPAGFVTDAHDPVTNNIETMKFIPVVPAWVFVKAERVPLPNPLMGFMASGADGNVFQQSMGEGGHGYALCLSCGRAESMLNLTDAPKSMEAHYPPRPGKADRDSQNQRIICPGSTALNKNVTLGALARTDVFELIVRRPQDGEYIADNTEEGRIVAMTLAVALRRSLASVLGVSAAELGYAVRPVRLENEQSVLAVQLYDIISGGAGFASSAPLHIEAVLKGMVKQLGCHHCDTACSECLLDSQTRHDHDLLDRKAALAWLGADFSHYIGLPDEEKFSLADAQYCPGSIEDTLRRAINDGGRKLTLWMSGPLNEWDLYARQFRTAIQNYRLKDDVEVVLVIPRNIDDPEILLELAQFTAIGVQLCQSELDTDTPLVAQVTFDDRLMTLISRSHDATIPGPNWHLNSQMVIRSHLQGPIALYKAELPSEDAGSKGLVNDIEIHKQLNGPVSQFGQRFWNLLTESQDDIQRLLKKCRVTRIHYSDRYLQNPVALALLGGLLKTLKPMLTQEAEVTIDTLFRSKERPGNKPFHDWMSEADFQDFADQWFAASMGRAVEIQAFNSGRDIPHHRKLMVSFDNGQSLKIRFDQGMGYWRINFARAWRDFNFNDDVSFQLGNMAQACAEGLVVNSEESWATDVLVQVIAP

SEQ ID NO: 25182 - protein, 1099 aa, Enterobacter aerogenes
MSHHEHISILKCTPWLVKFLTRRGLRKPDKRPLYEYHATSDEYDELKWLLRAIGLPDGYKSDKGYAACFTLFCSEWYRRDYERECGWAWEPIYKAIGISASSSEMGKIIPKGLDGYWGRPVRFYDTERRNFLGSLFSEGGLPFRLLKESNSRFQSMFSLILNQYEQAQSSNISTFMLVHAAVEKSSLPVVFKEDTSVELISRMAEQLVSLVQIYDLSNHTEPVKELERVHPKWRDSFPVPLDDDTGTSFLNGLLQTASIESKPRLQKNKATLCQFLWSENHPEAVQTVISLPEELNFSLESEPSTTRFELAIYEDGNEIASLGPAYATLSNSQAKIRVRKREIKFYRKTPDVSLFIVARAGGMLVGSKLLEGSEIAVGDVPLVFVSDHDEWLLQGQASCSVRGSHVLIVLPKDGCLASEHEDCDPDLSALGCRALIINGRQDITIKGDETYRIKTGRDQIIQAGFSFQGKRLNWTSCPDEVFLGIPGITKNPEDHSEHHYKRFFNGTFIDDCNAPEKMGTQFLSVRNDNNETLLRKKIGILPNDFNLEIKNGEQANEGSIIITTKHSCWYGLKEKTLEVDRKRFPGGTEIIMKTEGIPPASILLQITPNLAANPIIVSLPFPARGCLAFDKDEKPLQKNITINDLLGARAYLFGKNGEPTRYQLELRLRSRSGMQAWYEWRYSAGESPVELTLYSLREHIDNLLSLEKGIDQTVDMRIEGGGSSFTWQIRRYKYSLEYDREMQLLLANSVSNRTGQIPSPVIMLLSEPERKAISLVSRTSEGVPVGEFELSSTIQNNGPWLVVPKQGEEASFRPCYIAGEPVIQSDTSTIQSLQKATQLFNPRSDVNTITLVLEQMASDPAHSGWQFLRNLYDQFGYLPLATFEVWRALVQHPQALAMSLFKFEMSIDYLSRIESEFPVFWEFLPITEVKHAAMRFRAFLTHKGAPEEMQIKLLGRMFQQLGTVFPTYASEVQLWLDQGKLPPTFPAQMIKGIIHEWYQELLREHGESRWPEFGGPSLFRWYTSQKDPIIEVSPDTSYRYSVTLLPIFAAAVACGKTTFDSVFENKPGAVFFLRQVRDFDSRWFNAIFQYCLLRNVATK

SEQ ID NO: 25183 - protein, 2106 aa, Enterobacter aerogenes
MTTRYFSSLIEQSLSRSTEATLSIMGVTNPQLREHLAQQMGADCGKSGSFLASPVFQQMFGWKASNKTMRSLTEGKALLSKAVVDSLDDQNNGRYRFGADWKPFTHQLASWKALLEKKHSVVVTSGTGSGKTECFMVPVLEDLYRELHENGNNPLIGVRALFLYPLNALINSQRERLDAWTRGFGSGIRYCLYNGNTENLHAAVKSEQVKRPNEVLSREKMREEPAPILVTNGTMLEYMMVRQIDAPIIQQSKSQKSLRWIVLDEAHTYVGSQAAELALQLRRVMTAFGVTPDDVRFVATSATIAGSDAEKQLKKFLSELSGIPQERIDVLDGSRVIPELEPCKHVFIPLEEIEQIPDTDMKGVSPERFDALTHSPEAYYLRDMLVTQPNPMKLDDMTQRLNSLTKQHYSQQDVLRWIDVCSGTQPNTKDPAYLKVRAHIFQRNTQGVWACVDKECRLKHGTPLEKGWPFGYVYVNKRQNCDCGSPVYELAFCNECNEPHLLARDKKGKLVQWENKGGDEFSLQDDVHIENDAAEEKVDKESRFQPPLIIAAEKTSEAGYTLQRLDRQTRRIGVINNDSIPLVINDIEQVCSASSCGYRGASGKQPFRRALLGGPFYVTNIVPTVLEYCQDFISEEGKEGVGPDSLPGRGRRLITFTDSRQGTARMAVRMQQEAERSRLRGSVVEILSWHQRTQTSATPNANADLEKLATRAKQARHEAKEYRSWGMPEQAKLAEAQAEQLEQAIQAATGGKAATILVSRTWIEMVNELKEKADIRGPILQYNHYLKPEIFNENGGPLKLSEMLLFREFMRRPKRTNSLETQGLVQVGYQGLEKIHKMPVHWQEKGLTLDDWKDFLKVTLDLYVRESNFTQLDDELKNWIGSRFSSKFVRNPDTKDPEDNQNRRWPQIRNGNISHRLVKLLMLGAGFKTVNTATMDIINTWLKEAWTQLTGPLAVLKPDGNRFYLPKEHMTFSLITDAWICPVTNKILDTAFKGLTPYLPTHISFEHLTKTQYDAFVAQKVTMPEIWKLDRSQEDYAPGLAKVRDWVSKEPLIAQLRSENVWTDINDRVVEGGFYYRTAEHSAQQSSERLQSYEKMFKNGQLNVLNCSTTMEMGVDIGGITAVVMNNVPPHPANYLQRAGRAGRSQESRAISYTLCKGNPHDQQVFSNPLWPFETMIPAPMVAMNSARLVQRHVNALLLSDFLCHVIGETDKEKTSLDSLWFFGEDDGQSKCEHFKVWLERPVLDIDAALERLVKGTALHGARPDLLRDKTIHAITFLQQRWLSVYRDLVAQERESQPQTPYRKRIELEKKRHCGEYLLRDLAARTFLPGYGFPTDVVTFDNFTMEDYIREKSQKSRDKKDREDNVSRYKGLPSRNLGVAIREYAPGAEIILDGRVFRSAGVSLHWHNINADTNEAQRLDCAWRCHKCGTIGYEEGLSSSGTLFCTNSACGEKIIMDNRRQVLQPAGFVTDAHAPVTNNIETMKFIPVVPAWVFVKAEPVSLPNPIMGYMASGADGHVFQQSLGEGGHGYALCLSCGRAESMLNANDAPKSMEAHYPPRPGKADRDSQNQRLICPGSTALMKNVTLGALARTDVFEMVLRKPQNGEYLPDSTEEGRIVAMTLAVALRQALAGVLGISAAELGYAVRPVRLEDGQSVLAVQLYDVISGGAGFASSAPMHIEAILLGMVKQLGCHHCDTACSECLLDSQTRHDHDLLDRKAAQAWLGDDFSYYIGLPDDETFSLPDARYCPGAIGDTLRRAINEGAEKLTLWMNGPLNEWDLYARQFRAAIQNYRIKDNVAVDLVIPAGVDDPELLHELSQFTALGVRLCHSEQALELPIVAQVAFADRVMTLASRSQQATIPGPGWHLNDELVVRSLGYNTVKLNEFVLPGKAANAVERVKDIEIHKQLNGALSQFGQRFWDTLFNSHEEAQSLMKNQRITSVHYTDRYLQNPVALALLGAILKPLKTKLTDDAELELDTLFKPKDRPGNRPFHDWMSDADFQDFADQWFTAAMGRAVELTVFDSPRDIPHHRKLTVTFEDGQTLKIRFDQGMGYWRIDFPNAWRNFDFTDDVTYQLVKMAQACQEGKVLNSEDSWATDVLVEVMSS

SEQ ID NO: 25184 - protein, 1095 aa, Enterobacter aerogenes
MSQSECISWVKCTSWLSNFLNRRGLRQPDSRPLYEYHATNDEYNNLTQLLRAVGQVQSNIDDKGYAACFVLFCSEWYRRDYERHCGWMWDPIYRALGVSLTSTELRIIIPKGMEGYWNRPIRFYESERRNFLGTLFSEGGLPFRLLKESDSHFQNVFSRILNQYGQAQLAGFSILSLVRTVIEKSALPTVFSEDTSVELISHIAEKLSSLVLMYNLSNHTEPVKQLDKVHPKWRDEFPMPLDDETGTRFLNGLLCTASVEAKSHLQKNKGSGCQFYWLENHPNQIQAIISLPDELTFPIISTPSTTRFELAIYEDGEEVTCLGPAYASLENAHAKVRLRKSESRFVRRQPAASLTIVARTGGMIVGTIKLEDSEIAVGEVPLTFVDDEERWLLQGQASCTVRNSNVLIALPQEKTTISGCEGSPGTASLLGLRTLSVKGRQDITISGDETYRIRTGREQSNQSGFDFYGKHVTWNCHPDETFLGVPKVTAKNLNAEDIQFKRYLSGISLDECQVQEMMGTQYVSVRNTHNETLLRRKIGILPADFNIEIKGGELANEGSIVISTQHPCMSVLKDKTLEVARKRSAGQTEILLKAEGIPPAFVSLQIYPNLGAAPVEMTLPFPAKGCLALDANGCTLDKNITLHDLLGSRAFLFGKNCDPTRFSLELHLRSKSGLQAWHEWCYTAGEHPVELNLYSLREHIENLLSLETGIDQVVEMQIKGAGAVMSWQIRRYKYSLRYDYERELLISQSTHYRTGQMSSPDIMLLSEPERKITPLSSRMSEGVPTGEYELSSVINKNGPWLVVPKQGEEMAFRPCFIRGEPSLPVDESSIRSLQKATQLFNPQSEVNTITLVLEQMANDPAHSGWQFMRCLYDQFGYLPLATFEVWRALVQHPRALAMSLFKFEMSAEYLSRIENEFPILWEFFPIFEIKTAADRFKLFLSQKGAPEETQNLLVKSLYQRLGLVFPTYADEIEKWLSYGQFPPPIPEFFIREWYQELLREHSEARWPEYGSKRLHSWMTSQKNPVISINPDAEYRYSVAWLPVFAAAVASGNTSFEAIFDRKPGAVFFLRQVRDFDSRWFKAIFQCSLLRYFAQK

SEQ ID NO: 25185 - protein, 2106 aa, Enterobacter aerogenes; identical to SEQ ID NO: 25181

SEQ ID NO: 25186 - protein, 1099 aa, Enterobacter aerogenes; identical to SEQ ID NO: 25182

SEQ ID NO: 25187 - protein, 2106 aa, Enterobacter aerogenes; identical to SEQ ID NO: 25181

SEQ ID NO: 25188 - protein, 1099 aa, Enterobacter aerogenes; identical to SEQ ID NO: 25182

SEQ ID NO: 25189 - protein, 2108 aa, Enterobacter asburiae
MNVQQLHYAPLLNQLHQRAVRSVVSQLALRSKSLSQYLESQYFQPPGLGGSLLADPVFESTFGWMPADETMEDLRDKLISSPLVDALSNAPVPFRHQLTAWRTILQDKQSLLVSSGTGSGKTECFMVPVLEDLIRQQNLTRQSLTGTQAIFLYPLNALINSQQERLREWTRGFKGKIRFALYNGETRHTKFEVQEDQLKVPEQALSREAIYEAPPSIMVTNTTMLEYMLIRRKDAPIIEKSQGMLKYIVLDEAHSYIGSQAAELALLLRRVMQAFNVGPGTDKPVQIIATSATIGEDSPEGNKELAKFVADLAGVTKRDVKVVRGYRQIPSISETLIRHEYPTSLASLNSLSSRELYQQLCHYRVAQQLRQALTRPGCQAVRLSELLSVARRTWPDINHRELLQLLDLMAKSREGESKFSLAFIPLRMHGFIRTLAGLWTCSNKQCAHKASELGGGDWPFGQVWFEQRQYCDCGAPVFEVLRCSGCGSAYLSAKEEVRGDGTNWLVAQPAAAEEDEFALDLDVYSEDEDNNELENNSQFDRLIASDGEKYIISLEEATAGKIDCEAQKHYELNLIRPESRGEGRNNSFACVCCGDTQRKNNPLFRPLRLGAPFFLNEIIPTLLEFSPLPQTREEQLGPFNGRRLLTFTDSRQGTARISARLQQDADKATLRTLCYQELANINEPSVKLSPSHCALLESFITQFSIPPLKNSIDALRKTMVSNEKLSPADVQALRIIEPMVSSLSQEHAEAMQILLVNSGNQQKKTMSWLTLSEQLVGSVDLADRMRGSFTELSGLELTKQQFADFCLYSEFGRRPKNAWTLESLGLVAIYYPFIDKVTTCPQDWKTLLPDPDKQLPEWRNLLKITLDFFIRENSAVFYENEEYPRWMGARFPVKMLQGPDKKYKGQKRDQLWPQIRDRHYNRVIKLLIAVFPAIQPEQAHWKALVNHLMIEVWEAIRPCLRQFESGYQLDIKKQAEFYSPKQVWRCPYTRRALDVTLLGYSPYLPGSKEIAPEKAVVIEMPELPVRHWRLSGGGEMAREERLHWLESNGLIQHAREEGVWSTRSDRLALKDSWYRLEEHSAQRTPEKNQFNEKQFKAGKVNVLNCSTTMEMGVDIGGMSLVAMNNVPPAPANYLQRAGRAGRRGESASAAITLCKNTAHGMEVFKDPLWAFNTVASAPRVRFGSSSIVQRHVNALVLGAFLRAEVPDATKLSCKWFFEGDDSQCLRFLHWLNHQADQLADKLKRLTQGTVLMSLTPTQLLTRTHTMMQLVDTRWRSQLAILLENVEALKADNSAWEETPAGKAITYQLRDYRGAYLFSKLISEAFLPGHGFPVGVVNFNYLTADELEKRRAIKATQADPNEGGENFSRRIEKLPSRDLPTALREYAPGADVVLGGKVYRSSGIMLGKVLASGQELSGDHHIPWFWHCRKCGAGATSATRPVECSHCKAEIQQLDVKRYLQPVGFATDIRYQAHNDVSMPAQLPWKDPRVLVPSSVWVSLPDAGLGRYRFSHSGELFHFSEGEFGHGYAICLSCGRAESQTQPQRTPENLKNPEKENTHYLLRGGSNDRQGNNKLCHGHVHKDLWLGYSSRTDMVELQLSDDNGLLIRDDVAARSLAVALREGLAHKLGIENTELGVTTQQARDIDGFTGYSIFIYDNNAGGAGYAVQLIDNWSDVFNYARKLLDCSCDKFCHHCLLSYDSQHYVGKLDRHQALTLLTNLRLQRLNLAPEYQYFGESSRVETNPLSLRIAQCLNSEVYDSCSLVLAGAQEQWSFAQWPLFKELLQFASSGGNVELLIATQLENLADSTRHQLSALAAIPGERLQVKSIATAQLVQGKGHLLAQVTREGQTQQWAAADSATVSPGELWGQSSASPVVTIKGASRKTFSGQALSAEDLLPALPAGAVRINLSQQLDGQVEGFGSRFWVLIAQQHAGWKKAFTNRCEITHVHYSDRYLNSPFTVRLLGEILTELVEQGLAERAELTVSVKKLEYSSRQHDSLYNAWLDEQDRQQVMTTLLEEGYLGPAWSGKISWLAGDNQNTDHGRELTVTFSDGSEHYVLLDMGLSYWRCTGDTFFDFSGRIPNQVERLATCRALVIAPDNGLKSYIIAG

SEQ ID NO: 25190 - protein, 978 aa, Enterobacter asburiae
MIENESGYLITYFRRIYQALRGQSSRRPAEIIAQELGDTIPVTMQNELVYEIAGEFCETLHTLLNEHTTHGQDPVSSLRKQYPDWHLQLPLVLPEENASEIVRRLLSQSSEPRISSNVLVERIWIDVDDSWYCDARFRFPATMRTEQLISLFECNIQPEQTRLIISAKWRNGGARLAMLSRYEQQDWRVELLPFAMQKLSGADAMTEISLSLNEGPILLGHVIPKGGYELTEDLPWVFEAMNESESQLKLVGMGSVSSRQNSLFISLPTNSHLDISGEGEFDIPRLLKNSERSLTKISGVFSVVLHDGAVCTIRTQQLYDSAIEYYIKPTEIDLVKSDYPVHRAWPKFGWKKDMQHGIVPENELFWRSIRSGNSSWFSVASVMPKGQVEVRRIVNGEVLFSGKVVILPADFNIQIIPETAQQGVIVLSGITDARVDKYSNNEKVTLKSDYLQNECVIDCNSSQMLESTINLRVSWKDGSNLKLLLPKPVSGGRFVSNDGSVHFGGVASIAHLHGVNAELLTISCAGKGYLNIELLDENPMSEKFHYLHADIPLLSGRNEKLQQISLYENYNLLSAMLACAWKNDSTLRVDFYSDRFGKDKTTLNIKRYDGCFIESDERLLVDIKDSIVFPYHKIDGMVIEAVSLINPDLSTVLLNKDESGYDFSTLNIQGGPWLIVGKIDDAIRIAPVIKWVLPTLQTDDLFLNAICNAEREQRKKYYNALFFEVKNNPLQNSCSLLVEYIKKYKLNNNLPLLELDLFREIPSNYCVAVQLLISSCLSGDSDTIYDIQEELPFSWGWIPVSIWKDVFEQCWYSLENQINDKAFALNILQPFIAFINHRAHIDRRLVPIANMLLTHSEILPVGCTALPSVSREQFNDAKQMLLRNPDSFGRVSIFSKELWDSAIAPDLKSFFNKFWIENTYHTRFEKRFNLMLVAALLSQRNNKLMHQLTALFEFHYQQAPQQLGVIYQYYFEQAGVCH

SEQ ID NO: 25191 - protein, 2108 aa, Enterobacter cloacae
MNVQQLHYAPLLNQLHQRAVRSVVSQLALRSKSLSQYLESQYFQPPGQGGSLLADPVFESTFGWMPADEKMEDLRDKLISSPLVDALSNAPVPFRHQLTAWRTILEDKQSLLVSSGTGSGKTECFMVPVLEDLIRQQNLTRQSLTGTQAIFLYPLNALINSQQERLREWTRGFKGKIRFALYNGETRHTKFEVQEDQLKAPEQALSREAIYEAPPSIMVTNTTMLEYMLIRRKDAPIIEKSQGMLKYIVLDEAHSYIGSQAAELALLLRRVMQAFNVGPGTDKPVQIIATSATIGEDSPEGNKELAKFVADLAGVTERDVKVVRGYRQIPSISESLIRHEYPTSLASLNSLSSQELYQQLCHYRVAQQLRQALTRPGCQAVRLSELLNVARRTWPDINHRELLQLLDLMAKSREGESKFSLAFIPLRMHGFIRTLAGLWACSNKQCAHKASELGGGDWPFGQVWFEQRQYCDCGAPVFEVLRCSGCGSAYLSAKEEVRGDGTNWLVAQPAAAEEDEFALDLDVYSEDEDNNELENNSQFDRLIASDGEKYLISLEEATAGKIDREAQKHYELNLIRPESRGEGRNNSFACVCCGDTQRKNNPLFRPLRLGAPFFLNEIIPTLLEFSPLPQTREEQLGPFNGRRLLTFTDSRQGTARISARLQQDADKATLRTLCYQELANINEPSVKLSPSHCALLESFITQFSIPPLKNSIDALRKAMVSNEKLSPADVQALRIIEPMVSSLSQEHAKAMQILLVNSGNQQKKTMSWLTLSEQLVGSVDLADRMRGSFKDLSGLELTKQQFADFCLYSEFGRRPKNAWTLESLGLVAIYYPFIDKVTTCPQDWKTLLPDPDKQLPEWRNLLKITLDFFIRENSAVFYENEEYPRWMGARFPVKMLQGPDKKYKGQKRDQLWPQIRDRHYNRVIKLLIAVFPAIQPEQAHWKALVNHLMIEVWEAIRPCLRQFESGYQLDIKQQAEFYSPKQVWRCPYTRRALDVTLLSYSPYLPGSKEIAPEKAVLIEMPELPVRHWRLSGGGEMAREERLHWLESNELIQHAREEGVWSTRSDRLALKDSWYRLEEHSAQRTPEKNQFNEKQFKAGKVNVLNCSTTMEMGVDIGGMSLVAMNNVPPAPANYLQRAGRAGRRGESASAAITLCKNTAHGMEVFKDPLWAFNTVASAPRVRFGSSSIVQRHVNALVLGAFLRAEVPDATKLSCKWFFEGDDSQCLRFLHWLNHQADQLADKLKRLTQGTVLMSLTPTQLLTRTHTMMQLVDTRWRSQLAILLENVEALKADNSAWEETPAGKAITYQLRDYRGAYLFSKLISEAFLPGHGFPVGVVNFNYLTADELEKRRAIKTTQADPNEGGENFSRRIEKLPSRDLPTALREYAPGADVVLGGKVYRSSGIMLGKVLASGQELSGDHHIPWFWHCRKCGAGATSATRPVECSHCKAELQRLDVKRYLQPVGFATDIRYQAHNDVSMPAQLPWKDPRVLVPSSVWVSLPDAGLGRYRFSHSGELFHFSEGEFGHGYAICLSCGRAESQTQPQRTPENLKNPEKENTHYLLRGGSNDRQGNNKLCHGHVHKDLWLGYSSRTDMVELQLSDDNGLLIRDDVAARSLAVALREGLAHKLGIENTELGVTTQQARDIDGFTGYSIFIYDNNAGGAGYAVQLIDNWSDVFNYARKLLDCSCDKFCHHCLLSYDSQHYVGKLDRHQALTLLTNLRLQRLNLAPEYQYFGESSRVETNPLSLRIAQCLNSEIYDSCSLVLAGSQEQWSFAQWPLFKELLQFASSGGNVELLIATQLENMADSTRHQLSALAAIPGERLQVKSIATAQLVQGEGILLAQVTREGQTQQWAAADNATVSPGELWGQSSASPVVTIKGASRKTFSGQTLSAEDLLPALPAGAVRINLSQQLDGLVGGFGSRFWALIAQQHAGWKKAFTNRCEISHVHYSDRYLNSPFTVRLLGEILTELVEQGLAERAELTVSVKKLEFSSRQHDSLYNAWLEEQDRQQVLTTLLEEGYLGPAWSGKISWLAGDNQDTDHGRELTVTFSDGSEHYVLLDMGLSYWRCTGDTFFDFSGRIPNQVERLATCRALLIAPDNGLKSYIIAG

SEQ ID NO: 25192 - protein, 978 aa, Enterobacter cloacae
MIENESGYLITYFRRIYQALRGQSSRRPAEIIAQELGDTIPVTMQNELVYEIAGEFCETLHTLLNEHNTHGQDPVSSLRKQYPDWHLQLPLVLPEENASEIVRRLLSQSSEPRISSNVLVERIWIDVDDSWYCDARFRFPATMRTEQLISLFECNIQPEQTRLIISAKWRNGGARLAMLSRYEQQDWRVELLPFAMQKLSGADAMTEISLSLHEGPILLGHVIPKGGYELTEDLPWVFEAMNESESQLKLVGMGSVSSRQNSLFISLPTNSHLDISGEGEFDIPRLLKNSERSLTKISGVFSVVLHDGAVCTIRTQQLYDSAIEYYIKPTEFDLVKSDYPIHRAWPKFGWKKDMQHGIVPENELFWRSIRSGNNSWFSVASVMPKGQIEVRRIVNGEVLFSGKVVILPADFDIQIIPETAQQGVIVLSGITDARVDKYSNNEKVTLKSDCLQNECVIDCNSTQMLESTINLRVSWKDGSNLKLLLPKPVSGGRFVSNDGSVHFGGVASIAHLHGVDAELLTISSAGKGYLNIELLDENPMSEKFHYLHADIPLLSGRNEKLQQISLYENYNLLSAMLACAWKNDSTLRIDFYSDRFGKDKTTLNIKRYDGRFIESDERLLVDIKDSIVFPYHKIDDMVVEAISLNAPDLCTVLLNKDESGYDFSTLNIQGGPWLIVGKIDDAIRIAPVIKWMLPTLQTDDLFLNAICNAEPEQRKEYYNALFLEVKNNPLQNSCSLLVDYIKKYKLNNNLPLLELDLFREISSNYCVVVQLLISSCLSGDSDTIYDIQEELPFSWGWIPVSIWKDVFEQCWYSLENQINDKAFALNILQPFIAFINHRAHIDRRLVPIANMLLTHSEILPAGCTVLPSVSREQFNDAKQMLLRNPDSFGRVSIFTKELWDSAIAPDLKSFFNKFWIENTYHTRFEKRFNLMLVAALLSQRNNKLMHQLTALFEFHYQQAPQQLGVIYQYYFEQAGVCH

SEQ ID NO: 25193 - protein, 2106 aa, Enterobacter cloacae
MTTRFFSSLIEQSLSRSTEATLSIMGITNPNLRKHLAEQMGADCGKSGSFLASPVFQQMFGWKESNYTMRNLTEGKALLSKAVVDSLDDHNNGRYRFGADWKPFTHQLASWKALLEDKHSVVVTSGTGSGKTECFMVPVLEDLYRELHENSNNPLVGVRALFLYPLNALINSQRERLDAWTRGFGTGIRYCLYNGNTENLHASVKSEQAKRPNEVISREKMREEPAPILVTNGTMLEYMMVRQIDAPIIQQSKAQKSLRWIVLDEAHTYVGSQAAELALQLRRVMTAFGVTPDDVRFVATSATIAGSDAEKQLKKFLSELSGIPQERIDVLDGSRVIPKLASCKHVYIPLEEIEQIPDTDMKGVSPERFEALTHSPEAHYLREMLVTQPDPMKLDTMTKRLNTLTKQNYSQQEVLRWIDVCSGTQPNPKDPAFLKIRAHIFQRNTQGVWACVDKECRQKHGTPLEKGWPFGYVYVNQRQNCECGSPVYELAFCNECNEPHLLARDKNGKLVQWENKGGDEFSLQDEVNVENVATEEKVEKESSYRPPLIIAAEKASETGYILQRLDRKTRRIGVVNNESIELIINDIEQVCSASGCGYRGTSGKQPFRRALLGGPFYVTNIVPTVLEYCQDFVSEDGKEGVGPDSLPGRGRRLITFTDSRQGTARMAVRMQQEAERSRLRGSVVEILGWHQRKQTSTTPNANTDLEKLAALAKQAREQADEFRSWGLPEQAKLAEVQAEQLEQAFQAATGGNVATILISRTWTEIVNELREKADISGPILQYNHYLKPEIFNENGGPLKLSEMLLFREFMRRPKRTNSLETQGLVRVGYQGLEKIHKMPMHWHEQGLTLDDWKDFLKVTLDLYVRESNFTQLDDELKNWIGSRFSSKFVRNPETKDPEDNQNRRWPQIRNGNLSHRLVKLLMLGAGLKKVNTATIDIINTWLKEAWNQLTGSLAVLKPDGNRFYLPKEHLTFSLITDAWICPVTNKILDTAFKGLTPYLPTHISFEQLTQTQYDAFVAQKVTMPEIWKVDRSQEDYAPGLAKVRDWVSNEPLIAQLRSENVWTDINDRVVEGGFYYRTAEHSAQQSSERLQSYEKMFKNGQLNVLNCSTTMEMGVDIGGITAVVMNNVPPHPANYLQRAGRAGRSKESRAISYTLCKGNPHDQQVFANPLWPFETMIPAPMVAMNSARLVQRHVNALLLSDFLCHVIGETDKEKTSLDSLWFFGDDEDQSKCERFKVWLERPELDIDAALERLVKGTALHGASSHKLREKTVDAITLLQQRWLSVYRDLVAQERESLPQTPYRKRIELEKKRHCGEYLLRDLAARTFLPGYGFPTDVVTFDNFTMEDYIREKSQKSRDKKDREDNVSRYKGLPSRNLGVAIREYAPGAEIILDGRVFRSAGVSLHWHNINADTNEAQRLDCAWRCHKCGTIGYEEGMSSSGVLCCTNSTCGEKIIMDNRRQVLQPAGFVTDAHAPVTNNIETMKFIPVVPAWVFVKAEPVPLPNPTMGYMTSGADGHVFQQSLGEGGHGYALCLSCGRAESMLNENDAPRSMEAHYPPRPGKADRDSQNQRLICPGSTALMKNVTLGALARTDVFEMVLRKPQNGEYLPDNTEEGRLVAMTLAVALRQALAGVLGISAAELGYAVRPVRLEDGQSVLAVQLYDVISGGAGFASSAPLHIETILLGMVKQLGCNHCDTACSECLLDSQTRHDHDLLDRKAALTWLGDDFSFYIGLPDEETFSLPDARYCPGPISDTLRRAINEGAEKLTLWMNGPLNEWDLYARQFRAAIQNYRIKDNVAVDLVIPAGVDDPELLHELSQFTALGVRLCHSEQILELPIVAQIAFADRIMTLASRSQQATIPGPGWHLNDELVVRSLGYKTVKLNEFVLPGKAANAVERVKDIEIHKQLNGALSQFGQRFWDTLFNSHEEAQSLMKNQRITSVHYTDRYLQNPVALALLGAILKPLKTKLTDDAELELDTLFKPKDRPGNRPFHDWMSDADFQDFADQWFTAAMGRAVELTVFDSPRDIPHHRKLTVTFEDGQTLKIRFDQGMGYWRIDFPYVWRNFDFAEDVTYQLVKLAQACQEGKVLNSEESWATDVLIEVMPS

SEQ ID NO: 25194 - protein, 736 aa, Enterobacter cloacae
MNVGAIKLDDSEIAIGEVPLTFVAEGERWLLQGQASCNVRNSDVLIVLPRDKTTVSGYETTLNTISVLGFETLSVKGCHELIISGDEIYRIRTGKEQTNPGGVEFYGKRVNWVCNPTETFLGVPKVTSKNPDVKHIQFKPYFNSKSIEECQLQEMMGSQFVSVRNSDNETILRRKIGILPADFNVEIHGGDQANEGTIVISTQHPCMSVLKNKTFEIARKRAAGRTELLLKAEGIPPAFISLEIYPNLGADSIELTLPYPAKGCLVFDANGDLLDKNITLHDLLGSRAYLFGKNGEPTRFSLELHLRTINGQQAWHEWFYTAVERPIELNLYSLREHIENLLSLESGIDQVVDMRIRGAGVAMSWQIRRYKYSLRYDYEKEVLTSQSTSYRAGQLPSPVIMLLSEPERKAVSLSSRLSEGVPVGEYELSSIVSKNGPWLVVPKEGDEMAFRPCFIRGESSLHGDESSVRSLQKATQLFNPQAKVNTITLVLDQMATDPAHSGWQFMHSLYEHFGYLPLATFEVWRALVQHPRALAMSLFKFEMSAEYLNRIENEFPVFWEFFPILEIKSAAETFKRFLTQKGAQDEVLVTLLSKMYRQLGIVFPTYADEIEKWLSYGKFPPPIPTSFVREWYQELLREHSEARWPEYGCKRLHNWMSSQTDVVIDIYPEADYRYSVAWLPVFAAAVASGKTSFETVFEHKPGAVFFLRQVRDFDSRWFKAIFQCSLLRYISKNKKD

SEQ ID NO: 25195 - protein, 2106 aa, Enterobacter cloacae
MTTRFFSSLIEQSLSRSTEATLSIMGITNPNLRKHLAEQMGADCGKSGSFLASPVFQQMFGWKESNYTMRNLTEGQALLSKAVVDSLDDHNNGRYRFGADWKPFTHQLASWKALLEDKHSVVVTSGTGSGKTECFMVPVLEDLYRELHENGNNPLVGVRALFLYPLNALINSQRERLDAWTRGFGTGIRYCLYNGNTENLHASVKSEQAKRPNEVLSREKMREEPAPILVTNGTMLEYMMVRQIDAPIIQQSKAQKSLRWIVLDEAHTYVGSQAAELALQLRRVMTAFGVTPNDVRFVATSATIAGSDAEKQLKKFLSELSGIPQERIDVLDGSRVIPKLESCKHVYIPLEEIEQIPDTDMKGVSPERFEALTHSPEAHYLREMLVTQPDPMKLDAMTQRLNTLTKQNYSQQEVLRWIDVCSGTQPNPKDPAFLKIRAHIFQRNTQGVWACVDKECRQKHGTPLEKDWPFGYVYVNQRQNCECGSPVYELAFCNECNEPHLLARDKNGKLVQWENKGGDEFSLQDEVNVENDATEEKVEKESSYRPPLVIAAEKTSETGYILQRLDRKTRRIGVVNNESIELIINDFEQVCSASGCGYRGTSGKQPFRRALLGGPFYVTNIVPTVLEYCQDFVSEDGKEGVGPDSLPGRGRRLITFTDSRQGTARMAVRMQQEAERSRLRGSVVEILGWHQRTQTSTTPNANTDLEKLAALAKQARQQADEFRSWGLPEQAKLAEVQAEQLEQAFQAATGGNVATILISRTWTEIVNELREKADISGPILQYNHYLKPEIFNENGGPLKLSEMLLFREFMRRPKRTNSLETQGLVRVGYQGLEKIHKMPMHWQEQGLTLDDWKDFLKVTLDLYVRESNFTQLDDELKNWIGSRFSSKFVRNPETKDPEDNQNRRWPQIRNGNLSHRLVKLLMLGAGLKKVNTATIDIINTWLKEAWNQLTGSLAVLKPDGNRFYLPKEHLTFSLITDAWICPVTNKILDTAFKGLTPYLPTHISFEQLTQTQYDAFVAQKVTMPEIWKVDRSQEDYAPGLAKVRDWVSNEPLIAQLRSENVWTDINDRVVEGGFYYRTAEHSAQQSSERLQSYEKMFKNGQLNVLNCSTTMEMGVDIGGITAVVMNNVPPHPANYLQRAGRAGRSKESRAISYTLCKGNPHDQQVFANPLWPFETMIPAPMVAMNSARLVQRHVNALLLSDFLCHVIGETDKEKTSLDSLWFFGDDEDQSKCERFKVWLERPELDIDAALERLVKGTALHGASSHKLREKTVDAITLLQQRWLSVYRDLVAQERESQPQTPYRKRIELEKKRHCGEYLLRDLAARTFLPGYGFPTDVVTFDNFTMEDYIREKSQKSRDKKDREDNVSRYKGLPSRNLGVAIREYAPGAEIILDGRVFRSAGVSLHWHNINADTNEAQRLDCAWRCHKCGTIGYEEGMSSSGVLCCTNSTCGEKIIMDNRRQVLQPAGFVTDAHAPVTNNIETMKFIPVVPAWVFVKAEPVPLPNPIMGYMTSGADGHVFQQSLGEGGHGYALCLSCGRAESMLNENDAPRSMEAHYPPRPGKADRDSQNQRLICPGSTALMKNVTLGALARTDVFEMVLRKPQNGEYLPDNTEEGRLVAMTLAVALRQALAGVLGISAAELGYAVRPVRLEDGQSVLAVQLYDVISGGAGFASSAPLHIETILLGMVKQLGCNHCGTACSECLLDSQTRHDHDLLDRKAALTWLGDDFSFYIGLPDEETFSLPDARYCPGAIGDTLRRAINEGAEKLTLWMNGPLNEWDLYARQFRAAIQNYRIKDNVAVDLVIPAGVDDPELLHELSQFTALGVRLCHSEQALELPIVAQIAFVDRVMTLASRSQQATIPGPGWHQNDELVVRSLGYKTVKLNEFVLPGKAANAVERVKDIEIHKQLNGPLSQFGQRFWDALFNSHEEAHSLMKNQRITSVHYTDRYLQNPVALALLGAILKPLKTKLTDNAELGLDTLFKPKDRPGNRPFHDWMSNADFQDFADQWFTAAMGRAVELTVFDSPRDIPHHRKLTVAFENGQTLKIRFDQGMGYWRIDFPYAWRNFDFTDDVTYQLVKLAQACQEGKVLNSEESWATDVLVEVMTS

SEQ ID NO: 25196 - protein, 1098 aa, Enterobacter cloacae
MVQSECISWTKCTSWLRNFLSRRGLRQPDGRPLYEYQATNEEYVDLTQLLRAVSQTTNIVDDKGYASCFVFFCSEWYRRDYERNCGWTWEPIYKKIGTSLTATELRHIVPKGMESYWMRPIRFYESDRRNFLGTLFSEGGLPFRLLKESDSSFQTVFSRILNQYEQAQIAGFSMLSLVRKIIERSSLPAVFIEDTSVELISHMAEKLSSLVLMYNLSDDSEPVAQLDKTHPKWRDEFPMPLDDETGTRFLNGLLRTASIETKPRSQKNKCTGCQFFWTEKSPDQIRAIVSLPDELSFPIISEPSTTRFELAIYEGINEVASLGVVYASLENAHARVRIRKNESRFARHDPSANLLLVARAGGMTVGAIKLDDSEIAIGEVPLTFVADGERWLLQGQASCNVRNSDVLIVLPREKTTVSGYETTLNTISVLGLETLSVKGCHELIISGHETYRIRTGKEQTNLGGFEFYGKKVNWVCHPTETFLGVPKVISKNPDIKHIQFKPYFNSKSIEECQLQEMMGSQFVSVRNNDNETILRRKIGILPADFNVEIRGGDQVNEGTIVISTQHPCMSVLKNKTLEIARKRAAGRTEILLKAEGIPPAFISLEIYPNLGADSIELTFPYPAKGCLVLDANGDLLEKNITLHDLLGSRAYLFGKNGEPTRFSLELHLRTINGQQAWHEWFYTAGERPIELNLYSLREHIENLLSLESGIDQVVDMRIRGAGVAMSWQIRRYKYSLRYDHEKEVLISQSTNYRAGQLPSPVIMLLSEPERKAVSLSSRLSEGVPVGEYELSSIVSKNGPWLVVPKEGDEMAFRPCFIRGESSLHGDESSVRSLQKATQLFNPQAKVNTITLVLDQMATDPAHSGWQFMHSLYEHFGYLPLATFEIWRALVQHPRALAMSLFKFEMSAEYLNRIENEFPVFWEFFPILEIKSAAETFKRFLSQKGAPDEVLVTLLSKMYRQLGIVFPTYADEVEKWLSYGKFPPPIPTSFVREWYQELLREHSEARWPEYGCKRLHNWMSSQTDVVIDIYPEADYRYSVAWLPVFAAAVASGKTSFETVFEHKPGAVFFLRQVRDFDSRWFKAIFQCSLLRYISKNKKD

SEQ ID NO: 25197 - protein, 2106 aa, Enterobacter cloacae; identical to SEQ ID NO: 25195

SEQ ID NO: 25198 - protein, 1098 aa, Enterobacter cloacae; identical to SEQ ID NO: 25196

SEQ ID NO: 25199 - protein, 2080 aa, Enterobacter cloacae
MTTRFFSSLIEQSLSRSTEATLSIMGITNPNLRKHLAEQMGADCGKSGSFLASPVFQQMFGWKESNYTMRNLTEGQALLSKAVVDSLDDHNNGRYRFGADWKPFTHQLASWKALLEDKHSVVVTSGTGSGKTECFMVPVLEDLYRELHENGNNPLVGVRALFLYPLNALINSQRERLDAWTRGFGTGIRYCLYNGNTENLHASVKSEQAKRPNEVLSREKMREEPAPILVTNGTMLEYMMVRQIDAPIIQQSKAQKSLRWIVLDEAHTYVGSQAAELALQLRRVMTAFGVTPDDVRFVATSATIAGSDAEKQLKKFLSELSGIPQERIDVLDGSRVIPKLASCKHVYIPLEEIEQIPDTDMKGVSPERFEALTHSPEAHYLREMLVTQPDPMKLDTMTKRLNTLTKQNYSQQEVLRWIDVCSGTQPNPKDPAFLKIRAHIFQRNTQGVWACVDKECRQKHGTPLEKGWPFGYVYVNQRQNCECGSPVYELAFCNECNEPHLLARDKNGKLVQWENKGGDEFSLQDEVNVENDATEEKVEKESSYRPPLIIAAEKTSETGYILQRLDRKTRRIGVVNNESIELIINDIEQVCSANGCGYRGTSGKQPFRRALLGRPFYVTNIVPTVLEYCQDFVSEDGKEGVGPDSLPGRGRRLITFTDSRQGTARMAVRMQQEAERSRLRGSVVEILGWHQRTQTSTTPNANTDLEKLAALAKQAREQADEFRSWGLPEQAKLAEVQAEQLEQAFQAATGGNVATILISRTWTEIVNELREKADISGPILQYNHYLKPEIFNENGGPLKLSEMLLFREFMRRPKRTNSLETQGLVRVGYQGLEKIHKMPMHWHEQGLTLDDWKDFLKVTLDLYVRESNFTQLDDELKNWIGSRFSSKFVRNPETKDPEDNQNRRWPQIRNGNLSHRLVKLLMLGAGLKKVNTATIDIINTWLKEAWNQLTGSLAVLKPDGNRFYLPKEHLTFSLITDAWICPVTNKILDTAFKGLTPYLPTHISFEQLTQTQYDAFVAQKVTMPEIWKVDRSQEDYAPGLAKVRDWVSNEPLIAQLRSENVWTDINDRVVEGGFYYRTAEHSAQQSSERLQSYEKMFKNGQLNVLNCSTTMEMGVDIGGITAVVMNNVPPHPANYLQRAGRAGRSKESRAISYTLCKGNPHDQQVFANPLWPFETMIPAPMVAMNSARLVQRHVNALLLSDFLCHVIGETDKEKTSLDSLWFFGDDEEQSKCERFKVWLERPELDIDAALERLVKGTALHGASSHKLREKTVDAISLLQQRWLSVYRDLVAQERESQPQTPYRKRIELEKKRHCGEYLLRDLAARTFLPGYGFPTDVVTFDNFTMEDYIREKSQKSRDKKDREDNVSRYKGLPSRNLGVAIREYAPGAEIILDGRVFRSAGVSLHWHNINAVTNEAQRLDCAWRCHKCGTIGYEEGMSSSGVLCCTNSTCGEKIIMDNRRQVLQPAGFVTDAHAPVTNNIETMKFIPVVPAWVFVKAEPVPLPNPTMGYMTSGADGHVFQQSLGEGGHGYALCLSCGRAESMLNENDAPRSMEAHYPPRPGKADRDSQNQRLICPGSMALMKNVTLGALARTDVFEMVLRKPQNGEYLPDNTEEGRLVAMTLAVALRQALAGVLGISAAELGYAVRPVRLEDGQSVFAVQLYDVISGGAGFASSAPLHIETILLGMVKQLGCNHCDTACSECLLDSQTRHDHDLLDRKAALTWLGDDFSFYIGLPDEETFSLPDARYCPGAISDTLRRAINEGAEKLTLWMNGPLNEWDLYARQFRAAIQNYRIKDNVAVDLVIPAGVDDPELLHELSQFTALGVRLCHSEQILELPIVAQIAFADRIMTLASRSQQATIPGPGWHLNDELVVRSLGYKTVKLNEFVLPGKAANAVERVKDIEIHKQLNGALSQFGQRFWDTLFNSHEEAQSLMKNQRITSVHYTDRYLQNPVALALLGAILKPLKTKLTDDAELELDTLFKPKDRPGNRPFHDWMSDADFQDFADQWFTAAMGRAVELTVFDSPRDIPHHRKLTVTFEDGQTLKIRFDQGMGYWRIDFPYVWRNFDFADDVTYQLVKLA

SEQ ID NO: 25200 - protein, 1098 aa, Enterobacter cloacae
MVQSECISWTKCTSWLTNFLSRRGLRQPDGRPLYEYQATNEEYVDLTQLLRAVSQTTNIVDDKGYASCFVFFCSEWYRRDYERNCGWTWEPIYKKLGTSLTATELRHIVPKGMESYWMRPIRFYESDRRNFLGTLFSEGGLPFRLLKESDSSFQTVFSRILNQYEQAQTAGFSMLSLVRNIIERSSLPAVFIEDTSVELISHMAEKLSSLVLMYNLSDDSEPVAQLDKTHPKWRDEFPMPLDDETGTRFLNGLLRTASIETKPRSQKNKCTGCQFFWTEKSPDQIRAIVSLPDELSFPIISEPSTTRFELAIYEGINEVASLGVVYASLEKSHARIRIRKNESRFARHAPSASLSLVARAGGMNVGAIKLDDSEIAIGEVPLTFVADGERWLLQGQASCNVRNSDVLIVLPREKTTVSGYETTLNTISVLGFETLSVKGCHELIISGDEIYRIRTGKEQTNPSGVEFYGKRVNWVCNPTETFLGVPKVTSKNPDVKHIQFKPYFNSKSIEECQLQEMMGSQFVSVRNSDNETILRRKIGILPADFNVQIHGGDQANEGTIVISTQHPCMSILKNKTFEIARKRAAGRTEILLKAEGIPPAFISLEVYPNLGADSIELTLPYPAKGCLVFDANGDLLEKNITLHDLLGSRAYLFGKNGEPTRFSLELHLHTINGQQAWHEWFYTAGERPIELNLYSLREHIENLLSLESGIDQVVDMRIRGAGVAMSWQIRRYKYSLRYDYEKEVLTSQSTSYRAGQLPSPVIMLLSEPERKAVSLSSRLSEGVPVGEYELSSIVSKNGPWLVVPKEGDEMAFRPCFIRGESSLHGDESSVRSLQKATQLFNPQAKVNTITLVLDQMATDPAHSGWQFMHSLYEHFGYLPLATFEVWRALIQHPRALAMSLFKFEMSAEYLNRIENEFPVFWEFFPILEIKSAAETFKRFLTQKGAPDEVLVTLLSKMFRQLGIVFPTYADEVEKWLSYGKFPPPIPTSFVREWYQELLREHSEARWPEYGCKRLHNWMSSQTDVVIDIYPEADYRYSVAWLPVFAAAVASGKTSFETVFEHKPGAVFFLRQVRDFDSRWFKAIFQCSLLRYISKNKKD

SEQ ID NO: 25201 - protein, 2080 aa, Enterobacter cloacae
MTTRFFSSLIEQSLSRSTEATLSIMGITNPNLRKHLAEQMGADCGKSGSFLASPVFQQMFGWKESNYTMRNLTEGKALLSKAVVDSLDDHNNGRYRFGADWKPFTHQLASWKALLEDKHSVVVTSGTGSGKTECFMVPVLEDLYRELHENSNNPLVGVRALFLYPLNALINSQRERLDAWTRGFGTGIRYCLYNGNTENLHASVKSEQAKRPNEVISREKMREEPAPILVTNGTMLEYMMVRQIDAPIIQQSKAQKSLRWIVLDEAHTYVGSQAAELALQLRRVMTAFGVTPDDVRFVATSATIAGSDAEKQLKKFLSELSGIPQERIDVLDGSRVIPKLASCKHVYIPLEEIEQIPDTDMKGVSPERFEALTHSPEAHYLREMLVTQPDPMKLDTMTKRLNTLTKQNYSQQEVLRWIDVCSGTQPNPKDPAFLKIRAHIFQRNTQGVWACVDKECRQKHGTPLEKGWPFGYVYVNQRQNCECGSPVYELAFCNECNEPHLLARDKNGKLVQWENKGGDEFSLQDEVNVENVATEEKVEKESSYRPPLIIAAEKASETGYILQRLDRKTRRIGVVNNESIELIINDIEQVCSASGCGYRGTSGKQPFRRALLGGPFYVTNIVPTVLEYCQDFVSEDGKEGVGPDSLPGRGRRLITFTDSRQGTARMAVRMQQEAERSRLRGSVVEILGWHQRKQTSTTPNANTDLEKLAALAKQAREQADEFRSWGLPEQAKLAEVQAEQLEQAFQAATGGNVATILISRTWTEIVNELREKADISGPILQYNHYLKPEIFNENGGPLKLSEMLLFREFMRRPKRTNSLETQGLVRVGYQGLEKIHKMPMHWHEQGLTLDDWKDFLKVTLDLYVRESNFTQLDDELKNWIGSRFSSKFVRNPETKDPEDNQNRRWPQIRNGNLSHRLVKLLMLGAGLKKVNTATIDIINTWLKEAWNQLTGSLAVLKPDGNRFYLPKEHLTFSLITDAWICPVTNKILDTAFKGLTPYLPTHISFEQLTQTQYDAFVAQKVTMPEIWKVDRSQEDYAPGLAKVRDWVSNEPLIAQLRSENVWTDINDRVVEGGFYYRTAEHSAQQSSERLQSYEKMFKNGQLNVLNCSTTMEMGVDIGGITAVVMNNVPPHPANYLQRAGRAGRSKESRAISYTLCKGNPHDQQVFANPLWPFETMIPAPMVAMNSARLVQRHVNALLLSDFLCHVIGETDKEKTSLDSLWFFGDDEDQSKCERFKVWLERPELDIDAALERLVKGTALHGASSHKLREKTVDAITLLQQRWLSVYRDLVAQERESLPQTPYRKRIELEKKRHCGEYLLRDLAARTFLPGYGFPTDVVTFDNFTMEDYIREKSQKSRDKKDREDNVSRYKGLPSRNLGVAIREYAPGAEIILDGRVFRSAGVSLHWHNINADTNEAQRLDCAWRCHKCGTIGYEEGMSSSGVLCCTNSTCGEKIIMDNRRQVLQPAGFVTDAHAPVTNNIETMKFIPVVPAWVFVKAEPVPLPNPTMGYMTSGADGHVFQQSLGEGGHGYALCLSCGRAESMLNENDAPRSMEAHYPPRPGKADRDSQNQRLICPGSTALMKNVTLGALARTDVFEMVLRKPQNGEYLPDNTEEGRLVAMTLAVALRQALAGVLGISAAELGYAVRPVRLEDGQSVLAVQLYDVISGGAGFASSAPLHIETILLGMVKQLGCNHCDTACSECLLDSQTRHDHDLLDRKAALTWLGDDFSFYIGLPDEETFSLPDARYCPGPISDTLRRAINEGAEKLTLWMNGPLNEWDLYARQFRAAIQNYRIKDNVAVDLVIPAGVDDPELLHELSQFTALGVRLCHSEQILELPIVAQIAFADRIMTLASRSQQATIPGPGWHLNDELVVRSLGYKTVKLNEFVLPGKAANAVERVKDIEIHKQLNGALSQFGQRFWDTLFNSHEEAQSLMKNQRITSVHYTDRYLQNPVALALLGAILKPLKTKLTDDAELELDTLFKPKDRPGNRPFHDWMSDADFQDFADQWFTAAMGRAVELTVFDSPRDIPHHRKLTVTFEDGQTLKIRFDQGMGYWRIDFPYVWRNFDFAEDVTYQLVKLA

SEQ ID NO: 25202 - protein, 736 aa, Enterobacter cloacae; identical to SEQ ID NO: 25194

SEQ ID NO: 25203 - protein, 2106 aa, Enterobacter cloacae subsp. cloacae
MTTRFFSSLIEQSLSRSTEATLSIMGITNPNLRKHLAEQMGADCGKSGSFLASPVFQQMFGWKESNYTMRNLTEGKALLSKAVVDSLDDHNNGRYRFGADWKPFTHQLASWKALLEDKHSVVVTSGTGSGKTECFMVPVLEDLYRELHENSNNPLVGVRALFLYPLNALINSQRERLDAWTRGFGTGIRYCLYNGNTENLHASVKSEQAKRPNEVLSREKMREEPAPILVTNGTMLEYMMVRQIDAPIIQQSKAQKSLRWIVLDEAHTYVGSQAAELALQLRRVMTAFGVTPDDVRFVATSATIAGSDAEKQLKKFLSELSGIPQERIDVLDGSRVIPKLASCKHVYIPLEEIEQIPDTDMKGVSLERFEALTHSPEAHYLREMLVTQPDPMKLDTMTKRLNTLTKQNYSQQEVLRWIDVCSGTQPNPKDPAFLKIRAHIFQRNTQGVWACVDKECRQKHGTPLEKDWPFGYVYVNQRQNCECGSPVYELAFCNECNEPHLLARDKNGKLVQWENKGGDEFSLQDEVNVENDATEEKVEKESSYRPPLIIAAEKASETGYILQRLDRKTRRIGVVNNESIELIINDIEQVCSASSCGYRGTSGKQPFRRALLGGPFYVTNIVPTVLEYCQDFVSEDGKEGVGPDSLPGRGRRLITFTDSRQGTARMAVRMQQEAERSRLRGSVVEILGWHQRTQTSTTPNANTDLEKLAALAKQAREQADEFRSWGLPEQAKLAEVQAEQLEQAFQAATGGNVATILISRTWTEIVNELREKADISGPILQYNHYLKPEIFNENGGPLKLSEMLLFREFMRRPKRTNSLETQGLVRVGYQGLEKIHKMPMHWHEQGLTLDDWKDFLKVTLDLYVRESNFTQLDDELKNWIGSRFSSKFVRNPETKDPEDNQNRRWPQIRNGNLSHRLVKLLMLGAGLKKVNTATIDIINTWLKEAWNQLTGSLAVLKPDGNRFYLPKEHLTFSLITDAWICPVTNKILDTAFKGLTPYLPTHISFEQLTQTQYDAFVAQKVTMPEIWKVDRSQEDYAPGLAKVRDWVSNEPLIAQLRSENVWTDINDRVVEGGFYYRTAEHSAQQSSERLQSYEKMFKNGQLNVLNCSTTMEMGVDIGGITAVVMNNVPPHPANYLQRAGRAGRSKESRAISYTLCKGNPHDQQVFANPLWPFETMIPAPMVAMNSARLVQRHVNALLLSDFLCHIIGETDKEKTSLDSLWFFGDDEDQSKCERFKVWLERPELDIDAALERLVKGTALHGASSHKLREKTVDAITLLQQRWLSVYRDLAAQERESQPQTPYRKRIELEKKRHCGEYLLRDLAARTFLPGYGFPTDVVTFDNFTMEDYIREKSQKSRDKKDREDNVSRYKGLPSRNLGVAIREYAPGAEIILDGRVFRSAGVSLHWHNINADTNEAQRLDCAWRCHKCGTIGYEEGMSSSGVLCCTNSTCGEKIIMDNRRQVLQPAGFVTDAHAPVTNNIETMKFIPVVPAWVFVKAEPVPLPNPTMGYMTSGADGHVFQQSLGEGGHGYALCLSCGRAESMLNENDAPRSMEAHYPPRPGKADRDSQNQRLICPGSTALMKKVTLGALARTDVFEMVLRKPQNGEYLPDNTEEGRLVAMTLAVALRQALAGVLGISAAELGYAVRPVRLEDGQSVLAVQLYDVISGGAGFASSAPLHIETILLGMVKQLGCNHCDTACSECLLDSQTRHDHDLLDRKAALTWLGDDFSFYIGLPDEETFSLPDARYCPGAISDTLRRAINEGAEKLTLWMNGPLNEWDLYARQFRAAIQNYRVKDNVAVDLVIPAGVEDPELLHELSQFTALGVRLCHSEQALELPIVAQIAFADRVMTLASRSQQATIPGPGWHLNDELVVRSLGYKTVKLNEFVLPGKAANAVERVKDIEIHKQLNGPLSQFGQRFWDALFNSHEEAQSLMKSQRITSVHYTDRYLQNPVALALLGAILKPLKTKLTDDAELKLDTLFKPKDRPGNRPFHDWMSDADFQDFADQWFTAAMGRAVELTVFDSPRDIPHHRKLTVTFEDGQVLKIRFDQGMGYWRIDFPYAWRNFDFTDDVTYQLVKLAQACQEGKVLNSEESWATDVLVEVMPS

SEQ ID NO: 25204 - protein, 1098 aa, Enterobacter cloacae subsp. cloacae
MVQSECISWTKCTSWLTNFLSRRGLRQPDGRPLYEYQATNEEYVDLTQLLRAVSQTTNIVDDKGYASCFVFFCSEWYRRDYERNCGWTWEPIYKKLGTSLTATELRHIVPKGMESYWMRPIRFYESDRRNFLGTLFSEGGLPFRLLKESDSSFQTVFSRILNQYEQAQIAGFSMLSLVRNIIERSSLPAVFIEDTSVELISHMAEKLSSLVLMYNLSDDSEPVAQLDKTHPKWRDEFPMPLDDETGTRFLNGLLRTASIETKPRSQKNKCTGCQFFWTEKSPDQIRAIVSLPDELSFPIISEPSTTRFELAIYEGINEVASLGVVYASLENSHARIRIRKNESRFVRHDPSASLSLVARAGGMNVGAIKLDDSEIAIGEVPLTFVAEGERWLLQGQASCNVRNSDVLIVLPREKTTVSGYETTLNTISVLGFETLSVKGCHELIISGDEIYRIRTGKEQTNPGGVEFYGKRVNWVCNPTETFLGVPKVTSKNPDVKHIQFKPYFNSKSIEECQLQEMMGSQFVSVRNSDNETILRRKIGILPADFNVQIHGGDQANEGTIVISTQHPCMSVLKNKTFEIARKRTAGRTEILLKAEGIPPAFISLEIYPNLGADSIELTLPYPAKGCLVFDANGDLLEKNITLHDLLGSRAYLFGKNGEPTRFSLELHLRTINGQQAWHEWFYTAGERPIELNLYSLREHIENLLSLESGIDQVVDMRIRGAGVAMSWQIRRYKYSLRYDYEKEVLTSQSTSYRAGQLPSPVIMLLSEPERKAVSLSSRLSEGVPVGEYELSSIVSKNGPWLVVPKEGDEMAFRPCFIRGESSLHGDESSVRSLQKATQLFNPQAKVNTITLVLDQMATDPAHSGWQFMHSLYEHFGYLPLATFEVWRALVQHPRALAMSLFKFEMSAEYLNRIENEFPVFWEFFPILEIKSAAETFKRFLSQKGAPDEVLVTLLSKMYRQLGIVFPTYADEVEKWLSYGKFPPPIPTSFVREWYQELLREHSEARWPEYGCKRLHNWMSSQTDVVIDIYPEADYRYSVAWLPVFAAAVASGKTSFETVFEHKPGAVFFLRQVRDFDSRWFKAIFQCSLLRYISKNKKD

SEQ ID NO: 25205 - protein, 2106 aa, Enterobacter cloacae UCICRE 12
MTTRFFSSLIEQSLSRSTEATLSIMGITNPNLRKHLAEQMGADCGKSGSFLASPVFQQMFGWKESNYTMRNLTEGKALLSKAVVDSLDDHNNGRYRFGADWKPFTHQLASWKALLEDKHSVVVTSGTGSGKTECFMVPVLEDLYRELHENGNNPLVGVRALFLYPLNALINSQRERLDAWTRGFGTGIRYCLYNGNTENLHASVKSEQAKRPNEVLSREKMREEPAPILVTNGTMLEYMMVRQIDAPIIQQSKAQKSLRWIVLDEAHTYVGSQAAELALQLRRVMTAFGVTPDDVRFVATSATIAGSDAEKQLKKFLSELSGIPQERIDVLDGSRVIPKLASCKHVYIPLEEIEQIPDTDMKGVSPERFEALTHSPEAHYLREMLVTQPDPMKLDTMTQRLNTLTKQNYSQQEVLRWIDICSGTQPNPKDPAFLKIRAHIFQRNTQGVWACVDIECRQKHGTPLEKGWPFGYVYVNQRQNCECGSPVYELAFCNECNEPHLLARDKNGKLVQWENKGGDEFSLQDEVNVENDATEEKVEKESSYRPPLVIAAEKTSETGYILQRLDRKTRRIGVVNNESIELIINDFEQVCSASGCGYRGTSGKQPFRRALLGGPFYVTNIVPTVLEYCQDFVSEDGKEGVGPDSLPGRGRRLITFTDSRQGTARMAVRMQQEAERSRLRGSVVEILGWHQRTQTSTTPNANTDLEKLAALAKQARQQADEFRSWGLPEQAKLAEVQAEQLEQAFQAATGGNVATILISRTWTEIVNELREKADISGPILQYNHYLKPEIFNENGGPLKLSEMLLFREFMRRPKRTNSLETQGLVRVGYQGLEKIHKMPMHWQEQGLTLDDWKDFLKVTLDLYVRESNFTQLDDELKNWIGSRFSSKFVRNPETKDPEDNQNRRWPQIRNGNLSHRLVKLLMLGAGLKKVNTATIDIINTWLKEAWNQLTGSLAVLKPDGNRFYLPKEHLTFSLITDAWICPVTNKILDTAFKGLTPYLPTHISFEQLTQTQYDAFVAQKVTMPEIWKVDRSQEDYAPGLAKVRDWVSNEPLIAQLRSENVWTDINDRVVEGGFYYRTAEHSAQQSSERLQSYEKMFKNGQLNVLNCSTTMEMGVDIGGITAVVMNNVPPHPANYLQRAGRAGRSKESRAISYTLCKGNPHDQQVFANPLWPFETMIPAPMVAMNSARLVQRHVNALLLSDFLCHVIGETDKEKTSLDSLWFFGDDEDQSKCERFKVWLERPELDIDAALERLVKGTALHGASSHKLREKTVDAITLLQQRWLSVYRDLVAQERESQPQTPYRKRIELEKKRHCGEYLLRDLAARTFLPGYGFPTDVVTFDNFTMEDYIREKSQKSRDKKDREDNVSRYKGLPSRNLGVAIREYAPGAEIILDGRVFRSAGVSLHWHNINADTNEAQRLDCAWRCHKCGTIGYEEGMSSSGVLCCSNSTCGEKIIMDNRRQVLQPAGFVTDAHAPVTNNIETMKFIPVVPAWVFVKAEPVPLPNPTMGYMTSGADGHVFQQSLGEGGHGYALCLNCGRAESMLNENDAPRSMEAHYPPRPGKADRDSQNQRLICPGSTALMKNVTLGALARTDVFEMVLRKPQNGEYLPDNTEEGRLVAMTLAVALRQALAGVLGISAAELGYAVRPVRLEDGQSVLAVQLYDVISGGAGFASSAPLHIETILLGMVKQLGCNHCDTACSECLLDSQTRHDHDLLDRKAALTWLGDDFSFYIGLPDEETFSLPDARYCPGAISDTLRRAINEGAEKLTLWMNGPLNEWDLYARQFRAAIQNYRVKDNVAVDLIIPAGVDDPELLHELSQFTALGVRLCHSEQALELPIVAQIAFADCVMTLASRSQQATIPGPGWHLNDELVVRSLGYKTVKLNEFVLPGKAANAVERVKDIEIHKQLNGPLSQFGQRFWDALFNNHEEAHSLMKNQRITSVHYTDRYLQNPVALALLGAILKPLKTKLTDNAELGLDTLFKPKDRPGNRPFHDWMSEADFQDFADQWFTAAMGRAVELTVFDSPRDIPHHRKLTVTFEDSQMLKIRFDQGMGYWRIDFPYAWRNFDFTDDVTYQLVKLAQACQEGKVLNSEESWATDVLVEVMPS

SEQ ID NO: 25206 - protein, 981 aa, Enterobacter cloacae UCICRE 12
MRPIRFYESDRRNFLGTLFSEGGLPFRLLKESDSSFQTVFSRILNQYEQAQIAGFSMLSLVRNIIERSSLPAVFIEDTSVELISHMAEKLSSLVLMYNLSDDSEPVAQLDKTHPKWRDEFPMPLDDETGTRFLNGLLRTASIETKPRSQKNKCTGCQFFWTEKSPDQIRAIVSLPDELSFPIISEPSTTRFELAIYEGINEVASLGVVYASLENSHARIRIRKNESRFVRHDPSASLSLVARAGGMNVGAIKLDDSEIAIGEVPLTFVAEGERWLLQGQASCNVRNSDVLIVLPREKTTVSGYETTLNTISVLGFETLSVKGCHELIISGNEIYRIRTGKEQTNPGGVEFYGKRVNWVCNPTETFLGVPKVTSKNPDVKHIQFKPYFNSKSIEECQLQEMMGSQFVSVRNSDNETILRRKIGILPADFNVQIHGGDQANEGTIVISTQHPCMSVLKNKTFEIARKRTAGRTEILLKAEGIPPAFISLEIYPNLGADSIELTLPYPAKGCLVFDANGDLLEKNITLHDLLGSRAYLFGKNGEPTRFSLELHLRTINGQQAWHEWFYTAGERPIELNLYSLREHIENLLSLESGIDQVVDMRIRGAGVAMSWQIRRYKYSLRYDYEKEVLTSQSTSYRAGQLPSPVIMLLSEPERKAVSLSSRLSEGVPVGEYELSSIVSKNGPWLVVPKEGDEMAFRPCFIRGESSLHGDESSVRSLQKATQLFNPQAKVNTITLVLDQMATDPAHSGWQFMHSLYEHFGYLPLATFEVWRALVQHPRALAMSLFKFEMSAEYLNRIENEFPVFWEFFPILEIKSAAETFKRFLSQKGAPDEVLVTLLSKMYRQLGIVFPTYADEVEKWLSYGKFPPPIPTSFVREWYQELLREHSEARWPEYGCKRLHNWMSSQTDVVIDIYPEADYRYSVAWLPVFAAAVASGKTSFETVFEHKPGAVFFLRQVRDFDSRWFKAIFQCSLLRYISKNKKD

SEQ ID NO: 25207 - protein, 2106 aa, Enterobacter sp. BIDMC109; identical to SEQ ID NO: 25193

SEQ ID NO: 25208 - protein, 736 aa, Enterobacter sp. BIDMC109; identical to SEQ ID NO: 25194

SEQ ID NO: 25209 - protein, 1950 aa, Epilithonimonas lactis
MNFKNFYTKAENRLTDAILSLWATGDKEMQDYFKSILSQEPIMADAVFQAMFPWEQSHIDFQNTNFLYGTNFIKSLDSIRNPEFQFPKDRFPYKHQIESWQSLLLDKKSIAVTTGTGSGKTECFMLPVLQDIYENNRDQEGVNAIFLYPLNALIASQQKRMHAWCNALGGINYALLTGSTANRESSIEKKDSAMPQLISREQIRNSPPQILFTNPTMLEYMLVRNADVPIIEKSEGKLRWILLDEAHTLTGSKAAEMALLIRRVISAFKVNIKDVRFAITSATVGNGNSDILKKFMSNLCGISEDQIQVITGSRVNDFPDTDIPNISEILNKTQIKNLRNLLLNTSGLTNSEIGNRLGLQSRADQIEAMDILADQKINGKNLLPLRGHFFTRGIGGVYVCTNNNCTEPDIPIKALGRMTTVAETHCNCGFPMLELIACNSCGNMMLEGELKNSVVSQKASSGYEAFQIDGENEDETSNNNSSKTVRFIKNNSRERLVNRNLIQCSINQEGKIIYENENLLKIDDFKCPHCGNQTENSIHFRISSAFTNRILSDIVLDQTQPASSLTNKTLYNGRKYISFTDSRQGTAKISALINIDAETDWIRYQVYHLMIRKLAQQTNRFSNDQLLQERAYITGQLETDIPPFLIAGLGARLSEIENLLSNENNVNHSLTRTKWQDIIDKMMTENGFKTLFIKAAKGKDFELDGKIYAKGLLYSQFARRIGRERSLENLGLVNIVYPELDSVILPEEASLLNINLQEWKTLLKIAADYVIRDGFNFTFDDRMRLFNSKLYHPKLIYPSASAQKNSWKLYKADSKTQPRFVLLICAGLGWYNPEDIDAVRESQLNHLLEKIWKTLQEKILTKDGDGYKLDFFTHTQLEIAGKEVLCPVTNRLLDNTFRDYTPWIKGSLSEENIQNYKIQSQTDIQMPIYPYPFHLSDQNEDLHDDIINSWIEENRLEARNKGLWNDLHERIFDKEKLYLAGEHSAQQKKSRLVELEDQFEKGEINVLSCSTTMEMGVDIGGISAVVMSNVPPMPANYLQRAGRAGRRAENKSLALTFCAPNPIGLRTMAQPKWALEHPIAPPILKFDSKNIVLRHTNSLLFGLFIRNNANRGLNIKENIEKFFLGEQPNLGQNFLNWLSDLSVDNYKDDLVYLIKGTSLENTDPIQLKFSVYDNFMKTARGVTGQFTSFEEKLRILLETDGENSAAYKAIKYRKSQFLKKHILTYLAENGFLPNAGLPTGIVDFEKTVYDDIKNDNSKVTENPSYPLTSALTEFAPGNSVLIDGLSYMSAGIIMKNNWGQEGERNAVQACKNCGYQRIISLSNQLNDNCDHCYATDSLIGIDLGEYRGKLTELVEPVGFAVDLFKKPTRVISEKSKPQYLEPLLLNIKPWNQDQSSIVDVRSTDDDRSEILFYNMGDGEGYSLCTSCGRVETASDKLVGHSRLRGGKNNDGESFCDGKSKDHIILGARFKTDFTEIRLLNREGQRVNDKTLMYTLGVVFTKSLAEFLAIEESELGFGIKTYSGYQTIFIYDTAKGGAGYSSQFSMYTKEVLTKAYQALGCDCNKACTKCLIDRSSQWHLEDLDRNVARDWLRFANENQVPKNLQNTGLSISNIFGTLTNEVISLQYHQGVKEINIHINNQVSSWDIDKLYDLEEFKRNRIKINLIIEGSLDCNNHQEKLSIHKLEVGYQLKKGIEDKIADYPVHFSVILNDNQSISYIAEADYPFLVGDILKSRSITYYKVGGQQLANYADCILPTFTANIFEARVGSLPFNSDSNDLVLAMFNNLENKEDLMDKIKNRNFSVDYFDKYNQSEFSMRLVLQFIDQIKTICEIKIDDFKIHLSENDFRSNREPYYIIDNYKTIVDYENHLQHISQDFDFNIDLVNENRLPHYRFFQFKNDEVSFSIRIDGGISHGLKPISFLKSEDMELENLVFKIKKDITHDIIYTINIG

SEQ ID NO: 25210 - protein, 1007 aa, Epilithonimonas lactis
MSEFDKILTSRNIQKYSGDPLWKFQLSNNEFSQLKTSFSLSENKNKINPVDCALYFAEWWKRCYNGGKPSKEIIFQSLGINLESVIDCDEFYKKAKIGAEILGVKWLKKQNILFFRTLLLQGGLPILHISENQGSYKNFLLAVLEEQPESIEDFMFQPQIINLLPPSSRNDIVYENCLEIVKSILNDETTYDDLLNSNVAIKKINKELRERKTHLQKKQRASKIQNYWILNIDPKKLKLSLRLGLADSYTKEVLEHILGLEIVEKSNHFFINDQLVCVFQKMLSGNYKTEWNNRLAQEWTRDTLLPNCYIIVNNNRFEVKDFITTAPDFSEPSLWVPFSDNEWRLIKGNSTSSEIAAILSPESWKSKQEPELFNLFDTNFNWIKFEGQTEISNEFYTRHFISNVSSFDWTIVSQMPKWMFKAKMVVVQNVPKIIVYNDQNEALKSSDYEVFIKHKSFEIWKTINELNHLPLGCIDVKIVNDQTTAYDCFYNIGNLRIDYSNQNISSAELSCSNNNFDFKIKETPILKVFEQSKNRAYKLSVETKFNKIPNSILASLRIGNSKSLHFEIVCPFTGITLIDQEGKIILEESQLTFNHLHGIRILSESEESVIIKFKNILRPEVIISKELRLKIQPLIYFKDELLRLYFLADAMNHENMLSIELEKNGVSKQYFLKGFTHTLNVENQFQGKLNLWNSEDDLSLYAVPLNCSAENISLIPLLKESEDYKIPKTNFTNQYIIISSYEKNRHLMPRFVSTDNQFKSLQKNERIELYHHKLETSDFKSEIWKEILAYFNICINQNIPFSTFDQLRAVSRSSAVASRAFFFLGINQINTDEFIQKMIPELETDLGFCFHWIRKDDWHDAINEVAQFIGEEYFRNVIALFSNYMNENDLGEMIQFLNGQRIFTDKVYNPFINQIRSDLGERVLKELPDMKPNVNDYYNIPNNEYGKFFLLIKAPIAVAESIKNVQKEFPIWGGNDFREQIRRNIQYAQYLSPEFYNRIILQVLSQN

SEQ ID NO: 25211 - protein, 1989 aa, Erythrobacter sp. s21-N3
MAASDASQFSRLSPMEVHQRLRTGLAEAVVSRAGIRHEGLNAFLRRNLAGTEPQQGGLLSEQLFQAAPGYVSSGKRPDQLQTLLHPRTIDAISQTPVTDLRFDYEAYAHQLSTWELLSSKDPQSVLVSSGTGSGKTECFLVPMLDDLVREAATEGPLTGVRALMLYPLNALIASQEKRLTAWTKPLRGDVRFALYNGLMGTARKSNRDKAEHEIPHQVLYRETLRANPPPILVTNQTMLEYMTIRREDRQILEKSQGKLRWIVIDEAHSYIGSAAAELSLLLRRVMNAFEVTPDQVRFVATSATIGSADDEKAREDLQRFLADIAGVPLDRAHVVVGKPQPVDLSKVLTASDDPAAQSIAEKLEREPQTLASLRTLAPNAGQVLLDLSAHNAAEAKPVLPMRAHSFTRAISGLWTCINPDCSGEARPKGWPFGTVLFEQRDQCPHCQSLVFEIQNCLDCGEPYLPADDMGDRILPRGSDHDADEFREDSYREHDHDDADDDDAARHEGVGHPRLIAINPKADAKATGFDVSSGEFTGEAGNFHLTQLDEGRCPSCLGNKRRGRPAVFPFRFGTPFLTQNAAPILLEGVSPHEAEHALPFDGRQLISFSDSRQGTARFAANVETNGERGFVRGFIYHAVQKAAHGGDLTEERRAELLEKREALARLVNDMPAFKDDIAKIDDELCGTGAAGVRWQDLVPALAAEPAIGMMAKVWDLDRSERFHDNREALARFMLLRELARRPRNANAMETLGLARLRFPDIERIGQDKLPPIVREKGYSIEHWRDFLYYMVDYLRGQFALEVDDGDARWMPGRARPRNVIGPDQPPGEKRDASWPTVNSKGRQPDSILIVAAALSLDLSSDRGRHEINQLLRAAWDQLAPLLSGVGGTYSLRLEKTAEIEAVSKAWQCPLTRRILPRLVFGKSPNLISAGKIFASQPAIEVRLPRLPQTRPLSTEQREEITAWLGANEQVATLRERGIWMNWHDQAALATPYLRAEEHSAQQPPQRLREFEEQFKVGDINLLACSTTMEMGVDIGSIEAVLMTNVPPSIANYNQRAGRAGRRGQGFSTSLTIARNTPLDLETFADPAGYLRRKLASPRVSLDSDRIAQRHANAYLLAEWFREVDGEFAKTKTGDFFGCRSDLRPFEGRAPVDAFCEWLELPATTPATKNGLKRLLKGTGLEYDTEIRKHTADMFADETGNFRRTWQRLKEDGDALEGPAKKAIEFQARRLCKEFLLKELANRSLIPGSGFPTSVVPFDTLCAETQKAQERNRSDDEGARDRRYECPTRNADIAIREYAPGAEVVVDGLVWKSAGVTLNWLSPIDSGHREPQNLRWAWWCDHCGGAGSDHQMPDHCDHCGEQAINIEQFLDPAGFRVDWNAQPHADTDQAVYIEPKSPKVSVGDALWQPLLQPESGRIRASHEGYIYHHSRGPKDKGYEICLECGRAGDAGTDALKDHRPLTPRNKKAMDRCPGNDEGYAITGALALGHEVLTDVIEVQLPGLESDGAAWAFGAALREGLVRWLGIEPRELGIAVAARDGKLGRRVPSVYLFDEASGGAGYAPRLLDDIYHVFERAAKVLDCPNECEMGCSACVLSADLYKQQGKLDRRAALVAVQAFLETNAELPEEDRAVADARPINDAANTLLLKAGGGDIISIFLPSSFDLAELTSTKMRSFFSAASARGLPVTLVLDAKSFENLEEVERRFLRDASVRFEFALGLAKAEGGPFDSVRLAELKSGDRVTGFFSRDANAAQPGELWGVGETHAVVAGSQDSHTIFEPINPEDLERQVAAGDQVELMQGFGQCPVGQFGKRFGSKLKLQMEAAGVWKPGSLVRITYTDRYLNAPLPMLLFLRTCEALSADLKASSPVEVDIVVQPLKKDRPPHRIFHDWEYEDDRAEVAEMLGEKFGLDVDLQVTANSGHGRKLELEYADGQKVIVLLDQGFGYWRIAGSPPRHDFRAAPAVQASALLRSTSAVSGVGESYFAVKRDPK

SEQ ID NO: 25212 - protein, 1098 aa, Erythrobacter sp. s21-N3
MDGRDFKSEIDAARGDPAALRRIAQDIQDAGASRLLMIKAIQLARAADSGPHPLGKICGELGLPRPEGVPLYRYKLAPGVFDRIEKKLVSNLHSDLIRPTLAAAFVVWAADWFRRSYQGGTQRWRDIEGALGLSLPQSEWRDLADRGFRAWKIDPLVTAHGNQRLANLARHGGFPAAAISSGANWPRRFLERAVGELLGSDIQDITTAVGICERNEYLLPSIWRSQEMHAICGELSLKIVELRAFVDKALPSDGRPYSARLDLAYEDWRDELPMTLDGAAAGLIDTLLEARTLTGTGSIRVDRLMRLSGGEWRECLDFHLNGRWEDKDGSLAVDDSVRVFLQPSGGLADRVSGRLAYLEFESGNCWIARAMRSETAIEYPLDLAVAAEFHSRGERLSREFILPGGKPVSNGLRVFERRRGENDDGVFALIGQGSGSYRSEVVFIDVPHDWALRGKDSNAEIEPEDFVFAAGRSLYRCAGQIIAEKPNGDTYLVRTGQSVDRKDRLTIVADTASGVQAPSGERLLKHPLHAQVEDGVSRRSGSRGEVCWRFVGEKSWREDLASAGPGACEFAWLDGSTRHVRDRVTAVVLPSEFALSQRINAFHAQITLEGWTGKATLGDDAHDVEHQWTVRIDPPRRALLPLHLVTPQGSALQLSVPLRSKEWLTTWGGELLKRDAVLGLADLRDTVARAPASAVLMGEVAHHTGASLEVSWKLDGELGLSALRNDIAALMRPLGIDAQVRLDFHNGSNDNWYVTEFGNVLEWEPSGGWRPRTGIVGEAVRICGRFLGAPEKEIDYGGFDGLNVGLGGQLIQLPRLRGPWLIYLREGSRVLTRPKFIDGDPVHDLPQHRLGRAMAQPILLAREELTLITNDIIADPASPEAIKTIRAVMDLALSLNGLPPQTFEIFSKFDAAGPLAPLLLYRCEEQHLSTILELFDGLCSSWTLLPIEVWDAAFQAQGAFLVSRLDDPQWALANISERQNEIAARAPQLAPLICRDYSPLAYEAVRKHFTSHTSESINIGAAGFNPFRVDFGHMLPKENFVEGLMRVFDAPFAAALSTFGSVVLDKKQILTVKDVERRHPDYFAKAYGYALLELKNGR

SEQ ID NO: 25213 - protein, 1988 aa, Erythrobacter sp. SD-21
MAASDPLPTSRLSPMEVHQRLRTGLAEAVVSRAGIRHEGLNAFLRSTLAGTDPANGSLLSEQLFQAAPGYVSSGKSPNQLQALLHQRTIDAITQTSDTDLRFHYPAYAHQLATWELLSTQEPQSVLVSSGTGSGKTECFLVPMLDDLVRESAEQGPLTGVRALMLYPLNALIASQEKRLTAWTKPLRGDVRFALYNGLMGTARKSNRDKAEYELPHQVLYRETLRANPPPILVTNQTMLEYMTIRREDRPILDASKGKLRWIVIDEAHSYIGSAAAELSLLLRRVMNAFDVTPDQVRFVATSATIGSADDQKAREDLQRFLADIAGVPLERAHVVVGKPQPVDLSKVLTASDDPAASSVAERLEGEPQTLASLKALSPDAERILLDLSAHNANEAKPVLPMRAHSFTRAVAGLWTCINVDCPGEMRPKDWPFGAVLFDHRDQCPHCQSMVFEIQNCLDCGEPFLPADDMGDRIVPRRSDHDADEFREDSYRDRDHDDDDEEDEHEGIGHPRLIAINPKSKATATAFDVSSGEFTGEAGHFHLTQLDEGRCPACLGNKRRGRPAVFPFRFGTPFLTQNAAPILLEGVSPHQAEHALPFDGRQLISFSDSRQGTARFAANIETNGERGFVRGFIYHAVQKAAQGSDLTDERREELLKKKAALANLVADMPAFKDDIAKIDAELAGGAATGILWKDLVSALASEPAIGMMAKVWDLDRSERFHDNREALARFMLLRELARRPRNANAMETLGLARLRFPDIERIDPDKLPELVGQKGYSIEDWRGFLYYMVDYLRGQFAIEVDDGDARWMPGRARPRNVIGPDQPPGAKRDVYWPLVNTKGRQPDSILLLASAMNLDLTSQRDRHEINQVMHAAWNQLAPLLSGVGGTFSLRLEQKAEIEAVDRAWQCPLTRRVLPRLVFGRSPNLVGSGSKIDGKAVLPVEFPKLPRTRPLSSGDKKEIRGWLVEDKLVQALRQLHLWTYLHDQAALATPYLRAEEHSAQQPPHRLREFEEQFKEGDINLLACSTTMEMGVDIGSIEAVLMTNVPPSIANYNQRAGRAGRRGQGFSTSLTIARNTPLDLETFADPAGYLRRKLASPRVSLDSDRIAQRHANAYLLAQWFREVEGEFARTKTGDFFGCRADLRPFEGLAPVDAFCEWLDLPTTASATEEGLLRLLRGTGLEYDTEIRGHTAEMFGQEAGNFRRTWQRLKEDSDALEGPAKKAIEFQARRLCKEFLLKELANRSLIPGSGFPTSVVPFDTLCAETQKAQERNRSEEEGARDRRYECPTRNADIAIREYAPGAEVVVDGLVWKSAGVTLNWLSPIDSGQREPQNLRWAWWCDHCGGAGSDHQMPDQCAHCGERSINIEQFLEPAGFRVDWNAQPHADTDQAVYIEPKSPKVSVGDAPWQPMLQPETGRIRASHEGYIYHHSRGPKDQGYEICLECGRAGDAGTDALKDHRPLSPRDRKAIDRCPGNDEGYAITSALALGHEVLTDVVELQLPGLESDGAAWALGAALRESLARWLGIESRELGISVAARDGKLGRRVPSVYIFDEASGGAGYAPRLLDDIYHVFERAARVLDCPKECEMGCSACVLAADLSKQQGRLDRRSALLAVQAFLETNAELPQEDRAVPDARAINDAANTLLLRARSGDSISVLLPTVFDLAELTSTKMRTFFSAASARGVPVTLVLDPSSFDKLEEVERRFLRDAAVRFEFSLALGKGEDAPFESKRLAELISTDRATGFFSRDMSATQPGERWGMGETHAIVAGTLSDPTAYSPINPEDLERQVAAGDQVELMQGFGQCPVGQFGKRFGSKLKQQMEAAGVWRPGSLVRITYADRYLNSPLTMLLFLRTCEALSADLKADSPVEVDILVQPLKNDRSPYQIKHDWTYEDDRAEVAELLGEKFGLDVDLQVTQNSDHGRKLELEYVDGQKVLVLLDQGFGYWRIAGSPPRHDFRSAPAAQASELLRSSTAVAGVGESYFAVKNVRAN

SEQ ID NO: 25214 - protein, 1099 aa, Erythrobacter sp. SD-21
MGDRNFKQEIDAAKSDPVRLRKIADDIHASGGPRILMIRAIQLARAADSGPHPLGKSCGDLGLPRPTGLPLYRYKLAPGIFQRIEAKLSANLASDLLRPSLAPAFVMWAADWFRRSYQGGMQRWADIEAVLKLQLPQSEWRALADRGFDAWGVEPLITAHGNQRLSNLARHGGFPAAAIAGGASWPRRFLERAVGELLGADIQDIATAVSICERNEYLLPSIWRSPEMHAICGELALKIVELRAFIDKEVPVDGRPYSARLDHAYEDWRDELPMTLDGAAAGLIDTLLEARKLTGTGSIRVGRLMRSQDGEWRESLDFHLEGRWDDKDRALSAGEYVRVFLQPSGALADRISGRLAYLEVESGNCWIARAMRSEAAIDFPLDLSVTAEFHARGERLAQSFLLPGGKAVGDGLRIFERRTGDTELGAFSLIGQGSGGYRAEPVFVDVPQDWMLRGKDSNTEIESEDFAFAPGRSLYRCAGQIIAEKPNGDAFLVRTGQSADRKDRLTIVAQEATGVQAPGGERLIKHPLHAEVEDGVSRRTATRGEVGWRFAGESAWRDDLVNAGPGHCEFAWLDGATKHVRDRTSALVLPAEFALSQRINTAHAEILLGGWTGEAVLSDETPIADRRWRVRVDPPRRALLGLRLTPDHGSTFELNVPLRSKEWLTTWDGELLRRDAVLGLADLRDTVASAPGRAMLMGEVAHHAEASLEASWKVDVELGLSALRNDIAALMRPLGIDAQVRLDFHNGSNDNWYVTEFGNSLEWEPSGGLRPKTAIVGEDVRVGGRFLGAPEKEVDFGPFDGLLGGLGGQLIQLPRLRGPWLVYLREGSRVLTRPKFIDGDPVHDVPQHRLGRAMAQPLLQAREDLVRLAEELAAEPMSSEATQTIRAVMDLALSLNGLPPQTFEIFSKFEIAGPLAPLLLYRCEEQHLSTILELFDGVCSSWSLLPIKAWDAAFQAQIGFLLEKFDDLTWAMSHIYERQNEIAARAPQLAPLICRDFSPLSWEELRNHFTSHTSELINEDVGGFNPFRPAYSELLPRENFVEALMRVFDAPFAAALSATGHASLEKEQVLTIKDVERRHPDYFAKAFGYAVSELKNGRQ

SEQ ID NO: 25215 - protein, 2104 aa, Escherichia coli
MDVQQLHYAPLLNQLHQRAVRSVVSQLALRSKSLTHYLESQYFQPPGQEGSLLADPVFESTFGWMPADETMEDLRDKLISSPLVDALSKAPVPFRHQLTAWRTILEDKKSLLVSSGTGSGKTECFMVPVLEDLIRQQKSTRQSLTGTQAIFLYPLNALINSQQERLREWTRGFKGKIRFALYNGETRHTKYEIQEDQLKVPEQALSREAIYEAPPSIMVTNTTMLEYMLIRRKDAPIIEKSQGMLKYIVLDEAHSYIGSQAAELALLLRRVMQAFNVGPGTDKPVQIIATSATIGEDSPEGNKELAKFVADLAGVTERDVKVVRGYRQIPRVSESLIRHEYPTSLTSLKSLSPQDLYQQLCHYRVAQQLRQALTHPGRQAVRLSELLNVARRTWPDINHRELLQLLDLMARSREGELAFTPLRMHGFIRTLAGLWACSNKQCSHKAHELNQSDWPFGQVWFEQRQYCDCGAPVFEVLRCSGCGSAYLSAKEEMRGDGTNWLVAQPAAAEVDEFALDVDVYSEDEDNDELDNNSQFDRLIASDGEKYIISLEETTAGKIDSEAQKHYEINLLRPESRGEGRNNSFACVCCGDTQRKNNPLFRPLRLGAPFFLNEIIPTLLEFSPLPQTREEQLGPFNGRRLLTFTDSRQGTARISARLQQDADKATLRALCYQELANITEPSAKLSPAHCALLEKVISQFSVLPLKNSIDALKKAMAANEELSPTDIQALKIIEPMVSSLSTEHAEAMQILQANSGNQQKKTMSWQTLSEQLVGSVDLADRMRGSFKELSGLDLTKQQFADFCLYSEFGRRPKNAWTLESLGLVAIHYPFIDKVTTCPQDWKTLLPDPDKQLAEWRNLLKITLDFFIRENSAVFYENEQYPRWMGARFPVKMLQGPDKKNKGQKRDQLWPQIRDRHYNRVIKLLIAVFPAIQPEQAHWKSLVNHLMIEVWDAIRPCLRQFESGYQLDIKQQAEFYSPKQVWRCPYTRRALDVTLLGYSPYLPGSKEIAPEKAVLIEMPELPVRHWRLSGGGEIAREERLEWLESNALIQHAREEGLWSTRSDRLALKDSWYRLEEHSAQRTPEQNQFNEKQFKSGKVNVLNCSTTMEMGVDIGGMSLVAMNNVPPAPANYLQRAGRAGRRGESASAAITLCKNTAHGMEVFKAPLWAFNTTASAPRVRFGSSSIVQRHVNAQVLGLFLRAEVPDATKLSCKWFFEGDESQCLRFLHWLNHQADELADKLKRLTQGTVLMSLTATQLLTRTQAMMQQVDIRWRSQLAILLENIEALKADNSAWEETPAGKAIAYQLRDYRGAYLFSKLISEAFLPGHGFPVGVVNFNYLTADELEKRRAIKATQADPNEGGESFSRRIEKLPSRDLPTALREYAPGADVVLGGKVYRSSGIMLGKVLASGQELSGDHHIPWFWHCRKCGAGATSTTHPVECSHCKADIQQLDVKRYLQPVGFATDIRYQAHNDVSMPAQLPWKDPRVLVPSSVWVSLPDAGLGRYRFSHSGELFHFSEGEFGHGYAICLSCGRAESQTQPQRTPENLKNPERENTHYLLRGGSNDRQGSNKLCHGHVHKDLWLGYSSRTDMVELQLNDDNGLLIRDEVAARSLAVALREGLAHKLGIENTELGVTTQQARDINGYTGYSIFIYDNNAGGAGYAVQLIDHWADVFNYARKLLDCSCDKFCHHCLLSYDSQHYVNRLDRHHALTLLTNVRLQRLNLAPEYQYFGDGSRVETNPLSLRIAQCLNSEIYDSCSLVLAGPQEQWDFAQWPLFKELLQFASSGGNVELLVATPLENLTDSSRHQLSALAAMPGGRLQVKSIATAQLMQGKGRWLAQVTRKGQSQQWAADDSATVAPGELWGQSASSPVVTLKGTSGKTFSGQTLSAEDLLPALPTGAVRINLCEQLDGPLEGFGSRFWSLVTQQHAGWKQAFTRHKEITHVEYSDRYLNSPFTARLLGEILTELVEQGMAERASLTVCVKKLDYNSRQHDALYNAWLNEEDRQQVVTTLLEEGYLGPAWPGAISWLTGDNQSTEHGRELTVTFSDGSQHYVLLDMGLSYWRCIEDTFFDFALRVPQQVERLANTRARAVAPGNDLRSYIIAG

SEQ ID NO: 25216 - protein, 978 aa, Escherichia coli
MIENESGYLITYFRRIYQALRGQSSQYPAAKIAQELGDTIPVTMQNELVYEIAGEFCETLCRLLSEHPPHSSDPVSALRKLSPDWHLQLPLVLPEANAAEIVRRLLSQSSEIRSASSLQVERIWVDVDDSWYCDARFRFPATMRTEQLTSLFECHIQPEQTRLIISGKWKNGGARLAMLSRYEQQDWRVELLPIAMQKLSGADAMAEISLSLHEGPILLGHTIPKGGYELTEELPWVFEAMNESESQLKLVGMGSVSSRLNALFISLPKNSHLDISGEGEFDIPRLLKNSERSLTKISGVFSVVLHDGAVCTIRTQQLYDSAIEYYIKSTEVELVKSDYPVHRAWPKIGWKKDLQYGIVPEKELFWRSIRSGNNAWYSVASEMPKGQIEVRRIVNDEVLFSGKVVVLPADFDINIIPESAQQGIIMLSGITDTRIDKYSNNEKVTLKSDYSQNECAIYYNSSLMLENTVDLRVSWKDGSNLKLLLPKPVSGGRFVTNDGSVHFDGVASIAHLHGIDAELLTISCAGRGYLNIELLDENPVAEKFRYLHADLPLLSGRNDKLQQISLYENYNLLNAMLACAWNSNSTLCVDFYSDRFGKDKATLNIKRYDGSFIEHDQGLLVDIKNSVVFPANRIDELVVDAISLKNPGLHISLLKKDEFAYDLSALNVQDSPWLIVGKLDGTARIAPVIKWMLPVLQTNDLLLNALCEADPEQRKKNFNELIFEIDNNPLQNYCCLLTEYIKKYKMNNGLSLLDLDLFRGISSNYRVVVQLLISSCLSGDSDTIYDIQEELPFSWGWIPVSIWKDVFQKCWTYLEKQINDKTLALHILQPFIAFMNHRAHIDRRLAPIANMLLTYSESLPTGCDVLPTVSREQFNEAKQMLLRNPDSFGRISIFPKELWSSAITPELKSVFNKLWIEDKYHSRLEKRFNLMLVAALLTQKDNNLIHQLSALFEFHYQQAPQQLGVIYQYYFEQAGVCH

SEQ ID NO: 25217 - protein, 2114 aa, Escherichia coli
MTTRYFSSLIEQSLSRSTEATLSIMGVTNPQLREHLAQQMGADCGKPGSFLASPVFQQMFGWKESNHTMRSLTEGNALLSKAVVDSLDDQSNGRYRFGADWKPFTHQLASWKALLEKKHSVVVTSGTGSGKTECFMVPVLEDLYRELHENGNNPLVGVRALFLYPLNALINSQRERLDAWTRGFGTGIRYCLYNGNTEELHAKMKTVQDNRPNEVLSREKMRLEPAPILVTNGTMLEYMMVRQVDAPIIQQSKAQKSLRWIVLDEAHTYVGSQAAELALQLRRVMTAFGVTPDDVRFVATSATIACSDAEKQLKKFLSELSGIPQERIDVLDGSRVIPELEPSKNVSVPLDEIEQIPDLDLKDKNDNKIKGISPERFYALTHSPEARYIREMLVSQPNPMKLDEMTQRLNALTKQHYSQQEVLRWIDVCSGTQPNAKDPAFLKVRAHIFQRNTQGIWACVDKDCRLKHGTPLEKGWPFGYVYVNQRQNCDCGSPVYEVAFCNDCNEPHLLAQDKKGKLVQWENKGGDEFSLQDEVPVEHDTTEEKVEKENGFLPPLIIAAGETSETGYTLQRLDHQTRRIGVINNDSIPLIINDVEQVCSASGCGYRGMSGKQPFRRALLGGPFYVTNIVPTVLEYCQDFTSDEGKEGVGPDSLPGRGRRLITFTDSRQGTARMAVRMQQEAERSLLRGSVVEILSWHQRTQTSTAPNANADLEKLAARAKQAREQAEEYRSWGMPDQAKLSQAQAEQLEQAYQAATGGKAATTLVSRTWTEMVNELKDKADIRGPVLKYNHYLQPEVFNKNGGPLKLSEMLLFREFMRRPKRTNSLETQGLVQVGYQGLEKIHKSPLHWQEKGLTLDDWRDFLKVTLDLYVRESNFTQLDDELKNWIGSRFSSKFVRNPESKDPEDNQNRRWPQIRNGNVSHRLAKLLMLGAGFKTVNTATIDIINTWLKEAWAQLTGPLAVLKPDGNRFYLPKEHMTFSLITDAWICPVTNKILDTAFKGLTPYLPTHISFEHLTQAQYDTFVAQKVTMPEIWKLDRSQEDYAEGLAKARDWVNNDPLIAQLRSENVWTDINDRVVEGGFYYRTAEHSAQQSSERLQSYEKMFKNGQLNVLNCSTTMEMGVDIGGITAVVMNNVPPHPANYLQRAGRAGRSKESRAISYTLCKGNPHDQQVFANPLWPFETMIPAPMVAMNSARLVQRHVNALLLSDFLCNVIGETDKEKTSLDSLWFFGEDDGQSKCERFKVWLERPVLDIDTALERLVKGTALHGARAEHLRDKTINAITFLQQRWLSVYRDLVTQERESQPQTPYRKRIELEKKRHCGEYLLRDLAARTFLPGYGFPTDVVTFDNFTMEDYIREKSQKSRDKKDREDNVSRYKGLPSRNLGVAIREYAPGAEIILDGRVFRSAGVSLHWHNINADTNEAQRLDCAWRCHKCGTIGYEEGMSSSGMLFCSNSACGEKITMDNRRQVLQPAGFVTDAHAPVTNNIETMKFVPVVPAWVFVKAEPVPLPNPLMGYMASGADGHVFQQSLGEGGHGYALCLSCGRAESMLNENDAPKSMEAHYPPRPGKADRDSQNHRLICPGSTALMKNVTLGALARTDVFEMVLRKPQNGEYLPDNTEEGRIVAMTLAVALRQALAGVLGISAAELGYSVRPVRLEDGQSVLAVQLYDVISGGAGFASSAPVHIEAILQGMVKQLGCRHCDTACSECLLDSQTRHDHDLLDRKVALAWLGDDFTYYIGLPDEETFSLPDARYCPGAIGDTIRRAINEGAEKLTLWMTGAPNEWDLYARQFRAAIQSYRLKDNVEVDLVIPAGVDDPDLLHELSQFTALGVRLCHVEQELQLPIVAQVTFADRVMTLASRSQQATIPGPEWHLNDELVVRSLGYQTVELNEFILPAKAANAVERVKDIQIHKQLNGPLSQFGQRFWDVLFNDHEEAQSLMKNTRITGVHYTDRYLQNPVALALLGSILKPLKTKLTDGAEVALDTLFKDKDRPGNRPFHDWMSIADFQDFADQWFAAALGRPIELTVFDSPRDIPHHRKLTVTFEDGQVLKIRFDQGMGYWRINFASQWHYFDFRDDVSFQLVKMAQACKEGNVANSEESWATDVLVEVIAS

SEQ ID NO: 25218 - protein, 1096 aa, Escherichia coli
MGQSEYISWVKCTSWLSNFVNLRGLRQPDGRPLYEYHATNAEYNQLTQLLCAVGQSQSNICNRDFAACFVLFCSEWYRRDYERQCGWTWDPIYKKIGISFTATELGTIVPKGMEDYWLRPIRFYESERRNFLGTLFSEGGLPFRLLKESDSRFLAVFSRILGQYEQAKQSGFSALSLARAVIEKSALPTVFSEDTSVELISHMADNLNSLVLTHNLTNHKEPVQQLDKVHPTWRSEFPIPLDDETGTHFLNGLLCAASVEAKPRLQKNKSTRCQFYWSEKHPDELRVIVSLPDEVSFPVTSEPSTTRFELAIYEDGEEVSGLGPAYASLENRQATVRLRKSEVRFVRQNPSAGLSLVARAGGMIVGSIKLDDSEIAIGEVPLTFIVDADQWLLQGQASCSVRSSDVLIVLPRDNSTVAGFDGQSSAVNVLGLKALPVKGCQDVTVTANETYRIRTGREQISIGRFALNGKRASWVCHPDETFIGVPKVISTLPDIQSIDVTRYLSGISIEQCHIQEMLGAQYLSIRNSNNETLLRRKIGILPADFSIEIKGGMHANEGTIVITTQHPCVATLKDKTLEATRKRTEGRTEIQLKAEGVPPAFITLQVLPNLAADTIDIELPFPAKGCLALDVNGRPLDKNITLHDLLGSRAFLFSRNGEPTKYTLQLHLRSISGLQAWHEWSYTALSERPVELNLYSLREHIENLISLEAGIDQVVEMRITGAGVVMAWQIRRYKYSLRYDYEKELLLSQSVNHRAGQIPSPVIMLLSEPERKSIPLASRMSEGVPVGEYELSSIVNKNGPWLVVPKPGEEMAFRPCFIRGESSLPVEESNIRSLQKATQLFNPQAEVNTITRVLGQMANDPAHSGWQFMRSLYDQFGYLPLATFEVWRALVQHPQALAMSLFKFEMSAEYLSRIENEFPILWEFFPIFEIKAASERFKLFLSQKGAPEETQKLLVTNMFQRLGLVFPTYADEIEKWLSNGYLPPSIPESCVHGWYQELLREHSEARWPEYGCKRLYKWMMSQKNPVIGINPDANHRYSVAWLPVFAAAVASGNASFESVFDRKPGAVFFLRQVRDFDSRWFKAIFQFSLLRYVAKK

SEQ ID NO: 25219 - protein, 2114 aa, Escherichia coli
MTTRYFSSLIEQSLSRSTEATLSIMGVTNPQLREHLAQQMGADCGKPGSFLASPVFQQMFGWKESNHTMRSLTEGNALLSKAVVDSLDNQSNGRYRFGADWKPFTHQLASWKALLEKKHSVVVTSGTGSGKTECFMVPVLEDLYRELHENGNNPLVGVRALFLYPLNALINSQRERLDAWTRGFGTGIRYCLYNGNTEELHAKMKTVQDNRPNEVLSREKMRLEPAPILVTNGTMLEYMMVRQVDAPIIQQSKAQKSLRWIVLDEAHTYVGSQAAELALQLRRVMTAFGVTPDDVRFVATSATIAGSDAEKQLKKFLSELSGIPQERIDVLDGSRVIPELEPSKNVSVPLDEIEQIPDLDLKDKNDNKIKGISPERFYALTHSPEARYIREMLVKHPNPMKLDEMTERLNILTKQHHSQHEVLRWIDVCSGTQPNAKDPAFLKVRAHIFQRNTQGIWACVDKDCRLKHGTPLEKGWPFGYVYVNQRQNCDCGSPVYEVAFCNDCNEPHLLARDKKGKLVQWENKGGDEFSLQDEVPVEHDATAEKVEKENSFQPPLIIAAGETSEAGYTLQRLDRQTRRIGVINNDSIPLIINDVEQVCSASGCGYRGMSGKQPFRRALLGGPFYVTNIVPTVLEYCQDFTSDEGKEGVGPDSLPGRGRRLITFTDSRQGTARMAVRMQQEAERSRLRGSVVEILSWHQRTQTSTAPNANADLEKLATRAKQAREQAEEYRSWGMPDQAKLSQAQAEQLEQAYQFAIGGKAATTLVSRTWTEMVNELKDKADIRGPVLKYNYYLKPEVFNENGGPLKLSEMLLFREFMRRPKRTNSLETQGLVQVGYLGLEKIHKLPMHWQERELTLDDWRDFLKVTLDHYVRESNFTQLDDELKNWIGSRFSSKFVRNPESKDPEDNQNRRWPQIRNGNVSHRLAKLLMLGAGFKTVNTATIDIINTWLKEAWAQLTGPLAVLKPDGNRFYLPKEHMTFSLITDAWICPVTNKILDTAFKGLTPYLPTHISFEHLTQAQYDTFVAQKVTMPEIWKLDRSQEDYAEGLAKARDWVSNDPLIAQLRSENVWTDINDRVVEGGFYYRTAEHSAQQSSERLQSYEKMFKNGQLNVLNCSTTMEMGVDIGGITAVVMNNVPPHPANYLQRAGRAGRSKESRAISYTLCKGNPHDQQVFANPLWPFETMIPAPMVAMNSAQLVQRHVNALLLSDFLCNVIGETDKEKTSLDSLWFFGEDDGQSKCERFKIWLERPVLDIDTALERLVKGTALHGARAEHLRDKTISAITFLQQRWLSVYRDLVTQERESQPQTPYRKRIELEKKRHCGEYLLRDLAARTFLPGYGFPTDVVTFDNFTMEDYIREKLQKSRDKKDREDNVSRYKGLPSRNLGVAIREYAPGAEIILDGRVFRSAGVSLHWHNINADTNEAQRLDCAWRCHKCGTIGYEEGMSSSGMLFCSNSACGEKIIMDNRRQVLQPAGFVTDAHAPVTNNIETMKFVPVVPAWVFVKAEPVPLPNPLMGYMASGADGHVFQQSLGEGGHGYALCLSCGRAESMLNENDAPKSMEAHYPPRPGKADRDSQNHRLICPGSTALMKNVTLGALARTDVFEMVLRKPQKGEYLPDNTEEGRIVAMTLAVALRQALAGVLGISGAELGYSVRPVRLEDGQSVLAVQLYDVISGGAGFASSAPVHIEAILQGMVKQLGCRHCDTACSECLLDSQTRHDHDLLDRKAALAWLGDDFTYYIGLPDEETFSLPDARYCPGAIGDTIRRAINEGAEKLTLWMTGAPNEWDLYARQFRAAVQSYRLKDNVEVDLVIPAGVDDPDLLYELSQFTALGVRLCHVEQDLQLPIVAQVTFADRVMTLASRSQQATIPGPEWHLNDELVVRSLGYKTVELNEFILPAKAANAVERVKDIQIHKQLNGPLSQFGQRFWDVLFNDHEEAQSLMNNTRITGVHYTDRYLQNPVALALLGSILRPLKTKLTDGAEVALDTLFKDKDRPGNRPFHDWMSIADFQDFADQWFAAALGRPIELTVFDSPRDIPHHRKLTVTFEDGQVLKIRFDQGMGYWRINFASQWHYFDFRDDVSFQLVKMAQACNEGNVANSEESWATDVLVEVSAS

SEQ ID NO: 25220 - protein, 1096 aa, Escherichia coli
MGQSEYISWVKCTSWLSNFVNLRGLRQPDGRPLYEYHATNDEYNQLTQLLRAVGQSQSNICNKDFAACFVLFCSEWYRRDYERQCGWTWDPIYKKIGISFTATELGTIVPKGMDDYWLRPIRFYESERRNFLGTLFSEGGLPFRLLKESDSRFLAVFSRILGQYEQAKQSGFSALSLARAVIEKSALPTVFSEDTSVELISHMADNLNSLVLTHNLINHKEPVQQLDKVHPTWRSEFPIPLDDETGTHFLNGLLCAASVEAKPRLQKNKSTRCQFYWSEKHPDELRAIVSLPDEVSFPVTSEPSTTRFELAICEDGEEVSGLGPAYASLENRQATVRLRKSEVRFVRQNPSAGLSLVARAGGMIVGSIKLDDSEIAIGEVPLTFIVDADQWLLQGQASCSVQSSDVLIVLPRDNSTVAGFDGQSSAVNVLGLKALPVKGCQDVTVTANETYRIRTGREQISIGRFALNGKRASWVCHPDETFIGVPKVISTLPDIQSIDVTRYLSGISIEQCHIQEMLGAQYLSIRNSNNETLLRRKIGILPADFSIEIKGGMHANEGTIVITTQHPCVAKLKDKTLEATRKRTEGRTEIQLKAEGVPPAFITLQVLPNLAADPIDIELPFPAKGCLALDVNGRPLDKNITLHDLLGSRAFLFSRNGEPTKYTLQLYLRSVSGLQAWHEWCYTALSDRPVELNLYSLREHIENLISLEAGIDQVVEMRITGAGVVMAWQIRRYKYSLRYDYEKELLLSQSVNHRAGQIPSPVIMLLSEPERKSIPLASRMSEGVPVGEYELSSIVNKNGPWLVVPKPGEEMAFRPCFIRGESSLPVEESNIRSLQKATQLFNPQAEVNTITRVLGQMANDPAHSGWQFMRSLYDQFGYLPLATFEVWRALVQHPQALAMSLFKFEMSAEYLSRIENEFPILWEFFPIFEIKAASERFKLFLSQKGAPEETQKLLVTNMFQRLGLVFPTYADEIEKWLSNGYLPPSIPESCVHGWYQELLREHSEARWPEYGCKRLYEWMMSQKNPVIGINPDADYRYSVAWLPVFAAAVASGNASFESVFDRKPGAVFFLRQVRDFDSRWFKAIFQCSLLRYVAKK

SEQ ID NO: 25221 - protein, 2104 aa, Escherichia coli
MDVQQLHYAPLLNQLHQRAVRSVVSQLALRSKSLTHYLESQYFQPPGQEGSLLADPVFESTFGWMPADETMEDLRDKLISSPLVDALSKAPVPFRHQLTAWRTILEDKKSLLVSSGTGSGKTECFMVPVLEDLIRQQKSTRQSLTGTQAIFLYPLNALINSQQERLREWTRGFKGKIRFALYNGETRHTKYEIQEDQLKVPEQALSREAIYEAPPSIMVTNTTMLEYMLIRRKDAPIIEKSQGMLKYIVLDEAHSYIGSQAAELALLLRRVMQAFNVGPGTDKPVQIIATSATIGEDSPEGNKELAKFVADLAGVTERDVKVVRGYRQIPRVSESLIRHEYPTSLTSLKSLSPQDLYQQLCHYRVAQQLRQALTHPGRQAVRLSELLNVARRTWPDINHRELLQLLDLMARSREGELAFTPLRMHGFIRTLAGLWACSNKQCSHKAHELNQSDWPFGQVWFEQRQYCDCGAPVFEVLRCSGCGSAYLSAKEEMRGDGTNWLVAQPAAAEVDEFALDVDVYSEDEDNDELDNNSQFDRLIASDGEKYIISLEETTAGKIDSEAQKHYEINLLRPESRGEGRNNSFACVCCGDTQRKNNPLFRPLRLGAPFFLNEIIPTLLEFSPLPQTREEQLGPFNGRRLLTFTDSRQGTARISARLQQDADKATLRALCYQELANITEPSAKLSPAHCALLEKVISQFSVLPLKNSIDALKKAMAANEELSPTDIQALKIIEPMVSSLSTEHAEAMQILQANSGNQQKKTMSWQTLSEQLVGSVDLADRMRGSFKELSGLDLTKQQFADFCLYSEFGRRPKNAWTLESLGLVAIHYPFIDKVTTCPQDWKTLLPDPDKQLAEWRNLLKITLDFFIRENSAVFYENEQYPRWMGARFPVKMLQGPDKKNKGQKRDQLWPQIRDRHYNRVIKLLIAVFPAIQPEQAHWKSLVNHLMIEVWDAIRPCLRQFESGYQLDIKQQAEFYSPKQVWRCPYTRRALDVTLLGYSPYLPGSKEIAPEKAVLIEMPELPVRHWRLSGGGEIAREERLEWLESNALIQHAREEGLWSTRSDRLALKDSWYRLEEHSAQRTPEQNQFNEKQFKSGKVNVLNCSTTMEMGVDIGGMSLVAMNNVPPAPANYLQRAGRAGRRGESASAAITLCKNTAHGMEVFKDPLWAFNTTASAPRVRFGSSSIVQRHVNALVLGLFLRAEVPDATKLSCKWFFEGDESQCLRFLHWLNHQADELADKLKRLTQGTVLMSLTATQLLTRTQAMMQQVDIRWRSQLAILLENIEALKADNSAWEETPAGKAIAYQLRDYRGAYLFSKLISEAFLPGHGFPVGVVNFNYLTADELEKRRAIKATQADPNEGGESFSRRIEKLPSRDLPTALREYAPGADVVLGGKVYRSSGIMLGKVLASGQELSGDHHIPWFWHCRKCGAGATSTTRPVECSHCKADIQQLDVKRYLQPVGFATDIRYQAHNDVSMPAQLPWKDPRVLVPSSVWVSLPDAGLGRYRFSHSGELFHFSEGEFGHGYAICLSCGRAESQTQPQRTPENLKNPERENTHYLLRGGSNDRQGSNKLCHGHVHKDLWLGYSSRTDMVELQLNDDNGLLIRDEVAARSLAVALREGLAHKLGIENTELGVTTQQARDINGYTGYSIFIYDNNAGGAGYAVQLIDHWADVFNYARKLLDCSCDKFCHHCLLSYDSQHYVNRLDRHHALTLLTNVRLQRLNLAPEYQYFGDGSRVETNPLSLRIAQCLNSEIYDSCSLVLAGPQEQWDFAQWPLFKELLQFASSGGNVELLVATPLANLTDSSRHQLSALAAMPGGRLQVKSIATAQLMQGKGRWLAQVTREGQSQQWAADDSATVAPGELWGQSASSPVVTLKGTSGKTFSGQTLSAEDLLPALPTGAVRINLCEQLDGPLEGFGSRFWSLVTQQHAGWKQAFTRHKEITHVEYSDRYLNSPFTARLLGEILTELVEQGMAERASLTVCVKKLDYNSRQHDALYNAWLNEEDRQQVVTTLLEEGYLGPAWPGAISWLTGDNQSTEHGRELTVTFSDGSQHYVLLDMGLSYWRCIEDTFFDFALRVPQQVERLANTRARAVAPGNDLRSYIIAG

SEQ ID NO: 25222 - protein, 978 aa, Escherichia coli; identical to SEQ ID NO: 25216

SEQ ID NO: 25223 - protein, 2114 aa, Escherichia coli
MTTRYFSSLIEQSLSRSTEATLSIMGVTNPQLREHLAQQMGADCGKPGSFLASPVFQQMFGWKESNHTMRSLTEGNALLSKAVVDSLDDQSNGRYRFGADWRPFTHQLASWKALLEKKHSVVVTSGTGSGKTECFMVPVLEDLYRELHENGNNPLVGVRALFLYPLNALINSQRERLDAWTRGFGTGIRYCLYNGNTENLHASVKSEQAKRPNEVLSREKMREEPAPILVTNGTMLEYMMVRQIDAPIIQQSKAQKSLRWIVLDEAHTYVGSQAAELALQLRRVMTAFGVTPDDVRFVATSATIAGSDAEKQLKKFLSELSGIPQERIDVLDGSRVIPELEPSKNVSLPLDEIEQIPDLDLRDKNDNKIKGISPERFYALTHSPEARYIREMLVKQPNPMKLDEITERLNTLTKQHYSQQEVLRWIDVCSGTQPNAKDPAFLKVRAHIFQRNTQGIWACVDKDCRLKHGTPLEKGWPFGYVYVNQRQNCDCGSPVYEVAFCNDCNEPHLLARDKKGKLVQWENKGGDEFSLQDEVPVEHDATEEKVEKENSFQPPLIIAAGETSEAGYTLQRLDRQTRRIGVINNDSIPLIINDIEQVCSASGCGFRGMSGKQPFRRALLGGPFYVTNIVPTVLEYCQDFTSDEGKEGVGPDSLPGRGRRLITFTDSRQGTARMAVRMQQEAERSRLRGSVVEILSWHQRTQTSTAPNANADLEKLAARAKQAREQAEEYRSWGMPDQAKLSQAQAEQLEQAYQAATGGKAATILVSRTWTEMVNELKERADIRGPVLQYNHYLKPEVFNENGGPLKLSEMLLFREFMRRPKRTNSLETQGLVQVGYQGLEKIHKSPLHWQEKGLTLDDWRDFLKVTLDHYVRESNFTQLDDELKNWIGSRFSSKFVRNPESKDPEDNQNRRWPQIRNGNVSHRLAKLLMLGAGFKTVNAATIDIINTWLKEAWAQLTGPLAVLKPDGNRFYLPKEHMTFSLITDAWICPVTNKILDTTFKGLTPYLPTHISFEHLTQAQYDTFVAQKVTMPEIWKLDRSQEDYAEGLAKARDWVSHDPLIAQLRSENVWTDINDRVVEGGFYYRTAEHSAQQSSERLQSYEKMFKNGQLNVLNCSTTMEMGVDIGGITAVVMNNVPPHPANYLQRAGRAGRSKESRAISYTLCKGNPHDQQVFANPLWPFETMIPAPMVAMNSARLVQRHVNALLLSDFLCNVIGETDKEKTSLDSLWFFGEDDGQSKCERFKIWLERPVLDIDTALERLVKGTALHGARAEYLRDKTINAITFLQQRWLSVYRDLVTQERESQPQTPYRKRIELEKKRHCGEYLLRDLAARTFLPGYGFPTDVVTFDNFTMEDYIREKSQKSRDKKDREDNVSRYKGLPSRNLGVAIREYAPGAEIILDGRVFRSAGVSLHWHNINADTNEAQRLDCAWRCHKCGTIGYEEGMSSSGMLFCSNSACGEKIIMDNRRQVLQPAGFVTDAHAPVTNNIETMKFVPVVPAWVFVKAEPVPLPNPLMGYMASGADGHVFQQSLGEGGHGYALCLSCGRAESMLNENDAPKSMEAHYPPRPGKADRDSQNHRLICPGSTALMKNVTLGALARTDVFEMVLRKPQNGEYLPDNTEEGRIVAMTLAVALRQALAGVLGISAAELGYSVRPVRLEDGQSVLAVQLYDVISGGAGFASSAPVHIEAILQGMVKQLGCRHCDTACSECLLDSQTRHDHDLLDRKAALAWLGDDFTYYIGLPDEETFSLPDARYCPGAIGDTIRRAINEGAEKLTLWMTGAPNEWDLYARQFRAAVQNYRLKDNVEVDLVIPAGVDDPDLLHELSQFTALGVRLCHVEQDLQSPIVAQVTFADRVMTLASRSQQATIPGPEWHLNDELVVRSLGYKTVELNEFILPAKAANAVERVKDIQIHKQLNGPLSQFGQRFWDVLFNDHEEAQSLMKNTRITGVHYTDRYLQNPVALALLGSILKPLKTKLTDGAEVALDTLFKDKDRPGNRPFHDWMSIADFQDFADQWFAAALGRPVELTVFDSPRDIPHHRKLTVTFEDGQVLKIRFDQGMGYWRINFASKWHYFDFSDDVSFQLVKMAQACQEGNVANSEESWATDVLVEVIAS

SEQ ID NO: 25224 - protein, 1096 aa, Escherichia coli
MGQSEYISWVKCTSWLSNFVNLRGLRQPDGRPLYEYHATNDEYTQLTQLLRAVGQSQSNICNRDFAACFVLFCSEWYRRDYERQCGWTWDPIYKKIGISFTATELGTIVPKGMEDYWLRPIRFYESERRNFLGTLFSEGGLPFRLLKESDSRFLAVFSRILGQYEQAKQSGFSALSLARAVIEKSALPTVFSEDTSVELISHMADNLNSLVLTHNLINHKEPVQQLDKVHPTWRSEFPIPLDDETGTHFLNGLLCAASVEAKPRLQKNKSTRCQFYWSEKHPDELRAIVSLPDEVSFPVTSEPSTTRFELAICEDGEEVSGLGPAYASLENRQATVRLRKSEVRFGRQNPSAGLSLVARAGGMIVGSIKLDDSEIAIGEVPLTFVVDADQWLLQGQASCSVRSSDVLIVLPRDNSNVAGFDGQSSAVNVLGLKALPVKGCQDVTVTANETYRIRTGREQISIGRFALNGKRASWVCHPDETFIGVPKVISTLTDIQSIDVTRYLSGISIEQCHIQEMLGAQYLSIRNSNNETLLRRKIGILPADFSVEIKGGERANEGSIVITTQHPCVAKLKDKTLEATRKRTEGRTEIQLKAEGVPPAFITLQVLPNLAADPIDIELPFPAKGCLALDVNGRPLDKNITLHDLLGSRAFLFSRNGEPTRYTLQLHLRSVSGLQAWHEWCYTALSDRPVELNLYSLREHIENLISLEAGIDQVVEMRITGAGVVMAWQIRRYKYSLRYDYEKELLLSQSVNHRAGQIPSPVIMLLSEPERKSIPLASRMSEGVPVGEYELSSIVNKNGPWLVVPKPGEEMAFRPCFIRGESSLPVEESNIRSLQKATQLFNPQAEVNTITLVLGQMANDPAHSGWQFMRSLYDQFGYLPLATFEVWRALVQHPQALAMSLFKFEMSAEYLSRIENEFPILWEFFPIFEIKAASERFKLFLSQKGAPEETQKLLVTNMFQRLGLVFPTYADEIEKWLSNGYLPPSIPESCVHGWYQELLREHSEARWPEYGCKRLYKWMMSQKNPVIGINPDADYRYSVAWLPVFAAAVASGNTSFEAVFDRKPGAVFFLRQVRDFDSRWFKTIFQCSLLRYVAKK

SEQ ID NO: 25225 - protein, 2114 aa, Escherichia coli; identical to SEQ ID NO: 25223

SEQ ID NO: 25226 - protein, 1096 aa, Escherichia coli; identical to SEQ ID NO: 25224

SEQ ID NO: 25227 - protein, 2104 aa, Escherichia coli
MDVQQLHYAPLLNQLHQRAVRSVVSQLALRSKSLTHYLESQYFQPPGQEGSLLADPVFESTFGWMPADETMEDLRDKLISSPLVDALSKAPVPFRHQLTAWRTILEDKKSLLVSSGTGSGKTECFMVPVLEDLIRQQKSTRQSLTGTQAIFLYPLNALINSQQERLREWTRGFKGKIRFALYNGETRHTKYEIQEDQLKVPEQALSREAIYEAPPSIMVTNTTMLEYMLIRRKDAPIIEKSQGMLKYIVLDEAHSYIGSQAAELALLLRRVMQAFNVGPGTDKPVQIIATSATIGEDSPEGNKELAKFVADLAGVTERDVKVVRGYRQIPRVSESLIRHEYPTSLTSLKSLSPQDLYQQLCHYRVAQQLRQALTHPGRQAVRLSELLNVARRTWPDINHRELLQLLDLMARSREGELAFTPLRMHGFIRTLAGLWACSNKQCSHKAHELNQSDWPFGQVWFEQRQYCDCGAPVFEVLRCSGCGSAYLSAKDEMRGDGTNWLVAQPAAAEVDEFALDVDVYSEDEDNDELDNNSQFDRLIASDGEKYIISLEETTAGKIDSEAQKHYEINLLRPESRGEGRNNSFACVCCGDTQRKNNPLFRPLRLGAPFFLNEIIPTLLEFSPLPQTREEQLGPFNGRRLLTFTDSRQGTARISARLQQDADKATLRALCYQELANITEPSAKLSPAHCALLEKVISQFSVLPLKNSIDALKKAMAANEELSPTDIQALKIIEPMVSSLSTEHAEAMQILQANSGNQQKKTMSWQTLSEQLVGSVDLADRMRGSFKELSGLDLTKQQFADFCLYSEFGRRPKNAWTLESLGLVAIHYPFIDKVTTCPQDWKTLLPDPDKQLAEWRNLLKITLDFFIRENSAVFYENEQYPRWMGARFPVKMLQGPDKKNKGQKRDQLWPQIRDRHYNRVIKLLIAVFPAIQPEQAHWKSLVNHLMIEVWDAIRPCLRQFESGYQLDIKQQAEFYSPKQVWRCPYTRRALDVTLLGYSPYLPGSKEIAPEKAVLIEMPELPVRHWRLSGGGEIAREERLEWLESNALIQHAREEGLWSTRSDRLALKDSWYRLEEHSAQRTPEQNQFNEKQFKSGKVNVLNCSTTMEMGVDIGGMSLVAMNNVPPAPANYLQRAGRAGRRGESASAAITLCKNTAHGMEVFKDPLWAFNTTASAPRVRFGSSSIVQRHVNALVLGLFLRAEVPDATKLSCKWFFEGDESQCLRFLHWLNHQADELADKLKRLTQGTVLMSLTATQLLTRTQAMMQQVDIRWRSQLAILLENIEALKADNSAWEETPAGKAIAYQLRDYRGAYLFSKLISEAFLPGHGFPVGVVNFNYLTADELEKRRAIKATQADPNEGGESFSRRIEKLPSRDLPTALREYAPGADVVLGGKVYRSSGIMLGKVLASGQELSGDHHIPWFWHCRKCGAGATSTTRPVECSHCKADIQQLDVKRYLQPVGFATDIRYQAHNDVSMPAQLPWKDPRVLVPSSVWVSLPDAGLGRYRFSHSGELFHFSEGEFGHGYAICLSCGRAESQTQPQRTPENLKNPERENTHYLLRGGSNDRQGSNKLCHGHVHKDLWLGYSSRTDMVELQLNDDNGLLIRDEVAARSLAVALREGLAHKLGIENTELGVTTQQARDINGYTGYSIFIYDNNAGGAGYAVQLIDHWADVFNYARKLLDCSCDKFCHHCLLSYDSQHYVNRLDRHHALTLLTNVRLQRLNLAPEYQYFGDGSRVETNPLSLRIAQCLNSEIYDSCSLVLAGPQEQWDFAQWPLFKELLQFASSGGNVELLVATPLANLTDSSRHQLSALAAMPGGRLQVKSIATAQLMQGKGRWLAQVTREGQSQQWAADDSATVAPGELWGQSASSPVVTLKGTSGKTFSGQTLSAEDLLPALPTGAVRINLCEQLDGPLEGFGSRFWSLVTQQHAGWKQAFTRHKEITHVEYSDRYLNSPFTARLLGEILTELVEQGMAERASLTVCVKKLDYNSRQHDALYNAWLNEEDRQQVVTTLLEEGYLGPAWPGAISWLTGDNQSTEHGRELTVTFSDGSQHYVLLDMGLSYWRCIEDTFFDFALRVPQQVERLANTRARAVAPGNDLRSYIIAG

SEQ ID NO: 25228 - protein, 978 aa, Escherichia coli
MIENESGYLITYFRRIYQALRGQSSQYPAAKIAQELGDTIPVTMQNELVYEIAGEFCETLCRLLSEHPPHSSDPVSALRKLSPDWHLQLPLVLPEANAAEIVRRLLSQSSEIRSASSLQVERIWVDVDDSWYCDARFRFPATMRTEQLTSLFECHIQPEQTRLIISGKWKNGGARLAMLSRYEQQDWRVELLPIAMQKLSGADAMAEISLSLHEGPILLGHTIPKGGYELTEELPWVFEAMNESESQLKLVGMGSVSSRLNALFISLPKNSHLDISGEGEFDIPRLLKNSERSLTKISGVFSVVLHDGAVCTIRTQQLYDSAIEYYIKSTEVELVKSDYPVHRAWPKIGWKKDLQYGIVPEKELFWRSIRSGNNAWYSVASEMPKGQIEVRRIVNDEVLFSGKVVVLPADFDINIIPESAQQGIIMLSGITDTRIDKYSNNEKVTLKSDYSQNECAIYYNSSLMLEKTVDLRVSWKDGSNLKLLLPKPVSGGRFVTNDGSVHFDGVASIAHLHGIDAELLTISCAGRGYLNIELLDENPVAEKFRYLHADLPLLSGRNDKLQQISLYENYNLLNAMLACAWNSNSTLCVDFYSDRFGKDKATLNIKRYDGSFIEHDQGLLVDIKNSVVFPANRIDELVVDAISLKNPGLHISLLKKDEFAYDLSALNVQDSPWLIVGKLDGTARIAPVIKWMLPVLQTNDLLLNALCEADPEQRKKNFNELIFEIDNNPLQNYCCLLTEYIKKYKMNNGLSLLDLDLFRGISSNYRVVVQLLISSCLSGDSDTIYDIQEELPFSWGWIPVSIWKDVFQKCWTYLEKQINDKTLALHILQPFIAFMNHRAHIDRRLAPIANMLLTYSESLPTGCDVLPTVSREQFNEAKQMLLRNPDSFGRISIFPKELWSSAITPELKSVFNKLWIEDKYHSRLEKRFNLMLVAALLTQKDNNLIHQLSALFEFHYQQAPQQLGVIYQYYFEQAGVCH

SEQ ID NO: 25229 - protein, 2114 aa, Escherichia coli
MTTRYFSSLIEQSLSRSTEATLSIMGVTNPQLREHLAQQMGADCGKPGSFLASPVFQQMFGWKESNHTMRSLTEGNALLSKAVVDSLDNQSNGRYRFGADWKPFTHQLASWKALLEKKHSVVVTSGTGSGKTECFMVPVLEDLYRELHENGNNPLVGVRALFLYPLNALINSQRERLDAWTRGFGTGIRYCLYNGNTEELHAKMKTVQDNRPNEVLSREKMRLEPAPILVTNGTMLEYMMVRQVDAPIIQQSKAQKSLRWIVLDEAHTYVGSQAAELALQLRRVMTAFGVTPDDVRFVATSATIAGSDAEKQLKKFLSELSGIPQERIDVLDGSRVIPELEPSKNVSVPLDEIEQIPDLDLKDKNDNKIKGISPERFYALTHSPEARYIREMLVKHPNPMKLDEMTERLNILTKQHHSQHEVLRWIDVCSGTQPNAKDPAFLKVRAHIFQRNTQGIWACVDKDCRLKHGTPLEKGWPFGYVYVNQRQNCDCGSPVYEVAFCNDCNEPHLLARDKKGKLVQWENKGGDEFSLQDEVPVEHDATAEKVEKENSFQPPLIIAAGETSEAGYTLQRLDRQTRRIGVINNDSIPLIINDVEQVCSASGCGYRGMSGKQPFRRALLGGPFYVTNIVPTVLEYCQDFTSDEGKEGVGPDSLPGRGRRLITFTDSRQGTARMAVRMQQEAERSRLRGSVVEILSWHQRTQTSTAPNANADLEKLATRAKQAREQAEEYRSWGMPDQAKLSQAQAEQLEQAYQFAIGGKAATTLVSRTWTEMVNELKDKADIRGPVLKYNYYLKPEVFNENGGPLKLSEMLLFREFMRRPKRTNSLETQGLVQVGYLGLEKIHKLPMHWQERELTLDDWRDFLKVTLDHYVRESNFTQLDDELKNWIGSRFSSKFVRNPESKDPEDNQNRRWPQIRNGNVSHRLAKLLMLGAGFKTVNTATIDIINTWLKEAWAQLTGPLAVLKPDGNRFYLPKEHMTFSLITDAWICPVTNKILDTAFKGLTPYLPTHISFEHLTQAQYDTFVAQKVTMPEIWKLDRSQEDYAEGLAKARDWVSNDPLIAQLRSENVWTDINDRVVEGGFYYRTAEHSAQQSSERLQSYEKMFKNGQLNVLNCSTTMEMGVDIGGITAVVMNNVPPHPANYLQRAGRAGRSKESRAISYTLCKGNPHDQQVFANPLWPFETMIPAPMVAMNSARLVQRHVNALLLSDFLCNVIGETDKEKTSLDSLWFFGEDDGQSKCERFKIWLERPVLDIDTALERLVKGTALHGARAEHLRDKTISAITFLQQRWLSVYRDLVTQERESQPQTPYRKRIELEKKRHCGEYLLRDLAARTFLPGYGFPTDVVTFDNFTMEDYIREKLQKSRDKKDREDNVSRYKGLPSRNLGVAIREYAPGAEIILDGRVFRSAGVSLHWHNINADTNEAQRLDCAWRCHKCGTIGYEEGMSSSGMLFCSNSACGEKIIMDNRRQVLQPAGFVTDAHAPVTNNIETMKFVPVVPAWVFVKAEPVPLPNPLMGYMASGADGHVFQQSLGEGGHGYALCLSCGRAESMLNENDAPKSMEAHYPPRPGKADRDSQNHRLICPGSTALMKNVTLGALARTDVFEMVLRKPQKGEYLPDNTEEGRIVAMTLAVALRQALAGVLGISGAELGYSVRPVRLEDGQSVLAVQLYDVISGGAGFASSAPVHIEAILQGMVKQLGCRHCDTACSECLLDSQTRHDHDLLDRKAALAWLGDDFTYYIGLPDEETFSLPDARYCPGAIGDTIRRAINEGAEKLTLWMTGAPNEWDLYARQFRAAVQSYRLKDNVEVDLVIPAGVDDPDLLYELSQFTALGVRLCHVEQDLQLPIVAQVTFADRVMTLASRSQQATIPGPEWHLNDELVVRSLGYKTVELNEFILPAKAANAVERVKDIQIHKQLNGPLSQFGQRFWDVLFNDHEEAQSLMNNTRITGVHYTDRYLQNPVALALLGSILRPLKTKLTDGAEVALDTLFKDKDRPGNRPFHDWMSIADFQDFADQWFAAALGRPIELTVFDSPRDIPHHRKLTVTFEDGQVLKIRFDQGMGYWRINFASQWHYFDFRDDVSFQLVKMAQACNEGNVANSEESWATDVLVEVSAS

SEQ ID NO: 25230 - protein, 1096 aa, Escherichia coli
MGQSEYISWVKCTSWLSNFVNLRGLRQPDGRPLYEYHATNDEYNQLTQLLRAVGQSQSNICNKDFAACFVLFCSEWYRRDYERQCGWTWDPIYKKIGISFTATELGTIVPKGMDDYWLRPIRFYESERRNFLGTLFSEGGLPFRLLKESDSRFLAVFSRILGQYEQAKQSGFSALSLARAVIEKSALPTVFSEDTSVELISHMADNLNSLVLTHNLINHKEPVQQLDKVHPTWRSEFPIPLDDETGTHFLNGLLCAASVEAKPRLQKNKSTRCQFYWSEKHPDELRAIVSLPDEVSFPVTSEPSTTRFELAICEDGEEVSGLGPAYASLENRQATVRLRKSEVRFVRQNPSAGLSLVARAGGMIVGSIKLDDSEIAIGEVPLTFIVDADQWLLQGQASCSVQSSDVLIVLPRDNSTVAGFDGQSSAVNVLGLKALPVKGCQDVTVTANETYRIRTGREQISIGRFALNGKRASWVCHPDETFIGVPKVISTLPDIQSIDVTRYLSGISIEQCHIQEMLGAQYLSIRNSNNETLLRRKIGILPADFSIEIKGGMHANEGTIVITTQHPCVAKLKDKTLEATRKRTEGRTEIQLKAEGVPPAFITLQVLPNLAADPIDIELPFPAKGCLALDVNGRPLDKNITLHDLLGSRAFLFSRNGEPTKYTLQLYLRSVSGLQAWHEWCYTALSDRPVELNLYSLREHIENLISLEAGIDQVVEMRITGAGVVMAWQIRRYKYSLRYDYEKELLLSQSVNHRAGQIPSPVIMLLSEPERKSIPLASRMSEGVPVGEYELSSIVNKNGPWLVVPKPGEEMAFRPYFIRGESSLPVEESNIRSLQKATQLFNPQAEVNTITRVLGQMANDPAHSGWQFMRSLYDQFGYLPLATFEVWRALVQHPQALAMSLFKFEMSAEYLSRIENEFPILWEFFPIFEIKAASERFKLFLSQKGAPEETQKLLVTNMFQRLGLVFPTYADEIEKWLSNGYLPPSIPESCVHGWYQELLREHSEARWPEYGCKRLYEWMMSQKNPVIGINPDADYRYSVAWLPVFAAAVASGNASFESVFDRKPGAVFFLRQVRDFDSRWFKAIFLCSLLRYVAKK

SEQ ID NO: 25231 - protein, 2104 aa, Escherichia coli
MDVQQLHYAPLLNQLHQRAVRSVVSQLALRSKSLTHYLESQYFQPPGQEGSLLADPVFESTFGWMPADETMEDLRDKLISSPLVDALSKAPVPFRHQLTAWRTILEDKKSLLVSSGTGSGKTECFMVPVLEDLIRQQKSTRQSLTGTQAIFLYPLNALINSQQERLREWTRGFKGKIRFALYNGETRHTKYEIQEDQLKVPEQALSREAIYEAPPSIMVTNTTMLEYMLIRRKDAPIIEKSQGMLKYIVLDEAHSYIGSQAAELALLLRRVMQAFNVGPGTDKPVQIIATSATIGEDSPEGNKELAKFVADLAGVTERDVKVVRGYRQIPRVSESLIRHEYPTSLTSLKSLSPQDLYQQLCHYRVAQQLRQALTHPGRQAVRLSELLNVARRTWPDINHRELLQLLDLMARSREGELAFTPLRMHGFIRTLAGLWACSNKQCSHKAHELNQSDWPFGQVWFEQRQYCDCGAPVFEVLRCSGCGSAYLSAKEEMRGDGTNWLVAQPAAAEVDEFALDVDVYSEDEDNDELDNNSQFDRLIASDGEKYIISLEETTAGKIDSEAQKHYEINLLRPESRGEGRNNSFACVCCGDTQRKNNPLFRPLRLGAPFFLNEIIPTLLEFSPLPQTREEQLGPFNGRRLLTFTDSRQGTARISARLQQDADKATLRALCYQELANITEPSAKLSPAHCALLEKVISQFSVLPLKNSIDALKKAMAANEELSPTDIQALKIIEPMVSSLSTEHAEAMQILQANSGNQQKKTMSWQTLSEQLVGSVDLADRMRGSFKELSGLDLTKQQFADFCLYSEFGRRPKNAWTLESLGLVAIHYPFIDKVTTCPQDWKTLLPDPDKQLAEWRNLLKITLDFFIRENSAVFYENEQYPRWMGARFPVKMLQGPDKKNKGQKRDQLWPQIRDRHYNRVIKLLIAVFPAIQPEQAHWKSLVNHLMIEVWDAIRPCLRQFESGYQLDIKQQAEFYSPKQVWRCPYTRRALDVTLLGYSPYLPGSKEIAPEKAVLIEMPELPVRHWRLSGGGEIAREERLEWLESNALIQHAREEGLWSTRSDRLALKDSWYRLEEHSAQRTPEQNQFNEKQFKSGKVNVLNCSTTMEMGVDIGGMSLVAMNNVPPAPANYLQRAGRAGRRGESASAAITLCKNTAHGMEVFKDPLWAFNTTASAPRVRFGSSSIVQRHVNALVLGMFLRAEVPDATKLSCKWFFEGDESQCLRFLHWLNHQADELADKLKRLTQGTVLMSLTATQLLTRTQAMMQQVDIRWRSQLAILLENIEALKADNSAWEETPAGKAIAYQLRDYRGAYLFSKLISEAFLPGHGFPVGVVNFNYLTADELEKRRAIKATQADPNEGGESFSRHIEKLPSRDLPTALREYAPGADVVLGGKVYRSSGIMLGKVLASGQELSGDHHIPWFWHCRKCGAGATSTTHPVECSHCKADIQQLDVKRYLQPVGFATDIRYQAHNDVSMPAQLPWKDPRVLVPSSVWVSLPDAGLGRYRLSHSGELFHFSEGEFGHGYAICLSCGRAESQTQPQRTPENLKNPELENTHYLLRGGSNDRQGSNKLCHGHVHKDLWLGYSSRTDMVELQLNDDNDLLIRDEVAARSLAVALREGLAHKLGIENTELGVTTQQARDINGYTGYSIFIYDNNAGGAGYAVQLIDHWADVFNYARKLLDCSCDKFCHHCLLSYDSQHYVNRLDRHHALTLLTNVRLQRLNLAPEYQYFGDGSRVETNPLSLRIAQCLNREIYDSCSLVLAGPQEQWDFAQWPLFKELLQFASSGGNVELLVATPLENLTDSSRHQLSALAAMPGGRLQVKSIATAQLMQGKGRWLAQVTREGQSQQWAADDSATVAPGELWGQSASSPVVTLKGTSGKTFSGQTLSAEDLLPALPTGAVRINLCEQLDGPLEGFGSRFWSLVTQQHAGWKQAFTRHKEITHVEYSDRYLNSPFTARLLGEILTELVEQGMAERASLTVCVKKLDYNSRQHDALYNAWLNEEDRQQVVTTLLEEGYLGPAWPGAISWLTGDNQSTEHGRELTVTFSDGSQHYVLLDMGLSYWRCIEDTFFDFALRVPQQVERLANTRARAVAPGNDLRSYIIAG
